United States Patent Application Publication US 2013/0129668 A1 - sequence listing, part 14

SEQ ID NO: 223479 - DNA, 122 bp, Homo sapiens
taaggcgtgtagtgagcccggcgggacgcgcgacagcagcagccaaagtcgcatcggcggcggcagcaggacccgctgtctgtgcccttcatggatttcctgggcctggccaccccagtcct

SEQ ID NO: 223480 - DNA, 122 bp, Homo sapiens
cgggtgtctccctcccactttcctctctattccccgctaattatcactttgaaatctaggcggaaatcctttaacaagctccggggctgggccctcattagggataattacttaatcagtag

SEQ ID NO: 223481 - DNA, 122 bp, Homo sapiens
agttaattcttgctcaatgcaaagatcccacaaaccttgggggctaggctgaggtccagccgctaaactctgcaattcctcactctcctgttcatacacacacagacacaaccctcctcacc

SEQ ID NO: 223482 - DNA, 122 bp, Homo sapiens
agtctgacaccagagaactcacagccatgtcaaacttatgcaaaattattttaggtgcttcgaaaaataggttttacaggccaatcaaatataattgtataaaattaagtttaggccgggcg

SEQ ID NO: 223483 - DNA, 122 bp, Homo sapiens
ggggctgccgagagggcaggcgtggggcgaggccaaaggactgaacccgcaggagcgtcacgggcgccggggcggctgccgacggcgggactgggtcagtgagaagcccgtgggcccccgcc

SEQ ID NO: 223484 - DNA, 122 bp, Homo sapiens
agtagtagccaagtaggatttgtttcaatgttcagaacttgagggtgataagacctgagccgggtcttaagaaggaaaatgtggatggtctaaatctggaggtattgaggtgggaaggactg

SEQ ID NO: 223485 - DNA, 122 bp, Homo sapiens
aagatgagatcccagagaaggcctgcaggcgcctgcttgaagggaggcggcagaagaagacgaagaagcagaagcgtctgctcaggttgcagcaggagagaggtaggactagggggtgtgtt

SEQ ID NO: 223486 - DNA, 122 bp, Homo sapiens
ttcctccagggaataggagggttcctctatccatgggaaggaacatgcaattccaggacacgcttgccaaaccacagagattgtaagcctgccgcccatccattattatcattatttagcat

SEQ ID NO: 223487 - DNA, 122 bp, Homo sapiens
ggagccagccagggaggggcagctgcagtgaccaggcccagcagggaggacttgtgcagccgggcctgcctctgagtggtgcctctcctggaaggaagctcttgcttctcagtccatgctcc

SEQ ID NO: 223488 - DNA, 122 bp, Homo sapiens
ctacccttgagattgagagagctagtaattaaccgattaagaactgtttacttggtcaggcgcggtggctcacgctggtaatcccagcactttgggcggccgaggagggcggatcatgaggt

SEQ ID NO: 223489 - DNA, 122 bp, Homo sapiens
cgttagggctgccgaacagaaacgtcagggcagtcatacccttggtgtggtcttggtcgccgtagtgggtagggggtgggggtgggagtgttttgggggattgggtcctgcctgggccccgc

SEQ ID NO: 223490 - DNA, 122 bp, Homo sapiens
agtcgaagtttgtaaccccttggcccataggggctggctactgaggacaagttctgagttcgctgagacgggcaagctgtcctcatcgcggtattcatcttcatgatctttctgaacaggga

SEQ ID NO: 223491 - DNA, 122 bp, Homo sapiens
ctgtatctgccctatgtctgcagcttggcagggtgtttgctgcttacattttgagactctcggaaacaaactgtgccttctaaacacacagtggaatctgacaccaatgatgcagtccagaa

SEQ ID NO: 223492 - DNA, 122 bp, Homo sapiens
tggcctcgtctccattttacatgaactgttgcataaataaacacagagtacctgaaacaacggaggtgatcattctgcctaccgagtgttggccaggccaagcttggagtgttgctcttatt

SEQ ID NO: 223493 - DNA, 122 bp, Homo sapiens
tttatattaatccatttctttccagaagcgttgtaccaaactgcatgatcaccagctgcacgtgagcctcccgaccacatgaaggagcacagagaacgtacacgctcaactgattgtaacag

SEQ ID NO: 223494 - DNA, 122 bp, Homo sapiens
cgctccaggctccgctccctttccactgccagggacagctgttgcttgtacctaaggacacgtccaaccgctcagcattaatgcttcctgaggtcccttccacaggaaaagcagaggcacga

SEQ ID NO: 223495 - DNA, 122 bp, Homo sapiens
atcaatcttcatcaggctacatttccaatcacctaaacaaccgagcaagacaagccactccgacaaggtaaatcgcttgatttatttagtttgcaaagtgactctgcaggacttcccagtcc

SEQ ID NO: 223496 - DNA, 122 bp, Homo sapiens
cgctcgcggctctgggggctcggctttgccgcgctcgctgcacttgggcgagagctggaacgtggaccagagctcggatcccatcgcagctaccgcgatgagaggcgctcgcggcgcctggg

SEQ ID NO: 223497 - DNA, 122 bp, Homo sapiens
tagagcttggctaaggagagctgttcaaatgccctggcctctctgatgtggaggggtacacgcccctcttgggccacctcttctcttctggccaagagtatgagtgatgcgcaagttacaaa

SEQ ID NO: 223498 - DNA, 122 bp, Homo sapiens
tgtctgcgtctgcgtccgcgtctggatctgggtctgtgtctgtgtctgtgtctgtgtctgcgtctgcgtctgtctgcgtctgcgtctgtctgcgtctgcatctgcgtctgcatctaggtctg

SEQ ID NO: 223499 - DNA, 122 bp, Homo sapiens
agtaaagcccctcagttcccacctctttcagttcagtaagaggaaactgcaaggacttttcgagagtgcggctgatgaccgcataataaagaataactaataaatattaatgaagtatcccc

SEQ ID NO: 223500 - DNA, 122 bp, Homo sapiens
tggccccgcttgccaggcccagcgtcttttctgcataggacccgggggaagccgggaagccgttagggggcggggcaagcgggcgggcgtgcgtcggtcaagtttcccgggtcgcgtcaggc

SEQ ID NO: 223501 - DNA, 122 bp, Homo sapiens
cacatccttcagctggaggaccccagaaaggcagagctcccgtccagagtgtgctggtcccggacgcagacctgctcccaaatgccctggggtcgggcgtaaggcctggggatcgccggagc

SEQ ID NO: 223502 - DNA, 122 bp, Homo sapiens
gcgagcctctctgtgggcaaagccataggtgtgcatggtccttgttcccataggcgacatcggggtgtgtgattgcacgtgggggtgtgaggcctcgccagcaccgccactcactggtcctg

SEQ ID NO: 223503 - DNA, 122 bp, Homo sapiens
aaagctgaaaatatttaccacgtatcccttaccaaaacacatgcaggtccctgctctaagcgatgctgaaaaataacatctaaagtatcctgttttctaaatttactgaaacgaataacaat

SEQ ID NO: 223504 - DNA, 122 bp, Homo sapiens
caaagttttctgtggcaagtgctggaacatagttgtaggctgaggctcctgcccttcggtcgagtggagcaagctctcgagggcagcactgacaaatgtgttcctaagaagacattcagacc

SEQ ID NO: 223505 - DNA, 122 bp, Homo sapiens
aagaaagagaaaaaagtggccctgattaaattataaaattaagcatatcttgaattctaacgagccaaacaaaaattctactaggccagtataatagggcctgcagagcctgtcatgggttc

SEQ ID NO: 223506 - DNA, 122 bp, Homo sapiens
ttggtggaacagccccggtgagacagaccagggctggagaggagcctgcttaagttgtatcgtcaaagcaaaaattcccagacagtaatgatccagtgaccagaagcagccgattttccctt

SEQ ID NO: 223507 - DNA, 122 bp, Homo sapiens
acactcagcagaaaacattcccttttctttaaacctaccacgcacaccgcaggtactggccgccctcatcactgctttggtcaagcgtgcagagaaggcagttcagttccagttcggagcta

SEQ ID NO: 223508 - DNA, 122 bp, Homo sapiens
accttatctgtcagaatgaggaaaagaaaccctgtttggcttcctgggaccttaagattacgagttcatgtctcagtggagaggtattctggaaactcaaacagctttgaatctcagaagca

SEQ ID NO: 223509 - DNA, 122 bp, Homo sapiens
acagtctggcatgcaaagctccccaaccccacacatgcatgcactcataaagaatgcaaacgtctcttaaaaccgtgcacttaaacatgttttgtaaggttctgtggttgcatccccagaga

SEQ ID NO: 223510 - DNA, 122 bp, Homo sapiens
cctaaggcagcacggcttccccctatgcgtagagagagtggtcgccccatcaagcccccacgcaaagacttgcctgactctcagcaacaacaccagagctctaagaaaggaaagctttcaga

SEQ ID NO: 223511 - DNA, 122 bp, Homo sapiens
agccagaaatctcacatctgccacgcaaagcaaaggacataggtcaccttgtgcaatgtccgctttacctcaggccagggttccttttcttctaattctgttccttggctgtgctgagcaga

SEQ ID NO: 223512 - DNA, 122 bp, Homo sapiens
gacgcggtggggtgcgcacctgcggctgcggcagcaaaggcggaggaggagcgaagtggacgagcacccgaggctgccagaggatctgggcagcctgggtgcccatctctgctgcgtttcct

SEQ ID NO: 223513 - DNA, 122 bp, Homo sapiens
ctctgaggtgttgtgtgcccttgacgtcagcccgtaccggctccgcctccgggcgagttgcgacattttcagtgcttcctgagaagagtttcgcgcagttggagctacgggtacagcagtgg

SEQ ID NO: 223514 - DNA, 122 bp, Homo sapiens
ttgtgaagctgggtgtctgggagccagggcccgctgcgctcaacccggcctggttcacggcgaagtccccaggccgcatcctggacgtctcagctgcaaagatgctcccctctctcacctgc

SEQ ID NO: 223515 - DNA, 122 bp, Homo sapiens
tacttactttacttacttacttccttggaaaatgctctccatttgtcgagcactaatccacgtctgtaaatcccgcaaggaggacaatggaaaccagccccgtgtgccatttctcaaaacct

SEQ ID NO: 223516 - DNA, 122 bp, Homo sapiens
ttccctctgctcacacatatgccgtcacctctaggagaggtcacgggtggcggcgtgtcccgaactctttccaacacgagctgcccctcactttctgcctggtctgccagaaacaccgagag

SEQ ID NO: 223517 - DNA, 122 bp, Homo sapiens
agagccctcattccaacctattgttcagaaaacatccccactgttcatatttcaggagggcgggggagtggcagcagagagaagcggcaggtaatttattcaggagctggaagctgagaaac

SEQ ID NO: 223518 - DNA, 122 bp, Homo sapiens
aatggcacgagctggagggagaatttcaagaactgcaggtagggccaggccacctggtcccgcaactctgctgcccgcggtgcagcgccttgcccttcctgagccccccggcccgggcggtg

SEQ ID NO: 223519 - DNA, 122 bp, Homo sapiens
ctgaacagcaggtcctcggtgacatctgcatgtaagtcacccacatacagggaggccatgcggtacttggctgctacattcatctccttgtccttgccactgtgagtttgtcccctggagtt

SEQ ID NO: 223520 - DNA, 122 bp, Homo sapiens
tgcctcccccaaagacagcaccgccgcctacctgtcaccctgctgtctccggcttcctaccgccgccgcctcccgcagcagcctgccaactgcagcgcaacaaccaaccctctcattgggtg

SEQ ID NO: 223521 - DNA, 122 bp, Homo sapiens
atgttctgcgcgtcccactgggcagcccagaggaaagtggatgtcccttgctgggtgatgcgtatttaggcagcaggcagccctcacagtctgcaatgataacagctcttaacctaggcctt

SEQ ID NO: 223522 - DNA, 122 bp, Homo sapiens
taaatagacccttcagtttaaaaacagtctcattctcaaattttaaggagaaagtgaagacggagatgtcttaaagactcggcaagtactaagttggcaaatgtcaaatgttaaaataagtt

SEQ ID NO: 223523 - DNA, 122 bp, Homo sapiens
aagcattatggaattaacaaaaccaaccttgctgagcttaactatggaatggaagtatgacgaaaggccgtgtagtagggagcagtccacctaggtataggcaataaagggactactgtctg

SEQ ID NO: 223524 - DNA, 122 bp, Homo sapiens
gcattttgccgcacaagctgtaacatggcggcagcgactgcggcctgaactctagggagccgggttgatttttaaagcttcaaaatcctaagactcagcactgttgcggggtaggtggcggg

SEQ ID NO: 223525 - DNA, 122 bp, Homo sapiens
ccgctcctggatgccgtcctggccaacatccgctcacctgtcttcaaccattccctgtaccgcacattcgttccagccatgaccgccattcacggcccacccatcacgtatgtccagctggg

SEQ ID NO: 223526 - DNA, 122 bp, Homo sapiens
acctcgattctaatggtagggtcatttgtggcatgtctagtgcaggcccttttcagctgacggcttcctttgacaactactacagcctgctgattgatgggcccctggaccgggagcagatc

SEQ ID NO: 223527 - DNA, 122 bp, Homo sapiens
ctgtgaggtatttggcagtgataattagaaactgcaggtaaacaatgttgctgccagttccgcatctgaaagtagaactcccaagtcattggtgtactggggaggtgctgacagttaaaacc

SEQ ID NO: 223528 - DNA, 122 bp, Homo sapiens
gtatctaactaatctgatggggacgtggagaacctttgtatctagctcagggattgtaaacgcaccaatcaacgacctgtcaaaacaggccactcggctctaccaataagcaggatgtgggt

SEQ ID NO: 223529 - DNA, 122 bp, Homo sapiens
agaggaatcacacgctcagctggtggcccggttccagctgatctcagcctctggactcatcgcccctctggatcagtcagtgcttccttctcttccagggatcaaggggcggctcctggagc

SEQ ID NO: 223530 - DNA, 122 bp, Homo sapiens
aacaacaacaaaacaactgaatgaacaaaacaaacaaacaaatcctgatctaacacgtaacgtatttatagatggaagtaagttgctgcatggacgattcccccgcttctaggcctttactg

SEQ ID NO: 223531 - DNA, 122 bp, Homo sapiens
ttcccttattagtgaataccagaatctcagatttgcaaaggattctttaataaggctgttcgttctcagccatttgctttcatatttgagttgtttttctttccacacattgaataatgctc

SEQ ID NO: 223532 - DNA, 122 bp, Homo sapiens
taaaagcaaaaggaatggaggtgccggggattgaacccggggcctcgtgcatgctaagcacgcgctctaccactgagctacacccccgtactgaaacggttctctcgagagtatattcaaga

SEQ ID NO: 223533 - DNA, 122 bp, Homo sapiens
ttcactggatgaaaaaaaaaactggttaaacactaaaggaggcaaatacacattagacaacgagctagactattaaaaaaatctccatttggggacaaagcagataacttctctgcattctc

SEQ ID NO: 223534 - DNA, 122 bp, Homo sapiens
tggcagcagcggcgcttggaggaaaggaagccggttggagggcgcagcgcacccctgctgcgcggaggagggggctgagctgaactcagcagaagttacatgcacaaggttagtggccccca

SEQ ID NO: 223535 - DNA, 122 bp, Homo sapiens
ttaggaacccaagccggacattctgttttgcccagcagtgagtccagttacccagagacccggacttaatggatcaggactggtccctacccaggtgacacagatgtggcattctggttctt

SEQ ID NO: 223536 - DNA, 122 bp, Homo sapiens
gcagagaagtgtttccaatgctgcgacccgggtgtgtaggacggggaggtcacgatggcgcgacgtctgcagaaatttcatgaggaggtatcagtctagagttacccagggcctcgtggccg

SEQ ID NO: 223537 - DNA, 122 bp, Homo sapiens
caaacaaaactttatttttctggtccgcggcagcctgtctgctgaacgttgacttgctttcgctttgcagcaggcgacggtcccgggcgccacctgcgcgtcggtgggaggctggtccacgc

SEQ ID NO: 223538 - DNA, 122 bp, Homo sapiens
tggggcttaaaaagggggattccggagtgccaggaagagtgttgacgtggccttgagccacgtcagtctcagagcgaggagtcctcccacacacagattccacggcccaaggacgtttgttc

SEQ ID NO: 223539 - DNA, 122 bp, Homo sapiens
aaggaatccatttaaaaatagagtaaaatgctacagccagttgggggttgggggcagccccgtggaccagaatttgcctctgtgtgggaagtcagcaggaccagatgcccctctcttctttg

SEQ ID NO: 223540 - DNA, 122 bp, Homo sapiens
gagcggtacacttcacaattctgcgtgcccgaagtgtgcaggagccagaagatgtggatccgcacaaccacgctgggaaggaagcagatgacaaagacgatggccaccaccatgatgaaggt

SEQ ID NO: 223541 - DNA, 122 bp, Homo sapiens
aagggaagggaaaggggaaggaggggaaagaagactcctaccactcgtcgccgcctcagacggatcctttgccccgcccaccgctgctacgcaacccggcggaagctcgtcaccaaaccccg

SEQ ID NO: 223542 - DNA, 122 bp, Homo sapiens
tttacttcacttctttccttcacatattctacattacagcaaaacaagaggagtactgagcgttggtgcctcctcctccttgcctctgcctgtccctaaccccggcctgtcttttcaggctt

SEQ ID NO: 223543 - DNA, 122 bp, Homo sapiens
tccctgcgcgtctccctcctcctcccttccctcgctgtcggcgcgctaaggtgacgacggcggcagccggactcgccacattctgcttactcgctcgctctggccctgagtgcatgttcgta

SEQ ID NO: 223544 - DNA, 122 bp, Homo sapiens
attgggggttggtcctcattttctgggtccctacttctattgggaaaggcaactagagtgcgacacgtggcagattaccttggtttaagtcttaatgtggcctgtggtgtttcccataagag

SEQ ID NO: 223545 - DNA, 122 bp, Homo sapiens
cgggttttcccgggagaacagaggacacatcacgctggtgggttcgccttctctctccctcgctttgggttttctgccgccctgtggttactttgccacgttcctgtcttcgctgttgcctg

SEQ ID NO: 223546 - DNA, 122 bp, Homo sapiens
gaattcagtattcaaagccctccgtgaatgggcttggtccttcctccctggcctctcttgcgtggctccatgctctgagctgcctactcgctgactcattcatttaatgtttattctttggt

SEQ ID NO: 223547 - DNA, 122 bp, Homo sapiens
aactccatcctgctttccctcacagttctcccagacttcggttacactccctcccccaagcgccatcccctagtcattatgcagcctagattctctggagcgattccaggaggctgggcagg

SEQ ID NO: 223548 - DNA, 122 bp, Homo sapiens
ttgaagtaaacctggctatagagagggtgcaatttatgttgcctgccacgttccctggttcggtaagattttcagttaaagtcatcctccttcacttccgttttgccccagggaagggagac

SEQ ID NO: 223549 - DNA, 122 bp, Homo sapiens
caccttcccgcgccccggcccgaagtctatacattttttaaatgtgcatattctttgacacgggaattctacttctaggaatttatcctagagacagactcacacatatgtaagataatacg

SEQ ID NO: 223550 - DNA, 122 bp, Homo sapiens
tcagaaggccccttggggtctcgggagggcctggccgaggatttggggcgccccgagactcgcgtgtcagcgccggtggcgctcagggccgagatctgtctcctccccttcctcctcctccg

SEQ ID NO: 223551 - DNA, 122 bp, Homo sapiens
gattgtcagcttgttcagttcttgatagaatctttctggtcccttaggattttggaacagcggtctgagagacgactgctaccctggccttagtagccttccctggtacctcttcccatcgc

SEQ ID NO: 223552 - DNA, 122 bp, Homo sapiens
cagccgaggtatggaagtcaaccccttccttgcgcagcaggagtcggaggtagcgggagacgtcgcggccggcaatgtccacccgcatgatggagtgaggcatggcaaagccctcatagatg

SEQ ID NO: 223553 - DNA, 122 bp, Homo sapiens
ccggcccgcgaggggatggcaactacccggggtccggaggcggggctgcgagtgtcggggcggggggcgcgggccgggtcgagcaccgccccgacgagggcccaggccagtccggcccgccc

SEQ ID NO: 223554 - DNA, 122 bp, Homo sapiens
atgggatctcatagttttataaccatctggcatttccccggcttgctcctctctctctctcgcttgctgccatgtaagacgtgcctgcttctccttctgccatgattgtaagtttcctgagg

SEQ ID NO: 223555 - DNA, 122 bp, Homo sapiens
gaaaacccttcctgactccctcccacgcatctccgacctccccttgggtccaggcaggctcggtctgcacacggcgttgttctgcacttgttcctttgttgctgtgaaaccggctcccggca

SEQ ID NO: 223556 - DNA, 122 bp, Homo sapiens
tgtttttgttagcacatgactatgggctaggcattccgcttggttatcccgcttcatagacgtgagcccggttactccgacacaccgtggccccaggcagcctccccgtcctcaccaccttt

SEQ ID NO: 223557 - DNA, 122 bp, Homo sapiens
atgaataaagcctgattggactctccatcccaactcagggctgccaccagctgaatgagtcgcccccactaacactacccagagtagaactgcctagcagagccatgcctatggcttttgtc

SEQ ID NO: 223558 - DNA, 122 bp, Homo sapiens
tggagaggggccgccccggaagcggtgctgcgcccaacgtccccttctccccgtaagccccgcaaggagcctgccgcctcttgcacctgagccaggagttcagtcgggaggcgggcgcggag

SEQ ID NO: 223559 - DNA, 122 bp, Homo sapiens
tcatcttcagtggaaagcagaagtcccggaaacaccgcttgaagttttcatcaagaaaggcgtagagaatgggattcaggctactgttggtatagcctaaggcgatgcagaagtaatagctg

SEQ ID NO: 223560 - DNA, 122 bp, Homo sapiens
tttgtcttctcccagaagtgacatgggcctatttttgctgccttcccatccatgcttggacgccaccctccaggaaggccaggcagctctggatctgcttaggcccccatggaggggtgggg

SEQ ID NO: 223561 - DNA, 122 bp, Homo sapiens
cctcggagaaagttcaagaggaacttccccgcgaacaggtcctgccggcggccgggaatacgcacactttttatgttatgacttggactttcccgaacctttcgaaacagagggaaggcgag

SEQ ID NO: 223562 - DNA, 122 bp, Homo sapiens
ccttcggtggattgttgaatgcatctgttgtcagaaagacagagattccgtccccctcaccgcctccagtttgctatcttcgagcctccgcggagaggcaacggcgggcggcagcccacaag

SEQ ID NO: 223563 - DNA, 122 bp, Homo sapiens
cctaactagctcctcacttaggctgcggctaatatttttcctcatgaattaaattggcggcggcttccagtttggaactttgagacctagaatttacaaatcaagtcattgtaatagaattt

SEQ ID NO: 223564 - DNA, 122 bp, Homo sapiens
gcggcgcggcgcggcgctccactccggcctgactccgcaccggcttttgcgggcggccggcggcgcggggccctttggaaatagaatagccaatgtaatctgacacttcaacttgctcggct

SEQ ID NO: 223565 - DNA, 122 bp, Homo sapiens
aaccggcacggccacatgtgcctcatgatctcgtgctacaagggccaccgtgagatcgcccgctacctgctggagcagggcgcccaggtgaactggcgcagcgccaagggcaacacggccct

SEQ ID NO: 223566 - DNA, 122 bp, Homo sapiens
gccccttctcactctgagcagctggtgcctgggattttaggctgtcacgacgattccacccggccagggcaggcccgaaccagccggaggccacaggagaaccaatgagcctggctggactc

SEQ ID NO: 223567 - DNA, 122 bp, Homo sapiens
ttaaggcccgtccagccattgtggtcagtctcctgcgccttcttaaagctcaccccacaccgcaccagcgtccgcagctgccccacgcctccaggatgccctcctccggtacgctctccacg

SEQ ID NO: 223568 - DNA, 122 bp, Homo sapiens
ctcgaccaaggagtgggtgtgggtgggtctttcggggctcccggcgacccgcggtgccgacgcaacgccgacgtatggtgccaagcgaactttaaaaagctgcttcggacaaaccagagcca

SEQ ID NO: 223569 - DNA, 122 bp, Homo sapiens
cacttccgggtgtctcagccttttgttggggagccattcctttccttacagttaggaaggcgacagtgagtgagtctactaggacttgtctggcggctcagtgatgagacctgttttttctc

SEQ ID NO: 223570 - DNA, 122 bp, Homo sapiens
gttggcctgggggggctgagggactgagcctcccagagcaggacctccccctggaagggccgcgccgcagcccgtgggagggcctcgcccccggcgccccccatctccactcgccgccgtcc

SEQ ID NO: 223571 - DNA, 122 bp, Homo sapiens
tccagaggtggtgcagaaacgaccccgcgccggcgccccatcctgcggccagtgcctccgcgccccggctccggtccccaccgtccccgccccagatttccggaggagcaggcgggcggggt

SEQ ID NO: 223572 - DNA, 122 bp, Homo sapiens
tttcacttaatgtttttttttgttccaggattccatccagcataccatattacctttagccgtcatatctccttaggctcttctaggctgtgactattttgagaagtactgactaggcattt

SEQ ID NO: 223573 - DNA, 122 bp, Homo sapiens
ccagtcacgcctgacggggaaacttaaaacccagttagattactgcgccagctctggaatcgcacagcagagatggtgcacatcgctctttaattttcttgttaggtgaagcacttcaaatt

SEQ ID NO: 223574 - DNA, 122 bp, Homo sapiens
gactccactgttagatcattttccttgggtgtgggggcggggcggggcgcggcggggagacggggtagcaaaaagaaccgtgaagaaaccacgcctgcccccttcagccttttcccccctcc

SEQ ID NO: 223575 - DNA, 122 bp, Homo sapiens
caaaggttaaaacagatgacaactatttctagagagctgggttttttgccccctcaactacgcaccgtggtgaggcgccgaggaggccacatcacaaggctggagaaccctgggagcttggt

SEQ ID NO: 223576 - DNA, 122 bp, Homo sapiens
ggcgggtccgtcccgccgaacgcgtcctgagggcggggcctcgcgcgtggccgggcgctgcggcaggagcgtccccacggggcaccctcccacccacggccgtctcccagccccggcgccgg

SEQ ID NO: 223577 - DNA, 122 bp, Homo sapiens
gctctgctcacactaatcctttcctagacgctgcggagcacagacgggcgctgcgagagacggccctgcacaaaagacaaaaaagaccaaggcggcaggaaaaggagaggaggaaaaacaag

SEQ ID NO: 223578 - DNA, 122 bp, Homo sapiens
ggtttaccttcttcggctgtttccggaattcacccgtagtctgtggccgggaggagaaggcgcgccccacctcccgtttctagccgcttcggatgtttccggctgctgccggcgaaaagagc

SEQ ID NO: 223579 - DNA, 122 bp, Homo sapiens
agcgtgaggacggctggtacaaggggaccctgcagcggaacggccgcacaggcctcttcccgggcagcttcgtcgagagcttctgagaactggtgctccctgcacccagctcacagaggggg

SEQ ID NO: 223580 - DNA, 122 bp, Homo sapiens
taagctcgcgcgctggctcctcccctggcaccatagccccgccccacctgacacccggggcggagagaagtactggctccgcctcttccgaaccggcaggaagtgacgtcatgcccccggcc

SEQ ID NO: 223581 - DNA, 122 bp, Homo sapiens
cactgaaaatagccttactacccagtggtgaggacgcctgggctcctgagtctcacacagcgccttggcctgggtagagacgctgccccatactagcaggaagaccttgggggacttcacta

SEQ ID NO: 223582 - DNA, 122 bp, Homo sapiens
aagctcttctcccccaccccaaaccaatactgaaaacactataatatgaggctgttctatcgtcttcattcccaggctctgcaggacctcccctcccccattcatctctaggcccatcaggg

SEQ ID NO: 223583 - DNA, 122 bp, Homo sapiens
gaggtaacatctgcctttcagggtggttgttaaaattcaaagtattgaaagtgccaagtacgataatggctggaaatctagttggccttcagtagattttgcttgaactaatgaattcgctg

SEQ ID NO: 223584 - DNA, 122 bp, Homo sapiens
agggctaatctatattttgaaatcagtataaaaagacgaacagaatttgagatgtgagcgcggacagctctgctgggccctccaggccctccgcccggtagaacccggagccctggccgcgg

SEQ ID NO: 223585 - DNA, 122 bp, Homo sapiens
acggtcagccactcccccgctaagttcggagtctcagcccttggctccgattctgggctccgcccccaccctccggggacccccgcctggtccctgtcccctgcgcccaggcgctccagcgg

SEQ ID NO: 223586 - DNA, 122 bp, Homo sapiens
gacccagcagatggagattgtctgtgtggggctcacccactgtgctgtttccccaggtaccgcgtggtggtctcgtacccaccccagagtgaggcggagatcgagctgaaggaaggcgacat

SEQ ID NO: 223587 - DNA, 122 bp, Homo sapiens
actcacccatcaggagctcatttacagcctggccctgcccaggctcctcaggggcagggccgcaagtcctcggtggacggggccctaagtgcgaccttgctgctggtgcatataaatctggg

SEQ ID NO: 223588 - DNA, 122 bp, Homo sapiens
cacgccgtccaggccgcggaagccgatgtacagcaggttcccgttgctggcgggcggcggcgccacggcactcatctccacactggccaggctgcagcgccgctgcttgtgctggcaggccg

SEQ ID NO: 223589 - DNA, 122 bp, Homo sapiens
gttgctgagtcggggctttgtctcccaggggcccctcttccctccctgcctataagagcccgacctcggctggtctcagatctgacatgttccctgggcctatctcggtaagtcccaggttt

SEQ ID NO: 223590 - DNA, 122 bp, Homo sapiens
ccacgcttgctgccatgcctgctgctgctgtgctggtgaagggcctgtggttcaaaaccacgatgatgaggggccacagaacaccctgcccagggtggcagtcccagaggagcagcaaggaa

SEQ ID NO: 223591 - DNA, 122 bp, Homo sapiens
agccagggctagagtcctggaaggtggcagtcaggtcgcagggccacagcagtcactctgcgactctctcttccggtgtttctccagcgccaagcgggagaagacggagcctgggagctggg

SEQ ID NO: 223592 - DNA, 122 bp, Homo sapiens
gactgactcatctcttaaaagatgtgtgtgtccctcgacaaataacctgtctgcccctatcgttctgtaggaggacggagtcccagagaactacaactcccatcaagcacttgggggatcgc

SEQ ID NO: 223593 - DNA, 122 bp, Homo sapiens
tgaggggcacgcccgggctggcatcagccctccaggccaccctgccactcacccagcacacggcaaaatgcagaggactacctttccctggtccgccccctggccgccccttggggaatgca

SEQ ID NO: 223594 - DNA, 122 bp, Homo sapiens
aaagacctcttgctttgaggctgttggcgtgctacaaggactcgaaagttatttgttcaacggatgacttctgttttctggaggcaaactgaattccgggcaggtggctcagcacctccagc

SEQ ID NO: 223595 - DNA, 122 bp, Homo sapiens
gccagcaggtgcgggcggacaggtggggcgcacctgagtatatgtagggcgtcgggggcgcggcccgcgcgccccgggagcgcgggagggggaggcgggaccggaggggcggccgaggatga

SEQ ID NO: 223596 - DNA, 122 bp, Homo sapiens
tggatttgtctattctggacatttcatataaatgggatcacgctgtatgcatgaccacatcgttcttgaccacagctctgccaagcagccaatccggtttggatttgttgtggttttaaact

SEQ ID NO: 223597 - DNA, 122 bp, Homo sapiens
tccaccgcctatgatccagtgaggcatttctcgacctatggagcggccgttgcccagaaccggatctactcgactcccttttattcgccacaggagaatgtcgtgttcagttccagccgggg

SEQ ID NO: 223598 - DNA, 122 bp, Homo sapiens
acaggaagggaaagaaacagaggagaagcagccaaagggattgcaaggaaaaccaggagccgtggctgcatgaagaccaaagcaggggcttttcaaggagggagttgccagtatcaaatgct

SEQ ID NO: 223599 - DNA, 122 bp, Homo sapiens
cagctcctccttcttcccgcgaagatctggagccttgatcttggccattgctgcacaggccgctgccgcctccgccgctgcccgctcctcgggaaagagctactttttttagttcttgtaga

SEQ ID NO: 223600 - DNA, 122 bp, Homo sapiens
gctgtgaaacagcaattacagcccatccctctccctggtagttccgtcccacggaggctccgaactacagccagctggaaaacaccgccagggtggctggcgacccaggtctggaggccccg

SEQ ID NO: 223601 - DNA, 122 bp, Homo sapiens
ggcagcctcagcgctgggatttgggaggtgagggacaggacttgctgtattgagctaagccgggcgctggtttgctaacacagcagtgactcttaggcactgttttccttcccccttctgag

SEQ ID NO: 223602 - DNA, 122 bp, Homo sapiens
tgaatgtttattacatacctactatgtagccctatacttattatatgcctgcttgttaggcgctgttatgagcaaatgcagacccttttctgctatctttgagattacagtctggtgaaagc

SEQ ID NO: 223603 - DNA, 122 bp, Homo sapiens
gggccgggttggttgagtttcgcgcttctgagtgtgacgcgccctagtgggcatgcgcatcggtcggggtggcgggaacaggaaaaggtgaacccagaaatgctgagtcaggctacccaagg

SEQ ID NO: 223604 - DNA, 122 bp, Homo sapiens
tgagtaactgggatgatagtcatgcaccactgcacctggcttcttgaaatttttaaatttcgttttctaattgatttaatttttatttaattacaaaacaatagcgttgcttcttatttttc

SEQ ID NO: 223605 - DNA, 122 bp, Homo sapiens
taccactatgaacgctctcttagtgagctcactgccagcagtagggtggctgatggcagacgctgactggaatcaaatgaccaaatcattttttctacttggttgtttagtgcctcttcaat

SEQ ID NO: 223606 - DNA, 122 bp, Homo sapiens
ctccctagcagccagggaccgtgccctgcgctgggaagggcggcctaactgtcgggaaggcgcccctgcctctcagctgcaagcacaagcgattgtgcctgactttactcagctgtgacagg

SEQ ID NO: 223607 - DNA, 122 bp, Homo sapiens
ctccttgtccctccttctgtttctccttttgtctgtgtttcaggtccctgggaattgtggcggcctctgcctttttcagcagtgattctttcaccaaacctcaagacacactttgtgcagac

SEQ ID NO: 223608 - DNA, 122 bp, Homo sapiens
ggggcaaacttccccggctccaccccactctcccagtgcgcaggccagttggagattctccggggtcccctttgtatttggctgtctcagctggagcatcttatagtgcctgaaatcaagaa

SEQ ID NO: 223609 - DNA, 122 bp, Homo sapiens
cttaaaaagtacccgtactcagtactcagccggcagcataatgaaaagtgggactagacacggtgtccatatggagaggaaaaatatacatagaatatttttaacaaaatgtattcattgta

SEQ ID NO: 223610 - DNA, 122 bp, Homo sapiens
cccagaagcccagccagcttcacctctcaatggcactcaccgctgcgggactttgcggcacgtagcccgggcactctggcagcccagagggaactcgtccccccgatcaaacccagcaggcg

SEQ ID NO: 223611 - DNA, 122 bp, Homo sapiens
caatttcactctacaaggactgtgttcaaaatattaatttgtttacagtttttttttaatcggggtctattaatccgatgattatttatatagtgcctgggttaaaagctcttcctccaggg

SEQ ID NO: 223612 - DNA, 122 bp, Homo sapiens
gctgaaacccccacgagatgccaatgcacacagcagggagaaaagccaaccaaagaagaccgaagggtatctttccacccgagtagcctctgtagtgattgggaccaagactaaggacttgt

SEQ ID NO: 223613 - DNA, 122 bp, Homo sapiens
aggaaacccagcggaagtgcacaccccgggcaggcgtgggcacgtgtgtgatggtaaccccgctctggcaggggccagggggcaggcggtggtggtggcagggcctggggcagcactgaggg

SEQ ID NO: 223614 - DNA, 122 bp, Homo sapiens
gggctcacacaaagagagcggcggcgcgaccttctccccgcaccggcctcctttcctccacgaggtccctagttcccagtgccacatagctccagctcatcctagaggcacatgcctcacga

SEQ ID NO: 223615 - DNA, 122 bp, Homo sapiens
tctctttccccccccttattcttaaatcccttgggcgagggcaaccttgatactgagactcgtaaaattcatgcaggcttatcatccttggtgagggctccaggcgtgcgcccgcatccccg

SEQ ID NO: 223616 - DNA, 122 bp, Homo sapiens
cggagggaggaaggatgggtgcgggtaactttttgaccgccttggaagtaccagtagccgcgctcgcaggggctgcctccgaccgccgggcgagctgcgagcgagtgagcccgccaccgccc

SEQ ID NO: 223617 - DNA, 122 bp, Homo sapiens
gaactccggtgcagcacgactgggccctggtgtgcagagattatgggatattctagttggcgcttcttcacgcaccccttccctccatgagcattttttttttttgatgcagtcacctttag

SEQ ID NO: 223618 - DNA, 122 bp, Homo sapiens
gcaataatggatgatgccattacagcacaactgcagtcagaaagaaagagcgaaatgttgcggtttagttaatgctttggaaaaaatgtttttaaaactggcctccacccagtttcctgtgt

SEQ ID NO: 223619 - DNA, 122 bp, Homo sapiens
ctcctagatccttaccactttcttaccttctcgtgtgtctaatgccctcggcacagtgcccggcacatcggagtctgattattatagggtccatgacttgagttggctggtggcgcagtctc

SEQ ID NO: 223620 - DNA, 122 bp, Homo sapiens
gaagacgcggtaggagtgcaggaaggtgttgaggaagtcgatgctcaggaagcgcaggtccgtcagcctctccagcagccgctccacactggcgtagcggatctgcagcactttgcaggagt

SEQ ID NO: 223621 - DNA, 122 bp, Homo sapiens
agcagaagacactggaccccaacaagcactttgctctgtgaacagtagctgtggctgtatcgggagaccaaccctctgagacagctgctgtgggactgctgacagcatagtgtctttgcagc

SEQ ID NO: 223622 - DNA, 122 bp, Homo sapiens
ggacctcaggcaggtggaatgacacagtgtttgtagggacctcaggcgggtggaatgacacggtgtagggatctcacgtgggtggaatgacacagtgtttgtagggacctcaggcgggtgga

SEQ ID NO: 223623 - DNA, 122 bp, Homo sapiens
ccccctgtgtgctggccgctgaggcctgaggcatggggactggcaggaggcccactgggtcggagagagaactctgaagcttggagggaggaaggtgtgatgaagcctgggtccctgtccct

SEQ ID NO: 223624 - DNA, 122 bp, Homo sapiens
tctttttaagtcataggaacagaagcatctgcagactaggatcccaggcccaaacttgcacgtgagatttgttgaaacttaggtcatttggtactcctgacacctgcctggcccaggggtcc

SEQ ID NO: 223625 - DNA, 122 bp, Homo sapiens
gcgacgtcgcccccgccccacctccctgcgcaagtgcgaggctgccggcagcgcggcgcacgctccggccgttcccggcttccgcgcaaaacttccatcctgtccacgtgaagttgtcgctg

SEQ ID NO: 223626 - DNA, 122 bp, Homo sapiens
ggtcctgtcctcgtggctttctgccctgtcctccctggccggctgcactggcttctgtgacgctcgctccttgctgcgcaagtgcaggtgcagcaccttaaaggctgagtgcgtcccacaca

SEQ ID NO: 223627 - DNA, 122 bp, Homo sapiens
tgatccaggcaattctggccagacctccggagccatgaaccaaccaaatgcattcatcctcggtggtgacaaggtctttgcctaattgtaagaattattaagaccctattgccaagaaaatt

SEQ ID NO: 223628 - DNA, 122 bp, Homo sapiens
tgatggacccgcagcttgcggagctgggcccgagtattagcagagtcccccggatgttgacgctccctccagctcttctggaccgtgttctggaggccggctttgaactctttggcatatgg

SEQ ID NO: 223629 - DNA, 122 bp, Homo sapiens
gctatggggaaagaaactggagacaaaggtgtcaaccccagcagggcctggggagggaagcggccctgtacatcctcactctggtgggacctcagtcccctggccacagtgtgctccgggct

SEQ ID NO: 223630 - DNA, 122 bp, Homo sapiens
tccgtgtgaacagaccacagcttgcttttcattgtcctggccacatcaggaaacagcacccgcagcggctttgcagacccctcccctcaagtgttcttgtattcaacccccacaccctgcaa

SEQ ID NO: 223631 - DNA, 122 bp, Homo sapiens
cactaagctgtcttagctcattcacgttagcctggccgccccgtgggaagttcccctgcccgtgatcctccggaagaccgcaggtccctatgcccactcagacagccgactgttgggagtct

SEQ ID NO: 223632 - DNA, 122 bp, Homo sapiens
tctgtcaggaaggaggcccatcatattttgcatgaatgaagacaacttttaggccaggcacggtggctcatgcctgtaatcctagcactttgggaggccgacgtgggcggatcacgaggtca

SEQ ID NO: 223633 - DNA, 122 bp, Homo sapiens
ggcccaggtctccccaggtgccatctcttgaggcctgggaccagcagggtcctcgggggccggaatcacgcacttggcatggggaggaggcccagacccgacgcgggaccccgggaggtgct

SEQ ID NO: 223634 - DNA, 122 bp, Homo sapiens
gatctcgggcttgggttgaatgacatgagggaaccagggaaaggcgggcagctggaagcgcgcatccaccaagctggacaccgtgcccggcactttggagaaagaagagcgcggcaagtgca

SEQ ID NO: 223635 - DNA, 122 bp, Homo sapiens
cccgggggtgggacccgcgccgggagctgccgagtgcgtggagggagccaggctccggctcgcctgatggattgacttggagatggatcgaattacaccatttgccgtgcatcggtttgttt

SEQ ID NO: 223636 - DNA, 122 bp, Homo sapiens
cctcagggagcggcggctgcggtggggccgccgaggagctgctggcgacagtcaggcgggcgcgtacgggcccctagccttcacttcgcacaatggcgggaaatagccgccgccgaccgcgc

SEQ ID NO: 223637 - DNA, 122 bp, Homo sapiens
tttcaacttccaagttcaattcatggtggctccttttcacttgccagataattacaataacgatgaagatggagccataggtgtataagggatatccaacatcccacagaacaaaagtaggg

SEQ ID NO: 223638 - DNA, 122 bp, Homo sapiens
gctttgtgtgagcaacaaggctgtttgtttcacctgggtgcaggcaggatggtagcagcacgagccataggcaaaactcctcagacaccaagttaaagaaggaaggagtatattcggctggg

SEQ ID NO: 223639 - DNA, 122 bp, Homo sapiens
caggctgcctgaggcagccgaagcaggcactgctttaggaatgcttcaccccctggcctacgcaggggatgcaacaactggccagccttggcccagcctccatgctgattggggaccacgtg

SEQ ID NO: 223640 - DNA, 122 bp, Homo sapiens
cataagggccatctctgttctgcggcagatgcagcagagcttgccaccatgtactggcctcgtcatgcaaataaaataacttttcttgttctagataccttatttttattaaatcaagttga

SEQ ID NO: 223641 - DNA, 122 bp, Homo sapiens
tatatgtgactgcctttgagtgggcactctgtgctggaccctgtgccaaggactatctcacgcagtcctgacaatcaccctgtgtggtagatgctatgattagtcccacttgacaataaaga

SEQ ID NO: 223642 - DNA, 122 bp, Homo sapiens
cccgggcgcaggtgctcacaggcgagggcggggttcaggttccagctgggctttgagttccggttcaggcttccatctgtggttccggttccaatttgaggtggagtttgggattaaagttt

SEQ ID NO: 223643 - DNA, 122 bp, Homo sapiens
ctcaacagaaacccagtgtgcctcaatcatcccctctggaagtgacccatgtatagcaatcgtatttccctagaacccagtgagccataggctacatcctttgacttgctggggtaacatgc

SEQ ID NO: 223644 - DNA, 122 bp, Homo sapiens
atgctgcctctgccaccttctctgccagaagataccatttcaactttaacacagcatgatcgaaacatacaaccaaacttctccccgatctgcggccactggactgcccatcagcatgaaaa

SEQ ID NO: 223645 - DNA, 122 bp, Homo sapiens
gacggtgcgtgcgtgtaggggagggaaattccagggtttcatatatcaagatgacacacccgctgcacacttctcttagaaagtcacgacgcacagtactgtgcgtcacaggtattgagaaa

SEQ ID NO: 223646 - DNA, 122 bp, Homo sapiens
tgtggctactggcccaggtgctaagctcgtcactgcccaggactggtggtggcggccggccgctcctactgcagggctgccaagcccacacccacccggaactcgcgctggtccgccagcac

SEQ ID NO: 223647 - DNA, 122 bp, Homo sapiens
ggcctgggggcagggagctgggaccaagcactcgggggcgggcaccacaggtcacgccttcgcccaccccccaccccggctgatggatcctctgaccctgcgtcctgtcccgaaacgcacct

SEQ ID NO: 223648 - DNA, 122 bp, Homo sapiens
cggcgtgctcccttagtgccaggtcccagaagcagcagccgatctggtttccgcactggccgactgcgaccggaggagaggaaggaaagagaataggacattaagcaggaaacatggccgct

SEQ ID NO: 223649 - DNA, 122 bp, Homo sapiens
aagctagatgggcatgtatggcagctacagcttgtgagtgacccccttccccagagtccgcgatgaaaataaagttacacttgtcaataaccagatgtgggagatggagagtgcctttggca

SEQ ID NO: 223650 - DNA, 122 bp, Homo sapiens
ttgggacccagggctgactccagagcccgagggccttccactgctccacaaacagcagcgcgtccctgtgcaaggtcccaaacctgtgtggggctcagcttgcttttcaggaagggggcggg

SEQ ID NO: 223651 - DNA, 122 bp, Homo sapiens
cagtctcactgcaccccagcaacgcgaaggcagaaaccggtgctggtggccacacctgggcgcctggacaccgaagcccccagcacagtgaggcctctgagtgtggcttgtggtctgtcctg

SEQ ID NO: 223652 - DNA, 122 bp, Homo sapiens
agctggatcttcagtcgacagaaatcactggggaggaggagctgggttcccgggaggactcgcccatgtcaccctcagacacccaagaccagaaacggaccctgaggccgccaagtagacac

SEQ ID NO: 223653 - DNA, 122 bp, Homo sapiens
gggcaggtctccttccaggccaggggcccggaatcatgtacataaagcaggtaaggccttcgcgtccctccaccccgtcatgggccggtaagggccgctccttgaggcgggagtgttgcggc

SEQ ID NO: 223654 - DNA, 122 bp, Homo sapiens
ccccccgcccgcccgcctgccgcggcgcggcccaccccggcgcctccgcccgcccttcggcggattcctgagccagcgccagggggagggaccccgaccccccgcttctccgcccccggcca

SEQ ID NO: 223655 - DNA, 122 bp, Homo sapiens
ttttgccagggaaacggatatgagtcaggcagcccatcgggaattaggggggctttaccacgccgctgcgatttgtaccactcggctgtttccccgagctctaaagacctgccaggaggtga

SEQ ID NO: 223656 - DNA, 122 bp, Homo sapiens
cagatcaattaagtccaggaaaaaaatcaaatatgcaagtgttgaagtaaaaccaagaaacgttctgaattttctagcaagactgtgatttttaagtatgtattccccataagtacctgtca

SEQ ID NO: 223657 - DNA, 122 bp, Homo sapiens
atctagtgaaggatatgaggaagcgcatggacgtagaaaatcccacatcaactcctggttcgattcatttaacatttcctttagactattttaaatggttctgaaatgaataaggatgtaat

SEQ ID NO: 223658 - DNA, 122 bp, Homo sapiens
cagcagccttgtcagcctccctcattgcgactgcttaaatgctgagcgttctctgggggccgcccacacacgcacagcctaaatgcatgtcccccagcacacacctgtgcgcacggctgcca

SEQ ID NO: 223659 - DNA, 122 bp, Homo sapiens
tgtcctgcccctcctcgccccctcccccgcagcctgaggagggcgttaagcaaggggcttcggagaaattagaaccagcgttctaaattaaggggagcagatgtccttgttttgctcgcgag

SEQ ID NO: 223660 - DNA, 122 bp, Homo sapiens
aaaggaattccggagaggtgggaactgatggctcccaggcttctggcttgggtgagtgggcgaattgtggtgccaccagataaaataaagcaggagtgtgtcttgaggaaatgaggaattct

SEQ ID NO: 223661 - DNA, 122 bp, Homo sapiens
gaaaaaaaaagaagaaaccttttttaaggctctttggtccctttgggagagcactgagtccggctcttagaacacccaaggaagacccctcagttcgcccctgactccaggtctcactgcgc

SEQ ID NO: 223662 - DNA, 122 bp, Homo sapiens
accaactccggccgtgagacttccgggttgtgttatcgcgagaactgtaactgactttgccgctgaggggcggggttgcaagagaaacccagcgaagaggagaggcggagccgggccgggca

SEQ ID NO: 223663 - DNA, 122 bp, Homo sapiens
agaacagcattttactgtgagctcaggactctactgcatcagcaacctcgccagactgcacgctccctgagggcacggccttcaccttctgcttccttggtagggtggtgcatttggatcct

SEQ ID NO: 223664 - DNA, 122 bp, Homo sapiens
aagagtcttcttcaaactgattttatttaaaaatgttactggcaccatcactaccagcatcgtcatcatgattaacattaaaattaaatcttgtttggataaattttcccaagaacttgcca

SEQ ID NO: 223665 - DNA, 122 bp, Homo sapiens
agcagccttttggaaaacaatccggcaagagccaggaaaatggcagctgcaggccaggtgcggtggcagtggctcatgcctgtaatcccagcactctgggaggccgagatgggtggatcacc

SEQ ID NO: 223666 - DNA, 122 bp, Homo sapiens
cagcaagctggcgtgcgagtagaggcctcttcgtgccctttggggttgcccagcctggagcggagcttgcctgcctgcctgtggagacagccctgcctatcctctgtatataggccttccgc

SEQ ID NO: 223667 - DNA, 122 bp, Homo sapiens
atttattgtattatgccatggaaagtggatgactctcatggtgcaagtgcagtctatgtccgaaagagggagtagtgaaatcacagatagcatcatggtttttctgactttttgcttctgat

SEQ ID NO: 223668 - DNA, 122 bp, Homo sapiens
tcggccgctgtagcggagctcggaaagagtggcgcagggtcgcggggccccgccagggggcgcgcctgggggccgcgcctccttccccgcccagagatgctctctgatcacccctcttttct

SEQ ID NO: 223669 - DNA, 122 bp, Homo sapiens
gccccgtaggggcccgacaagaagagggaatccctgcagaccaacagcgggctatattgacgacggtgtctgagatcggggaccgtcttttgaagagtcagtccctccttagttgcccgcct

SEQ ID NO: 223670 - DNA, 122 bp, Homo sapiens
cgccgcgacctcttaaaagctgaacttacttccctaaacttcttccacttctgggcccctcgcccaactccctccccctctaaacctccagagacggtcagccgcgtttccatggagagcgg

SEQ ID NO: 223671 - DNA, 122 bp, Homo sapiens
tatttgcaggcgctgagaaactttctcaacagtaagaaccaatcaggcgcagtgcgcaggcgccttcagtgggtcctgggtccgcctcttccgcccggtgcgggcgccgattggtccgcgtg

SEQ ID NO: 223672 - DNA, 122 bp, Homo sapiens
aattaattaattaggggcagccatggagcacagtgggctggggccaaggagggaccccagcgccgggagctttattagtacataaaatgggtgtttaaaacacacacggccacgagcgtgca

SEQ ID NO: 223673 - DNA, 122 bp, Homo sapiens
gactccaggaaaatttaagcgtagcattttgagacttccctaaggcccccttctctagtacgcaatcgcggattcaccagcttgagtcagttggcctcagttttgcttttggaggtttaagt

SEQ ID NO: 223674 - DNA, 122 bp, Homo sapiens
acaggcacagtgggacctgcttctgctcccaagccccctcacctccttcaccaaaatcaacggtggtctgattcagatggcagacttttggaaggcaggaggaattcagaggatcacatgga

SEQ ID NO: 223675 - DNA, 122 bp, Homo sapiens
aagtgttggatactgagcaagtcgcgtaacatctgagtagtcgtgaaattgaaatttcaacggtataaaggacacgacgttgtcttacagattgaaaaatgctataaaatgaagttcttact

SEQ ID NO: 223676 - DNA, 122 bp, Homo sapiens
aattccaagggaaggttcatgagcagctgttgccagggtccccagagcttccttagcttccgctcttcatggttggttgttcagttctttggattctgtgagagagcctaatatatttccaa

SEQ ID NO: 223677 - DNA, 122 bp, Homo sapiens
caggaagggtacattttattcctactcggagtcagcagaaaggactgatgtttcaggaaacgagaagtatgtgacgcgtgtccgctggatgggtgagagtttacacggcagacccgggttcc

SEQ ID NO: 223678 - DNA, 122 bp, Homo sapiens
agccttattctttaacagtatagcacaaactgcttctgcaatacaacttgatcagagttgcgtgtggcacacgtgtacctatgtgcgcgtacaggtatgtgttctgactccagtaagctctt

SEQ ID NO: 223679 - DNA, 122 bp, Homo sapiens
cgccctgccctgtgttcccgggaggcgcggtctcctggcggcaggggagtcccgggagggcgcagggcggcgcagagcctgggatccccgagggtcagggcgagccggcggccagggcgcgg

SEQ ID NO: 223680 - DNA, 122 bp, Homo sapiens
tttatcagttgaggtattaatagaccgacggaggcctacagagctgcagaggcaggatttcgagtccaggggctcctctgaggcgttggcaggggcagcgcatcagcagccgtgacactgcc

SEQ ID NO: 223681 - DNA, 122 bp, Homo sapiens
aacgtttcctccaacagtcatcgaaagcagggtcgcctttggctggcgcggcgtgagggccgcaccagggcaacagagagtggcccgctcaatgccacgtgacctgcacagccacagggttc

SEQ ID NO: 223682 - DNA, 122 bp, Homo sapiens
agagcgccggactcgctcagcagctgcagtgactgtgtgtctgtgtcatgtctgtgcagccgggggggaccgcgagccggggctgggttccgagcgggggcggggccggcgcccgcgtcggc

SEQ ID NO: 223683 - DNA, 122 bp, Homo sapiens
aacgggtgtgcagggcgcccattgggtccgcggtatgactgcagaaagagcctgggagatcgaggggcgcagagtggggccggaccaggggcgtttttagggatcccagtagttctcgtggt

SEQ ID NO: 223684 - DNA, 122 bp, Homo sapiens
ctgacccggtcggcccctggtccccggcccaccaggccaggggccccgcgggggtcccgccggccgagaggtcgcccccggagcactgcgatttgcatacagtttgcatttggcccacaccc

SEQ ID NO: 223685 - DNA, 122 bp, Homo sapiens
agtctgtgtagctcttccaggtgtcgaacgtcatccttattttcacggtcttctcaaatgcgaggttctgaaccttcacagtgcctgcaatggccttgtccttgagcacacagttctcaagg

SEQ ID NO: 223686 - DNA, 122 bp, Homo sapiens
gttcggctcggctgttcggcttggctacagggctcggctgttcggcttggctacatggctcggctgcgcggctcggctctgttcggctcggctcggctgctgggctcggctgttcggctcag

SEQ ID NO: 223687 - DNA, 122 bp, Homo sapiens
aagagaaggcatgcgttaaattgtggtcatgcggagctaagtgtctttgagacattaaatcggacacgtcctgtaggttatacaggcgccaaggaagaaaatctgcataagaacacagtttt

SEQ ID NO: 223688 - DNA, 122 bp, Homo sapiens
ctgcccacctgcacatgggggcctgtgctaggccttgtggtctgcctgccctgctcctgacgagtgagaatggctggggtgggagatccctgcctgcacgtggggcggtcctggtagaccag

SEQ ID NO: 223689 - DNA, 122 bp, Homo sapiens
gccacacggagctcaccggaggccacctggcaagcctctgtgattatctgctgcagacgccgaggcctggagtccctgagcatcgagcctccccggggagcaaatgcactcggcactcgtga

SEQ ID NO: 223690 - DNA, 122 bp, Homo sapiens
gcgccccctccaactcctgccttcgcccgcgtttctgctctgtgtggttactaggaccaacgaggagggcgttaggttagtccctgtcaccttgtcggggatcagtctgctgtgcgtgctca

SEQ ID NO: 223691 - DNA, 122 bp, Homo sapiens
tctttaaaagtaaccaaaaacagcagtcctggttatttatgacagcacttgaatcaatgccgtaagttctgatggactcacatgtgactctgttgctaaaactctcaggtggtgggatgccc

SEQ ID NO: 223692 - DNA, 122 bp, Homo sapiens
cgcggcagttcccgcccgccccctcctccggcccagcagccatcgcgcacccgccccgtgcgcccccaggacggacaatcccagccggcctccagacccaggtctgcctccgccaagtggat

SEQ ID NO: 223693 - DNA, 122 bp, Homo sapiens
ccacccccacccccccacacccacctccacccccgatcctccgagttacctgctgtgtcccgggtccacgtcatcctcagcttcctgtagaagacatttgatgtcaaactccggatcctcta

SEQ ID NO: 223694 - DNA, 122 bp, Homo sapiens
ttgtccgcactctacaagttcgcaaggcgcgggaaccccgcctctcgctgcttattggcccgaaagggctatgccgcccctcactgcccattggctgagagaaactgggggcggggccgtaa

SEQ ID NO: 223695 - DNA, 122 bp, Homo sapiens
cacttgattcagagagggtgagcataaaactatgcttagaacaaggggaaattagaattccgggcatgaggactgtcttagctcaagaaaacagtggctttttagtgttcttcattatatgg

SEQ ID NO: 223696 - DNA, 122 bp, Homo sapiens
ggctgcagagacgcccgggtcctgcacctaggaggtcccgccccgctaactcgaaaggggcgggtctcctacttgtccctggctcctgcctgctcagtgaagtgggaggcccaggtctgcag

SEQ ID NO: 223697 - DNA, 122 bp, Homo sapiens
ctgctctctgacacaattaagggataaaatctctgaaggagtgacgggaagacgatccctcgaatactgatgagtggttccctttgacaccggcagcagccttgggcccgtgacttttcctc

SEQ ID NO: 223698 - DNA, 122 bp, Homo sapiens
aggaggggcgctgggctgagggccggagaaacagaccaagagacatccgccgcgagggtgcggcgacctaacaagcggctcaggtatccccgactgctttaaagctcccgcttcctccctcc

SEQ ID NO: 223699 - DNA, 122 bp, Homo sapiens
ctgtcacccatgtcagaatgcagtggcacaatcatggctcactacagccttgacctcccccgatcgcctgagctcaagcgattgtttcatgtcagcctcttgggtagctgggactacaagca

SEQ ID NO: 223700 - DNA, 122 bp, Homo sapiens
ctgtgctttttccaaagaggctttcgagggtttccatattttaagaggaaaagggggcagcgagggaaattggagggcatggtcacgtgactgaaccctcgtgtcatacgtgaagaggagca

SEQ ID NO: 223701 - DNA, 122 bp, Homo sapiens
ggactgggtacagcgaagctgccatgaaaccagcaggctccccccctgctgcgtaacaggcggactcactttgttgtacattttgtctcatctcaacaccgaagtctgaggttcacgtgcac

SEQ ID NO: 223702 - DNA, 122 bp, Homo sapiens
cagctcacaggaagtgggcctgaatgcggagaatagcagcaattccatctgataaggccccgctaaaccccacattgacaggccccaccgcccacccgggctccaggggccaagggaggggc

SEQ ID NO: 223703 - DNA, 122 bp, Homo sapiens
tgacggagctcccgggcaccatgaggagggacgcaggtctgggtacagaggccccagctgcggacctcattcaccgcggaaaccagggacgaggagggctcggcggggccacgaaccccgcg

SEQ ID NO: 223704 - DNA, 122 bp, Homo sapiens
gcagggtggcggaacccagaggaccggacgggctcgttcagggtggcggcccggcgggggcgatgcccgccagcagagacaccgatggaaaccttgcccagttattttctttgcccagggta

SEQ ID NO: 223705 - DNA, 122 bp, Homo sapiens
cactgtcgaggacatgctgccttctgtcaccaccgtcaccactaactctgacactatcaccgaaacctttgccactgctcagaacagccccaccagtgagaccaccaccctgacctccagta

SEQ ID NO: 223706 - DNA, 122 bp, Homo sapiens
ttgtcccctcaccaagagcggggacggagcaagccttcgccacctgtctctggcacccgccgagggaagacaggccaatggaaagagggcagaggttcacaccccacccccgaaccccagcg

SEQ ID NO: 223707 - DNA, 122 bp, Homo sapiens
cgtggctatgcaaacgagagggtgccaggcgctgagcagacaatggcagccctgtgtgcccgcccagggcgtaggcctctggtatggcctgcagctctggccagagatgggggagtggtctg

SEQ ID NO: 223708 - DNA, 122 bp, Homo sapiens
cttagagaaacatcggtgagtctggcagtaccccttgtggcctgggggtggcggtggctacgaggtgaggtggaaatgggaaaaagagtgagaagtaccagtcctgtggtttgaatgccagc

SEQ ID NO: 223709 - DNA, 122 bp, Homo sapiens
aataagtatatgagccagaaactgggtcagagagattaaaaatattttattgctaaacctcgttcagcatctgaaataagcataattgtgtcaccattttacagaggaggacactcagaccc

SEQ ID NO: 223710 - DNA, 122 bp, Homo sapiens
gactacccggttcctcaggcccacggctccgaactgcccccgtggatggtgcttcgagtacgcctccaccagtgggcagtgtggtccacgaggatcaggccattctagccaacggtaggttc

SEQ ID NO: 223711 - DNA, 122 bp, Homo sapiens
aaccctgcattaccggagaaagctataatggccttccccaaggcttttgttatgccaggccgtgctgattcttctcagggcccacaccacaagcccttttttcttctaaacatataaccaga

SEQ ID NO: 223712 - DNA, 122 bp, Homo sapiens
gagcgccctctcctctcacccactaaatacagctggagggcttatggcttattctgtcttcgactgatctcttccccagggtttgaagagggatttcgttgttctccctgatcccagccttt

SEQ ID NO: 223713 - DNA, 122 bp, Homo sapiens
atagagaagaggctactcaccaaccatggcactaacttccccagccatgagagtctccaccgtctcgttgtacaggttcacgtcaatgatacctttgcgaatggtttctcctactttggcgc

SEQ ID NO: 223714 - DNA, 122 bp, Homo sapiens
ggaggagggtggatcgaaagcgccaaaaatcaatcagaaatcgtccccgtagtttgtgcgcgtgcaaaggttctcgcagctacactgccagaatagaacgtgctcctccgcttttatacccc

SEQ ID NO: 223715 - DNA, 122 bp, Homo sapiens
cctcccagtcccccgcccctcccctcaggaatccgcccagagcgccgcggacaccgcctccgccactcccgcgcccgccccttccgacttccgcccaatccgaaggcggccaccgaaaaaac

SEQ ID NO: 223716 - DNA, 122 bp, Homo sapiens
tttcaaaattatccaagtcttgaacttttgcaaccctcctttttaaagaggaaacaggttcggtgactcagtgacccacctgagatcacctagctaacaaattacaggattagggtgtgaac

SEQ ID NO: 223717 - DNA, 122 bp, Homo sapiens
agtatcgtaaagaaaaagtggttagaaacctcctactccaaaatccagggcgggaaatgccggttgggttactaagtgttgagaaacgctaaagctaagattcctggattaatggcatggag

SEQ ID NO: 223718 - DNA, 122 bp, Homo sapiens
gactttaatctggaatctaggcaacatgttagtcaccaacttgtattaagaaaccctggccgggcgcggtggctcacgcctgtaatcccagcactttgggaggccgaggcgggcggatcacg

SEQ ID NO: 223719 - DNA, 122 bp, Homo sapiens
ccttgtgcgacccagaagtgaacgactttcgcgccaagatgtgccaattctgcgaggaggcggccgcccgccggcagcagctgggctgggaggcctggctgcagtacagtttccccctgcag

SEQ ID NO: 223720 - DNA, 122 bp, Homo sapiens
ccgccgtctcggggtcacatcccaccctccagcgccccgagctgcagacacacccggaagcgcggactcccaccctgggcgcggacctctccatcgtccgtgagcacctgcgaggcgttccc

SEQ ID NO: 223721 - DNA, 122 bp, Homo sapiens
caatctgaggttgtgctgtcttctgtgaactgaggccttttcccatccaggcctggtccccgtgacaccatgtcatgatgtcagaatccctgagagctgtgacagggcttttggcagaggcc

SEQ ID NO: 223722 - DNA, 122 bp, Homo sapiens
ctgctctgcactttgtcattcacgttcatctccctccttgagtgtcacctctctctggctcgtcacggagccacggcaaagcgtcctttcccaggaacccctccccctggggaggtgagctc

SEQ ID NO: 223723 - DNA, 122 bp, Homo sapiens
ggaaacgctgcgagagccagctcgctggaaatctgccagggaaactaacttatcttggggcggcagcgccccgggtgcgttatggtgcaaggtcttggagcttcgagtcgggggtggtgggc

SEQ ID NO: 223724 - DNA, 122 bp, Homo sapiens
gccttcttcgtgaactacgtcattgcctcagcctttatcggcaacgccatggacctgctgcgcatcccaggcctgctcatgtacatgatccggctctgcctggcgcgctcggccgccgagag

SEQ ID NO: 223725 - DNA, 122 bp, Homo sapiens
aagacaagacctggagctccggctgcagagacaaaggccccgcaaaacccggaagccttccgcttcactctggctgcgtgcctgattggacggcttccagcccagcgtccctgattggataa

SEQ ID NO: 223726 - DNA, 122 bp, Homo sapiens
gagaagtatttgaacagttgtgggaggaaacgacctctcccactggctgcggagagtatgcgggtgttggtgtcatcgtgggtgcactgctttctggctgaactgtcaagttcactgtctac

SEQ ID NO: 223727 - DNA, 122 bp, Homo sapiens
gggcgttaggcgtgtcccacccacccgccgcctcccatggcacgtcgggaacaccggagccgccaacttggagactcctggtctgtgaagagccgctgacgcccgcaggaaccgggctgggc

SEQ ID NO: 223728 - DNA, 122 bp, Homo sapiens
gcccagatgccataccgtgagaaagcccagactgatgtggagaggccacagtgagaagatcgtacgaagaagaactgagtccaccaaccaaaccagcatcgactgccaaacgcgcaggcgag

SEQ ID NO: 223729 - DNA, 122 bp, Homo sapiens
cgctcttttcattcacgaaggtagtgaggcctagtggaaagccatggagagcgctctccccgccgccggcttcctgtactgggtcggcgcgggcaccgtggcctacctagccctgcgtattt

SEQ ID NO: 223730 - DNA, 122 bp, Homo sapiens
ctgaggtaggaggatcgcttgaggccaggagttgaaggctgtagtgagctatgatcatgtcgctgcactccaggctgagcaacagagtgagactctgttactaaaaaataaatagataaata

SEQ ID NO: 223731 - DNA, 122 bp, Homo sapiens
ccggtggggtccgctgcgaatactgggggtgggcagttgggactcagggccccaggccctcggggctgcggggccgcctcttccaaacgcgccttaagcggttttgcagtggctttccgccg

SEQ ID NO: 223732 - DNA, 122 bp, Homo sapiens
ctgggctgccttggagttcagatgaaaacaagttcaggaagttgatttgatgggcagcaccgaccaaaccacgacttatgaggcttgcagatgcatgtcagaattaggctgctatgaaatac

SEQ ID NO: 223733 - DNA, 122 bp, Homo sapiens
aacacgtgagacgacaggggcagagatggggtgtcccgggcaggtagcctgggtccagcacggcagccagaaagacgaggaaaacggagctggccctgggcagggcacgaggcctctgagcc

SEQ ID NO: 223734 - DNA, 122 bp, Homo sapiens
aaggcgaagggggaaaactagagctttcgccggccgggacagcgcagccgggtttcagctcgttctacggtccacgtcagaagatcgcctccggcgccgcggacgccggagaccactgtctg

SEQ ID NO: 223735 - DNA, 122 bp, Homo sapiens
aagaagcaggaagggctcgcagactattggcaggaattcttcttaaatgcagatattccccgggaggggtcaggtcactgcccagggaggaaccccccctcccccgcccgccccatgccaag

SEQ ID NO: 223736 - DNA, 122 bp, Homo sapiens
tccttcatcccccacccggggcagattcagacaagcatttattttagttcctaagccgcgcggtgctcccagcttccgcgcctctgggcggcccacacccctccccatcctctcctccgcgc

SEQ ID NO: 223737 - DNA, 122 bp, Homo sapiens
tgtgaattctgttcttctcctgggccggtggtgtgtggtgcgatgctcccctgcgatgctcgcagaggcagtgagccgccgctcccagatcgccaccagccatacaaccatgaggggaacga

SEQ ID NO: 223738 - DNA, 122 bp, Homo sapiens
gcgcgcgggagcccacgtgagggggagcccgggtgaggggccggggtggctcctggcgtccgcggtcccagccctgccttccggtgggcgtgcggcaccccgggccgtgcggttcccggaca

SEQ ID NO: 223739 - DNA, 122 bp, Homo sapiens
tggctgggatgaggctgtgggagcgaggtctgcagggcgggctccgcgggcctgtttggacggatgcagatgctctagcggatttgcttctacttcaacccctgggctgtcttaatgggatt

SEQ ID NO: 223740 - DNA, 122 bp, Homo sapiens
tgctgacggtcaggctttcgtcaggccgcagctggctcggtggctccggggcctgggggtcgatctccatgctgctgccctggctgctcttgccgctgctgctggtggacggctccttcacg

SEQ ID NO: 223741 - DNA, 122 bp, Homo sapiens
tcccctcccgtcttctgcttccttggaaagctaacagggcaggccgttaggtgcccacaacgccgggatcatgcgccgattctggaagcggggaatcggagcagtggtacaggaaacagttt

SEQ ID NO: 223742 - DNA, 122 bp, Homo sapiens
tctcagggagtgaatggagggtaaacagctgtcagcgctgtgccagcgtcccccaaaccccgtaaaatgtggttttgcaaagtttcttggaagccaggtcggtacaaatctattcctgttgc

SEQ ID NO: 223743 - DNA, 122 bp, Homo sapiens
gacacacccttcactgggtctctttcccccacatctcccccaacaatggaaggcaagcaccgctccacacgaaaataacaacacgggtgcagttctgtgcctctccttagcttctccctgcc

SEQ ID NO: 223744 - DNA, 122 bp, Homo sapiens
aggccgcctccgggaacggaagggtccaccccaccgccaggctctcaaagggtggggtggcgcctcgggtggggcgggcaggaggtgggtgaggacgggagagaaggggcgagcgggggcac

SEQ ID NO: 223745 - DNA, 122 bp, Homo sapiens
caaaagagagactgaccatgtaaaaggaaatgccctcacagatgcggcagccaaggccaccgcactgaaaggggcaatgaagctgatgggcatgctggtcagcatacatagagctgggtgag

SEQ ID NO: 223746 - DNA, 122 bp, Homo sapiens
tgctggacaagatccgggccatgcagaagctgagcacaccccagaagaagtgagggtccccgacccaggcgaacggtggctcccataggacaatcgctaccccccgacctcgtagcaacagc

SEQ ID NO: 223747 - DNA, 122 bp, Homo sapiens
taaacaaattcctggatagggacgggagtggaagatggcaatttttgcaagaaaagtgtacgttgcaaagtggcccacatcaatgaacacaatcttgggctctggatttctgacctgctttt

SEQ ID NO: 223748 - DNA, 122 bp, Homo sapiens
cacccaagtccttctcccacgcaaggaccttgacaccatctaccagcgcgggggtgggatcgaggcttgaggcagcccacctggataagcatacttcggatccccgcggtacagatcgatct

SEQ ID NO: 223749 - DNA, 122 bp, Homo sapiens
cagcctgccccgcgccgctcggcgccggaagtgagtgagcatttccggcagccatccccgcggtgctgacatcccggttgttcttctgtgccgggggtcttcctgctgtcatgaaggacgta

SEQ ID NO: 223750 - DNA, 122 bp, Homo sapiens
agaaatttaatttaaactcacccctctgtgctaaagaatgactgggacatgagatcaaagcgcgaagctctgtcctccagtggtttgcaacacctaggcacaatagggtgagagaacgcggc

SEQ ID NO: 223751 - DNA, 122 bp, Homo sapiens
acactgtcctatatacctaatgggctactgggtttcagctggacaaagtccttatagagccgtgattctcaagaagtagggggagatacttttatttgtcataactagagtggagagagtgt

SEQ ID NO: 223752 - DNA, 122 bp, Homo sapiens
ctccgactcgcccgccttggccaggaacaccagcgcctggttcagcgccgcctcgtccaccgccagcagctcctgcaccgcgtccacgcccatatagtagtagacctggggtcggggacgcg

SEQ ID NO: 223753 - DNA, 122 bp, Homo sapiens
agggtggacagccagcagtggtccaggcagcaggggctccagggctcccactgcagccatcgcagcaaggaagcggagtagaagcccagggtcccagggacagcgggatgccgggtggtcag

SEQ ID NO: 223754 - DNA, 122 bp, Homo sapiens
cctacaacgaccgcctaaaactccacacggagaaaccgttttctttctccgccacatttacgtgcaaggacgcaaacacggccatgcgccatagtctttattcccatttcttctatcagaga

SEQ ID NO: 223755 - DNA, 122 bp, Homo sapiens
acaactggataacttttgtattttctgtagagagggttttacctttttgcccagtctgatcgcgaactcctgggctcaggcgatccacttgcctaggctccaaaagtgcttggtctacaggg

SEQ ID NO: 223756 - DNA, 122 bp, Homo sapiens
aaggtgagctggagtggttggggcagagtcttatgaaggaagaagacctgagtaggacctcggtgggactgacaggctcagattagagaagcagcactctagctgtcttggaggaagaaggt

SEQ ID NO: 223757 - DNA, 122 bp, Homo sapiens
ttgtggcctttacgcgtgccacggccacatcaaaacttagttatttctagtagcaactgacgattgggagctcttaccttttggagtcccttctatcccattgaaagtgtgcgggtggtggt

SEQ ID NO: 223758 - DNA, 122 bp, Homo sapiens
taatacgaaggtagaagtcgagaggcaggaatgcaggagctgcccagcccgcaataaaggcgcgctggcagctctcccaccttccgcatcccgccccgcccgcagcagtgcgagtcctcctc

SEQ ID NO: 223759 - DNA, 122 bp, Homo sapiens
tccgggaggaggaggcggggacttgcgctcagggctggcgggaggggacccggcgcggggcggggaacgcggcccgagtaaggcgcccgcgggcacgcgcccactcttgccggccgccggcg

SEQ ID NO: 223760 - DNA, 122 bp, Homo sapiens
gcactcttctggatgctggactgactgtgtcaccaaacaagacaggcaagctccctgcttcgtggtgctcacatgctagggaatgtggccattcaggtgacccaaagacgtattgaagctgg

SEQ ID NO: 223761 - DNA, 122 bp, Homo sapiens
gggtcacggaggcgcacgcagtgaagccgaccggctggcgccagaggacgggcagggaagcggggataggtgccatcttaactaagggcaaagcatccgtgcttaagccaagcaaaaataag

SEQ ID NO: 223762 - DNA, 122 bp, Homo sapiens
ccgtgggcttcgatgtattcaaatgactcaggggccactccggccgactggtacaacgagcggatgagctgctcctggatatcccctgaggggaaggtcacgcctgcggagggctcggctca

SEQ ID NO: 223763 - DNA, 122 bp, Homo sapiens
cagcctccatgctcggccctaaggacgccacggcacacactcagtatctgaacacttgaacggctgagcagatgtaaatgaaaccgctcagactccggcagatcccagagagggcgatgtgt

SEQ ID NO: 223764 - DNA, 122 bp, Homo sapiens
ttaggtagctcgcttagacctcgatgtgaaaacctttctggcaggtaaccggaaagacaacgcccacactccatttgtgggagggatggggaaaatctcaatccaatttaacagattatcag

SEQ ID NO: 223765 - DNA, 122 bp, Homo sapiens
ttgtttgggaagaacaagttctggagatggatggtggtaatggttccacaacaatgtgaacgtacttaatgctacccaagggtatgcttaagatggtaaattttatgttatgtacatgttac

SEQ ID NO: 223766 - DNA, 122 bp, Homo sapiens
aaccttcctgggttcaccccggtgcaacggtttgtgtcatgcatcaacttggctgggccacggcgcccggtttggtcaaacgcccatctggatgttgtcgtggacagctgtgtagatgtgat

SEQ ID NO: 223767 - DNA, 122 bp, Homo sapiens
agtcacaagaccatcagtgcaaatcaggccacagccctccgtgcagaagcgcttcccacgcgttcactcctgtgcccagatggcatgcagaaccttgcggctcccaggcccaaccgcgcagg

SEQ ID NO: 223768 - DNA, 122 bp, Homo sapiens
cgagcgggggcttccagcactggggcggcatgccctgcccctgcagcatgtgccaggtgccgccgccgcaccaccacgtgtcggctatgggcgccggcagcctgccgcgcctcacctccgac

SEQ ID NO: 223769 - DNA, 122 bp, Homo sapiens
ttggtaccttactctaatttagttcagctctcagtgagacatccccctttaaaaacacatcgcctgaccatgttttatattccaaatataattgtattgggtagtgtgggtgttacagaaat

SEQ ID NO: 223770 - DNA, 122 bp, Homo sapiens
acccgaccttcctctctgtcctcccctcccacctgcccctcaattcccaggagactcttccggtgtaactctgatggcctcctctgggtatgtcctccaggcggagctctccccctcaactg

SEQ ID NO: 223771 - DNA, 122 bp, Homo sapiens
ctcagtgccgcccactgagggtgcgtatgtgccgggcaagcccactctggtgtgctccagcgcgttggggagctggtcgaactcacagcagaggcggcagagggtgtgctctagcgagggcc

SEQ ID NO: 223772 - DNA, 122 bp, Homo sapiens
gcataggcagctgatgtagagtctgctctcactggctcataggtattaaaaaatcagccccgtcagagctcagcacaaaaataagtaggtgtaaaaagcctccagtagatgtaggctctgct

SEQ ID NO: 223773 - DNA, 122 bp, Homo sapiens
cacttagactttctcggttttcatgaaactcacaatctacctcaggcgctcaaaggcactcggcctctcaggtctgaggcaccacagagaggcttccttgggcacagttgcttgctggtcaa

SEQ ID NO: 223774 - DNA, 122 bp, Homo sapiens
cctccttcctgggcctttgaggatttaagtggacgctggacatgactctccagaccttcccgggtcctcactgaggctaacaccgattgggggcggtgggggaaatgaacctacggggtgtt

SEQ ID NO: 223775 - DNA, 122 bp, Homo sapiens
tcgcggcggtggaaggcacgcaaaagggcgaaccgagacgactccaggacgctgaggcagcgcaggccccacccggccccgccctgccccgccctgtcccggccggctttccagtactagtc

SEQ ID NO: 223776 - DNA, 122 bp, Homo sapiens
cagggagggcggcgcgggcgcggtccggggccccgagggcggaggccggcggcaggtgcgcggcgtggactacaagtcccagcatgcccggccgccctgacccagcccccgccgccgcttaa

SEQ ID NO: 223777 - DNA, 122 bp, Homo sapiens
gaagttggcagatacaatcatcttttaggagagaagatacctttgtcactcctcatctcccgaccatcaggtcttctagggatggaggagaaactgttagggcaatgaaggaggaagaaaat

SEQ ID NO: 223778 - DNA, 122 bp, Homo sapiens
agggggccggggtgggggggcactccctaaaaacctggcacggagacacccagggaaggacgcgaggggagcagggagcgcgggagcctcatgcaggtgtgcgtttcacacgggggggccaa

SEQ ID NO: 223779 - DNA, 122 bp, Homo sapiens
agtacagggtgctgtgagactccttagaatccaggggactcaggtgagatttttcgtggccgtaagttcattcatttactcccttattcattcaataaatattgctgcatacctacactttt

SEQ ID NO: 223780 - DNA, 122 bp, Homo sapiens
cagagaaggtttttagtgcaaaaacatgaaattgtgtcccagcccaccccttctagcacacgcattgatcagttttgttccatgctggccgggggttatttggctatattttgggcctccag

SEQ ID NO: 223781 - DNA, 122 bp, Homo sapiens
ctagggcatattggtccgtagcagggcagttggggcaataccgcgatgcttggggtgggccgggggctgccaagaggagcacccccggccgtccagcccgctgggcactagctcaggctctt

SEQ ID NO: 223782 - DNA, 122 bp, Homo sapiens
acatacaatcgggtcttcttgcttgaatagcatttgtcaacaagaacatggaagtgaaaacgcagcagtcaaataatgtagacatgcattctggacctcttcataaataggcataaggaaaa

SEQ ID NO: 223783 - DNA, 122 bp, Homo sapiens
cactctgcccccagaactgttgggatggagaagagtgtactacattcccatgtgtgggaccgctatcccaccagcgagatcaagttaaaggtagactgagagggttcaggaaggcggggaag

SEQ ID NO: 223784 - DNA, 122 bp, Homo sapiens
ggcttcgggcgcctcgctcacgtgccctttgctctacagggaggagccggaaggggcgggcggcagcaaaagcccacggccccaaaggccccgaagcccaccgcggcgcccctagcctgccc

SEQ ID NO: 223785 - DNA, 122 bp, Homo sapiens
gacccgcacacggcctccagctgctggttcaactcatcgctgagctggggggcagggggtcgggaggacagttataaggtgccgggagggggtggaagtccctggggtgctctgccttaggg

SEQ ID NO: 223786 - DNA, 122 bp, Homo sapiens
gccccatcgtcttctcgtagcagcagctgtgcctcatccatgcggaatcctctgggaacgcgcggggccgcgaggccgtgtgcacagacccgagtgaccgcgcagtctcatagcggctctcc

SEQ ID NO: 223787 - DNA, 122 bp, Homo sapiens
aaattcgggccttaacgagagggtgcccccttcagcgcatgcgcaaggaggcccgctgaacgctcacctggactgtggtatttacactctaggactctaggtcatagagtatttgttaaatc

SEQ ID NO: 223788 - DNA, 122 bp, Homo sapiens
gggcatccagccccggatctcgaacgccctcctcgcccctcgccccgcgtagcccggctgcgctccccgctccccgcccggcgtccacctctcgagcctgacagccccgccgcccgcgcagg

SEQ ID NO: 223789 - DNA, 122 bp, Homo sapiens
atgggtgcggttactatggcaacagagcaaccggaagcggaagactgccggtttccttgtcgcaagaaatctgttaggaacaaaaagggaccactctcgtcagtctctcaatttcagcttga

SEQ ID NO: 223790 - DNA, 122 bp, Homo sapiens
gttgtcccacggcccggccacgcgcgcaggtttggttccacacgggcggtccagagggctcggaacgggcccactggtgtcttcgagaaatctctaccaggcgcgaacacgcggtggtttca

SEQ ID NO: 223791 - DNA, 122 bp, Homo sapiens
gttgtctacccacaggtacagctggtgcagcgcctcctcgtccacgctgctcgccattggcgtcctcacggcctggccgccccagcggtgccgggtcccgccccagcctcacgacccttcag

SEQ ID NO: 223792 - DNA, 122 bp, Homo sapiens
aaggcaacctcgggcccaggctgtgaccttcccatgaaaagaaccagaaattctgagaaccgagtttataacctgcacattctgcacatgtatcccggaacttaaagtaaaaaaaaacaaaa

SEQ ID NO: 223793 - DNA, 122 bp, Homo sapiens
actgattgggagccattctggcagccctgagatgctcatgccccttataagcgtgcgccccgccctgtctttatgacacctttatttatgccacatttatttggctcgggtccagatctgct

SEQ ID NO: 223794 - DNA, 122 bp, Homo sapiens
ccgacctggccggcccccgtgaccgccctccctgccgagggggcacctgtccgggtggtccgcagcctgcacacggtaggtgcaccctgggcaggtgcttcccccgcaggagcccctccggc

SEQ ID NO: 223795 - DNA, 122 bp, Homo sapiens
tctagggtccgcgcacctggacgtcccccaccctcctccgaggggcccctcggcgctccccgacccgtcttgaccctgtgggcggctctctttgatctggccgcctccccgccctcagtccc

SEQ ID NO: 223796 - DNA, 122 bp, Homo sapiens
ccccgaggctaggcgacgcccgtcgcaactccaggccaccgagtgcaccttggcgctgtgcgccaggaactcgcgcgtcttgctgtggccccggaacagctcctgcatcccaagcacgtagc

SEQ ID NO: 223797 - DNA, 122 bp, Homo sapiens
ttctattagatcaccgaggtctttaagaactgcatcttttacattgcctcgtcgtgcctccgggcgggcaagacagtgtaaaatcttggagaaggcctgtccaaaggcggagtgagacaact

SEQ ID NO: 223798 - DNA, 122 bp, Homo sapiens
gctgaccccacccagtcgggggttggccatgttttcagggtgccggctacaacgggtggacgagcgggaggcagaacgcgcagaacctggatctgaaccgaaatttcccggacctgacgtcc

SEQ ID NO: 223799 - DNA, 122 bp, Homo sapiens
cggggaaggcggggactgcggggcagccactctcagagacccccgtccatcagggacccccgtccagcccagtgtggcctgacacctgccaggcccccttgcagctctgtctctggtgggac

SEQ ID NO: 223800 - DNA, 122 bp, Homo sapiens
cagttatagtggagagacctgtaatcacccttatatctgaaaggactaaaacccgtagagcgattcatgtagcaagcatcacccgtcaagagctgtgacctttggcagaggtatacaatcaa

SEQ ID NO: 223801 - DNA, 122 bp, Homo sapiens
aggtgcctgatgagagaactcatttccctctcaaaaataccgtgagttattttcagtaggcgaaaagttctcagataaaactgtccgttttacatccgtatccccctgtgtaggtaggttct

SEQ ID NO: 223802 - DNA, 122 bp, Homo sapiens
aatgctacgggtgcgcagcctggacaagctggaccagggccgtctagtggacctggtcaacgccagcttcggcaagaagctcagggacgactacctggcctcgctgcgcccgcggctgcact

SEQ ID NO: 223803 - DNA, 122 bp, Homo sapiens
aggcgattaatgacttctagtcttttgttccagctagtgaacattggagtagaagggagacgtcctcctgcattgctagataaccacgtaaaaggttggctagcatagcttcccatcagagg

SEQ ID NO: 223804 - DNA, 122 bp, Homo sapiens
ctaggcctgcaggtcccaatgtagccccctcccctcctccagaggcccctccaaccgccccgctcatttgtgatttcaggaggatttgatgaagatgttaaagcgaaagtggagaaccttct

SEQ ID NO: 223805 - DNA, 122 bp, Homo sapiens
ccagaccctgaataaaggtttttttttttttcccaccgacctcaccttcgggtccccagccgcatcgccccctgccctgtcagaagcgacttcgggagtcctcgcagccccgcgtaattatt

SEQ ID NO: 223806 - DNA, 122 bp, Homo sapiens
gcagaaagcatcagtgtggtcccgaggctccctctgttttccttgccatggagtccccagcgccttgtgcctgtttccatttccctctctctttgaaaagtagaaatcagtggtttcttgac

SEQ ID NO: 223807 - DNA, 122 bp, Homo sapiens
ttttacggtccacattcttaaccattaggacgtatggccctaacgttttcagttgcatgccgagggcagtgtacaccaattaagcaaggaagacagctgtggaaaccagcgttgcaggacac

SEQ ID NO: 223808 - DNA, 122 bp, Homo sapiens
ctgcctataatcccacttgcttaggaggttgaggagggaggatcgcttgagccctggaggcggaggctgctgtccagcctgggcgacagagcaagactcggtctcaaatagaaaacaaaaca

SEQ ID NO: 223809 - DNA, 122 bp, Homo sapiens
catttggtagtggtgccggagacggacccctttagatttcggggcggctgaggagcgcggcggctgctctgtggctgagtgaggggggtgggcggaatggcgggggaagggaaggtgactgt

SEQ ID NO: 223810 - DNA, 122 bp, Homo sapiens
ggctgtgcgcaagcgtctgcgcgcgtattggggcaatgtgagctctgggggctggacttccggcgttgggactgtcacttggctgctcgcgtcaggccacaccggtggtctgggctgtggcg

SEQ ID NO: 223811 - DNA, 122 bp, Homo sapiens
tccagacttgctagttgtccttgggtcttggtaacattctgctcattaacttcaggaagacgtccaggagtaaagatgcatttgaaagtggctgaaaatagtttgtaaagctcagctttcct

SEQ ID NO: 223812 - DNA, 122 bp, Homo sapiens
tcaaagtgcctggagctcacctgggtgtgtttgtgaggccctttccctctctttaccccgcggaggagtccgacctggaagcctcctgctggacttctctactggactgagtgcccgggagt

SEQ ID NO: 223813 - DNA, 122 bp, Homo sapiens
gggccctgagcaaagcctagacccaggtgccagctgcccctgctgcatccttaggcccgtcgccgagtcactgagccagcatcaaagtggggaaagttgcccccagactctaaggcggtaga

SEQ ID NO: 223814 - DNA, 122 bp, Homo sapiens
cctgggacacggggtctccaggggcctgggctggggccggctgcaggctgcaggctgcctcgcgcggtgccggagtcctcggccaccgtccctgcccccgctcctgccgtggcttcggcctc

SEQ ID NO: 223815 - DNA, 122 bp, Homo sapiens
tactttataaaccatttttaaaactttttgactcttaacaactcagcttaaaacacaacacgaatacattgtgcagctctacaaagatattttatttgtataatcttattttataagcttta

SEQ ID NO: 223816 - DNA, 122 bp, Homo sapiens
cagctcttaaggcggacacctggagttgttcattgcgtggctggagttgttcattcctcccggtgggctcgtggtctcgctggcttcaagagcgaggctgcagaccttcgtggtgagtgtta

SEQ ID NO: 223817 - DNA, 122 bp, Homo sapiens
caggaagggagccattgcccagtggtccatatctccaccacatcccctgcttgagcccagcgctgcatgtccctcccaagaagtccagaatgcctgcaaattgctgtaattttataccatgt

SEQ ID NO: 223818 - DNA, 122 bp, Homo sapiens
ggcccggcatggtggcttgcgcctggggtcccagcgactcgggaggttgagcgggacggacggcttgagctcaggccttccaaacaagcctgggcacatagcgaaaactcgtctctccaaaa

SEQ ID NO: 223819 - DNA, 122 bp, Homo sapiens
caatatttttcatttcacgccagaaagttctcagctccttaatagatttattcttttaaacgaggttgttttcagatatatttcattacatacagggatgctgaggtcataagaattagaag

SEQ ID NO: 223820 - DNA, 122 bp, Homo sapiens
actagacacaaaaagaagttccagccgattcagagaagcagtccagtcagcacagcagctcgcggttttcccaggttcatcttgacgcatcctgagctacttaacttcggttcctatcccac

SEQ ID NO: 223821 - DNA, 122 bp, Homo sapiens
cgcgcccctgtagccccaacgctttgaggctgaggcgggaggatctcgaacccaggacttcgcgccactgcactccaacctgaacgagtgagcggaccctgtctcataaaaaaagaaaaaag

SEQ ID NO: 223822 - DNA, 122 bp, Homo sapiens
cctccacggacaggttggccaacagtgggatggggaccaggccctggtcacagccaccgtcgcaaggagtggccggcgggaagcaggtcaggttctggcaggggccctgaggcgggcagctg

SEQ ID NO: 223823 - DNA, 122 bp, Homo sapiens
gctactttaaggatatattactttatacattttctgctttcaaaaaaatggcactgggcgcggtgactcacgcctataatcccagcactttgggagcccaaggcgggtggattacttgaggc

SEQ ID NO: 223824 - DNA, 122 bp, Homo sapiens
caagtgcaagctatggaagtactcggaggaggaaaaagtgtgctttacccagcaagaaggcgccacttgaggaaacaaaaacagcagactctggggcaaggaagattggggagggttgagag

SEQ ID NO: 223825 - DNA, 122 bp, Homo sapiens
gacagacggtgaaactgaggtccagagccggacatccaccgcctgcggagggaacgagaacgcggcgcgtcctgccttgcgggccgagcggcgccagagccgcctcctcccgccccccgcgc

SEQ ID NO: 223826 - DNA, 122 bp, Homo sapiens
gcccgggccttctctttctcttgtctctctcagactaagttatagtctccacagcttcagcgacagcacttaggagcgtcttgaaggctggtgccttcccttccacttcctcgtacctacac

SEQ ID NO: 223827 - DNA, 122 bp, Homo sapiens
ctgaagcggcagaggggggcaccccgggtgggcggaggggggatccccacggggtcggggcggcaagaggacaccccgacagcctctgcaatgtccggggcccaacttccagagcaacatgt

SEQ ID NO: 223828 - DNA, 122 bp, Homo sapiens
caagagccaggcaaagcgaaaccaagccctggaagcagatccggtgcgggtgacagccggcgccacccctgcccccatccctgtgaaaaagaggcgactgcgcggcgaggggtccccgtacc

SEQ ID NO: 223829 - DNA, 122 bp, Homo sapiens
agcgtgtccggctggtgtgcagtggtggcccacggtgttggtggggtttgctggtttcagcgtgtccggctagtgtgcagtggtggcccatggtgttttactttgcgattccctaatgagag

SEQ ID NO: 223830 - DNA, 122 bp, Homo sapiens
cctctggagaaacctacctcaaaggtcactgtcattgcctcactcctggcagtggcctttcgctgcccatcagagcacgcccatgtcctcagctggtgtctccagctccagcttcaacaagg

SEQ ID NO: 223831 - DNA, 122 bp, Homo sapiens
ccgaatcgcggaatgtaggtgctcataagctggagacccacggaaagaacctagaagctccgagcggttgcagacagcactgcattgagccaacgactcctgctctactgatggtgattcca

SEQ ID NO: 223832 - DNA, 122 bp, Homo sapiens
catgttgagctgttgctgaactttacgacacgattgggagatgaactgaagttagttaagcgaaccatttaaataaacgatcagccttagcattctggggaagtcattgggcctaaagaaga

SEQ ID NO: 223833 - DNA, 122 bp, Homo sapiens
gcactcccaggctccaggtcctctgtagaagagggcattgtcccggtagggcaagagtcccgagcctcaggtcttcctcttcaggggccaaagcagaggctggcgagtcagggtgcttgcaa

SEQ ID NO: 223834 - DNA, 122 bp, Homo sapiens
cctttgccctaatcccagcaaaggacacagacacaggatgggcgggaacgcaagcaccctcgcatgggcctcctctccccaaagggccactccaaggcgtgaggtacagcccgccctgccgg

SEQ ID NO: 223835 - DNA, 122 bp, Homo sapiens
ccggcttgcctatgggtgccctggggagagcatcacttctggctcggagggtttcgggagcgccttctccagctcaagcactccttttgtcgtttatgaggtgaacgcattatcagctctgt

SEQ ID NO: 223836 - DNA, 122 bp, Homo sapiens
ccatgcacgttattcgtctgctgcctgggccatgtctagataccaaagcatgctgtgggccgtaaggtacaggcccatgagctccctgaaggcagctcccaggttttgtgcctttgttatat

SEQ ID NO: 223837 - DNA, 122 bp, Homo sapiens
ccaacaacttcctgctgcgaagcagcggggaatcaaagcgtttgagagccttttcacacccgagagtggtgcagggcctaattaaatggccctcatatcctgcagcctggtggaggccgcat

SEQ ID NO: 223838 - DNA, 122 bp, Homo sapiens
ctttttatctcgtggggtggctaccggtgggggcggggcaccttccccttctttatggcgcggactttccggttccaccgaccgccttctgctccccaagggctgccacagcagtagtcatt

SEQ ID NO: 223839 - DNA, 122 bp, Homo sapiens
ggcgggacccgccccacagactccaacttcccctccaaaccccgaagtgaaacccgccaccgggttacccccacaagggggccgctgcgagaagttcacccacccccgaaaaaataattaaa

SEQ ID NO: 223840 - DNA, 122 bp, Homo sapiens
caaacatagggtgaccaacctgtcctagttcacccatgactgaggggtttcccagaatgtcggacttgcaccaacatcaggacagtcctggaaaccaccaacaaaaaatatatatcataaag

SEQ ID NO: 223841 - DNA, 122 bp, Homo sapiens
cactctccgtagacagctctgcagggaagtctgtgacaacctggccagacatagggctcacgatctgatcagagtcatggcaccccagactctgctgcctgtcctggttctctgtgtgctgc

SEQ ID NO: 223842 - DNA, 122 bp, Homo sapiens
ttcagatttaaatcttgcccaactcaaaagcaagcgcacaggaaacacgaacctcgccgccgtgagagcagcctgagtgagccagcactcaccaaggaaagggctgcaggttcgcttgagag

SEQ ID NO: 223843 - DNA, 122 bp, Homo sapiens
tgtcctctcaacttggcagggggcagagttcttcccttttctctctctccatgccctaaccgctcctttcaattccccaactcactttctgtgttcacagctttcttcccttttcctttccc

SEQ ID NO: 223844 - DNA, 122 bp, Homo sapiens
gcccgctggcccctccgtagctccggggtgcccagctgagtcaggtgcggacgcagatagcgcaaggcctgaccccgagcggccggaggccgggaccgccccgcaagcgcgctcacctcggc

SEQ ID NO: 223845 - DNA, 122 bp, Homo sapiens
gcagcttcaagaaggaacaggatcccgaggcctggacgctggaccctacaccgccaccctcgtcccagcccgctgcaggccgcagttcctcgggaatggagtagttttagattccaggtgat

SEQ ID NO: 223846 - DNA, 122 bp, Homo sapiens
aaaactcctgcccaaaattggtgatgattatggtttcttattatccctgtcactgagttacgagtcagagtcaagaacaggaacaaagcataaatatgaggtcccaattaaataattaaata

SEQ ID NO: 223847 - DNA, 122 bp, Homo sapiens
caaactgtaagcagacgcgttttcttccttagttgttttcaaagttcgttgcttcccgcccgtttttcactggaggaaattaaacgtttttaataaccaggtctaactgaacctttctaaac

SEQ ID NO: 223848 - DNA, 122 bp, Homo sapiens
cgtccaggactccaggaggggtgaacgcagggatccagggccctgtcaaactccatgccacggggcgtgttaagaggcgttcctcacgtcaggacgcctgcgttccttacggctctcccgct

SEQ ID NO: 223849 - DNA, 122 bp, Homo sapiens
ccataaggcggttttctcctatctcagtaaatcgaatgtacgatcaatcgggttttacaccgaaacattccattcccagggatgagcaggagacagatgctttcctcttatctcaactgcaa

SEQ ID NO: 223850 - DNA, 122 bp, Homo sapiens
ttggataaggggccaactctccgtgtccaaacatttagagaactgcctgtgagtgtacaccgttgtaatcttattgggagccctttgtcgaattctgtattttactttgatgctttttgagt

SEQ ID NO: 223851 - DNA, 122 bp, Homo sapiens
tctatgactgctctgctgccttttttttttttttaacagcagctggtttggagtctcccacgtattgcctgaggtggtttggtggtaaccagctaacaaaaatcctttcattttaggtgcct

SEQ ID NO: 223852 - DNA, 122 bp, Homo sapiens
caaatggcacttgagcggtggatgcccactcgcctggaagggttaattttcatgtagtcccgggagggggaggggtattataaaaagccacagacaaacggaggtgccaggaccccgggacg

SEQ ID NO: 223853 - DNA, 122 bp, Homo sapiens
accgtgaatcaccggcccgcggtgccgccggcctggagcccggcgagtggccacggcgtccgcagagcgaaacctgccccgcaggccccgaaatagcttgttgtggaaacacttggggataa

SEQ ID NO: 223854 - DNA, 122 bp, Homo sapiens
ggtttcgccatgttggccaggctggtttctcaatcttaaatcaccccccccaccacccgccgactcctcccaggcatggtggtgggagcattggtctcttactattgacaacgcctccagaa

SEQ ID NO: 223855 - DNA, 122 bp, Homo sapiens
gtgaaaaataacccaaagtcgaaacattagaattaagagtgacccaggaagtggctaaaccgaaaagaacctcaggatctttcttgtacttacataatcagtcacatgatgtcgctctacac

SEQ ID NO: 223856 - DNA, 122 bp, Homo sapiens
gctctgttcctcgggttcagcaaacgcccgggcgaaagcaatcttaacattctgggctcccggcacccagaccttgggctgatgccccttgctagtgggtcagctctttagaaaatatattc

SEQ ID NO: 223857 - DNA, 122 bp, Homo sapiens
ggccttgagctgcttgtagtctgggacggggacctcgaacaggcccccggacttggacagcgcctccatgatgccttccatggcggagatgctcttttgttgctaggggcggcgagggggcc

SEQ ID NO: 223858 - DNA, 122 bp, Homo sapiens
accctgtctacactacctgcctggccagtagatccatgctatctacactacctgcctggccggcagatccactctgtctacactgcctgcttgtccagcaggtccaccctgtctacactacc

SEQ ID NO: 223859 - DNA, 122 bp, Homo sapiens
agcttcggtttgatggtgttgcgtttagcttgcgtgactccatctgggtttggtctggtccgttggggcctcttgcgggagctcagtccaaaacaatggcctcttataattttgtttaaaaa

SEQ ID NO: 223860 - DNA, 122 bp, Homo sapiens
ttctccacctaccaccctccccccccaccccacctcctccttctcctccccctcctcctccgaaccaccgaagtaccgagggtgagacacagagactcacaacaacatggctgccaccgccg

SEQ ID NO: 223861 - DNA, 122 bp, Homo sapiens
ctctctacggcccagctgcccactggaggtcgctgctgcacccaaactttgcaaggaattcggtccagaggattacggcgaagaggtaaaagcgaccctcagtttcccccagtcctgctcat

SEQ ID NO: 223862 - DNA, 122 bp, Homo sapiens
aaggtgggaccccccaggctccccttcttccctggcctctggaaaatccagctgggaggacgcaggggcgggggcagatcccggctgggccggcgcctcctgcagcggctgtcatggcggcc

SEQ ID NO: 223863 - DNA, 122 bp, Homo sapiens
gtccgcgcctgtcaatcttgggtgctgtcggccgacggaagtgacgatgggggcggtgggcggatgcctacccgagagaccaggggagctaagtgattgatggagcttccggaagtcttggc

SEQ ID NO: 223864 - DNA, 122 bp, Homo sapiens
ggctcgcggggtgggggtggccgggggcggtggccgggatcggtggacagctgccgggcgcgtccctcccagactgggctcggctgagcgtgtgcggagcgagacctgggcaaccggggcgt

SEQ ID NO: 223865 - DNA, 122 bp, Homo sapiens
ccccagcaagccaagcccaagctcatccccgcgtctgcctcagcggcaggccagtgaaggcgttttcctagcctggagatgggaaaatatgcttggcagagacaggaatgctgtgtgcttgt

SEQ ID NO: 223866 - DNA, 122 bp, Homo sapiens
cctcactgccctgggccggtgggccggctggccgctccgaatgcggggccgcggggcccgcggagcccacgcccacccggaactcacgctggcccgcaagcgtcctgcgcagcaccggttcc

SEQ ID NO: 223867 - DNA, 122 bp, Homo sapiens
tggctcagatgaatgatgacggcagagggcagagagcttagaggacgcggtaccaagccccgtccctcgcccatcccaacgaaggtcttagaatacaatcaaccaactacaggaagaatttg

SEQ ID NO: 223868 - DNA, 122 bp, Homo sapiens
cttctgcccggcccccaccctttgccaccgtctgggaagtgaggagcccctctgcccggccgcccatcgtctgggaagtgagaacggcctctccttggccgccaaactgctggtaagtgagg

SEQ ID NO: 223869 - DNA, 122 bp, Homo sapiens
tggtcaagactccttcagatcttcagactttcttactgcattaatttaacaaactggaggcgtgggggatgggaggggtgatagccgatgggagggggttgagggggaaaaaaaaaggggga

SEQ ID NO: 223870 - DNA, 122 bp, Homo sapiens
gatactgaagtcgagtgtgccttcggggagccagcgagattggtcgtctaaggtatattgcggccaggcaaccatgcagaagaaaattagtcgctttcgttttaaatcttggtcgagttgta

SEQ ID NO: 223871 - DNA, 122 bp, Homo sapiens
gtgcgactgggcaagtacagaccctgcacgtccttggacgagagggactggatattgcgacgcctgggccgcagaaaaggactccaccagccaggcctccttcgcccgcccccggttcgggg

SEQ ID NO: 223872 - DNA, 122 bp, Homo sapiens
ctcccaggagtagccaattcttatacaaaacaggggtctccagggagcaccaaccaatcccgagtctacagcctcaaccatttccttgtctagctctcacacataaagccaatatttccaca

SEQ ID NO: 223873 - DNA, 122 bp, Homo sapiens
gtgccctccatctcctgcagcttgaccttaagctccttgttctggcgttccagctgctgccgagcattctcgttcttctgggcgtggctgcgctccaggttcaggtcggtgttgatctggtc

SEQ ID NO: 223874 - DNA, 122 bp, Homo sapiens
tcttccgtgatcagggccccgttggccccaactggcatttaattcccctggctgtcttttcggattcttatcactttttatgtatatgagtaaacttgagggtccaagtaagtctgcaagtt

SEQ ID NO: 223875 - DNA, 122 bp, Homo sapiens
tgtgggagctgggtatggggagcgcagcccagcctgggggatcaggggaggcttctggggcgagaagccaatgagctgagtgtaagcttcactcctggaggcttccagggaccagtcctggt

SEQ ID NO: 223876 - DNA, 122 bp, Homo sapiens
gggctcggtctcggacgactttgacacaagaagacagaggagccccctctacaaaatcttcgtgaaaatcggacctgagggcttatgcccatatagagcctgttccagccgttctgaacatg

SEQ ID NO: 223877 - DNA, 122 bp, Homo sapiens
cccatctgtcccgagcccgctgacgaggctccgccttcctttcctgtagactgctctctacggcccagctgcccactggaggtcgctgctgcacccaaactttgcaaggaattcggtccaga

SEQ ID NO: 223878 - DNA, 122 bp, Homo sapiens
gaagcggcccgaggcagctcgagttctgagatctcgctggctcttctcctctcggattttcggggtgctcccttagggaatctttcggtcccatctcagagaccccagaagggaagtgtatt

SEQ ID NO: 223879 - DNA, 122 bp, Homo sapiens
cgctgtggccccgcctccttgagtggtgcggagctttgtgatgcggagcttcgtgatgcacgccccgatgcctgcggggctataaaaacgctcgcaagcgccaagtctcctcaggagccgcc

SEQ ID NO: 223880 - DNA, 122 bp, Homo sapiens
gtgagcagatgggctggctctgggggtggagctggaactgggcggagcctggagccggggcggaaatgggtggggcctctaggtggggcggggcctggggctaaggcgggatcagagcaagg

SEQ ID NO: 223881 - DNA, 122 bp, Homo sapiens
ctgtgaggatagagaatcagtaggaagttaaagacaaggctctgggttcccacatctccccgtcttctctaatggcagttcaatttttctctgtttatctggttttttgttttttgcttttt

SEQ ID NO: 223882 - DNA, 122 bp, Homo sapiens
cacatgggtcccaggtgaatgaattctatctgccccttaaggccatcccttgattcaatccgacaaacatttcttcaacctgaactaacccaagaagatccgcatcaagggtcagattacta

SEQ ID NO: 223883 - DNA, 122 bp, Homo sapiens
gtctccctggggccaatctactgccccctgaacctcacccatcagccaggtgcctggccccgggtctgtctcttagggttacatgctcccggggctcccgcacataccccggcagatgaggg

SEQ ID NO: 223884 - DNA, 122 bp, Homo sapiens
gcgccgcgccccggccgcaccccgcgcagccagagcaagcactggagccccgccccttcccgcaccccacccgcctccggccccgcctggcccacccctggaccgcccccgccccgccccgc

SEQ ID NO: 223885 - DNA, 122 bp, Homo sapiens
ggagaggccaaagggcaaagtgatcaaggacagcgtcaccctcctgccctgcttttatttcgtcgaggtgagttggcccagtgccttggcataatgcagatcctctgggcatctcctgagcg

SEQ ID NO: 223886 - DNA, 122 bp, Homo sapiens
ttctactccattctccaattttattctttattttgtatacttctttgtgcatgcatttctcgtactgcatatgccattcttcatactctatattctattctccatattccatacttcatatt

SEQ ID NO: 223887 - DNA, 122 bp, Homo sapiens
tcctgcttcctcagtaagagttttcctctggacagtacttaggcattttctcaggctccccgccagagagcgccgccaggtcctcggaaccacctcgcgcactttagctgggcgcgcgaccc

SEQ ID NO: 223888 - DNA, 122 bp, Homo sapiens
gaggggagcagtgggcaggggcccaggggatataaatatccgaggagggcgcgcaaggaccgtcaccacccagacttggaacatgacgcacggcgccagggcacccaggccccgctgcagtc

SEQ ID NO: 223889 - DNA, 122 bp, Homo sapiens
cggcggagcgggagcagtgggacgtttccgggggtcgggtgggtagcggcgagcgctgtgcggtcagggcggggctcctgtgccctgtcggtggcgcagggagctggacgcggcccgttacc

SEQ ID NO: 223890 - DNA, 122 bp, Homo sapiens
tttagggagacattagagaagcaagtattttctctctggaggcagaagatgtttcagcatcgagaaaaccgcctggcagagagaatggtaaatggctgtccctgaggagatgtgtggagggg

SEQ ID NO: 223891 - DNA, 122 bp, Homo sapiens
ctcatgctgtgggtccggcgcaggttaaacaggcttgggcaaggctaagaagggacacagcgggggttgctgaagaagagtcaggagtttgtcctcctaagaccagggcagtttagagacat

SEQ ID NO: 223892 - DNA, 122 bp, Homo sapiens
gccggcgccggcgcttgcagacttcccgggagagaaacctccgtgcagccctggggctgacgtggatgccaccctggggtgggcattcagttttgtttgttccaaactgcagcccagcagga

SEQ ID NO: 223893 - DNA, 122 bp, Homo sapiens
ggggccgtggggctccgggtgcgggcggcggccgagtgcccacgtgggtgcaggctaggccgggctgatttccctggaaccccgcgccgcgtgcttccctgtaatgagctcccagggcccga

SEQ ID NO: 223894 - DNA, 122 bp, Homo sapiens
gagcaggcatgtagaaatgtttacaggtttatggtcctcactcttccaaatccctaacggcggcacccaacagacacataccacaatgtaaacacatacacacacacacacctgcacaccca

SEQ ID NO: 223895 - DNA, 122 bp, Homo sapiens
ggcaggatgaggatactgaccaggagagcagatgcatgaagtaaagttctagtgtgcacccgctatggggttcttaaattgttttagaataacagatctgataaaaatttaagaacccagca

SEQ ID NO: 223896 - DNA, 122 bp, Homo sapiens
ccgtggggaagcgttcgccaaggaggactggggcccttagagctgctccgtacctgggagcgccccgggccgggaaggccgctgggggctggcggggacctcgcactgggcccctggcggcg

SEQ ID NO: 223897 - DNA, 122 bp, Homo sapiens
tgcttccaagggcctgaggggccaaggaggaagcagtgcccaggccccagcccaggctcccgggatccagtaggcacttaaggcagggacaggctctcaccacaaaggctcccctgcccagc

SEQ ID NO: 223898 - DNA, 122 bp, Homo sapiens
gctggagaaggggcatccaccttgcttttgtcattcaaagaggcactgaaaacacaccatcgagtttctgaaagaaaagcttttcgggctgcctggagttctcattaattctagaccataat

SEQ ID NO: 223899 - DNA, 122 bp, Homo sapiens
gtcccctggcgcccgcgcccaccctgcctgactgggttctggcgctgttgcgcacacccccgcagactccctgcgccgtgcccccaccgcccgccttccgcggctctcccccagctccccgg

SEQ ID NO: 223900 - DNA, 122 bp, Homo sapiens
aaaaattggtagaatctaccaatctaagacatgtgctctacactgccccctggagatcctcggtggaattgagctccaaatgtctatagtggaaacatctattggctaggtgcggtggctca

SEQ ID NO: 223901 - DNA, 122 bp, Homo sapiens
atgctttttttttcccctttctcttatttgatcttaatggcttaataataatattaaagacgcttagagatggaagggatattggcattgtctcatccagttgctgagtttgcaggtgagat

SEQ ID NO: 223902 - DNA, 122 bp, Homo sapiens
ccggctacctttgttgtacacgttggtgggcagctgcacgctgctgatggaggtgttcaccggcaggttgctgaagtgagcattggactccaggaggaactcggcgcccagctccacgaagt

SEQ ID NO: 223903 - DNA, 122 bp, Homo sapiens
ccccatgcccgggagtcccgccgcttccgccgcactcctcgtcctagtttcgctctctctcgaattcatcgcatcacgtttcgacccatagatattctagcccaagagctgaggaggcggag

SEQ ID NO: 223904 - DNA, 122 bp, Homo sapiens
aacgaaccacccgcctcggcctcccaaagagctgggattacaggcgtgagccaccgcgttcggcgaaaacacacattttctaagaaactgattgctgggaaggctacagtgggtaagagctc

SEQ ID NO: 223905 - DNA, 122 bp, Homo sapiens
agggtgcgtgctccctgtgtcagcaggtcaaggggaggaatgagcagcagacatgggagacggatgagtcttttaatagaaaaacacacgtgcaacagtatcaacacacatctctcgcaatc

SEQ ID NO: 223906 - DNA, 122 bp, Homo sapiens
gttttcatttaaacacttagttcagaaaccttaaaggatttgaatatttcaaattgcacacgtcactccagcatctctgtaaaataattggaatgaaaatacttcttgcacttaaacactgc

SEQ ID NO: 223907 - DNA, 122 bp, Homo sapiens
caaagaggtggaaggaaaatgttatgctgaaaatccctttccaacaagggtgccaagcgccggtcttgaacgaagtaccctgcctaagcatcatttcctaaagcgcttgaagagcgggtgta

SEQ ID NO: 223908 - DNA, 122 bp, Homo sapiens
gagatcagggacttgggcgtggggggcggccaaaggcacccaagaggcggctctgccacccggccgtgtccctgcagattgactaccctgagatcgccgagggcatcatgccacgtcaccgc

SEQ ID NO: 223909 - DNA, 122 bp, Homo sapiens
cacccctgctctgctgctctgggctttccccgaggctttgctgcccacactcttcttgctcgtcagacccaccaaggttgcagagaaaggcagacagcagcagatggctaggaaacgaatac

SEQ ID NO: 223910 - DNA, 122 bp, Homo sapiens
aaccgctgccggggatggcggaagtgacgctctgttgcggggcagggacttgggacaggccgcgaggggaggcgcggggctctggcgctcgtggccgagcctgcccgcgacggtggtacggc

SEQ ID NO: 223911 - DNA, 122 bp, Homo sapiens
acttcaggcgatccacccatctcggcctcccatagtgctgggattacaggcatgagccaccgtgcctggcctcatgtgttacgttttaaattaattggtttaataataagagcttaaataaa

SEQ ID NO: 223912 - DNA, 122 bp, Homo sapiens
ggaatgagagtaagcgtgaggctggcggtgctggcagcagggtgggcacgtacctttcctcgcggttctgtcccacgcacacccggcccccgtgcctgggagtggggttgctgcaggagcgc

SEQ ID NO: 223913 - DNA, 122 bp, Homo sapiens
aaacaaaaaacccgtggtgcccctcccccgccccgccccactcctccgaagtccgggctgcgaagagccaagctcaaatccaagtccaagtccaagtccacgtccaagtccgcatctccaga

SEQ ID NO: 223914 - DNA, 122 bp, Homo sapiens
gttgagccttggggagtttaccgctaagatgttttcatagaaggcattggagattcactacgccccacaccccgcacacaggcagggacagagtgggttctcagcccctgcaaagacggaaa

SEQ ID NO: 223915 - DNA, 122 bp, Homo sapiens
tgcaagggtgacccattctgctggaagggcttgtgatgggagggttttgagttttcctgccgtcatttcctatcctgatagggcagagtcggtggtacattttttggactctgttttataag

SEQ ID NO: 223916 - DNA, 122 bp, Homo sapiens
cagcggcaccggggaaaggttccgaatcttccgtgccgagaagacctatgcagtgaaggccggacggtggtattttgaatttgagacggtcactgctggagacatgagggttggttggagtc

SEQ ID NO: 223917 - DNA, 122 bp, Homo sapiens
tcatggggctaggctcactacagggctgtgtcctcttgtgtcatgttgtggaccacacagcgcctgccttccctgcatctgaaggagcagcctggagggcttagggatctggaaccccattt

SEQ ID NO: 223918 - DNA, 122 bp, Homo sapiens
gtgagatggctggaggctgaaggaagctgggatgttgtggtgtcttaatcataaactgcccgaccaccaaagaaatggatcatttctgggaggtctagaaggacatacaatgagatccctta

SEQ ID NO: 223919 - DNA, 122 bp, Homo sapiens
acagctgtagccaggaggaagtggaagggcaggaactcaagccgtgttactcggtcacagcggcggatacagtggagctcaatgccctgattgtcatagatgtggagccagcggttctgagc

SEQ ID NO: 223920 - DNA, 122 bp, Homo sapiens
tgccggccagcgagcagtccaggtttcaatacacaggaaactacatctcccaggaagcaccgcagcaccggacccatctttgtgagcaactacaagtctcaagctatcctgggacctgtagt

SEQ ID NO: 223921 - DNA, 122 bp, Homo sapiens
gttcacccagagttccggaaagaaaaatggaggaaaagaagagttgcggggagagacaagcggtatccctgcaaatctgaaaactggaagaggaattggaagtaaccttttcggataccgtc

SEQ ID NO: 223922 - DNA, 122 bp, Homo sapiens
cttagtgtcctgagcatctgtgggaagctgacacagcctcactcctgcttcacttcatgccgcttcaggcgggagaaactgcaatgtcttacagatctagagcattggaaacaaccttagaa

SEQ ID NO: 223923 - DNA, 122 bp, Homo sapiens
ggggagggggcggaggccagcgctggtctggccacttgcacgaggccccagggcctgatacgcgcgccgcccctcggcagtgcggcctcccttgggccgtcccggcagggaggcggccgcct

SEQ ID NO: 223924 - DNA, 122 bp, Homo sapiens
ggaaggcagggcccagcttaaccgagagagccgagtggcctcgcccccaggattcggggccggctgcttctggagctgacccgagttccatccagacagcgctgaacactcttattaaaagg

SEQ ID NO: 223925 - DNA, 122 bp, Homo sapiens
tataattagaatcagtgaaattgaaagaacaataaaaggcaccactatgcttctgctttccgtctacactgcgtatcaagcatcttcatacctgcacaaaaggatacattttgtatatagtt

SEQ ID NO: 223926 - DNA, 122 bp, Homo sapiens
ctattgcataactgatggaaagggagctggttattcagctgaattcagtcgctagatagacgttaaagctgacagaacctggattccatggcgtttctacgctgaaatgtcctagaaatcac

SEQ ID NO: 223927 - DNA, 122 bp, Homo sapiens
attaacacacaaggcaaccaaataaattctgtcatcaacattagcataatgtgtatttcccgtcactgcactaacattaaactaaacttcaaaccacaaaaacattgtgactaacattaaaa

SEQ ID NO: 223928 - DNA, 122 bp, Homo sapiens
gtttttagttaaaaacaatgagaagctactgacagattttaagcaggggagggacaggaccgcctgcttcagtagggtctattgagctgctcctggggggcccagggctattttaatgtcga

SEQ ID NO: 223929 - DNA, 122 bp, Homo sapiens
gtctccaccagggcagaaaggacacatctgggcgccttggaaagctgttgccacgatcatcgcagagccttgccagggaaggctggtggcagggaagggcaggaagatgcaaaagagggcct

SEQ ID NO: 223930 - DNA, 122 bp, Homo sapiens
acactgaccttctgacttcttctttagatgtagcagggctgctgcgcttgcttttccttccgcctggaactctttctcttgatcttttcttagcttgcttctgtctccaggtctcagcctgg

SEQ ID NO: 223931 - DNA, 122 bp, Homo sapiens
aggaccttctgctgtcctgaatacgtccaccttgagtcaacctgacttgctgtacaatgacgcctggctctcttgatctgggactcaccggcctagtgggagaatggctcctgcattaggat

SEQ ID NO: 223932 - DNA, 122 bp, Homo sapiens
ctcacatcccagatggggcggtggggcagaggcgctccccacatctcagacgatgggcggcgggcagagacgctcctcacttcctagatgtgatggtgaccgggaagaggcgctcctcactt

SEQ ID NO: 223933 - DNA, 122 bp, Homo sapiens
cccgcagaacatggatgatcatgtcaaaatagcttacatcaacagagtgtgttacaataacgggttttcagtgaagtcatcaaataagatgccaacaaaatccttgtgagcagcataggaca

SEQ ID NO: 223934 - DNA, 122 bp, Homo sapiens
ttcttttctccttgcccgatcagctggacggccaaccgccatgtgatgtaagcctccatacgaaagcactgttgcagatagaagaagaggtggttgctgctcatgtagatctataaatatgt

SEQ ID NO: 223935 - DNA, 122 bp, Homo sapiens
gaaggcagaggagagactagatctggcatgggcagctggcatggacacagctgcagaagccgggaaggccactaaaggagactactgcagccggggtcagttgggcagagacttatgctggg

SEQ ID NO: 223936 - DNA, 122 bp, Homo sapiens
actgccctgtgtctgggagcagcccactaggcaagctgggaataatgccacagagagtgacgagcatgtgacattcctgtccctgtgcttttcttatctcaccacactcttgggtatagcgg

SEQ ID NO: 223937 - DNA, 122 bp, Homo sapiens
gggccagcatcacggcgatggcccctgagttggctcggggatcctaggacccggaaggctcggcttcatcttgcacacggcattgccgggttagggggtctccgggcctctccgcacgcacc

SEQ ID NO: 223938 - DNA, 122 bp, Homo sapiens
ccccaccgcagatgtcttggacctcatccccagttcacttttggccatgcgtttatcagtcgaacacttcctaggaatctctctgtaggctgggagtcagagccccacttccagaggcttcc

SEQ ID NO: 223939 - DNA, 122 bp, Homo sapiens
ggcctgcctaggctggacagtgcagattgcagaagtccgcggacgagaagagccgcagcacgttgaccagagggaacatgagcagcgctccgagcagcgagcccagctgcaccgccgccccg

SEQ ID NO: 223940 - DNA, 122 bp, Homo sapiens
tccctcaggcctcagggccttcctggtggaaagggaaacatttggggtatagggcaagaacgggctcgctagggcacagacatctctgctgtgggaactccttatgaaagagctgagaatga

SEQ ID NO: 223941 - DNA, 122 bp, Homo sapiens
tcatggaaaaagacaatctgtccagtccacaacagacatttattacccctaagcatggggcggcacagagctggatgctggttgtacaaaggagaaggaagaaacacgtggtcaatccccac

SEQ ID NO: 223942 - DNA, 122 bp, Homo sapiens
ccgcgcttgaaggccgtgccggaagctgcggaggagacgaccggcgccctagtgccagagcgcccggcgtacccggtgggactccccctacagcgccatctgctgttcggagcctggccagc

SEQ ID NO: 223943 - DNA, 122 bp, Homo sapiens
gggcactgaggggggcatcctgagcagtgctgacagcctctgttggtgtcccagggtgttcgggcctctgcatatttggcccccagaacccccacccaccgactggaccctgccagggcttc

SEQ ID NO: 223944 - DNA, 122 bp, Homo sapiens
caaagagaaacttgtttctaacatcttccctaagatggcaaacgggtccaagactttgtgcgtgtgtgtgtgtgtgtgtccccacctttaaacttcaaaccccagatctctgttgcttactc

SEQ ID NO: 223945 - DNA, 122 bp, Homo sapiens
gcacaatggtggctctggggctaccccagcctcccccagaccccgcagagcttagcgggacgtgggaggccctcagataaagaagtcacagcgagacaagtgagctttactctccggcccac

SEQ ID NO: 223946 - DNA, 122 bp, Homo sapiens
ttatttacgcgtcagggcttttcttgtttaataaagttatgatagctagcagtgcggtcccgggcgcctccccgtggggtttgccttcgcggcggactcgctcctctggtctacagcctttg

SEQ ID NO: 223947 - DNA, 122 bp, Homo sapiens
ctgtgttgtgcactcgaaacccacgatcagccgccccttctccccgtgccacaagacctacgcagcgagcaccaccgctgacctccatccgccgccctaactgtccccggaaccatgaggtg

SEQ ID NO: 223948 - DNA, 122 bp, Homo sapiens
ccctgttcttcagcagcagaacgacagtttgcttgatggcagcgggcgcaggtgaaaccccggcctccccgggtgacctcgccgctgagggtggcgcccgaccaacacccagtcagcaagac

SEQ ID NO: 223949 - DNA, 122 bp, Homo sapiens
atttgtcagcccttgccgaaacgttgacgcagtggtgtgttacctgccgacagcataatgcgaggcagggtccagccgttccacccggcatacaaacttatggaacagccccctttgaagag

SEQ ID NO: 223950 - DNA, 122 bp, Homo sapiens
gcccgtgccccggaacgggccagcgtccgagcgcatgcgcaacagctcccgtttcctctgcgcgtccgagtgtttcatgttttgagtcccgcccgagtgacccaagccagtaccggggtggg

SEQ ID NO: 223951 - DNA, 122 bp, Homo sapiens
ggtcaaggcaatgcgaggcacatccagcatccctgagcaagatgtgctcaaacacatgtacgctacaatgttcccataacatctgcctccatagcatcagcaactgacctaaatgcctgcct

SEQ ID NO: 223952 - DNA, 122 bp, Homo sapiens
ggccgggcgggggaggccgcggggaggtaatcggagccgcagcaccgccccggcccctcccgctctcggggcctggcattggcaaagccccgcccctcccagggacgcaagagccccgccca

SEQ ID NO: 223953 - DNA, 122 bp, Homo sapiens
ctaggggctcaggagggtgcacctgttggccaggtgtgttgacatgaaaatgctggtgtacgaaagatgttaagtggggcaggctgaggcaggcacaaaaaaaaaagccaggaggagccagg

SEQ ID NO: 223954 - DNA, 122 bp, Homo sapiens
ggagtccgaacgcatgttcactctgccttgaagcaacagctactctctaagcttcgtctccgtccaactcttcgtgtcagggacttttccctgacttcttatatatcccctctgcccatcag

SEQ ID NO: 223955 - DNA, 122 bp, Homo sapiens
tcacggcatggctgggacgaggcacccggtgtctttctggcacccggtttccatcgcacccggtttcgggcactccgtcgcttgccttctgcagagctgctaagccgctgggcacacagctg

SEQ ID NO: 223956 - DNA, 122 bp, Homo sapiens
gtccctgccctcctccccccagacacgttgcacagggagcgttaaggggaaagaacaaaacggaacacacatcctgagacacactggcttaatctggggcgaacatgcaggaatttcaaaaa

SEQ ID NO: 223957 - DNA, 122 bp, Homo sapiens
ccattttatcagggcccggggcatgcccggaaaagcaggcacatgctccctttttcacggcgtgcccacatatcacgtcatgtctgggtatgcctttctcctccctcctaggagtttgcctg

SEQ ID NO: 223958 - DNA, 122 bp, Homo sapiens
actggagaaacagtggtttttcttatagagaaagagccagaaaataccttgctcctgcagcgataacaatagtaatagttgacttctggtgcttagccagccactggattaaagtttttcaa

SEQ ID NO: 223959 - DNA, 122 bp, Homo sapiens
gaagcttcttggccagggcgctggggatccgggagcgggggccgccggcgagactgagcccgggacagcccagagctccagcgctccagcgctctgcagcccgcccagagcgcgcagaccac

SEQ ID NO: 223960 - DNA, 122 bp, Homo sapiens
ttacttaaattgtggtggtggaaagcgtacctcatctctctggcatccagttctctcatacgtaaattagaaaaaagtaactattcttaactcatagatgtaagagagaattaaatgaggta

SEQ ID NO: 223961 - DNA, 122 bp, Homo sapiens
ggactcagttctggaagtgacccctcagccttaggggtcctctaagccaggtctgcacagcgacaggctggagtgcaacgaccagggcgaactcacgaggcttcggaccagtctgggggtgt

SEQ ID NO: 223962 - DNA, 122 bp, Homo sapiens
ctttcaacgccttggttttgcctttccttgatgtttatttgaccttgcccgaggggccagcgcttttgatctgcatcaggctgccttactccactagtgttttgagacccagctacttgccg

SEQ ID NO: 223963 - DNA, 122 bp, Homo sapiens
tgggcaaggctatcttgtgattcactgctaaggatcttaagcccaccttggccctgacctcgttggaaaacgaagctccccgcagggtcccggcctctagggctgctgtgcgggcgggggtg

SEQ ID NO: 223964 - DNA, 122 bp, Homo sapiens
ccactccatttaccattttcaacccactccagtccacgggcgtcttacgaggatgctgcacggtgttgaatgggatcaaagccagtctggtcttggccatgtctaaaccacgacaccctgtg

SEQ ID NO: 223965 - DNA, 122 bp, Homo sapiens
gggtctgtcttgcatgtattacaaccagaatacagtgtttggaacctaaatctgtttgtgcgtctgcatcaaaggaacatttgcttcactgggtgataacctttgatgaaatgagatatgtc

SEQ ID NO: 223966 - DNA, 122 bp, Homo sapiens
cggatccgcagagccgggagtccgggctaggaagtccctttctcggtgggagactgaggccgccttggcggggcgggacgagactcctccgaggtcgggaaagggggccccgcagcagcccc

SEQ ID NO: 223967 - DNA, 122 bp, Homo sapiens
gcttcgcggggcacctcccctcccctactcggagccagtctgctgcgaccattacccaggcgtgccattctggccacccgatctccaggcagagctgctccctacctgtccaggaccatccc

SEQ ID NO: 223968 - DNA, 122 bp, Homo sapiens
ttagtagagatggggttttaccatgctggccaggctggtgtcaaactccttcaagtgatccgcccgccttggcctcccagtgtgctgggattacaggtgtgagccactgtgctcagcctgtt

SEQ ID NO: 223969 - DNA, 122 bp, Homo sapiens
ggtgggtaccatgtgccagctcctggagtccacagtgatccaacctcaaggggacagccccggtgaggacgtaataatgatagctaactcttattgagcacttactgtgtgcagacactgct

SEQ ID NO: 223970 - DNA, 122 bp, Homo sapiens
acagaggggaaattatgaggatgaggttaagaactgaatggggagatatgagagcaaagacggctgctgcatgagcagagatgcttcctgtggcttccctgccagggttccaagtgagcctg

SEQ ID NO: 223971 - DNA, 122 bp, Homo sapiens
gaggcccagcccgggggaggccgctttgtgtaccgcagaaagcattacgtcatttcagagcggctggtccccgacccagccctgtgggctccaagattagttttacactctctggagcagaa

SEQ ID NO: 223972 - DNA, 122 bp, Homo sapiens
gcagggctattcccgggccaggggcaccctgctgatccactcagtgctgatcacattgtacgtgagcacaggggtggtgttctccctggacatggtgctgaccaggtaccaccacattgact

SEQ ID NO: 223973 - DNA, 122 bp, Homo sapiens
gtgactcttctgcacgctcactcaaagctgatgctgagaacttgcttcctgattggtagccgggcgaatccacgtgacttggccgctaatgcccgcccaacccgctcccctattggttgaaa

SEQ ID NO: 223974 - DNA, 122 bp, Homo sapiens
tgtcttttaccagctggccattttatttgcataaggtacactgaaattcctagagacctacgaggtcattctctgctcccttgctttcctcagatgaggaaacagagctctacagaggttaa

SEQ ID NO: 223975 - DNA, 122 bp, Homo sapiens
ttaatggtgtggtgaagaggaggcgggagtttgcaaatggagagaggctgacttgcctgccggactcctacccccgatcccctctgagggcagtgctgcccctctgactgctggggactggg

SEQ ID NO: 223976 - DNA, 122 bp, Homo sapiens
ggtggttacagcaggaagtcccaactctggggtcagaattggcctcaatgacggggctcacgcaaaatgaaaacgagagtcccctgattcaaaatgtatttaaaatgtcaagacagtggcag

SEQ ID NO: 223977 - DNA, 122 bp, Homo sapiens
gacccggagctccgccctcctcccatcacggcatctcttggcttcgcagagaaaatcgagcgagtgcccaaagcaaaaccttggaagccaggaacaccctcaggctgtggaaaaaggcctat

SEQ ID NO: 223978 - DNA, 122 bp, Homo sapiens
cccaaagcaaggggagccgcggagcagctcagcgctggagagagtccgtgggaggaggcacgctggcggtgaagggcggggacccacaacccagcggccgctcacctgttccagccgccgca

SEQ ID NO: 223979 - DNA, 122 bp, Homo sapiens
tccatgcctggctgtcagactgaggtgggggagcctgcacaggtcgccgcgagagctgcacgcattctctgtgatatgagctgaacccgccaccctttccacgcagggcgtttcagctcaca

SEQ ID NO: 223980 - DNA, 122 bp, Homo sapiens
aggtgccccggcgggaaggaggtatcaggcatgcaacacaagttactgcaaagaccctgacgtgggagcccgattggcccagggtgtggccgggggagacgataggggtgaggtggggttgg

SEQ ID NO: 223981 - DNA, 122 bp, Homo sapiens
cttcccagacctaagctgccttctctccctactttcagaagatcctagttccttccttcccgagtgatacccatgaactgccagtagaggctgctatcgttccatgtgtaaggaatgaactg

SEQ ID NO: 223982 - DNA, 122 bp, Homo sapiens
cttgtgtgtcctttggggacccgcctgagccttctgtgggctgggagtgagccagacccccgggctggggaagcagggcactgcagggcaaggaaggtccctgagccagggtctccctatgc

SEQ ID NO: 223983 - DNA, 122 bp, Homo sapiens
ggctttgaagccggccagtaaggggttgtcaggcagttgactaatgctcttgatttgaatcggaggctgctgtgaaaagggatgcagcttctgctagccactgtgaacttctgaatctcact

SEQ ID NO: 223984 - DNA, 122 bp, Homo sapiens
aacttcaccgtcttcaaactccatttccatggttctgttaattctcaaggagcagcaactcgactggttctcccaggagcaggaaaaacccttgtgacatgaaacatctcaggcctgaaaag

SEQ ID NO: 223985 - DNA, 122 bp, Homo sapiens
acggggacgtgggcacgcgtgtgcagccctgtgtgcgtgtgtgccgttgggctgagtgttcgtgtgtcgggcatccatgtgtgttgtgtgcacatgcatactgtgtttgtacacactccacc

SEQ ID NO: 223986 - DNA, 122 bp, Homo sapiens
cattcttgtgcaaacgcagcctgggtaccgtgacaatagatttgtaatcactggaataaccgcactgaacgtagtgcctagcccagtgccaccacatggacatctgctctcattcccatgcc

SEQ ID NO: 223987 - DNA, 122 bp, Homo sapiens
ggcaccgggaaccccgtacagccacaccaaaccatacatccgctccaagggccggaagttcgagcgcaccagaggccgactggccagccgaggctacaaaaactatagatcctatcctctta

SEQ ID NO: 223988 - DNA, 122 bp, Homo sapiens
ttgtagtcctgcgcggcagcggggtaggtgggaaaagagatgtggcctttcctgcactgccggtttctctggcccccgggcccagcatttcggcgaaatctcccaaggtccacattctccca

SEQ ID NO: 223989 - DNA, 122 bp, Homo sapiens
ccagcgcagagaggccgcgctgccaggcgcgtggtggtccgggggtccacgtgtgagcctcgccctaggctgccaattgagagttccacctccgcccagagagaccccacctcacccctcca

SEQ ID NO: 223990 - DNA, 122 bp, Homo sapiens
ccccctcccccatcatctggtaaaactgaactccggggagacgcaccccgtgtgcccttccgactccactgccctagagtgggaagtctattatgagtttcactttgtgttactccaggcct

SEQ ID NO: 223991 - DNA, 122 bp, Homo sapiens
gtggtgggctcccttcttcactgtgcccctccctcctctggccactaggggtgggaaatacgagtgagaatccttccagatttacttccgccaatccagaggtacaggcttttaggcaaggg

SEQ ID NO: 223992 - DNA, 122 bp, Homo sapiens
gaggaggtcacttgttcaactgtcaaggttctgcagggaacgaagatctggtaccaatcacgctcctttttccttggacagaccagcctgggcttcaggcctctactgacctagacctcttt

SEQ ID NO: 223993 - DNA, 122 bp, Homo sapiens
cacttagaggatcgtgggaatgcttacggaaacacttgtcacggcgctgccagctggaatcgctgcttaagaagaggctggaaaactagggagtgcgcgatcagagacgggaggctggggag

SEQ ID NO: 223994 - DNA, 122 bp, Homo sapiens
ctgctctgtccattttagtctctacattggcaccttggtgtaaacccacagcagaggctgcgtgtcctggctgagaaacacagaagggcagcggggacggaggtggggccgtgtgcagatga

SEQ ID NO: 223995 - DNA, 122 bp, Homo sapiens
cgctgcgccgctcccgccgacgccacgggacttggaggcaggggcggggtccgaccgagccgccccgccccgcccgggccacgtgacttcacctgcttgccccgcggccccacgaaaagttg

SEQ ID NO: 223996 - DNA, 122 bp, Homo sapiens
tgttcttttttttttttaacctcccaacaacaaacgtttggccctttgacaacgcatgcacgatagcgccgtatacagctttatagtatttcattatatgagtgtgcaataattttttaaaa

SEQ ID NO: 223997 - DNA, 122 bp, Homo sapiens
tacttagagtcttcttcctagtgggtctgaccaccttcttagtctgggctaagagctggccgacattcagcagcagcaggaaccccaggcagacaatggctgggatacaggtgcttagtgac

SEQ ID NO: 223998 - DNA, 122 bp, Homo sapiens
tctctcctcttcttccccctcctcccactcccaagtccctggaagaaggaggaggggcatcggctgtctggaaggtggggagaagtcacttattttactgagcacctactatttgcggggca

SEQ ID NO: 223999 - DNA, 122 bp, Homo sapiens
tggtaactcgtgtgatagaactgatggtactagtcagccatctcacccacctcctaaaggcgcctgcccagctgtaactgccgctgagtgacctggccttggagggggcacattccacaacg

SEQ ID NO: 224000 - DNA, 122 bp, Homo sapiens
ggccgcacatggaagcccacgctggtcatcctgcggatcaaccgggctgcccgctgcgtgcgctgggcccccaacgagaacaagtttgctgtgggcagcggctctcgtgtgatctccatctg

SEQ ID NO: 224001 - DNA, 122 bp, Homo sapiens
aatagcagctgactgcaggacagccactttcaccttgcagatagagctttgttgttcgggcgtgtaaagcagaccattagcacaaagtcatttctaatctcagttgtacaatccacatggtg

SEQ ID NO: 224002 - DNA, 122 bp, Homo sapiens
caatgttgtctgtttgtaactcagctcagccacctgctagttgtttgaccttgggcaaatcgtttgtatggaaaatgctgatgttaatgctgccttacgtggttctgggggaattcaaagta

SEQ ID NO: 224003 - DNA, 122 bp, Homo sapiens
tgactacttccttctagccatagctggggccgagggctggttcacagtctggccactgggcgtcctgtggtgaaggccagatgcagccctccctgagtggctctccctcccactcagtcact

SEQ ID NO: 224004 - DNA, 122 bp, Homo sapiens
actcctatgacttttttatttcgtctctgctgggaaatgcctgcaggaaacacccagtgacgtgacacgtttttagtaactttgtggtgacatcactgtcttctctgcttactgcagctttc

SEQ ID NO: 224005 - DNA, 122 bp, Homo sapiens
gtcgtcatgtttgccagattaggaagctgaggctcagggaggttcggaaccttgccggaccgagttggcaggaggcgagacgaggctctaagccctgctcccagagctctttctcccccatc

SEQ ID NO: 224006 - DNA, 122 bp, Homo sapiens
agccaaccgccgctgcctgagcgccgcgcccgctctcgctcgcgcctaagccacgcccaccgccgctatcgccagccaacccgtgtattgcaccgcctacagacacgccccttcatctccgt

SEQ ID NO: 224007 - DNA, 122 bp, Homo sapiens
gcctagagtggaaaagtaaagagaagcaaggcctcagaacccggcccaacaaactacctacgtccgggagtcgccaaccgacgcgagtcctgcaatgccattctttcttagctttacttctc

SEQ ID NO: 224008 - DNA, 122 bp, Homo sapiens
acccaaaagccaatctgagcgaactcttgcttccctcgcctgccgggctgaacccaaaggcgcattagcccagtgcggctgcttcattcttgagctaagaccgccggcggcgtctgcgcctc

SEQ ID NO: 224009 - DNA, 122 bp, Homo sapiens
gttttattgatactgtctgcctccctctccattttagcgtgtagaatgtgcctctttcatcgcagagtccaggcagttctcagcaccttgggggctagatttccggggtttttttaatctgg

SEQ ID NO: 224010 - DNA, 122 bp, Homo sapiens
gtagccccctgtgaccccccgaagagccccaattttaccttcccctccgcctgtggtacgcgcatgggccgggtgcccaggctcactcttggcatgtgcgcccacattgccaaggtgcgagt

SEQ ID NO: 224011 - DNA, 122 bp, Homo sapiens
tgtgcccaaagtctccagaagggcgatgccaaacccactcaactttgacaaagtgtgaaacgtctgtaaaaaggagttctctgatgtgtgagaggagacggaaccgagaagaaaaggccgta

SEQ ID NO: 224012 - DNA, 122 bp, Homo sapiens
cccccgtcagctctgctgggctgcagaggaggggggacgaggtggcacagggtggctctgcggcagtgtagccgcttcgtgctgtcggtatctccacaagtccagaagctggcttcaccggg

SEQ ID NO: 224013 - DNA, 122 bp, Homo sapiens
cgtgggagcctccatcaagatcgcccctgcgtcagcggaaggtcatcatcacctggccaccggaatcccagttcaaggcccagggacggatctttgggaaactgaaagaagaaaactttttt

SEQ ID NO: 224014 - DNA, 122 bp, Homo sapiens
caagtggtcaattcactaaatccaaccacagtcacaggccgctgctttgaatttaccacgcggaaagcagcttttcctgtgcttcctgcttcccccggaagtgccttgctacgggaagtgac

SEQ ID NO: 224015 - DNA, 122 bp, Homo sapiens
tggcaaaacccaccagagaggtggggcttacagacaagtgctgggaggagcctcaggccccgcccccacactgaatgccggtcggggccaaatggttctcaaccttggggctgagtttttac

SEQ ID NO: 224016 - DNA, 122 bp, Homo sapiens
agggaaatgcaacttacaaccacaatgagatattaccttctggccgggccctgtggctcacgcccataatcccagcactttgggaggccgaggcaggtggatcacctgaggaattcgagaca

SEQ ID NO: 224017 - DNA, 122 bp, Homo sapiens
tttgcatggtaagtatggttttatctgcataattattttcttgttaattgtagggtgaaacggccttagacaaaattcttagaggcctgtaaaatgtggactgtagaatcctggttttgaat

SEQ ID NO: 224018 - DNA, 122 bp, Homo sapiens
tggtctgaatcctcacagttctgagggcacaccatgtggtctcacacctccctgcttttgcgcatgctgtgagctttgcctgaaatctttttcctgactagatcacctgagttctttagcct

SEQ ID NO: 224019 - DNA, 122 bp, Homo sapiens
gttttggtgttttggccagcttctttactgcaacctgtttcatcagcagggcctctatgacgtgtatcttgtgccgacctcctatctcgtcctgtgactcagaatgtctaaccgtctggaaa

SEQ ID NO: 224020 - DNA, 122 bp, Homo sapiens
tggaggtggtagtgtttttgaaggatttgaaaggcggtgtcttgattgtccagatgctaccgtgttggacagctaggttaataagaggtgttttctcctggacggtgccaggtcttgaggtc

SEQ ID NO: 224021 - DNA, 122 bp, Homo sapiens
acgttacgaccgtgaaatatgacaataaaatgatagccgtatggtcgcaaatttgcagcccgccgagctgcgtggggtttatcgtcactcaaacgcgcggagagctgtaaaatgtttacaga

SEQ ID NO: 224022 - DNA, 122 bp, Homo sapiens
ctcagactgagatccgccctacgtgcagttatgtggtgaaatcactgctttcctccccgccggaggcgccaaagcttggaagggagggtactcaaacctttgatgtaggcacgtttcagaag

SEQ ID NO: 224023 - DNA, 122 bp, Homo sapiens
cgaaggcacctatgagaaccttgcctcacacagctttccatgggaactggcttgcttggccgaggagtctgatttctacattctctgctgagccttcagtaagtgtgcatctctttggaggg

SEQ ID NO: 224024 - DNA, 122 bp, Homo sapiens
ctctggtctcacagtgcctgtcaacctcttgaatttctgtgtattttgaattccagtagtcgaggtcagaatctcatatatggggtctgagaaggtgccatataacattctccaggggagct

SEQ ID NO: 224025 - DNA, 122 bp, Homo sapiens
ctcccacctcccacctgcggggaactagaggccgggggacagcaaaggcggcggtggcggcggcgcttccgctctaacgggtcccagctgcggcggcgctgacggcggcgcctctcccctca

SEQ ID NO: 224026 - DNA, 122 bp, Homo sapiens
ggaggtcccgaagactgtgctgggcacagtgcaggacccagagaagcggagccatgggcccgtcctggtgagggagttaaagtccgtgcaggtgaacagaccccggcccgcgaatcaacgaa

SEQ ID NO: 224027 - DNA, 122 bp, Homo sapiens
ctgccatggcctgaggcattgtccctctaggtgggagcgtgtaggactcatgcacccccccgggaggctccaagagagtcccccatttgacctacaccccttatttcttagaaggccctagc

SEQ ID NO: 224028 - DNA, 122 bp, Homo sapiens
tctcattctgactctttacatctgtcttcctaactctctagctccacttccacatttctgcgcctccatctcttcaacatttttatcttgtgtatctctctctgccctccattcctctactg

SEQ ID NO: 224029 - DNA, 122 bp, Homo sapiens
cccagcaagaaagcagtgatcaatacagcagctgccagggtgaggaggctcccacgctgccgagaggctgggaaggagacgcgtcctgccactgggcgtcaggtatgcaaactgtggtctct

SEQ ID NO: 224030 - DNA, 122 bp, Homo sapiens
ttttagtgacaggatgagagagcccttcgtgttctgagggaccgagtgggcgaaaagcgccggagagttggagagtctgtggttcagaatgcgaggtgacaacgtgctagcagccctcgctc

SEQ ID NO: 224031 - DNA, 122 bp, Homo sapiens
ccccggggcatagcgccaggccggcagggagacctgggccggggacgcgggggctgcaggcgtgggatctggacccaggggaggccgggccgcccccctcattcccgcggcccgggtttcca

SEQ ID NO: 224032 - DNA, 122 bp, Homo sapiens
caacggtccgagaaacccggccggtgcgctgccagaacgggaatctggaagcccaggcagcggagtgaaaacccgccctgggggccacgccatccccatgctggcccacacccgctgcgtgg

SEQ ID NO: 224033 - DNA, 122 bp, Homo sapiens
ctgggctccttcctgaatccccgatcaagaagaggaaggttctctcccaaaggaagcaagcgtgaaggcagagagcacttgcacaaggctttgagctgggaatgattaacttcgagtttgtt

SEQ ID NO: 224034 - DNA, 122 bp, Homo sapiens
aaaatgggaataataatcctcactcacaagagataagaatgcatataaaagcactctacacgcagtttttgcttggttcttatgggcttcctgtaagaacctgaagggtgggcagcctcatt

SEQ ID NO: 224035 - DNA, 122 bp, Homo sapiens
gtctgtgactcagctctggccaacgtgacccaagcagaaatcgtgcaataacttctgggacgacattttcttatgaccttttctcctgccaggcgatcatgaagaccgtccctggcgcttca

SEQ ID NO: 224036 - DNA, 122 bp, Homo sapiens
aggcccctgggttcccgggctgctcctgtgaatggcattggaaggccgttccagcgcggccgctgaggcagccacttcccccggtgctgggggcggatctcaggtccctgaagtcctgtcct

SEQ ID NO: 224037 - DNA, 122 bp, Homo sapiens
cttatcggccagcctctgcggggatcttgggcgtcaggtcaccagctggctgctgggcagcgacggggcagcgctccctacacggccccgggcgagaggcgggcggggggacgcggaggatg

SEQ ID NO: 224038 - DNA, 122 bp, Homo sapiens
agaatcaacccgtctcctgcatctactccgaagtcaagagcattacaatacaatttacagcgcctttaacaactcgcaagtaaagcattaaaattcgctttaattgagaaaatattgatttt

SEQ ID NO: 224039 - DNA, 122 bp, Homo sapiens
ctgctcccgtgaaaagatggccgtcagtattctccaaaaaggctgcaaatgatgctgatgcggagggagttgccaggagcttcacccgctacaagtttaaaatacactccctcccagaattg

SEQ ID NO: 224040 - DNA, 122 bp, Homo sapiens
aagttctagacataccgggagggttggttaacctaagaaaagggaccctctttactgtgacgttaaagactaagtcaagtctcccatttcagtggtgtgtcttgtccctttctattgttaat

SEQ ID NO: 224041 - DNA, 122 bp, Homo sapiens
cccggctccgaaacttacaaagtgttggatgtcccccgttcgaactgagggactgcagaccgcctctgggtagctggatgaagcccaccccgtccccttctggtaccaaagtgcttactcct

SEQ ID NO: 224042 - DNA, 122 bp, Homo sapiens
gccagtgccctgtccatacggtacaacagcatcaataaccggccaggagtagccccgtgccgggaaaacaggccctgagaggcgagtgatacatgcaagtgaacatttgacccaaacagaca

SEQ ID NO: 224043 - DNA, 122 bp, Homo sapiens
gctcgcagagcttggcgcagtaggacgcgggcggtcctgaccgccgctccggcctctcctcgaacaccgagtcctcgaactcgccgccgaacaaccagcacccggaatccatctcgcgcccg

SEQ ID NO: 224044 - DNA, 122 bp, Homo sapiens
ggcagcggctcaaggtcatctatggctccagtgctggcttccatgctgtggatgtcgactcggggaacagctatgacatctacatccctgtgcacgtgagcttggcggggctgctgggggag

SEQ ID NO: 224045 - DNA, 122 bp, Homo sapiens
actcaaatcttttatctgattataccagctttcccgagcaccgtgtgctttcctttaagtcggacatgaaatgtgttctccaaagcgtttctggattgaagaaaatatttaagctgtctgca

SEQ ID NO: 224046 - DNA, 122 bp, Homo sapiens
aagcttctctctcaccttcgctgaggctagtggtagccttctgggcacccctccggcttgcgcagggagcaaagggaccgcggcgccacctgcgcgcaccacgcgtgaaacgtgcggacagg

SEQ ID NO: 224047 - DNA, 122 bp, Homo sapiens
gcgccgcgggcggggcactgggtgcggggcgcggggcgcggcagctggaccgttaggctgcgccttcccgccccggctccgctgcagccgggccgccccctgtgcgcgggcgacctccgggc

SEQ ID NO: 224048 - DNA, 122 bp, Homo sapiens
gctttctccctgttttctccaatcttgccggtcccccatggccccaggctgcctttgcctcgcgtgtcatcctggccccccaaagagttggagagaaaaggtttggcttttggagggacgag

SEQ ID NO: 224049 - DNA, 122 bp, Homo sapiens
gctaggacagcggaacaaccaattgacagaatgaccccgcccaggatccttaaggcctttcgagggttgtgggttttcgtgctgaggccagcagttcctgcagagcagaggtgaggtcgggc

SEQ ID NO: 224050 - DNA, 122 bp, Homo sapiens
ctgcgcccagcccccagtgtgacttcttaaaggagcacatcactggacgtgagacccacccggggcaagcctctggcctgcacagaccttgggcatcatcattcatccaacagaaattcacc

SEQ ID NO: 224051 - DNA, 122 bp, Homo sapiens
cggccaggaactgccatttcttgagtacctccctcggaccaggttgtgcccaaggccccacgtctcccagtggtaaagccggcggtgcttgctctctgtgaggcttggtgttctagcctgca

SEQ ID NO: 224052 - DNA, 122 bp, Homo sapiens
ttcccgtccccgtcaattggccgctagctctgttttgactgcctgtacaaagcgagtagacggcgggggatggggcgattagggaccggatttgggaaaggaggcagcagccccttcccctc

SEQ ID NO: 224053 - DNA, 122 bp, Homo sapiens
ggcctggattaagttttaatataaacaccagtggccttactgcccgcataaataggcctccggcctctcttcaacacctgtgtgctgctcccagcgctcatctctgttctgcccccagggta

SEQ ID NO: 224054 - DNA, 122 bp, Homo sapiens
cgcgtggcatgctgggggtgctaggtaccgaaggcagatgccgtccctttggactcgcttcgtccaacgcccccacgagtttcggtggcccttcgccccacgctataagagcagtcacttcc

SEQ ID NO: 224055 - DNA, 122 bp, Homo sapiens
caagtagccgggagcctggtgtcctctgtgaaccgggggctgcctcagtccctgaggtcccgacctcatgcatgtctgggccgtggttcccgagagcacccagtgccctgcacaccgtgggt

SEQ ID NO: 224056 - DNA, 122 bp, Homo sapiens
tctgcaagtctctttccaagtcctgttcagaggtgggatctgggcaggatgtccaggtgtcggcagcaaggtcagaggccctggctctcattccttccaatgttatgggaaaccagtttcct

SEQ ID NO: 224057 - DNA, 122 bp, Homo sapiens
ttgtgcacccagggaggccgggagattgtcctgtgatctgggtcaggtagcgcatccctccgggatctggcggacgtggttgagcagggctggccgtcaagccctctgccaacacggcccac

SEQ ID NO: 224058 - DNA, 122 bp, Homo sapiens
tcccgttcattctcgacggtggcgcatccactttcggaaggccgggcctcgaagggtgggcgcgcggggcaggagcaggaccaccccgatgcccccattccttcccgggaggcggggcccac

SEQ ID NO: 224059 - DNA, 122 bp, Homo sapiens
cagagcccttggtcctgctgggtgctgggggagtgagattcagagcagcagaccatcagccgggtagacagaggtcatggccccagcagctcagccccattagctaggctggtgggaggcag

SEQ ID NO: 224060 - DNA, 122 bp, Homo sapiens
gcctcgcttaagttcttcttggccgcctccagctcgctcacaaaggtcgccattgctccgcgtgtctcagcccgaccgcagaccgcccggccaccgcgatcaacaacccaaaaaccaactcg

SEQ ID NO: 224061 - DNA, 122 bp, Homo sapiens
aacgaggctcctggcagcagctgatgcgagcacaggaggggaggacaaggactgccctgccgagctcacagggcaatgtctcccgtagccgaagcagctcctccgttatcaatcacacagtg

SEQ ID NO: 224062 - DNA, 122 bp, Homo sapiens
aatgtggacccgcggccccattccgacggggcactgcctcctccgtgcccgcctcctcatcgccgccctccccgtcattggccttcttcacggggctggatgacaggctcttgggcagctta

SEQ ID NO: 224063 - DNA, 122 bp, Homo sapiens
ctgtggtggtgagatagcattgagaggccgcctgaagctgtgtgcccccagtctggggaccgagcctctttatccagccagaatgggtggaaggccagacaatgtagtgctatatttggttt

SEQ ID NO: 224064 - DNA, 122 bp, Homo sapiens
tcccttagagtggctcccaggcagtgctcttgtggttgggtggcaaggggttgctttattcggtggtggctagaggatgttttagcagataaatcgggaccccaggagcccctgagtgtcaa

SEQ ID NO: 224065 - DNA, 122 bp, Homo sapiens
gaaggggtcttcatgggctgtgaggaggtaagcaggcctgagactgggtagagatgggagcggcatgaggggaaggtaagtcagttgccatgccacagccaaggggcctttattggatggtg

SEQ ID NO: 224066 - DNA, 122 bp, Homo sapiens
cacagtcttcaccaggcagatggctaatttctttgctctaacctcatttctccagtattccggtgttcctgtgacgtcctgctcctggagtcaggtcctaattgttgtcaagcgttcagaga

SEQ ID NO: 224067 - DNA, 122 bp, Homo sapiens
ttccgctagtgagatgtttaagcagcaaaagctccttaacagtagagtgggcgccctcttcgtggaggccaggcccgggtggctataggggtttatcacatactttatctcctactcatcct

SEQ ID NO: 224068 - DNA, 122 bp, Homo sapiens
tcatccgtggtggccctagaattgcaccatcaaccagagtctgcttctggcaaaagggcccgggggtctccgccatcagaccactcaccgcaggccacagctcggatgggtacggggcaccg

SEQ ID NO: 224069 - DNA, 122 bp, Homo sapiens
tacgggatcaaactgctgtaggagctgccaaacgcttctctccatttctggccgcggggccgcggaccgccctttaagtagcccgttttatccctggcagaggtggagccttaggcaggcct

SEQ ID NO: 224070 - DNA, 122 bp, Homo sapiens
gaagctcaaaaatgtccaaggtcccatccttgttatagtccaggtaccaaaagagatctccgtagagggagtccatcgaggatgtctccctcgcagctccgcggcctgagtgagccccagcg

SEQ ID NO: 224071 - DNA, 122 bp, Homo sapiens
gcgccggggcagtgtcctccttggggtttgttggtccagctctgggcagctcgatgaccccgcctccgggacccagtgtgcttagtgactcagtttacactttttcctcgtcgaggaacgct

SEQ ID NO: 224072 - DNA, 122 bp, Homo sapiens
ggccagcagggagggagggtctcacctcggaagctctggctgaacctctttccgcgggagcggtccccgtggctgcgccgcagcaggactacatactgggccctcacgtgggcggggatgac

SEQ ID NO: 224073 - DNA, 122 bp, Homo sapiens
aggtcccaccctgagtagggagccccgtgggaactgacccggccacattcccaactgcagcgattgtgaaatgggcgcccgggcccagccagggcgggctccgagggaggagcggggcgggg

SEQ ID NO: 224074 - DNA, 122 bp, Homo sapiens
cgtctggaagcggggcacctctcaggggcaaatgtttcacgcctgcttcctctgagttgtcgaatccgggcctcgcctcctcctcccttttcagatcataggatttctctcccccgcaaata

SEQ ID NO: 224075 - DNA, 122 bp, Homo sapiens
aaacagcatcagcaccaggctgagtcgcggaaaggatctgtcagaccgctccactggcatcgactcagctcgggagctacgttcaaagaagggtgagttgcccgggaggagaccacccagag

SEQ ID NO: 224076 - DNA, 122 bp, Homo sapiens
cctgcagaactccgggtccctcttggagctctctgatggcagctgtagggccatccccagcggcactgtttccccctttgtttacccgtttctaagggcaagtgcaccacgaaggctctccg

SEQ ID NO: 224077 - DNA, 122 bp, Homo sapiens
gaaactcctttcctactgaactgctgtcactcaatcctaacctctcttagaacactggagcggcttcgaacccgaagtatggagcaggcttgggtgggtacctcgcccctggccaagtctac

SEQ ID NO: 224078 - DNA, 122 bp, Homo sapiens
tccccttgaggcacgggcgctctgggttgtgggagttggggagctgctccggcttcggcgcggaggggcggcggccggggaggcggcggcggcggcaggtgagaggccggggtcgggcggcc

SEQ ID NO: 224079 - DNA, 122 bp, Homo sapiens
tcttttatgtgattatttttttcttaggccatcatggtgttcttctccttctttacgagccgatgcacagacgtgtatttgatctccctaagagacggctcagaagaaaagccagcaaaggt

SEQ ID NO: 224080 - DNA, 122 bp, Homo sapiens
gaactttttgccgctcggccagcctggcaggggattttaaaatcggccaatcacagcgggcgccaggcctccgctttccgcttactggtcctgccgtaggaggcgggtacgtgagcgcacca

SEQ ID NO: 224081 - DNA, 122 bp, Homo sapiens
gagaattttaaggagagaaggccatcagaatggactacgtgatggcgctgaagctcgtggcgttgtaagggatggagaaaggcggccagcacctgctcagtctatctcttcctcctctgtcc

SEQ ID NO: 224082 - DNA, 122 bp, Homo sapiens
gcctcaatctcacctcaaaggagtaggtggccagctgtgttcccgactgggcctcgctgccgtacacttcaatctcgtccacctcatcctgcggcaccgacttacccgcagctgcacacaga

SEQ ID NO: 224083 - DNA, 122 bp, Homo sapiens
cggagccacgaggactactggcaaaggtgctgggcaggctgtgtcgcatgggtgggggatcggccagtggctccttgcagcaggagtccgcatcaggggctggggaggtggccctcgggtag

SEQ ID NO: 224084 - DNA, 122 bp, Homo sapiens
gtgccccgccagaccccgcgctcccctccccgggaccctgcggccccgccaccccctccgcggtccagaagatctccccagttacagcaggcggcagctgccctttcccgcttccacggctt

SEQ ID NO: 224085 - DNA, 122 bp, Homo sapiens
aggttccgtaatgtggcgctgtccggcagagaacatggccgcgcccttatggtgtttattcgcgtgggccgccattttgaaagcatatccattccgtagagcagaggaattggccgctggca

SEQ ID NO: 224086 - DNA, 122 bp, Homo sapiens
gtacgtcggcctgggcacttccatttactacagagtccgcagtatgcagttccctgaggacgctgctgcccgccgcctgggctctcccgtcctcctcagcgcgtggccgccaactcacactg

SEQ ID NO: 224087 - DNA, 122 bp, Homo sapiens
ccctggagtgggggcagctgatggctcaagacacatgagctctggtggcgagtacagggacgcggggtttggggaggcccaagtcaaggtccatccttctgggatgaggggcggaggatggg

SEQ ID NO: 224088 - DNA, 122 bp, Homo sapiens
ggagctctgaagacccaatgaaacctcagttctgactgactcctcctctgcgatcaattccggatgcccccacttagtccctgcctcggtaaccggttctttggggacagcagcatcagcac

SEQ ID NO: 224089 - DNA, 122 bp, Homo sapiens
cacagcaaaatacttccttgggagttgtcctaactgcagggggctgcctctcacaagtcacgtcttctccccgggggaagtccatatccaaagactgctcagtgcaggcctcaaagacctgg

SEQ ID NO: 224090 - DNA, 122 bp, Homo sapiens
gggtgacggacgcacctggaaaatcgggtcactcccacctgaatattgcgcttttcagaccggcttaaaaaacggcgcaccaggagactatatcccacacctggctccgagggtcctacgcc

SEQ ID NO: 224091 - DNA, 122 bp, Homo sapiens
gcccactgaagttaaagtccgagtcatgaacagcacagccatcagccttcagtggaaccgcgtctactccgacacggtccagggccagctcagagagtaccgagtgaggaagccagctccgg

SEQ ID NO: 224092 - DNA, 122 bp, Homo sapiens
agtccaccatgttcatcaggaaggagagaaggagagtcaatggactgtctcttccctcatcgaactcatgaaaagggtctagccaatgaggtactcagggccaaactcacaaagatcagtgc

SEQ ID NO: 224093 - DNA, 122 bp, Homo sapiens
ggaagcaattgctccgacacagacagggacaccgtggtgcgtctctcggccccatcacgacggcctgcaccacatcccaaatcggaatccagctcatgcatgcggggttggccctagaaagt

SEQ ID NO: 224094 - DNA, 122 bp, Homo sapiens
ccgggagcagagcccccggtagcctcaggggagagctttgctacggggggtttcccgcaccgaggctccctagccccgcagagccagccccccgcaaaggggaaatgtgccggcacaccagc

SEQ ID NO: 224095 - DNA, 122 bp, Homo sapiens
tccccacctcagtgggttcccttgtggcccgacgtctccctgtgtcttcatacctaaactcggagcggggcgccaggtaaggatgagtattacagtccgagaagcgaacttccaagtcacct

SEQ ID NO: 224096 - DNA, 122 bp, Homo sapiens
tggaaacgattgtcttgtcccctgcgtccggcaattctgaagacagcatcaaagatgggccgtgaagagaaaggaccccgagggcggcccgacacgagagagaatccgctgggactatttgc

SEQ ID NO: 224097 - DNA, 122 bp, Homo sapiens
cgcagttcaccaccgtcttcaccccttccccgcagttcaccaccgtcttcgccccttccccgcgcagttcaccaccgtcttcacacctttgtactgggagggcccttcattcctgcccttct

SEQ ID NO: 224098 - DNA, 122 bp, Homo sapiens
atgctcccagctctgagggaaagccaggtcagcgtgggtctccaggcggctcctagactgcgccctgtgactggcacagggtggtggtggcagagattctctcctttttccttccttcctgc

SEQ ID NO: 224099 - DNA, 122 bp, Homo sapiens
ctcttgggtctacctgagcatacgcggcacacaccaaaggtctcagggtggaattgttcacgtcaggaatgtgctttgagcaggtggctgattttgaggtccttaaagttcaaagtcctccg

SEQ ID NO: 224100 - DNA, 122 bp, Homo sapiens
gatcctacagaccgcctagggggccacagtcgggcagtccaaggctgccctgcggcgacccggcctatgtcacaggatttcacagctgctaagggactggcctcctctgccgtcaccgacac

SEQ ID NO: 224101 - DNA, 122 bp, Homo sapiens
aggcaggaaggcgaagggccttctgggaggtgaggtcctgggcggccgctggccaccaggcggaagtgcgtaccggaagtgccggcggcagtgtgtaagacgctcacgggcgcgcggactat

SEQ ID NO: 224102 - DNA, 122 bp, Homo sapiens
gggatggtggagggggccggggtcggggcctgcaggatggtcatggtcgggtggcagctgcgagagtgacacatggtgagccgagcggagtgtaaggccaagtgagggtcggctgccggcag

SEQ ID NO: 224103 - DNA, 122 bp, Homo sapiens
ggcccacaggagatagcaaccccattctttgccccccaacaccagggttcctagctcccacgtctatgttcacatttgtggtcctggtcatcaccatcgtcatctgtctctgccacgtctgc

SEQ ID NO: 224104 - DNA, 122 bp, Homo sapiens
tcctaagggatcggatcgcagttccccctctggacagctgtgggctctgtcctaagggatcggatcgcagttcccactctcgacagttgtgggctctgtcctaagggatcggatcgcagttc

SEQ ID NO: 224105 - DNA, 122 bp, Homo sapiens
aaggctttctcaggcctctgaggtgagccacattctgcccctcaacccagggatgagccacgaggcagagtgggtccacatttaactgtcctaatttttagtacaattatatttttcctcag

SEQ ID NO: 224106 - DNA, 122 bp, Homo sapiens
tgtgcaggtagcggtgctcatattggggaaggggcttcccatccaacagcagctgtcccccggtgggctggtacagattctgcagcagggcagccactgtgctcttcccagacccattgggt

SEQ ID NO: 224107 - DNA, 122 bp, Homo sapiens
tccggcgattactaacttttgcatcgcccctgttttgtctttctctccctgtccccttcccgccctctgcagaccatggtgaatccgggcagcagctcgcagccgcccccggtgacggccgg

SEQ ID NO: 224108 - DNA, 122 bp, Homo sapiens
tggccaccgggtgcaggttcagggccaggggccgggcctcctggggattggcagggcgcccgccgcggtcccatgtgcctggggccggtccccgggcggtggccttcggccctgcgctccgg

SEQ ID NO: 224109 - DNA, 122 bp, Homo sapiens
agacacaggccgccgcagtgcccgtcggcgtcccccgggccccccactgcaggtcacctccgacctctcgctgtagccgctatttctgcaggtggattctgcaggggtgtggggccgtggac

SEQ ID NO: 224110 - DNA, 122 bp, Homo sapiens
ccgctaagaggtggaggtggagacgttacgctggcgtaagaggtggcggtggagacgctacgctggcgtaagacgcggcggtggagacgctacgctggcgtaagaggcggcggtggagacgc

SEQ ID NO: 224111 - DNA, 122 bp, Homo sapiens
cttctaaattccaccggggaagtgagggtgcgaaagcctgtctcgatggccctttctggccgtattatcctacagttctgtgcctgtccagcttaccgggagtctctggcgggactagggaa

SEQ ID NO: 224112 - DNA, 122 bp, Homo sapiens
ccgccatgttgtccgctacaaactacaaaccgctgaaactttattgacactgccgaatagcgcaggacacgaggggcggggcctgggccgcctggggcggagctgggaggtgggtgggaatg

SEQ ID NO: 224113 - DNA, 122 bp, Homo sapiens
cacgagaagcctcaccactgtaggtttttcagcagaggtcactggaggtctggttaaacccgtacagcactgagggggagggggcccggctgcgtttccgaagctgcgcagcgcccacagca

SEQ ID NO: 224114 - DNA, 122 bp, Homo sapiens
gctttactgcctggagagggagaccctctcagagcatcctctcctgtcatgagctacagacggatgcacagacacattccccaggccctgggctcagggcatcccatgctggccccttcctc

SEQ ID NO: 224115 - DNA, 122 bp, Homo sapiens
agcaaccacaaagctctttaaggattcggggcctcccctcacaaatttatttctcatagtcgtggttgaaaggttatgtccttcttgggtgagtcagcaagtcttacatggtaaaactactt

SEQ ID NO: 224116 - DNA, 122 bp, Homo sapiens
cggggctcctcgtccccgtcacgctgactttccgtgcagtgctgtggtgcgaaaatgcctcgccggtgcgcaccgggtcggcagcctcggcggcgggggcgagattggcgggaggggggcgc

SEQ ID NO: 224117 - DNA, 122 bp, Homo sapiens
ttttttaaacaatactgagaagcaagcagtaagctcttttctcaagccacacctgacttacgtgcattcacatgcccatgcttccaagggaaagccagccccactcctactgtactgaccca

SEQ ID NO: 224118 - DNA, 122 bp, Homo sapiens
aatgactttgtgatattttacttcactgaaaattataataggggttgaatgagcaagcaccgtgttaaaagattgctactgcagctatgataatagtccaggagattttaaaccccgttatt

SEQ ID NO: 224119 - DNA, 122 bp, Homo sapiens
acggcaaattccagatttggttaagtacatagtctgtgtgttccctaaaacattctctgtcgcaaagcagcagagcgttgggattaccagacagtggtgttcacatcagaccacccaggttc

SEQ ID NO: 224120 - DNA, 122 bp, Homo sapiens
gggcccgtgctacagacggagcagggcgggcttggattcgaggtctgctaccgacaggctcgatgctgttactcagctgctctaagcctcagccctttgtctgggaaaagcccgcctcacag

SEQ ID NO: 224121 - DNA, 122 bp, Homo sapiens
acctttctacagctgtgcatctaaaatattcaattgtaataagtatctacagaagctacacgaaataaattttaaataacgtagcatttaaaatgctatcattagagaaaagaataaaacat

SEQ ID NO: 224122 - DNA, 122 bp, Homo sapiens
gctgtcctcagtctttaagatcgcaacgcacactcgctccgcttcttctcgctaaacccgcgtattttacagcaggtttcctcagggttcggtgacaacattcgcattttctaaaatgaaac

SEQ ID NO: 224123 - DNA, 122 bp, Homo sapiens
acgcatctgtaccattgagtgtgacacatgcggccagatcttcatacgtgctgtcaatcacgcatctgtaccatcgagtaagacacgtgctgcaggatcttcatacatgctctctttcacgc

SEQ ID NO: 224124 - DNA, 122 bp, Homo sapiens
gacaactgcccaggggtgacctcgagaggcgggtggagctaggcccacggcgagccagcccgggatccccggcctgtccctttaaccccgccgccgggcgggagcacgtgagcggggctccg

SEQ ID NO: 224125 - DNA, 122 bp, Homo sapiens
ggtttctccatgttggtcaggttggtctcggacccccgacctccggtgatccgcccgcctcgacctcccatagggctgggtttacaggcgtgaggcactacgcccggccataatttttaaac

SEQ ID NO: 224126 - DNA, 122 bp, Homo sapiens
gcctaccatgcataggacaggtactgaatttgacacggctgcaggcatctgcagggccagcgctcccctctctccaccgttctgtccaaagggctcaccataggcataggccacgtccaaga

SEQ ID NO: 224127 - DNA, 122 bp, Homo sapiens
agtggcctgaagcaacaccaccccaagggtggttcgcgaaccagcagcatcagtgccactcggccgtgtgctagaaaagccaagtccaggccccacggtgtacccagtgagtcagaatatct

SEQ ID NO: 224128 - DNA, 122 bp, Homo sapiens
ttctagtgaactgagcactggggaattgaagatgaaaaagacccaataccagccccagagcgggaaggatgaacagaagtaagcgaccacataaatgctgaagtatttacagatcaaccagc

SEQ ID NO: 224129 - DNA, 122 bp, Homo sapiens
acccccaactccaactgacctcccctctgccagagcaagaccacgagtacccgccgagagcggacctggctggctacacaaagccaggcgcccgaccagagggatcctccgggacgtcctcc

SEQ ID NO: 224130 - DNA, 122 bp, Homo sapiens
ggcatgttgttaggaaagagagaggcaaggcaaataaaattactgctaacgctcagagatcggcaggagtcctacttgcctaatcttaccggtgggagcaagcggctgttgtaatccaatta

SEQ ID NO: 224131 - DNA, 122 bp, Homo sapiens
aaggagtcggccatcggtttagactgcaaccagccttatctcgaaatcttgcatcctcaacgtacttcgaagatgtggaagacaaggaccatttcttttcagtcagttgctgaagaaagaat

SEQ ID NO: 224132 - DNA, 122 bp, Homo sapiens
atacctgtgtgttctcaacaccagcatataagcctgttgggaggggcctctgcacactgtcgggaggggccgtcccacctcggctcgtttcccattgagggaaggaggcttggtcttagcac

SEQ ID NO: 224133 - DNA, 122 bp, Homo sapiens
aggccgtgcggccagcgcctggggacgcccgcggcgggacaggggccacccgggccgcggcgcagcctgggctgaaacctcctgggacggaaccaagccacctgctgtgcgcccttctcggt

SEQ ID NO: 224134 - DNA, 122 bp, Homo sapiens
aagccgccgcccacgggttctggcctggggcaaacccaactgagaactttgggcttgcctcgttctggaagctttcccagagaggagcaggatggagccgctgccctcgaggaaaagctagc

SEQ ID NO: 224135 - DNA, 122 bp, Homo sapiens
cgcgaaccagggctgggaggctcggctggaggtgtgaccagggcagggactgacctggcccggaacagaagcgcgcagagtcccatcctgccacgccacgaggagagaagaaggaaagatac

SEQ ID NO: 224136 - DNA, 122 bp, Homo sapiens
ggctgtgcaggagtgcggtggggccgggctgggtgtggaggcctcacctggcttggctgccgactgaggaggggcctggatcccagctggcgcggctccagagcctggaaggatatgggcca

SEQ ID NO: 224137 - DNA, 122 bp, Homo sapiens
caatgtaaatggtcaaacaaaatcattttgcctttggatactgatcacaaacataggttgcggttttttatcaaacactagtcaataatttacattaaattctaaattacatctgaaacccc

SEQ ID NO: 224138 - DNA, 122 bp, Homo sapiens
cactctcttaccctcttttcaacattagagtcagtttcaaaccaccagacttagtctttccgtccatgccttttgtgctaacattcctgaatgtgctccctgtagtgtgaccgagataacat

SEQ ID NO: 224139 - DNA, 122 bp, Homo sapiens
gtgcacgcaccctgggcaggcaagtccaggcggctccgtgtcaacagccgaagataaatacgattttatcagctcggaatctgttgaaacacatccatctagcggttctagggaaggagaag

SEQ ID NO: 224140 - DNA, 122 bp, Homo sapiens
gcttctgaatactgggaacctgaaagataactagaagggaggggcttgcaatcataattacggttgaaggcatggattcaagtttctaaattggaattagaaaaccattgcatacagtcctg

SEQ ID NO: 224141 - DNA, 122 bp, Homo sapiens
tctgatgatgctgctatttacaaaacactgatcgtccgaaagcttgaatctgttcctcctcgaatgaccctgtagatgcctgacctccaccgtacctccacatcactattcatgtccttcta

SEQ ID NO: 224142 - DNA, 122 bp, Homo sapiens
caacaggaaactggctccacggcaagggtgaaaaagatctgacccagtggttcccacccacgccaccttccagggagaaggtgaggccaagatgagactttaataagtcgaaaataaaagac

SEQ ID NO: 224143 - DNA, 122 bp, Homo sapiens
tgactccatctcaggatacagggactgagagtgtgtatgcaacttctcagacccagaaaccgttgattctgcctaaaaacacagcaataaccacatcccaccctcttgatttaaatgaaagg

SEQ ID NO: 224144 - DNA, 122 bp, Homo sapiens
ttagtacagtctgtttcctccttcacccccagaacaaaaatcgaacttctggttggacagcgtcagatgtcactgaggtgaccccagcctgtttgcagttccaagtcttccgtgtaggcgtc

SEQ ID NO: 224145 - DNA, 122 bp, Homo sapiens
ccgcaccagtgcgtggaggtgtcaggctcccgctgcgggaggcgggagatttaaaccgcgcgacctggcgtccgcgttcgcccccctcgggcgccggcctgaccccgccaccggcccgactc

SEQ ID NO: 224146 - DNA, 122 bp, Homo sapiens
tgcccatcttgctcctgagcgtcttcatagcggagtcgtcgtggtctccagaagtgcccacgttgctcttgccactccccctgcagcaggggaagcagtggcagcaccacttgcccatcttg

SEQ ID NO: 224147 - DNA, 122 bp, Homo sapiens
ttcggagcttggctcgggtcctccacggttccctccggatagccggagacttgggccggccggacgccccttctggcacactccctggggcaggcgctcacgcacgctacaaacacacactc

SEQ ID NO: 224148 - DNA, 122 bp, Homo sapiens
ctggtctcgcgggcctgggtggggagcggccgcagagctgctggaaccaggaggaggcgccgctcccccgagggccccggagacctcttgtcctcgcgccgcgggaagggcctggggagctg

SEQ ID NO: 224149 - DNA, 122 bp, Homo sapiens
gcccaggaggcctgggtcggacgtggggcgcgaggaaacggcgggttttccacactgagccgcgaaagcctgtagacgacgaagaaccccgcagccttggcctctgcgcggcttccacgccc

SEQ ID NO: 224150 - DNA, 122 bp, Homo sapiens
attccgggcccagcccaagctggtgtggcaggaaggcacccaatagctctatctacctcccgctggaactctctccttcccctcaaccaagggagaagcccatgtcattcctacatgtggga

SEQ ID NO: 224151 - DNA, 122 bp, Homo sapiens
tgaggggtgatggacagatcaaaaacagatgatcttcaagacaacataatcacccataaacgtggtaaaacaaaaaattacacttccaatttggtggaaagagtgccacctgctgacacttt

SEQ ID NO: 224152 - DNA, 122 bp, Homo sapiens
cagcggcgagcggaaagggaagccgggcggggccagggggtcaaacacgggcgacagtcccgcccagccccggacctgcagcgcgcacaagctcgggcgccctccgagcgccgcgcccaagc

SEQ ID NO: 224153 - DNA, 122 bp, Homo sapiens
cgccaccgaggcccgtcttctcctcggcagaggaaacaagacagatgggcctggacctggcgtgattaaagatgaaacgtggatccatcttcgccaaagctgaaaacgaggagctgcagcct

SEQ ID NO: 224154 - DNA, 122 bp, Homo sapiens
ggaaggctgtctatagacgcatatacactgcattcttgtgatagaaactccagttgtgtccgcagtgatgtaccagggttgaacaaggatctcttctccaagacccttcatgatcacagagg

SEQ ID NO: 224155 - DNA, 122 bp, Homo sapiens
ttttagctggtaagcggaattcctgtgaccttcctaagatggcgtccactcaaccgcttccgcctttacgtgggccggcagggggcgggcttcccaggggcgcatgcgtctcgcatctctcc

SEQ ID NO: 224156 - DNA, 122 bp, Homo sapiens
agaacaaatagaatcctgtggccatgtgatcatccttcacatatatgaagacaatcctcacgtcccccactctagtaggcactcagtaatcactatagttggggaataagctccggaattag

SEQ ID NO: 224157 - DNA, 122 bp, Homo sapiens
cagcccccagacacgcgcgcgcacgcccactcgcacgcggggccgccctgtcaagcagtgcggtattaattaagaaggtgggggggaagcacagcagcagtttgaagaattgtggggcggag

SEQ ID NO: 224158 - DNA, 122 bp, Homo sapiens
gaggaactacatttcagtcccccagtatctgccaagcgatgtgtgaggtacttgtccccacgtcccgtaaccctcactatagacctgcaaggtattattatccccatcttagggaggggaaa

SEQ ID NO: 224159 - DNA, 122 bp, Homo sapiens
aaaattgaagttgcagctataattattgttgtgactattgctttttaaaaattatcttcacgtgttataaaacttgtcttttgccattaggaaatggaaaggtcagtagttgcacagctgct

SEQ ID NO: 224160 - DNA, 122 bp, Homo sapiens
gatgcattagcatcctggcacatcagtgtgttcaccaaccaggaagctccacagagctttcgtgtccagaggttttattgggggtatcaatgcatagcagtctccaaaagaggtcaggctgc

SEQ ID NO: 224161 - DNA, 122 bp, Homo sapiens
tttctcattcatcaaaagaaacaaggatttattgagcccctactgtatgcttggcactcacggggaccacagaacagccctggtacagtgggagaacacaggttcagaaggagtttgtcact

SEQ ID NO: 224162 - DNA, 122 bp, Homo sapiens
cagttgccagtgccaagtgtttgtgctgaggtctcttccgttcatcatggtgatgacggccggcagtgagggcccttgtgctggagcctcggaattctctgttcttccaggccggggccagg

SEQ ID NO: 224163 - DNA, 122 bp, Homo sapiens
aaaaactgctctacactggacaaggatatgaatttttgacccttaaatgtgcaagatacacgcttttgcataatcaatcactctttctaataatttagaagtgagggtcacccttaattcac

SEQ ID NO: 224164 - DNA, 122 bp, Homo sapiens
agagagggaggaggacaggggctggttatttttaagcaaggattcacctcggctggctagcgaggggcgtgcgcacaggcggctgctagccagccggaccttacccgggaccgtccaggggc

SEQ ID NO: 224165 - DNA, 122 bp, Homo sapiens
ccaagggcagagctcggtggcccagcgtggctcccaggcgcaggatggaccagcgccccccgtcacacctcgccaaccctggactcacagccgcccgctctgcctcgcgctcccgctctcgc

SEQ ID NO: 224166 - DNA, 122 bp, Homo sapiens
cccagcgcggcggccagggttgggcctgcccccttcccctcctggaggccaggcgcgggccgaggagaccctgcctgaatgtgccctaaacctggggggttgagactagaggggtgctcgac

SEQ ID NO: 224167 - DNA, 122 bp, Homo sapiens
gctctccctgctgttagcatcccgagcggcaggaggaggctttcgagtctctgcccaggccgagatgtcatcctcccgggcgggggcgaggcagttcagcgagtgaacccagcgaatgaagg

SEQ ID NO: 224168 - DNA, 122 bp, Homo sapiens
taccccggctctcagggccctgaggagcttacgggctggaaatggccacttcctgaagaacggtaaccagcccctgtgtaggcaacaactcacgcgcgcccacggaaactcagaggcgtggc

SEQ ID NO: 224169 - DNA, 122 bp, Homo sapiens
gcggggccagggcgggccggccggcggggcatttaaaccccgctgacagccagtccagcccgggacacgcgcccagctctgtagcctcctccgtcgactcagccttaggtaccggtcaggca

SEQ ID NO: 224170 - DNA, 122 bp, Homo sapiens
cttccttttatagggtgctaggtcagagccccctcccaccaccccccaccaccccgaactcggggaggagttctgacctgagtgctcctgctgactcctgaatatcaaaggagggcagagct

SEQ ID NO: 224171 - DNA, 122 bp, Homo sapiens
tggggcagggagggcccagcacagagaagcacagacttcaacctcttttccttaggaagacggaagaaagtgccgggaagaaagaaaaccccgtccggaccatccgcaaaaagtaagagctc

SEQ ID NO: 224172 - DNA, 122 bp, Homo sapiens
acatgcccttaatcaccatagctcagaatctatgaagtaatttccatttaattccttactcgtgcattcgatccacaaattatttagtataacactatgattaagaacattaggctttgggg

SEQ ID NO: 224173 - DNA, 122 bp, Homo sapiens
cttggcactcgaagcccacctggataatgacactgtagtttcccctggagaagacgggcgcgttgtcattgacatcggacacatcgatgttcacggtcgtcgtgttgactctgggtggactg

SEQ ID NO: 224174 - DNA, 122 bp, Homo sapiens
ccgagcgccctccctcccaccgcacttacacctgaacttgtctccagcactgcggacacccgggtgacacattctttcggagagggagggcaagacttttctccggagcctctggcaactcg

SEQ ID NO: 224175 - DNA, 122 bp, Homo sapiens
ccccaggcgagctggagactggggcactccttgcttggtagaggggcggggcgcgcctagcggccacgcgcgcgggcgtcggagggggcgtgtctcgcgggcgcgcgcgggcgtcggagggg

SEQ ID NO: 224176 - DNA, 122 bp, Homo sapiens
agcaccatgcccggcatccacctgagccccgaacagcagcagcagcagctgcagagcctccgggagcaagtcaggaccaagaatgagcttctgcaaaagtacaagagcctctgcatgttcga

SEQ ID NO: 224177 - DNA, 122 bp, Homo sapiens
gggatttacccagccaggaggagtggggggaagggcagacggtgggggcggtgacctaggcgccccggcttctcatcagagccactcgggccgggcctgtggtccacaggcagcctcgcctc

SEQ ID NO: 224178 - DNA, 122 bp, Homo sapiens
ggcagctgcgcgcgcacctggcgcagcaggacctggacctggctgccgagcgcgaagcggcgctccaggccccgcacgtgctcagccagccgcgcagccgcttcaaagtgttggaggccggc

SEQ ID NO: 224179 - DNA, 122 bp, Homo sapiens
gatccacccacctcagcctcacaaagtgctgggattacagcatgagccaccgcgcccgggcgcaggataatttctagtagtgataagttctttaaaggagctcagggaagggaataaaagag

SEQ ID NO: 224180 - DNA, 122 bp, Homo sapiens
ggccccggcgctgggaccgcgggcggacgcgcggggctgtttgctctttgtgaggcctggcgcggcggccgccgtcggcccgcccccgccgcgcagccgggcgaccggtgcgacaacagccg

SEQ ID NO: 224181 - DNA, 122 bp, Homo sapiens
tgcgggagccccgcgcgcggggggcggcctgggtggggccggcgagggtcaggggcatcgcggccgcgaccccattctgcagcccccgaggctcgcccgactcctggctgccctggactccc

SEQ ID NO: 224182 - DNA, 122 bp, Homo sapiens
caaggagcgcaagtgcctgctcctcaagatccgcggtgggaaacagttcattttgcagtgcgatgtgagtgggggctgagccagggatgggagggccgaggggccaggccaggcaggctggg

SEQ ID NO: 224183 - DNA, 122 bp, Homo sapiens
atttatttatttattttttgagacagagtctcgctctgtcgccaggctggagtgccgtggcgcgatctaggctcaccgcaacctccaactccggggttgaagcgattctcctgcctcagcct

SEQ ID NO: 224184 - DNA, 122 bp, Homo sapiens
tggtgccaccggacccctctggttcagtcccaggcggacccccccctcaccgcgcgaccccgcctttttcagcaccccagggtgagcccagctcagactatcatccggaaagcccccaaaag

SEQ ID NO: 224185 - DNA, 122 bp, Homo sapiens
ggggaggaagggggagacctgtctgaatattgcaataaaaataaagcgagaagaaagaagcggactcacctttatgaggcatcctttctggttgtcacagcttctgtcaagagttttgtttg

SEQ ID NO: 224186 - DNA, 122 bp, Homo sapiens
tcgggccagatcacacgacacccactcggaaactggagtcaacagagagccgcagctgctcgtaccgggcaagtctctgcggggtgggaccctgtcccaggacgcaggattggcgctgagct

SEQ ID NO: 224187 - DNA, 122 bp, Homo sapiens
gccccacaggctttcatacctggtttgggtggttcatttaatgaggacagtgggttctcgcgaacatcatggctggtgatttcctcggcagccttcaggggctgagaagactctattagcag

SEQ ID NO: 224188 - DNA, 122 bp, Homo sapiens
cccccggggatccccgcccgacccctgtctgtcgctaatgtgggcctgtctccggaaattcgaggttgggcctttgcctgaatctgttgctattgctccccttgctaccgctgacacttggc

SEQ ID NO: 224189 - DNA, 122 bp, Homo sapiens
tataacaggagaatgacattgaaagaaattacacttgacaatacaaatggtcaggcacatcggaaaacagctgggcagtttgttaaacatatacttcttataaagttaaacacacacttacc

SEQ ID NO: 224190 - DNA, 122 bp, Homo sapiens
cacagtgtgcgcaccccctgacctgcgcccactgtctggcactccctagtgagatgaacccggtacctcagatagaaatgcagaaatcacccgtcttctgcgtcgctcaagctgggagccgt

SEQ ID NO: 224191 - DNA, 122 bp, Homo sapiens
aagaggtcactatttctgaaagaaatgcaaccatatccaggaacggcccggtcaggacttcgttctgcacaagcccacctcacgctaacatttgccctgatgtcccggggaccacacccttc

SEQ ID NO: 224192 - DNA, 122 bp, Homo sapiens
gcgcctactccgcgggtatcaccagcttgcttacgatggcaaggattacatcgtcctgaacgaggacctgtgctccttgacagccgcagacacggcggctcagatcacccagctcaagtggg

SEQ ID NO: 224193 - DNA, 122 bp, Homo sapiens
tgggacgggggccaaggatcggcccaagctgctgggaacgttcttgtccctccaggatcgcgcccaaggaccgctcccctcttgcctctccttccatagcctccgtttatccttcccgagtg

SEQ ID NO: 224194 - DNA, 122 bp, Homo sapiens
gccttgggaggttggtgacgaaaggagtgcgtgcccgctaagggaggggacgccccggagcgtacactcataaacctggtcccgaggcctgcccctcaccaggatggtgcacgcggaagggg

SEQ ID NO: 224195 - DNA, 122 bp, Homo sapiens
tgaacctgggaggcagaggtcacagcaagctgagactgtaccactgtactccagcctgcacgacagagtgagactgtctcaatgaaataaaaataaaaatactttggccgggcgcggtggct

SEQ ID NO: 224196 - DNA, 122 bp, Homo sapiens
agctcacgccgcacctccgcagtccctgccgccgcccggccccgcctggcccgcgcgccccgccgcccggcttgcgcctgccgctcccacccggcggtctcctacccccagggccccgactc

SEQ ID NO: 224197 - DNA, 122 bp, Homo sapiens
ctctcacctcctacagcaggtgacccatggccaatcgccaggggtctctttgccaggagccgccagggccagccaatcggggcgacccctccgccggggaggggacgggaaaggggtggggg

SEQ ID NO: 224198 - DNA, 122 bp, Homo sapiens
accagtggggagtgcgaccaatcaatgggctcctggctgggtggtgggacggccggcgtccgactcctcccatgtagtgatcggtttaggtaggtcggcctggtccccggcggaggttacgc

SEQ ID NO: 224199 - DNA, 122 bp, Homo sapiens
gtggctccccactccccgccccccgccattacgtgtccttgccccctcagtcccggaacacgcctccttcaggacacagcggctgcggagccagccccggtgtctctcacagacgcaccagt

SEQ ID NO: 224200 - DNA, 122 bp, Homo sapiens
caatcctctgtccctgcattcatctgacacttgctgagcacctgctatagcacagattcacgtcatgcccatggctggcatccagcatttatagggtaactggcaggagaaaagaagaggcc

SEQ ID NO: 224201 - DNA, 122 bp, Homo sapiens
ttatttttcttatttgggacaatgagaactgtgctttctctttaataagcaaaaagcatgcgtaatttctcaacagagcaaaaaagtagtcttataaggcattttatacttccatgtccttt

SEQ ID NO: 224202 - DNA, 122 bp, Homo sapiens
tgttccgcggtgcgggtgtgttggtgctctcgaggcacctgcggttccggattggtgttccgcggcgcgggtgtgttggtgctctccaggcacctgcggttccggattggtgttttgcggtg

SEQ ID NO: 224203 - DNA, 122 bp, Homo sapiens
tactggggctgaagcatatggagtcacccagcccggtgtccatgtccttggataggccatcgcttttagagctggagatgggtgtgcaggccaatgtggctagggatggccactttcctggg

SEQ ID NO: 224204 - DNA, 122 bp, Homo sapiens
ctgcactccagcctggccgacagagcgagactccatatcaaaaaaaaaaaaaaaaaaaatcggttctgagcaaatttcgagtcactgacaaggcggcggtatccagcagagggcgcgccagg

SEQ ID NO: 224205 - DNA, 122 bp, Homo sapiens
gtgtttccccacagacagattcctttgcaaaactggatgggagtgaacatcatggctggccgtcttgtgctgtgtgacagaacattaacatgcccaaagccagaggtctagaagacagtgtc

SEQ ID NO: 224206 - DNA, 122 bp, Homo sapiens
agatatcataggttgactttaaaagaaccagtggaccaaatatgagtgctagggaaaatacgtttagcctgaactcagtgtgggtgaggttaggtgaaaccagtttaaaggataggtatttg

SEQ ID NO: 224207 - DNA, 122 bp, Homo sapiens
atgctcacactggagagatgcccggtgagtgtaatgtgtgaagaagcttcatttgtcacccggaacttcacaggctaacgggcctcatgagcaaagccagcgtgggggactttccgccgcag

SEQ ID NO: 224208 - DNA, 122 bp, Homo sapiens
ctagttttggggaagagggaaacacctaaccttgacagaatcatcaccagagacacctgccggctgacaaggacagctttcttggagccaacagatgatgcaaggaaataagaagtgcacag

SEQ ID NO: 224209 - DNA, 122 bp, Homo sapiens
agccgtgggctgcgcccaaactgcctcacaaccaccgctgacccgaagcctctctcactccgtccactgttagaaacctgaagctgccctctgtgagaaagcgttgggattgaatccagact

SEQ ID NO: 224210 - DNA, 122 bp, Homo sapiens
gcggcggggacggcggtgcgcggagccgggcatctcccgcgcccccccgcctctcccgcgcgccccccccgtggaagttacacacctttggattgcatttcgccgtcaccttctcccccacc

SEQ ID NO: 224211 - DNA, 122 bp, Homo sapiens
tttccggctcctgtgctctgcccatgaggccccggggccagccccctcccttctgctgctcgacggcctagaagagtacctagcggaagacccagagccccaggaagccgcctacctcattg

SEQ ID NO: 224212 - DNA, 122 bp, Homo sapiens
ttaagatgttaatgattcacctgatataggcactagcatgtgcagcatttagcgcatgcacgtccagagaacagtccagagagtgcttaacagtgacaccccttcccaccccttcatgaata

SEQ ID NO: 224213 - DNA, 122 bp, Homo sapiens
aactctgagggatgcagtcagaccatagcagtgtccaatgtaatcaccagaataatgttacgtgcacatatagaggagtatcacactgtgttgtttcactcttgttaaccctgcaaccaact

SEQ ID NO: 224214 - DNA, 122 bp, Homo sapiens
tcccaactgcccctcaccacttatggagctcccgccaaagcagcttccacgtgctgaggacggcaacctgcatagttcactgaggggtgctcagttgccctcccagggttggggcagcttgt

SEQ ID NO: 224215 - DNA, 122 bp, Homo sapiens
cgaactcccgacctcaggtgatctgcccgcctctgcctcccaaagtgctgggattacaggcgtgagccactgcaacgggccagttactactattattcaaattttacagctgagaaaagaat

SEQ ID NO: 224216 - DNA, 122 bp, Homo sapiens
cagaggtcagcagcctgcgagaccctcctaggctcgtggccctaggcgcggcagctgacacgtaagtctcgtcgcccgacgttgtttcggcgctcagaaacaacgtaaagtaaaggggcggg

SEQ ID NO: 224217 - DNA, 122 bp, Homo sapiens
cctcctgcgcaaggacagagacatttaaaggcctgaacggacgtcagcaccagtcgagctcgctgggtgagcgccaggtctccccaccccaaggatagcgcgcacagggcgatctgctgctc

SEQ ID NO: 224218 - DNA, 122 bp, Homo sapiens
ctcggcaccgccccgccccgccccgtcccgctccacggacgcgcccggacgctactggttcgcctttgcgcatgtgcaattgccctcgtaccgaactccgcaggacgaagcgtgtatttttt

SEQ ID NO: 224219 - DNA, 122 bp, Homo sapiens
gaccccgagaaccaggcgctggcgaggttttactgctacactgagaggaccattgcgaagcggctcgtcttgcggcggtgagacagccacggggcgggcggcgggcgggacgcgggaggaac

SEQ ID NO: 224220 - DNA, 122 bp, Homo sapiens
aggatggagctccagacacaaggaggccctagcaacactgagctcagttctccatcaccacggaagttgaacaagatgacaggggctaaagtaagggtgaaggagggattattggaaggtgt

SEQ ID NO: 224221 - DNA, 122 bp, Homo sapiens
tgcgagtgtactttgtactttggtcctgtgtccctgcagccctgtgactacacgcgcacacgcaggcgcgcgcacacgcgaactgacggctcgctggcgatgctggaggctttcacagcccc

SEQ ID NO: 224222 - DNA, 122 bp, Homo sapiens
taactgctcagcaaccagagcctctttaaaatataaatcagattgtgtcactgttccctgcgtgaatcattctggtggcttccttttgcatttagaataaaatgtaaatttcttcataagtc

SEQ ID NO: 224223 - DNA, 122 bp, Homo sapiens
gtgatgcctcccttcttgcacaggagcagtgacctcagcacttacttaatcctctcccggcgccgagctcagttggagaggctaggggtggtagtgactggcaggaggccggggcgggggga

SEQ ID NO: 224224 - DNA, 122 bp, Homo sapiens
ccttgagaaagccagccccaaaggtacctgtgtttaaaaagatgaaagaaatggtaactacgtccacaacatgttcacaaggaaactccagaagaacagagcagtggtgatggacctcctgt

SEQ ID NO: 224225 - DNA, 122 bp, Homo sapiens
tccacacaggagggagcaatcacaggaaggaggaaggagccacagtctgtatgggcaggacggtaaggacaatgggcaggatggtattagatcttctctatgccatctccttcccactcctg

SEQ ID NO: 224226 - DNA, 122 bp, Homo sapiens
ctcagggctcgcggaccggaagcacgcataaacttctaccctgtccaatcataagcctcacgtgacctgccgcgtagggagggcacgaacagaaaggtgctgcgcatgcgtattgaaaaacc

SEQ ID NO: 224227 - DNA, 122 bp, Homo sapiens
tgtgcatgccacatttagcctcgctgtttacagccagttcagtaagtttgtgtgtttcaccgtgtgtgtgtgtacagagctgtgtgggtgttgtctgagtgggacttgggggttgggagagg

SEQ ID NO: 224228 - DNA, 122 bp, Homo sapiens
tttccccagcccctgctgtggaggcagcctcaatgctgaaaatggagcctctgaacagcacgcaccccggcaccgccgcctccagcagccccctggagtcccgtgcggccggcggcggcagc

SEQ ID NO: 224229 - DNA, 122 bp, Homo sapiens
taaataaactctccagtatgaaaacccggatgacgaccgcactaagggcaactgcagaaacgtcatgaccggacagagcaggatacatggtcgggagctcatctggtgaacgtgacgggatt

SEQ ID NO: 224230 - DNA, 122 bp, Homo sapiens
ttaatgactagaattcaggttccaaggagaagcccacaaggctaagggtattggatataacggaaagtggaagctatacctgacttccagagaatgtggaccggatataagatcttaatctt

SEQ ID NO: 224231 - DNA, 122 bp, Homo sapiens
ccgaagcagaccctgggcctcagctgtgcacctggtgatggtgctgccctatggagcgcccggttcgacgtgggaccgaatgacattcccagtgacgcatgcagcccagcgcctggtccggg

SEQ ID NO: 224232 - DNA, 122 bp, Homo sapiens
gccgggggcctgagggtggagtcccggccggaggcaggccgggactctggtgggtctaggcgcggatcggacccaagcaggtcggcggcggcggcaggagagcggccgggcgtcagctcctc

SEQ ID NO: 224233 - DNA, 122 bp, Homo sapiens
ccgcgactgggcagaggacctccttgaagagggcagacacacacccgtgagctcaccgttcgccagcagaccccagccagaaacgaggcaagagttccccgcggtagggcactgcgaagcaa

SEQ ID NO: 224234 - DNA, 122 bp, Homo sapiens
ttctagttaaaagaatgggtgacatcatccagggagaatatgaggagtgagaaggtcactcgcagaaacctaggtaatactaatatttaatacataggcagatgaaaaaatgctttagaagg

SEQ ID NO: 224235 - DNA, 122 bp, Homo sapiens
acatttccttcaggcactgggaatgagctcctggagccacgtcctaactttagcaatagccggttgccagccctagttctctattttggagcttcgttcctagtcttcattgtgttgagtga

SEQ ID NO: 224236 - DNA, 122 bp, Homo sapiens
cacttttttaaaaaatgcactactgtgtgctgagcgcttttctgatcctgcatctggtcacggtcgcgctcagcctgtctacctgcagcacactcgatatggaccagttcatgcgcaagagg

SEQ ID NO: 224237 - DNA, 122 bp, Homo sapiens
tgttgcttgctgaccccctcatgggccttcgagtgtaagggagagtcctcttcatgccctcgcaccctcctgggtctctagggcttgtgtgtccccaggggaggagccccctggacacaccc

SEQ ID NO: 224238 - DNA, 122 bp, Homo sapiens
atttgccttaacgagtgcctctggtatcccgctaaagccggacaaagcgtggccagagtgcggcccagcctctcagcctgcggcccggggaggagggcagcgcgggcgcgggctgggggtgg

SEQ ID NO: 224239 - DNA, 122 bp, Homo sapiens
ggccccgcccctgcccttccctgacacgcccctccaatgaggccttgttccgcctggccacgcccgtcggttggcgccccgcccctccgcgtctattggccgctccctttttctcccatcgc

SEQ ID NO: 224240 - DNA, 122 bp, Homo sapiens
gcctccaagatagggagtccaccaccaataaagtacggcagatgccagcagtctcgtccccgaacgcaccgtccgtcccagggaagtcgcagcggcggggaggccggtcctaggttggggct

SEQ ID NO: 224241 - DNA, 122 bp, Homo sapiens
ttgcacacatttactttgtgcaatgcattgtattcagtattggagaaataactgcatcctcgggaattcaagtctggagagatataaacaaacaattgagaggtgtttacaatatgacatag

SEQ ID NO: 224242 - DNA, 122 bp, Homo sapiens
ttttctgtgcatgcccagaggctcaagaaatgagcctttctatctttctacctttactatcgccaaggtaagctgggtagtccaggtgcatgactgaccttggctaaagagtatgtttgctt

SEQ ID NO: 224243 - DNA, 122 bp, Homo sapiens
accaccatcatccctccattatctagactgtgtcccttccagtgtattgtgaaaaatcttcgagagatcatgctgccaatatgtcaaggattctacttttttgtaacaggtgagggcctttg

SEQ ID NO: 224244 - DNA, 122 bp, Homo sapiens
tgcagaaaagtaaacaaaacataaatatacagctgaatgatttatcacaaagtgaacatccgtttaactaccacacagtccaagaagtggaatatttccagcatcccagaacccttcctctt

SEQ ID NO: 224245 - DNA, 122 bp, Homo sapiens
acttgggagtccttgaggttcaccgagagggaagttggaaatttttcacttatgtcagtgcgtttgcagttgggcaacagccagattgttcatatggcaatcaatcaaacacacctaagttt

SEQ ID NO: 224246 - DNA, 122 bp, Homo sapiens
acctctcaccctcagaaggctgagctggtgggggctgagttctgttacgtgtgacagcaacgtctaggccaagcttgtccaacttgcggcccaccagctgcatacaactctggacggctttg

SEQ ID NO: 224247 - DNA, 122 bp, Homo sapiens
ggacttgtcaattgacagtggccatagagtagaggaatactagagcgtctcaagcggccccgcccctagttctgttccggtttgccggccgcaattttttccggaagctgtttttctcctgg

SEQ ID NO: 224248 - DNA, 122 bp, Homo sapiens
cagagcgccgggtccacgccttccccaaggaatggggcgtgtctcggcacccctcggtgacgcctccactgacatcatctgcggattcccgccccgaggtttctaaatccagacattcccgt

SEQ ID NO: 224249 - DNA, 122 bp, Homo sapiens
ggttctatcaatgctttcatacatacattgtatgtgtttcagcttccattctgtaggtctcggctcattaaccactttttctgtgaagttccagctctactatcattggtgtgtcaggacac

SEQ ID NO: 224250 - DNA, 122 bp, Homo sapiens
gcagcggtaggacccctggcagccccctgtgctggtgtcgctgtcattggccgggggaggcggcagggagggggttggggtggctgccccggagcatgggggagccgccaggaggagtgtga

SEQ ID NO: 224251 - DNA, 122 bp, Homo sapiens
gccagcgctttcaccggatggccaccggctgggcagttctcgggagtccacttggtcacccgctgcagggctgcccgccttccccggcggcctggccggcccctcctgcggtgggtggcggc

SEQ ID NO: 224252 - DNA, 122 bp, Homo sapiens
agtccacaacacaccgactcacctccgcgcactctgaccccgaccgacgcggcggacgggcgggcgctgtggccaaccgctgagcccgctgccgacccctttgaccaatgggctgcagtcag

SEQ ID NO: 224253 - DNA, 122 bp, Homo sapiens
aagagcagacctgaacttgactcctcctacgccctgtgaaggctgcaaggtggttccgtccgaggcgcggactccgcccccacgagcgccgccattttgtttggctgaggggagcgagcggc

SEQ ID NO: 224254 - DNA, 122 bp, Homo sapiens
gtccggcctctgtcaaaggcagggacttccttggttcaccataagccttttcttgtgtcccgggtcggaacaggagaacctgtaggttcatgtaaccgacaagtctgttcgcgatgccgtcc

SEQ ID NO: 224255 - DNA, 122 bp, Homo sapiens
gcagggtgggcggccccctgcccgcccaggccccagagttgggcagtagcagagggacagcgcgtttgcggctgaccacaccctgttctggccagagcaccccgcacctgaagctcaggggt

SEQ ID NO: 224256 - DNA, 122 bp, Homo sapiens
cttggagtttagttttggagttagccttgcatatcccttctgtatcctgtccctcctccacgccgacccgagagcagctgagctgcgctggctctgggcagggagtgtgccttaatgggaag

SEQ ID NO: 224257 - DNA, 122 bp, Homo sapiens
ctcctgttcgcctctggacacgggggctccgtgactggcctctgagtgggcctgagtgcccgtccgcactggcctccccacccggcaccctccgtgggacgaggctgcacatctcggtgggc

SEQ ID NO: 224258 - DNA, 122 bp, Homo sapiens
gacacactgaggtgcatgactgcacatgaggggtggggctgtctcctggcaccgagtgcccgtctatgctggctgggttttgagatacgaacagtctgccctcagcagtttcagtttgggac

SEQ ID NO: 224259 - DNA, 122 bp, Homo sapiens
ggcaaatgacttttcagcatgtgccagctctggtcatgttatgctggttgcaaacccctccgcaccatgctttgtaatgtcacagttctttgtcaagctgcagaggagatcacctccaatga

SEQ ID NO: 224260 - DNA, 122 bp, Homo sapiens
ccccgatgctctggcataccgtctgaaaaccgggggcggggactgggtggaggtgaagcccgtgacctcccagaaagagttttgagcctccagccttgaggcaagtcccctctcactcagtg

SEQ ID NO: 224261 - DNA, 122 bp, Homo sapiens
gcggcccacacaagcgttacagaaccccggccagggacagcctgacagaaacaaaatgtccgctacaaggaggagccggaagtcccgcccacgcaccccccgcaggcactgaaacacccctc

SEQ ID NO: 224262 - DNA, 122 bp, Homo sapiens
cctggttagaagccttagtctggattcggcagattctgaatctgggaccctctgcgctagcggcttggaaccttgtcaccctcccctcccccacccctacttccacacacctgattagttgt

SEQ ID NO: 224263 - DNA, 122 bp, Homo sapiens
cagacccaggcagagagagcaaaggaggctgtggtggcccccgacgggaacctgggtggccgggggacacaccgaggaactttccgccccccgacgggctctcccaccgaggctcaggtgct

SEQ ID NO: 224264 - DNA, 122 bp, Homo sapiens
atttgccttggttgaggatgggaagaagatgcctccttccaaagattgccgtgaagatggcgatgcgataatgtgaaatcgctgtgcgcgcggctggactctatcaatcatggttgtcttcc

SEQ ID NO: 224265 - DNA, 122 bp, Homo sapiens
agactgtagataattggattgaccattggtgttagtacggagtaaactatagcaagtgttcggtcaagggtcagggaatagctcttctttagccgcacatacatgaagatgatgctcccaaa

SEQ ID NO: 224266 - DNA, 122 bp, Homo sapiens
gtgtccccggccgagtttggtaaccaggcagcggggaggctggcaggggattctagaaggcgcctgagaactgcgcgccaaccgcaccgcccccttgaaggtcggggccctatctccgggaa

SEQ ID NO: 224267 - DNA, 122 bp, Homo sapiens
gtgacctcaggtgatccacccgccttggcctcccaaagtactgggatgacaggcatgagccgctgtgcccggctctagtacttaggactacagacagggaccatcatgcctggtgatcctcc

SEQ ID NO: 224268 - DNA, 122 bp, Homo sapiens
cttgggcgcgccccctgctgcccgcggccggagccgttcgccacacccccgtgtttatgtcggtccacgggggttgcctgtccctttaattggcatgtaccaagtccttccaggtcacattt

SEQ ID NO: 224269 - DNA, 122 bp, Homo sapiens
aaatctttctggcttgttcttctgccactggttggagaaagctttatacttttaagttgtcggaggcatttgaactagaacgactccatcttgaataggggctgggtaaaataaggctgaga

SEQ ID NO: 224270 - DNA, 122 bp, Homo sapiens
tgctttgttcttttttggaggcctgtgtcacttgtgaaaatgaagattcagctgatggtgcggccacatcctgtggtcaggttctggtagaagacagctgttgagtgactgtgaggatgaac

SEQ ID NO: 224271 - DNA, 122 bp, Homo sapiens
ctttcctcttgccatactgagtggcttttcctgcactttcatgcccttcccagtcttctccggtgggtgaggcctgcggcacactgggctcttctggtgcccctgcagaatctctggcatgc

SEQ ID NO: 224272 - DNA, 122 bp, Homo sapiens
aagagaaacgcttgaacctgagagttggaggttgcagtgagtcgacatcgttccactacacgccagcctgggcaacagagtgagactccatctcaaaaaaaaaaaaaaaaaaaagagtttct

SEQ ID NO: 224273 - DNA, 122 bp, Homo sapiens
gcagtggccagatcttggctctctgcaacctctgccttccagactcaagtgatccaccttcgtctccagagtagctgggactataggtgtgcacaaacacacccagctgagttttaaatctt

SEQ ID NO: 224274 - DNA, 122 bp, Homo sapiens
ggcgggcctcgccgctctgtgggggagggcggtgtggggccgggcctgaccccgggggcccgccccgcgtctgggcggtgccccagtgccccggcctcgccatttcccgctcagccctggag

SEQ ID NO: 224275 - DNA, 122 bp, Homo sapiens
aggggtattttcgagcgatttggtgttttgtctctttggaacggaatcggatacgttttgcgattgtttccattttgttctggtcggggagccgagttggttcctgctcgaggcgctgggag

SEQ ID NO: 224276 - DNA, 122 bp, Homo sapiens
agacgtaaagaaaaattcggagcgagtctcactcgctgtggtccaacaggcaagtcctggcgggtggcaatatatgtgaaaaaaacagtcatacagataaaacagtagacggcagctattgc

SEQ ID NO: 224277 - DNA, 122 bp, Homo sapiens
gtgggcgccgactgctcctgcctcactgccacggtgccctcggttaccacacagcctgcgcgggggctggtttgcaggaagcccccagagagtccccacccgaatcctcctttattttaaat

SEQ ID NO: 224278 - DNA, 122 bp, Homo sapiens
aggcccaaaccttgcagaagccattccatgtttcctgagcaggaaaagacaaactcagaccgacaaccttggacttcaaaagactgcacacaaggggaggaaggactgagagtaccaaggcg

SEQ ID NO: 224279 - DNA, 122 bp, Homo sapiens
cctgactgatccctctgactctattgggagggttgcatgatacccatttcaggacagggccgccaacaggacaatgcatggacattctagtgtccccttcactgttacatcctcataggctg

SEQ ID NO: 224280 - DNA, 122 bp, Homo sapiens
ccgggtgccgccggatggggagtctggctgagccggagcgggagccgcggctgggggaggcggagccggggtgggcagtgtggtgtatctctctccaccccgggccgcgctccgggagggaa

SEQ ID NO: 224281 - DNA, 122 bp, Homo sapiens
ccacgctgtggcgcgcgtggaaggtgagggtcctccgctgtcccgccgcctcccacagggcggcccagagcctgcatcttttgcaaagggaacataggatggagagaaagaaagtcccgcct

SEQ ID NO: 224282 - DNA, 122 bp, Homo sapiens
tgatgccctttgtcttcgagcactatacatgatctcaagggttatcagttctagacaccacgaaaatgggaaagctccaatgacaagaccttgacaacaatcattccttgtgaataacttca

SEQ ID NO: 224283 - DNA, 122 bp, Homo sapiens
gacgtccctcccccgaccccctcccggcgcccggcgtccggcctgccgctcccgctgctgcgcgccccccttccgaaggcaaagcaggagcccgccttattatcataatgtattcaccttgg

SEQ ID NO: 224284 - DNA, 122 bp, Homo sapiens
cctgattgacagttctcacgaccccgccccatagctctgattggatagggctccaggtcccgccccctgggcactgagtgacagaagaagcgatcacacagtgctgagtcgagcgggatgaa

SEQ ID NO: 224285 - DNA, 122 bp, Homo sapiens
ataattgctggtaattctagttttaattttttgaggaacctccattctgttttccatgggcgataccattttacagtaaagggatgatggaagaaaaacaataaagtggcattttgattatg

SEQ ID NO: 224286 - DNA, 122 bp, Homo sapiens
cgtcccccagaggctgctgaggagagccctcggagatgcagtgcagaagcctctccctgacgctgctgatttgggggtaggcatggaaatgtagagagtaccgctcagagaagaatctgccc

SEQ ID NO: 224287 - DNA, 122 bp, Homo sapiens
tccaaaggggaccccaaaggtgcccacgcggggctggggcctcctgggcgtcgttgggagcggccactaccggcccgggtccgagctgtcagcctctccaaagcctgcgcgagaggagccgg

SEQ ID NO: 224288 - DNA, 122 bp, Homo sapiens
tgagccaggtgggctctttcaaaagccacttaaggacaaaaaggaagagcctgcatccgtcgcccgtgcccgcctcactggacccgccccagctctgctggcatccctggcactcaccttcc

SEQ ID NO: 224289 - DNA, 122 bp, Homo sapiens
agttctaattctcagtacaattttccagaaattgagatcagagcgtgacttcacttgccccgaatcacccctaagggtcggagatgaggagccccaagtaaatatgttggcattcctgcagt

SEQ ID NO: 224290 - DNA, 122 bp, Homo sapiens
aatttcagacttattaaccttcatggcctctggtcttctgaggaagcagtctgaggagcccgagttttgaaaagggaagcaatcctccaaggctgcgatttccacagaaatcacatgtgagc

SEQ ID NO: 224291 - DNA, 122 bp, Homo sapiens
ctcagaataaataggtttctcacttcccctgctttgtttttgtttttgttttttttttgccggtgagtaatgtgaagcacacaggttaacttgcccagggttatagtagttaatgatagcct

SEQ ID NO: 224292 - DNA, 122 bp, Homo sapiens
tgtgggattcgcccaggagctggaaacgagggagggaagcgagccagagccttgtgtgcacgtgtgtgtgcgtaacacacaaaccagggggcatcgctaataaatcaaatatcgtgataaat

SEQ ID NO: 224293 - DNA, 122 bp, Homo sapiens
cagtggctggggtcacgcgtgcccgggaacggggtgggggtaaccgggtctccccacaggcgggatcctgggactggtgtcgctctcagccgcccacctgccagggttgctggaaggaaggc

SEQ ID NO: 224294 - DNA, 122 bp, Homo sapiens
gcgacccgcgcggaggagggtcgggctgactgccgccgctgagctgtccccggacgggagcgcctgtccacggcactcaccccctccagcggtggaaatgtggagaagtaagtgggaggcgg

SEQ ID NO: 224295 - DNA, 122 bp, Homo sapiens
tacgaaaattattacttcctaggtaaaataacgttcaaccagacagccattgtcgccattcgacggaaggaaaaactgaggttccaggagcttaagggtctgggcccagttcaggggggttg

SEQ ID NO: 224296 - DNA, 122 bp, Homo sapiens
cccaccccacccatctgcgtgggacacagtgactcctagaagggtatcccaggattttagcggccaggtgtgagcgccctccacgcggtcctccgagacctcagggcgcgtggcaactgggc

SEQ ID NO: 224297 - DNA, 122 bp, Homo sapiens
ccaatccgagcgcagtcttccgcagtcgcgagtacggctgcagccaatgagagaccggggcgcctcggtggggtgagacagggcgctcactggcggaaccccgggggacgcggtgatgggag

SEQ ID NO: 224298 - DNA, 122 bp, Homo sapiens
gtggccggtgctaccctttggaggtggcgcggctctaggcggagcaatgagccaggagtccgttttctagaatgttgacacaagggcattgacgaggtgtcaggacggcctcactcactggg

SEQ ID NO: 224299 - DNA, 122 bp, Homo sapiens
tagacccctaggagagttattgttaacttccctagacccctaggagagttattgtttggacgccagcggccgaacccatcagacgggctaggcgcgcacgtgcagttaccaaaatacagatg

SEQ ID NO: 224300 - DNA, 122 bp, Homo sapiens
cacacccccagcgatgcgtacacagaccgaccgacgggcgttccagggtccacaaagtcacgtgcaggcagagcccagaggatgtactcacagacacaaggccacagtctcgcaaatccaca

SEQ ID NO: 224301 - DNA, 122 bp, Homo sapiens
gcggcccgcgccccctccccaggccgcggggaaacgcagcgcgcgccccgcatctgcccgcgggcccagcccctcactcacccagagctcggtgccccagctcatggtgcaggggacgcgaa

SEQ ID NO: 224302 - DNA, 122 bp, Homo sapiens
caggccctttctctgcacagcagggtaacgggtgagtcggccctcgtggcagggcggtcccgagggggtggagcggtgctggctcacgctcgtgggcaccagcgtcctgggctgctgtggcc

SEQ ID NO: 224303 - DNA, 122 bp, Homo sapiens
cccgcccccaaatgtggtcctttccacgggcgccgccatgttccacagccggaagaggttcgcattttatagtcttcggggaaaaccggctgtggagaaggaaatagggcccggcgctgagt

SEQ ID NO: 224304 - DNA, 122 bp, Homo sapiens
gcggagggaagcgtcaggcctggctgcgcgcgccctggctagggagctccgagtcccggccgcctggtcctttcattctgggcttcttcgagattctcgagggcttccagccggcagtgttt

SEQ ID NO: 224305 - DNA, 122 bp, Homo sapiens
acttcctgccacctcgtgcctcagtttccccaatgcattttctatctgaaaggcagtgtacggaccaggcaacatggctcatgtctgtaatcccagcactttgggaggccgaggcaggtgga

SEQ ID NO: 224306 - DNA, 122 bp, Homo sapiens
ggagcctgactttccactggaggtcccgctcctgagggaaccctgaggctgcacagccaccggatcaaggtcacatatggggggacagaggctcccactcctatggtgcccttaccccttac

SEQ ID NO: 224307 - DNA, 122 bp, Homo sapiens
ttttctcttacacactaagggtgtttaagggtttacgaagcggtgagcttattgcaggttcgtaatgtttctgtatgagggaaagtttattgcagggttggaaagtctctggccggagggga

SEQ ID NO: 224308 - DNA, 122 bp, Homo sapiens
ggttcccatgagacaggagaaagccgcccatcaccgtggagaaccaggaatggcagaccacgcggacgccaacagtttacgcagctccccagctaggtgcaaagtggccaaaggaagagccg

SEQ ID NO: 224309 - DNA, 122 bp, Homo sapiens
gtgagggccggggcaggggccgtcttgagccctgtcgagggcctcttgtttttccaccaacgccttcgttgggctggggatggtgcttcactacctcgagtttctagggaaggcagaagcca

SEQ ID NO: 224310 - DNA, 122 bp, Homo sapiens
ttggccctgcagaagcaaaacttggtgatcccatgggtcacaaacgtccgctgtgtttggcgcgggatcgggggcaccgggggagtgaagggatgagctggtgtgcgagtgcggggaccggc

SEQ ID NO: 224311 - DNA, 122 bp, Homo sapiens
agtgagaaggttgcaaccaaaaatactttttagtttccttcaaacatggatgctgccatccgtttggagaagtagaattcaacatcatggctcaactggagctgcataaacccctgcctaga

SEQ ID NO: 224312 - DNA, 122 bp, Homo sapiens
ggatcgagtgtcggccaggcggctggatggtccaggaaagagtccggtgtcagcagagtgcgtctcccgggagccggcagagctgggcagctggggccagggccggccccagggaactagac

SEQ ID NO: 224313 - DNA, 122 bp, Homo sapiens
cctcctcaacacttcctgaaggaaactgacaagtaaggcggcggccgctccgggaaggggcgggtgtggacccgacaagcttgctccctccagcgagcccccagcgcccgcgcgccgagccg

SEQ ID NO: 224314 - DNA, 122 bp, Homo sapiens
agacaacactcgatatagcccaaatgatttgcagaaacactttcaaatgtggcaccatggcgaattaccttcatatccttgtgaaatgtgcaacttttcagcaaatgactttcaggtattta

SEQ ID NO: 224315 - DNA, 122 bp, Homo sapiens
atggggaccatgagggctgtggctcagccaggtctgcctgggagacctgtgttctagaatcggccctgctcctgacttgccccactcaggcggtcctcccccgaggtgctgtctgcatgggg

SEQ ID NO: 224316 - DNA, 122 bp, Homo sapiens
gggagggaccctgagagggtggagccgggccggagcggcagtgggcgtggctaggtggggcgggacggagccgcggcggaggatggggcggggtttcatggggtaagcggggccgaaataga

SEQ ID NO: 224317 - DNA, 122 bp, Homo sapiens
tggcttgccgtgatcttattgtggttagtactttacgcggtggccgcagcagcctgggctcgaatcccagtcgtggcaacgtccattctagggtgtagcgctcttctttccctttagcctct

SEQ ID NO: 224318 - DNA, 122 bp, Homo sapiens
gagggcttcgtgggccccggggagtcgggcgcagagacttctccaagtttgtgcgagtcccgagccctctgcctccctgccccggcccccgccgaaggctggcctaaagacgggctccgtgt

SEQ ID NO: 224319 - DNA, 122 bp, Homo sapiens
gaccacattctcgtcgccgtctcgggaccttcctgccgcctgagtgcaccgcctcccgcccggctgttgtcacttgcacccacagacctgcggctcacagtgggcctgtcgacagccggagg

SEQ ID NO: 224320 - DNA, 122 bp, Homo sapiens
gaaggaggctttcactcctgtccaagggccgatctgggccccaggcccctggcatgtgtgcgcctgtgtcgggggatccaggctgggacggggggcccgggaggccgcagccccccagaccc

SEQ ID NO: 224321 - DNA, 122 bp, Homo sapiens
caggtgcctaccgctcgttgtctgcagctactttgaagccatgttccggtccttcatgcccgaagatgggcaggtgaacatctccatcggggagatggtgcccagcaggcaggccttcgagt

SEQ ID NO: 224322 - DNA, 122 bp, Homo sapiens
ccgggagacagcagtccgcggaacctgagcccagaggcagcggggccccggggccccggccgaagccaacaggcgaaaacagggcctaggccccctgcccggcctcccccaagccctaggcg

SEQ ID NO: 224323 - DNA, 122 bp, Homo sapiens
ccttcccgcgactcaaaggagcataggggaacctgcaggggcgtggccggggcgtagctgcgcgccgacggcggggggtcgaagggcacgcagtgccggcgtcatggcggcctccgcgcacg

SEQ ID NO: 224324 - DNA, 122 bp, Homo sapiens
ctcctacaggtttccggtgacccttgtgtctgtgtcacttccttcagaaatcgacgtggccgtcctcggaagtacccagtgagcgctcccatggctccccctgcagttgggggcggggagcc

SEQ ID NO: 224325 - DNA, 122 bp, Homo sapiens
taccctctctatgctaaaacaggaaatgcatttctgacacttttaaaatgagcaatcacacgtataatcaacttggttaaaacttccttcctggtaactgcaacacttcctctgcatctgga

SEQ ID NO: 224326 - DNA, 122 bp, Homo sapiens
ccaaaaagccacaacgggccctggggagggagaatgcacccgtctgggtgagcagttgaacgtgcattggctgaggtgtgaggctcgggaaatggctctccaggcaaagacgctgcttggag

SEQ ID NO: 224327 - DNA, 122 bp, Homo sapiens
tgcgaagtcctagagcctccaaaactcaccgcaaggggtgaactgaccagcagtgggctgcggatgaagcggcagaacggcaagtctggaggctgagaacattctagtcttccatggaatgg

SEQ ID NO: 224328 - DNA, 122 bp, Homo sapiens
ggagcagagggcctgcctggtggggtgatgagcccgttgggcagatgtgcaccctgagggcgggcggcacgtggggagcccagtggggttcgggcggccgctgagcgtgctgtctctgccac

SEQ ID NO: 224329 - DNA, 122 bp, Homo sapiens
tgcggattcgatcattcacatcggtaagaaagtgttggtgcagctcgtggttacttttaccgtttcagttctcaaatgtttccccttcgctttccccctctccggtctctgtgtgtcttgtt

SEQ ID NO: 224330 - DNA, 122 bp, Homo sapiens
cgcagcgacatccccacttatcccgctccgcgaatactcgctcctcacccgcctgctacccgggggtaaaacgtttgttcgtagcccctgagactcccaatcaaggatgcaaagtaaaatgc

SEQ ID NO: 224331 - DNA, 122 bp, Homo sapiens
acgcggacaggtccagctcatagctccgctccaggcagcgcacgcggcacacagtaggtacgccgctgcggctcagttccgccccctccgcaggctccacccacggctcagctttgagcctc

SEQ ID NO: 224332 - DNA, 122 bp, Homo sapiens
tttccctgttcccttactcagagtagggaaccctagcctgtgaggctgcagaaggaatcccggaggatagtggaaggaaggagagcagcgttgtctaggagggctcttatgtcatctctgat

SEQ ID NO: 224333 - DNA, 122 bp, Homo sapiens
ctcaattccacaggtgacttttgatgcctttggccaactaggcactcacattccctctcccgaatttccctctcctttctgcaccactaccagccccagggctcccagtggcaaggagccta

SEQ ID NO: 224334 - DNA, 122 bp, Homo sapiens
atgcacctcattgtgaggtcctgggcacctcttaggggaagaaaaaggttataaaatgttcgagccaattgaaagttttcacacttttgctgagatgtgcctcttattcattaaaaataaaa

SEQ ID NO: 224335 - DNA, 122 bp, Homo sapiens
ctctccaggcacatgacctcgcataattgactcggaaaggaccccagctttccacgcgcgcgcaagcacagttaagccacctgcaggaataaacacgcgagaacatccaccgcttccttgca

SEQ ID NO: 224336 - DNA, 122 bp, Homo sapiens
tctaacaatttctaaaggatcagaacagagttctagaaaccctgtaatgctgttattgcccggaatcctgggttattaaacattcttatccgcagaagcaaaggaccatccaatcctattca

SEQ ID NO: 224337 - DNA, 122 bp, Homo sapiens
cgcacaagatttcttcgtctgtctccaaaggtttctgaagccccaccctttgcccacgcacggtgccaaggagactgtgccctgccttgacaacagttgctaaggggcggagacttcggctc

SEQ ID NO: 224338 - DNA, 122 bp, Homo sapiens
agcccgtgagttctcagcaaacccaagagatgctggcaggaggtaccaggccaggctgcacgctggggctccttatatacccttcagagggtgttgtgggacctcgtctcctcccctaaagc

SEQ ID NO: 224339 - DNA, 122 bp, Homo sapiens
aaggacataagtgaaatgccatttgcctatagttctaaagcctttcaataatttatttaacgcctataaaatattcagcacagcaccctagggaagttaaaaattgggacaatacacatggc

SEQ ID NO: 224340 - DNA, 122 bp, Homo sapiens
gcaccggccggaggaggggccaccagggcctctaggcaggactgccatgcaggtgcgctgcgccacacgtgggttcgtgtgcatttgtgtgtgtgtgcatgcgtgagtgcgtatgtgtgtac

SEQ ID NO: 224341 - DNA, 122 bp, Homo sapiens
atgacaaagattctttggccaaactttagtcagacttctgaatcttctgctaggtccatccgtgcacttccttgtaaagtctagttttagcagaaaactgagctaagtcagtttagcaagaa

SEQ ID NO: 224342 - DNA, 122 bp, Homo sapiens
tgaacacataggtccccacttgcagcccagtcacagtagcaacactgctgttagcattctcgagctgcaccccatcaggtcccctgcaaaaaaagaaactagagggtagagttgtacctgtc

SEQ ID NO: 224343 - DNA, 122 bp, Homo sapiens
tctgctcccatcatgggcatcgcccgcttaccttcagcctttggaaatgccaagacaatccgcaacgacaactcaagccgctttgggaagtacattgacatctactttaaccccagcggggt

SEQ ID NO: 224344 - DNA, 122 bp, Homo sapiens
caggctgggagcgggcatgtggacaggtccctccctgcagatccacgtctgcctcccactcgcagatgcccctgtgcccagcgcaccgtaggctcacttggtcaaacatcaggggcatggca

SEQ ID NO: 224345 - DNA, 122 bp, Homo sapiens
ccaagccagtaccggggtgggcgctttccacccaacctccacttgaggacccagcttattcgtgagaccttgacttctgcctgaggcctcagatagaaggagcctcagaaggctcctcctcc

SEQ ID NO: 224346 - DNA, 122 bp, Homo sapiens
gtgggttctttaccaggcccggggtttaattgggccttggcataaggctcccagcaagcgcgggacattctaggctagctgttcccgggctagaggagagtgagcgctcaggtctgggccca

SEQ ID NO: 224347 - DNA, 122 bp, Homo sapiens
acggcggttccgaaagctgcctcccctctgccatccattcctaaggcaagtgggaagaaacgtcacctcccgctccacaatttctcagggaagccgaggaggccagcgtgacgggggagcag

SEQ ID NO: 224348 - DNA, 122 bp, Homo sapiens
acacctggtttctcatttagaacaaaggagagaaagtgcagtttcggtgagtggaggagccggcagcatctccaggcatttccatgtggggggcacgcgcctgtgtaagtgccttatcgccc

SEQ ID NO: 224349 - DNA, 122 bp, Homo sapiens
gtctcagctgccgctgctgccgggaggtgccggccccacgcggcgcctgagcctccagagcgcgaagcctccaagcctgctgcaggccccgcctccttgtcagttgcgcgtccagcgccacc

SEQ ID NO: 224350 - DNA, 122 bp, Homo sapiens
cctgttcctcacagcgccttccagctcaggcctcgtttataagggcactcaagccttccacgacaacgggtcctcatgacttactcacctcggaaagccccacccccaagaccatcacattg

SEQ ID NO: 224351 - DNA, 122 bp, Homo sapiens
aggaggtagcacccagtcttattttgctgccccccatctagactacctactgcaggtggccgaggccttgtccttgagggaattctgcaacagagagtatcactctttctgggttgcggttc

SEQ ID NO: 224352 - DNA, 122 bp, Homo sapiens
cggaacaagtcttacttctagaacccccagggcccagcggagtgtctgacacatgatagtcgatgttgattaaataataaatgaatgatgaacacatgccacctccttgacgggcagttcag

SEQ ID NO: 224353 - DNA, 122 bp, Homo sapiens
gcctcagaaagtaactttttcaaagagacaatgtctggctctgttccccagactggagtgcggcgactccatcatggctccccgcagcctccacctcctgcgctcaagagagcctcccacct

SEQ ID NO: 224354 - DNA, 122 bp, Homo sapiens
tcctggaggagggaataactctaaaaacaagagagatctccttcttgccctcatccagctcggctgtctatgggggaaaacaagtgagagggcaaacaagtccccaggaaaggaagcatgca

SEQ ID NO: 224355 - DNA, 122 bp, Homo sapiens
tcctccagagtatatgcatccccccaacccagtatgtcctacgtgaagtttattcctatccgtgtgctaatctttaccatagcgtttgcatttgtttttcccttgagacagagtctcactct

SEQ ID NO: 224356 - DNA, 122 bp, Homo sapiens
tgctacaagtccttcatggggctgttctacgcaacactttggaatgcagactcccttgagcgagcacttgtttagcatagtttcaccagtggcctgtctgtctaaagtagtcggcgaatatt

SEQ ID NO: 224357 - DNA, 122 bp, Homo sapiens
acacagtttgttaggaagtgagggagaggggtgagcgctgtcccggcccgcgctgggaggcgggactcagacttcagcacggggtcggggtttcggcctaaaaccagcctcccccaaagccc

SEQ ID NO: 224358 - DNA, 122 bp, Homo sapiens
ccgccggtttgacttaacagttggcgggagccgttccaaaatcctcccagaaagttgctgcggtggcatctagggtcagggaggggagagcaaggaagggcggtgtgagcatgcgcaatagc

SEQ ID NO: 224359 - DNA, 122 bp, Homo sapiens
cggcctgttccggcgggcccgccacgacagctcgcacacctgcacaaatcgctgagtccacgtgggagcccagactcagccacggcacagcacttggctcacctgtccactgagagtgggga

SEQ ID NO: 224360 - DNA, 122 bp, Homo sapiens
cggtactgctggctgccccagctggtcaggggcgcgaagccgggcatgaagaagtgcaggcgagggaagggcaccatgttcaccgccagcttgcgcaggtctacgttcagctggcccgggaa

SEQ ID NO: 224361 - DNA, 122 bp, Homo sapiens
acaggactgtgccagacagctgggatgaagaatgaccatctgggcaaatcctccttggaacgcagatcctcttgttacggtctcagtggaggaagtcagtaccatctctttcataaatctca

SEQ ID NO: 224362 - DNA, 122 bp, Homo sapiens
ccgccgcggcccgtctcctcgcgcccggcctggaggcggcctcggcccctgctgcggggccggggtggctgaggagacatatttaaaagtttattaaattttagctgacttaagtttaaata

SEQ ID NO: 224363 - DNA, 122 bp, Homo sapiens
tgctcacttaccaccctgacacccccatttccgagtccacatggcacctcctggatgccacgaatgttcccgggcagtgctgtgccagcacctatgagagcctggcccgtgtttgctggtga

SEQ ID NO: 224364 - DNA, 122 bp, Homo sapiens
gcagatgcacaccagaagctgcagccaagtgcatgggctctgctccccacagctcctagtcgaagggccttcttcctggaaggggcagggccttacttttctcatcttgtctgcagttgcct

SEQ ID NO: 224365 - DNA, 122 bp, Homo sapiens
cacctgtggggccctatccagaccccctaatccacttgcctagcagccccactcttccctcgatggctcagatcctgagatccaaggaacaccctgggtttcccaaccactctcttactgca

SEQ ID NO: 224366 - DNA, 122 bp, Homo sapiens
cgggttcttgccaaatgtaagagggatttggctttactgccacttagccggccgcgaaggcgctgcggagcccacccccgcccccggctcgagactgcggcggtgcgcactgagcctgcgcg

SEQ ID NO: 224367 - DNA, 122 bp, Homo sapiens
acccttcccactcccccatcgtggggcagctgcggctgagggctgtggctttggcagctgcgacggggagcggcggagaccgcctctgctcccgcctggggtaagggggcgttttgggagcc

SEQ ID NO: 224368 - DNA, 122 bp, Homo sapiens
agccagggtctctcctcccacccagcaatacggacaccagcgccggattgttctccggggcgggagcatcctgggctctgcagggtggtgagctgcgtccctggcatccacctgctccgtgc

SEQ ID NO: 224369 - DNA, 122 bp, Homo sapiens
aaccctccccaccccgaggctctgaaggtgggtgggaagaaggaaggcccggagggaagccgccatcagctcagccacccacaacggccgccccgccggctgttcccagcagggctgtgccc

SEQ ID NO: 224370 - DNA, 122 bp, Homo sapiens
ttcctgatcattgggctgtgttggtcagtgaagtacccgctgaagtactttagccacacgcggaagaacagcccactacattactatcagcgtctcgagatcgtcgaagccgcaattaggac

SEQ ID NO: 224371 - DNA, 122 bp, Homo sapiens
ggcggtgcctcccggcccagcctctggtggctccccctcgttcggctgggcctaattcctcgtcccctctggggccctactgcggcggctcagcacgcctgcagaagctcggcctagccgcc

SEQ ID NO: 224372 - DNA, 122 bp, Homo sapiens
ttccccggtgcaagcagctgttggtctgtgcttcctgctgctctgctctgcagatactaacgaagccacaaccagggggccgggtggtcacagcagggaccacagctgggcaacctataatc

SEQ ID NO: 224373 - DNA, 122 bp, Homo sapiens
agcacagaagctcctgggtgctcgcctcttcccacccgcgggtagaaccctccctgttcacgatccttctcaagagatgcacggaggccagccttcaccgctggccccgcggggccaacggt

SEQ ID NO: 224374 - DNA, 122 bp, Homo sapiens
tggcgcttcattgcgctataaactgatgggcgctttatgtgccacaaactgacggatgggcgcttcagtggcgctacaatccagaacgaggagcagcgatataggagctgcagacagaaaac

SEQ ID NO: 224375 - DNA, 122 bp, Homo sapiens
acggcagccgtggaactgctctgccttgcaggcgaaagtgtggtcagctatatcggagcgcgatgggggcctgagaggcgcatctgcgcaggcgcccggctcctaagtctacccaggaactg

SEQ ID NO: 224376 - DNA, 122 bp, Homo sapiens
atatcattattacattctaatatgttaacaaggcttctttaatatcattaaatatccactcggttaaaatttcccatttttctcctaatttattttatagcttacttgaatcaatatcaaaa

SEQ ID NO: 224377 - DNA, 122 bp, Homo sapiens
cctgacgcagaccacgtgagggcttcgtaaccaacacgaaaaagacggccggaggtgctccgagtggccaagggcacaaagaggtgctcagcctcctcacttatcaggaaactataggttaa

SEQ ID NO: 224378 - DNA, 122 bp, Homo sapiens
gtgacaccactcttcccggctggatggtcaattagctctggcatgagagaatgtcactgccggtgagcgccagcttcagggtcccacccccccatgcctggctcttggctgaacatttcttc

SEQ ID NO: 224379 - DNA, 122 bp, Homo sapiens
gagggctgtgaggctcttccgagacagaggacatggagccatttcgtaaaccggagcgcacggtacagacaagaaactgttatccggcccagcagctgcgagacccccgagcggaatgcaag

SEQ ID NO: 224380 - DNA, 122 bp, Homo sapiens
agctcaccttgaaggaacaaccttgctgggagtgcagtggggggacctttcccctggagccggagcccctgctgggttctggcagccccaggatgcccactgagctctgcttctctgggcac

SEQ ID NO: 224381 - DNA, 122 bp, Homo sapiens
agaactctcctgggcgcttattcacattgtctgatggcaggtggatggggtgggttaggacgcgcaaactttgttcatggtcaggagtttggcacatgtgaaacagtccctaggagagtgct

SEQ ID NO: 224382 - DNA, 122 bp, Homo sapiens
aatggaaagctgtaaaggccacaagctacaaattaggctttcttcttctgtgaaagccagcgataaaatatctaccagaatatcactgcttctcatcctgcactctaactctccatgttgct

SEQ ID NO: 224383 - DNA, 122 bp, Homo sapiens
ttgcattttctgtgtgaaattatgtagctcataagctattatcttgtatatgtgtgtttacgtgagtaaagtgattatgcttatgtctattttagttactgtgtgtgaatgtaattttttaa

SEQ ID NO: 224384 - DNA, 122 bp, Homo sapiens
ggtggctatcaccctcaatcctgacttctttctcagatcttccactgtctgcctttgaaacggggagccctcttggcccagaggaaagccaggatgattggtctctagctgccctgttcttg

SEQ ID NO: 224385 - DNA, 122 bp, Homo sapiens
ataccttacaaaactaaaattgctttttacttacatgacttttcattaacttgtattctacggtttaacattctttcattaatttaaaaaaaaaaaaaaaagtatcccaatcctcctcattt

SEQ ID NO: 224386 - DNA, 122 bp, Homo sapiens
acgccaacagatacatactctctttacataaggtgttagatacacagagatagataaatacgtgtaaatgatagagatatgatagctaagccagtccacaggttattagtcgtggtccacgt

SEQ ID NO: 224387 - DNA, 122 bp, Homo sapiens
agcagctgccctgcacttaccgggagagtctctgccctcagccagtagggagctcagcatcgccagcatcaaggtgacagttgctacccgaaggtctccggggatccgcaaagccttcttcc

SEQ ID NO: 224388 - DNA, 122 bp, Homo sapiens
tataaaaattttctcttcggagggagctctcttaacttccgatcttaagtagtggcttcccgtttctgcggtgctcgccacaggggtgtgtctcagagcagggaggacgggtgagagaaggg

SEQ ID NO: 224389 - DNA, 122 bp, Homo sapiens
ccaattgcggagttgaagtagctcctacgctttctcattggtcctcacccagggggaaggcgtggcttcaagtgtaaaaggcgaggaagcctggcggggctgtgggttgttccgctggtgga

SEQ ID NO: 224390 - DNA, 122 bp, Homo sapiens
agttctgttagtgacatgcattctgccaaaaaaaaaaaaaagaaaaaaaaatcacagggccggagactcagattttgtcagtagatgtgattcacactgtacttcctgccaatgcatgcaac

SEQ ID NO: 224391 - DNA, 122 bp, Homo sapiens
ggccttggcccgaacttacgcccaactcttgactgagtgcctggtgctctcgtggagcatcgcatctggccccttcctgtacgtcccgagcgcgctcgagccagccccggccccaaccctac

SEQ ID NO: 224392 - DNA, 122 bp, Homo sapiens
cccgggagccaggaaggtctgaatggagtgatgcgcctggacttttgttcggaaatcccgcgtggagggcggcctagcggggagaggctggaaacaggcgaggaggagcagggccgcggttg

SEQ ID NO: 224393 - DNA, 122 bp, Homo sapiens
taggggtgggtagagagctgggtggtgggttaaaagggctgatcaaggtccttaaatatccgatgttaagtaaaggtatcacagagagtaattttaggaaactaattcctctgctttgtttc

SEQ ID NO: 224394 - DNA, 122 bp, Homo sapiens
gatgctttagatgtttacaaaacagcccaaatatccttctagaaactggctccagcctggcgtagaggagtgctggaaattctacaaatgtcaccacgcagccggccaccaggtttgcacgt

SEQ ID NO: 224395 - DNA, 122 bp, Homo sapiens
aaggcaccacagaggtccctgtgacttccagggacttccaaggtgatttccaaaggtggccgtgacaactctcacaccctgagtgcccttttgcgtgtgactgcagcttgtcctagtgagag

SEQ ID NO: 224396 - DNA, 122 bp, Homo sapiens
tggcgtctccggcgctgttgaatggcgaaagctttattgttcccttcgggcaggagtgttcgtgtcctctatggcgctgtcaataaagaacggcagtttgaatcggtgctgaacaggtaacc

SEQ ID NO: 224397 - DNA, 122 bp, Homo sapiens
cacttcctttacacaggttcccgtttcggacgtggtctcttggtccagtcagtgccgccacgttcagacagcattttccactaacctcagggtcagcgcaatccgggggctccaactccaat

SEQ ID NO: 224398 - DNA, 122 bp, Homo sapiens
tttcccctgtctgggcctcagtttccctttctataaaatgggggtgaacaggactgggctcgggactcctaagccctgtccggctgagccttaacggctcggaggagtttgtctccatttcc

SEQ ID NO: 224399 - DNA, 122 bp, Homo sapiens
tcctggggggcttgtgaggattgaacaagcgtggacgcgttgagtgccttggaagagtcccggggccccccaagaggctcggaaggtgttcgcagcgtcctcacattggcgctccccgccgc

SEQ ID NO: 224400 - DNA, 122 bp, Homo sapiens
aatgatataattatggagattatgaacatacagctaaggatattatgaaagcaagacaggcgggaagcgtttatcacatgttggaaaacagcaagcttgcttatcagaaggcacatgtcagg

SEQ ID NO: 224401 - DNA, 122 bp, Homo sapiens
cgccttggaatgtagccggggagtgtctgtgacgtcaccgaggaactcctcctgcttgagcgcggcccgctgtctgctgtcgcctacagctgaccaatagagggcttgggtccggaagtgat

SEQ ID NO: 224402 - DNA, 122 bp, Homo sapiens
cgcaaactgccgggacactgcagcttgtgcgctctggcccgggaggactagtgggggagccggagaggccgagggaagaaaggtctgtctggaggctgtctgcgttcttggcgtggaggcgc

SEQ ID NO: 224403 - DNA, 122 bp, Homo sapiens
gtacagggacatgccgggagcgccccacgcctagccccaccgcgctcccggcgcggcctccgccctggtcccgccccccgggagtcgcccgccctgacatcatcccggttatgtaagagccg

SEQ ID NO: 224404 - DNA, 122 bp, Homo sapiens
tgctcacagccagccaggcctggaaagggttcatgctgcttattttaactaaagagtaggcggccagttctcttcattcttatcccctgctcaatgagtcaagttagtacattaataaagta

SEQ ID NO: 224405 - DNA, 122 bp, Homo sapiens
gccctggggcgcgagcttctgctgcaacccctgtctctgatccaggcaaatattgtagggcggctttggggcttgttttgttttgttgttgtaacggggcagggttctctttgggaagattc

SEQ ID NO: 224406 - DNA, 122 bp, Homo sapiens
atctcgtgatccgcctgcctcagcctcccaaagtgctgggattacaggcgtgagccacagcgcccggtcaggagaagctatttttaaagactttgacacatataaagcaatatttaaaatca

SEQ ID NO: 224407 - DNA, 122 bp, Homo sapiens
gtgagagacagtgaccaagcccaggagaccaccatgagttccagaaaaagtgagagagagcggccacttttcctgtctcggagatacctcctactcaggacgcaggaagcatggggcagggc

SEQ ID NO: 224408 - DNA, 122 bp, Homo sapiens
gtccaggaggcacttgttctgctgctgtggaagtcgccctgactcggggaggaagggacacgcaggtggtatcagtcttgctcaagtaaacaggctgttttccaaacattgtgacttggcta

SEQ ID NO: 224409 - DNA, 122 bp, Homo sapiens
gagcaagcagcccagtgtgtggtgtagaagcccaaatgtggtgaggatggcattcatatacggggcatacctgacaggaggtgtcactctgggtgaagaggacacccatgaatgccacacca

SEQ ID NO: 224410 - DNA, 122 bp, Homo sapiens
ttgaaaaacagtgttattatgtgattggtttttcataggcatcacttccaccctctgagacgagactcagactgcaagctagtcagggaatctccaagataaagagagcaaaagggagatct

SEQ ID NO: 224411 - DNA, 122 bp, Homo sapiens
gtggagactgcgttggggacgagtctgcgccctggacggtcctgcgtgtccttccgagggcgcagtgtccgcgcgggatgctctgcgccgcgggcggcccgggccagggaagttcctgcggg

SEQ ID NO: 224412 - DNA, 122 bp, Homo sapiens
ccaaagtggaaagaaacaactgctcacccgtcctcggggctccgtgtactttcaacacaccgtggacaggggaggaaatgggttctgcttgctgaccaccagcttctgatgctgatgcgata

SEQ ID NO: 224413 - DNA, 122 bp, Homo sapiens
ggaggctgaggtgggaggatcacctgagcccaggaagtctaggctatgctgagtggtgaccgtgcctgggtgctacagtgagaacctgtctcaaaaaaaaaaaaaaagaaaagaaaagaaaa

SEQ ID NO: 224414 - DNA, 122 bp, Homo sapiens
attttgtcacaggaatggctccttggagcacgcaaatgcaccctgcagcaggtgctagctcgcagaaggttgaacaccaagggggccaggcctgcaaaagggaggcaccaatgcaggatatg

SEQ ID NO: 224415 - DNA, 122 bp, Homo sapiens
gcggagtgcaattaggctttggggtggtttggctctccggctttccgtagcctctggccccgccccctagcaacgcgctggcttgtgttaacaaccggcccgggatcagaggtctgggtcaa

SEQ ID NO: 224416 - DNA, 122 bp, Homo sapiens
cagagggctcaattatatccatagtcacctttattctgaattaaccatttatcaagagtgcgcctgaaaagagtagaaaaaaataaaggagcccatcaaaaaaaagttccctggcaagtggg

SEQ ID NO: 224417 - DNA, 122 bp, Homo sapiens
aagtgattgaccgcagagccgatgagctcagagccggtggtgggcagtctggccggatggcggtgactcagggaagcggaggggctccccccaccccgctgctgctgccccccgcgtccccc

SEQ ID NO: 224418 - DNA, 122 bp, Homo sapiens
gactcttgaaggatgcccattcccttattagaggaaacaagttgtctattgcagttactgcggtgtcactagcaactggtaaagtgcctgcatacagtaggtattcactacatgttttctaa

SEQ ID NO: 224419 - DNA, 122 bp, Homo sapiens
caaggtgtccccttccgagatggcctgctcgatgacatccaggtagctgcgggcacaacacggaagctggttcatggcagagggcctcgtgatggaacggtgcgcacgctccgaccagcagc

SEQ ID NO: 224420 - DNA, 122 bp, Homo sapiens
atagcatctaattcctcatcagaaagtgggcgatttctctcatcaatttctctttcccaccgccaagcctgaagctgttcaggagtcatactcattatgtgacctaccaagaaaagcaaatt

SEQ ID NO: 224421 - DNA, 122 bp, Homo sapiens
tccgtcccattaattacctccatggaggaagcgaggtcaggactcccactcaggtgacttcgtcgcagggctgttccgccgtgacccaggtgagttcgtcgcagggctgttccgccgtgacc

SEQ ID NO: 224422 - DNA, 122 bp, Homo sapiens
gcacggctccaatccttggcatcggacatccggggagctggtcatgcagcatcgggcgatcgggcatccggggaggtggtcgtggagcatcgggcggtccgggaatctggtcgtggagcatc

SEQ ID NO: 224423 - DNA, 122 bp, Homo sapiens
gatttattttacatttccctttgtcaaaccctttgataaggttgcaagtgagcagtgaaccggtcaatctaacctggattagtctttgactaattaagactttaaagagcctttaagcttgc

SEQ ID NO: 224424 - DNA, 122 bp, Homo sapiens
gcctgcttgttccctgcggaccagctcgaggctgccccagtcctcctgccaggccctgggcgcccacgcccgccacgggctttcagccgcgggctgctcctgctcctcgccccgggtgagcc

SEQ ID NO: 224425 - DNA, 122 bp, Homo sapiens
cttcgagagcagatggaacgacatctaaatctgtgaataaagcagcaggcctgtcctggccggttggcttgactctctcctgtcagaatgcaacctggctttatgcacctagatgtccccag

SEQ ID NO: 224426 - DNA, 122 bp, Homo sapiens
cccctgcctgcaatgctctccccacttagataactctcagtcttcagatcccagttcaaacggggctactccaaggataccttccctgacccattcccacacaggttttcttagcacgatat

SEQ ID NO: 224427 - DNA, 122 bp, Homo sapiens
aagagaaatctggaaccgttgtaaatattcatgtggggggatgccccttcacccttcacccgcctctcccagctgcattcccccctcagtgatagtgggggagggcaaggcgactgccccac

SEQ ID NO: 224428 - DNA, 122 bp, Homo sapiens
ccgcctccccgcgccggggactgggacctgcctctggggaatccgcctagaagacggcggcggactggggtcgggcactctccagggctgtcaggccctccccagccctgcacctgccgcgc

SEQ ID NO: 224429 - DNA, 122 bp, Homo sapiens
ataggggaaggaatgtgaggctcaggagtggagtcttgctcagttagtctcaccccacctcggcgaagccctcctgtgctgccctgattcccttcacatcaaacatctgcaggggccacaat

SEQ ID NO: 224430 - DNA, 122 bp, Homo sapiens
gctgagctggccggcagggcctgagtcagcagctgggggagcttggcgctgggtggggggcgggggggcaggggagctatcaatcaactccccatcctgggacagaagggcagccaaggagg

SEQ ID NO: 224431 - DNA, 122 bp, Homo sapiens
gaagggagaaccggggaaaggcgactgacctggcacgttggaccctgtccgctttggtcccggccactttgatctcacgcgtctgcctaatcaagttcatctaccgccgcgattgccctgat

SEQ ID NO: 224432 - DNA, 122 bp, Homo sapiens
gttaaatcactggcaactggtggttaatcaatctccagcccttttaccctctctggaggtcgaggcgtggggctgcaaatcccagacctctaatcatgccttagtctttcaggggatagccc

SEQ ID NO: 224433 - DNA, 122 bp, Homo sapiens
ggttgataaccctccctgcccaactccgcccgcgctcccccagaccccgcgacgctggctcggtgacactggggaagaacaggctgccagggagggtctccatcgtttcccgtttccatcct

SEQ ID NO: 224434 - DNA, 122 bp, Homo sapiens
cacgtgacgcccggcccggaagcgctcgcgcaggagaccccgggtgacggggcccggcgccgctaactggagcgaaccccagcgtccgccgacatggcctggaccaagtaccagctgttcct

SEQ ID NO: 224435 - DNA, 122 bp, Homo sapiens
caatatccaaatcttcaaacctgctggaagaagtccacagcacagcctggaaattgcatccgttgcattctctcgtgcagttacctgtaaaccaaaaatcgcagtcacgactttctctaggt

SEQ ID NO: 224436 - DNA, 122 bp, Homo sapiens
gacgcccgcctgactcgccccattgcacaattcttaccgtggaacagccgcgtgactcggcgggagcccaaaagtttcccaggtttcctcagcctagaaaagcgtgggtgggtgtcccggcc

SEQ ID NO: 224437 - DNA, 122 bp, Homo sapiens
atgtgtgcactttaaggttctaatctcttctctttgtagctcttttcacaatattcagcacgcctcctcctgttgccctgcctctggatagctgtaccatgtgaatataagtgccctgagtt

SEQ ID NO: 224438 - DNA, 122 bp, Homo sapiens
cacttgattcctgtgactgcctagggagcaaggaggccgggtgaaaaagcggcaacggaacggaacacatggtcctgatgcagaggaggcagggtctgcatccagctttccgcagcagcacc

SEQ ID NO: 224439 - DNA, 122 bp, Homo sapiens
ccacacctgtgacggtgacagtgaaggaggccgactcatcgtcaatttcacacaagtactcgccggagtcctcgagctggacagcgggcagcaccaggcggcggacagtgtcttccttctgc

SEQ ID NO: 224440 - DNA, 122 bp, Homo sapiens
gctggcagcgcgcggcttctcagagctgagcaccctggaggtgctgccacaggtctacaacgtgcgcactgtcagcctgccaccgcccgacctgggcacaggcacagatggccctgccggct

SEQ ID NO: 224441 - DNA, 122 bp, Homo sapiens
acagggatctctccacaggtagagatgacaccattcctcctgtaacatggtccaatctcacgcttgttctgctttacaagaaagttgacccacgctggtgtcccctgaagaaatcacaggca

SEQ ID NO: 224442 - DNA, 122 bp, Homo sapiens
ggcctggggacacttgaagggatagggactggactaactggactagatccagatcaaccgcgggttactgtccatctcctgtgctggatcccattggcacaggttggaagaataaattgcgg

SEQ ID NO: 224443 - DNA, 122 bp, Homo sapiens
ctccctcccagccccgccttcagaccccgcccccagccccgaacttccagcaagacgggccgcttcccgccctcgagccccgcccatttccaggagccttgagcccagagtctccgtcccgc

SEQ ID NO: 224444 - DNA, 122 bp, Homo sapiens
accaagtggccccagcgccccgcaggagagctcagactccagggctggggtggcgcagagcggggcgtgtggagcgcatgcctgcgaggggcctacgaggcggctgcgaggcataaggttct

SEQ ID NO: 224445 - DNA, 122 bp, Homo sapiens
gtggaatttctgtgccatttgtgtgtgtaggagaaacccccaaattctcccaataaattgcgagtcccgtaggataggtacgcatttgatggccttgaaaaagcgatccttgtatttgccga

SEQ ID NO: 224446 - DNA, 122 bp, Homo sapiens
tgcacttcctcctctcaggccccatccccatgtggcctcttctttgggtctggcgctctccgggactgaaggctacccccgaccctgtaccccgcgctcccgctctcgcctcctcctctcag

SEQ ID NO: 224447 - DNA, 122 bp, Homo sapiens
ggccacggaatctcccgtgtgctctgagaccactgacgtgctctggcctcagggggcccacggaatctcccgtgtgctctgagaccactgacgtgctatggcctcagggtgccacggaatct

SEQ ID NO: 224448 - DNA, 122 bp, Homo sapiens
agaggttcagatcctggatgaagatgtggacggagcctttgggaatccagacgacatcctcgtaccctgaacagcagagctcagatgtcacccacttggcatgtccccaacacctgcctgcc

SEQ ID NO: 224449 - DNA, 122 bp, Homo sapiens
actccatttatcttcaccgtccttcaaaatggatgagctaaacccacgcacacgcgtggacgggctgcacatggggatgcctgtggcggcccaccattcacacgtgtgccctcacctgtaga

SEQ ID NO: 224450 - DNA, 122 bp, Homo sapiens
ttacccccacccactccaggtactccagctctggcttggggatgtttgccagctttgaggcgcaaaggcggcgggagttgggatgcggggtgtcggagggagactgagggtcgcccgggcac

SEQ ID NO: 224451 - DNA, 122 bp, Homo sapiens
agatgttttgtctgtaaattctcccaagaacttttccagttttgacgtgaaataaaccttcgaaaatcagaagagtatattaataccacttctgtggggcctcaggagagctgagtcaggtg

SEQ ID NO: 224452 - DNA, 122 bp, Homo sapiens
aggagcgcccacctcccactggccactctagtctgggcctagaccttaccatggtcctgtcgccctgctcggctgggaagggatgctaagagaggcatttgttctggtttccctgtcgccgt

SEQ ID NO: 224453 - DNA, 122 bp, Homo sapiens
caagtccctgtacgtcagtcagcatcaccacatccgcaggtccccgttcatcggcttcaccgcatccgcaggtcccgtccatcagtcggcatcaccgcatcgccaggtccccctccatcagt

SEQ ID NO: 224454 - DNA, 122 bp, Homo sapiens
aaaagggggcagcgagggaaattggagggcatggtcacgtgactgaaccctcgtgtcatacgtgaagaggagcaggtagaggaatgggtggtgcatttctctggcgttcggtaaatcagcag

SEQ ID NO: 224455 - DNA, 122 bp, Homo sapiens
tgcccggaaaggagtgagcggcgcctagtcccgggctggcgggagtgcagttctgagtcccgcccggcgtgcgcggagcggggcagccagcagcggaggcgcggcgcgcagcacacccgggg

SEQ ID NO: 224456 - DNA, 122 bp, Homo sapiens
taaagaaagggctgtgcatgtttgaaagcacctatgtgaccccctctgactatgttatgccgatgctttaaatatcattctgctccaaaagtaagatccctatcagtctggctagttttaaa

SEQ ID NO: 224457 - DNA, 122 bp, Homo sapiens
caagggcagatcacagactgtaccggaggctcgggtttccctggactctgtgctgttctgcgtcccagggttggctaggaaggaaggcctgggccggcgaggtgacgggtctcccgcccagg

SEQ ID NO: 224458 - DNA, 122 bp, Homo sapiens
cgtggggatggagggacgtgggcggttttccgtggggatggagggacgtgggcggggtttcgaggcattcagaaggtgttaagagaagacgaaggaaaaatgaatggtggaactctcctgaa

SEQ ID NO: 224459 - DNA, 122 bp, Homo sapiens
gcagctgtctacctgctgaatgtccctatcccctcaaaattcccttcgacctgccatgggcggagtgtccgtgtcccctcaaaattcccatgctgggcgatcctcacccccacagtgatggt

SEQ ID NO: 224460 - DNA, 122 bp, Homo sapiens
gaatatggccctttctcggagcagccgctcaggcaggttcttgcgaggcagctccctcgtcgtctgcagctcctcattccagtctcgggtctgcagagagatcagggagggaaaaacgagct

SEQ ID NO: 224461 - DNA, 122 bp, Homo sapiens
ctacatgggccgggctggggttactcagctttcaggcaaggcctatctgggagaagctggcgtgacccggaagggccttgaggtatagggcttggggcattgccctggccaaaggtggacag

SEQ ID NO: 224462 - DNA, 122 bp, Homo sapiens
cgcgcggcgcccgagctgcgagtgcgccggggggtggagtgccgccttttaaagccgctccgcgccggggaagcgccgccgccgccgccaccgccgccgccaacaccgccgcgggcgggagc

SEQ ID NO: 224463 - DNA, 122 bp, Homo sapiens
agacttgaggatggagagtcccactctgaggtactggtagcggctcctcctgcctggtggcggcgtagggcgcagcgggacagcttggtggaggcagagcggggctccgacgcccgacggcc

SEQ ID NO: 224464 - DNA, 122 bp, Homo sapiens
tgaaagggactcattccagtgcgtttttcgaggaggagggagaaaacgttgcccgacctccgagagagctgtgggaccagcactttattttacaaggaactgcagagctcgggttctaactc

SEQ ID NO: 224465 - DNA, 122 bp, Homo sapiens
cttcatgtactcacctcccattataatgtctagattacagatagcctttattttacctcacggcatgtccagaaagaatctgtcttaactacctacttacaccaaggcatcagcaattcatt

SEQ ID NO: 224466 - DNA, 122 bp, Homo sapiens
agccctggggatgtcccagccaaatgtccactgcagggctatctgttcgtcccaaatgtgcgctccggggctgagcactcaccccaaatgtgcgctccggggctgagcactcaccccaaatg

SEQ ID NO: 224467 - DNA, 122 bp, Homo sapiens
tgtccctgggccccggcccgaggccggcaggaccgagcggggtccccaggagaggggtggcggggagctcgatctccacgcggggaccagattttcggcctcaaaatagaagaatagggctt

SEQ ID NO: 224468 - DNA, 122 bp, Homo sapiens
aaatgaattatgaagaattaaatactcaatggaacctaaagtccctcagtgaatctcagccgttggccatgcatattggagctcactgccagaagagtgtgaagctctgagaggcttaatgt

SEQ ID NO: 224469 - DNA, 122 bp, Homo sapiens
ctccaccagattctggctccctggccccgccccagcgtgctgcctctgcacgtcagttagcgcctgcaacaccgcacttaatgaggacaaacaaatgtgctcatcgcattgagttcaagtgc

SEQ ID NO: 224470 - DNA, 122 bp, Homo sapiens
agaccctgatcttctggtataactactcggcttttccaacttccttgtctcagtgtagatcgcgcggtaacccaggccactcagaagtcccgagacccgatgctttcgccagcgtctcggtc

SEQ ID NO: 224471 - DNA, 122 bp, Homo sapiens
ctccggcgccccagctgagctcccgccgcccctcaggctctgcttcccaccccctaatcccgctggaatctgccacagcatcgacctgctgctcctcaacatcgtagagctttcttactttc

SEQ ID NO: 224472 - DNA, 122 bp, Homo sapiens
aagcctctgccgtcgctaagcacgtctgtaggttcaggctaaggttttccgtcagaaggccgcgcaagtgcacttgcgtgtcaccgttaccgtagcgactgggcttctggactgtatatcct

SEQ ID NO: 224473 - DNA, 122 bp, Homo sapiens
aggggcggggctgtagatgacccggtcgggagagggccacggtttgttgggggagcggctcgagattgcgttctagagaggaaccagagagagggtctttaacctaaatataaatgaatgac

SEQ ID NO: 224474 - DNA, 122 bp, Homo sapiens
cacccgggaggggggagagaggcaaaaagtaagagaggaaaaaaaatagcaggaagatggcgcccaccaagcccagctttcagcaggatccttccaggcgagaacggtaacacttttctgtt

SEQ ID NO: 224475 - DNA, 122 bp, Homo sapiens
cctcctccccgggcggaagctgtgtcagttgccggaagtcggcgtgaggtggggcttatgcggcggcgtggtgaaatagatatggcgaccgagggggatgtggagctggagttggagactga

SEQ ID NO: 224476 - DNA, 122 bp, Homo sapiens
ccgtggctgctgcatccagcattcgcttagcagaatcgagaagtgaccagtggtgccttccggctggagagcaacagatgcatttcggcaacactgacaaagaaaaatccggggcatgaatg

SEQ ID NO: 224477 - DNA, 122 bp, Homo sapiens
catgggcccgctggccttccaggaacatgagtctgcgtgactggctgttgtgccctcacccggaaccgtgccaggcaccgaggaggtgctcagtaaactatggggttgcatcgtatttgagg

SEQ ID NO: 224478 - DNA, 122 bp, Homo sapiens
gacaggaggcctcccatgcctgagaagtgagagcccggatggtgggcccagggcacagggcggagcctcgtctctagcagggcagggggctgcaggagccgttcttagcatctgggcacagg

SEQ ID NO: 224479 - DNA, 122 bp, Homo sapiens
aggcagaattgagtctggcttcttgtgtctctggagttgggcaagtacagaacagttgcccggaaagaggaaggactcaatgggataatgtctgggtcatccagagattcctacctggagaa

SEQ ID NO: 224480 - DNA, 122 bp, Homo sapiens
accccaacccgccccaacactttacccctaattcccggccccacagagccccacgcgcggcgggcgagcatctacttacgaaatgactcctgcggcctctccgaaatcccaggagcatcctt

SEQ ID NO: 224481 - DNA, 122 bp, Homo sapiens
ttaatatttctggccatgcagactgtcacgtggtatgtcacagtggcaataagtgaatgacgagaagacagactccagggatactgagatgttcaaagccttgcttttgtcacagttggccg

SEQ ID NO: 224482 - DNA, 122 bp, Homo sapiens
cactctctcggcggctccctggcccgcccagatgcagcaaactcctctcacctgcattgacgccatgatggaaccatccccccaagaccggcgaggccagagacgcagggggaggagctgcc

SEQ ID NO: 224483 - DNA, 122 bp, Homo sapiens
gcgggaatagctcgttttttcagaatcccactgctcaaacctctagggggagcctgctgacgggcagcttgtggggctccaaccccacggcagcatctgggggtgaatgcttacagctcctg

SEQ ID NO: 224484 - DNA, 122 bp, Homo sapiens
cgagaattagcgactcccagccgccgcccgggcccgcgcgctcctccgccgcgctccgctcggctcctctcgaccccacaccgccggtcgacatgatccgctgcggcctggcctgcgagcgc

SEQ ID NO: 224485 - DNA, 122 bp, Homo sapiens
cgctggggccggggcttccctcgcggaggcgccgccagcaactccccgggggctgctgcacggaagcgctgaggagcgagtcaacagcccctctgctgcctcccgtagatgatccgagccgc

SEQ ID NO: 224486 - DNA, 122 bp, Homo sapiens
ggctgcccccggcgcttgcaggccagctggagttgcgggcgggcgtgggcttggcggccccgcactcagagcagccggcaggccctgccggccccgggcaatgaggggcttagcacccgggc

SEQ ID NO: 224487 - DNA, 122 bp, Homo sapiens
gatggcgatgttcagcgccgtctgccctgcggagcgggcggggacgcgcgggagcctcagcgccgggcacaggggcctcttgcccacccgctctggcctccataccctccccgaacccacgg

SEQ ID NO: 224488 - DNA, 122 bp, Homo sapiens
tttagtctacagctctttcacagacttcatgggtggccctgagaagggcctttgaggaaccgtgtaagtaagtaaaacactcagccgccaaagccatacagggtgcggccctggcgcttgag

SEQ ID NO: 224489 - DNA, 122 bp, Homo sapiens
gttccaccccaccccggtgaccccgggcacagagagtgtggctgctttgatgcgagattccgacacaaactcaccagcacctggtgaacaacccgagtaacacgaagactctgagaagcctg

SEQ ID NO: 224490 - DNA, 122 bp, Homo sapiens
ggggcagtggccacgtgacttacccctttccgtgcggtgctcggcgccgcgcaccacccccggagttttattattacttaaatcagcctcctcaaaaattggaggctgaggtttttcgagga

SEQ ID NO: 224491 - DNA, 122 bp, Homo sapiens
ggccgcccgccaggggcgcccttcccagcccgcgctcgcccgctctgcctcgcccacgctcgcccccacccctgccctgagccctgcatcccgggaagccccctctgcaggtactcactaaa

SEQ ID NO: 224492 - DNA, 122 bp, Homo sapiens
aaggtcggccgggggaggcttccctggggctgctttgggtgttaggatcctgctagaggccgccagtccccgcaggacctagtgccctagcgccaaggctggaagtaacgcggcccccagga

SEQ ID NO: 224493 - DNA, 122 bp, Homo sapiens
cccacacagcaggcccacagctctccacacatacacgtgcctccacccagcaagaggagccgccatgccagggtcaggggactcaccgccctgcctggacagcaggaagaggaagaggaggg

SEQ ID NO: 224494 - DNA, 122 bp, Homo sapiens
tgaggctcctcctggttcctgacgacgctggtttgtgttgcttctcggctcgtgctgcctcgtgctcccctctgctctggctcctaggccacggctcttgccggagtcctcctgtccctgct

SEQ ID NO: 224495 - DNA, 122 bp, Homo sapiens
gcaagtgtgaggtattgttttccccattcgagaaatgcacactccaaaagttaagcgacacgtccaaccccacacagctaggattccaaggaagatccagctttctgctcagttgcagaact

SEQ ID NO: 224496 - DNA, 122 bp, Homo sapiens
cccccccgacatcccggaacaaataaataaataaggcgcgcgagagaggccaacacgtcgcggagggagatgttgttattttttgctgttgtgcgtccctgacgtcacatccacctgctggg

SEQ ID NO: 224497 - DNA, 122 bp, Homo sapiens
tacaatttttaaatagtctttcattcatctattagctttcttgaaaataaatgtgtataccgatacaggtgaaacacccatgcttttggcaataggagggttccatgtctgcagtcagattg

SEQ ID NO: 224498 - DNA, 122 bp, Homo sapiens
gtcagcccgcgggtgcccagttgtgctcctgaactcgcggtggtggtgcgtgttggggagcggatgtggggccgcggcggggactgaaaggagaacggggccgcagcgcccgtggctattcg

SEQ ID NO: 224499 - DNA, 122 bp, Homo sapiens
ggcggggggggggggggcgtggaggcggggacagggcggccaggccggcgggggcggggccgccaccaggggaccggaggggaggggcgcgcggcctgggctggccggtgccgggaggaagg

SEQ ID NO: 224500 - DNA, 122 bp, Homo sapiens
ataggttgaaaaaataagtctccagtttctttggagtttgctgtttaggaaaaaatgcaacgtaagtgtctcagggttggctgggtatgatgactcatgtctgtaatcacagtgactcagaa

SEQ ID NO: 224501 - DNA, 122 bp, Homo sapiens
ccgttagcctattcctgagtagaaaatggcagccttccgttttcctaccagccaccacctcgccccagctatgggttatttgaactgtttgttggactttggggagacctgttcaccccttc

SEQ ID NO: 224502 - DNA, 122 bp, Homo sapiens
ccatatgactcagcagttctactccgaggtttctacttgagagaaacacaaatatatgttcgcacgtacttgcacaggaatgtgcatagcagcatgattcatgcagccaaaatgtggaaaca

SEQ ID NO: 224503 - DNA, 122 bp, Homo sapiens
aaatgcgaaatgtttctttctctccctaattctctggctcagctgaggagctgctgggtgcgagctttcgggccctcccaggttaggaggcgcctgtcgaggaccgggacccgggatcctcc

SEQ ID NO: 224504 - DNA, 122 bp, Homo sapiens
agtggcaggggtggccgggacatgccaggccacccacctggcaaagggcagcgccgagggcgccccgcgcctgccagcgcccggccgggcccgccctgcccacctcccatcccccatccggg

SEQ ID NO: 224505 - DNA, 122 bp, Homo sapiens
aatctgatctctctttcttttccccaaatttccccattttcttttccacaaaaccgccatcgtcatcatggcccgttctcgatggtcgctgtctcttcggagctgttgggtacacctcccag

SEQ ID NO: 224506 - DNA, 122 bp, Homo sapiens
gcgtcccggggctgcccggcttccctgctttcggggccacgggccgcgtcgcggctgctccgccatctccgagcgaacgctctgccgcagcctggcccaaccaccgctcccaccgggggagg

SEQ ID NO: 224507 - DNA, 122 bp, Homo sapiens
ccggggcaagaggcaggggaactgtacatgtgggaggtcctgagggcccttgcacccactcgacctccaccaagcggatggccaagcgccacccggaagtgtccactggtgggggcgggaag

SEQ ID NO: 224508 - DNA, 122 bp, Homo sapiens
ggcctgggcacaatgttaacaaaactccctattttccccaccccatagtagctcagcacccgcaatgtgcacttacgtcgggtgtccccagacaaagccagtggggagctcagcaccatcag

SEQ ID NO: 224509 - DNA, 122 bp, Homo sapiens
agatgtttcatctctgtggccacctgaaccccatctgcgtggggcgtgtggcttggccatcgctgtggcaacggattctcagtggtgctgaggcctggtcgtggtcatggtgctaaggcctg

SEQ ID NO: 224510 - DNA, 122 bp, Homo sapiens
ggttcccccggaccgtacgctggaccttgcctccccggctcctaacgggagacgggctgccgtaaagcttcgctttgccgactgctgcaaagcgccttacgactgaacccggaatcgaccta

SEQ ID NO: 224511 - DNA, 122 bp, Homo sapiens
gcttagaaacctctacccagtgtaaaaggctttttcatatgacttaatgttctttgctatcgaatgtcatttaaaagatgaaatatggtcattaaacaagtaagacagtatttggcacatag

SEQ ID NO: 224512 - DNA, 122 bp, Homo sapiens
cccactatggtcatctttttctctaaaatagccacttaccttcaataaagtatctacatgcggtgaagcattgttgactctaatgtgtgaatccaaggcaattcgttggtaacaccaactat

SEQ ID NO: 224513 - DNA, 122 bp, Homo sapiens
agggatcttagcagcagaaggaaacccagagaccctgagctgagggactccccagagggccgcaggaggtcaccctccagggctcctccttcctttacaaattgggaagctccaccccgaag

SEQ ID NO: 224514 - DNA, 122 bp, Homo sapiens
ccgtgcagccatcgacagtgacgctgtaggtgaagcggctgttgccctcggcgcggatctcgatctcgttggagccctggaggagcagggccttcttgaggttgccagtctgctggtccatg

SEQ ID NO: 224515 - DNA, 122 bp, Homo sapiens
gcattttggcctgggggcggatggggcccgcggggtgcggcgccctggcggagtgggaggcggggcttctgtgcccggtgtccccaccccgcccggacccccagctcgggccgcccctgggt

SEQ ID NO: 224516 - DNA, 122 bp, Homo sapiens
tccagccggagccatggggccggagccgcagtgagcaccatggagctggcggccttgtgccgctgggggctcctcctcgccctcttgccccccggagccgcgagcacccaaggtgggtctgg

SEQ ID NO: 224517 - DNA, 122 bp, Homo sapiens
tttggggtgcccccggtgagggagacgcacactggggtgaaagccagggactccacggcccgccatgttctgtcgcacagactgccaagaaggcacacacctccgggggaaaaccccagcct

SEQ ID NO: 224518 - DNA, 122 bp, Homo sapiens
acaccctcagcctccagcaccttcctgtctcccagccctgatcaaactaggctgggctagcgtctgtctcccctaccgggctgtgaactcttcgggggcctccaggaatgtctgagataccg

SEQ ID NO: 224519 - DNA, 122 bp, Homo sapiens
gttaaggttactaaaatcagcgtttctgaatcctgtctcaagttgtctcaactgggcttccgtagaacggtttcttcgtaagagggccttcagcgacagccgagctcggaaaagaacgggaa

SEQ ID NO: 224520 - DNA, 122 bp, Homo sapiens
gatgagtcacggctgggcggtgagaacttctcagcgggtcacagtcaggcttcggcagctcggcaggtgagggagcacccactaagagagtaatcgtggtaaaggaaggaaatgcactcaga

SEQ ID NO: 224521 - DNA, 122 bp, Homo sapiens
aatctctgggtctctctcaagctcttctaccctctctgcccaccccaagcccctactcaccggcaagtatcggccattatgggtgcagccacaatcttggacagggatgcagacaccctggg

SEQ ID NO: 224522 - DNA, 122 bp, Homo sapiens
tctgttaaggttattgactaatttagattgtatgccattctgtcccttgcatgctgtctgcgagggcacagccattataagcagagagtgaaaagggagattgtgtataacagaaagccaag

SEQ ID NO: 224523 - DNA, 122 bp, Homo sapiens
actgtgccagctaaggcaagtactcaggatagccagatgctgtcagcaaacaaagagtctcggtggaaagtgagaaagtgtgcattagggtgaagaggctgaattgccacctatccgtagct

SEQ ID NO: 224524 - DNA, 122 bp, Homo sapiens
acggcgctgctggtggactcgagctgccgcggcggcgcgagttaagtggaggcgtgcttgcgtgtgtgcgtgcccgcgtccgcgcccggcgcaccggaagcacagcggacgccactgcgcac

SEQ ID NO: 224525 - DNA, 122 bp, Homo sapiens
ctacaatgtctactgtggacacagtgctccttcactcaactgtgcaaagcacaagacacacgagcagtcatgggggtcctgacagagtcaagagaccgcccgttttttttttttggtttttt

SEQ ID NO: 224526 - DNA, 122 bp, Homo sapiens
atcggaggagccagggcgccagcatagctgcaccgcctccagctgcagcgctcaggacgccggtgacatcagctcccaattgccgcgagagcaactgaggggtaccagggcgctggaggtcc

SEQ ID NO: 224527 - DNA, 122 bp, Homo sapiens
agcctcgccacagcagatcccgggtgggcatagtgcaaatctgcccagagcccactccaccgacaccaggcgtgtgggtggtgcgggccgcagaggactccagaggcagccagtgcaggcct

SEQ ID NO: 224528 - DNA, 122 bp, Homo sapiens
cgcccaggaaaggctgcgtgaggcttttagacccaggatccgttccaagggaccgctgcccggcatccatcacggctgacagactggggatcggggtgggggaggggacgccgacacggagc

SEQ ID NO: 224529 - DNA, 122 bp, Homo sapiens
ggcccgcgcagccgaggacgcaagcacaggtgccacgagcacgctggagtggccccgaggcgggcccctgcggaggcttgcagctccctggaaggtattttgccttcttcattgccccaaat

SEQ ID NO: 224530 - DNA, 122 bp, Homo sapiens
tcgcaggagccggggggaggtggtgcgggaaggccgcgtacctgcggggcggcggcaaggcgtgcgctcggcgagacaggtcgtcggcggcgagtgagggacagagtgcagggcgcacaccg

SEQ ID NO: 224531 - DNA, 122 bp, Homo sapiens
acctgcctgtctcgctttctcacctgcgttccctcctttcatcccggagcccggaacctccgcttccggctccacgtccgcccggaagaagatctgctgcacacttccgtttccggtccgtg

SEQ ID NO: 224532 - DNA, 122 bp, Homo sapiens
ggttcagtctgagtgagattaccggccagtaagggatttgggcagaggagcaacaggattcgactaaggccagcagtctgatgtaagctgtggattcgtgcacctgctttgtgtgcaaatca

SEQ ID NO: 224533 - DNA, 122 bp, Homo sapiens
aagtaaacaaaataaattggcaagtaccaaataggaagggaggctagagggcccattccacggaccgaaagtagatactgtcagtgaccagaattgtaatgaacatcatgtgggcagtggcg

SEQ ID NO: 224534 - DNA, 122 bp, Homo sapiens
attaaatactcaacagactcctccttttttagctgtatttttcaggtactgtgtggtgaccgccccactggtgtctattacaggccactttggtagttgtgtatctgctcatgtatgtgatt

SEQ ID NO: 224535 - DNA, 122 bp, Homo sapiens
ccggttccgcgcgcagggattttaaatgtcccgctctgagccgggcgcaggagcagccggcgcggccgccagcgcggtgtagggggcaggcgcggatcccgccaccgccgcgcgctcggccc

SEQ ID NO: 224536 - DNA, 122 bp, Homo sapiens
ccgcgctctgatgctggcagtcaccgccaaaaagtgaaactactaatactttgcagttgacgttaaaaacaacctggtaaagtagaccaagttccacttctgagctcttccacacgataacc

SEQ ID NO: 224537 - DNA, 122 bp, Homo sapiens
gagtcgccgcggccggagggcggggaggagccgccgcgtcccagtcccgaggtgaggagtcgacccgcgcctggctgttggcgccagctgccccgtccccaaagcgccctcggcaccccttt

SEQ ID NO: 224538 - DNA, 122 bp, Homo sapiens
ccgaccccagactctgtgctcccagaggcagctctgcctgtgcaggacagcagccacggccgagggtggggacgcctggagatgcccagtgatgctgccccggcgtcttctcctccacccgg

SEQ ID NO: 224539 - DNA, 122 bp, Homo sapiens
gactttcggggatggccgttgatgttttgtccacgagcctgtgtccccagacacacactccggcccatactcaggtgcacagaaagacaagcacacagctcatccccctctccaaaactctc

SEQ ID NO: 224540 - DNA, 122 bp, Homo sapiens
cccgctttctctcgagcaatgacagcgcggatccacaggtgagtgtgccatccgcagacacggaaagccctgcccttccacggggtggtaacacggggtgacaatgctcttaccacgatgtg

SEQ ID NO: 224541 - DNA, 122 bp, Homo sapiens
aggaaaccttgaagcctgcccaacgatcgtgggcaggaggtggtttctggtttgttggggcgtgtgtatgtgtatttggggggactgaagggtacgtggggcgaaacaaaaccggccatggc

SEQ ID NO: 224542 - DNA, 122 bp, Homo sapiens
cctaagagggagcggtgtgcaaattgatttggaggcgatcaatggctcggggcgcggccccggctcgctgccgtgtcactgatcctctccaaatcgattcacacaccattcctcctcagcac

SEQ ID NO: 224543 - DNA, 122 bp, Homo sapiens
gccgcaaatctaaccctaggatgcctttcttattaaagcgggaaacttctgcaggggccacgggacagcgtggagggctctgcgcgcagggcagagactgcagttcactgccctgcggtttt

SEQ ID NO: 224544 - DNA, 122 bp, Homo sapiens
gttttaaatgttttgcacacgctaactcatttgttcttatggaaatcctgtagcgtgcaccgccacctccatgtttctaggcggaaactgaggcacgggggctgcggctcctggacccacct

SEQ ID NO: 224545 - DNA, 122 bp, Homo sapiens
caaaggcagagaaaagaacacattgaaggcttttgctcacttttccaagttgtttcgtttcgttttgtttctaatgtggacgatcatttaaaatgcctctggtggccgggcgcggtgactga

SEQ ID NO: 224546 - DNA, 122 bp, Homo sapiens
ccactgggagccaaccgttgcagccagttgtccccgcgagcgaggccggagaaggcgcggcggcccctggcctggccatttcgcccttgtcgcagctgaaccgccgactacgagctcctgca

SEQ ID NO: 224547 - DNA, 122 bp, Homo sapiens
aagcctaggcccgggccccacactcagcagctcttcagcccggccagtggcacaagcccccgctacctactgtcctgtaccctgtgcagttgaaatgacagtgcctcttccatagggtcact

SEQ ID NO: 224548 - DNA, 122 bp, Homo sapiens
ttccgaaacccctgtcctactccccactcaccccacccggctctcacagatctgctgacccgaatctcccaaccccaggttatgcacacaggaacgaacaagtttcaggagctaaccagccc

SEQ ID NO: 224549 - DNA, 122 bp, Homo sapiens
ggatggtgtaatcgaggacctagacacttccacactcccatgccatcatccttagcatgacgtgtcctattcccatccctgctgcctcactggctgctgtcacaccagacgtcacatcctca

SEQ ID NO: 224550 - DNA, 122 bp, Homo sapiens
ttaggatgtaggaactagcaggtgccttgcattcccacacacattttatttttaaaaaggcggaaggaagaggagcataattcagtctagagatggttccaaaaacttaggctggtcgatca

SEQ ID NO: 224551 - DNA, 122 bp, Homo sapiens
gcccgcgcggcgcaatgacgtaacacaggcccgcccactgcccctgttgggttcctgagtcgtgctgcgtcgacaacggtagtgacgcgtattgcctggaggatggcggacgccggcattcg

SEQ ID NO: 224552 - DNA, 122 bp, Homo sapiens
attttctctatccactgtaacattgatgggcatctaggttgattccatgtctttgctatacgaccttggggaaagagagtcttgctgcttgcttgtgggacttgccttggaaggtagataag

SEQ ID NO: 224553 - DNA, 122 bp, Homo sapiens
gctcgcgggcgccaaggcggcccgggcctcccggcctcccgcaccaggcaggactccgcgcgccttcgctgcgaaccagacgccacatcgggtaaacccccactcccacatcttctcacctc

SEQ ID NO: 224554 - DNA, 122 bp, Homo sapiens
cccgctgcccttcacctgcgtggctgcgggggcccaagagcgctgaagccccgagggagccggtctctagaaaagtcagcggctgaagctgacagcccactctgaataaataaatcatttct

SEQ ID NO: 224555 - DNA, 122 bp, Homo sapiens
accaccagtggccttacgttagcccgagcaggtactcaacatcactggacaccagggaaacgcaaatgaaaaccacagtgagaggccacacacgtgagaatgcagattagaaaggcggtaac

SEQ ID NO: 224556 - DNA, 122 bp, Homo sapiens
caccatctggcagtcaggtcagtccaaccacagtcatatcagggcccttccaggaattctcgacgcaaactggaggccgatggcgcgggtcttttcgtggacggcggcagcacggtcctcgg

SEQ ID NO: 224557 - DNA, 122 bp, Homo sapiens
accaggaaatgtatacagacacatgcgggtgggcttgtcagggggctgacagagtccccgcgatgacagaggctgaaaagacctgcgacgggctgtctgcaggctggagtccctcgaggctg

SEQ ID NO: 224558 - DNA, 122 bp, Homo sapiens
cagccatctgcgttccaagggccggggtcttcaagctgggatcctggccttgaccaggtccggtgtgcatctgcctgctgccagcttcccccgacccctacccttccacgcatgtgaccagc

SEQ ID NO: 224559 - DNA, 122 bp, Homo sapiens
ttcccacccacccgcagcactctcgaggtcgcaacggcagtcaccaggtcccggggcctgcgttcagctgcttgatccgactaggtttggcttcggacccgaatgggtcagctccacgcccg

SEQ ID NO: 224560 - DNA, 122 bp, Homo sapiens
aaccagacagctgggggggacatgagaatcagggccagtgcttgcaggaaagaaagcaaacgctctgaatgtgagccagatggcaggtcccccacacaaggcagggggctcaagaacacttc

SEQ ID NO: 224561 - DNA, 122 bp, Homo sapiens
aaatgtcttaaggaagggtacgctttctgtaagagtaaactagacatcaaatagtccttgcgtggattgcaaccttcctgagacttctgagtgactcctgtggtaccagcaccagctgggta

SEQ ID NO: 224562 - DNA, 122 bp, Homo sapiens
gcacgaccccacgggagcctgcgcccacctgcccaagtactggacctggggctagcttgccgcttgctccttgccacccgccaggccccccgcccatcgcttcgcccaaatcctttcaaaca

SEQ ID NO: 224563 - DNA, 122 bp, Homo sapiens
tctggggcttgcacttgcgaacgccccacagccgggccacctcatcagggtctttgatgacgaattccccgtagtccccctgccaggcaatgacgccctggtactcctccttccgcagcagc

SEQ ID NO: 224564 - DNA, 122 bp, Homo sapiens
gaccttaaaggtgacactgaccttggaggaagcacacggggggctgggagactcagggaccgggagacttggggggctgggagactcgggggccgggagactcgggggaccaggagactcag

SEQ ID NO: 224565 - DNA, 122 bp, Homo sapiens
ccgagcctaatggatttgtgggagttccagaccgtggggtgcagaggttgcggccacgggcgagaatccccatctgagaggagcgttgctgttttcggtgcgtcagggtaaattaccttttc

SEQ ID NO: 224566 - DNA, 122 bp, Homo sapiens
tccatgaacagcatttcttcattatccacccagggtcctttcatcatgactgacgtccctcgagatgcaattattctggtctgcttttgtcacaggacgaaactgtctgtgtagcatggggg

SEQ ID NO: 224567 - DNA, 122 bp, Homo sapiens
cgcctccctgtcagttttagatccgccctttgactagggagcaacctgcagttgacgcagcgtccatgggacacactgttgtgttccttaaaccgagaagtggttcttgattcttggtaccc

SEQ ID NO: 224568 - DNA, 122 bp, Homo sapiens
tcctcaacattcagttcaggtaagagccgcctgtgcgccccgggccaaggggtgtgtgggcgcctgagctgtgtgcctgggctccatgactgtgcctccgtgtccttcctgaggggacccgg

SEQ ID NO: 224569 - DNA, 122 bp, Homo sapiens
tgctttaatgatgcttgggccagtatcaaacagcaactagatggcttgagaaaggtggagcgtttcctcatgagtgggctttgctgggtcagagggagttcccaggatatgggactttcagt

SEQ ID NO: 224570 - DNA, 122 bp, Homo sapiens
tatattattcccacttaaatagctcggtgtttcgtcaagagagtgcaaacacgagggcttcggtagagggaggagacactggctcaggaaccagagctcacggttcctgctgtctctgcccc

SEQ ID NO: 224571 - DNA, 122 bp, Homo sapiens
ggctcctttttgcctcggcagctgggtgtctgtttttaaaataataatgagagggggaaacgcgttccattgctcagctgcccccttaccaacgccttgggcctgcagggaggagggggagg

SEQ ID NO: 224572 - DNA, 122 bp, Homo sapiens
ctggctcaggcccagccgcaggtcctgggtgaccctgctgctttcttccagctggaggcccggacaccactcccacgagggacggtaaggagccttttttctgttgagactggtgggtggtc

SEQ ID NO: 224573 - DNA, 122 bp, Homo sapiens
cagtaccttggcctgtggtagatcctgagtaaatgttgactgaaacgaagatgccatggccggtggtgaagcagggatcagtgcaacaatgctgtgagaatacagaggcaggggtggctttt

SEQ ID NO: 224574 - DNA, 122 bp, Homo sapiens
agctagatctcatccggaagcctaagaactgtcatctatatcatatacctaagtcaaagccggcaggaatttggagaagtggacagtgtcatccttttctgcagaggtctgatatatgacca

SEQ ID NO: 224575 - DNA, 122 bp, Homo sapiens
gtctccggccggctgactgctggctgaggcgcagcacagccttggttaaatccttaattgcgcgcttacgcacagcggggtggatctggttctattggccagggcctcgggagcaacagtaa

SEQ ID NO: 224576 - DNA, 122 bp, Homo sapiens
caaaaaagtgggagcgagacgagagcagaaggccactgctgggatggggccagggccacacgtgaacatccgagcacgttccagagctgagatgcaaaacacccagaaaatcacataggaag

SEQ ID NO: 224577 - DNA, 122 bp, Homo sapiens
cccacaggcagggctgctccggccttcgtttagcagcttgattgaggcgtcattggcacacggcgaactgcgcgtcattaacgtgggcggttcagtgagttctgaggaacgcatagcaggtg

SEQ ID NO: 224578 - DNA, 122 bp, Homo sapiens
ccgcagctgctcctctttccctccttaggcacagcagcaacagaggtgaaaaccacaaaccgaatcctaaaacccctacccaggcgggaaaataaataaacttgagtgcagcagcagcagca

SEQ ID NO: 224579 - DNA, 122 bp, Homo sapiens
ataagatttccaagcagcattagaaaccatggttcaatccagaagtgtgctcctgcaacccggggagggggctcctgatgacttcacagtgaagccaccgtcacaaacaggatttcctaaag

SEQ ID NO: 224580 - DNA, 122 bp, Homo sapiens
atgccaatgccagggagggttcaggaagtcaatacacggttaataaaacattgggacagccgggcgcggtggctcacgcctgtaatcccagcactttgggaggccgaggcgggcggatcacg

SEQ ID NO: 224581 - DNA, 122 bp, Homo sapiens
ccctcagcctgcctctgctcctggcagggttgggaggtggcacagacatggacagacaggcgaggaacagtttctgtgtattacgggcagttctttattacatgagctcaggccgtctgcac

SEQ ID NO: 224582 - DNA, 122 bp, Homo sapiens
gccttcctgttccattcaggttccagggaggaaaggaaccggccctaggtggagaatgggcggggagccctgctgtgtggtcttggccacgcccctctctgggccaacctggttgtccaaag

SEQ ID NO: 224583 - DNA, 122 bp, Homo sapiens
aggagtgcattctcttgaatcttatcagatgtaacattctaaatggaatagttaccactacgttggagcgcctcctaagtaccatattattacattgtagctaggtgaagctatgactaatt

SEQ ID NO: 224584 - DNA, 122 bp, Homo sapiens
ggcctaactattctgctagtgggggcatattttattttgaaatccttaaggtgcctggtgcgtaacggcaaccagggatggtggtggcaatgtgggtgaggtggagtcttgcctgcatttca

SEQ ID NO: 224585 - DNA, 122 bp, Homo sapiens
atacgcatttaatttccttacccattaaggattctcaaatcaccatatagattgtctttccgagtagataaaaacacccagagacaaggaggctggatgtgttttagtgggtctgagtgatg

SEQ ID NO: 224586 - DNA, 122 bp, Homo sapiens
cctccttccctgggggtcctgagttcccgcagggcaggggttcctggatctcccctcagccgggcccctggggagtcctcccagcagcagaaccgaagatctacagcctcccccggacctgg

SEQ ID NO: 224587 - DNA, 122 bp, Homo sapiens
ggggcctaagatctgcctctgtgcagcaagaaggactcttcaccttctgggttcagacaccgcggttcggacccatagctccagcgcctctcacctcacaaaccgcagaaacacacccaaca

SEQ ID NO: 224588 - DNA, 122 bp, Homo sapiens
tcttggtgactttcttcttaaggactggaaaatgaactgttatattcaacaacacacacacgccttctcaagagtgtaataagctggactgaaaggtaagaagatgtcagaaatttattgaa

SEQ ID NO: 224589 - DNA, 122 bp, Homo sapiens
aaattgctttcctttatttagaccagttctcagcagtggctgcatatttgaaccacatggcggagctttggaaagtcccagaaaacactcagaccaattacatcagaatgtctgggggagga

SEQ ID NO: 224590 - DNA, 122 bp, Homo sapiens
gagaggaaatcacccaacaaccaccaaattccatgagtctagagaatcatgtaaatacgacgctacacaggtgttaggatgtgataagtgccttattagagatttgcacaatgccacagaga

SEQ ID NO: 224591 - DNA, 122 bp, Homo sapiens
tgcccagagaccttccaagctgtgcttgatgggcttgatgcactgcttacccacagggttcgtctcaggtgaggtggcccaagtgggctggtggggagggcccaggtgtccaacagaaggaa

SEQ ID NO: 224592 - DNA, 122 bp, Homo sapiens
aacctcctctttgaagcccacaagatacggtgaggattactgcctttttctgatttccaacgtgggtttttcattaagcaaagaacaattagaaaacccacacataacatagggtattcagt

SEQ ID NO: 224593 - DNA, 122 bp, Homo sapiens
tcacacggatggcgcctacttcggcactggtttccctcacatgctcttcatggtgcatcccgagtaccggcccaagagacctgccaaccagtttgtgcccaggtagggagcagggagagtca

SEQ ID NO: 224594 - DNA, 122 bp, Homo sapiens
gggctcacagcaggctgccggggcaccattaatgggggagggtcctgtccccagcgcatacgtagacggcccttcagaacctgctcagtggtcagtgcggccgtgcagctgcaccccggcct

SEQ ID NO: 224595 - DNA, 122 bp, Homo sapiens
cgccagggccatgtgagcttgaggttcccctggagtctcagccggagacaacagaagaaccgcttactgaaactccttgggggttctgatacactagggggagttttatgggaaagaggaag

SEQ ID NO: 224596 - DNA, 122 bp, Homo sapiens
aaacaaacgggcggcaaaactggacctggccggaggagcctttcaagtgggcgtgtctttcggctggggaaaagggaggagttagactctgggcaacatcactcctccctggtcagctggga

SEQ ID NO: 224597 - DNA, 122 bp, Homo sapiens
gtttggcatcttcaggttactttcccacaattatggctgctgatgaagtctggggcccttcgaagtaattttccaactctctccctgcccctttctgtcatcccaccgacaagcagcctctt

SEQ ID NO: 224598 - DNA, 122 bp, Homo sapiens
aacagctcagatctcaattcagtgcccttatctctagctggactgctttgattctgcccacgtatgtgtggttccttggttatctagaaatttgggcagaatttatttccaaaatgtggggc

SEQ ID NO: 224599 - DNA, 122 bp, Homo sapiens
ggctccgacccgccctcctcaccaccctcatccggctcttcagggcggggtcttcagggtcgagggcaggatgtgccctgtggagctgctcacctaagttcctgcctccataggggaggctt

SEQ ID NO: 224600 - DNA, 122 bp, Homo sapiens
ggtgtgtggtgctggacgcttcctgagcacctccctgcacagcctgcctctggagtttctcgcgcatggcggtaagcagggccaggcctcactctttccccttcacagtggagggtgtgagc

SEQ ID NO: 224601 - DNA, 122 bp, Homo sapiens
atttattaagcccatcatagtagtatttattttccattattttcttcacttgtttctgttcgttaacgataatgcagagcccatgtctccttgttggtcttttccatgggagttttatagat

SEQ ID NO: 224602 - DNA, 122 bp, Homo sapiens
tgcagccccactgccgggtggagtcatctctttacaaacggccttgggaagaaccacagccggcatctttccttgatcacgggtatcctggagggtgaggccatgtcatcctgctcggtcac

SEQ ID NO: 224603 - DNA, 122 bp, Homo sapiens
cttccctgatgccaggggcaccagactgattctgaggcacaaataaaagaggcttcataccggaggcttttgctacctaactttacttggggggaacgcctacggtgtgggttggggtcctt

SEQ ID NO: 224604 - DNA, 122 bp, Homo sapiens
ccctccccaggaggcatctgagctgcaaaaggggcgaatgcgatgtagacacttgggccccgggactcgcctgtgtcatctgggctgggccccacaaacaccacaaacaccttttccaccac

SEQ ID NO: 224605 - DNA, 122 bp, Homo sapiens
caggaggaaataagcgcacattactttgaagccatacttccatagagctaacaccgtgcccggaactaaggtgactacctagaataaatcaccacgtattctcacaacaaccaaaggaacca

SEQ ID NO: 224606 - DNA, 122 bp, Homo sapiens
atccgcccaccttggcctcccaaagtgctgggattacaggtgtgagccaccgcacctggacgattctgggtatgttttaaagatgacctgacagaccttgctagaggactgggcagagtgag

SEQ ID NO: 224607 - DNA, 122 bp, Homo sapiens
aaaaccccgcgtgggtaagacacatgagcaacccagtgacctccaccttgagctaatgatcgtctttgaagttaatccattagaaaccaagatagatgattaagacacaaactgcaatatgc

SEQ ID NO: 224608 - DNA, 122 bp, Homo sapiens
aggagggacaaatggaaatagtcatgcacagtgttttcatttcacctccatgctctgctccggctctgctcttttccagtctgagatgcccactctttctcctttgcattagttcaattcct

SEQ ID NO: 224609 - DNA, 122 bp, Homo sapiens
ggccgcggacgactacggcaaggccgggccacctgaggacgagggggaccccaaggctggcgctgggccaccccccggcccccctgcttatgatccctatgggccctactgtcctggccggg

SEQ ID NO: 224610 - DNA, 122 bp, Homo sapiens
ggatggaggcattccagacggaaaagccccattaggtcatcgctacgccgcctgcaatgccgttcagccttccgctgtgtaatctccagcacactccggggagactgtgaatttcagacact

SEQ ID NO: 224611 - DNA, 122 bp, Homo sapiens
cgattcgcctcagttgctgctgtaataaaagtctactttttgctaaaagcgtcgtgtgttcgcgcctttcccgccagggggagcgggcccggggcggaggcggggcccaggtgggaggggga

SEQ ID NO: 224612 - DNA, 122 bp, Homo sapiens
aatctcgcattgctccctaagcaccctgggccttattaaagagcaacttctatttccagtcgggggagtaacactaaagctacaagaaatatgtaataatgataggtaataatgtgttccaa

SEQ ID NO: 224613 - DNA, 122 bp, Homo sapiens
atgctggcagtccctgtcccagatcaaaggcagggcggctaattgtgtgtcttaacgagccgccccccacccacccccccaccgctgcctccctgctccgggcagcccagctggccatggcc

SEQ ID NO: 224614 - DNA, 122 bp, Homo sapiens
tttcctctcttgaccatttgttcagcgactctcccctccgttcagcatccaggttccttacggctacagtgccccagccccgcctcaccagcgcgacattctgccctgcctacccactcaga

SEQ ID NO: 224615 - DNA, 122 bp, Homo sapiens
gcagcgaagggacgcttaaggaggaagtgcctgtggagctgagaaagcgttatttcatcgcggaatacaaataattcaggtctctagatggcagccttcaatgcctttggaaagcagtctct

SEQ ID NO: 224616 - DNA, 122 bp, Homo sapiens
tccccttttacaagttctccctgaaagagggcagtcacaagaggtgtgaagagtagcagccgatgctctctccaaagcagggcagcagcccataccagctggcatctcccccccgtgccttc

SEQ ID NO: 224617 - DNA, 122 bp, Homo sapiens
tcacggaagcgcagacgcggtatcactccacttagatgaggtgcgtagtatattcagattcgcggaaacaaagaagaacggaagtgatccatccccgtaggcaaggagatgtgtatccacac

SEQ ID NO: 224618 - DNA, 122 bp, Homo sapiens
agactaggaaactgagcatcaaaactactaagtaaatttcccaagaccaggaaagggctgcgtctcaaattagttctatataattccaaagtccttgccataactaatattcatttctggtg

SEQ ID NO: 224619 - DNA, 122 bp, Homo sapiens
gtctgagctggcgtggacatttgctctctgggtgcatcacagagacctgcagggccctggcgctcagaagccagcgtgaggttctaggtctggggccggggcgggcgacagcggggctcgga

SEQ ID NO: 224620 - DNA, 122 bp, Homo sapiens
ggcctccttttctggaccacagtggagcgatgtgcaggtcatcggctaagctgggcgggtcggggagggcagggggagtacagttccttcggatcccagcaaaggtagactatcaatggcca

SEQ ID NO: 224621 - DNA, 122 bp, Homo sapiens
ctggagcaggagggacccccgagccctgagtggagggtttgcatctgtacccgtccagcccgactttgtgctgctctgcgattatttgtccagtgtcgtttaatctagtttaaatgatggcc

SEQ ID NO: 224622 - DNA, 122 bp, Homo sapiens
aaggcgcccgggccccaggagctgcctcccgctggtggtgtgatcagaagagagtggggtcgagtgtacattgccgtgtggtcgtgtttcctgtaggtgctgtaaaatacctggagtgctcg

SEQ ID NO: 224623 - DNA, 122 bp, Homo sapiens
ctatgtgggattctcaaagattatctggcccagagacacctgagtacagggcctcagtcccgcctccccactcacgcccggggcaactgctggaaggcattttgttctttcttttctttcct

SEQ ID NO: 224624 - DNA, 122 bp, Homo sapiens
cacttcccccggtgctgggggcggatctcaggtccctgaagtcctgtcctctcccggagccgatgtgttctcagctcctgggccgcagctcctggagttggggccctcctttcttgggaccc

SEQ ID NO: 224625 - DNA, 122 bp, Homo sapiens
ggccgcgggcctgggggccaccacagtggcggggcccggccgggcagggggccgggggcacgcgtacctggggtctcgcggttcctccgcggctctgtccgccgccggccgtgaccaagatg

SEQ ID NO: 224626 - DNA, 122 bp, Homo sapiens
tggccaggctccaactcctcccactgtagatagcagcagccttcttaagcagcctgtggccgggcacagtagctcacacctgtaatcccagcactttggaaggccgaggtgggcggatcacc

SEQ ID NO: 224627 - DNA, 122 bp, Homo sapiens
tgagtggtagcgtcaagatgtgaaccactgttactgcacactgaatcataccactatggccgatcacagagggccctggggagccacggaaggctctaggcagaggcagggcctcttgggtt

SEQ ID NO: 224628 - DNA, 122 bp, Homo sapiens
tgactataaccatcagcacagggaacctgaagagacaaaggaggggggcctgggggtgggcgagccacctaaagtgaggatctgctgtgacaggtgaggagagctggactgtggctgtgccc

SEQ ID NO: 224629 - DNA, 122 bp, Homo sapiens
ccaggggcagagcctgcacgtgtcagagccaggcctgggatgcaccttctctgggcagaccgacccaaaagaaagcccacaagggctgaagccacacacagcccgccccagggctgcctgga

SEQ ID NO: 224630 - DNA, 122 bp, Homo sapiens
gctggagcccggcttcggggcggggcgagggtcagtcacgtgggcccgcagccctctcctcgatttccctacaaggacttgggccgacgggccccgcccttcgccgtgccctggaatgtgcg

SEQ ID NO: 224631 - DNA, 122 bp, Homo sapiens
ctgggtgggtctcctggcactggccagagcgcggggagctgtccgtagcttggtgctgaacggggacgcagagtcgacgctgcacaccccctggtgcggggcggtaccctttgtctaagagg

SEQ ID NO: 224632 - DNA, 122 bp, Homo sapiens
ccgacggcggcacgcccggtcctagtacagcgcaggcgcttaacacacagcacccagccacgaggcccggagtcagagggctttgcttgcccattcacagagccctcacccgcggatcaaag

SEQ ID NO: 224633 - DNA, 122 bp, Homo sapiens
gctcaatcccttttgcaggagatggcttcaagtgctttaataaagaaccatgtactcaatcgtcttcggaagaggggtctccaaacggttgactggagggatcccttctggagggagtctcc

SEQ ID NO: 224634 - DNA, 122 bp, Homo sapiens
catttctaaggcctcctggagaaaaagaacattccataagtgcctttcaagtttgatatacgtgatgcttctgagcttgcaaagttcaagttgttacagtttttaaggaaacagcacatact

SEQ ID NO: 224635 - DNA, 122 bp, Homo sapiens
acgcggcgcaactgcagctgcagctgcggggggagccgggagttggggcccctaggctcccgaggcgcccccttgagcagcgctgcccacggggagcgggcgaggggctgcgggagagggag

SEQ ID NO: 224636 - DNA, 122 bp, Homo sapiens
cccaggagctgccggcccacccatccgcgggtttcttccgttgggggagccctccagactcgtagaatataagagagcgcccctccctagccgcgggccatctctaagcgacaggctttaag

SEQ ID NO: 224637 - DNA, 122 bp, Homo sapiens
gtgattggggagaagccgagaatggcgctggtggggcttctgcaggaacagccgagtcctcggaagtttgaggcctcgtgggaagatgtgtgctccgagctaggaaatctccagctttcaag

SEQ ID NO: 224638 - DNA, 122 bp, Homo sapiens
ccaggagccaggcacacagggactgggctgtctgagtaccaagcctttgaaatcatatcacgaaaatctatccctgagcctatatctcaaacatagcgtttgtgcctgaaattgcacaattg

SEQ ID NO: 224639 - DNA, 122 bp, Homo sapiens
ccagctcagaagatacccactgacgagattccaaacaaaagacaaagaacctcaaaacaacgtcaggaagcccagggtgaagccccagccctgtcaccagccatagcaggtggctttgtggc

SEQ ID NO: 224640 - DNA, 122 bp, Homo sapiens
cgcgctaaacacgtttctaattagcatttctttaaacaatgctgatcacaatcttgccaccgtaatccactccaaatgcatcgttgagattgcagcacggaaagcgagagaggaaattcgct

SEQ ID NO: 224641 - DNA, 122 bp, Homo sapiens
acacttcaggatgagatactcaccgtaaaggacaccccactcaatcctcagtgcctctcacgtgccatgctctttctagcctcctggcctttgcaccagctgtgattatctgacacacttca

SEQ ID NO: 224642 - DNA, 122 bp, Homo sapiens
agagctattccgtgtacgtgtacaaggtgctgaagcaggtccaccccgacaccggcatctcgtccaaggctatggggattatgaactccttcgtcaacgacattttcgagcgcattgcaggc

SEQ ID NO: 224643 - DNA, 122 bp, Homo sapiens
gctttgtgtgcgaagacccctttcctgcagtctaggcgtggacgggggcgggagagtgggcggagggtgtggggccccactccacagccccaggtttgctgctgcgctgtctgcttggagat

SEQ ID NO: 224644 - DNA, 122 bp, Homo sapiens
cagctctggaaacagcagcaccggaagccccctgccccagactcactgcccacccccggccgagctggctgccagccgagccccttggatctctgcgcccccccgggccccccaccactcca

SEQ ID NO: 224645 - DNA, 122 bp, Homo sapiens
gtccggccaggccctactgatgtgttctcaggggccaggacatcagtgcaacagggcagccgcttgcgacaggacccggccgactgtccccgtccccagagcacttttggctgcatctggga

SEQ ID NO: 224646 - DNA, 122 bp, Homo sapiens
cggagcttccacaaaccagatagaggttctccagcttttctttgattgtctctgctttagcgtctctaaatccggtcaccatgtcggaccccgaaggcgagaccttgcgaagcacctttccc

SEQ ID NO: 224647 - DNA, 122 bp, Homo sapiens
atacacttcctatcgcgtagtttctgtgctcaaaaccgttttttaactcctccctccccgcgcttttcaaagtcctcacccgagatgtgtatttccgcctgggcgcctcccagtctcaacct

SEQ ID NO: 224648 - DNA, 122 bp, Homo sapiens
gaggagtcacattccaaatgcctctcactccacaatgctgcttatttcaacaagaaagcacggggaaaagtatgtgcaaagaagccggggaagcatctggttttggcccagtcaagaagagt

SEQ ID NO: 224649 - DNA, 122 bp, Homo sapiens
ctgcatctgcgtgtacgtgggagtatgaacatgtctgtgtgcgcccaggagggaggcgaccgggcttgtgtgcccagaggaacaataataactagcatttatgaagcgctccgcttccacgt

SEQ ID NO: 224650 - DNA, 122 bp, Homo sapiens
gttttaaaaaatgtggtaaaatagacaccttttaattggaccacattttgtctatctcgacgtatgcctcagtgtcatcaaggagactctccttgacatgcagtcacggccatgatccatct

SEQ ID NO: 224651 - DNA, 122 bp, Homo sapiens
tagctgtctgacacccggatcccatgcctaacccaaatgtcactgagccctaaggcacttcgctcctgctggtccaggcagtgtcccctaagattcatcatggcatgttctccatggcctta

SEQ ID NO: 224652 - DNA, 122 bp, Homo sapiens
ctgggctggaagcgaggcggagatgggcggtcgggatccgcgagtgagcggggcgggcggcggtgacagccccacagctccagctgctgctgctgctgctgccgccgcggctgcccggggag

SEQ ID NO: 224653 - DNA, 122 bp, Homo sapiens
gaggccgtttccccctcagctgggcttagagatgcacgatgcacagccagtgagagcaggcgtcgtacattccacggctgcgtttccgtttggctctggaatttgccgacggaagcatatcc

SEQ ID NO: 224654 - DNA, 122 bp, Homo sapiens
ggtctacctgtggttattttatttgtgctgccctctgcccttgctatggccactatctatcgcaccctcagaaccgaagatagatgttagtagagagaggctgtctcctcacctctggcaga

SEQ ID NO: 224655 - DNA, 122 bp, Homo sapiens
gagaaaggctagatactgcgtgatgccacttacagaaactctggaaaacgtggatgaacccgtggtgacaggaaacacagaaggatcagtggctgcctggggtcgggttgcagtgggagggg

SEQ ID NO: 224656 - DNA, 122 bp, Homo sapiens
tcggggccgcgtttcattggctttccggccggaagctgcggcgcgacccggctgcgcatgcgcctctcacacgtgctgtcagaacgccgcctcctccgcttgcggccggtctgcaccatgct

SEQ ID NO: 224657 - DNA, 122 bp, Homo sapiens
ggtccaaggaagtgcaatacaacagcaaaatgcaatggccgcagcagctcagtgatgggccgagactcgtcccgtgtggcggagatgctggcatcccccctgtggctccaagcgctgagctt

SEQ ID NO: 224658 - DNA, 122 bp, Homo sapiens
cgcccggcccggtccggcctgggcagctgcggcgcgccgcccgcggcaggaagtgcttggcgtcccggcgctccggctcccatggactttctccgacctcgcccagcaccggcggccgcacc

SEQ ID NO: 224659 - DNA, 122 bp, Homo sapiens
aagcccacttaacggctgagggcaggtgggggtatttccttctcaattctgctcaaggcccgttgctgttctttgaggatgttgcaaatccagggtttggagggctgggcctcttggtggcc

SEQ ID NO: 224660 - DNA, 122 bp, Homo sapiens
cctctgtacccgtctcacaatcgcacacagcgggtactcagtaaacttctgcagaggagacgggcagacgcctccttgcggggcaactccactcagcccctgtccacctcctcctcgcagga

SEQ ID NO: 224661 - DNA, 122 bp, Homo sapiens
tttttagtctccttcactgatgagggtaaagagttccttaagtttcctccgagccctgcacgcgacaaggtcttcattctgcattttctccttgtggcctcggggcacaggtccacgatgga

SEQ ID NO: 224662 - DNA, 122 bp, Homo sapiens
ctctccccaaccttctgacctggtccttagccctgggccttgggcttctctggcctctcacgcccatgtaatacttactagatgccagatgtgtacacaggttgcatggcctggtagatgcg

SEQ ID NO: 224663 - DNA, 122 bp, Homo sapiens
gggggcaggacggaagcccggttatcaccttccctgactacccggccttcagcgagattccggacaaggagttccagaatgtcatgacctacctcaccagcatccccaggtacgtgcaccca

SEQ ID NO: 224664 - DNA, 122 bp, Homo sapiens
tggaagatccgaggcccaggactggtgccaggtctcggaagctccagggggagggggcggcgtgaacccaactcaccgagctccgggcgccacttgtaacttggttttctccgcagctccgc

SEQ ID NO: 224665 - DNA, 122 bp, Homo sapiens
tgtcgggggtctggtttttgagtccccgagtccctgcgcacggggtcaggaggaacagcacggtcggggaggtcgagagcgccttacctggtggggaggggtcgggaaggggcccaggaacg

SEQ ID NO: 224666 - DNA, 122 bp, Homo sapiens
tctggtaatactatcaattctgtttctcttcagaggtgaggggagactatttgatgaaatcgtaagtcctgtagggtgttgtgaaatagggccagaatgaaagatagcaagaatagtgttat

SEQ ID NO: 224667 - DNA, 122 bp, Homo sapiens
tggggatccgggagcgggggccgccggcgagactgagcccgggacagcccagagctccagcgctccagcgctctgcagcccgcccagagcgcgcagaccacccccatgccccgcccgccctc

SEQ ID NO: 224668 - DNA, 122 bp, Homo sapiens
ggcctccagctcagacaccttggtgttggcctccttaacggccagctccccacgctgctccgcatttgcgatggcggcctccagggaagccttctggcctttgaggccctcaatctccgcct

SEQ ID NO: 224669 - DNA, 122 bp, Homo sapiens
acaggctgaggatggcagacacttcccacaaaagtggacctagccctgaacacacacagccgggggacttgttgagtttgcactgagcttccctccaaatgaggaagggggcgtttttatgg

SEQ ID NO: 224670 - DNA, 122 bp, Homo sapiens
aattcctaatgctctcctttttttattctccacagtgacagttgtcataactatatctaacgattgtgggacttggagaaaaatgcagagtggaagcaggaggaggtgagaataaggaggcc

SEQ ID NO: 224671 - DNA, 122 bp, Homo sapiens
ggtcagagggtctgggcagcagggtggacaggaaggctccggaatattcagttgcgtcgccgcgcggaggggacaggtccgcgcctcccggagagcgggacccgagcgtaccgcgcaggcgc

SEQ ID NO: 224672 - DNA, 122 bp, Homo sapiens
aactctacaaaaacagcaaggagaaagagcaaataatcccattaaaacgtgggcatatgacgtggacagacatttctcaaaagaggatatacaaatggacaagacatatttgaaaaaatgtt

SEQ ID NO: 224673 - DNA, 122 bp, Homo sapiens
gcggtgcgtagctgtgagggagtttacacttctgacttcgggccttggctcctgggacggcgcactggtgcaagagccgcttctggagtctggtggactcgggttcgtgtcttgcctgggac

SEQ ID NO: 224674 - DNA, 122 bp, Homo sapiens
taccgatggattcagccggtggggctgcaggaggttcctataagcgtggtcccctctccccgcaccgagtccggccccggccctgggatttccccagccgccgccccgccccctccgccccg

SEQ ID NO: 224675 - DNA, 122 bp, Homo sapiens
ttcctgtatctattttggcagggaaaccatgcagccaagctagccaggtactcctgagagcgacagccaacccaaaccacgtaagggtgaaagaatggtttaagtagtaaatacagttgcca

SEQ ID NO: 224676 - DNA, 122 bp, Homo sapiens
gtttaattactgaattccgcctagactgcggtgcggccttcatgtgcacgcccctgccgccgtttaccgccaggtggcagcgtagaccaagtaaggaagccggcccacccagagctgggaac

SEQ ID NO: 224677 - DNA, 122 bp, Homo sapiens
ctcctaagcactaagtttacaggcatgagccaccatgctgagcctatactttccttttctcgacagattgaattaactagaactttacagttgataataacacagatatctctgatatctgt

SEQ ID NO: 224678 - DNA, 122 bp, Homo sapiens
ttatctgtagtgttctacagtgattcaagaatatgtacactctgtgtttgtactcatacacgtgcacctgtaaaaatgttgttcttgaatgtgaacaaaatgttgttcttgaatgtgaagta

SEQ ID NO: 224679 - DNA, 122 bp, Homo sapiens
agtacacttggaccgggcttcccaaagggttcaagaactcccccaccatcttcggggaggcgtgggctcgagacatccagaagtttcccagcggagacataggctgcatgttgctccagtag

SEQ ID NO: 224680 - DNA, 122 bp, Homo sapiens
ggggcggcaccgagtactgctgctcacctgcagagagaaccgaagacagctgagcgagtgcgccccaagggctcggggtgcgaggctgcgggcaggggttgggggagacacgagatcctgag

SEQ ID NO: 224681 - DNA, 122 bp, Homo sapiens
gcctccaagcaaggagcacactgttgggtcctcagtcacctgcggggtaaagcataaggccgccccctctggtgagcaagtgggacctgctgcctggcaccccaagtcgtgcacaccccaga

SEQ ID NO: 224682 - DNA, 122 bp, Homo sapiens
gggcaggccctggcacctttgttcctcagagatgctctgcacctgcacccaggtgtcgtccgcgggcaggggcatgggcatgctgacggtggtcctggtggtgtcactgatgatgctgagcg

SEQ ID NO: 224683 - DNA, 122 bp, Homo sapiens
tcgagccagaaagtccggagccgcccaggaattttggctcgaactgagtgcatttcctctcgggccggccgggtgcgatccgggaagggcggctgcgggcagacgcggcgctgcgctcggcc

SEQ ID NO: 224684 - DNA, 122 bp, Homo sapiens
agtattggatcccttgttttctggatgccatgtttacctcttgagtttaattccctttttcgcatggagccatcttcccatagtttctccagagaacataaatggggaaatttgagaccttc

SEQ ID NO: 224685 - DNA, 122 bp, Homo sapiens
aggcgccgcttctgctccgtctcctcgcgaagccgcctctgcagctgtccctgctgctgccgcatgagctgcacgttccgctcgagctcctgcagtcgcttctcactctgggccgacagtga

SEQ ID NO: 224686 - DNA, 122 bp, Homo sapiens
gttttgtttgtttgctacatgccactatttctgtatcagtttccttcatcatagctctctcggtgctgatgtcagcacaatcttattgttttgacatttttctctaaccatattgagactgt

SEQ ID NO: 224687 - DNA, 122 bp, Homo sapiens
cagggcttccagagaaacctggaaaaccagctcaggccctgccgcaaagggggtcggacccgctccgccctctccctctgggcgctgtgcttagagactcaggcctcaccgatggctctagc

SEQ ID NO: 224688 - DNA, 122 bp, Homo sapiens
ctgcttcttagagatcgtgactccgggcccaaggtcaccggcaatgcggccctgacgctgcgcaacttctgtgcctggcagaagaagctgaacaaagtgagtgacaagcaccccgagtactg

SEQ ID NO: 224689 - DNA, 122 bp, Homo sapiens
aaactcgggcgcctttacccggtttaatttcagtttaggccaaaatccccgcgggttggtcggggcgggagcggggctcggtgttcggggctgacggcgggggcgaggccatggttctcaca

SEQ ID NO: 224690 - DNA, 122 bp, Homo sapiens
aggagagcgggcacccgagtctccatcctcagggtggcctgaaggttccaggagggcgtccggcgaaggcacggggctgcgaccatccagttagcagggctggtgtgactgttgagagtaaa

SEQ ID NO: 224691 - DNA, 122 bp, Homo sapiens
gcgtataaacacaaaaccagcccctgactgcgagacaccaagcttgtttaggtctaagcccgcagagaacccccgatcccagaattagctggcgggcccgggaggaagtgttcccgccctct

SEQ ID NO: 224692 - DNA, 122 bp, Homo sapiens
aaaccagacttggatgagccacagtcatttaataataagagccatagcagcaactacaaccgcccctatggctaatgcatatttggcacttaccatgtgccagatactgtctcaaaagtttt

SEQ ID NO: 224693 - DNA, 122 bp, Homo sapiens
cctgcatatctaaattaacagcagtgcagaggaagcaatcagatgtgcatttgtctcaggcgaggctcagagaaatgactctgagttctgtctgtctttggttctcaaggaatttccttgtt

SEQ ID NO: 224694 - DNA, 122 bp, Homo sapiens
cgccgcggcttccctcaggccggggttccaggttggggctgggactggggccgggccgggcgcacgcggcgggagaaggggtaggcggggtcccggccaggctgcaggggccgggactggcg

SEQ ID NO: 224695 - DNA, 122 bp, Homo sapiens
tttctgtttaaatctttaagtatcttgaatacttcattttaaaatgtaatctcatgttttcgtttgaacagaagactggggtagtctaccccacagatgcctaactctcactatttcttctt

SEQ ID NO: 224696 - DNA, 122 bp, Homo sapiens
ggcgcacgcgggcaccgcccacgcgtcacaaagagcgggccggggcggggcctcgacagccgggctctcagggccctaaagtggccagagcccatccagatggtaggaatggcaaacagcta

SEQ ID NO: 224697 - DNA, 122 bp, Homo sapiens
cgtgacccgcccgcctcagcctcccaaagtgctgagattacaggcgtgagccaccgcgcccggccttgtctattgtttttcaataacgaatgtataggaatagattgaatagattgacatag

SEQ ID NO: 224698 - DNA, 122 bp, Homo sapiens
cccaaaatagccacatgtggcaagcctcattgacaggccaaaagcctcagtcaacatggccgcgaccggcttccattgcccttcactgcccgcagtaaggatggctccggtgacttccttcg

SEQ ID NO: 224699 - DNA, 122 bp, Homo sapiens
gacgtgcgcctgaggagaggctctcaggagaccacagctggcccttctcagggctgagggcgagaggagcaccccttggtgctttgggataacacccagtggccacgtcacagcccctcgga

SEQ ID NO: 224700 - DNA, 122 bp, Homo sapiens
cgccctgtctctggccgaggcgagccgcgcaagtttcccgggaccctcagagttgcactccgaagactccagattccgagagttgcggaaacgctacgaggacctgctaaccaggctgcggg

SEQ ID NO: 224701 - DNA, 122 bp, Homo sapiens
aggcacatgtattagattatgtttgggaaaggatgggaagaaataagttagtagattcttcgtttgattgtttattggtccactgtggttgtgaagatttacctttttattaagatctaagg

SEQ ID NO: 224702 - DNA, 122 bp, Homo sapiens
gccttctactgcctttcactgcgcgtgcgtcgtgctgtgggattcgcggacccctctggccgcgctgtggctgtttcaccgctccccggctgggacttggagtcccttatctttccctggtt

SEQ ID NO: 224703 - DNA, 122 bp, Homo sapiens
gtgagtgagggatgtgtcgcctgcacaacctgaattttctaaaacgggtaaccttatacacgtaagcctaatttataggcagggtctggatcacgagacagcagagctgagaacaaatactt

SEQ ID NO: 224704 - DNA, 122 bp, Homo sapiens
ggcaggcggagtgcctgagtgccctctcactcaaccctctctaccctttgtctgcagaggcggccgctgacagcaccagcatgtcttacagtgtgaccctgactgggcccgggccctggggc

SEQ ID NO: 224705 - DNA, 122 bp, Homo sapiens
ggtgccttaccgagggcaggaggaggcaccggtgcagaacccatgagatagctaggaacgcgagatcaagggcacagtaggtaccaaggtcattggaagggcttttgctctctacctcctgg

SEQ ID NO: 224706 - DNA, 122 bp, Homo sapiens
gatagcatttttcttctggcgttgtgttttaaatctctaaatgaaacttgactgtccccacggccggttggagaagcacaaaggcctcccattccactggctacagtaacgccattgtgtat

SEQ ID NO: 224707 - DNA, 122 bp, Homo sapiens
ggacaaagagatgattcacctcttgagcaggactgagcgggatggtgtgagatttcatcacgctactcaaaacggcacacaattcaaaactaatgaattgtttatttctaaaattttccatt

SEQ ID NO: 224708 - DNA, 122 bp, Homo sapiens
ggtagggtggcagcccacagctccttgaggctgaggaggagacagtgcagacccagaagacgctgacgcaccgccccctcgcccgcccaattcaatgactggagttcacgtggccctgaagc

SEQ ID NO: 224709 - DNA, 122 bp, Homo sapiens
gcttcggcgccgggggcggggccttcagcgggcgggcggggttttggcgccgcgaggtggcggcagcagagcggcgcagaagggagggggcggctggccgcgcggaaggagtgagtcacctg

SEQ ID NO: 224710 - DNA, 122 bp, Homo sapiens
ccagccccacggcacctctcccctggcccactcacctgcccacagcaggggcagcagcagcggtagcatctctgaggcggaggcttcctgggctccctgcatgagcagagaaggggaaggga

SEQ ID NO: 224711 - DNA, 122 bp, Homo sapiens
agggggcggcagctttgtgctttttagtggccgcgtcccaggatagctggaaggttaggacgctcttgcggtcccagagtggagtggaaggtctggagctttgggaggagacggggaggaca

SEQ ID NO: 224712 - DNA, 122 bp, Homo sapiens
acctgaccagcttgaggcttgcgccaccctggtggcgctggttgggggctggtaggaggacgtccgctctaagaacagaagggaagtcaaggggctccctggacggcacggagcggttcttc

SEQ ID NO: 224713 - DNA, 122 bp, Homo sapiens
cagacgagaactggccggatcccaacagggacttgatggggggcccgcgggccttcccgacggagacgggagaaaaacagggcaaggacaccccgaagggttcagcctgagccccggcaagt

SEQ ID NO: 224714 - DNA, 122 bp, Homo sapiens
cctgtcccgcttggcatcttgagtgtctgtgaccagccctgcctgcagagttgcccgggccgtggcagcagccccggttagcctcatgggtagcccgggcaggtgctctgggctcacggctt

SEQ ID NO: 224715 - DNA, 122 bp, Homo sapiens
agctgcgccaccgcgccagccccggcgcacgctcccggcccggggcccgccagcgtctcgcgcaccagcgcccacagctcgcgctgcagggcctcgtacagcagcgccacgtcccgcgcccg

SEQ ID NO: 224716 - DNA, 122 bp, Homo sapiens
cccgcccaccgatgagccaatcgccgcacggcggggcccggcctttcggagtttccagtccgccaaccaatcagcaattgcctctccgcaagcccgcctgcttgcgtcaccgacggacagca

SEQ ID NO: 224717 - DNA, 122 bp, Homo sapiens
gctcccgtgaccctgtttacagaaataggcagtggcccatctggttgtagtttgagaccccggctctgtgtgtcccaacccaggaggggctgccttggaggctcttcccggctgccctgcat

SEQ ID NO: 224718 - DNA, 122 bp, Homo sapiens
cgggaggccgagtcctggagcagagatcggaaccccgcgggggcgagggccaagagtgggcggcggactcgggaactctaagccccaacagggagtcatttggcacggggcggggagaccgc

SEQ ID NO: 224719 - DNA, 122 bp, Homo sapiens
gtccccattgagagggcgagccccgggcgggggcgcgaggaccgcccggggacggcctggcgcagggccgttatcagtctccatcggctcctggggcaggagagagagaacgcgccggcgga

SEQ ID NO: 224720 - DNA, 122 bp, Homo sapiens
cggaggcagcgtggggaggcccagtgaggccgcctgtgtggaactgcaggggggcagtggcgtgggtccccgggcctccctcccgccaggtgccctgaagcccctctgggcgcccactgtgg

SEQ ID NO: 224721 - DNA, 122 bp, Homo sapiens
tcccgaagcacaggattccttctttatacatacttctctcatgtccattattcctagaaacgtggatgatggatgtgtctcctccacgctgcctccaggcgctgtttatcatgagagaaagt

SEQ ID NO: 224722 - DNA, 122 bp, Homo sapiens
atcagtcagggcttgaaaaatatctccttgggcacttcttctagccctgagcttggccagcgcctggctggactggcatgcaaagttcactgtggtagtaaaggaagctattttggggctct

SEQ ID NO: 224723 - DNA, 122 bp, Homo sapiens
cacccagatctgcctgttcagaatgtctggaaggggactccagaacctgtgtgcccctcccgcatcttcctcaaggcattgttttgcacacaaacatgtaagaatcaccgggcgtggtggct

SEQ ID NO: 224724 - DNA, 122 bp, Homo sapiens
tggaggttaaagcacggtttgtcaaaacgccttagaacttgcaatgccggccattcgcgtcggggtggggtccccagaagcagaccctgaggtgaggcttcctgtattcttggcttattggg

SEQ ID NO: 224725 - DNA, 122 bp, Homo sapiens
cagctttgaggggagcccacctgccccgtgagcgccgtcgtcatggcaaccggacaggcccgggaagcgattggccactccctgccacgcccctatgccactgcttccccgtaactgaggca

SEQ ID NO: 224726 - DNA, 122 bp, Homo sapiens
tgtacagcgtcaggcgctcagcagaggatgaaggtcctgtattagtgataattcctggggcgcctttcaatggcaggctgggagagaagcagagaaagcaaatagctgagctcttccagcat

SEQ ID NO: 224727 - DNA, 122 bp, Homo sapiens
taccccaggaaggggtccctcaagtctctgctatttacagaagtttcttcagtaggcagacgaagagtgtgttggggcaaaggggctcggttggaggcatttcccataagactgagccctct

SEQ ID NO: 224728 - DNA, 122 bp, Homo sapiens
gcagccgctctcaacagagccagtgtgggctgtcttttcaaaattttaacagatgggcgccgcctgtggagctgcgtgttcccggggtgactcacaggtgaccccacactacacaggactga

SEQ ID NO: 224729 - DNA, 122 bp, Homo sapiens
aagtccagcagcaccttgctggcgtagttaaacgccttctcgatctgctccacatacgcccgctcttttaacgtgtagatgatctctttagccaccgggcaggtgacgtcatggccacactc

SEQ ID NO: 224730 - DNA, 122 bp, Homo sapiens
tagcacaggttgcaggtcgaaagatgagctgtgggccacaggtacattcaggacgcttctcggggaatttctttggggttggtttaggcagatgctgatggttcagaactctccacctgtcc

SEQ ID NO: 224731 - DNA, 122 bp, Homo sapiens
cctgcctctgcatgcggctgttctgtctttcctcctccttcttaaaaactaagtaccaagcgggatgggagagccaagaagagaagctcaagtgttaattgtattctttacatacagatctt

SEQ ID NO: 224732 - DNA, 122 bp, Homo sapiens
ttataatttggtcttgttaacttttaaagaagaattaatttaggtgctttgccagagagacggtgatcaagttcagaggaaagagaactgggaaaaacatttctgctgcttcatgtttcagt

SEQ ID NO: 224733 - DNA, 122 bp, Homo sapiens
cgccgccagcgcgagggctcacgggagccacagcgttctgggctggggctcctaccgctgcgcggggggctatacatgggggtgggcaggattcacgttgttgatgaccggccaaactcaac

SEQ ID NO: 224734 - DNA, 122 bp, Homo sapiens
cacgcccaggcgtgcatgtgcgtctcgagacctgtgggcctgggcggcagaaaggcttcccgtggctgttgcacgctgggtgtccctgggtgctccaagagagccccacggtgggacgcagg

SEQ ID NO: 224735 - DNA, 122 bp, Homo sapiens
cccccgcaccagctcccgagccttggccttcgcccgagcgatctcccgcctagaaccccgcgcccacctgtgccacctgtgcccacctgcgccagcatccctcgaggtccagctccagcgtc

SEQ ID NO: 224736 - DNA, 122 bp, Homo sapiens
tgttgcttaattctccaatcacttccttttctcctttgttgctgtaattcacagccctgccggcctcttaccacatcatttgtactattggacttcagctgcaaacctcattgctcccagtg

SEQ ID NO: 224737 - DNA, 122 bp, Homo sapiens
cctttcggctcagcgctataccgtgggagctctttagctgactgaggccggaagcagccgcgttgggttgcagggaggtgcggcaggagaggcacgggcgggaacctgtactgcacgcaggt

SEQ ID NO: 224738 - DNA, 122 bp, Homo sapiens
ccttgtgtttgacttcagtccaatagctcagtctaccacacttgtgaatctcccaaagaacgaaaacaaagctctaagttttttttattcacaagagggaaaaccaggactatttagaaagc

SEQ ID NO: 224739 - DNA, 122 bp, Homo sapiens
tggatgtgagccaccactcccagccctttcttagaaacttctctttcccttggccgggtgcgcagtggctcacgcctgtaatcccagcactttaggaggccgaggcgggcagatcacctgaa

SEQ ID NO: 224740 - DNA, 122 bp, Homo sapiens
aattcactactaagaaatgcaacccaggggctcccaggggcatgtgtatctttgaaagcacgaagttctttggtgtgtctttggtgagcaggtgtcttatgtgcactttggaatgcaagcaa

SEQ ID NO: 224741 - DNA, 122 bp, Homo sapiens
tgtgcccacagaaatattacattctctcctatgggcaaagagctggcataacaagataatcgcttcaaatagttttgagctttcagagatatgtcacgatgatctctgtggtcagggaccac

SEQ ID NO: 224742 - DNA, 122 bp, Homo sapiens
acccactgatgctgttatggaaaccacggactttaagaagccccaaaacgccaggttccccggggacccagcaggaggcccaaggtcacatgcagtggggtgtcccagccaatcatgacagt

SEQ ID NO: 224743 - DNA, 122 bp, Homo sapiens
gatccgattccgggtcaagagctgccggcagccacttcctttgacgagtgactgtcaggccgttcccacggcgggggtggtgacaaggactaaagggtaagaatttagaacgggacgcgcag

SEQ ID NO: 224744 - DNA, 122 bp, Homo sapiens
tgtgattttgcaatgaataatctctccccttggtttcataggcaattgaaaagctgcaggcgggtgctcttgcaactgacgcagtcactgcagcactggtggaacttgaggtatttcttttc

SEQ ID NO: 224745 - DNA, 122 bp, Homo sapiens
tggtttaaattagtgaagccaagaagtcaaaattctaagaaaagtaaataaaattctgaccggtttgggaaaagcaaatccaagctcctgctgggctccagctggaggtcgtgacccctagg

SEQ ID NO: 224746 - DNA, 122 bp, Homo sapiens
atggcgacactctggttccgccttcgggcatgctcgaacagcattctgggaattgtagttcggggggggaatctaacactcaccgaggggcggagtagcttccggaaagggtactgcatttc

SEQ ID NO: 224747 - DNA, 122 bp, Homo sapiens
actggctggttggattggttggatacttggctggacttcaactgactgctctcccacatccgcttcagccacttggagcgcccagccacagtagtctcttcccaattccactctccacaagg

SEQ ID NO: 224748 - DNA, 122 bp, Homo sapiens
agcccaggccgtgagaggttgctccagtctgtgctctctgaccgtagtcagtagtcacggcgttagatttttgcggtttttgatctggaagccacacatccttagcttaatttccacgtatc

SEQ ID NO: 224749 - DNA, 122 bp, Homo sapiens
tatccagccagtctgcagccagttgtcctggttgggctccagcacattgcacacttggtacgtgcggatgggacggtcgtgttcatccacgccgctgatctcctcccactggggacaagagt

SEQ ID NO: 224750 - DNA, 122 bp, Homo sapiens
ggtttggggtagggacaggcgagagtcaactttacaaagtcatgtgctcagtgttcctcccgcgtctcagggcactcacgtcccgcatctcagagcactcatctcctgctactcagcactca

SEQ ID NO: 224751 - DNA, 122 bp, Homo sapiens
gcctgggggagggggtcttgagcccatgaggggtcccagagaccttgtcactggagacagcgcccctggctacccccacctcgatccacttgagggtggaagtgagtctgaggtcaggagtg

SEQ ID NO: 224752 - DNA, 122 bp, Homo sapiens
gaaccagagcattggcctgggctgtggctctcggcagggagagacggccgcccagagcagcgagtggccaggaagtgtatcctagccccccaccccgcccccgtgtccaccgcaggacagag

SEQ ID NO: 224753 - DNA, 122 bp, Homo sapiens
cggatgggagggtggcagaggggtcaggagaagtcgctgtcgccgccgcagcccaggtggcgcacaccggctcaggcctccatgtttccacgtctcagcgggtacagatccggctccggtcc

SEQ ID NO: 224754 - DNA, 122 bp, Homo sapiens
aggccagcaggaacccctggatcctactgtttagctcttgctgtggaaattcccatacatcggacaggtaccaaaggctcggagatctcagcctgtctgccccccaacaatgcaagccctgc

SEQ ID NO: 224755 - DNA, 122 bp, Homo sapiens
agagatctgttgcatgacaaacgttacctgacagttaaggagaggagctgctaaatgggtcgtgtgtttctgaatgggttcctgatagtcctgtgaccatgcggaagccagcactcctcatc

SEQ ID NO: 224756 - DNA, 122 bp, Homo sapiens
ccccggggtctagccaggtaattccgacgcccatggatttccggattacagttcccaccgcgggctcagtcctactcttagtttatcccgcggtgagcgccaagccccaaaagtcggagtgt

SEQ ID NO: 224757 - DNA, 122 bp, Homo sapiens
ccctcgatgcctgctggctagctcgctcgctcaggcctggccggcacccctcgagcacagcgcacttggcctgtggaacgcccagcccgcctgcgccccctttatacgcgcgggccccaccc

SEQ ID NO: 224758 - DNA, 122 bp, Homo sapiens
caagggcaccaatcggaggctcctaacttcatgcaggacagacgacagaaggatgacgagcgaccttgatgcccacttggggggcgaaacatcacacttcctctggtttccagggcacacac

SEQ ID NO: 224759 - DNA, 122 bp, Homo sapiens
gcaagggaagctgtagtgaagagtgttgctgccatttggctggtgctgaaactgcacctacgtggaggttatcactgtgggtggaaatggtttctattgttctttactgctagggtgatttt

SEQ ID NO: 224760 - DNA, 122 bp, Homo sapiens
tcctaatcagaagagataaacttgggattcgggaagaaagttgattatttgaatcaatgacgaactcaccatattatgttttagttggacagggcctcacacttagagtgagagcggcagaa

SEQ ID NO: 224761 - DNA, 122 bp, Homo sapiens
gtacgcatcgcctcaggatgggacaagagctccacagaggctgcctggggtgcccggctacgggttagcgtgtgggacgcgggtacctggctatgggatgctctaagtgtagcgcctccagg

SEQ ID NO: 224762 - DNA, 122 bp, Homo sapiens
attgtgggtagaatgttttcaagaactgccaggaggcagtattggagctctgtctctctgcgtcctgaggctccagaaccaatccttcatttacaattcattctcccatctttttactggca

SEQ ID NO: 224763 - DNA, 122 bp, Homo sapiens
gcgtgtgtgtggggggggtggtagggaggtgggtgtatgcgtacgagagagagtgcgttccgggccaaaaggccatctttctgcatccgttatcctggcctgggccctgttcatgcaaaaaa

SEQ ID NO: 224764 - DNA, 122 bp, Homo sapiens
cagcagcagcagcgagcaccaccagcccattcaccacccggccccgggccgcagcacctccgccgcctcagcccggggatccctccgcccaggcccagacacactcgcccgcgcgggagccc

SEQ ID NO: 224765 - DNA, 122 bp, Homo sapiens
agagtttttgaaactgtatgctatgtactgggaggaaggtggggaaaatcctgcaagattcgccctccttagacccatgtcagcttttcttgaaacaatgatttttggggaaatgtaataca

SEQ ID NO: 224766 - DNA, 122 bp, Homo sapiens
tccagaaaacatgcaaacagggccaatacatgcatctttacttttgtgtccattttaacccggtgaaggaaaattccaacaaaaaacccacaatgctggagcaagatctcaggctgtgaccc

SEQ ID NO: 224767 - DNA, 122 bp, Homo sapiens
tcagctcttcaccggagacccaaatacaacaaatcaagtcgcctgccctggcgacactttcgaaggactggagtgggaatcagagcttcacgggttaaaaagccgatgtcacatcggccgtt

SEQ ID NO: 224768 - DNA, 122 bp, Homo sapiens
acaggccatctggattgacaccttgattgattatcaagggctccattgcgtctgctgcagcgtcacctgacagaacggggaggggctgtgttgtaccttacctgtcagtctctgctaggtgt

SEQ ID NO: 224769 - DNA, 122 bp, Homo sapiens
caggcctcagacgctacctcagatctgatccactcctggggctgcaactacaacatacaccgcccaatatctcccaaaccagcccagcgcattggggccctggccttcctcccaagcttctg

SEQ ID NO: 224770 - DNA, 122 bp, Homo sapiens
tcttgcccgtcaagggggcctcgcgctttttcttcctcggctggctggggtcgtagtcggcgtccatctgccaggacgcacaggtcagatcccaccagccccccgtcagggcccctgggact

SEQ ID NO: 224771 - DNA, 122 bp, Homo sapiens
cctgagaagttgacgtttcggatgtacttaagcagctgggtgccatctacagggtccatgcgcgggcagagccccacgcggccgggacacaggtcacggtgcatggcgtgcagcgcgtggcc

SEQ ID NO: 224772 - DNA, 122 bp, Homo sapiens
tccggccccagccgggggggaggccgggcgcccgggccagagtccggccggagcggagcgcgcccggccccatggacagctcggccgtcattactcagatcagcaaggaggaggctcggggc

SEQ ID NO: 224773 - DNA, 122 bp, Homo sapiens
tgcaagatgacagctcccctgtgaggaccagagaggggatatgtgtgcgcccagttgcctcggagtcagcgtatgtccaaaatgtgagagtgtggggaacagagatcctctctgggctgact

SEQ ID NO: 224774 - DNA, 122 bp, Homo sapiens
agtgaggagcacctctgtgccaaccctatttggccagccatggggtgtctgtgtgtttcacgccttaggttttgagtccccctgcccgggaagccgtccttacccacagagacaaggttgct

SEQ ID NO: 224775 - DNA, 122 bp, Homo sapiens
ctttctctaacaacttgtgtgacatgtccccgaatcagcatttaagatttcgaactaaaacgtaatccgaagagattccttaatgggaaggttggcaaacttgccaaggacatagacctgtt

SEQ ID NO: 224776 - DNA, 122 bp, Homo sapiens
agcgagaggcggggtcggccccgccgggcctggggagagaggcgggtcctgtcggcggggcggggccgatagcaggcagccccgccccccacggccccaggctcttggacggcgaagctggg

SEQ ID NO: 224777 - DNA, 122 bp, Homo sapiens
gcgttcgggaagggaaggtggaagcaggaaggacacccacaagatagagtggtcagaaaccgaccacgtcaccaaagggcgccatagacgttccagaggacaaaatgcccgtctttccaggg

SEQ ID NO: 224778 - DNA, 122 bp, Homo sapiens
accagtgtatgaaggcaggacagcgaagtggtcccggctacctgggttccagtctcagctcgccctgcgacttgttaactctgaacttaagttaccgcttttgcaaaatgggcagaactttt

SEQ ID NO: 224779 - DNA, 122 bp, Homo sapiens
tgggctggaggtatatagaaaatctgcccctttttctcaattttgctatgaatataaaaccgctctttaaaaaaaaaggtttattagaaagagagagagtaagaataggaaagagaagatac

SEQ ID NO: 224780 - DNA, 122 bp, Homo sapiens
tgccggcagggcttgggggcgccttagagccgaaccccgttttttcaggaaagggcgctgcgaccacccccgtcccgggcctcagcccctctgctgcagaccctcgggatcgtcgctggtag

SEQ ID NO: 224781 - DNA, 122 bp, Homo sapiens
ggggggagcaaggatgacgcttgattgtctgaagtccccacttcgttctgcctccggagacgcagttgtgaggactctcagcgcatcttcttccttctgcttccaccggctcccttgcccaa

SEQ ID NO: 224782 - DNA, 122 bp, Homo sapiens
ctggcagtgccactgataattgaagctgcttgcatttctcccaacaggaaaactactagacgttcttactttgaaaaacaaccatttatgtaaccaagggcgatcaaatcagtggtccacac

SEQ ID NO: 224783 - DNA, 122 bp, Homo sapiens
tcaggcccggccaggctggcccgagcgccgggctccgggaggcgcggacaaaggaaaacacgggcccaggcccactcacccggcgcggggcctgctgtccatccgcttcttctggcgcaccg

SEQ ID NO: 224784 - DNA, 122 bp, Homo sapiens
tctagggttaaaagtctctctaacgcctcctcccaggacgtgccaccccgggcgctcctacgcaagcattttctgggggcctgacactgctgcctccccgggctcactgaggagacaaggtg

SEQ ID NO: 224785 - DNA, 122 bp, Homo sapiens
ccggtggcaaccaacacggctccctgctccaggccgggacgcccctctgggaggaacgcgcggccacccttggaaacctgtaagtgatccacggtccaggtgtggaatgctcacagttgtca

SEQ ID NO: 224786 - DNA, 122 bp, Homo sapiens
acctgattaatcagagccctgcaaagcccactgaggagggctcctggctaatctcatctccgcacccacgcggggacagacacctccgctcggccaatgagacgcaattctgcaaactcggc

SEQ ID NO: 224787 - DNA, 122 bp, Homo sapiens
cctgtcagttgttctcaggtgtttgggcttgttgttccgtatactcagtgggttcgcggccgccggcccagtgaggctgggttcgaggagctggagcgggaaactggagcttaaattctggc

SEQ ID NO: 224788 - DNA, 122 bp, Homo sapiens
ggaaagaaagaataggcttttatccagccttttaagtcttaagttatctaattcaacacacgtacagcgctattgtaaagctattttaatttgtcttcctcccatcatgttatgccctttca

SEQ ID NO: 224789 - DNA, 122 bp, Homo sapiens
cgggtcggcggcgggagaacgaaatgacggaacccggaagtcgtggtggccatagcccgtcgtacggcggagacacatcccgggagtggggagcgggagcgaggaggagcgcgccgcgccga

SEQ ID NO: 224790 - DNA, 122 bp, Homo sapiens
ctcctcatagtccagcacacacacggcagagccacccgcaggcacccactccccatagcccggcacacacgtggaccatgccaccctccacgtgcgcctggggagcaaagcagcacagcctg

SEQ ID NO: 224791 - DNA, 122 bp, Homo sapiens
ttcagtcatggcctccgtaatcgcgcgcatggcatagcccgcccctgacttcaaggccaccgccgtggtggatggatagcgctttcaaagaagtgaagctgtaggactacaaagagaaatac

SEQ ID NO: 224792 - DNA, 122 bp, Homo sapiens
gtcggcgcgcgcggctgtctcagaactcatgcagctgttcccgcgaggcctgtttgaggacgcgctgccgcccatcgtgctgaggagccaggtgtacagccttgtgcctgacaggaccgtgg

SEQ ID NO: 224793 - DNA, 122 bp, Homo sapiens
cgcagcatcccagagccaccgccgatctgctacccccgcaagacctacgcccctcctgcccgggcctccaccagggccactatggtgcctgagcccacctcagcactgcccagtgacccccg

SEQ ID NO: 224794 - DNA, 122 bp, Homo sapiens
catggaattcccgacagggttcatccccggtcctcctgggtcggtgtaatagggcggccccggctgctgggctcctgaaagacagacaaacataggtgagcacagaagggaaagccccatca

SEQ ID NO: 224795 - DNA, 122 bp, Homo sapiens
tgccgctcttaaatgacaggcgtctattaaagatagcttttgtgtagtgtttctccaaggcgaggtcaaattccatacacttttataaccgtagtcgatttttctttcgtgtgaatatggtt

SEQ ID NO: 224796 - DNA, 122 bp, Homo sapiens
aaaaagaaaacagatctggtggcgctgctgagtgtcaaaccctggagcccatcatcaagacgttatactggtggcagttctgctgtgagtgcacttgccgaattgaacagagccagagctgc

SEQ ID NO: 224797 - DNA, 122 bp, Homo sapiens
cttcccatcctaccctcgggcccacctggccacctgaggtgggcccaggaccagctggggcgtggggagggccgtaccccaccctcagcaccccttccatgtggagaaaggagtgaaacctt

SEQ ID NO: 224798 - DNA, 122 bp, Homo sapiens
agagtgtgcggggcccaggaaccgaaacaggaggtccgagggaccaaggcagggtccagacgtgagggggagcgcggcggggcgtgggggacgcggcccccggggcaggggtccgggatctg

SEQ ID NO: 224799 - DNA, 122 bp, Homo sapiens
tgctgccgggaagtcactctcagatgtgtgagggtgacccagcaaggccgggttccgcctcggcaggtgtgatgcttccacgagcctcccggcacctgctccttggtggtcctggaacgcgg

SEQ ID NO: 224800 - DNA, 122 bp, Homo sapiens
ctacgcgttcccttggcgctgtggaacgagccagtgtctgtggggcgtcagctgacttcacgcggccctgtgttccggccgctttcagcgatgcctgtccttgctagttcactttctggctt

SEQ ID NO: 224801 - DNA, 122 bp, Homo sapiens
gcggcctccggggaagatactgacagagacgccgccatccggggctccctgggcggggtgcgggcactggaaccttaactgatcccaaccataaccccgaccacgcgcagcccagaggctca

SEQ ID NO: 224802 - DNA, 122 bp, Homo sapiens
ttttctcatctaaggacccgcacccgcacggttcacactgtcttcttcccgctatcactccgtgtgggtcaaacctctgcctgcccactggagagcagcgggaatggcttcaggaagcggct

SEQ ID NO: 224803 - DNA, 122 bp, Homo sapiens
gaagctgaactgactcgtccgcggccgctctaccccaacaggccgccaccagcgagagtgcggccataaccatcacgtgaccgcccaccgacaccagcgagagtgcagtcgtaaccgtcacg

SEQ ID NO: 224804 - DNA, 122 bp, Homo sapiens
tatatccacaatccagccactgtcatcttttgcttggagattacaatggctttctaacagcgtccctgccacctgccctttgcccctgctgtctgttatcctgttaaaactgaagccaggtc

SEQ ID NO: 224805 - DNA, 122 bp, Homo sapiens
ccggcgcctgaggtctctaaggctgcgcccgcccccgccgggcttctaagctgtccagagcggggagcctcagacccagccgagccccacttctgggcttagagcttgacccaacacgttcg

SEQ ID NO: 224806 - DNA, 122 bp, Homo sapiens
ttggaaacacttaatgcgctctccaaatggggagtctgttggggaggccctggcgggagccggggctacatccaggtcctcggcttggtggccttgttcacttatttgttcaggaagcagca

SEQ ID NO: 224807 - DNA, 122 bp, Homo sapiens
atttgttaaaaagactcttttctccactgtattccctttgctcacttgtgaaagatcagccgactgtatctttgtgggtctgtttcatcaatccatttgtctttctttcaccagtacctcag

SEQ ID NO: 224808 - DNA, 122 bp, Homo sapiens
cctgactccctgcttcaattacttgggaaagtaaatcacctcagtgttgtttcttggctccgagggtcttgttttatcagcagccgggatgcaacagatgggtcatctcatcctcatgggaa

SEQ ID NO: 224809 - DNA, 122 bp, Homo sapiens
agggtgcgcggttcccttcttgccacttccttgtatggacagtgggggactccaaagacccgctcgggagaggcccaaagcccggtacccggacgtgctgggggaagcacaaaggggccaac

SEQ ID NO: 224810 - DNA, 122 bp, Homo sapiens
tactcagctcacgggcctcatactcgggcaaggcagccgatgtctggagcctgggcgtggcgctcttcaccatgctggccggccactaccccttccaggactcggagcctgtcctgctcttc

SEQ ID NO: 224811 - DNA, 122 bp, Homo sapiens
agtcttaatagattcagctcagttactgcctcctccaggaagtcctccttgtctgcaaatcggctgcccaccatgccggctcactcatagttttaactctgtatctttctaatatgccttag

SEQ ID NO: 224812 - DNA, 122 bp, Homo sapiens
ggctgtctcgctggtgccaccgaggccctctttgggctccagctctcaggacagccttgccgccccgagctccccaaagccgcagagcgccggcaggtgcgcggtggaggcgcgccgcggag

SEQ ID NO: 224813 - DNA, 122 bp, Homo sapiens
acattaggaaagttaatgtgtaaaaatcaccttttgcagagcctagcccataggaagcctcgatgaatgttagccacttggactacttgccttgttctcattaaagcagaaagtagcagaat

SEQ ID NO: 224814 - DNA, 122 bp, Homo sapiens
aacaacgaacttggcttttcctttgttttagcaacaacgaactgtctacagactgacgctcgtgaaagcatggaacgtggacgagctccaggcctacgcgcagctcgtgtccctggggaatc

SEQ ID NO: 224815 - DNA, 122 bp, Homo sapiens
tggaggctgcaaaaggtgccgagctctggtctccacactatttattgagtacagtcccttcgatctaagaagcagatgttcagggagaaacagtgaaagggtggcagtgcatcacaggcata

SEQ ID NO: 224816 - DNA, 122 bp, Homo sapiens
ccggcggtcgtaactaccgctgcatgggctctgatgctcagccgcggaaaagcaagtaaccgggaatgaaggaagtggggtcagtcccaaccctgccacgtgcgggtctcgagacggtggac

SEQ ID NO: 224817 - DNA, 122 bp, Homo sapiens
gcagtgcctgaggacgtcaagttccccggggtggatgtcctggcaacgttcaacgttccacgggcaggaacgagagccagagcacagccccagcccccagcccccagccagggtgccccacg

SEQ ID NO: 224818 - DNA, 122 bp, Homo sapiens
gtttgacatctgggtataattgtaaaataatgagacctgtgagccacatgccaagtgctacgtttacaccattgtttccagctccaccaagacaaagaccatttctgtgcactctgcaggcc

SEQ ID NO: 224819 - DNA, 122 bp, Homo sapiens
agattggagggatcagtgtggattctgcacagatctggggtaggaggcaagcgtgggtaacgctcagcttattgttggatctcaccacagtgaaagacaagcacttccctcattgaaagttg

SEQ ID NO: 224820 - DNA, 122 bp, Homo sapiens
gggcgggccttgttgctggatttccctcgctaggagggggcggtgttgctaggcaaaacccggggtgccaatcccggggaccccctccgtggggcggcactgcagcgttgccgggtggcgcg

SEQ ID NO: 224821 - DNA, 122 bp, Homo sapiens
gatggtgtgaggtaatagtgagtggtggggactgtggagggaatatggccaccgaaaggacggtttcacttggctgcagcagagagactggttccatgagggtgtgcactcattgtttctgg

SEQ ID NO: 224822 - DNA, 122 bp, Homo sapiens
acggagggaggaaaggcattactgctctttgctattaaatgagcatcctagagccgggcacggcggcacatgcctgtaatcccaacactttaggaggctgaggtgggaggatcacttgagcc

SEQ ID NO: 224823 - DNA, 122 bp, Homo sapiens
caccggctttctcgcactatatggggtatcctcatatgcccagcatggatcctcactggccgtctctgggagtctggggctcaccctacagtcccccgcgagaagactggagcgtgtatcct

SEQ ID NO: 224824 - DNA, 122 bp, Homo sapiens
gtacagtgcatacagctattcatgtgggtgccagctccatcccccagtgacctcttcatacgggcagagggtggcatggcagctgtggtgggccagtggggcctacagcctttgcttggtct

SEQ ID NO: 224825 - DNA, 122 bp, Homo sapiens
acagaatgggtggggattctgcgtgtctcccggagcctgaacccctttcctggttatggccggtagctgtctccagggctaacgtgggcagcgcaggggggcggaaaccgggttttagccaa

SEQ ID NO: 224826 - DNA, 122 bp, Homo sapiens
gctggggctggatgggggcatggggtggttggggcttcccatgagttgttggcagttccccggcaccagtctgtctgtccagtccttttgctgctgggctgggagcagtgaaattacagagt

SEQ ID NO: 224827 - DNA, 122 bp, Homo sapiens
tcgggaggggccggcgaataaaacgagcggcgaaagaaccgaaaaaaggctcgacgctaccgtgtatgaggaactttgatccttgcgggccaccattccggaagtagaatttagaggaagaa

SEQ ID NO: 224828 - DNA, 122 bp, Homo sapiens
gctcaggtgcgacctgggagcctggggctcctgggggaatggggcggtgcactcggggcccgaagggagcgggagccatggcccggggaggtggggaacacagattccaggggatggctgac

SEQ ID NO: 224829 - DNA, 122 bp, Homo sapiens
tatagttattggtaaaatttaggatgcattgccatcacagacagaaacaatgtctttcctcggtttaaaaaaaaaagcttcaggctaattttcaatagaataactcaaggccaagaggaaga

SEQ ID NO: 224830 - DNA, 122 bp, Homo sapiens
ccactaccgcccggcccggagggtgggggtccctctcgcgcaggctgctttggagagtgtcggagagagacagctttatctacagcttcacccattgtatagcacaacagaatcgcatttag

SEQ ID NO: 224831 - DNA, 122 bp, Homo sapiens
ggagggtgggactagggccgcaccctggcttttgctaaccatttatgtgactggggcaagcgccctggccttggactctgaccacaccgcacagggcctggggtcgcttccatgcagctctc

SEQ ID NO: 224832 - DNA, 122 bp, Homo sapiens
ggtccacaggaggacctggcaagatgacagctggctggggcaccatggtggttggcagagcgtccaccgtagcatcccctataaaaaatggactacaaatcccagtaggcgttccgcccgtg

SEQ ID NO: 224833 - DNA, 122 bp, Homo sapiens
ttagtctgttagaatggtggggagtcggctcagatttgagcatggcttaaagtgggagagcgttattagaagccagcctagtggggattgctgagatctcatctgctgaatgacagcaaagt

SEQ ID NO: 224834 - DNA, 122 bp, Homo sapiens
tggactcgctccgtctcccgctaccgctgctaccaccacaggagctccgccggcccccggcgcgacccccacccctcggcctcagccccgccagcgcgcagccgcagaggccggcgcagagg

SEQ ID NO: 224835 - DNA, 122 bp, Homo sapiens
ccgagtccctccccagtccttctccttcctggtctgtgggtgtgagggctctggggacctcgagtgagtggggagtggtggatttgtcctgctttatccacgcacctgccaatgggtccttt

SEQ ID NO: 224836 - DNA, 122 bp, Homo sapiens
tgccctcccggcttcagacttcggagcctaaaacgcccctgcctcctggcccgaggccgacgggcctagaaaaagatgcaaggagctaggaccacacagccaccccctaccgcagctctacg

SEQ ID NO: 224837 - DNA, 122 bp, Homo sapiens
ctacagagcagtggcagatagactcggggacaggaagtggagctgttaagactcggccctcgcctgctcccgggcacctcagggccatcgaagggcgcgtgcacctgagatgctgcggtgct

SEQ ID NO: 224838 - DNA, 122 bp, Homo sapiens
cggcctcgtgcccctagccatttcatttttgtattttgctttataaatggaacacctggccgggcgcggtggctcacgtttgtaatcccagcactttgggaggacaaggcgggcggatcaca

SEQ ID NO: 224839 - DNA, 122 bp, Homo sapiens
tccgctgcctgctctgggctgggctgggctgggctgggctggtaggacctgctcccagggcgggaggggacacacccacctcagcagatctcagcccatccctcccagctcagtgcactcac

SEQ ID NO: 224840 - DNA, 122 bp, Homo sapiens
ctctgcatttgtcccataaccctcgtgttttgtttctctgggcctggacctctacagtaacgcagcaaggcaggacatggtccttttcaaccgggtaaccatgaagatggagacaggaggag

SEQ ID NO: 224841 - DNA, 122 bp, Homo sapiens
ttagaagtcatccttaagttctctctccctcactttcccaaacgaatcatcggcaagtcccgttggcaacagtttcatgtcaagagttaattttaagaatcttttattcaatttaaactgac

SEQ ID NO: 224842 - DNA, 122 bp, Homo sapiens
gaccgggggacagagagactgcgggtcaaatgtgaggccataaactgtcaagatgacacacggtgcgggcctggcagggcatgactcatcaggttctcccagtgccagtgggacaagtagca

SEQ ID NO: 224843 - DNA, 122 bp, Homo sapiens
tgtggatctactaggcagaggccttgggcctcagattgagtaagccccatgctcccggcacgaggctgagccccaggaatcactcaacaggcatgagctgactggagctgccctgaatttgc

SEQ ID NO: 224844 - DNA, 122 bp, Homo sapiens
aggtgcaggagcagcgggagcaggaggccaagcgggagccagtggggaatgacgtggccacgatcctgtcccggcgcattgccgtggagtacagcgactctgacgacgactcagagttcgac

SEQ ID NO: 224845 - DNA, 122 bp, Homo sapiens
caacaagactcgttttacacagacgaagccagttatttgaaaaccaggtctttccaggcacgctcagtgttgatgggctatttgcagagagaccctccgaatacaaagcaacatgctattct

SEQ ID NO: 224846 - DNA, 122 bp, Homo sapiens
agagaacttaggtctccatgtaaacagctgcaacagaatctggaggcatatccaggcaatcgcagctgagatctgcttacccagaacagaagctgctcgtgtcattaactggtagaaacagt

SEQ ID NO: 224847 - DNA, 122 bp, Homo sapiens
cagcccagtgctcatggctccaaataaaacaagagtgttagtgaattgagccaattcatccgcttcgctctaatgtaaatgtatacaccagtgtggccatgggtgtctgcgtacagccaggg

SEQ ID NO: 224848 - DNA, 122 bp, Homo sapiens
tacctaatttaagaatgaatcgctggcagccaccaggtgcaataaccgtgaggaggaggacgtatatccatcacaatgcataatgaggtgtgccaaccccggagctggtgcccgtccttacc

SEQ ID NO: 224849 - DNA, 122 bp, Homo sapiens
acccaggcctcaggaaggacacgccgaggtgggcttcttacctgcagcgggcggcgggctcgggcccgtctgtcttttgccgtaccctgcctcctgcaccaccaaggacaagactgatacca

SEQ ID NO: 224850 - DNA, 122 bp, Homo sapiens
ggaggagaggcggggaggcccccggtcctccccaccccctgtccaagcggcacaggcgttcgggccactttgcaaggcaaataaacgttaggggccgagcctgaacacctggcaacggtggc

SEQ ID NO: 224851 - DNA, 122 bp, Homo sapiens
gcttaaagaagtttgtgacagttagcgtggctggacggaagccagagaagctgcaggcgtcgtccccactactcgcccggtcctggggcccccgacggcggcggtctgtccaggctggccgg

SEQ ID NO: 224852 - DNA, 122 bp, Homo sapiens
gcatggcgagaaccatctcctacacgggtcctggctcctgtcgtccctatgctggcaggacggaacccgttgccggctcccagggccacctcacaaagggccttcattccaagcctgcgtca

SEQ ID NO: 224853 - DNA, 122 bp, Homo sapiens
gtttcttggcaggccattaatggcatggcgagttccattcccaaagtggatggtctgtgccggttgttcagtggcgcggctctggcttccctagggtgccaaagttctttaacgtcatcggc

SEQ ID NO: 224854 - DNA, 122 bp, Homo sapiens
tgcgctatgggaagctgaggaggtgctttctttctttctgtctctgtctctctttctttacgtctctgtctctgttgaggtgcttgcttgcttgcttgcttactttctgtctgtctgtctct

SEQ ID NO: 224855 - DNA, 122 bp, Homo sapiens
gggtggaggttggctacaggatcccgatggggatggagtgttcaaatctaggcctgtagccgtgaccctggcgtgagttggatggaggaaaccccagtatcgcgagcctggaccaaggcgcg

SEQ ID NO: 224856 - DNA, 122 bp, Homo sapiens
agatcagcgatgacttgacaggtctgactctcacgtgatttctcctctctgaactagaagcgagctccatcgggccgctgcgcttctatcagcttgagctgatgccctccgtgttcccacac

SEQ ID NO: 224857 - DNA, 122 bp, Homo sapiens
cacgagccaagctctccagctcgcctccagagtgggagcgggtcatgttcaggtccaactcggccccatcttcctctgcaggagaagtcacagtcagacaccaggcggccccaccttgggca

SEQ ID NO: 224858 - DNA, 122 bp, Homo sapiens
gaagaccatgaagcatctgctgagtccttttgttccatcttctttcttcctgatcttgatcgccccctgatgcatcttcatcctgaataaaaatgacccccaaaaagctgacaaaacaagtc

SEQ ID NO: 224859 - DNA, 122 bp, Homo sapiens
gaggactcaattcctcaatgagtgaaatcatccatttgctgactcaaacagttactgagtcgtctgtcaacttcctgacctttgtaagtctcctggcccctctcttgtcctttcccctggaa

SEQ ID NO: 224860 - DNA, 122 bp, Homo sapiens
agttataagggcgggttattagaagggcgccaggaaggtctctctacaaagatggggggccggggaactccctatttgccctattttggtcccaacactgaaccaaggaaattgcgcccaag

SEQ ID NO: 224861 - DNA, 122 bp, Homo sapiens
cgaagactggacgccggaagtcccgcccacgccgctacgggaacgcccctctgcgccttccgtctatggcttggggtcggcttccgtcccttgtagcactgccttctgggtaatgtagtttg

SEQ ID NO: 224862 - DNA, 122 bp, Homo sapiens
ctccagggacttgtggtcccctaggctgctgtgcctggtggaaccgcaggtcgacctcatcgagtgcccttcggagagcgccttcttgtcagggtagttgatgctgccagcgctcccgaacg

SEQ ID NO: 224863 - DNA, 122 bp, Homo sapiens
ccttcatcccctcacagtagcttggtaattatatcagcctgggggatggcagacagtgcacgtttgcacttcgaccttgagctccttttatagagtcaaacaggtctggaccctccgagcaa

SEQ ID NO: 224864 - DNA, 122 bp, Homo sapiens
ggccccgctcgccggcgggagccaccggagccccggccacgaaggggtgcgaccccccgccggccccgccctcccggctgcggcctggccaatcagagcggctcttactggcgggtgggctg

SEQ ID NO: 224865 - DNA, 122 bp, Homo sapiens
ccacagatttaatctaatcatctctgactactcttggaccattacatttattcaagggagcgaaaggagaagatgtttgaaaaaactgactctgctaatgaggtgagaggttgaatatgtca

SEQ ID NO: 224866 - DNA, 122 bp, Homo sapiens
agaagatcaagtacgccttcagcctgctggtgaggacgcgcccgcccctgggccggggcgcgggcacgacgaacctgtcccgtccccgcacccacgccaaccacctccctccccacgcccca

SEQ ID NO: 224867 - DNA, 122 bp, Homo sapiens
tagatctgcagatgcttcgtcccagtcagggaggccgtctcggcatttccaggttcttaacgctcttgatttttaccctctaggactcattgcgtacacgccctcaccgccgcccagtttcg

SEQ ID NO: 224868 - DNA, 122 bp, Homo sapiens
ggccaagtggggtgagggagacccacgctggatcgtggaggagcgggcggacgccaccaacgtcaacaactggcactggtgagggccagaaaagcaggccggccttgggagacctgcggccg

SEQ ID NO: 224869 - DNA, 122 bp, Homo sapiens
tgtggctgttgactttgcctccatgaggaaattaactcctatggagggcacctagctcggcgtagacccggtcgctaccacctgcgatgccttggaaatgcagccggcggggcccacctgtg

SEQ ID NO: 224870 - DNA, 122 bp, Homo sapiens
cagcccagcagctgctggtcccacaagtactcgggggagagcaccttggtgggtttgtggcgcagcaggtacttgttcaggtggctctcgtcgtgccacacggcctcgatgccgttggcctg

SEQ ID NO: 224871 - DNA, 122 bp, Homo sapiens
tgcaggtttagggcaatcaggaggggcagcaaccctggccgccaggtgaaggggcgggcccgactcccgggccgggcggggcccggggtggggctatgcaaatgagggacccggttgggccc

SEQ ID NO: 224872 - DNA, 122 bp, Homo sapiens
ggcccgctgggcgctgttcacaggtagcttggaccagagcaggggcttcatcattacctgcggggacaggtgggacacatgcatttccggggtcatcccagacctcctggaggatgctgatt

SEQ ID NO: 224873 - DNA, 122 bp, Homo sapiens
aagttcacttacctctctcttctggcctgcctttgtcaccttcaggagcctggttctggacggacgacatagaggaccacgaggaggaagacgacgaggacttcctggcggaggtggccgag

SEQ ID NO: 224874 - DNA, 122 bp, Homo sapiens
gggagtcgtcagggcggtggagtgtcggggctagcgcacctcgttgacgtcggtgcagtgcgagccgttgcccgtgaagcccgcggggcaggggccgcagcgcgcgccgctctccgtctgga

SEQ ID NO: 224875 - DNA, 122 bp, Homo sapiens
ctaaagcagcagggaggtctggggagagtcaggtggggttgtgtcttccacgttgcaggccgtgctcacagatggtgaaagacgttgtggaaaagagagctcacgaacgaaaaaggttgagt

SEQ ID NO: 224876 - DNA, 122 bp, Homo sapiens
gctcccagggctgatggtgccacctggtggcacaaagggtcctgctcaccctgggaacttcgctctcgagcgggagaggaacggcttctgtggcccagcccagcgtggtgacgtcacgacag

SEQ ID NO: 224877 - DNA, 122 bp, Homo sapiens
tgactaaaagcactaaagtggtgactctttgggtagaacgtaaaaacgaacggtcctcaacggccacaaggcgccccttctaggagtggtacctcccaggataacggaaaacagccccagcc

SEQ ID NO: 224878 - DNA, 122 bp, Homo sapiens
cctctggggcgggagtggccactctcccgggcgttccgaatgacctcaggagggctgcatcgctcagcataactaaggccagcattaccccaaagccagctgggacggctttgctaaggctc

SEQ ID NO: 224879 - DNA, 122 bp, Homo sapiens
ttggtaggtaactaagctttaagtcaaagagcgaccctagaaaatgtcagaaccccagcccgagattgaggactgaccacagggagcggagcctttcgggacggaccgcggggggcagagcc

SEQ ID NO: 224880 - DNA, 122 bp, Homo sapiens
gcacccttgccagccagctactgctccccgagtcaccaggccaggctgtgtccagagaggcgtggagacagccaggagccaaggccatgaagccaaaggtcattttaaaaagcacttctgct

SEQ ID NO: 224881 - DNA, 122 bp, Homo sapiens
cgttcagattttgcagtaatttgcatctggacatgggatacgggaggccaggctgctcctcgcagtacacccacccacgcctgcacctgcctcagcgaagccgctcgccgctggttccagca

SEQ ID NO: 224882 - DNA, 122 bp, Homo sapiens
atttaaacaacttggctgggtgtggtggctcacatctgtaattccagcagtttgaggatccgaggtgggaggatcactcgagcccaggaatttgagaccagcttgggcagaatagcgagact

SEQ ID NO: 224883 - DNA, 122 bp, Homo sapiens
tatacttcccacaatgcaacacggtgacccctaacgtaccttaaactgctgcaaaagaggcgtttctcgtggtgtcttgtgggagtggcggtgcgatccctctcagacttgtgagtccctgc

SEQ ID NO: 224884 - DNA, 122 bp, Homo sapiens
ctcctgaaaagtttcttacttgctacctactacccacaaaggactgatatggtacagtaccgggattgttcaactttagcaaagatctccaatgcattcttcttctcatcacatctgtcaga

SEQ ID NO: 224885 - DNA, 122 bp, Homo sapiens
ctggcaaagggtacgcaaagccagcggagctgccctctggtgcgttcagcagggagccagcgccccagttccagccgagtaggtcggcgtacggtccatcatcagcagctcgtctccacggc

SEQ ID NO: 224886 - DNA, 122 bp, Homo sapiens
aataaagaaggcctgggtgtcctccatgcctcaccaaagaccagggtcagcggataccctcgcagtggaaaagggctgtcctaagacttagaaaactacctccatctctgccacaaaatcct

SEQ ID NO: 224887 - DNA, 122 bp, Homo sapiens
aaccttgtctctactaaaaatacagaaacagccgagcgtggtggcacatggtaatcccggcggcggaggttgcagtgagccaagatagccccactgcactccagcctgggccagagcgagac

SEQ ID NO: 224888 - DNA, 122 bp, Homo sapiens
aaatagatatatgagcacagtgaatagaaacacaacttgctctggaggagttagagataacgagatattgccaattgatgcattcaataaatgtttaataagtgcgctcactatgtatcagg

SEQ ID NO: 224889 - DNA, 122 bp, Homo sapiens
aagaacagggaatgagaaggagctgctggatggtgatgagccttggaaagggaggctgggcgagcagagacagaagagaaacacctacctgctgtgacctcacaaacacccaggctgagttt

SEQ ID NO: 224890 - DNA, 122 bp, Homo sapiens
actgtagcctgggtgatttatacagaacagaaatgtatttctcaaggtgtcagtgggttgcgtggtgagggctgctgtctgcttcccatgtggcatcctatggctttatcctccagaaggaa

SEQ ID NO: 224891 - DNA, 122 bp, Homo sapiens
ttccgccccaagttatctttgctccctgctggggtgtaagtaaaccccaggggcttgaaccgaaatcatcggttactcgacgcttccagccgtggcctttccgcggcgctgggcttctggtg

SEQ ID NO: 224892 - DNA, 122 bp, Homo sapiens
caagtgcggtggctcacgcctgtaatctcagcactttgggtggccgaggagggcagatctcgaggtcaggagttcgagaccagcctggccaacatggtgaaaccccatctctactaaacata

SEQ ID NO: 224893 - DNA, 122 bp, Homo sapiens
gagactgcgtatgcgtcgccggcgcgcggctgtgtcgtcatacttgcgcgccgacgccgccgctcgcttgtgaaactggaaggctgccatggctagcccagccgcctcctcggtgcgaccac

SEQ ID NO: 224894 - DNA, 122 bp, Homo sapiens
cctctcttggctccagccttctggcttgagtttaatctcaggaaggcctgtccgcatggccggaggccgtgtccgcgtggccggaggctgtgtccccgcaggtccaaaccttccaggggttt

SEQ ID NO: 224895 - DNA, 122 bp, Homo sapiens
cgagattgcagcctctgcacggccgccaccccatctaggaagtgagaagtgtctctgccccgccgcccatcgtctgggatgtgaggagcccctctgcccagtctgggaagtgaggagcacct

SEQ ID NO: 224896 - DNA, 122 bp, Homo sapiens
cggcggcaaagactgagacagctccgctgcccgctgaactccatcctcccggcggtcgggcggcggcggctgccagtattttgttatagcagctaaaattaaaacaatggtattacttttga

SEQ ID NO: 224897 - DNA, 122 bp, Homo sapiens
ctgggagtgaccatcctcgctactcagctactcacgtgaggctccagcgttcacacaacgcgaaccctcaaccactatggacgtggaagtaaaagccccttcagagtttgttgtagcccaga

SEQ ID NO: 224898 - DNA, 122 bp, Homo sapiens
gtctctgaaaggccaatgtaacgttccacattattcgattgtcccaggtgacacctcaaacgttctctctcaagatgaaataagtcacttcgttaattaattattattttggaaaataataa

SEQ ID NO: 224899 - DNA, 122 bp, Homo sapiens
ctcagaccactgcggcgggacgggcggatcagcggggatctaagtctcctgaggcaagggcgccccgaccgcagcgactcctgacacacccaggccgcaggacgaagcgctaccgcctgggg

SEQ ID NO: 224900 - DNA, 122 bp, Homo sapiens
aggatctcagccatgtgaccctgcccttctaccccaagagcccacagtaagcaggggtgacgcgccgggtccatgtggcgccctggcgatggggagctgcgggtctctgtattgtctgtcgg

SEQ ID NO: 224901 - DNA, 122 bp, Homo sapiens
acctcacttggaagcaccatgtccggatgagatcgcacttcctgcagtgggcattagccacgtccaggtagaaccaaacctgttgcttttgtatgttgggtcaacttggcctgacgtttcag

SEQ ID NO: 224902 - DNA, 122 bp, Homo sapiens
cccggggctggcttcatgacttgtcctcctgctcccagcccagtgcccctgcactctgcccggcagcccacagggaccagagaagcaatggcagagccagtgggcagaaggagcagacagaa

SEQ ID NO: 224903 - DNA, 122 bp, Homo sapiens
cttccggagctgacccgtggggggtctgctgccctcagttcctgctgaccaaagtcctgccggatctggcgcctacgaggacgtggcgggtggagctcagaccggtgggctaggtaagtcag

SEQ ID NO: 224904 - DNA, 122 bp, Homo sapiens
gcggccctgctcagccaatcagcgagtgggctcctaggcaggtcctgagtgacagcgcggcgggctggatcaggagatgcgcgtgcgcggcccggcccggctgatcgcttcgggtgctcgac

SEQ ID NO: 224905 - DNA, 122 bp, Homo sapiens
tgtgtgtgtgtgtgtgtagatcactaaatccagctctgctttaacctgcactcactccatcgtgcacacggcctgtgcatgccacgtgtatccaggctcctgtttgcctctgtctacctaaa

SEQ ID NO: 224906 - DNA, 122 bp, Homo sapiens
atgactcggagcccgggggcccccctgctcctcggcgtcggaccccccgagaaaatggtgcgaactgcttaatgctttctctgttgatcatttatttggtcttgtgtcttttgtgtaggagg

SEQ ID NO: 224907 - DNA, 122 bp, Homo sapiens
aggttttccggggtctttctgagtctctggagtctgactctggtggaggtaagaagggaacggaggtggccgtgagtcccggtggcctatctgccctgtgtgtgtatcacatgctggctgcc

SEQ ID NO: 224908 - DNA, 122 bp, Homo sapiens
tcaccatttctacctgccacgtatcggcgaaggttgggactcaactggtgtttttgatcacgatgggaaaatcatccagaaaaccccctacccccaccccagagggaccacagtcagcgtga

SEQ ID NO: 224909 - DNA, 122 bp, Homo sapiens
cgccaccatggctccctcctgctcgcccgccgagccgcctaccgccgccgttgccgctgccgccgccccgtccccgccgaactgctcctccgacatagtgctagtgtctccgccgctgccgc

SEQ ID NO: 224910 - DNA, 122 bp, Homo sapiens
ccccgcgtcggtacaaaaggagaaatgaggggatgaggccgaatgagtggtttctaatcgcgagaggccccatatggaatcatgaacttccgcaacattaggaactgacaactctctttaaa

SEQ ID NO: 224911 - DNA, 122 bp, Homo sapiens
gccgagtggctggttatctttttgacacaatccctgtcctgtgaatggcaggcagaggaacgaggacgcctgaaggaagagctggaagaggctcgggacatagcccggcggcgctctttagg

SEQ ID NO: 224912 - DNA, 122 bp, Homo sapiens
ctgcctcgctccctccgtccttcttctagtagtctcaagttgctattgttgccatctttacgtccacgagttcccaatgtttggttcccacttataagtgagaatgtatggtatttggtttg

SEQ ID NO: 224913 - DNA, 122 bp, Homo sapiens
gcaaccagtcaaacagggacgcgaacaacaagcaccaacttacaccttttccaatctggtcgcggtgttgagtccgtgggtgtccttgacttgcttgagcgttggagttattcaggcagttt

SEQ ID NO: 224914 - DNA, 122 bp, Homo sapiens
ccgtcctgctgggctccttgacccagcttcgggcgggtgcggtcggggacgggatgtttccgtccccacggggccgcgggaggcgggaggggccgggtggggaggacggaatgtgctggggc

SEQ ID NO: 224915 - DNA, 122 bp, Homo sapiens
tggagaacagattggtggtagagaaaaccttagttagggaatccagttaccaggctgcaacggcaatcctagtgaaatggtggtggccccaactaaggtaatgctactgagaatagagaaag

SEQ ID NO: 224916 - DNA, 122 bp, Homo sapiens
gggctgcacgtgctttcttcaggtggcctccaggacggcggcttccagggccagcgcttccgcgggctcctcctcgtagtctgacaggtaagactccaggctctgcctggccagtgcctccc

SEQ ID NO: 224917 - DNA, 122 bp, Homo sapiens
gattcaaagatgtgaaatcaagttcaagttcacacattatggatgccaaggtagagcctacgtcttctgtcttcaaacctagatcatgtgctcttcccagtaagccccataacctcagggac

SEQ ID NO: 224918 - DNA, 122 bp, Homo sapiens
cgaaaggcgcgctcccagcgcgggcgctcgcgccgcctgccgcccccggccgttcactgccgcatttcgcgctctcgcgccgcgccccgccccaccggcctaaatttgcatatcccaggatc

SEQ ID NO: 224919 - DNA, 122 bp, Homo sapiens
agcagttgttcctgtggttatggatgtattccagaactgtgcctgtgccactgctgagcgcgtagttaactcctgcaggggcagagcaggctggttctgggtggcagaacgatgatttcagg

SEQ ID NO: 224920 - DNA, 122 bp, Homo sapiens
cgagctaacacagcacaggctgcccgccgctgccctacacgcctctcacccagctagactcgcatccaactctgctgaaccaccagctaacacagcacaggctgcccgccgctgccctacac

SEQ ID NO: 224921 - DNA, 122 bp, Homo sapiens
aaccggacgaggaggtgtgcaacctgaccaaggtggtcctagcggggagcttcgctccagcgctcttccggggaggctggctcacttctgggacagtggccaacccaggcctgcgaccacct

SEQ ID NO: 224922 - DNA, 122 bp, Homo sapiens
ggtaaatcagcttctgtgtcagggatgctgtgtggtgtccatctgaaccccctgcatacgcgtagctaatgtgatctccccactttcacataagatggtggccctgccttcagggaatgtgg

SEQ ID NO: 224923 - DNA, 122 bp, Homo sapiens
accttcctctcccctccatccaggccttgtgctagcactaattgctaatggacagaggggcgtcgaactccaccgtctaacgccgaccccacaactgactgaagccgggctgttctggcccc

SEQ ID NO: 224924 - DNA, 122 bp, Homo sapiens
aaaccttgcctaagtccttgtagttgagaaatctctaagaggtgagtctgtggggactgacgacttggcttccttggaccgccaaggaagggtctggtaggagccaagaagggtcggcacca

SEQ ID NO: 224925 - DNA, 122 bp, Homo sapiens
gccgcggctgcccgggttcccctgcgctctgccctcggccgggtcgggtctccgcgggtgcgcgcagaggatctggctctcgccggcgcctgccgcccttatattcagccggccgcccgcat

SEQ ID NO: 224926 - DNA, 122 bp, Homo sapiens
tcgtcacaccgcaggctggaggttacgcttcgagtcgcttaccgaatttgtgtgcattcacgtggacacggcctgtggggccttttgcccctgtagggtctttactgagcacgtgtctactc

SEQ ID NO: 224927 - DNA, 122 bp, Homo sapiens
ggggtgtggtcgagagtgtgggccccgtctcagagcctgatgcgcaggggtgatgcgatgcgcctcttggaggctccatcgcagggccctttgaccagctggaagaaatcctaggctgggag

SEQ ID NO: 224928 - DNA, 122 bp, Homo sapiens
agctcagtcactgttaggactccagtgcccagccctggtcgggttcatgtaggtgctcagcgaatattttctataagcacgaaaaacagagacagtgagaaatagagagaggagacagggca

SEQ ID NO: 224929 - DNA, 122 bp, Homo sapiens
ttacaacaatagagccagttctccagaaaatattcatgttttaattttaaccaatctccacgaatgtgttgagcccttgctataggacaaaaagctgccaaggtattgtgatacgttgatgt

SEQ ID NO: 224930 - DNA, 122 bp, Homo sapiens
gaattggaccctggaaagagatacccatgggcccaggaagtaggctaagggtcctttgggcggagagtattagggtttcagatactaggagcttggcctagaaggggaagagggatgtgcag

SEQ ID NO: 224931 - DNA, 122 bp, Homo sapiens
ggctgacgcgcccgcgtggactcgcacagcaagatcctggacgcccgggatgtggatcagcgcaagcaccaccttcgagaagtctctgcggatcggcagggagtttcagcaccgcgccaaag

SEQ ID NO: 224932 - DNA, 122 bp, Homo sapiens
tgcctgagtgtgtgtcactgctgaagtttgggagtcaggctgggctccagcagcactcctcgacctctgacggtaggtcaagtcctttctcggggtcctgctatgaagggaaccctgggaag

SEQ ID NO: 224933 - DNA, 122 bp, Homo sapiens
ctggcctccagcgagaggcagataggacgtgggagaaaggaggagaaggggctgcgggggcggcgggggctgccgctttcccaactcgccctgcccagcgaccttccccgggtcggatcacc

SEQ ID NO: 224934 - DNA, 122 bp, Homo sapiens
gacagagggtggggcagacgctccgtttccggtggcagggtctggggaagcggcggcaggcgccatgtccggccgcgaaggtaagtgttccggaaccgtgaggactgcggggacggcggggt

SEQ ID NO: 224935 - DNA, 122 bp, Homo sapiens
gcgccaccgaccccagaccctcgcgcggcgggcctcaccgtcagcgccagctggtggatgcgcccggagcagccacccagcagcagcaccagaagtagccgctgcccccactccgcggggct

SEQ ID NO: 224936 - DNA, 122 bp, Homo sapiens
tcccacacctctgcaccttgttacctgactttcggcttcaggatccgcagcgtgcacccgcgttccgtgagtgccctataggcagtcagcatgcccctctgcgtgtccctgtgttacgggga

SEQ ID NO: 224937 - DNA, 122 bp, Homo sapiens
gcgcgaggggtaaccgggactgcgcagggtgcttgcgggccagctggagttccgggttggcgtgggattggcgggaccctcactcggagcagccggccgcccctgccggccccgggtgatga

SEQ ID NO: 224938 - DNA, 122 bp, Homo sapiens
cagggcagggcaactccctcgggctcttacgccaggctggggtagctgcggcagctgtgacgtaaggaggggtacgcttcctccagaccgccctcccggattttccggaaagaagccccatt

SEQ ID NO: 224939 - DNA, 122 bp, Homo sapiens
gcggcgcggcgcggctccggctccggctccggctctgcaccacctgcgcacagaactcggcgtcagcggccggcccttgcccagcccctgcggccgcccccagcagccccgaccgctgccgc

SEQ ID NO: 224940 - DNA, 122 bp, Homo sapiens
cagggcctgtggggcaggagaggccgagaggcagcgtgggctctgaggctgggccttggtcgcgctcgctcagcccggggcctggtagcagcagggacgtacacagacgtggaggggcatcc

SEQ ID NO: 224941 - DNA, 122 bp, Homo sapiens
agtgtgttgcacagttttttgaggttttgttttttaagtctaatccaggagaaacaaaatcggagctttggtgagtgaaatggtcctaccagagctgttgttacttgggactgccaaaaagc

SEQ ID NO: 224942 - DNA, 122 bp, Homo sapiens
tgaatcattaagttgttacgaattttggatgtgcgtgtttgtctgcccttctgaaactcccgccttaccctctcttctgtctcccacttctttttaaaaaggtcagcagaaatcacaaagtc

SEQ ID NO: 224943 - DNA, 122 bp, Homo sapiens
acctgaatggttcttctccagagggggtcctcgaagggccgtctgtgctgaccaggtggccgtgctttgtcgtgggaggcctagggtctgcggatgggcgatgatggggtggggcttggagg

SEQ ID NO: 224944 - DNA, 122 bp, Homo sapiens
aggcatgtcccccgcaagccaatggagccttaaagctcttccagggagctcacagcctggcgggtgcaaagactgtcagctctagcaccggatccccgtgggcttgacacttgctagctgcc

SEQ ID NO: 224945 - DNA, 122 bp, Homo sapiens
tggcagcttgcacggccaccaggtcactcgaagtgtgggaggtgacgagacctgtgaactcgggaccctcccttgggtcagaggccaccgccgcctcttggagtcaagcctctggtgccacc

SEQ ID NO: 224946 - DNA, 122 bp, Homo sapiens
ggagcgccggcggctgagaatccgcgttgttccgtgttgggggcggcatggagcgggagccgggcgccgcgggagttcgccgggctctgggccgccggctggaggcggtgctggcgagccgc

SEQ ID NO: 224947 - DNA, 122 bp, Homo sapiens
caccgggtggtcgagctgcagcagcgccacgtcgtagtcatggctgtcctcttcgtggtacgggtgcaggagcaggcggctcaccttgaaggacacctctccaggccagcgcgagttctgcc

SEQ ID NO: 224948 - DNA, 122 bp, Homo sapiens
agggggctcaagctaggcccaggccagagggattattgtgctgggggctgagtgtgaggacggctttctcatgtaggctgggggcacagggccacaggttccggcaggaatgaggatggatg

SEQ ID NO: 224949 - DNA, 122 bp, Homo sapiens
tgctcacaggagagcccccgtagcctcctgcctggcggtcccgggacagcccctgcaccccgccactgtctgccagctccccccgggtgctctgtcctgcaatcctcagcctcattttcccc

SEQ ID NO: 224950 - DNA, 122 bp, Homo sapiens
gagaactccagggggcgggttcgtctgtggacgggaagcacaggcgttagcagtggcgcacgcaggacgtccccgtgccctctctacgccggggacaggggcaggcagctggggcgattgct

SEQ ID NO: 224951 - DNA, 122 bp, Homo sapiens
tgggttgctgggcggtcgaagagatgggggtgcccgtggcggcccgggccccggaatcgacgctgcgcaggtgaggaccgctcctggagtgaggacaccccaccctggagattgagtctccg

SEQ ID NO: 224952 - DNA, 122 bp, Homo sapiens
gctgggtattcactggatgcaacagtaactcccaatccgagcaacctgagccgccattggcggcaggtctgctccctaaaaggccagcacttgccaatctctgctctgccaggtcctggaat

SEQ ID NO: 224953 - DNA, 122 bp, Homo sapiens
agataggggcctgcaaatttgcatttgaacaaagcccgagggatagtgatgctgctagttcgtagaccactctcagaggagtccgggactccccagagctgttgtacaaaaaccatacccca

SEQ ID NO: 224954 - DNA, 122 bp, Homo sapiens
tcggggccgcggtgaactccagttcaccaggacaggaagtgacagcggaacgccggaaaccgcagatccacggaggtcagggccgcggagagctgtagttccccggaaccggaagtgatggc

SEQ ID NO: 224955 - DNA, 122 bp, Homo sapiens
gaatttgtttcagctccctcttcgtggacacaacttcagggctcccttgtcactggcttgcgggggtggtctccccacttgcagagtctggtctccacaggacaccgtccttcccttccctt

SEQ ID NO: 224956 - DNA, 122 bp, Homo sapiens
acctgaccctagggcggcttgcgcagctgtcgggacgtgactgcgttcagccgcgtcgggcgtgcttcccagacttgcccaagttcgggtgccctagctgcccctttgcagccgctggccta

SEQ ID NO: 224957 - DNA, 122 bp, Homo sapiens
cccttcctccctgggcatctctagcacaggggatccccaaacatcaggacttttggggggcgcctgtgctgtccatgggaagagcatgcattgtgggttactggaggaacccgacatggatt

SEQ ID NO: 224958 - DNA, 122 bp, Homo sapiens
gggcctaagtcttcggagttacatggcggggccaggtgtggggggggttccccgagccctcgcggttctaagtgggcactgggggcccgcgtacagcaggcaagagtgcaaaccagcagcgc

SEQ ID NO: 224959 - DNA, 122 bp, Homo sapiens
aggggaaagaagactcctaccactcgtcgccgcctcagacggatcctttgccccgcccaccgctgctacgcaacccggcggaagctcgtcaccaaaccccgcctctttgtttaactcagccc

SEQ ID NO: 224960 - DNA, 122 bp, Homo sapiens
cttgctttggggcggggggctgagactcctatgtgctccggattggtcaggcacggccttcggccccgcctcctgccaccgcagattggccgctagccctccccgagcgccctgcctccgag

SEQ ID NO: 224961 - DNA, 122 bp, Homo sapiens
ccctctcccccgatgacttgcatgtaatggtggccacctgcggggcccgggctgagggttcgccggccccggcgcggggaagagcgcagctcgtgggctcggacggggaaggcgggcgggcg

SEQ ID NO: 224962 - DNA, 122 bp, Homo sapiens
cactgctcccggagagaagctctcggcagagcacaggcgctgagcccgacaaacgtgttccgtaagggtccaggtgggagatgttaccggctttgcgggccacggtctctggcaactgccta

SEQ ID NO: 224963 - DNA, 122 bp, Homo sapiens
taatttcttttaaatactgggaaatagtataagccaatttagcaaataagtgaacagacccgtatatgctaagaatgtgttccaaagaatgcctagggagcagaggagacttgaatagaatt

SEQ ID NO: 224964 - DNA, 122 bp, Homo sapiens
aaaccctgccccagcagggcaggtaagcaacactctccctgcccacatctagtttgatttcgcgccctgatgcttcaaggtgcccagaaaagcggcagcgtgtggaagaggaaatctatgcc

SEQ ID NO: 224965 - DNA, 122 bp, Homo sapiens
gtccccgcgtgggcctggggtttccccgtgcgggtggagctcctccatgcggggtgggcccgggctgcgcctctgctcctgccccacgttgtcttcacaggagcttgtcctggctctgttta

SEQ ID NO: 224966 - DNA, 122 bp, Homo sapiens
agaacattttttttttcctttaaaaattggaaaatacaagaagtttggatttttttttcccgattctttttttggagggggaaattgcatcgtaagctttcggagaaacccaacatgtcaac

SEQ ID NO: 224967 - DNA, 122 bp, Homo sapiens
aaccaaccaggaagaatgaaacacagagctggtccgacacccagctcgagggaggggggccggaagcttctggaagttggctgcccctaagcaggggccactctagcccacaaggccaagtt

SEQ ID NO: 224968 - DNA, 122 bp, Homo sapiens
ccttgcctaccctaactttagctcctcagcaaagtgcttctgcaaattgaatcattcatccggcagaaaaatttgaaattttgcacaatctttatgaattcattgatcagtttatgctaaag

SEQ ID NO: 224969 - DNA, 122 bp, Homo sapiens
cgggggctgtgcgccaggctgggagtatccttggggggcggggcgagggggcttccggggcggcagcacctggcccggctccggccccgcccgcgtcagctctgcgcggtgattcactccct

SEQ ID NO: 224970 - DNA, 122 bp, Homo sapiens
gtgtcggctgagaccaaggtggccgactggctggtgcagaatgacccgagcctgctgcaccgggttggccctggggatgaccgccacagcaccaagagcgacctgcctgtccacacccgcac

SEQ ID NO: 224971 - DNA, 122 bp, Homo sapiens
acctgttccgcggaagcgcggccaaagttggaagccctggcggctgctgcctgcagccgacgcgcgggggcgcccggcttcatccggccgcgggggaccaggagcctgagagcctggaactg

SEQ ID NO: 224972 - DNA, 122 bp, Homo sapiens
ggtttgcagaagtggagggagacgggaggaggccagggggaaggggtagcaagtggtttgcgaaggaagttgctgtttgcaaggatgagtctggggagattctctgtgtctgtttcaggaca

SEQ ID NO: 224973 - DNA, 122 bp, Homo sapiens
gctttgtggacttaatacataatagtgaacagaaattgggccctgccttcctgaaggttacggtgttatgaaggaaatgagcatgtaggttgaacttgccttaggtacagataattcaatag

SEQ ID NO: 224974 - DNA, 122 bp, Homo sapiens
gcgtgaggacagctgcctgccagccttcagaggccagttgttcagctttcaagatgcccccggcccaggagaaggcccggcgggtcgggaggccgggagaattgagaatctgcccggcgggt

SEQ ID NO: 224975 - DNA, 122 bp, Homo sapiens
aagcgggcagccatccaccggcgtctacctaccgaagccatttctgctttttaccagcgacgctggaacagtgttattgtgggatatgttcagtgttgaacaggctcccagggcacggctgt

SEQ ID NO: 224976 - DNA, 122 bp, Homo sapiens
acagcgagctcaagtattcgggtcaagatgggctctacataggcgtcagtctcgcctcgccggccgaagtcacgtcctccgtgcgaccggattcctggtgcgccctggccctggcctgagcc

SEQ ID NO: 224977 - DNA, 122 bp, Homo sapiens
aatgctgacctatattccagtgacacacaccagatatgagtaggacataactgcccagggcgctgcccactccctcctcctccttgttcctcagccaggagggcagccagatccgtacacca

SEQ ID NO: 224978 - DNA, 122 bp, Homo sapiens
ggagggctcgcggagtaggccaacggttggccccaaccgccactgactacagcctgcgcccgcctcttttcgttgccgttacctgtttccggcagtcgacacgctcttcgcttctcggggct

SEQ ID NO: 224979 - DNA, 122 bp, Homo sapiens
atccaatgacaacccttctgtcctccccagtagttgtcctttctcaggaacaggtgaccacgcctgcctaaccacatacatccctctcctgagaaaagtccactctccaggacctcactcta

SEQ ID NO: 224980 - DNA, 122 bp, Homo sapiens
tggagcatccctacaggggactctggccagcttgagggacgcagaacctgagagcactcccgggtaggcaattgccccagtggaacacctcgccagagtggcgtgtggcaggcccccacaga

SEQ ID NO: 224981 - DNA, 122 bp, Homo sapiens
tccaattcccagttcaatctctgaaatgcatttctccctcttctacctgtcacatcacagcgtgtgtggagttggggggaattaagagtacagggatttacaggaagaaatcttttccttct

SEQ ID NO: 224982 - DNA, 122 bp, Homo sapiens
ccaccccctccagctccgccccctgcccctctcctccgcccaccccgcccctccccggcccgccccggtaccccgcccacgtgccgcacgcagaccaatcacccgtgaggatgcgagtgtcg

SEQ ID NO: 224983 - DNA, 122 bp, Homo sapiens
atggcggagtgagagagctggtaaccgtccatgcagctgtaacttatgctggagccccagcggaaatcacttccctccactgttccattctgcaccggcggcggctgaggacacagcacggc

SEQ ID NO: 224984 - DNA, 122 bp, Homo sapiens
acctgcagatggagtgaatcagcaagatcctgttacagctcagctgttttcacataacttcggaaatagatcccattgacctctgcagccagaagtaattctattttaagcactatgcagta

SEQ ID NO: 224985 - DNA, 122 bp, Homo sapiens
gctccagctcttcctgtgacaccaccctccggacagagacccaagctccaggcccggccccgcccagaggttccagggagaagaccaggccaccgcccactgcccggcgtcggggaggaaag

SEQ ID NO: 224986 - DNA, 122 bp, Homo sapiens
gacgcggaggacgcgcgcaccgcgcacccgggcgccaggggctggaccgccgctcgctcccgcagccctacccttgcccagcgagccaagccgcagtcccagcccatccgcgccggtgccgt

SEQ ID NO: 224987 - DNA, 122 bp, Homo sapiens
tgcccctccaagacttccaactgcttcctggtgttaaggacccctctttctggaaaacttcggaaaagtctggactttcggaaaaaaaaaaaaaaaaagcaatgtctattcagcacattttg

SEQ ID NO: 224988 - DNA, 122 bp, Homo sapiens
aggcccagccccatacggaagacggacgcgtacataaactattaggatacaggaaaagcgcgatactactggcacatagaggaaatcggggaagatgcttagaacaatgtctggggcacacg

SEQ ID NO: 224989 - DNA, 122 bp, Homo sapiens
gtttcccaggccgggcctaaacctgctctgccactgagcatgcccagtttaatcgccggccgggactcttcccaccgccctgggctttaccctcctggttggacctgtaagggctcaggaaa

SEQ ID NO: 224990 - DNA, 122 bp, Homo sapiens
gggaagggggctgtaggaggttaaggcacccccgggttaggggtaaaggaggttggccaccggcaaaggagtatcttaggcgctgggtctctgggagccaggctcacagacacgttgggttg

SEQ ID NO: 224991 - DNA, 122 bp, Homo sapiens
agcaattctcttgccttagcctcccaagtagctgggattacaaacacacacacaccaccacgcccggctagttttttgtatttaaagtagagatggggtttcaccatgttgaccaggctggt

SEQ ID NO: 224992 - DNA, 122 bp, Homo sapiens
gggagggggctgccctctacagtctctttgactgtaagacagggctctgtatcagtgagacgatgagaaaagtcccaggctaatggcagaaatttgcactttgaacatgtgtgtttttgtgt

SEQ ID NO: 224993 - DNA, 122 bp, Homo sapiens
ggccgcactcctcgtcctcgcccggcgcgctgcgacgccaacggccgccgcggggaaacgcgcccccggctgcggccgcccgcagcccccagctcaccccgatggggccagaccagcgcggc

SEQ ID NO: 224994 - DNA, 122 bp, Homo sapiens
taggctcacacagggtggagagatcagagcccttcagggggaatatttctgaacaaatcacggatgattaaattctctaagaaacagctccctacctaaatgagagtgagaaagatagggaa

SEQ ID NO: 224995 - DNA, 122 bp, Homo sapiens
cgggggctcggcatttccagtgagcacgggccgggtgctccgcagcatttccggtgagcacgggccgggggctcagcagcatttccggtgagcacgggccgggggctcagcatttccggtga

SEQ ID NO: 224996 - DNA, 122 bp, Homo sapiens
gaagctggacctgatgtacacctggcccaggctctgctggccccatagagagagagctgtcgctccaactcagaggtggcccagcctctgcaggccccgtggagagagagctgccactccaa

SEQ ID NO: 224997 - DNA, 122 bp, Homo sapiens
tccaaagatgcccccagcctactccagcccctaacaggacactcaaagggactctgtgttcgtgactgctggaatttctgctgagaccccaacacagaacaatatatgggtcaaacaactcc

SEQ ID NO: 224998 - DNA, 122 bp, Homo sapiens
cgcgccgcctccgggccctcgcagcagccgaacgactggtccgacgcgtcgctctcgctgcggttctcctcgtcctcgctcagcagccgcacgtccgggtacagcacgtgcgcgccgacggg

SEQ ID NO: 224999 - DNA, 122 bp, Homo sapiens
gaccagctagctattcaaatccaatcccctcatattacagatggaagaaaaccctgaagccggaatgtgactcgccaaggtcacagagcagttttctgttggatgaaggagccggtttaggg

SEQ ID NO: 225000 - DNA, 122 bp, Homo sapiens
atcctccctttctgtggatgaggcgggacaaggccggccccctggctggggcctgggacgcgagggctctcagagcttggagaaggtgacggttttcagttccttgttctcagtcgtggcct

SEQ ID NO: 225001 - DNA, 122 bp, Homo sapiens
cagaatgagaactcccaggagaaggctctgctagacattcagtccacggaaacaaagacacggactgtagactgagaggaagtgagacactgggacgtatgtcaggggaaaatcaggtctga

SEQ ID NO: 225002 - DNA, 122 bp, Homo sapiens
catcctgcatctggcccaggcagtaggccagctcgtgcttgagcagggcggaatcgtcatcgaaggcctggctgatccatgcaatggcgcctgggccgccgagcccacgcagcgtgaacagc

SEQ ID NO: 225003 - DNA, 122 bp, Homo sapiens
cccgcgctaggagctggggacgaccacgatgagaacagaaggacacggggtcgggagcctcgctttacggcatagcgaggtgacggagcggctccgagggggacgaagacctgggcagggag

SEQ ID NO: 225004 - DNA, 122 bp, Homo sapiens
gtgcctcctgggacggattgtggctctgtcccctggccacagtgtggatagctgtgctgccggaatagccataccatttcccactagaaggcattttcgtggttatccagagattaatggcg

SEQ ID NO: 225005 - DNA, 122 bp, Homo sapiens
tctctcttggactgaggaatgctattgttttacagatacagggatggaaaaagtacagaacgaattgtttgagattgactctcagcctcaggctgaagtaagagaagtgaaggatacctgta

SEQ ID NO: 225006 - DNA, 122 bp, Homo sapiens
aaggtccgcattccttccgcctttctccaggacaccgagggcgaggagggtggtaccaagcggcgcccaccctcagagcactacttccatctctgattggcttcgctgggtgcccgtcgcta

SEQ ID NO: 225007 - DNA, 122 bp, Homo sapiens
actacctctttaggcctttcttaggctccccgtgtgcccccctcaccagcaaagtgggtgcgcctctcttactctttctacccagcgcgtcgtagttcctccccgtttgctgcgcactggcc

SEQ ID NO: 225008 - DNA, 122 bp, Homo sapiens
cctggattcaggaccctgggtaggaagtgattagccctgccctctcacctcaccctctcccgggatctccataacctagggcatcaaaagggagaagcacagagtcccggcatccgccgtat

SEQ ID NO: 225009 - DNA, 122 bp, Homo sapiens
acctggacacatgaagagtcacccagtttctcttatggacgtgtatatctgtcacacacacgaatgtcacaaagccacagtttctctcctgcatacacccagccctgcacaagttgctctga

SEQ ID NO: 225010 - DNA, 122 bp, Homo sapiens
acgggaccagggctctaagacttgggccacttgcagccaacgtggagcgtgcgcggcgtgcgggttacagaaatttctgacaaatccgccagggctctgtgaatccttaagggcctgggtag

SEQ ID NO: 225011 - DNA, 122 bp, Homo sapiens
ggtggccggagcgcaggcggcgctggcgttcaacattagcggggcgcggggtctgcaggacgtgctgaggaccaacctggggcccaaagggaccataaagatgtaaggtggggctggcggga

SEQ ID NO: 225012 - DNA, 122 bp, Homo sapiens
ctaattaatccccactcatggatataggcacacaaactaaaggtaggaggctgctgccggcggaaaaccactcaggccacctagacagtttggaaatcaagaggaatctctcagctttggta

SEQ ID NO: 225013 - DNA, 122 bp, Homo sapiens
ccttttttttttttttttttaaataaccggaaccaatgaacgcagccgggatcagagctccggaggccgccggtgccgatgggaccaggctggcgcccggcgggagcccgtgtctgaggcgg

SEQ ID NO: 225014 - DNA, 122 bp, Homo sapiens
agtgggaaggcaggaggggtgggaggtgagacctgccggggaaggagccggttacccaggcgtgggacttggccgccatgggatgtcctgctacgagtcaggcctggatccctcccctaccg

SEQ ID NO: 225015 - DNA, 122 bp, Homo sapiens
tgagtagctgggacagttccattcttttcccatcctccaccttggctaactgaaccttatcgataggatgagtcgctgcggcagtctgctcggtctgcgcggaaggcagggagcctcgcaga

SEQ ID NO: 225016 - DNA, 122 bp, Homo sapiens
gatggccgcttgtctggggacaggagcggaggccaatacgcgcagagcatgcgcctacgccgggccaattgaaagccatagtgacagtaaccctgattcaggggcgggaaacactgaccaca

SEQ ID NO: 225017 - DNA, 122 bp, Homo sapiens
tcttggctctcccagccccacgccgcccactcacatctgcccagctctgctgttcttccacgttcttctccacattgggagttttttgcaggcgtgtcctgtctcatgctccccatcctccg

SEQ ID NO: 225018 - DNA, 122 bp, Homo sapiens
ctctggtgactttaagtctgcttccttcacctttccggcttctggaggtgaccgcctgcccgtctgcctgggctcgagacccatccttgaatccctgcagtctccgcatccttcctcatgtg

SEQ ID NO: 225019 - DNA, 122 bp, Homo sapiens
tccccagtgcatacctgattttctcgacctcttttatgaaatatccccgccagactccctcgaccgtgccacccccaggttcccgtgcatacacaacattgcgggataggtattgtggaatg

SEQ ID NO: 225020 - DNA, 122 bp, Homo sapiens
ctttcaggtgtacccattgctcaactgtatggaggggatcccagggggctcaccatatgccggctgggcctacggcaagacggggctctaccctgcctcaactgtgtgtcccacccgcgagg

SEQ ID NO: 225021 - DNA, 122 bp, Homo sapiens
cagggatcatgataattaacttgtaagttgggctgtagttgggtgcaaggctggggtgggcggggcattctgtgtatatatcagaggaagactgattttgatcacctcaaatttgggtccac

SEQ ID NO: 225022 - DNA, 122 bp, Homo sapiens
gactggttggcacctgtgatatactgatggttaaatattttggatcacacctgtaatgagcgggtgactaatttctggcaatgacactgagtagaagtttggaacattagagccctagtaaa

SEQ ID NO: 225023 - DNA, 122 bp, Homo sapiens
tgctgattgataactgccagtgcgtcctccgccgcctgccgtttggcctcggcgaccgtgcgctccatcttggccctctctgttgtgatcatgtcgtgggctttccgctccgcctcagacac

SEQ ID NO: 225024 - DNA, 122 bp, Homo sapiens
agggttggagggtcgggggctgagtgaaatgaaaaaagaccaagtggggaccaggaacgacgcatgaaaacagctcctagtttagtggcccgcacacgggacacccacacctgtgaagaaat

SEQ ID NO: 225025 - DNA, 122 bp, Homo sapiens
atggacagtgtgaatcaagaaccttcaaaatgttcatacctggccaggcgtggcagctcacgtctgtaatcccagcacttcgggaagccaaggcaggaggatcacctgaagtcaggagttcg

SEQ ID NO: 225026 - DNA, 122 bp, Homo sapiens
tgaatgttaatgctttcttgaagatgatttcagacacactgctaggatactgcctctactcgctgaagcagaatcctctgaagagttgctgaggcagaactgaaatcatggctcacctcaaa

SEQ ID NO: 225027 - DNA, 122 bp, Homo sapiens
aaatgcacagagggggatttgcgtttgggggtcagcatatcctcgcactctcccaacattcggggaagggcgtgccttcaggatttggagtagaaatcctcaggcattcggtgctcagtgtt

SEQ ID NO: 225028 - DNA, 122 bp, Homo sapiens
catagcaacccctttcttctttgcttagggcccactttcctcctgatcttttcattgattcgtcttgtaatacttaccacatgttttgctatgaagatgagtggctcccagacctttcagtt

SEQ ID NO: 225029 - DNA, 122 bp, Homo sapiens
gtgtacttgaggatgctctaaataaaatgagttactaatagaatgtgagtgacatcatatcgttccccaacaaatacaaggccaaatttgtatctgcttaggtgtgtgactggatgtgtgcg

SEQ ID NO: 225030 - DNA, 122 bp, Homo sapiens
tgacaccaaccccccccagcctatttgctcaccagtaagtgggggtgatcccacctctagcggggctgtgaaggcagggaacctgggctgcagaggcgcacaagcaagggctcacttccttc

SEQ ID NO: 225031 - DNA, 122 bp, Homo sapiens
gatctgatcagcattagagtagtgacttttctggctgagtcctttagtatacctggtggccgaaccctgtgatatccatttactggaacatcagatttcactgaaaggctggaaacgtaaac

SEQ ID NO: 225032 - DNA, 122 bp, Homo sapiens
gggacttactttgcagacctccctttatctgggagacaaatccagcgtgatttagcctaccggaccatcatatccaatttcttcttcagccccttctgaaagggagatgctacacaccactc

SEQ ID NO: 225033 - DNA, 122 bp, Homo sapiens
ctctgcgggctcccggccaccgagacaccgccggcaaagccttggctcgggcagaggctccgtctggcaggcagcacaacaagccatagtgtttccagcattattaaattatttagttcata

SEQ ID NO: 225034 - DNA, 122 bp, Homo sapiens
acagagctggaggagctgcgggctcaggtgctgcagctggtggcagaactggaggagacccgggaactggcagggcagcatgaggatgactccttggagctacagggtgagtgcctgggcca

SEQ ID NO: 225035 - DNA, 122 bp, Homo sapiens
caggtctctgttaacaccttggttcctcagatattgcggacagtctaattcgccccgcgacgtgagggagaacccaggagcgggctccggtagagaaagaagcttccggtcaacgaccacat

SEQ ID NO: 225036 - DNA, 122 bp, Homo sapiens
gaggtccgtggaagccacttcggcctccagcctcccggctcagcacccgcccctcctgagcgcagaccaccccatcctgtgccggtccccctgacgtcccttgcctcccgtccccaggagaa

SEQ ID NO: 225037 - DNA, 122 bp, Homo sapiens
agtgtctgccccgggactgggccctgggactaggcggggcacaggtgtcccaggagggggcgccctgacttgacgcgaacgggccacctgtccctcccacgcctgcgctgccacccgccctg

SEQ ID NO: 225038 - DNA, 122 bp, Homo sapiens
ttagctatctcaaggtcacataacaaaatggtaaaagaagaatttcaggctccaaagctacgcagcccaacctaaagctagagttttactttctggggctttgtggccttagtgatgcaaat

SEQ ID NO: 225039 - DNA, 122 bp, Homo sapiens
agggagaagagatagatctcctccagggacttgatcttcatgtctttgaccaggctggcacggcttggtgatgggcatccattctttgtccttggccttgcctccactagctctgcggcctc

SEQ ID NO: 225040 - DNA, 122 bp, Homo sapiens
cctcggccccaccccctgcctctctcctggcctcaccttgccccctcctcttctccggggcgggcggcacccaggccagacacctcctgccagcccatgctgacgccggggctgtgctcagt

SEQ ID NO: 225041 - DNA, 122 bp, Homo sapiens
tggtacccagacggaggcgactagcaggacttgtgctctaggcggctcttggtcacgtgacggccacgtcaccagtgcgctctggcccccaatttccactcccacaagcagtgcggcaggcg

SEQ ID NO: 225042 - DNA, 122 bp, Homo sapiens
gcattggcaccaaaaggcctgcagtgttccatggcgtggttgtggaaacattgacagggccgcagggcagcagtaggcaggactagaggagggggcagagtagaggagaggcaggaccgttc

SEQ ID NO: 225043 - DNA, 122 bp, Homo sapiens
cacgctaggcctcagtgcaccccgctcggggaacaaaggtgacgctgacggtggccggcacgtacggagcccttcctgtgaatgactcccatgggtaagatgctgatctggccctatccaga

SEQ ID NO: 225044 - DNA, 122 bp, Homo sapiens
ccatgtcgaatagcaccagttaatgaaatagtatccctaacactgtagactgtagcgcatcgaatcattagacaatgaccattcactttagggaaattaattctaaaattaccgacctcttt

SEQ ID NO: 225045 - DNA, 122 bp, Homo sapiens
gcagcaacgctagtgtggagaggtggctggttttttctaaacccatctcaccctccctgccggaggcagtttcacgggcgcatggtcagggaggcgcgccacagggacctcccagggcggag

SEQ ID NO: 225046 - DNA, 122 bp, Homo sapiens
cccaaggctgccggctggttagtggcagagctgggatgggaaagtccgtattttccaccgcgctgtattagtgagggctctttgtgtcacttctgtgcataactccgccccaagttaaaagg

SEQ ID NO: 225047 - DNA, 122 bp, Homo sapiens
gtcgcggctgtgtcccagtcattctcggggtaagttccgaagttggaggtgtcgccttcgcgggctatcttgggcacgatgggaggcttcagttttctctgaggaacagcttcccagtccac

SEQ ID NO: 225048 - DNA, 122 bp, Homo sapiens
gaagcactggaatacagctttattcctacacgattagacccgttaccccgtgggtctggccgaccgtcctgactcggagatccctgagctgcgccgccgcttccttcgtcaacatccagcag

SEQ ID NO: 225049 - DNA, 122 bp, Homo sapiens
tgggctctttcccagctcccggaggcttcctcatctctcatccccagtgccagcaaatgccggagggagctatcctgcgcatgaggcattcggatccttccttggccagcactgctcatcca

SEQ ID NO: 225050 - DNA, 122 bp, Homo sapiens
cttcacacatgaggaaactgaggcccagggaaggaggacaatctgtccatagtcacatagcgagctaatggcaaagctaagacttgaagcctgagtctgttgaatcataacaccccaagcct

SEQ ID NO: 225051 - DNA, 122 bp, Homo sapiens
gacctatctgaggaccgactggccgaagcctgcaagtttccacaaatgcagtcgctgccgcggcgtctgtctacacacacactggaaggcaagagtaacggagggaggagactggggagcag

SEQ ID NO: 225052 - DNA, 122 bp, Homo sapiens
ctcttggaatgtctgcacagcattccgctgtagctctctccctccccaggaggcagaatgcggttggcaatggcaattgcaggcttggtggcccttatagctcccagccccaaagagtaagc

SEQ ID NO: 225053 - DNA, 122 bp, Homo sapiens
gtagttgttcaggagtgatcggcgtaccagtgtttggaatgaaaatgaggctgtgcatatcgggcttcttggaattgacacacacacatgcacacatcctgtcttgaatgtaaaattacttc

SEQ ID NO: 225054 - DNA, 122 bp, Homo sapiens
ccccacctcatctaacacctgttgagaagccccccaaggaactcgctaagccaaggtcctcgaaggcgcgactcctagccccaagctaggccaggccgtcgccatctccgccggggatgcgc

SEQ ID NO: 225055 - DNA, 122 bp, Homo sapiens
cagccttgtgcacctgtccctgtgcatcttcctctaccttgtcctcttggctctgttgagcggcccatgtagccacactgactggtgggcaggtgacagactggcacatggcacgtgggctt

SEQ ID NO: 225056 - DNA, 122 bp, Homo sapiens
ccctcaaaaaaaaaaaaaacaaaaaaaaaaaaaaaacggaacaaaacgatgaaaaaacaacgtgccacagaccgttagaaaaagtgtatggtgatgaaaactatcaatttctttaaagtcaa

SEQ ID NO: 225057 - DNA, 122 bp, Homo sapiens
gaacaagggagggcaagagttaccgagtacagggacatctatgtggccgctctgctttcccgccgtcacctgctgttgaactccggccgcatcgcggtgtccggagccgcctggcctggagt

SEQ ID NO: 225058 - DNA, 122 bp, Homo sapiens
ggtccttcttgtggaccctggagtgcaagaccagctggtggtaggttctgaaagctttgccgcactcggagcagtgagtgggcttctccttgctactgggtaacttgggatccgcgtccacg

SEQ ID NO: 225059 - DNA, 122 bp, Homo sapiens
agaagtagtttttagatatattccaccatctagagaaaggaaatatcacttttttgaaggcgaaccaagaagtctgttttggggttgataaatttctgacagttgctcccagagtattttca

SEQ ID NO: 225060 - DNA, 122 bp, Homo sapiens
ttgtattacgggaacatattacctccccatagtgcttcataaggattaaatgaaatgacacgcagttgcatcctacagagcaggcacccagtaaacactaggtggcagagcattctgagtgg

SEQ ID NO: 225061 - DNA, 122 bp, Homo sapiens
acatctcactcattctgggttcatcaggcttctgccaggcttatcaggttcaagctcaaacgcacggcgttctcctgtagaagcctcaaagagattggcttattctcggtggtgggcggagc

SEQ ID NO: 225062 - DNA, 122 bp, Homo sapiens
caacgttcggcctccagaacggcggttatgccctgccccgcccccggctcccttcttcgccgcttgaggcggcgcatggtcacctctgccccctacagaattgaatcctctgcctttcctcg

SEQ ID NO: 225063 - DNA, 122 bp, Homo sapiens
ctgtcttttcaagcctggctctctctctaccacttctgaggtcctggccttgccttgccgcgatggctgctgtctgcacctcaaagctcatgctattgcttggccctcttctcaatttcctg

SEQ ID NO: 225064 - DNA, 122 bp, Homo sapiens
gtgtgacaaagtatgagggcgcgccaagctctccagttccacatctgctgtcgagtccagcgcctgccacgctcccgtgcggggacccgcccaaaactccctggaagccaggcgattcagac

SEQ ID NO: 225065 - DNA, 122 bp, Homo sapiens
agcgatgagtgcacgagtgagatcaagatccagaggaagaggagatggtcaggaggctcccgatgtggttgcattcgtggctgtgagtacatttcagtatcttatttccattggcagaaatg

SEQ ID NO: 225066 - DNA, 122 bp, Homo sapiens
ccacaagagcgctagggcccccgctaatagtccagctgcgatggtgagaactcgcggacccgccggcgatgcatgccgggagatgtagtcccgggccgacgcattacctcttgggagtcgtg

SEQ ID NO: 225067 - DNA, 122 bp, Homo sapiens
ctttacccagcgcaggccggcccggctcaggtcgctcggccagcgcctggcgccctcgagcgggaccctgactcctgaccctgcttcccaggtgggagccgttttcctccttccaaagccag

SEQ ID NO: 225068 - DNA, 122 bp, Homo sapiens
cagaagtactcggtgctgctggtgctcactgacggtgtggtgagcgacatggctgagactcgcactgctatcgtgcgtgcctcccgcctgcccatgtccatcatcatcgtaggcgtgggcaa

SEQ ID NO: 225069 - DNA, 122 bp, Homo sapiens
tccatttcaccggcggcagcagtttcagcgtgcagttcccaaaccccaaagctgaccctgcgccccatttgaatacggccagagcctgctggttcactttgggtagagccgtgcctcttggg

SEQ ID NO: 225070 - DNA, 122 bp, Homo sapiens
attcgtagccctgctgcggcgccgtcccggagttccccggcccagaccagacccgcggggcgccctcagcagcccgcccgtcttgcactcggagagcggtcctggcaggaaggccggccagt

SEQ ID NO: 225071 - DNA, 122 bp, Homo sapiens
catgtttttttgactctgcttgaagagactgcacaactttgatcaacaaaaagatactcccgcagatccagacttgccacccagatttataatatagggcttcctctagatgtcttttttct

SEQ ID NO: 225072 - DNA, 122 bp, Homo sapiens
tagacatgatcttggacctggagcctggtgaggcaccctcagggttgttttgtgtgtgtgcgtgcactatttttctcttcaaatctctattcacttgcctgaattttgaaatttcctttggt

SEQ ID NO: 225073 - DNA, 122 bp, Homo sapiens
cgggcaggacccaggcaggcagtgacaaaaaacaaaaaaaaaaaaaaacacgccaaacaacgataatacagacacacagacacagatggaggcaacgatacaaactcggaggcagagaggga

SEQ ID NO: 225074 - DNA, 122 bp, Homo sapiens
ctttccctatcaaaggtcaaaacaccggacagcctgttgctcttaacatcagctcttctgcgtaatatttctctttgctctggaacacaattagctcttgggaaaagaggccaacttttcag

SEQ ID NO: 225075 - DNA, 122 bp, Homo sapiens
gtcatgctggctgtttggctctcagggagcagagaggtctcccagaggctgcagggagcacgccccttgaatcacccctgttccagattctacctgcagagggcagtattgagcatacactg

SEQ ID NO: 225076 - DNA, 122 bp, Homo sapiens
taggtagcttaaaatcagacatgctatgagtatttacaccagagaaataggccaacactacgaggcaggatttgtgggtattgtttttcagaaaacttggtttttcagcacaacactgctct

SEQ ID NO: 225077 - DNA, 122 bp, Homo sapiens
cccatggtgaccgcaactgcacagagaaacgctgaagttaaactgtcagggtgaaggatacggagagtcttgggcgcttggctccacgggaagcaaacactttcccctgcgacagtggctgt

SEQ ID NO: 225078 - DNA, 122 bp, Homo sapiens
tggcttctgttccggtgaagtagtactgctccctggagaccccatctcccagcacacacacgtgagtccctgcctcttgcctttgttcatatgatgcccctgtcttttctccatcatataaa

SEQ ID NO: 225079 - DNA, 122 bp, Homo sapiens
tctggtacttagctggtgctgagggacattggactgcttatgaaaaaagcaggggaagggcggaatggaattatgtggccttcgttatttatccccccggtcacgcgtggtcacttgcttga

SEQ ID NO: 225080 - DNA, 122 bp, Homo sapiens
taacgtctaaagacctgcagggaagacaagacttttccgcctgggacacatgaaagacatcgagctaatttccttaataaatgaagagctcttggaaaccaacgagataaagaccaaaccaa

SEQ ID NO: 225081 - DNA, 122 bp, Homo sapiens
tcttaaaccagaatggaggagatccacaaccctatcttgtattgttattctttatacctacgcattatctgtcatgcataaacagcatctatttaaaatttaataaagtaactttcaagaag

SEQ ID NO: 225082 - DNA, 122 bp, Homo sapiens
tggcccggcaagggtgggggaggacaagcgcgcttgtccctgcggctgtcttcgcgccggcggcagagatgagggacctgaggccccgaaaagttcagtcacttagtgcccgggggcctcca

SEQ ID NO: 225083 - DNA, 122 bp, Homo sapiens
tctctctatgtgtgttgattcttgcggaacaaggcgcttcgagcatctcctctgcccctacgcccgtgaccctgtccctcttcttgtctccattgccccccaagcgggtacatttgcccacc

SEQ ID NO: 225084 - DNA, 122 bp, Homo sapiens
ttctgtttgcagcagagcccaggctgtcttttcttcataattctctctgtgcccactcctcgagggcaggaactgtccctgtatcagtgaggcattcggacttgggagatgtttttagaaca

SEQ ID NO: 225085 - DNA, 122 bp, Homo sapiens
ctgaactttttgcaatgtccgctaaattacaacggcaaatgtaagtctttccccgagtgccgtgagctcttccagcaaatgaatgcaactaaatctgggagtggtggcaacctgatttatag

SEQ ID NO: 225086 - DNA, 122 bp, Homo sapiens
gaccttcgctacaggtacaattcagaagttcagcagcctctacagagacaggggtttcaccgactccaccaagtgaagataaatgtcaaaggtaaacaggcaggacggggcgctgtggccaa

SEQ ID NO: 225087 - DNA, 122 bp, Homo sapiens
gcctgtttcgaaatggggaaagccgtgcgtgcgcgttatttatttaagtgcgcctgtgtgcgcgggtgtgggagcacactttgcaaagccacagcgtttctggttttgggtgtacagtcttg

SEQ ID NO: 225088 - DNA, 122 bp, Homo sapiens
tgacacattttaactactcaataaatgttttgtatcaccaatcacatctccttccaaccccgacattttaatttgatgtttattaacatggacggtgccagccactggaagacagagtttct

SEQ ID NO: 225089 - DNA, 122 bp, Homo sapiens
cacacgcctggacactttcacaagcacacagaacgaccacctaccacgtccataacgctccggatgtcctgagtggagagagttgtgtttattcaccatgtcatacgcgcatatagggaacc

SEQ ID NO: 225090 - DNA, 122 bp, Homo sapiens
cagcaaagggggtggtgagcggtgataggaagacagcaagccaggcacagcggtcagggacgtcagtgatgaccaagaagcggcctccaggagaggcgaatgttacaggtgcctttccccgt

SEQ ID NO: 225091 - DNA, 122 bp, Homo sapiens
gagtcggggctttgtctcccaggggcccctcttccctccctgcctataagagcccgacctcggctggtctcagatctgacatgttccctgggcctatctcggtaagtcccaggtttggagga

SEQ ID NO: 225092 - DNA, 122 bp, Homo sapiens
tctaatcgcgtcatcatttcaaatggctgcataatattttattgggaagatgtcaagggccgatttctagtggcaggaaatatgtctgcagtacttcttttatcaggaatttaggagagctg

SEQ ID NO: 225093 - DNA, 122 bp, Homo sapiens
ggtcattctacttatgctattctcctctttgagctcaaggctctaatgagttttacatctcggctttgttacagaggagctccaaatagtctcaaactaactctccattcttcctatttagg

SEQ ID NO: 225094 - DNA, 122 bp, Homo sapiens
acccggcccgccccaccctccacggtcacttcatttccagcccggggtcccttggtggggcgggagagtcacttgcaccagtctagcctgggaattcctgggcgggtatcccctgccggagg

SEQ ID NO: 225095 - DNA, 122 bp, Homo sapiens
tgggggcgccctcggctctgggggggcccccgcccccgcccccgcccagcccctccctggcggccagataccaacaagcacgctaaactccgggagatttacagcgggcggcggggcggcgg

SEQ ID NO: 225096 - DNA, 122 bp, Homo sapiens
ccaccttctgccacctctatcattcctacctctactacgcctcctgctccttgaaggatccgtgtaaaaggtcagctgggggtcgttttctgcctctgtgccagaatccccttcagggttca

SEQ ID NO: 225097 - DNA, 122 bp, Homo sapiens
tgcagggccactcctggtggagaaccctcgtgactactccactgaattaagtgtcaccatcgccgtgggggcctccctcctgttccttaacgttctggccttcgctgccctctactaccgta

SEQ ID NO: 225098 - DNA, 122 bp, Homo sapiens
gtaggaatagctcagaggtgcccttcctttccaggcaaagtgcttagtagctgaattcagcgagaagaaatcatccaaaggtaacccttgctctgagccctccccaggaagaagagagaggt

SEQ ID NO: 225099 - DNA, 122 bp, Homo sapiens
taggagtgttggtgagaaaaacaacaataatttaatctcagcatgcaaggatttattccacgtaccagaaaagaggaagtatacttttggaatttggcttgaaagtattcttcttgttgtat

SEQ ID NO: 225100 - DNA, 122 bp, Homo sapiens
accccggtagggacactgatgcaggaggcgctctgcagtgcctccccccaatctgtgggccggggtgcccccagggacgcaggctgtgcgctcccacgccctgccgaagcaggacgttccca

SEQ ID NO: 225101 - DNA, 122 bp, Homo sapiens
tgtggcaggcatgcttcttggtgatggagacacggcaggtagcgtgtgcaccctgtgtggcggggagtcagtgagaaagacggagaagaagcagacaaatcatgccgtaatatcataccaaa

SEQ ID NO: 225102 - DNA, 122 bp, Homo sapiens
ttttaaaaagaccacagaattagccaataatacattataaccagtagtctttgaatggcccgtttaaattaaattaaacgaattcatttttaaaataatataatgaacaccttctttaactt

SEQ ID NO: 225103 - DNA, 122 bp, Homo sapiens
gttaaccaacttcttgcagctcctgcttttgctgcatttcctgctgcagcactgcaacaccgcaacaccctccctccactgttcaaatgctgaccttccttcacagacctggcccagttccc

SEQ ID NO: 225104 - DNA, 122 bp, Homo sapiens
tgctagcctctcacactcgtgttagaattattgggaggcggggccaggcgcagtggctcacgcctgtaatcccagcactttgggaggctgagccaggtggatcacctgaggtcaggagttca

SEQ ID NO: 225105 - DNA, 122 bp, Homo sapiens
caacctgtcgctttctggactacacttcccagaagcctctaggcccagggcactctcccgcgataactagattgtctcttgaggagtgggcgggatcttcccgcggatttgggcaagcggcc

SEQ ID NO: 225106 - DNA, 122 bp, Homo sapiens
ttaataacacagcacagcaattaacagctcgcaaacttttgttttatacacaccgtgtcacgacttccagataccttcggcatggagtccagtccttgcgtttgtttggtcgttcgtcctct

SEQ ID NO: 225107 - DNA, 122 bp, Homo sapiens
cctcctgctgttctcgggagccgtggccctgatccagacctgggcaggtgagtgcggggtcgggagggaaaaagcctctgcgggaaggagcgaggggcccgcccggaggagtaaatctgcac

SEQ ID NO: 225108 - DNA, 122 bp, Homo sapiens
ctctccccgtcccgcaccagcccttacctgcccagcccaggtgcgccgagctcacgtcagcgcctcgccccaggacgccgcagccttcgcatccgcccggccacgcctcccaggtgtggcca

SEQ ID NO: 225109 - DNA, 122 bp, Homo sapiens
caatcagtggtggagatgagcctcaaactcaggtccccagacccgagtctagggtgaggacgaggcccctggagcagtggcaccccctccctccccgccgcctgctccgcgacccggccccc

SEQ ID NO: 225110 - DNA, 122 bp, Homo sapiens
gctgctgccgttcctgctccttttcactggacctgcagtctctcaggggctggtggcaggcgactaggagactagggtggtggcggtgggggtgccagcggctgagccggagccggagccgg

SEQ ID NO: 225111 - DNA, 122 bp, Homo sapiens
accccactcaccgcgcggcgcgccgcatcccgccaatccccgcgcgcctgccccgcccatcgccgcaactcgctaatccccgcgcggcttccccgcccatcgcctaatctcaccaatcgctg

SEQ ID NO: 225112 - DNA, 122 bp, Homo sapiens
gcttttccttaggtatgccgagcagacagctggaggatcccggggcagggacacctagcccggtgcgtctgcatgccctggcagggttccagcagcgagccctgtgccacgcgctcactttc

SEQ ID NO: 225113 - DNA, 122 bp, Homo sapiens
ggccgcttttttttaaagccacgtgatcggaatcaagtttcagaaacgtcccttgaaagccgccttcatccccacaagtgccctccgacccgccccgcgccctcccggccccaccctcccgc

SEQ ID NO: 225114 - DNA, 122 bp, Homo sapiens
aaatcatattagattagggcctcccctacttctatgtaaccttaactaattacgtgtgttcgtgttcgtgaagtttttcatttcccaggaacattttggtccactctccggggaggagtgga

SEQ ID NO: 225115 - DNA, 122 bp, Homo sapiens
gcgggtaccaggggccatggggagcctgctcgatctcctgtagatctcccgggctggcctcgcacaaggaggggaagaaaatggaaccaccaccagaatatcgccctccctcctgtcctgac

SEQ ID NO: 225116 - DNA, 122 bp, Homo sapiens
ataagaacaaaaatccagagtgaaagtgtctcaggttgcgccgagtggcctggaaatttccgagcccgcgcggaggccgaggcggcgagggcggcggacggccggggagcgcgggcggccca

SEQ ID NO: 225117 - DNA, 122 bp, Homo sapiens
cgccaggggggccatagaagcagaggatcttgccctgggtggagccgcggagctggctaacggcaatgaactcctgcagacagaggcaggttcagtgggcacgtgagctggggaagccgggg

SEQ ID NO: 225118 - DNA, 122 bp, Homo sapiens
cgtggggtaggtgtatcccgaggacaaggtgctcgctggctgtccggactccactatgggcgcctgctgtgggggctgagcgtggctgtgactgccatgggggctgggctgcccgcaggctt

SEQ ID NO: 225119 - DNA, 122 bp, Homo sapiens
caggtacatcctaccacctctgcattcatccactggcaatgtacatagagactgaacccacgggccctgaaactttaagtgtgtgagtataggtggaagccagaagatgagaacattttagc

SEQ ID NO: 225120 - DNA, 122 bp, Homo sapiens
aaggacggtctttccgtccccttctggggctcagatttgcagagtgtgtccttagtcgtccgttgggaagctgacgggcaggggcaccgcggggctgggccagggctgtgcttttgtgagat

SEQ ID NO: 225121 - DNA, 122 bp, Homo sapiens
attgagcagtactcagcaggccacctggacatgctgggccggatcaagagcctgcaaactcggtgggtgcaccgggcctgttgggaggcaggggcagggaggcagcgaccccagccctgaat

SEQ ID NO: 225122 - DNA, 122 bp, Homo sapiens
gcaccatgggcagggccggggcgcctggctccttccaggcagttctcccacgcgccacctcgcgtcccacagacacgaactcctgccgctccccccggcatctgtctcgtcgcgggaagtgg

SEQ ID NO: 225123 - DNA, 122 bp, Homo sapiens
ctggacgaggtgctggctagtgacagccgcttcttgctgggcagctggctagagcaggcccgagcagcggcagtcagtgaggccgaggccgatttctacgagcagaacagccgctaccagct

SEQ ID NO: 225124 - DNA, 122 bp, Homo sapiens
cctggcgctgctggcgaggcaggtcttggcagaactcctggaagttgttctgcagggcagcgcatgcgtgctccgaggccttcagcgcgcggtgtagccgcagcacgcaggtctgctgttcc

SEQ ID NO: 225125 - DNA, 122 bp, Homo sapiens
aaggtgccccgggattgacgccgcctgtggccagagccggagtaacgggactcccagctgcgcgtcgcagtcccgacgcgagaagggctggagtcggcgtccagcctagagcccccggtggg

SEQ ID NO: 225126 - DNA, 122 bp, Homo sapiens
ccggccgagggacccacccaaggccacacagggaggcggcctcaggatcatgggcagctccgtctggttccttcccaggctccgggccatatcatcagcaccctcccctcatcctgccccgc

SEQ ID NO: 225127 - DNA, 122 bp, Homo sapiens
tgcttctgagtaaacttgtcacagctgaaggtgagagccagcgaatcaccagcacatgagcggggactgaagcctcagaggagaaggagggtggtgcaaagacagcccagagaggaagagac

SEQ ID NO: 225128 - DNA, 122 bp, Homo sapiens
caactcattgaacatccacactaacaacagaatcctgtgttcaacagtgctttggaagcccggcttttctaacgaccagacaggaaggcctgtgtgtgtaataacagcaaatgaacttaacg

SEQ ID NO: 225129 - DNA, 122 bp, Homo sapiens
gccgctgctgctagaccaggaggggcattcaagggaacttgtctgtcagttctgttgcctcgtagcccccttagcaacctgttcaccacgttggtagtcacatagcagccctcacctcactc

SEQ ID NO: 225130 - DNA, 122 bp, Homo sapiens
cgcatctgtgcgcatcccgcttccatcgctgcggggatcccttcggtcctcccaggcaggcgagattggtggctgtaattaggacaggagtggctcattatatcatcacagaataaatgcac

SEQ ID NO: 225131 - DNA, 122 bp, Homo sapiens
ccctccctaccgccggccgagatggcggatccagccgaatgcagcatcaaagtgatgtgccggttccggcccctcaacgaagcggagatcctccgcggggacaaattcatccccaaatttaa

SEQ ID NO: 225132 - DNA, 122 bp, Homo sapiens
ctggcgagcgctactgttgctgagctggtgggagtggctgccggcgggtgcaggggcccccgagatcccttctctgccgcgcctgcccccggcctggaatccagcttcctctcacacggctc

SEQ ID NO: 225133 - DNA, 122 bp, Homo sapiens
ccttgccctgtcccaccgggatgccactgcctaagcagtctcctgcttccagattactgtcgcttctgcctctgagcccattagaccgtgtcacatccttaaatcttcccaattaggctggt

SEQ ID NO: 225134 - DNA, 122 bp, Homo sapiens
gatccacatactgatttcctttgctttggatatactcaatagtgggattgctagatcactcgaatcttatgcctcagaggcttgacacaagagcaaaactatggaagtgtggctagggtgat

SEQ ID NO: 225135 - DNA, 122 bp, Homo sapiens
tgtttgagagactgcatggaggagtgggggctggtggacagtgagaggagggagctaggccgagagatgcagagttaatcagggagcaaatccaaagccaggcatggataggcctcactaat

SEQ ID NO: 225136 - DNA, 122 bp, Homo sapiens
ggccttgttagcctgcctttcccagagcccctcgctgtgaagccacccctgtagcagcagcgtgtctccgggaggacccagagaagcaacatcacccatgtgctgcacggaaccctaacccc

SEQ ID NO: 225137 - DNA, 122 bp, Homo sapiens
gcgggagggccaactgcggtgaaagtctgtgaggaaggaggcggatgttcagcgcagtcacggggaacataggaacgatttccgtaaagcgctcagtttggaaaagtcaccctgagactcca

SEQ ID NO: 225138 - DNA, 122 bp, Homo sapiens
gcaggaggcatggggagggcagggcccgcccgtttctcggcacctctccccgctggtgcgcgtctaacaacagccacagctgcagagctagacagaagccccccgcagcccggcccctccag

SEQ ID NO: 225139 - DNA, 122 bp, Homo sapiens
gcgttgcggatcacctcccggctccgagggtctgctgtggagacatggctccatgagacacgggtcccctctgccaccggtggagctgggctgcgccaagcctcgccccctagctccttgca

SEQ ID NO: 225140 - DNA, 122 bp, Homo sapiens
aagttcgtgggtggagctggttgtttggcgcctgcgtcttgcggcgagcgggctggcgtgcggcgccgttgcgggcgggagcggctgcaacgccggtgcctgaggagcgatgccgagggaaa

SEQ ID NO: 225141 - DNA, 122 bp, Homo sapiens
gcaggcttggcgagtccttgcagagctgacatagaggcgcccgcatgtcacttagtctaacgctgacagaaatgaatgcagaaggaagattttcagtcctgaacgtgaattatagaggtaga

SEQ ID NO: 225142 - DNA, 122 bp, Homo sapiens
cgtccttctctgcctttgtacacctgcctgacatgtgtgtcttttcttgacgctgctccccgtgagggggactaaccgtcaaagactcgacttttctcacccgggctccttccttcaagttg

SEQ ID NO: 225143 - DNA, 122 bp, Homo sapiens
agctgtgctccgcctctacacctggctccacacgcgggctcgtccgcgtgagagatgagccgggaatgggataaaaaccatcccagaacccacaggaaatgcaagtccctcgccaggtagag

SEQ ID NO: 225144 - DNA, 122 bp, Homo sapiens
aaaccggccgccgctccgcccgtccggctcaccccgggcgcacgaatcggccccctgccccgggagatccctgactcggtctggcccgatcccccattcccgcgcgccccctggatccccgc

SEQ ID NO: 225145 - DNA, 122 bp, Homo sapiens
aaagccaaaccaccagcagcagcggcagcaaggtttacaatcctaaaccatgcaggcttccggcgtaatctctcctgtacttcgccaccactacagcctcaccgctggacagctcggccgca

SEQ ID NO: 225146 - DNA, 122 bp, Homo sapiens
ggccgagtagcgccttccccgggccccgtgaaccggctgcgggtcgcccttggggggcagcggccgcagccccccacctgggccctcggtccgccctcccggcgcgtccatgaactcagtgt

SEQ ID NO: 225147 - DNA, 122 bp, Homo sapiens
aatatatatccaaactgactcatcccagtgagctcaccgcacatgaattacaaatgtgtccgggtgcattaagctcctctgctggcagaagggaggctgctgcctgccatgcgcctgtgctg

SEQ ID NO: 225148 - DNA, 122 bp, Homo sapiens
ctcgctccgctccaggtctcccgagcaggggtgcaggcccgagcacccgcacgtggcgtgcgcccctagctcctcccggggcggcagctcaccagcccccgccttagtggctggcttccacc

SEQ ID NO: 225149 - DNA, 122 bp, Homo sapiens
tctgctctgctgcctccactcctgcggaactgttgccttgggcctcccttgtcagggtctcggacagctctgcagtctcttttggagctacccctggaactggccactcttcttttctccca

SEQ ID NO: 225150 - DNA, 122 bp, Homo sapiens
tcttttcgcaggttatggcagctctgggccctgctgcgcatgagcctgaccaatttaaagcggaatcctggctccaggaaacccatgagacgaccaaaaggtcggagaagaggtagaaaatg

SEQ ID NO: 225151 - DNA, 122 bp, Homo sapiens
agactgtgtgaggcctgtggtatgtatactccccttgatcccgataaccctgaaaatcagcgcatgattcacatggctttagtctgtcaaagcgcagaagacgttagaagaaacctgcagaa

SEQ ID NO: 225152 - DNA, 122 bp, Homo sapiens
tgtctccaaaaagaaaagaaaaatgaaagcacacgctgaatctctgggaacgaagctcttcggaagcaccagcttctgggccctgcccattgaacacggcaaaagcaggagcaatcacggcc

SEQ ID NO: 225153 - DNA, 122 bp, Homo sapiens
agtggattacgcaatactttggccagcctccttagcttcatctgtttaagggttcattttcgcttgtttggcacaggtcccagtgaggccttcagaattgtggttagcaacatgaatgaatt

SEQ ID NO: 225154 - DNA, 122 bp, Homo sapiens
tgtgcgtccctgtgacgtgggaacccttgctgttgtgcgtccctgtgacgtgttctcgtgcggctgtgtgtccatgtgacgtgttgccgtgctgctgtgcgtccctgcgacgtgcgatcccg

SEQ ID NO: 225155 - DNA, 122 bp, Homo sapiens
aagtggcagccatcaagtttcccagaataactcaagttcaggaagatgctacacagcctccggtgaggacagcgaactaataaacctgcagcagcgcagtgagatcggcggggggtccccaa

SEQ ID NO: 225156 - DNA, 122 bp, Homo sapiens
gctcgccatcccggcgggccgccttgacgatgggggagatgtccttggcctgccacaggccgcgcggtgggggcgccagggccatggccccgcggagtagcccctgtgtggccgtgttctgc

SEQ ID NO: 225157 - DNA, 122 bp, Homo sapiens
ggcggaggaggagactaaaaaaccagaaaacaaccagcaaaccagctaggcagagctgagcggagaagctccagagccttttaaagagactctcgtcacatgacacccccaaccccgacccc

SEQ ID NO: 225158 - DNA, 122 bp, Homo sapiens
aggaggacatcaccttaaagtaccagactctagggccagcctgtgttgggagaacccccccgccccttctcttgcagcttcccccgggggggacagatcttcatggggacacaagggagagt

SEQ ID NO: 225159 - DNA, 122 bp, Homo sapiens
aaaaggtctcatgatttggcctgaagcccattcagcatgacgcagtggaaaaaaacatttcgagtctatagacctggaccagtggaagacctgggttggaattctactctgcacttagcagc

SEQ ID NO: 225160 - DNA, 122 bp, Homo sapiens
cttcgtacttctaaccttcccttcggttctttgcagcaggtggccgccgcatctcccacccgccaggctgccaaccgaaacgactgcagactatcacatccggcatgaagccccgcccccgt

SEQ ID NO: 225161 - DNA, 122 bp, Homo sapiens
ctggcagggtcccagggctgctggcaggggttgtggtcctgttgagcagaggagcgacgccgctgccctggcccccgctgtccctatgatcctgcactctggggtgggagctacatatcatc

SEQ ID NO: 225162 - DNA, 122 bp, Homo sapiens
ctgtaacactcaccgtgaaggtctgcagcttcactcctgaagccagcgagaccatgaacccgccagaaggaagaaactatgaacacgtccaaacatcagaaggaacaaactcccgacacacc

SEQ ID NO: 225163 - DNA, 122 bp, Homo sapiens
cctacggagctggggcggatgacccccaaatagccctggcagattccccctagacccgcccgcaccatggtcaggcatgcccctcctcatcgctgggcacagcccagagggtataaacagtg

SEQ ID NO: 225164 - DNA, 122 bp, Homo sapiens
gggacaagaggccttacctgggggggccagtgtgcagagggccctagagctgagaggccgcggacggagtaacagctggattctgaggacgtggaagaggccacaccacgcagcagaaggaa

SEQ ID NO: 225165 - DNA, 122 bp, Homo sapiens
tgtggccaaatagctgcaggaatgttggggcatagtagaaagagcccaggattaggagtccgcagacaggattccagttctgtcactagaaagctgtatctctatcttgctggaattcatcc

SEQ ID NO: 225166 - DNA, 122 bp, Homo sapiens
aactccactccctccctttctctcttctgcaggcagccatgagctccagccgccccgagccgggtccctgggcacccctgagcccccgccttcagcccctgtcccagagctcttccagcctg

SEQ ID NO: 225167 - DNA, 122 bp, Homo sapiens
cttcccctcacggtccgagttcctgcaaatgcttggccagaccgaggtcgccgagatgctcgctccagtctctcccctcgtgggcacctagggtagcccgtgagcgccgcccgccgccgtct

SEQ ID NO: 225168 - DNA, 122 bp, Homo sapiens
aggccagtgtttagcaagtctaaatgacaagtttattagcacatattgactcttcacctacgtggcagcgggggagtaggagaggcctgaattttttttttttttttttgagacggagtctc

SEQ ID NO: 225169 - DNA, 122 bp, Homo sapiens
gtgtcatttgtacaaagtgatctcaacaggtctgaaaccccaagttccttgggcatggatcgagaatgagtctgtaggatgggaaactgtcagcaagctaaatgggttgacacaaatgaatt

SEQ ID NO: 225170 - DNA, 122 bp, Homo sapiens
gggaaccccagcagctgaaggaggtattcgcagccagccacccttgacattcacccggagcgccggcgcgggaggcagggtgggcgaaggaccccatcaggagaggctacccgacgaagggg

SEQ ID NO: 225171 - DNA, 122 bp, Homo sapiens
tggggagatgatcggctgcgacaacgacgagtgccccatcgagtggttccacttctcgtgcgtggggctcaatcataaacccaagggcaagtggtactgtcccaagtgccggggggagaacg

SEQ ID NO: 225172 - DNA, 122 bp, Homo sapiens
gcatgacctgggataggtgaattctatagccaggtggcctccagaagcttacgaaatgatcgtctaccaaatctaccatctatctatttccctacctacctatcatttatctaatctatcta

SEQ ID NO: 225173 - DNA, 122 bp, Homo sapiens
tcatggtgatttcctggaactcaatatgaaaggacatggactttggcggacaagccatcacggttccaccctcaatgccaccacttattagctgtgcaaccttcagaaaatcaatgggttgt

SEQ ID NO: 225174 - DNA, 122 bp, Homo sapiens
atggtactgctgcatccgggtgtctggaggctgtggccgttttgttttcttggctaaaatcgggggagtgaggcgggccggcgcggcgcgacaccgggctccggaaccactgcacgacgggg

SEQ ID NO: 225175 - DNA, 122 bp, Homo sapiens
ggaagttggggcgacgtctcccagcagtgcccctctaggggaagaagcactggctcctgacgggcagcggccacctctgctctggtttctacggaccagacatttgtacacatgtggcctgg

SEQ ID NO: 225176 - DNA, 122 bp, Homo sapiens
gggctcaagcaatcctttgccttgacctcccaaagtgctgggataataggtgtgaaccaccgagcccaactaataaggattattttaattggcatctttggtctttgacctctgagcttcta

SEQ ID NO: 225177 - DNA, 122 bp, Homo sapiens
caggctcttcctcatcatttaggtctctatgcaaatgtcataaccccagagaaggcctgccgtggccagcgtcctccccattattccttttaccccccgttattcctcattacttcgcccca

SEQ ID NO: 225178 - DNA, 122 bp, Homo sapiens
gaggaaggggcggctgctcagacagatttagggcccgccagctaggctacacccatcatgcgccgccctcctccatcgagggagaggcctgaagggactgcctactgcagctcgttgccaat

SEQ ID NO: 225179 - DNA, 122 bp, Homo sapiens
cccttgcctgcaaagccccgactctgacatcctgcagagaatacccaattgcaggctcttcgcgggggacgcgggctcggcagcagcggagcttctcccggtgcagaatcgccagcccggcc

SEQ ID NO: 225180 - DNA, 122 bp, Homo sapiens
aagaagcatctgtccctgcaaaccacttttagaaaaatagaaggacccgcgccggacccgcgcctgccctgcgtctaggagccaaggcaattttctaaatgtggcaagtggagaaattgagg

SEQ ID NO: 225181 - DNA, 122 bp, Homo sapiens
ctaggcaatttacctaacctcggcttgccagtttcctcccgcgtgaaacaggacaataaacgattatgcctcttagggttgtgctgaggaatacatgtgtatgtaagtttatttgcaaagca

SEQ ID NO: 225182 - DNA, 122 bp, Homo sapiens
catcgtctgagatgtggggagcgtctctgcccgcccgcccatcatctgagatgtggggagcgcctctgccccgccaccccgtctaggatgtgaggagcgcctctgcctggccgcgacccgtc

SEQ ID NO: 225183 - DNA, 122 bp, Homo sapiens
ggcctcgtggcgcagggcttgcaggctcacttcccccggctcaggattcctagcaagggccggaaatctgggcagggagcgggaatcgaagcccgggcaggccctcccgcgacaccgcgact

SEQ ID NO: 225184 - DNA, 122 bp, Homo sapiens
ggtcacgctggtggcttccccttctggggtgagtgctgatgccggacttgagcttctctccggtttgcccccctcttccttgcctcctaaaacaccactgcttccctgctccattggctgag

SEQ ID NO: 225185 - DNA, 122 bp, Homo sapiens
aatgcagctcttctgacttttctgcttttgatcggtattcaccagccacagcactcgctacgtgattcacccttttatctctcgagtgctcttgcctgtgtgttgctctgtgcgaagtggaa

SEQ ID NO: 225186 - DNA, 122 bp, Homo sapiens
ctaccttcatattttaataagtattgtcctagaacaagttatttcacctctctaaggcttcgtttcttcatttgtaaaaaagagacaatgctgataacacctacattgtcagagctgtgatg

SEQ ID NO: 225187 - DNA, 122 bp, Homo sapiens
cgggggcgctgaagtacccctcaccgggagctgctcctcctctggcgcgccattctgcaccggctcccccgctgcctcctcgctgcctggaggctgcttcttggacttcttcttgcctttgg

SEQ ID NO: 225188 - DNA, 122 bp, Homo sapiens
cgatggccttgtagaagagcttgtgggccctgcccttcatgccacgctgctgcaaggacacgtgtgtcacggcacaggccctggcccagccctgaggagcccgccgcctggcaggctctgcg

SEQ ID NO: 225189 - DNA, 122 bp, Homo sapiens
gtgtgtgttggggcgtgtggcccttcacaccagtccctgcagagcttgagggaaactccacggggtgggggccctccgggagttggggtaagggcctgatgctggccgcgaagccccatctc

SEQ ID NO: 225190 - DNA, 122 bp, Homo sapiens
tcacggtgtagttcatggtgtagctgctcatggtgtagctgctcacggtgtagctgctcacggtgtcattgcttatattgtagttgctcataccgttgctcgtggtgttgttcttcatggtg

SEQ ID NO: 225191 - DNA, 122 bp, Homo sapiens
agcgccgcggggcagaggcacctggagctcgcagggcccagacctgggttggaaaagcttcgctgactgcaggcaagcgtccgggaggggcggccaggcgaagccccggcgctttaccacac

SEQ ID NO: 225192 - DNA, 122 bp, Homo sapiens
caaaaaaaaattgtgctccataagcaaaacttgtcatgccagcaacaaatttcccttctccgcatctgcatagcccacctcaaggaacaaatttgtcaagcaactttttaagtgccctcccc

SEQ ID NO: 225193 - DNA, 122 bp, Homo sapiens
ggctccccaccaggtgagcaggtcctgcccggcttgaggccaggggtccgggctgcggcccgagataagcgtcgcgcccgccgccgcttcctgcgcttccagcgccgccacttcctgttttc

SEQ ID NO: 225194 - DNA, 122 bp, Homo sapiens
tttccccgaatggaaacggtttagaagtggacgtgcattccccacccttttcccgtccctcgtttgggttgttccttgaggggcaaagtgcctgttgggctttctgtgaacctcacctaacc

SEQ ID NO: 225195 - DNA, 122 bp, Homo sapiens
cctgcagatggaaaacgctttggttgcctgtgtgggaagcggtttgcagtgaagccaaagcgtgaccggcacatcatgctgaccttcagccttcggccttttggctgtggcatctgcaacaa

SEQ ID NO: 225196 - DNA, 122 bp, Homo sapiens
tgggaaacaggcggcacagatcttggaggttaccttgttcttaatcagtcctcaggcagtcgcctctaacgcgagcgaacaccggcttcccgaggccgtcgctcggcagaggaggggccagg

SEQ ID NO: 225197 - DNA, 122 bp, Homo sapiens
tggtaatattgctaacacaccgtcagctggcctttttagggactttgtttaaagaagatccgcctctggggttttatattgctctggtattcatgccaaagacacaccagccctcagtcact

SEQ ID NO: 225198 - DNA, 122 bp, Homo sapiens
agagacgccacagcagcccgcagaagcggaaccactaccagccccgccgcggacacaccccgctctcccacccagcgccttccccgccaccgatcagcgccggtgaccgtgtacagcgtctc

SEQ ID NO: 225199 - DNA, 122 bp, Homo sapiens
cggtgtgtggggtctggggaggcgactgtcacgtctcctagaaccctcatgccttccactcgtctgcgaccccggctgccgaggaggcaacgagggaggtcgagccgctccctcccgtgggc

SEQ ID NO: 225200 - DNA, 122 bp, Homo sapiens
tcaacacctttctctctgttgatgtcagtcagaatatcaatcacaacgtatgtccctgtccggccaattccagcactgccgtgcaccacgactggccttgcatgcatgatgcgttcctgctt

SEQ ID NO: 225201 - DNA, 122 bp, Homo sapiens
gatgcacaaagggcatgagtagacattaataaaaaactcattttgaccctttcgaactggcggccaccatggaggtcagaagagggcaggtgtattcctgccagccccctagagacataaag

SEQ ID NO: 225202 - DNA, 122 bp, Homo sapiens
catgatttctttggaattccaaaaggcctcaccagggcttcctggctctgctatgaccgtcgtctaatggattacagatacatttcagtttagggcttcataacagcaccacagaaatacac

SEQ ID NO: 225203 - DNA, 122 bp, Homo sapiens
ctgtaagtctaaattcactgtaaataatgtgtacagtggaataagttttgtaaataaatacgcatagcatagcgccacgaggttacttattacagctgcaaagggctattgagacatcaata

SEQ ID NO: 225204 - DNA, 122 bp, Homo sapiens
ccacagccctgtttgcttccgtgtgggaggcgaggcaagcctggggcctggggcctggcacggtgcctgcctgggtccggtgtgcctgcaggctcgcctgctgccgcctggctctgccccgg

SEQ ID NO: 225205 - DNA, 122 bp, Homo sapiens
caccagttacaggttgcttcctggggaaacaggctctgagatggaagttagcatgcaggacgcctgctagagtgctcttgggattaacaccccaggagaaagggtgacctcagctgacccca

SEQ ID NO: 225206 - DNA, 122 bp, Homo sapiens
cctggccccgggggcaggaaatgtcgccttacccacagccttagttctggcgaggactcacgtcatggaaagccttaagacgattgtcccacccccggaagccacgcagctgtagatagcgg

SEQ ID NO: 225207 - DNA, 122 bp, Homo sapiens
tcctcctcctcaaacaaggccttctgcaccgaggagcacatgagctggaggcagagacagcgtgcaaggagaggaggtgagtcccagaaactgcgctgcggccaggggagtcccagaagctt

SEQ ID NO: 225208 - DNA, 122 bp, Homo sapiens
gcataatcattgaacattggaatgattgagggcatgttatatgtgctttccctatgaccccggcaggtccacctctcagtacccaccctagagaaacacatatgtgcacaaaaaggcatgtg

SEQ ID NO: 225209 - DNA, 122 bp, Homo sapiens
ggagagcagccctggtggtcggcgtctgtgcaggtccctgctggggagcttgacttcccgcgtggcctcccgcggcgctgatgccgggggccgggcggtattcaccgctgaagagccccgga

SEQ ID NO: 225210 - DNA, 122 bp, Homo sapiens
ccatcagctcccctgtgcatggcatgcacatccccgtatgtgtctgcatgtgcaggtgtccgtgggcatgtgtgtggttgtggatctgcaagcagggagtgagctgtatgtgagctggtatt

SEQ ID NO: 225211 - DNA, 122 bp, Homo sapiens
ccatttcctcaccgcgtttcaggagctgtaagttcttggtgttcaaaccccctacggttacgtaaacagaactctgcagttatcttctttccctttcttcggagctttgttttcaagttcat

SEQ ID NO: 225212 - DNA, 122 bp, Homo sapiens
gcggagggagcaggaggttggggcttgagcccgtcattccggcgcacgaaaacttgaagtcgctcggtagccggggaagggaaggaagagaggcaggctctttcctagaggtgccgtgatcg

SEQ ID NO: 225213 - DNA, 122 bp, Homo sapiens
cgggaggtcgggagatcaggagtccacgcaccagcctcgggaggacttccaagcctgctgcgtgtctgagctgcagccacagtggatttccccagctggtcattgtttaaacgactaagacc

SEQ ID NO: 225214 - DNA, 122 bp, Homo sapiens
tctggaaggagttccgctctgggaagtgggcacactgcgagtgtccataggtttgagtggcgagtgagttcaatctgcaggcgtaggaaggcttctgatctctcggggtacgtggcattgtg

SEQ ID NO: 225215 - DNA, 122 bp, Homo sapiens
tctacagcagaaggacaggggagggtgggctgtatcattagatgcaagtcgtgagcatttcgcaaacgcattcaagtacccacaaagactggaatttcacaggaagctatacctatagtgca

SEQ ID NO: 225216 - DNA, 122 bp, Homo sapiens
tgcaaggatgaagtgacttatgcgaggcaagacagagggtaagtgtccccgggcccggctcgttattaagcagggagctctcaccgtccggaggtgcagagggctggggatgctgccctggc

SEQ ID NO: 225217 - DNA, 122 bp, Homo sapiens
ccactcgggaccctggagggcaacggggccggcgctccggggccgctagggtgcggggtgcgcctgggggtgtgcccacagcccccccgctgcttcatccaaggatgctgctggggcgctga

SEQ ID NO: 225218 - DNA, 122 bp, Homo sapiens
aggatggcacattgtgtgtgagtgagtgtgtgagcgcaggagggagaggagagaagccaacgtgcatcagggtgattacaatatcagcagggcccagatggaggcaggaaaataaacagagg

SEQ ID NO: 225219 - DNA, 122 bp, Homo sapiens
caggagctgtagagaggaccccggtacatctgaaagccgggaaatggtgcgtgtgctggccgggagtggtgcgatgggggaggggctgcctggaactggcgggacccgggcctccctgtggg

SEQ ID NO: 225220 - DNA, 122 bp, Homo sapiens
caagtcgggagggggacccagctcaggactgggaggccctgctcgcaggtccctgggtcccggtggcggccggagcgcttgctccgcaggcagcgggcgggtggtcgcccctcccgccccca

SEQ ID NO: 225221 - DNA, 122 bp, Homo sapiens
cttgaagagattcataggcgggtctcgaagcccatgctgctgggagggccgggctgccgacgtggacgggtacagctccctggttcacacaagacttggggttccctccaccgtggaatccg

SEQ ID NO: 225222 - DNA, 122 bp, Homo sapiens
gagccgtgggggaagagctgttgaagaaaagttgtgaatgaaaagccgtggatgaagggccgtggatgaagagctgtggatgaacaggcatgcatgtggccaaggcaccaccaggcttcact

SEQ ID NO: 225223 - DNA, 122 bp, Homo sapiens
ggcgggccagggagcacccagtgcgccccctccgcgggcggcacaagagcagcgctcggccgccgcctccagccaactcgggtccctcccacggcgaccaatcagtgcgaagctggctgggc

SEQ ID NO: 225224 - DNA, 122 bp, Homo sapiens
cggctgcgcgcggagctggagcgggagcgtgtgtgcagcgtggcgctctcggagcacgaacgcatcgtgggcaccctgcaggccaacgtggcccagctggaggggcagctggaggagctggg

SEQ ID NO: 225225 - DNA, 122 bp, Homo sapiens
gcgccagccaaatctgtgagcgcgcagctccttggacaggggcccgggtctggacaccgtcgcagccctggactttgtgtcagttccagtgctgaaggtactggagggtagagcttggggcg

SEQ ID NO: 225226 - DNA, 122 bp, Homo sapiens
gacagcgccgcgggtggggatgcgggaggctgagcgcaccggccagctagcccctttgtgcggcgggggctgcggagtgctccctccaagaccggttgcaccccgctttcctggccaggact

SEQ ID NO: 225227 - DNA, 122 bp, Homo sapiens
acacatcaagtgcccaagaaaatgttggttctcccttagcagtagtatggggttgttttccgtagaaaatatattgtgaccagatcaaaaaagcaccattactgtgacttaaaatattattt

SEQ ID NO: 225228 - DNA, 122 bp, Homo sapiens
gcagggggatacggccaggcattgaagtctcatggaagccagcccctcagggcaactgaccgtgcaagtcacagacttggctgtcccagaatgcaagaagcccagacggaaaccgtagctgc

SEQ ID NO: 225229 - DNA, 122 bp, Homo sapiens
ttgtctgtctgtgtgtgccaggtggccctgccccaccccagggctggctgcaagtcagggcgaccttgtacccggctgactggctgagccaggcccagacgggggtgtggaggggaaagggg

SEQ ID NO: 225230 - DNA, 122 bp, Homo sapiens
tccaccactccacgtggcctcagtgtgcccaaagatagccctccaatctgtagagaccagcgcacatggcccctggctgccagccccaaagcctggagctgtttctcctaagacatagtttc

SEQ ID NO: 225231 - DNA, 122 bp, Homo sapiens
tgcacttccgggtctgctgcccgcgccggcactcgactacttgccatttcaccttgaaagcgtacatgcaaaagcacgagccactaaggacagtataaacacatctttcgtaccgcgcatag

SEQ ID NO: 225232 - DNA, 122 bp, Homo sapiens
ctcgtgatgagaaactcacttctggcacctgtcgagatgccagattccatgccaagcccccgaagattctgactagtttggcaaaaaatgggatctggcaggtccacttcaaagcagcgccc

SEQ ID NO: 225233 - DNA, 122 bp, Homo sapiens
ggaattgattgagctggctgcacttgtgtaccaggatgcagagttctccaggtagctggacgctggggactggttggaggtcggagggtgggcatgagggtggtggctgagcgagcgggacg

SEQ ID NO: 225234 - DNA, 122 bp, Homo sapiens
ttcacagagtggctgtcggaacccaccaaagatgccatggcttccagactgccaggctgtcgggagatgcagcacaggttctgctctcagagtgagctgctgtccgcagggactatggctgc

SEQ ID NO: 225235 - DNA, 122 bp, Homo sapiens
gagccaccgcgcccggcagcactgagttttctaccattatgtatgctgctagtggaactccgactgtggacgccctgttatcaaactaggttaagtttcctttccctagtttgctaggaggt

SEQ ID NO: 225236 - DNA, 122 bp, Homo sapiens
cgtgagtcagctcattagcataaactatcaggcatggtcccaggagctcatgatgagtggcgaagatactcctgtcagtcaagaaattccaaggaacagttacttcccaggaactgggacaa

SEQ ID NO: 225237 - DNA, 122 bp, Homo sapiens
tacgagaccattggctaacctgcccgtcaatccgctagggcagagccaatcgggatactgcgcgtgcgcacggaaaagcgagggcggctgactctcgggtgaggcggtgcgggaggcgtcac

SEQ ID NO: 225238 - DNA, 122 bp, Homo sapiens
ccctttcctcgtgacccagaatcagccttgtttaatccagaaaccatctctccaactctccgagaacccagactagggacagacatcaggacaaaggcgactctcgcctctcacccccgagc

SEQ ID NO: 225239 - DNA, 122 bp, Homo sapiens
caacacagcgaaaccccgtctccaccaaaaaaatacgaaaaccagtcgggcgtggcggcgcgcacctgcaatcgcaggcactcggcaggctgatgcaggagaagcaggcagggaggttgcag

SEQ ID NO: 225240 - DNA, 122 bp, Homo sapiens
gccctggcctccaggaccggcgagagtgagcgcgctctgctcggctgcaggctcaggaagcggcgcggcggcacgtgctgggccagagccccgcgccctgcgtccagccgccgggtgtgtgc

SEQ ID NO: 225241 - DNA, 122 bp, Homo sapiens
ttttgtgcttttaaacacacaggtccaattctgctacttaaagtggttccatgttccattcgcctgctcaaaatatgcctgtttaattcctcttctatggtgattgatctgtttacactata

SEQ ID NO: 225242 - DNA, 122 bp, Homo sapiens
gagagccaagaaggcaggagcgaacgcgggagctagagggcagggccgaggcgctgcggccggcccagagaggcccccgcacgtccagggccgccgcccggcgccccgaggggcagtcggcg

SEQ ID NO: 225243 - DNA, 122 bp, Homo sapiens
ctacagtaaaaaaagaaaaaaaaaaatctgcccctggttgctgtggtggctgtgccacagcgtcagattggttggacttgtttaccactgctggtctcttagtccaagttcctactttccta

SEQ ID NO: 225244 - DNA, 122 bp, Homo sapiens
aggggggcggggcggccacgtggggcacggagcagctgactcgggcaccgcccgcgcgctcgcccaactggcaggggcccaacccaagccgagggccccaaaagattccccgcgtcgggctg

SEQ ID NO: 225245 - DNA, 122 bp, Homo sapiens
cccagagcagcgagtggccaggaagtgtatcctagccccccaccccgcccccgtgtccaccgcaggacagagcttcggcagaaagcacctcagctttaggtgaattcgagctaggacaagtt

SEQ ID NO: 225246 - DNA, 122 bp, Homo sapiens
atacatctaagcgtcaggacagagatagtcctttttgtgccttccccttgagcctttgcccggtttctctgaagctgtgctctttatttgcagttttagagaaggccctttcaacgcaacag

SEQ ID NO: 225247 - DNA, 122 bp, Homo sapiens
gactggcgagcgtcaggggttgctgagtgccacttgtgaccctggagtgcgttgccccgacgggcgcacgctgggccgtgagaccgggtggaagcggctagctgctctgccactggctgtcc

SEQ ID NO: 225248 - DNA, 122 bp, Homo sapiens
cctggctgacaagcacaaaactctgtctcaaaaaaaaaaaataatacaggatggggaagtcgcatagatgtcaggtcatgataggctggaaggccatattaaggtacttgggctagccttgg

SEQ ID NO: 225249 - DNA, 122 bp, Homo sapiens
agagttcctcccggtgtgctcactggggcaatctcagcgtcagaggtgttcgaattaattcggagggctacgacccccactcactggccccacatgcaacttggggcatcggttcccatgac

SEQ ID NO: 225250 - DNA, 122 bp, Homo sapiens
aagcccccggccgcagaggcgcaggcgggattcttgccccggaggttgccgaggagtggccggtacctttcctaaaacccttatctgtaagtacactccggcaagctcgaaagggacagcag

SEQ ID NO: 225251 - DNA, 122 bp, Homo sapiens
gtcgaagaggaagtggtcgtcgatgagctgctgctgctccgcctccgtcatgctcttgagcgcgtagtatcggcccgccaggtcgccgtccaggctggacagggctgcgaggggtgcgctca

SEQ ID NO: 225252 - DNA, 122 bp, Homo sapiens
ggcggcagcggcagcagcagctgctacagtggcggtggcggcggcggctgctgctgagcccgggcggcggcggggaccccgggctggggccacgcgggccggaggccccggcaccattggcc

SEQ ID NO: 225253 - DNA, 122 bp, Homo sapiens
agccctttgtcacctggaagagagagttcctccgtgaacgtgggcccctcgtgggtggagcgtcatcctgttaggcccggccgacaccccaactgaccccagccccctctgcccacagacac

SEQ ID NO: 225254 - DNA, 122 bp, Homo sapiens
gcctctcaatgacagctcggacttgccactggtccgagctttcattggctcaaggatccccgccgtctatgacgctatttccctatgcccgtcacgctactgctaggtcgttgccaaggtga

SEQ ID NO: 225255 - DNA, 122 bp, Homo sapiens
ccgtcagaccgcgccagtttgaatgaaagctctacaagatggcggcggtcggggccgaggcgcgaggaggtgaggctggagcgcggccccctcgccttccctgttcccaggcaagctcccaa

SEQ ID NO: 225256 - DNA, 122 bp, Homo sapiens
agttgttaaaatgcaggttctatggggcctgggaggggacatttctatccaggagccagacgcggcccaggcccggtttgaagacctttgttttgaagaacgtggggtcagcgagttgatga

SEQ ID NO: 225257 - DNA, 122 bp, Homo sapiens
tgaagcctggagaatgtggcccggagtggggcagctcagctgtggacattgggggctgcccgggggaggcgcaggctggggccacggagaggacaaggctggccttcaggcagcacaagggg

SEQ ID NO: 225258 - DNA, 122 bp, Homo sapiens
agccaggtgcagggctcagggtgagcctggctgcagggcctcttggccctgtctacaccccgggaccaagcctggaacaaacgtttgcacaaaatgaagccggccccacccaggcctccctg

SEQ ID NO: 225259 - DNA, 122 bp, Homo sapiens
tgagggacgaatcacagacagaaacgcacgactcggctccaccatgcgctgtcagctgtgcgggaagcaccacgtgtagaaataaaagcatgaaagtgcctgaaagagggaattccagcacg

SEQ ID NO: 225260 - DNA, 122 bp, Homo sapiens
ggaatcctcctgcagggtgcgagtatgggacctggaagactacgagggaccgaagagacccgactgcactgtgtccgggcagaggcagcctccgggagctgatggacttgagggctggggca

SEQ ID NO: 225261 - DNA, 122 bp, Homo sapiens
tccttcccttcccaccacatctgtttatacaaaggagggccgctgaaggacaaacataaccgtgtttactgcgagtcccatgctgggcctggagctcagatacagatttgccctcaccatgg

SEQ ID NO: 225262 - DNA, 122 bp, Homo sapiens
attttgaggcctggctctgcttcctgttactgaggccagggagttaaccagcagggacctcgccgtctgttgagcggctctgcctctgtggtgggcgtgctaagccctgtgtccccttaggc

SEQ ID NO: 225263 - DNA, 122 bp, Homo sapiens
gaaaactctgggtcctcatttccccagtggtccttcttgtcctgataaattactcatactcgcaggaaaccctgacatatcagtactcattttgacatgcgagagggacgtaaggaaaaata

SEQ ID NO: 225264 - DNA, 122 bp, Homo sapiens
agccgtggggctctaaagaaagcattctttcaggatcccgccaaacttttgacaacaccccgtggatcggctggaggagcgcccgcctcctctgtcttatgattggttgttaggcctcgtgg

SEQ ID NO: 225265 - DNA, 122 bp, Homo sapiens
tttaagtttcattcacaagtgttttcttttggtttttcttgcttcagggctgactcggggcggctgcgctgcgttctctcccctgtgaactttgctcacgttttggactgggcagcatctcg

SEQ ID NO: 225266 - DNA, 122 bp, Homo sapiens
ccgaagctaaagcagcagagcgagaatctcccggaccgttccagcgcctcgcgtgagccccgcccaccgccgtcctgcgccgccgggcacagatgacaagtcctccaggaagccagagcgac

SEQ ID NO: 225267 - DNA, 122 bp, Homo sapiens
aaagcttgaaaacacaacgtgaaatttcttagtagtcatacattcagccaaaggggctggcgacgggtattttaatctctccgtcttaagtgatgcgtaggaggccatatctttgaccatcc

SEQ ID NO: 225268 - DNA, 122 bp, Homo sapiens
tctgagaggaggggaagcgggtgggcggagcctgatgctcagtgggcggggcctgagggacggtgggcgaggcctgttgacgggaggcgggtcctcgagcccacctccggctcatagtgccc

SEQ ID NO: 225269 - DNA, 122 bp, Homo sapiens
caccgacattaatgaccagctcattacatgttgaggtgtggggagatgggggtagaaccccgtcaacccaggattcgagtttagaaagactacaagccccaaaatgcaatttcacctcccaa

SEQ ID NO: 225270 - DNA, 122 bp, Homo sapiens
ggtgccagtcctgagctagggacggtcccttaccttcctctctgggaagctgacctcagccggaggcctctcctggtggtgcccctgagcagcaacctgatttctatcctcagctacctggc

SEQ ID NO: 225271 - DNA, 122 bp, Homo sapiens
gtgagtgggaaagggtcttaattgtgctgtctcatctgacgagcttgagtgttcacaccacgcagccacagccagagcagcacactctatctggggtggtgaattgtaattttaggcaaata

SEQ ID NO: 225272 - DNA, 122 bp, Homo sapiens
attctgtaataaaaaggaatgcaccattgatatatgcagcaattggttaagtctcaaaggcgtactgtcagtctgtctatatggacaatcgaacctcaaatagagaaaactatagtgataaa

SEQ ID NO: 225273 - DNA, 122 bp, Homo sapiens
ccgcgccagtgacagcgatggcggcggagtcggcgctccaagttgtggagaagctgcaggcgcgcctggccgcgaacccggaccctaagaaggtaagcgagggggcggcgcgtagcgggatg

SEQ ID NO: 225274 - DNA, 122 bp, Homo sapiens
ggacagagctcagaggcggcaggctccgcacaagaaggcgtgcatggttggtggccgcagcgtccgtggccacttgacacgtgttctgtgagcctgggattctactaaaagccagatgccgt

SEQ ID NO: 225275 - DNA, 122 bp, Homo sapiens
cgcggcgggaattagattcgaaagagtgcttacacaaatccgtctggccaccctgtgccccgggccagcgcgaggtgggggtgcgggcagggctcccgggcttgcggctgccacgcccctcc

SEQ ID NO: 225276 - DNA, 122 bp, Homo sapiens
ggcctccaaatacggcctcaaacagcctcccggcagtgtccaaggtcaacagcggctgcacgtgagtgccacacgagcgtgcacggctctttcagtaggtgtcagaaggcagctgtgacgca

SEQ ID NO: 225277 - DNA, 122 bp, Homo sapiens
gaggttgaggttttttgaatgtacaagtatggagaagggcactgccttcagaagcctgaacgtctcccctgagagggagggggtgcacaggactcaattgtttcagcttgaaaatgggggag

SEQ ID NO: 225278 - DNA, 122 bp, Homo sapiens
ggtaattaagacgaaggaaacaattctaggaggcacaacgtggggtggacagtcagctgtcggtggcttctgctgagatggccacaggactccaggttcccctgccgcagctggccacagga

SEQ ID NO: 225279 - DNA, 122 bp, Homo sapiens
gcccctcactcgctctgctccgagtcgcaggctcagtcctgccggctcatggcagactgacgtttcccggaatcctgcgcagcagccacctaactagttgagcagacggcaccggcgggcag

SEQ ID NO: 225280 - DNA, 122 bp, Homo sapiens
ggctaggtgtgtgtccccggactggcgtgggtcccgggccaggcgtggtcctgggcggcgcggcccgtgacaggacccgacgcctcctggtgggcatttcgctccaagccgggaccctcgga

SEQ ID NO: 225281 - DNA, 122 bp, Homo sapiens
acatatgtggccagaagctgccagcaagcctctatgtgtcctctcataaccctgacaactcgagtcgctaacaatatttccgttggagaaacttttataaaatattacaatcaattcaattg

SEQ ID NO: 225282 - DNA, 122 bp, Homo sapiens
caccgcatctggtccgagaagtatcttgtatttatatattgcaatgagacttctctctcacgtcttcacactaaagcatcatatccctccagttctgaatttctcttgagcttcacaatgtt

SEQ ID NO: 225283 - DNA, 122 bp, Homo sapiens
gtgtgcaagaactgacctctgccgttattttctataagccaacgacaccctctgcatgagcggaaacccgcttcaatccctgtagatcctgtccctgcgttcaatcagggtcatgtcaggcg

SEQ ID NO: 225284 - DNA, 122 bp, Homo sapiens
ctgggaggaaacatctgtactccaggatttagagacaccgacacgggagcagggcgcccccgtgtgcacagagccctgttctgcagctggaaaccgaacgggaccctgtggaagtcgcgggt

SEQ ID NO: 225285 - DNA, 122 bp, Homo sapiens
ggttatgacggatactttggccctaaataaagcctgggtgtatgagcctaggcaaggaaacgaagatcggagcagcctgggcgagggcggagagggagaggggctcacaagctgcctgggga

SEQ ID NO: 225286 - DNA, 122 bp, Homo sapiens
tggatcgaaatacaacataaaagtggttttctagttaatacaggcctgctgattttttcccgtgagtgcagcattagagatgaatctaaaaacatagctacaaataggtgtttattttgaaa

SEQ ID NO: 225287 - DNA, 122 bp, Homo sapiens
tcagctggttgacgcttcatttgtttgtgttctttttctttacagtctcctgaatatttacgcgttgctgaatctcctgtggacaaaccaccaataggccaggactgtcctgtggacagacg

SEQ ID NO: 225288 - DNA, 122 bp, Homo sapiens
ccaaagagaaagcccctacaataacaaagtcataatccttgaattatagccaggtccacccgatgcttagctcttttcctacttccccaaagtaggagataccccaaattcacttgcttgtc

SEQ ID NO: 225289 - DNA, 122 bp, Homo sapiens
tgcacatccaccaggcggggtaagtgccgcccgctcagcctgcaggtccgtggtggtgaccggggccccacgggctgagctgtccctgagccggcctccccatcctcctccttccccgccct

SEQ ID NO: 225290 - DNA, 122 bp, Homo sapiens
ccagggcttgcgggcgaggcctgttttaagtctccagtaaccgagcggaggcccggcaggcgcgacccgggctgcgtacgtcagagctgcctccgaagtggtaaaatgtgctgcgagaagtg

SEQ ID NO: 225291 - DNA, 122 bp, Homo sapiens
ctcatgtcaagccatgtcaggggacacaaagatggagtattctctaacctatgtgacactcggcataagggaagtacaagcactcaatatgtgagtttcattcccacagtctgtggtcttta

SEQ ID NO: 225292 - DNA, 122 bp, Homo sapiens
ccctcctcttgcagcacctcggcaggttcaaactcttctccgggagcgtggcggcgatcgcgaggtcacgtgatgagcatcctgctgcccaacatggcggagttcgacaccatctcggaact

SEQ ID NO: 225293 - DNA, 122 bp, Homo sapiens
aagatctcttcctatgccttggaagcctatgacttcatgatctattcatgaaaaatatgccgaaggctaaatatgcaatgcattgaaatttctgggaagaattcacatttaaaacagtttaa

SEQ ID NO: 225294 - DNA, 122 bp, Homo sapiens
gacaacacgttgcgccggctgatcttcaggtcccgctgcttgctgggcacgtaggcctcccgcagtgagatgaggatcgggtcggcatcccgcccgctcacccactcctcagcctccagggc

SEQ ID NO: 225295 - DNA, 122 bp, Homo sapiens
tccctctgtccattaacacattaccaacgccttttgagtattcctcccagtgcagggtgccgggaacccagacggaacaactcagcctctttcctcagggagtaagtctaagacctggcttc

SEQ ID NO: 225296 - DNA, 122 bp, Homo sapiens
gtagcggagcgcgtctcccgtgttggtgttgcccccgtggtaggcgagacgccgggcagccgccttgacctcctcctgcgagccaaagagtcccaactcgaaggccgtggtgggccggtcgc

SEQ ID NO: 225297 - DNA, 122 bp, Homo sapiens
gccgcacctctctgaccaggccccgccaccgcagcccacaagctgtccccaacctccacgcgcagccgcctgcccgcgactcccttcaagcagcctgtggtgggaaggacagctttgatttt

SEQ ID NO: 225298 - DNA, 122 bp, Homo sapiens
agtcttctcggtcacgttttctgttatatttgcctatgtagctgatgtcactcaggagcacgagcgaagtacagcttatggatgggtaagataatagactatatatattttttaaccagaat

SEQ ID NO: 225299 - DNA, 122 bp, Homo sapiens
gtagcagataatcaatcttgctgtgtccacccttgctattgacaggctattcaccaaatacgagtcagaaggatcctgttgaaatgcagctcagagaatggcatgaccgtactcaagaactt

SEQ ID NO: 225300 - DNA, 122 bp, Homo sapiens
gaacacccactgtgtgttgggcaccatatactaggcactgactgaacacctgctgtgtgtcgggcaccatatactaggcacttcttgcattgtcgtattgtgacttgtggttttctcttttt

SEQ ID NO: 225301 - DNA, 122 bp, Homo sapiens
gaagagagagatctgctggccagtgtaggggtccttgtagccagtgacggcgcgctcggccgacagcagcttgtggtgcagctcggggcccaccacaccctccttcacagcctcgttgacgg

SEQ ID NO: 225302 - DNA, 122 bp, Homo sapiens
cctgcttctggcctcatctagccccgccccaggcgagggcgccgcacccacaccgcgctgcgcagttttgttctgctccagctgttcgaaggtgatccaggtgagtgctagcacctgcgggc

SEQ ID NO: 225303 - DNA, 122 bp, Homo sapiens
aatcccctgacccgtgagctgtccccctctctgtggccctgggtctcgggcctgggccctcgcagctgctgggatgctttgctgcgacaacaccctgccttccacatgcagccgctgcactt

SEQ ID NO: 225304 - DNA, 122 bp, Homo sapiens
gatggttggcaagcagcatgcatccaactcttggcttcttccggcaaatcaactaactaacgctcagtgtgcaattccatatttaacaggacttccagcactgaatgtcaagtctggggaag

SEQ ID NO: 225305 - DNA, 122 bp, Homo sapiens
gactggacggccagaacgctctcagggatttcagctggccggccatatggccctgtgggtcgtcgcgcccgggccagggaccattctgtacataggatcgtgcttggctctcacggaacgcg

SEQ ID NO: 225306 - DNA, 122 bp, Homo sapiens
attaaatcagggcccttgagacttaggtgtcagatgcttttacagctcaagctctccaggcgactgcagtgtgcagccaagattgagcacccgtcactgaactgtgggagaatcactacaag

SEQ ID NO: 225307 - DNA, 122 bp, Homo sapiens
gcctgagggcctccctggctggcttctctcagtctccccaggctctggctgtggcagatacggttttccatcttggttgagctgtaatttcagagatttggggttgaaggggtagcagtgac

SEQ ID NO: 225308 - DNA, 122 bp, Homo sapiens
cccggggagggagggattctgcagctgcagcttggaggtccttgatgctgcattttaacgcgcatcgcaacgcctttggagtgacattaagtgcaaagaggcaaatgactaatccaaactat

SEQ ID NO: 225309 - DNA, 122 bp, Homo sapiens
tacaggcagcttctggaggagactgctggcccctgacactcatacaaggtccactagaatcgcaatcacttccattttcccagcactgtgtggttccagagtccttttaccggcatgactgc

SEQ ID NO: 225310 - DNA, 122 bp, Homo sapiens
tagaggtgtgtgaggtgcagagtggcatgtgtgaggggatcctgacccagggtgccagggcgtggcaggcatgaggggatcctgacccagggcgccagggcgtggcaggcgtgaggggatcc

SEQ ID NO: 225311 - DNA, 122 bp, Homo sapiens
ccttggagaaagtgaaataagacattagactttcagtaatctcatatggtgatgatcaatcgaaacctggagaagaaggccaatttatagaaattgtatctgcttcactgggtggctggaac

SEQ ID NO: 225312 - DNA, 122 bp, Homo sapiens
tgtgcaaaacgtttcggggtttccgggccagcggttccgggcgcgcctcgcgggcggcggcgcagaactacaacccccaggctccctggcgtggcggcacgtgggcccgagccgggcggccg

SEQ ID NO: 225313 - DNA, 122 bp, Homo sapiens
tcacataattgggagtccagcaatagggagggcttctgggtggacttaatccagtagcttcggtgacattccctgagaatgggaattctccacatttcccttggatctgcccttctccctag

SEQ ID NO: 225314 - DNA, 122 bp, Homo sapiens
cttctggaacgtcaggtatagaccttcctggaatcttctgggctcagagacccaggggtgcgggctcttaggctgagatggagcatctcagaccctagtttcttacatatatacattcacag

SEQ ID NO: 225315 - DNA, 122 bp, Homo sapiens
cgctgcatgctgggtggcggggagagaccgctctgaggaggtttggtctgtcggccacgccgtaggccgcggtgcattctgggtcctggcaatatggcgtcctccttgatgggctgatgaga

SEQ ID NO: 225316 - DNA, 122 bp, Homo sapiens
ggacggaggaggggcggcggtataatagcgggcgtgggggcggcgggctggcccggagtccgcgcttggagctaaccttttgtctcttctccgccctccctcgccgcctatgcaggaccgca

SEQ ID NO: 225317 - DNA, 122 bp, Homo sapiens
cgccgccgcttccgctctgccggagccgctgggtcctagccccgccgcccccagtccgcccgcgcctccgggtcctaacgccgccgctcgccctccactgcgccctccccgagcgcggctcc

SEQ ID NO: 225318 - DNA, 122 bp, Homo sapiens
tgggaggatccattcaaaccaagcacctccaagcttggcaaaggattgctctctgaatgacgccaggcctcacccagctgcttggaaacaagcttgcatgaaggtaggagggaaaggattgc

SEQ ID NO: 225319 - DNA, 122 bp, Homo sapiens
gagtgtagaagagctcgtcgtagacgggcttgtctttggccacgacccactcctcctcgtcggcgccctccttggcaccctccccgtagccctggttgaaggggccctcggtggtgccatcg

SEQ ID NO: 225320 - DNA, 122 bp, Homo sapiens
gccaatacaaagcacatcaactttcagcaagtttattattgggtttaaattctctacacacgatgcactgcttttgcctacacctggacagtgttcccactcactctccttagtatgatgct

SEQ ID NO: 225321 - DNA, 122 bp, Homo sapiens
tcacctctggatagcaatccttcgctaacacttgcaacatcgcggtcttcccacactgcacgtccccgaccagaacgagcttacatctggccacgactggctggggggcccgtctctccttc

SEQ ID NO: 225322 - DNA, 122 bp, Homo sapiens
ggggcggggcttggcacggcccgagggggacaggtgtccccacgccccgggcgtcgtgggcgggacaggtgaccccacaaaatccatacctgatggggtacaggtgccctgcatcactgctc

SEQ ID NO: 225323 - DNA, 122 bp, Homo sapiens
gccccagctccaatgcccggggcgccctcccacccagccctgatccaagagtccagggggcgcctgtgtctggctctatttatatggtcccccggcctacagctgacacctctttgggtccc

SEQ ID NO: 225324 - DNA, 122 bp, Homo sapiens
gctgctggggcatgggaagtgtgcacagccgaggctgcaggtgtgtgcagctgtgccagccgtactcgaggtgtgtgcagggtgtgtgtgaacacagtgcgtgcatgggtgcgtgtctgcag

SEQ ID NO: 225325 - DNA, 122 bp, Homo sapiens
gacgctctaaaggaagtgacctttaggggctgttactctcagaccaggcccagcagcacccggcgcatttacgtcggatctgacccctgcaagcaccggcgcgaccgcgctagcggctggga

SEQ ID NO: 225326 - DNA, 122 bp, Homo sapiens
tgcgtggcttccctggcacgctactcttacgacgtcacggtcaggtggtgcagagctggacggcaacgacgtcggacgcgccccttcttggaacaatgtcccaccacggaggagctcccaag

SEQ ID NO: 225327 - DNA, 122 bp, Homo sapiens
aggatttgtcttatttcccttagcacaacgtccttgagggacctcatcataatctgtatccgaatctccttcctttcaaggctgaatgttccacgtgtgtacagagcacacttcgctgatct

SEQ ID NO: 225328 - DNA, 122 bp, Homo sapiens
agctgcagcttgtcatatattagtcaattatcctaatgattttttccccactaaaaagcacgaatccaggttgctcttatattttattaagattttactttgtctactcacaaatattaatt

SEQ ID NO: 225329 - DNA, 122 bp, Homo sapiens
gtcaaaataatccaaaaaagaaagcaggaggaagaccacgattgcaaatgaaagtttcttcgtgagtgtggctttccttggcaagcagtgactccctccagtgttgattgcaggagtctcaa

SEQ ID NO: 225330 - DNA, 122 bp, Homo sapiens
tgcacccgctgcggggacaatgtacagtacgcaccacgccagctaggcctgaccgagccacgcatttacatcagtgacctgctggcccacacccagtacaccttcgagatccaggctgtgaa

SEQ ID NO: 225331 - DNA, 122 bp, Homo sapiens
ggtgcaggggagcagggaaagactagaagagggatgggccaaagaaggagaacgggagggcggattactgggaaaaaaattagaagacttagaggacagaaagaccgagtggagtcccgccc

SEQ ID NO: 225332 - DNA, 122 bp, Homo sapiens
ttggtgttggcaagaaagcaaacctctcctccccacgctgtccttaccccgcgtatccgacgagcctaaagtcataggtaagagatctgtagaagcgacgtcaaggtgtggttccctctgta

SEQ ID NO: 225333 - DNA, 122 bp, Homo sapiens
ccggcaccgggccgggactgggggaggcaggtaggacgcgggtcccgcaggccccgccgccgcctacggctttcggcttcatttcaccggctgcacccgggagcctagggccggtccaggcc

SEQ ID NO: 225334 - DNA, 122 bp, Homo sapiens
tcgcaggctgaatgtggcccaggacagttttgaatgtgaggagtttttgcttttctgtggcggacctgagacctggagtgagtgcacccacctccctcaggatcaggagtgaatgctttagg

SEQ ID NO: 225335 - DNA, 122 bp, Homo sapiens
cgcgggggatgtgggactacccggactgaggactgcgcaccggaagtagtggcggcgctgcgtaacgtcgagaggaagtgcctgatgccgcggcctgtgattgggagttgctggagtcggtg

SEQ ID NO: 225336 - DNA, 122 bp, Homo sapiens
caggggggttgttttcgctcctcgacgctgaatttagaaaccagaggctacaaagcgggccgagacttgggttccccaggtccttggtggggaggtttccaggaggctcgggcgcgcccccg

SEQ ID NO: 225337 - DNA, 122 bp, Homo sapiens
gaatgtgaaatccagggagactgctcagggccatgtggtccagctaaccatacccagtgacgtggttctttttttgtaagccctggaagttaggaatttgaatttgttaagaaaaatgaatt

SEQ ID NO: 225338 - DNA, 122 bp, Homo sapiens
caatagacacggactttgttggaccagaagccaatgaagaattacgtggaggagaagcggcgataatctgtttgaggatgtaggcactggtgtgaaggaacatggccctgtatcagaggtgg

SEQ ID NO: 225339 - DNA, 122 bp, Homo sapiens
cagggacacacgcaggggctgacagctgtgctggtgctgataagggaagccacaaggagacgatcgaggagagagacaagcggcagcagaggcagcagcggcagaggcagcaccagggctgc

SEQ ID NO: 225340 - DNA, 122 bp, Homo sapiens
agagctgtattctagtggatctgccctgttgctaacccaccagaaggaaccagagcagaacgtgcccttttggaaataactgggaccatgaagagactgtcagtgttacagctcttttagaa

SEQ ID NO: 225341 - DNA, 122 bp, Homo sapiens
gcctctggcagggccagggattgctggcacgcaccctccagagagctgtggcaggagccgcgttacgagctgcctccttggagaaacagcctcacatctgtgagaagggcctgcggtggagc

SEQ ID NO: 225342 - DNA, 122 bp, Homo sapiens
gattgacaacaattttgtttacacaccacacgccctgggaaagccacacaccagtgccggcgttccagacgcttcctctgcgcagagccggcccaggacgggggcggggcgggccctgttgc

SEQ ID NO: 225343 - DNA, 122 bp, Homo sapiens
ttctcctcgataagatctcgacataagaaagagcctctggccacggttcctcccagtgctcggcgtttctagggctgtgcttaatcgcccttcttttgggttattcggaaagtcctggattt

SEQ ID NO: 225344 - DNA, 122 bp, Homo sapiens
ttctatgaaatttccagcagaggtttccaagccagggaggttgaggtaggtcagggaggccgcaggtgcttatctaagtggcactgccacagtctttgagtttccattactggcctcctgga

SEQ ID NO: 225345 - DNA, 122 bp, Homo sapiens
tgcacagaccgtcacgtccattccctctctggccccagccccgcgggaagaaaacgagggcgttcagcctggcagttcattcacttattaggaagaagacatcccacacccccacccagcac

SEQ ID NO: 225346 - DNA, 122 bp, Homo sapiens
tgagcctcgggcattcctagctggagagtttggctgggggtcgctacagactcttcagagcggctgcagcaggacctcagggtgatcgcgggaccgcggggcggggcgagtggtgggatcct

SEQ ID NO: 225347 - DNA, 122 bp, Homo sapiens
agctatgctggctttcggtacccaggatgaaaaggctggtcctccccttgacttggcaaacgagaccccagtctccaagggtgttagccgctaccagtcagagacaacaaagtgctggaagg

SEQ ID NO: 225348 - DNA, 122 bp, Homo sapiens
cggccgagggaggggtgagtggttattaataaacaagtgtattgtgtggcgttccattcacggcactctcagaggacgtggtgggcttgagataataaagccctgtttatgccacggagggc

SEQ ID NO: 225349 - DNA, 122 bp, Homo sapiens
cctcattttccttatgtggacaacgggggcggggtcacagcagcccctcgggcttatagccgggttgttctttccttaaatctcctccctctgccaaaataaaaaaccccacagggcaaggc

SEQ ID NO: 225350 - DNA, 122 bp, Homo sapiens
gcaagacatgagcctcaaattatgccattaacagaatttggatgagactacttttttatccgctttttgtttgttttatacaggccaactgtttgctcactgtattctgactattccataaa

SEQ ID NO: 225351 - DNA, 122 bp, Homo sapiens
aggccaggggtgttcacagcacagtgtccacaccggggcggggggcaccctccgaggaagcgctcacgccatgggggaggacatggaatcccgtcctggtgtctgtgctggaaggtgccctc

SEQ ID NO: 225352 - DNA, 122 bp, Homo sapiens
ctccctccctccgtcgcaaagccctcgagcccgcccggccgccacgcttcagcaaaaggtcgtgcgcagcggcccacactgaagactctccatctgctcccacacctgccccagctggccgc

SEQ ID NO: 225353 - DNA, 122 bp, Homo sapiens
ggcctggatgtctgacccacagacactgtgcagctacgtttgtttgaaggcactaaactgcgggcaatttgttacacagcaatcgacaactttctgttccctatttctgttctttctcttca

SEQ ID NO: 225354 - DNA, 122 bp, Homo sapiens
gaggcgaagcgcggcggcgaggtcagagcgcggcggccggcgccgcagccgcacccccggcgtcctaccttcatgtcgctgatgatggtctggaagaggcctccgagcgcgctgcattcctt

SEQ ID NO: 225355 - DNA, 122 bp, Homo sapiens
agcagactaaaaactggacttgaataatcactaaggtgtaaaaaatgtgtttgcatggctcgggtactaaagttctataagaggaggtaggaatggaaaaatctgccaagcattaaataccc

SEQ ID NO: 225356 - DNA, 122 bp, Homo sapiens
aaatgatacccctgcattcctctcatactaatcaaccatttgtgaatctgtctcaaagaacgcattcctgtgccaagctacccttagcacagccctgaagctgctgctatcctttctgtccc

SEQ ID NO: 225357 - DNA, 122 bp, Homo sapiens
aaagctgaaacagcatgttttctgtgtaactgagcaaagctggcagtgaggcctgatcttcgcatttcctttctgtatcacctaagccacagactggcgtgatacagcgagtctcatcagat

SEQ ID NO: 225358 - DNA, 122 bp, Homo sapiens
ggccttgtccctaggaggacctcagccccccgcttaaaatgcctgcctgaaaaagctcatcgctgtcagaaaaatttactgtgcatcccagcccaaacctagcaatagacacaggcccctga

SEQ ID NO: 225359 - DNA, 122 bp, Homo sapiens
atcagcttcggtagatcctgccggttttcccatgcgctgtgcctgtctgcactccaccaacggcgagcggaccttccggtagttaaacatcttcacgaactcttggactttcctgcacacac

SEQ ID NO: 225360 - DNA, 122 bp, Homo sapiens
tttaacatgaagccatgagggttgcctggattcatgctggtaggtaagcaccaatccattcggttgcctcagacaggacagaaaccattccctctaaaaaaatcgtttactttgacgatagg

SEQ ID NO: 225361 - DNA, 122 bp, Homo sapiens
gggcggggccgcgcgcgcttacgggattggggcggggccgcaagcatttcctggatggggcggagccgagcggatttccgggatccgggcggagccgcaggaggaggcgggtggttcctgct

SEQ ID NO: 225362 - DNA, 122 bp, Homo sapiens
ggcaacctgaccctatttgccagtgtccgcttttaattttggtcgctaagggcaagcgcccgtgacaaacatggcggcggcagcctcaggcgcagtcacctgccggagctgcgcccgggggc

SEQ ID NO: 225363 - DNA, 122 bp, Homo sapiens
aattgaaggttagggtgcctgacagtctgcgggatcgaactgggaggcaaattcagatttcgctgggggaacggagtgcgaagtgtcagggtagctggacgctaaactggcgcagctgcgcg

SEQ ID NO: 225364 - DNA, 122 bp, Homo sapiens
atcaataaaaataccatatatgaaatatatttagtcactgattcctttatatcttgatgtcgattttgaactcaattatttggggtgtttgagtggcctgaatagtagaggagacttctaca

SEQ ID NO: 225365 - DNA, 122 bp, Homo sapiens
atgtctgtgaggagtaaagccatgcattaaagggctgcatgtggacttcatgaaaagcgtcgctgtgtctacactctctttaatgtaggtttggagagagaggatgactttggttggagtac

SEQ ID NO: 225366 - DNA, 122 bp, Homo sapiens
cgagggccccgggatcccgcagtcttgaaatgtgacgggaagtccgaggcatcacgaagtcggagacgcagggcgcgtcgtgggtcccgggcgccgaacgccagctcgccacggcccagcag

SEQ ID NO: 225367 - DNA, 122 bp, Homo sapiens
gtgttaggattacaggtgcgagccaccgcgtctggctgatgtcttctcatgatgagattccggttgtgccttcctggctggaatgccacatagatgatgctgtgacctgcgaagaccttcac

SEQ ID NO: 225368 - DNA, 122 bp, Homo sapiens
gtaaaggccaaacccctgtagggggcgctgggaaatggacactccaggttggggcggaggcgaggcttcgttctttcttaaaggagacgtacccaggtttctaccgattgctgtctgccagt

SEQ ID NO: 225369 - DNA, 122 bp, Homo sapiens
ctgctgagcccgtactctctctttggctcaggctaggcctcttcttctccttggacttaacgtggcttaggtccctgagtcggccaagacctcccagaggagacctgcccagctgccaccac

SEQ ID NO: 225370 - DNA, 122 bp, Homo sapiens
gtggggttgaggtcgtgtggacgtgggagccggtggctgtctctccggcagctcgggccacgcgcccctccctcacgcgccccaccctcttccaggaggtggcccgagcagggcgggtcccc

SEQ ID NO: 225371 - DNA, 122 bp, Homo sapiens
cgctgccgccgtcctcccctgtctacccggagctgtctcgagctgagccccctaccgggccggatcccgaggtgagtcccccacctgcggtcagcccctgcgggcagccaggtcccgaggtg

SEQ ID NO: 225372 - DNA, 122 bp, Homo sapiens
taacttgaacactacacaattttccttgaaaacatcttcaaacttcttgaatgacaactacgaagtatttctagttattctactgctaacaatgactcacctgccctaagaagaaaaagact

SEQ ID NO: 225373 - DNA, 122 bp, Homo sapiens
tcgattgaacccgggaggtggagtttgcagcgagctgagatcgcgccgttgcactccagccgcctgggcaacaagagcggaacaatgtctcaaaaaacaaacaaaaacaggccgggcgcagc

SEQ ID NO: 225374 - DNA, 122 bp, Homo sapiens
gaaaatgtgaagagcagaatgctttaaacatgtgggctttgataagtggaattatgaccacgtgaagtcattcccagaagcaagagtctctcccaaattctttagattttttttttagcatc

SEQ ID NO: 225375 - DNA, 122 bp, Homo sapiens
cggggaccggccctaaaaagagcaggaaatcttgtttaccgcccgcggagagaagccgatcgagcctttgtctggaaagtcagcatctccggctccggctgcaatgtgttcctggtgacatt

SEQ ID NO: 225376 - DNA, 122 bp, Homo sapiens
ggacataacctcactgcctgtcggaggctgggccaggcctctgttctgcagggacaggcccggagccaccatctgacgggcctcccctgtggggaactggtcctgggcttcccagctcctcg

SEQ ID NO: 225377 - DNA, 122 bp, Homo sapiens
acctaatgagactctcgagaggaacataaagttaaacacatcactaaagggcctacaaaacggagtaaagcccggagatcgggtgatctggcagcccaggcaagatcgaggaccgcgactag

SEQ ID NO: 225378 - DNA, 122 bp, Homo sapiens
acccctgcccaccctggctgaggccagaatcagatgctttttcattgtgtttccacaatacgttctgcacacatgtatcccacggaatactagcgagttacctgctttccctcctattcact

SEQ ID NO: 225379 - DNA, 122 bp, Homo sapiens
ctaagccaagggggagaaagttggggaatccctcttgaattccccagaacacttaggtggcgccgggctttggtgcacgcgcgcagggcatgcggacaggcaccggagaggctctattttgg

SEQ ID NO: 225380 - DNA, 122 bp, Homo sapiens
gatacgtgcgccatctgcagggtccaggtgatgggtaagcgctgcacgcgagtccagggccgccctgcggcctccgggagccgacctcggggttgggaagggacgggcgtccgtcagaagcc

SEQ ID NO: 225381 - DNA, 122 bp, Homo sapiens
ttgtattttattttttctgagatggagccttgctctgttgcccaggatgcagtacagtagcgcaatcttggctcactgcaacctctgcctcttggattcaagcaattctactgcctcagcct

SEQ ID NO: 225382 - DNA, 122 bp, Homo sapiens
ggggaagaaagcgggaggtctcgaagctggctttgtagccgcgccgcgacgggcagcccccgcgtggctcccagactgccctatcattacctagggcagggcaccgccccctctgtcgctcg

SEQ ID NO: 225383 - DNA, 122 bp, Homo sapiens
accagcctggccaacatggtgaaacctcgtctctactaaaaatacaaaaaattagctgggcgtggtggtgatcacctgtaatctcaggaggctgaggcacgaaaatcacttgaagctgggag

SEQ ID NO: 225384 - DNA, 122 bp, Homo sapiens
agctggctctctgcagacacacctggagggagggtttgggaggaagggggctggggcctccggtctgaccacctctgaaacaccatcccaggctgtctctgaggttcatgtggtttgggtca

SEQ ID NO: 225385 - DNA, 122 bp, Homo sapiens
ccggggcgaggccctgcgggagccgactgggaaggtctggaactctgacaccccgccccgcgagctgtgctctcagtctcatgtcatcccaccacaaggacagatattaagtaccatatatg

SEQ ID NO: 225386 - DNA, 122 bp, Homo sapiens
aacgccagccccagccagtcacaccaatgacaccatcttttggagtttacattaaaatgtcgatcataagactggcaaaacagactatttgtagcaataagatgtcaaattattaagaagac

SEQ ID NO: 225387 - DNA, 122 bp, Homo sapiens
cgagagctaaggccaacttaagcttggtggggtgaaggcaaggcgctgatgtttctaatacgttgaaaaggagaaagggaacatcacagagaggacagcacagaagttaaacatcttagatt

SEQ ID NO: 225388 - DNA, 122 bp, Homo sapiens
gggtaggaccctcggagccaggtgagggatataatctcgtggtgcgccgttttttaagcccgtcggaaaagcgcagtattcgggtgggagtgacccgattctccaggtgcggtccgtcaccc

SEQ ID NO: 225389 - DNA, 122 bp, Homo sapiens
ggtttgctgcgcggagctcagggcgtggcgggctggtttgggcccgaatccggccgggggcgccttgcctcgaacctctcggggttcaggctgcctgccaccccgagacccgggagacatag

SEQ ID NO: 225390 - DNA, 122 bp, Homo sapiens
ggattctagaatttatgtcttgtgtggtaacatttcagccggtgggtggcggggattaggcgtgaagcggttcagcaggcagaggttctcggacgccctccggcgaagccacctgttgatgc

SEQ ID NO: 225391 - DNA, 122 bp, Homo sapiens
cgcagagaggtaagcccgggctgcagaggggcggggcgggagctggcccggactccacatcgcggtgcccaggaagccgccaggcgacggccgccggaaaacctggttgcgaggggaggtgg

SEQ ID NO: 225392 - DNA, 122 bp, Homo sapiens
tctttagggggaatgggtgttgcaggcaggcccagctggagaggagcagcgggggccttgcggcagggcaggaagagacatgtaagctcccactctggtgtgcctctctctgtgttccagct

SEQ ID NO: 225393 - DNA, 122 bp, Homo sapiens
ggcattcgggcaaggcgagtcgcggtggcctctgaggctcgcagccagcacagcggggctcgttaaagtctgggcaatttctggaactcttcccacgggaagttttccggggctgccttccg

SEQ ID NO: 225394 - DNA, 122 bp, Homo sapiens
ttgcattccattgagacagatacatttctcagtgcttaatttagttaagtgagatgggggcgggaaagaagagaaaatagagagacagagaatcatggggttttgactttacgcgggagtca

SEQ ID NO: 225395 - DNA, 122 bp, Homo sapiens
ccatcggctacggccccatggccaggggacgcacacccggatacgtgttaccatcggctacggccccatggccaggggacgcacatgcagatacatgctaccatcaggtacagccccatggc

SEQ ID NO: 225396 - DNA, 122 bp, Homo sapiens
cctataattggacaagtctgggatccttgagtcctactcagccccagcggaggtgaaggacgtccttccccaggagccggtgagaagcgcagtcgggggcacggggatgagctcaggggcct

SEQ ID NO: 225397 - DNA, 122 bp, Homo sapiens
gccggccgggcgcaggcccggagctggagctgggcacagctggcagcccaggtggggccccgcctgaggccgccccgggggattgcacaagggccccgccgcccagctctgaatcacggccc

SEQ ID NO: 225398 - DNA, 122 bp, Homo sapiens
ctcgggtgggcttgaacctctcccatccgctcagcttggacccgaccccggctctgggcccgaccccttggccgacgtgcagtgtcctttcggcaaagcttccgttgcgtttccaaccccac

SEQ ID NO: 225399 - DNA, 122 bp, Homo sapiens
ggaggttgcaaaaaggctccttgacactttttgctcagaacttgaccctgagcttaatctcgccgtaaagtgaaagggttcttgcgcccccacagcagcccggggcagggtcaccctcgcga

SEQ ID NO: 225400 - DNA, 122 bp, Homo sapiens
tcccagaacgcagcacccagttgctttgcacgccaggccagtcctggggaaacggtgcaacgcttgtctgggcgtcgaggaggctcccttgcggtcctccctgggcccttgccagtcccaag

SEQ ID NO: 225401 - DNA, 122 bp, Homo sapiens
gcattcagcacggtggatttccctgagctctgcaagccaaggatagaaagaacaaatagccgtttgtctccaagtttctcagagaccttgtcaaaaacagctgccacccatgttagaggtac

SEQ ID NO: 225402 - DNA, 122 bp, Homo sapiens
gttgggccgggtgtcggcgctgggtccagctgtccatccgactgtctgtccatggggtcccgtgtgaggttctaggccagctgccgtttgccttccagctgctgcggactctggagcgtgag

SEQ ID NO: 225403 - DNA, 122 bp, Homo sapiens
cctcttcctgcaggggatctttggaatgggggaaggggaccaaagagtcaccctgcccctcgacatcaaccaacaaagagagcacagatgagaggaaaaacaggtttgtcaacagatccccc

SEQ ID NO: 225404 - DNA, 122 bp, Homo sapiens
cgcgcggccgaattgggatctgaaggcagcggcagcgtctacgcaagcagcgttctggagcgtcgctctgccaccttcccgcgcgcagttccgcgcgagccgcaggacgcgggcgctgtggg

SEQ ID NO: 225405 - DNA, 122 bp, Homo sapiens
gttatggatttaagagtcctctaggggtcctcttggcttttcaaagccaggcagcttctccgtggctcccatcttccccagttgggctccgtgagcaccctctatctgacaccctcctgtca

SEQ ID NO: 225406 - DNA, 122 bp, Homo sapiens
cggtaactgctgccatccattcaactcgtccgctggaactggaagtcagactcatggcgccgtcgcttgcaaggcgtgtgcactaggataccgagcacaaacgggtttgcgcggccagcgag

SEQ ID NO: 225407 - DNA, 122 bp, Homo sapiens
cactggctttctccatccttcccctgcctctttgttaggttattttagacagagcagcctcgccctggcgcagtcccattggccctgatggggacaaggcaagagaagtaaggggcagagtg

SEQ ID NO: 225408 - DNA, 122 bp, Homo sapiens
atgccaagtgcaacggctactgcaacgaatgctttcagttcaagcagatgtatggctaaccggaaacaggtgggtcacctcctgcaagaagtggggcctcgagctgtcagtcatcatggtgc

SEQ ID NO: 225409 - DNA, 122 bp, Homo sapiens
agttccaagaagaaaactgtcaaaaccaaaactgaaattgaagattataaatcagaatagcgtggccatccttcagacccctccagacatccaatcagaacattcaagggatggtgatatgg

SEQ ID NO: 225410 - DNA, 122 bp, Homo sapiens
agacccgctctccaggaacccatctctgcccagcggcgccctggcaccgcaacctcgcctcgcagccccgcggaccaacacaggccccgcccccagagccgtccggaaaacctggaccgtgg

SEQ ID NO: 225411 - DNA, 122 bp, Homo sapiens
actcccaatgccagcattctggggtttacccctagaccactgcactcctggagccctccccgcctttgcaggaaaccctcaggggtcagccaggaggccctgcggagacagggctcagccag

SEQ ID NO: 225412 - DNA, 122 bp, Homo sapiens
ggaaacattcccgagatacctatttttcctacagagaagtcaagttatttttcctaccttcggtccttagttctcattctccaaggaactcaacagtcctgagcaacactgaggtctcaggg

SEQ ID NO: 225413 - DNA, 122 bp, Homo sapiens
ataactatttataaagtgcataccatgtgctgggtgctcagaatacaacaatgagcaaaccggatgaggtctaggtcgccttcatgaagccagaggcaagtggggagatggccaggcatcaa

SEQ ID NO: 225414 - DNA, 122 bp, Homo sapiens
ttcttcttaccgccaccaacccgggtacaccatagagagcgtaaaccgagaccagagaggcggctgcctctctatggtaacgccccgcgcaggcgctggcctggccgtgttaggcttcgctg

SEQ ID NO: 225415 - DNA, 122 bp, Homo sapiens
tctgttgttttaagcaactacgtttgtgataatttgttatgacagtcctaggaaactaaccggataccctgagactcaatagttccatttctagatctactccctagagcactgggtcacca

SEQ ID NO: 225416 - DNA, 122 bp, Homo sapiens
cccctaggtccacacagtgatgccatgggggacccttgccttccacacttgcaggtgtcacgttttgcagggaggtgtttgggccttgggctcagccactgggagacagttgggacctgagg

SEQ ID NO: 225417 - DNA, 122 bp, Homo sapiens
tgcaggaagaaatccacagctcgcactgggtagtgagcctgtcctggggcagagctgtaacgtcacaggcctgcactttcagcaagaccaacctcatttgaggtataaaaagaaaatgaaga

SEQ ID NO: 225418 - DNA, 122 bp, Homo sapiens
tcttctgtttgaaaggaggaccagactgtctctccccattcccgtgttgaaggccatccccgaaggcttcgtgtgtgactgatgaggaatcaagcagtgaacgtggcatgcaggtttcatgt

SEQ ID NO: 225419 - DNA, 122 bp, Homo sapiens
gcccggttgtaggccttgatgagcaggccagctgagttgtactcaaagatatcaccgccccgctgcctcaggaagccatcctcatccatcttgtattgcacgtcacccagccgagtgatgcg

SEQ ID NO: 225420 - DNA, 122 bp, Homo sapiens
aggagggcggcagcactggcagtgctggcagtgacagcagcaccagcgggagtggcggggcgcagcaaagggagctggagcgcatggctgaggtcttggtcaccggggaacagctacggtaa

SEQ ID NO: 225421 - DNA, 122 bp, Homo sapiens
aaaaacgaaaaaaccaaactgactaaaacgtgcacagaaacacgattcagacagtgggagcggggtgatccctcttccctggaaggagcctggagccccactgccggccccggtcactttag

SEQ ID NO: 225422 - DNA, 122 bp, Homo sapiens
gtttgtggcttccttcccggcacctgctgtgtcctcggggtcttcggtggccgctcccatcgtggacagaggccaacagaggccactttccatgatacacatgttcgtcttggtgttttccc

SEQ ID NO: 225423 - DNA, 122 bp, Homo sapiens
tctgcgcgcgcagattcgtgcagaccaggaagcggatagcgtggagtgacggtgccaccgcggcgcgtgagtttcgccctgtcttgtattaagtctgctcttccaggttcctggcgcttctg

SEQ ID NO: 225424 - DNA, 122 bp, Homo sapiens
tctgtcaggcacgcaagcccacctcaaattgctgctcctttgtgaagctttgcctctgttcgccacaggtaactcttacctggcctttgtgtggcctccctttcaatgtagaattctcgtgt

SEQ ID NO: 225425 - DNA, 122 bp, Homo sapiens
gtagcacacttttgataagcgctgtagtgaggatggatcatgataatatgggcctggctgcgggacaaatgacccatccatctggagaagcgagggcaaattctggatgcggcgatgccaga

SEQ ID NO: 225426 - DNA, 122 bp, Homo sapiens
acaaggtgacgtatcagagccttgagggtgggagctccccaggttgggaagggacagacacgtgggccaatcctctggacaggaatagagaacgaggaggaaacaagcgcagaagctggagc

SEQ ID NO: 225427 - DNA, 122 bp, Homo sapiens
gacttagacagcagaatgaactgacctctaattagagcagaaagaagatagatgttgatacgcataggtttgtatatttgctttctggaaaatgagagtatttcctttgatgtcttctgtat

SEQ ID NO: 225428 - DNA, 122 bp, Homo sapiens
aactccccctcttctcaaactcggggccagagaacagtgaagtaggagcagccgtaagtccgggcagggtcctgtccataaaaggcttttcccgggccggctccccgccggcagcgtgcccc

SEQ ID NO: 225429 - DNA, 122 bp, Homo sapiens
tgtttgcaatgttggctgaacattaaaattgcatcattggtttcctctctcacttgttctcgttttttattttattgttattcagtgcaaaacaaaaagctgtgatggaaaaagacaataga

SEQ ID NO: 225430 - DNA, 122 bp, Homo sapiens
caggttcacaccagaaacctccaggtttccctgtgaaagcaggtgggccttgggaagactcgcctcatttcccatcttccaaaggaggatggccctcaggatgggaaggctctggatgggtc

SEQ ID NO: 225431 - DNA, 122 bp, Homo sapiens
atagcattcggcagtggacaaggagtaggcggacccgaacctgaacctgacagctgatgccgtgaagtggacacttgaagttcttggtttggctttagggagcgtttagggaatgtgttagg

SEQ ID NO: 225432 - DNA, 122 bp, Homo sapiens
gatcagagacaggcaggtgttgtcctgctcctaggattggcccacacagagggtctttgccgacacattttcagttttcaagataaatcggtggaagaaatctgaagttctcactgtttgct

SEQ ID NO: 225433 - DNA, 122 bp, Homo sapiens
ttattgttcactcagtagcaacaggaaacacagaatttgtgcaaaaaataaacaaagcaccgagagtgctacccccaaccacagcaccctaaccaggtgaacttacggcttctggcattagg

SEQ ID NO: 225434 - DNA, 122 bp, Homo sapiens
tccctcctgtaaattaattaactgacacactgaatgtgtgttcaccaatactgactcgaacgtattttgttagcacgtgtctccatagccctgggcaccctgagaacgtttggcttctggtt

SEQ ID NO: 225435 - DNA, 122 bp, Homo sapiens
aaggcgcaccggatggcgtaggacatctgcatggctctcggggctcggggcgcgcagcaacgaccacccggccacagactacgccagcggccgcaagcccggatttaccgcagcctgccgag

SEQ ID NO: 225436 - DNA, 122 bp, Homo sapiens
tcggtggtgtggtggccccggggcagccgcttcatgaagtggacctcacgctggtgctgccgcgtcttggagcccttgcggggccggcccttgcgggtgaaggccatgtaccagccctcgta

SEQ ID NO: 225437 - DNA, 122 bp, Homo sapiens
tccatcccttcttccccagttccctcccacgaggctgatttttcctgctgtttcctgccacgtccacacataagtcaaagataaagtctgctgggaagtatgtgggttttttttcttttctt

SEQ ID NO: 225438 - DNA, 122 bp, Homo sapiens
ccatttcccgaaaataaatagtaaattgtcactgttccagatataactgctagattgaaacgcacgatttctcctctcactcgtaaaaataaataaataaataaataaaatttaaataaacg

SEQ ID NO: 225439 - DNA, 122 bp, Homo sapiens
ggcatactgatctgttcatagaaaatggtatttaaatgtgcaaatgcatgattatgtccacggaaagggtggttcatactgcacaaaagcatcaagtttaagacttggataacctgtttcgt

SEQ ID NO: 225440 - DNA, 122 bp, Homo sapiens
ttcagcatcacctgccacttcttctcaatctgaagccactaagaacgatcaacaccagaccgttaaaacataaaccagtatgggccactaaataattcgtaaatatttcaaaatgtatttca

SEQ ID NO: 225441 - DNA, 122 bp, Homo sapiens
cttatttccctcctgcccccaactctgtccttgttcgcagatatgtttattctcaatcaccgaggtaaatcattgaggtaaaaattaaaaggataatttaagagtgaaagaaaatgtggttt

SEQ ID NO: 225442 - DNA, 122 bp, Homo sapiens
tgtgaaaaaataagactctggtttaacatcaagttgattgtgtttcagcccagactctctcgccaaggggtcactattttaaacgccattgcccagaatgtgaacgattccatgtgtgtcca

SEQ ID NO: 225443 - DNA, 122 bp, Homo sapiens
cccggggggctgcagcccggccagcgggtcctctacaagcaatcgatcgcgcagcgcgcgcggaccatggcgctgtacaaccccatcccggtcaagcagaactgcttcaccgtcaaccgctc

SEQ ID NO: 225444 - DNA, 122 bp, Homo sapiens
tggtggcgggcgcctgtagtctcagctactttgggagtctgaggcagaatggcttgaacccgggaggtggagcttgcagtgagccgagatcgcgccactgcactccagcctgggcgacagag

SEQ ID NO: 225445 - DNA, 122 bp, Homo sapiens
tctttgcactgcatcgcggcacttcctgcggggtggggggcacaatgggagaagcatctgcgtctaatgctgctttacttttgaggccagaaaaatgggaaggctcccctctgactctggaa

SEQ ID NO: 225446 - DNA, 122 bp, Homo sapiens
acctcgtgatccgcccacctcggcctctcaaagtgctgggattacatgtgtgagccaccgcgcctggcctaggagtagtattaagtggcccaggcaagaggaacatattcagactcggagga

SEQ ID NO: 225447 - DNA, 122 bp, Homo sapiens
tcaggtcctccgccgagacctcgctgcacttcgcaatgagtcttttggcgtcaggtttggcgggtgcagcctggagaaagcacttctgtaaaatcgtgcgtgttacatggaaaggcctgaaa

SEQ ID NO: 225448 - DNA, 122 bp, Homo sapiens
gagaatttgcccgtatttgtaacatcctcggccctgggtaaaggggctggccaaggggggcgagtgaagcatccgccctgggttcctctcctcctagagtgttaaactcagtcgagtccggg

SEQ ID NO: 225449 - DNA, 122 bp, Homo sapiens
agtttaagattatggtaaatccttccctgcagtacctgttaaacaatgacctcattcttacgcagatttaataaattttttttccactattattttctgcttgttattagtagcattttgat

SEQ ID NO: 225450 - DNA, 122 bp, Homo sapiens
aaggcgaggctgagagcgagagcagcgactccgagtccctggacatggcccccagcgacacggagcggactgaggggagtgagcgttctctgcaccaaacaacagttattaaggccccggtc

SEQ ID NO: 225451 - DNA, 122 bp, Homo sapiens
ccagaaaaaccgcgaaaaccaggcgttcagctttctgtacgagccagcccaacagccaagcgtccaactgctactgacagaagctggaggagttccagaaagccaaggccggctccacaggc

SEQ ID NO: 225452 - DNA, 122 bp, Homo sapiens
tatttaatgagatacctgcattcactcaccccctctcccgcaaccaccccttcagcaagtcgcgctccacccaattaggaggggctttaggctgggcctaaaaagttgggccaagaccccac

SEQ ID NO: 225453 - DNA, 122 bp, Homo sapiens
gtccgcacggacggtgttagactcggtgctgggtgggttgacagaggttccctgcaggtccgcacggacggtgttagactgggtgctgggtggggaggttccctgcaggtccgcacggacgg

SEQ ID NO: 225454 - DNA, 122 bp, Homo sapiens
gcaggggcaccacctcgaggaagtagaagcggttggggccgcccatggagtacacctggacgcactcgggcaggtcctccccatactccacggtgcagcggccctgcacagccttgaagtcc

SEQ ID NO: 225455 - DNA, 122 bp, Homo sapiens
gagtagaatctctttcgtccctgtgccagttatcaacatactgtctcccagctacaaattcgcctctcagctacaaattcacccctcgttgcaccccacgccctacagaaaatacacctcct

SEQ ID NO: 225456 - DNA, 122 bp, Homo sapiens
gtgtcgactgggcagggccctaagcttttataggaagtgcattacaatcaggtcggccatcgagaccgcatactccggggctaccggcttatgaacgaagcgggaggccgaggtgcggcggg

SEQ ID NO: 225457 - DNA, 122 bp, Homo sapiens
taactcatgaaattccttcactctcatcatgttcctcttaactctggttggaaatgtgatcgagcgtgaagggtgccaaccatgaatcactataacagccccctttatttctaaattccaga

SEQ ID NO: 225458 - DNA, 122 bp, Homo sapiens
ttcagtaacttgcttaccaaattcttcccggctggtggtgatcggagccattttttactgcgtgttctgtccgaggtgctgaagggaaaactgcctggctggattcacttgcctggatctca

SEQ ID NO: 225459 - DNA, 122 bp, Homo sapiens
taactaaaagagggaaggcagagaccagggctggggccggggccgagagggcctagtcagcggctaaggaggcctgggaggacaaagaaaaatggtgcagaacagcatccgccatggagctt

SEQ ID NO: 225460 - DNA, 122 bp, Homo sapiens
gcttcatctgcctcctggacttcgagcggcaccttgacaggatagcccgaggcagcacggcgttcccgcagacgctgggcctgccgctgggcctcaactcgcttggcttgcagcttgcccag

SEQ ID NO: 225461 - DNA, 122 bp, Homo sapiens
gactctaagacaagttatttcgcttctccgagcctcagctcttcatctgggaaatggggacgagatgttttactctctcagattctagagggcgataaatgagtgcatgcccaaaatgcctt

SEQ ID NO: 225462 - DNA, 122 bp, Homo sapiens
atggtcatcttttcatcattgacatttctcaatggaaatgtttatttgacctgtcaccttcggccacatgaaaacaccccagacatgtgaaataacaaagtaaaaatcaggaggacaaggca

SEQ ID NO: 225463 - DNA, 122 bp, Homo sapiens
gaacgagcaggaagtttttaatcaccaactccacaactacttaatcagtccagtctccagcgagccctaggctcttcccaaatcctacgcttggcaaggagaacggccctttgagggtcccc

SEQ ID NO: 225464 - DNA, 122 bp, Homo sapiens
aaaatttgtgttgggagaattagaggatatagggaaattacctaagagagtctggagccccggtggcacgagatgcatgctagagattagtattaaggcagaaaatcgccgagtcctctttt

SEQ ID NO: 225465 - DNA, 122 bp, Homo sapiens
tggtgccgcgcgaactcctgctccagcagcagcttcagctgctcgatgctgctgttgatgcggtcgcggcgcatcttctccaccaccggcttccgcagctgcgggaggagggggtgtcaggc

SEQ ID NO: 225466 - DNA, 122 bp, Homo sapiens
gcccatgagctcagctctggcagaaagagctcctcactagggaaggcctggtgagcccctcggcctgggaaagcctctccacagagccagggccagaccacagggcagccgaactccagagg

SEQ ID NO: 225467 - DNA, 122 bp, Homo sapiens
cgggtcagggagctgggacagctgctttagacgggggtctggccgcggccgtgaccaggccggagctcgccagggagctccagcgcctttggtgtttccttttctgaactgagactgaatcc

SEQ ID NO: 225468 - DNA, 122 bp, Homo sapiens
gcatgaaccctttcattcattctggcttttagccagaggtgttctaattggacttgtccgcgcagccctttgacttattcagtcttattggtcccctactattggcacgatcctgatgtttc

SEQ ID NO: 225469 - DNA, 122 bp, Homo sapiens
gagcccatgcatgagatctttcataagggacagaccctggatagccaggctcaggctgggcgccgtatcctgcccgctctggtgccctcctgagcatgggtacggccaggccgggcgccgga

SEQ ID NO: 225470 - DNA, 122 bp, Homo sapiens
gctcccaggctgtgtttatttccccaataactggggaaactggggaggggcacgaccccacgggagcctgcgcccacctgcccaagtactggacctggggctagcttgccgcttgctccttg

SEQ ID NO: 225471 - DNA, 122 bp, Homo sapiens
catgggaaatagagaaaaacatggggtttccatgttatttcactcctaatttgtacgctccgacctctgtgatccccactcatgccttaaatccctcgattttgttggtctttgtctgcagg

SEQ ID NO: 225472 - DNA, 122 bp, Homo sapiens
ccggcgcaagctccgccccgctgggggcgcggctggggggcggccagcggggacgcggggcgccctggaggcgggcccgcgcccctgcccgtttcccagcagagaaacccaggcgcgggggc

SEQ ID NO: 225473 - DNA, 122 bp, Homo sapiens
gccaggccgggggtggggctgaatgggacgcggtggctccattcagtccagttggagcctcgccccgagcctctgagattgacgggcgggggagcctcctcggtcagctgacgaggaaactg

SEQ ID NO: 225474 - DNA, 122 bp, Homo sapiens
acctccaccccagctcccacaggcccctcgccccgttcatcggctgggcgctcgagacggcgcccccagatctcccaccgggcagtgtccccagctgcagctgaggagagaagcgccggcgt

SEQ ID NO: 225475 - DNA, 122 bp, Homo sapiens
gctgtccccggcataggtccatctctgcagaagccatttcaggagtacctggaggctcaacggcagaagcttcaccacaaaagcgaaatgggcacaccacaggtaagactttaatccggttt

SEQ ID NO: 225476 - DNA, 122 bp, Homo sapiens
tctcccggccctcgcgcaactgtcaggcgaaacgggccggcggatattggctcggcgacacgccgaggctcctccccgagtctggatctttatattttgggagaatttctttgaactcagtt

SEQ ID NO: 225477 - DNA, 122 bp, Homo sapiens
gctgatcccttggggtaggtgccagaggcgccactgagggatctggtcttggggcgcccgcgcagtccttggactaggccttcccggcagatctgcgggcgccacctggcggtcactgccga

SEQ ID NO: 225478 - DNA, 122 bp, Homo sapiens
cagaaagtagttccggcccatgttgtttcggccgaggagccgtcgccgccatttcaagaccgtactaggtagatggtcaattagagttcccagggtttgaagcctgtaactgctgccgccgc

SEQ ID NO: 225479 - DNA, 122 bp, Homo sapiens
cccaaaacctgcacaccctccagctccccacaggacgtcacgtattaccaccgacgcacgcgcagaagccttcccggggactcaagaaagggcaggcttagcctcctccccatgtcgcccct

SEQ ID NO: 225480 - DNA, 122 bp, Homo sapiens
cactggcttctagcacttctgtgtctctcactggatccctggactaatatttcactgttccgaagttgtagggctgggatttcctcattgatgaaatatttagaagctaagcagatttgtaa

SEQ ID NO: 225481 - DNA, 122 bp, Homo sapiens
gcaaagttggggcccggaggacggtaagacacagcaactgcgagttcccagagacagatccgggttccagccccagctcaccatgcactgggcgtgccacccagggagtcagccccactgca

SEQ ID NO: 225482 - DNA, 122 bp, Homo sapiens
tgaaccccattacacccgggtccctccccctggacctcccagcagctctagtcctccccgcgtgccctagagcagaccggcgccgcgtccctgtacccacaggacccaggtcctgccccaca

SEQ ID NO: 225483 - DNA, 122 bp, Homo sapiens
gagcggtgggagttcaggctggagcggtggggcctagcaaggtggccacaggcacaagcccgcgtaattcccagaggttgggtaccggagggccgcttacgcaattcgcaagtgaacgaatt

SEQ ID NO: 225484 - DNA, 122 bp, Homo sapiens
gcagaacaaggctcaaagatgagactgctcatcaaacctccaggtgacgaagcacacacacgcgctgccacatcggagcgacggatgaagggagcggttatctgggggaaacagaaccaggc

SEQ ID NO: 225485 - DNA, 122 bp, Homo sapiens
gtcagtgcctgacccggggctggaacttcggtctcctgaccccattttcctctggtggaccgcagcctcccctgctgtcccgcagacaggatggggccgagacttccttccacttacaggcc

SEQ ID NO: 225486 - DNA, 122 bp, Homo sapiens
ccccacttagagaacctcaaaacgtgttcaaagaaccagacacaaaaggccatatagggccgggcgtggtggctcacgcctgtaatcccagcactttgggaggccaaggccggtggatcact

SEQ ID NO: 225487 - DNA, 122 bp, Homo sapiens
gagaaagacaatttgcagccagcatctcgaagaaggagctgtagtgtggcatctgtgggacgtaaggtcccaaagaaggggacatattggttacacatttcggcagttagcaaatggctgga

SEQ ID NO: 225488 - DNA, 122 bp, Homo sapiens
aagagaggtcggcattgatttcagaagggcgcccggaaggacacctgtctggccccagaccgggcaggagccaggcctcggatttctcatctgtcagatgacaatgatgctatctacttccc

SEQ ID NO: 225489 - DNA, 122 bp, Homo sapiens
tagagcccagccttgctcagtattctgatgtgctgtccactactcatgctgcttcagagacgctggaatttggtagtgaatctggtgttctttataaaacgcttatgttttctcaagttgaa

SEQ ID NO: 225490 - DNA, 122 bp, Homo sapiens
cgcagcgcagggattctcgggctcaccttgcgccttgctaggatgggcgaagtagggggtcggggcccctgactgatcgtgagcccccgaggtgactccagccttgtgcaccccgtgttctg

SEQ ID NO: 225491 - DNA, 122 bp, Homo sapiens
gcaaatgagaacaagctactgtcacttctgaagtatgcatgttgcttaaaaactcttgcacgatatgcgtatgaaccgcattaaataacagccctcacttctaacagtaatgttactcaaac

SEQ ID NO: 225492 - DNA, 122 bp, Homo sapiens
cgcgacccctggcggcggctgccgaggggctgcgggacgaccttgggcggcagctagcagcgagtcctagctgatgtggccctgagtcagcttttagaggtcccaagactcgttcacaggcc

SEQ ID NO: 225493 - DNA, 122 bp, Homo sapiens
ccacccatgtcccaagatctttggtccctggtgtgtcttaccttcaggtcgccggggcaccgccccctcctgctctgtgggactgggaggccgggctggtcgtggagtacagcagcggaagc

SEQ ID NO: 225494 - DNA, 122 bp, Homo sapiens
cgcagcgtttgttctcggagggcagtaactccaagatccgcatagcctccccctcccccccgccccaacacaccagcttgaggcaaagaccctgaaaagcagccttgaaggggttcagaggc

SEQ ID NO: 225495 - DNA, 122 bp, Homo sapiens
gaggcgctgctgtggattggtcacagggagaaacctctgatctgttcctattggcccgtccgtcaagggacgatgatgattggtagggcagagcaatctgagtcctagttggtggagttctg

SEQ ID NO: 225496 - DNA, 122 bp, Homo sapiens
aagcagaactttttgctacatacaactctgaaggagagaaggctgctagatggggccatacgtgtattgctctaggggacaggcaagctggagctgttggggacagcttatgtatggcaaag

SEQ ID NO: 225497 - DNA, 122 bp, Homo sapiens
cctgggtcacgcgcacttgtagtagcttgcatttaccaagacagtgagacagtggcctggcgcggtgtctcatgcctataatcccagcactttgggaggctgagacgggacgattgcttgag

SEQ ID NO: 225498 - DNA, 122 bp, Homo sapiens
tggcctataaaattttgtaaaaacaattcttaaatattatttgaaagggcaaatggcccacgctgaaaggtttgacagtttgacatatagtgcatggttttgatagctcggaaactgaaaag

SEQ ID NO: 225499 - DNA, 122 bp, Homo sapiens
atgatgatgataatgataacgatgatggtggctaacatgtatacagtccttaggacgtatcgagcattttcctgaggaaactatattaccttatttaatcctcaaacaatccaatgaggtgt

SEQ ID NO: 225500 - DNA, 122 bp, Homo sapiens
aggctcttctgccatgccttgggacttccctttctgtgtgagtgtgaggtaggtggattgcgcctactcagcatggattttgcacagaaagtcttgctcgcttttccttggtgtgattttta

SEQ ID NO: 225501 - DNA, 122 bp, Homo sapiens
ttacacacaaggtgcgcagagcggccagcgcatgcccagagaggtcgtaaggaggacgaccgcccggagagaaaggacgcacgcttcccgccattttgttcagcttgccgggcaaccggccc

SEQ ID NO: 225502 - DNA, 122 bp, Homo sapiens
aaatatcgaaactggccgatctgatcttcaagctatgcccctagaaaaggcagatgccgccgtgttcacagacagtagcagcttcctcaagcaggcagtatgaaaagccagtgcagctgtta

SEQ ID NO: 225503 - DNA, 122 bp, Homo sapiens
caaaaccccatctctacaaaaaatacaacagcaaaaaaatcagccaggctagctggtgtgcgcctataatcccagctacttgggagggaggctgaggcacaagaattgcttgaacccaggag

SEQ ID NO: 225504 - DNA, 122 bp, Homo sapiens
caatgccaattaatctggcgcttgtcgcggctactccctcagggcaggtgtgagggtcagcgaccaagctccatcctgagtggcactgaggcaaagccgtggcggccagggcccggctcctg

SEQ ID NO: 225505 - DNA, 122 bp, Homo sapiens
tttatcatcccagttgaaaagtgatccagttgatccagacaaggaaccagagaaagaagacgtgtctgcctctgggccgtccccagaagccacccagttagccaagcagatggagctggagc

SEQ ID NO: 225506 - DNA, 122 bp, Homo sapiens
acaaatgggatcattagacacaacctgttctacgcccacttagaattctttaacagcttccgaatgactcagagtggaatgtaattctttagcaggacttgcgaagccctttgagatgtggc

SEQ ID NO: 225507 - DNA, 122 bp, Homo sapiens
gacctggtcggagctcacttaacggttttgtatttcaaatccaaagagactttgcctgctcgaggcttgtgttcccgcggctcctgagagggggcacagatggaaaccagaaggggaggcgt

SEQ ID NO: 225508 - DNA, 122 bp, Homo sapiens
agcgggaatcttcggagcctgcccattggcttctgctgaacgggagggtgggccctggggcgctccgcttactgattggttcgatgccagattggcaggtccccgccggcagtgcgtgtggt

SEQ ID NO: 225509 - DNA, 122 bp, Homo sapiens
cgccgtggagtggagtctgcagagagccagataggttcccgccatgccctggagagctgccgtttctccagctccgccctgcccatgaggcaaacagctggtcgactggtcttctgtgctgg

SEQ ID NO: 225510 - DNA, 122 bp, Homo sapiens
gagtggtgcctgggaagctgctaaaagcttaaataagggggagtaaaccagagagctggacgaaaaaataaaaagccaaaaggaccctcctggtctccctgcagattgccagcctcatccca

SEQ ID NO: 225511 - DNA, 122 bp, Homo sapiens
ggcggcgttagcgggcatggtggtgcttagatatcagttggagcggcggacctagggggacgcgtcctggtcccctggtttggggcggcccgtccaagtgtgaggtcatgtaggggtggggt

SEQ ID NO: 225512 - DNA, 122 bp, Homo sapiens
tttgaccctcaccaggtgccctgagattgccctccaggataagccttgttttgcatggaccgaggggtgcaaggaattcctgtctcatatttgtggagggagtcatatgcacaggctagcag

SEQ ID NO: 225513 - DNA, 122 bp, Homo sapiens
cgacctcgagtccccgcagaggaagcacaagtgccactacgcgggctgcgagaaagtttacgggaaatcttcgcacctcaaggcgcacctgagaactcacacaggtcagtggggcggcgcgg

SEQ ID NO: 225514 - DNA, 122 bp, Homo sapiens
cgaaggcgacacgcttcgggcggccaacacctgggggcccaggccaggcagggctggggccgcgcgggactcactggacccagccaggggcccccagggcccagcggtgccggggcagcccc

SEQ ID NO: 225515 - DNA, 122 bp, Homo sapiens
cgaggcggggcggggccctggttgggagcctggggaagcttccaggagcttcagggttcccgccaggccacactcatctccctgcccctttgaggttcccgaccgaggcaaggggtcttgtg

SEQ ID NO: 225516 - DNA, 122 bp, Homo sapiens
ttccccttcctgtgtccatgtgatctcattgttcatttcccacctgtgagtgagaatacgcggtgtttggttttttgttcttgcgatagtttactgagaatgatgatttccagtttcatcca

SEQ ID NO: 225517 - DNA, 122 bp, Homo sapiens
gagttccaacaacttagatttttgaattacttatatttacacccatcaatacagctaaatcgtgagagaaacttgctattcctcatctctaccccaccctctttctagctgtgtgactttaa

SEQ ID NO: 225518 - DNA, 122 bp, Homo sapiens
gagacacacatcatttggcatttgagttgaatggtaattcacagtaatgctgccgttgttcgggacttaaagacacttgacctgtttgggctgttgccacttaaaagttcatgaccacaaat

SEQ ID NO: 225519 - DNA, 122 bp, Homo sapiens
gatggcagcatggaaagcagttcagaccgcggcctccgtggggcccgggggtccagtgcccgcaccactatggggcccgggactgggctccctgtccagacctccaacccaggcacagttcc

SEQ ID NO: 225520 - DNA, 122 bp, Homo sapiens
gctccgccgcctcgtcggcgcgctggtagctgaagcaggcttctgctatgtccaggtggccgaggggcagcgggtcgtgggggttcttgaagtagcagaggcagcagcggcgcccgtccaac

SEQ ID NO: 225521 - DNA, 122 bp, Homo sapiens
tgctttctaagcatcttcggaggcagctgttcagagaaaccggctgtaggcctgctcgggcgaggagtgctgtacaccaccactgctgcctaagtggggcactctccaccatgttggagttg

SEQ ID NO: 225522 - DNA, 122 bp, Homo sapiens
caaggccaacccggctccatggctcagcattgcgctcagtagttaagatccagaggagaccgagggggctggacgtgggacggcccgagggccggggcagggggtcacctgttgcgcgcgct

SEQ ID NO: 225523 - DNA, 122 bp, Homo sapiens
tgtcccagaccacttgtcccggaagggagcttgggaatcgattcacaataaattctcattcggactctcctggcctggctttcctgtctacagtggggttgacctagcggggaacggaaggt

SEQ ID NO: 225524 - DNA, 122 bp, Homo sapiens
ccagaagcagcacctgtgggccacggcgtttgcttagagcctggactgaggctgcctggacggggcccctcacccggccagagttaggggtgccgctgccacccccatggacccgcttcggg

SEQ ID NO: 225525 - DNA, 122 bp, Homo sapiens
tttcttccttgtggtgggttcgtgatctcccggctttagaagtgaagctacacaccttcccggtgagtattacagctcttaaggcggtgcgtctggagttgttcgttcttcccagtgggttc

SEQ ID NO: 225526 - DNA, 122 bp, Homo sapiens
cagaggcgccaggaccctatcattcatccctttccacgtgcaaagtgaaaagtcagagcccgggcacacaccttggccgtttatgtatacagaagtggggtgccgggcgggaagggcgcggg

SEQ ID NO: 225527 - DNA, 122 bp, Homo sapiens
gaactttaagataatgatccagggtatgtatgtgatatgtcagcatggacagttgtcactcgtggggctaagtgacaggttttaataagtagcacttgctcctttcaaaggtgacaagtatt

SEQ ID NO: 225528 - DNA, 122 bp, Homo sapiens
ttaatggaatgaccatatctggcttcaggaacatctcctaccaagtctttctctgtgcagcgaaaagtaacctttttgttgttcttgcaaacaatagacatgacataaatcttatctgaaac

SEQ ID NO: 225529 - DNA, 122 bp, Homo sapiens
gaccagcctggcaaaaatggtgaaacccggtctctactaaaaatacacaaaatggccaggcgcggtggctcacgcctgtaatcccagcactttggtaggctgaggcgggtggatcacctgac

SEQ ID NO: 225530 - DNA, 122 bp, Homo sapiens
tcttagcgtccaggactaggtaaaggttaaaaaatcatcaaggctaagcgactgttgtgtcgttcgtgttgagcgctgtattattttctgcatttgggaatgtgcgagtttctcaggtttgt

SEQ ID NO: 225531 - DNA, 122 bp, Homo sapiens
caacgggcatgctgacgtcagtgacccagtttgtcaaggccctgtcaatggtgtacctaacgtgcaggctaatcctgtgtcaagccaaccccgacacctgcaaccaagcacgcctgcacctg

SEQ ID NO: 225532 - DNA, 122 bp, Homo sapiens
ttctcggtgtggagggcagctgttccgcctgcgatgatttatactcacaggacaaggatgcggtttgtcaaacagtactgctacggaggagcagcagagaaagggagagggtttgagaggga

SEQ ID NO: 225533 - DNA, 122 bp, Homo sapiens
accaaaaaacttcatagcaaaacaccttcttgttcttcattttaaaactatttacttggtcgtacatttccttctctaacccaggagctccttgaggtcagtggaatggaatgaaaaacaca

SEQ ID NO: 225534 - DNA, 122 bp, Homo sapiens
cctcctggctttgctcaagggtcctttagcatttgaggagatgataagggatgggatccccgcctgttgaaccagaggaatctgaggagtaccaggtttccactgaagactaaatcatgatc

SEQ ID NO: 225535 - DNA, 122 bp, Homo sapiens
ggtccccggaaacctcaggggcttggaggcggcggctgggcgagcgctccggtgcgtctccgcagcccgtgcgctcatcacgttatatatagcgtcccggcaacaggaagtatcgcctgcct

SEQ ID NO: 225536 - DNA, 122 bp, Homo sapiens
ccagacgtccctgcgcgtcgtcctcctcgccctccaggccgcccgcgccgcgccggagtccgctgtccgccagctacccgcttcctgccgcccgccgctgccatgctgcccgccgcgctgct

SEQ ID NO: 225537 - DNA, 122 bp, Homo sapiens
cccccccgccagagaaggaggaccctcccgcgccctttcggagcgtcggtggcccggctccggctctgcgctccatcctcccagccagcaggtgcccccagacccccggctcctcctccgcc

SEQ ID NO: 225538 - DNA, 122 bp, Homo sapiens
cagcatgcctccccttcctgggcgctgtcctgggcctacttcctccgtgtccatggctcacggacccgccactgcctggagtcgtggctcctgaccctggttcccgtgtccacatgtcagcg

SEQ ID NO: 225539 - DNA, 122 bp, Homo sapiens
agtggtaaatggcgagggttttagtgccagacccctggctttcagcctggctctgccacccggtgtgggtctctccacccaagcctcaattttcccatctatgaagtggcgctaatcatagt

SEQ ID NO: 225540 - DNA, 122 bp, Homo sapiens
cacggagcctgagagactgcgctgaccgggtctgagggaagctttgccaacagcctggcccgtgactgatcggaattgcctaatctgaattccagaccctgcgacatttccccaaatcttgc

SEQ ID NO: 225541 - DNA, 122 bp, Homo sapiens
gaggtcactccgcagtaccagctcctggttgaggtggaggacaagggtgagcctaagcggcggggctaccttcaggtaaacgtgactgtgcaagacattaatgacaaccccccggtttttgg

SEQ ID NO: 225542 - DNA, 122 bp, Homo sapiens
tagtcgtcgccgccacggccgcagccagcgtcctgccccgccatgtttcgcgctccgagccgcgccccgcccatgccctggcttcactggccggcaagaccgccaatcaacctccagcgttc

SEQ ID NO: 225543 - DNA, 122 bp, Homo sapiens
gtgaaaacagaaagccagtgctgacgaaggaagtccccaagctcactccctcagttccagcggctgatccagtgaaggcgtttgtgcgtgtgctgtcacattttccccctgaactctgtgat

SEQ ID NO: 225544 - DNA, 122 bp, Homo sapiens
caactcacagtccctcatcttttaaaagaagggaaaaaaaatgaagcactctggtcataacgaattgtgcagattttgttttcagtgaggtgtttgccattacatattgcacataatgtatg

SEQ ID NO: 225545 - DNA, 122 bp, Homo sapiens
tttgttaggcagacacagatggagacagagctctccggggctgtgccgaggagagagcagcgtggcgtaaccgagaacttcctccagccgaaaccaggggctgtagccagttaccccgggaa

SEQ ID NO: 225546 - DNA, 122 bp, Homo sapiens
cgtgagactcgggtgggcggtgctccgcagcgtgggcctatgggaaatgcagtcccggcgcgcgctaggcggccgtggggcggcggtgggaggctctgggagtgcagccggcgctgcgcgcc

SEQ ID NO: 225547 - DNA, 122 bp, Homo sapiens
ctgtagagtccccaggcagctggggctgtgcagcccagctttagcggatgaagtcaaacgcgcagtccacaaacattgcgctccgggtgaatcctggctcgcgccgatttccagctgctgct

SEQ ID NO: 225548 - DNA, 122 bp, Homo sapiens
gactctaggttcatgcttcacgctctctgtgtggaactcacggttttccagagactgaggcgtctgtgggcaggaggaccaagaggagaagaaccagacttggatgaaggagtttgttcttc

SEQ ID NO: 225549 - DNA, 122 bp, Homo sapiens
ttaattagctcggtctctcttctttccgttccctggtctgaatgtttcttgatggcaaagcgaccaggagagagttgatttgcatcttaagacctatgggtaatgcttctggagtggggaga

SEQ ID NO: 225550 - DNA, 122 bp, Homo sapiens
gccacgaagccctggggaaggaggcagcggtgagatcaggcccatggcattgggctgccccgcctgctcgcccactgcctcctgcaggtacctccagaccccggtacaccgtgctgttggtg

SEQ ID NO: 225551 - DNA, 122 bp, Homo sapiens
tcgcaacacacagtcctcccaggcttccagaggggcggcgctgggggttacaggcgggggcggacctggagaccttgaaagtggagaaacctccttggctccgagaagccaaggaacagatt

SEQ ID NO: 225552 - DNA, 122 bp, Homo sapiens
tagctgccccttttggatgggacactactgtcctgtttgccgtggtctttacccagcatacgtcccccgtttacatggaacttctcctgcccttctgtaaatgctgcaggaggactaggaag

SEQ ID NO: 225553 - DNA, 122 bp, Homo sapiens
ctgttaagaatagggtccggggacttagtctccctttaaactgactcttggttggggttccggggcttttctaaaatgctgggagatagagggacagttgcagttttctgtgcctggcaggc

SEQ ID NO: 225554 - DNA, 122 bp, Homo sapiens
ttgcaggcgttcacttgcagggcggctgcacacttctgattgaaggctctgtggtagcgtcgctctcccaggacacagagctgggccttttgggctgcgcgcacattcggtgtgaccccctc

SEQ ID NO: 225555 - DNA, 122 bp, Homo sapiens
tgacgctgagcgaggcggagaaggtgtacatcgtgcatggcgtccaggtagctacagcagcggcgttgggtcggccgccgggttcagcctggccctgcgggtcgcggcctgccctgggtttg

SEQ ID NO: 225556 - DNA, 122 bp, Homo sapiens
gggctttgggctttatcaaccagacacaaacgcggggggctctgggtgctgttaaccgggcgaattcctgggaactgcgggtatggcttgccacagtaccttatcagttaattgcattcttg

SEQ ID NO: 225557 - DNA, 122 bp, Homo sapiens
gccgcgatttcccggggactgctggggcgcagcggggaggcgggccggggggcggcggggcgcgagcagagcgcggttgacctccctttctctgctcagctccagcgtcatttcggcctctt

SEQ ID NO: 225558 - DNA, 122 bp, Homo sapiens
tgttttattctcttgaggactcaatgttcccgagtcctggagccctgtctttatcaggctcgcaaggagggagcccagccaaacttgcttcctatacttctctatgattgatagcagatggc

SEQ ID NO: 225559 - DNA, 122 bp, Homo sapiens
ggaaaatggtgggcgggcgggcccgcgcgcggccgcggtactcacccgggccggccagtgcgggtagcccttcatcttggcgaagaccaggtcgcccgctttgtactcgcggggccgcggac

SEQ ID NO: 225560 - DNA, 122 bp, Homo sapiens
tatggctgtgagtttcagatacttcatagaaagaaagttagcccttaagatagagatacacgttcaaatgtcataattcatctttcggatgaaggtctttggcttgcaagctccactgtccc

SEQ ID NO: 225561 - DNA, 122 bp, Homo sapiens
cgggaatgcgggcgtgaagggtccgagttgccgcccagcggggaggagaccccaggacgccggaaatcaccatcccaaagctgcaagaaggggggagaaagcattcttcattcagttgtgtg

SEQ ID NO: 225562 - DNA, 122 bp, Homo sapiens
gggggactcacgcgccgccggggagcggagccaggctccgagaagggagcaggctcgagccgctgggttttcgcaagccttggggcctctggccgcccttccatgcctccgggcgcgggcgg

SEQ ID NO: 225563 - DNA, 122 bp, Homo sapiens
cgttgcctggagactgtggaaggcccaggcaagagggcgcgtggcagcccaaggccatggcgggacacccaaaagagaaggtgattccagatgaggtccatcagaaccagatcttgcgggaa

SEQ ID NO: 225564 - DNA, 122 bp, Homo sapiens
cttaaagggaccgaggcgcttcccccgcgctcgcggcggggtcccggggagggggcttctcggaaactcgcctacccgagcggattgggagaagcgctctcccacctagcaagcgctttaca

SEQ ID NO: 225565 - DNA, 122 bp, Homo sapiens
agaatattgtactttacttaccatactctttttctaaagggagagaagaaaggtaaaatacggtgggctttctccagttcgaaagcaagaaaaagaagaccatggaagtgacgaattttccc

SEQ ID NO: 225566 - DNA, 122 bp, Homo sapiens
catagcaggtgctcagtgaatgagagctgttattatgtattcaatcatcatgcctttggccggtgtttattaactgtctttgctgtggcttcttcctcctctacctgcaccttttccccctc

SEQ ID NO: 225567 - DNA, 122 bp, Homo sapiens
ctagaggaagagcattcctggaggataacaaaggcaagggcttggagacaggagtatgtccgatgtgtttgaggaatagcaaggaggccagtatggcaggagcacatgaagagaaggggaga

SEQ ID NO: 225568 - DNA, 122 bp, Homo sapiens
gacctttgctcgccatctcttcatcatccatcaagaaatatcagcacctaatatgcaaggcgagaccaattttaaggtgaggtgttaattaactaacgattctggttaatttctatacaagg

SEQ ID NO: 225569 - DNA, 122 bp, Homo sapiens
ggccacggaacatgccctccccgcccgggcagtgtctctgaccctggaatatgccatcctcggtgctgaagtgcttcaccgtcctgtccgcgcagcccaccagcatctgcggcaaagaaggg

SEQ ID NO: 225570 - DNA, 122 bp, Homo sapiens
acatcgtaccctaccagagaggaatccattacatagtattttcccaaacttatttgatcacgaaattcttctttgaaaaatatctcacaactctagtaatctccaggaaacactctgggaaa

SEQ ID NO: 225571 - DNA, 122 bp, Homo sapiens
cgctgggacctgtccgacggctctggcgctggctctccctcaccctggccctgctccctccggagcagctgcagcttgggcagccccgcccaggagccagttgagtcacccacatcccggga

SEQ ID NO: 225572 - DNA, 122 bp, Homo sapiens
cagagctcttagctcagtcccgtgggctctgatgcttgttactagtgttaaccatggtaacgatgagtacccgctgaagcagccccagtccttgcgttactcgactttttcgtagtgttctc

SEQ ID NO: 225573 - DNA, 122 bp, Homo sapiens
aagacttgagaaaacacatctatttattatctatgtgaccaaccgagttgctttaacactcgttaatttgcatttccaaggagagcaatttagttttaattatttgatcaggcacacacgtc

SEQ ID NO: 225574 - DNA, 122 bp, Homo sapiens
aagagaggcagggtgcccatgaggaaggccccggaactgcacccctgagaacaaggagcacgtgaggctggaacacaggactgggggccgaaagtccctctttggccaccctcttcacacgc

SEQ ID NO: 225575 - DNA, 122 bp, Homo sapiens
ggagagaggagaaacctgcacacagaaggacagcagcgcccaccctaccagcccctcacccggccccagctatgggctggtcctatctcccatgggtgtgctggggcctccggagccactgg

SEQ ID NO: 225576 - DNA, 122 bp, Homo sapiens
catgaagaaataatggattttaaaaaaaacaaacaaaaaaactttggtgccttaacaaaacgatttaatgtgtggaaacatcattgctatggatgtgggttaccagaaagatggttagacag

SEQ ID NO: 225577 - DNA, 122 bp, Homo sapiens
agataatggagagcaggttcttttaactcaagatacaattgatcctgggagagcaaggagcgaggaggcagcaagttcagacacattccagagccacgagccctggattctatccaagccac

SEQ ID NO: 225578 - DNA, 122 bp, Homo sapiens
agggggaagagggggaagacatggggattaaagctccaattcagggtgcacaggggccgccggcccctccccagccccaagaccctggctccattgtacccattccctaggctactccaggc

SEQ ID NO: 225579 - DNA, 122 bp, Homo sapiens
tctctccctgcaggctgtgcgagggcgtcggctcggtgaatgtctgtaagtagtggggtccgtcccctcctcccgctgggcgggtctgggagcctctgggcaaagggcgcgtgggctcgcag

SEQ ID NO: 225580 - DNA, 122 bp, Homo sapiens
gggaagctttgccatcattaatggaattaatgcctctataaaagaggccctatagagccccgtctactcttctactacatgaggtaatggtgaaaagacagctagctatctatgaacaaggg

SEQ ID NO: 225581 - DNA, 122 bp, Homo sapiens
cccatgcggctacataaaattggcagccttagaactagtgggaaggcgggtgcgcgaagtcgaggggcggagagagggggccggaggagctgctttctgaatccaagttcgtgggctctctc

SEQ ID NO: 225582 - DNA, 122 bp, Homo sapiens
tgcttctccggccctgcaccgtctcggctcccgctgagagctcgcagttccggcgtcgggcgaagccttcgccaattgctccacctatgggccaagcgtctgttgcctccttccgcacctcc

SEQ ID NO: 225583 - DNA, 122 bp, Homo sapiens
gcagccggcggggggtgccgtcctcctcgccctccctggagcccggccctgggcccacgccgtgccccgagcctcctctgcggcccgcccccagttcccccggtccgccgcggccgggcatg

SEQ ID NO: 225584 - DNA, 122 bp, Homo sapiens
ttctcgtttagctctaagtgacatcatctaaaatcattgtgcaagggctaaataaggaaacggagtctaattcaggggcaaacgccaggctatatttatcaaacgccaagctccagaaagcc

SEQ ID NO: 225585 - DNA, 122 bp, Homo sapiens
tcatttttgcagcgcttgggtgcatccagaccgtcagagctttgggagcgctttgtttggcgacagtcggaaggcgcgaggggaggggtcctcccgctgaacagtgggggttctaagggtcg

SEQ ID NO: 225586 - DNA, 122 bp, Homo sapiens
ctggctggaatgcagtggcaagaacacaattcagtgcggccttcaactcccgggtttaaccgattctcccaccttagccaattttttcctttttttttttttttttttgagatggagtcttg

SEQ ID NO: 225587 - DNA, 122 bp, Homo sapiens
caaggagcttatggtctagtgagggagacagaggacgatgtcatagaacaagaactctggcgaggtatgcgtggagcctgtggacatgctctatccatgtctaccatgactccctgggaatc

SEQ ID NO: 225588 - DNA, 122 bp, Homo sapiens
catgggcacccaatagagcactcctgcaccctgtgtctgggcaagggatcccagggtcagcgctgtgggtgggaagatgttttggttctgccttccaaactggagtcctttcacttactccc

SEQ ID NO: 225589 - DNA, 122 bp, Homo sapiens
ttcactttcctcagttgatataaaactctgggtcttggccatgatgtccttggactccatcgctaaagggaccatctgctgcagttaccacagcaactgacctgagcggcaccctggtctgt

SEQ ID NO: 225590 - DNA, 122 bp, Homo sapiens
aatgtgaactttgatgtaacttgtccacttaccttttgtctgtgtgtgtgcacacatgtgcgtgcacacacacacgcattagtaataataaggtaatccatactttgcaaatagcaagagtt

SEQ ID NO: 225591 - DNA, 122 bp, Homo sapiens
cgtgtgcgcactcaggagggtggcagccaaaggcagggccgggactcacgctgctcgcaccgcgggcccacgtagccagcctcacacagacacaggccgctgatggcatcacagctcccgtg

SEQ ID NO: 225592 - DNA, 122 bp, Homo sapiens
gctgagcttcgcgtctgtagttactgagcaggagcttctgggcggaacttctaagggccccgcccgccccgtctgccctgaccctcgcccggactcgcctcgcccacgtcccgtttcgcttc

SEQ ID NO: 225593 - DNA, 122 bp, Homo sapiens
actccagtgccagcaggaagctgtgggcattggagaggcagggctgaagcctcaggccctcgaattcgtttgcagtccctctcccctctccacccagcatggtcccctccctgcctggattt

SEQ ID NO: 225594 - DNA, 122 bp, Homo sapiens
acaggcgcccgccaccacacccggctattttttgtattttaagtagagacagggtttcaccgtgttaaccaggatggtctcgatctgacctcgtgatccacccgtcttggcctcccaaagtg

SEQ ID NO: 225595 - DNA, 122 bp, Homo sapiens
atcttttgattccgctattgaggtagaggcgggacgggggaagcagctttcagtaagacccgcccgctcttgccctgtcagtttaccattgccatggcaacacccggaagttgccgccccct

SEQ ID NO: 225596 - DNA, 122 bp, Homo sapiens
cagcccggctcagctggaacatcttctcagggtcaggggctgcaatcatgcttcccttcccggcccccaggagcccattgcaggctacttccacatagagagtgaggctacaaagatgggga

SEQ ID NO: 225597 - DNA, 122 bp, Homo sapiens
gccactacagatgatcattgagagctcactgtggcccctacagatgccccacttgtcttgcgtcctggtgttcaatttctctccctggctatgcttctctaccctccctctccctctttggc

SEQ ID NO: 225598 - DNA, 122 bp, Homo sapiens
atgaatgtttgagacactaggactctgagcagcacttttaacactctcattgccctaggacgacaaaatttggaggcttggtaccaccaaggaggtatcccactgtactgttttgggaccac

SEQ ID NO: 225599 - DNA, 122 bp, Homo sapiens
tcacggtgcggcactgcttcttgcctgcattcaggctgctggcggccgccttagtggcggcggcttcggcagccttatagcagttgccgaggtacagctccagagccagccttcagtcccca

SEQ ID NO: 225600 - DNA, 122 bp, Homo sapiens
gcatcaccgtgagacgccacgggggcaggtcagcgggacggggacagggaggttggtcatcgaaaggcaggtgatgcatgtcgtgtcatttagcacctggtcatgagatacggcgagacccc

SEQ ID NO: 225601 - DNA, 122 bp, Homo sapiens
aaggacgggcacatttccggtaacagcctcatttccccccgttccccgggggaaggggggcggctagcactgctgatggcatcgcctgacatcacttgttccggaggataggagagcgtggg

SEQ ID NO: 225602 - DNA, 122 bp, Homo sapiens
gtggatgaagctgtactggtcctccgtctgcaccatgtagttgcgctgggacctcatgagcgtcacgtggccatagacatcgactgtcttctctggcttgatccgctcaagcatggcgtcga

SEQ ID NO: 225603 - DNA, 122 bp, Homo sapiens
ggtcactgcgacggccacatgccagcggcctaaggcggggacagaggtggccctggcggtcgcagtggggaagcttctggttgctgcctgcgggaggcaggtggcccctggcaggttgggct

SEQ ID NO: 225604 - DNA, 122 bp, Homo sapiens
ccccccagagccttccctttccagggaagcagccccactcaccctcgcctgctgcaggatcgcctgggcctgagcctcctgggccgccaccacagggcccttgtcacccccaccactgccaa

SEQ ID NO: 225605 - DNA, 122 bp, Homo sapiens
agtgataacgcaacacaccttgcacaaatttgcgctctgccaaaccagagcattcaggcacgactggctttgttgggtgaggttgttgtggtgttcctgtggctggacgtgattcgcagcat

SEQ ID NO: 225606 - DNA, 122 bp, Homo sapiens
ggttaaaaacatctcgacgggagacgctggtaggcgaatagtggctccagacgcggtcggcgcctgccgtaccctggtcagactctgggtcagagcgctaagtttcaaggaggcggcgctaa

SEQ ID NO: 225607 - DNA, 122 bp, Homo sapiens
ccagcatggaagtcccttgtggcagcagggtctgaggctctttttccttctcacatctctcgtttccttctctggcctcttctgggtttggttctcagagctggtgagagtatggaggaagc

SEQ ID NO: 225608 - DNA, 122 bp, Homo sapiens
gaagagatggcgcgcgatgatgacgtcaaacgcaatggctcccgcgggttgtggtcggagcgctggcgggggcgggatcgtgacgttaagggcggtgcccagtcagcgaggtaggtcgggaa

SEQ ID NO: 225609 - DNA, 122 bp, Homo sapiens
actgacagtcttaaataataagactcgaaagtctaaaagagtccttgacccaaggtctaccgatgaatgatgtgttagcagatgtgaaaacattaatctccttgtgcatcatcagagctctt

SEQ ID NO: 225610 - DNA, 122 bp, Homo sapiens
cccgccccctccgctggggcttactccagggctggcgttgtgaagaccatgacaggaggccgagcgcagagcattggcaggaggggcaaggtggaacaggtgaggaactctagcgtactctt

SEQ ID NO: 225611 - DNA, 122 bp, Homo sapiens
aacggattggaggcaaaaaacaaaacagggagggggacatcaaggagagaaattgaagtacgaagggagtaaaaggacaagagaaaagaacctcagggtggtttagaagccagtattacctg

SEQ ID NO: 225612 - DNA, 122 bp, Homo sapiens
ttctcctgacatttacctcaactactaagtattaaatatttacaaagcacttgggcttgtcgagtgctttttaactcttctttacatttttgccttctgcacaggtggggaagtgtcgctat

SEQ ID NO: 225613 - DNA, 122 bp, Homo sapiens
gaccccaactatatctggttgaccataaaaaacaccctcctggccaggcagagtggctcacgcctgtaataccagtactttgggaggctaaagtgggaggatcacttgagctcaggagtcaa

SEQ ID NO: 225614 - DNA, 122 bp, Homo sapiens
gagagcagggggcgggctggccagaaaggggcgggggtgcgggaaggccacggcgtcgcccgcccgggcaatgtactggatgaagtcctcctggggggcatccccctcctcctgctccgtgc

SEQ ID NO: 225615 - DNA, 122 bp, Homo sapiens
tctggcaagaaggaaatgtaacccattagggttctggggcgcccacgacaaccagtggggcgcagcttcctctccactccctaggagggcccagctcgctgcagggggtgggcaggaaagct

SEQ ID NO: 225616 - DNA, 122 bp, Homo sapiens
ctagaactagaaataccatttgacccagctcctgagatcttatccggaagcagcggatcacgtttcaggtgtttcctatctgttgggagatggcctttccctggcgccggctgtggccaatt

SEQ ID NO: 225617 - DNA, 122 bp, Homo sapiens
gtccctggagaagctgcgtgaagcccgccgtgtggtagtgcccacccgtcaccctccccacgccctcgcctgcaattcatttctggatttccaaggacatttggggttcaaggcagatggct

SEQ ID NO: 225618 - DNA, 122 bp, Homo sapiens
gcaaagacctgcccacaggcccggcccggcaacatcttccagtgggtgagcacagtggggcggggccgagggctgcggaggggcgcggcccgcgagacaccatgggacgggcgccccctcgt

SEQ ID NO: 225619 - DNA, 122 bp, Homo sapiens
agatgccaagtttaggggctggagaggacaaggggaaggacgagagaactcttgcaccgacggatgtagttccaagcgacccgaaatgaggaaaacccagaaggggcggacggagggcaaag

SEQ ID NO: 225620 - DNA, 122 bp, Homo sapiens
tgatgtgcacattctgctggagagaaacgggtcccagggtacaggtaggatgatcagcttcggtagatcctgccggttttcccatgcgctgtgcctgtctgcactccaccaacggcgagcgg

SEQ ID NO: 225621 - DNA, 122 bp, Homo sapiens
tggctgcttcctccctctaccaggcctgcccacctcagggtaacgatttccagacatccccggggctccccgaccctccctgcatgcacgtgctgaagtaatcagcactagcattggctgtc

SEQ ID NO: 225622 - DNA, 122 bp, Homo sapiens
cgattggtggcctccagcttctcctgctccccagctgcccggtactcccgggcgagatcccgcactcgccgcttatatttgagctcctgccgctcgtgccggctcagctccacgtccccaaa

SEQ ID NO: 225623 - DNA, 122 bp, Homo sapiens
gacccagcctcttctcggagcaactttctccgccggccgccgccgagccccctccgcagccgaaggctgactgtcaaaagtcagtccaacccgacccacagggaaacagctgcaggaagtga

SEQ ID NO: 225624 - DNA, 122 bp, Homo sapiens
cagcggaaaagaggccgtggggggcctcccagcgctggcagacaccgtgaggctggcagccgccggcacgcacacctagtccgcagtcccgaggaacatgtccgcagccagggcgcggagca

SEQ ID NO: 225625 - DNA, 122 bp, Homo sapiens
ccgaggccccgccccctaggtggtcctagcctttgcgcgtgcgcggcgtgtctgcgtgggcgcatgcgcataacggccgccatcttaacagcgcgttcccgttggcgtctgaggtaagtttt

SEQ ID NO: 225626 - DNA, 122 bp, Homo sapiens
acccgctcgcaaataaggtggccctggtaacggcctccaccgacgggtgagtgctccggccggagtttctgaggccctggctgcctggaaacaggcactggcctctcatcctcggcctccgg

SEQ ID NO: 225627 - DNA, 122 bp, Homo sapiens
agtgtctctgcctggctgcccatcgtctgggatgtggggagcgcctctgccccgccgccccgtctgagatgtgaagagcgcctctgcctggctgcgaccctgttgggaactgaggagtgtct

SEQ ID NO: 225628 - DNA, 122 bp, Homo sapiens
agtgctgcgtcttatctttgggccgcatcttgaaccccgtcttgcttccactgcagtttacggcgatgacttctgccaacgcaccggctgctgtggggcagatttgctttcgggctctcact

SEQ ID NO: 225629 - DNA, 122 bp, Homo sapiens
gggcctgtgcgaagcgggatctctcgggcgtccctctctttgtcaccccttcccccgccacgtggaggtgcctcagccgcctgagctcagcctgcctgcgcctggatttttaagaaggggaa

SEQ ID NO: 225630 - DNA, 122 bp, Homo sapiens
tatatttaagtatggcaggataattacccacctgttcctcttttcagcttagaaacataacggttcattccttttattgctagagaatgtcattcctgaagattttataaacaaaggcaaat

SEQ ID NO: 225631 - DNA, 122 bp, Homo sapiens
agagggatggtctctaatggattcaaaagagagctgtcaatgtctaactgcaatcagcatcgccctggcacttcaaaggaataacaaggaccctagaacgccagggccaccctccatccgaa

SEQ ID NO: 225632 - DNA, 122 bp, Homo sapiens
atactatgctgagaaaatatattcgttcattagtcaagtatttactaaaggtgtactcggcgcaaggcccctggagagaggccaacaagcacaccagctctggatccctcgccggaccgccc

SEQ ID NO: 225633 - DNA, 122 bp, Homo sapiens
gcggccagcccatgttcctggcgctggacaggaggggggggccccggccaggcggccggacgcggcggtaccacctgtccgcccacttcctgcccgtcctggtctcctgaggccctgagagg

SEQ ID NO: 225634 - DNA, 122 bp, Homo sapiens
tccagctcttgaggggaccgggccttcagctggggcaacactgggcctccagccgggccccgctgagccttgatgttgagggaggagctccagaactctagggaacaagaaaccgactgggg

SEQ ID NO: 225635 - DNA, 122 bp, Homo sapiens
aggcctcttagggcctcagtttccccgtctgttcgaagactgcggaggcaccaaggagtgcgggccccccctgtgctggagttggaggcttccacgatctccaggcttaagtcccagcgccc

SEQ ID NO: 225636 - DNA, 122 bp, Homo sapiens
gcggggcggtggccgtcccggggcagacgagcgcggctgccgcgtccccccacctcaccccgatattccgctcccaccgtcgggaactcccccaccgccgcctccggccctgcgcgcccctt

SEQ ID NO: 225637 - DNA, 122 bp, Homo sapiens
gctgggatgaacttatcgtagttctcatagaccagggtttgcatgtcgctgtctagagcccggatctgctgcaccatgtccgtctcactgtccatcagctgggccagagagcactctctagg

SEQ ID NO: 225638 - DNA, 122 bp, Homo sapiens
gagacctggcccattttcattctgcataaaattttaatggtctctctggctgatccgggacggcagcgcgcggagaggctcttaaagggccagtggcggcgggaaggggcagcggtggggat

SEQ ID NO: 225639 - DNA, 122 bp, Homo sapiens
ctcaaagcatgaccatgactcagtgcctgctagctcccgtgacaacctgtctccctgcaacgctgctgcctcgaggcagaaaatgttgtcactactgcatttcacagagtgtagaaacagga

SEQ ID NO: 225640 - DNA, 122 bp, Homo sapiens
tttgtttaatttccaatctgtcagagactaatacgcataaaaaatgttaaaaatgaaatacggcaaaagtgaaataaatattgaagagaggtaagattatagtagattcaaaagacataaaa

SEQ ID NO: 225641 - DNA, 122 bp, Homo sapiens
tagggggatccgatattggtttccttggcaggcggggtacccaagtacctcccggttacacgtctggacaatgcacttccctatagtaactttgaaaagtttttactaccaactttagtaag

SEQ ID NO: 225642 - DNA, 122 bp, Homo sapiens
cacagctctgtgaccatgttaaaaaccactgaattggattatttaaatgctgttaaaaaacgaaccaccctatctggaaattcttggagacacccagctcagcgtcaaccgcagttgacaaa

SEQ ID NO: 225643 - DNA, 122 bp, Homo sapiens
tattagattctctcaaggaaattttgttcaagtctgttccttccaggttcccactaattgcggtgtcactgctaatttagtttactcaccaaagttaaaataagcaattgagaggcctgtaa

SEQ ID NO: 225644 - DNA, 122 bp, Homo sapiens
cggcccggggccggagggcctggagggccctggaggagcgggctgcgttctgcgtctctccgcgatctctgccggaccggaactgacttggcagttctctgcgctggcaagagaggagcggt

SEQ ID NO: 225645 - DNA, 122 bp, Homo sapiens
ttcggaaagggactagtaatttctgatatccggagaaaactaatgtttccgctgcagtggcgacaccttgtggtcagaaaggggaatgcacaggacggtcatacgcttcccaccttcctctg

SEQ ID NO: 225646 - DNA, 122 bp, Homo sapiens
cgcggccgggctggtcctgtgcaccctgtgttacctgctggtgggcgctgctgtcttcgacgcgctcgagtccgaggcggaaagcggccgccagcgactgctggtccagaagcggggcgctc

SEQ ID NO: 225647 - DNA, 122 bp, Homo sapiens
cacacagtaggcgctcaatacatgtttaatggggtgaagactcacattgacccaaggaaccgtggctcacagggggcgagggaccaaccagggcacacagggccctggggagccacggagct

SEQ ID NO: 225648 - DNA, 122 bp, Homo sapiens
tccgccaggagccggtgtccggcggctgcagcctgggctgtgtccagcagcaccaggtggcgccctcgcacccacgcccccgacccgttctccattagtggctccgatactccgcgtccatc

SEQ ID NO: 225649 - DNA, 122 bp, Homo sapiens
gggaccttggcttgtttccagttttttggttaattacaagccccgtgctgctgtggacatcgtgtgccagtcttctgcgtgtgtctttctggatgggcagggcctgtcttaagcatgtaccg

SEQ ID NO: 225650 - DNA, 122 bp, Homo sapiens
ggttcggacacggttcgcgcgcgccgccctccgggtttggcagggccgggcgccccctcgcggcagctctggggaatctctgaaaatcagcgccttgattttttccaggccgtgattttgga

SEQ ID NO: 225651 - DNA, 122 bp, Homo sapiens
gctcacagtggctcgggagggagtctcccaagggttttacaatttgctggctatgtcccacgtgtgtgccacaaggagacgttagataccaggagccattgttggatgtttaaaacaccctg

SEQ ID NO: 225652 - DNA, 122 bp, Homo sapiens
cgcgccgcgcgggtcctggctccctcccaggggggggccgggccaaggcacagccggaggcgtggggccaattaacattttgattgcgggactggggggccatctggaccgaggcctaatta

SEQ ID NO: 225653 - DNA, 122 bp, Homo sapiens
ccgaagggaacagctggagcaggcccaaccccaggtggccctggggttccgtggttgacccggaagcaagtcaggcagggagccaggaatgtggtgactcacattagctatgtggagagaga

SEQ ID NO: 225654 - DNA, 122 bp, Homo sapiens
aggcttatttcgctccccgtgggggggatgatggatccggagccttcgtgggcctggggccgcgcccaccctgccgccccttcccgggggacgggcgtgtcctggccccggagccctcggcg

SEQ ID NO: 225655 - DNA, 122 bp, Homo sapiens
gctgaatgacgactggtacctgaagtacatcacgctgaagacgccccacggggactacatcgagttcccctgctaccgctggatcaccggcgatgtcgaggttgtcctgagggatggacgcg

SEQ ID NO: 225656 - DNA, 122 bp, Homo sapiens
ctctcagtctgagttttcttatttgcaaagtgagggtagtaattccaatcttgggagggacgattaattgcatgtgaaatgcccaccacagagcctgactgaaagcaggagtttagaaaaga

SEQ ID NO: 225657 - DNA, 122 bp, Homo sapiens
ccgggcgtcgaggagggcagcattgtgacccgggccgcggcgcgctgacctcacagagcacgttcctcccactggagaacccccaacggtgccccctgccgcccctggcactcagcgcgggc

SEQ ID NO: 225658 - DNA, 122 bp, Homo sapiens
cgatgtcaatcagctgcagttcccgcccccggataaggtaagcccccccacgcccctccacgttgccgggtgtgcacccccaaatctcgcacggcgggcgcaacaaaagaaacgcgccgcgt

SEQ ID NO: 225659 - DNA, 122 bp, Homo sapiens
caccgcttcctggtggtcacgccgcgggcaggacgcgggaggccaggtccgtgcatcccgcgtgtcctgagcttcggcccagggtccctccgtgccccggaaccccgccggctttcttcggc

SEQ ID NO: 225660 - DNA, 122 bp, Homo sapiens
cagggcctttccctgggagtccctgtgggggcttcatcagagggtgtgctcaggtcaacccgggctcctgcgccagcagagttttgagaccagacaccttgccacttgctggagggagagcc

SEQ ID NO: 225661 - DNA, 122 bp, Homo sapiens
ctaccagctgtgtgcccggtacttctgcggggtccccagccccctcagggacatgtttcccgtgcggcccttggacacggaacccccggcagccagccacacggccaacccaaaggtgcctg

SEQ ID NO: 225662 - DNA, 122 bp, Homo sapiens
gaggaggaatcccctgtaagcccctaccagtcccagagaatgcaaagccctcttgcaaaccgtgcctgctccacgccccagaccactccttcccccaacccttccccattctactcaacctt

SEQ ID NO: 225663 - DNA, 122 bp, Homo sapiens
aggaactcccgcctagtgtgggcccccaggttagcccttctagggctgtcctggcggggacgcaaagtggccacctgcccagctgcccgcttccagaggcgtcctccctgcgccgcccgaga

SEQ ID NO: 225664 - DNA, 122 bp, Homo sapiens
gcactgcggagctccctcggcctctctcctcctctggtccctaaggcccggagtggttggcggtactggggcccgtcgtcatctctgcttctaaggcattcagactgggctccagctgggac

SEQ ID NO: 225665 - DNA, 122 bp, Homo sapiens
atgggccttccgaggtcgggccgtgccccgctgggcagcgcagagggggtgtgtagggcacgcgacttggagccaggtccagacccatcctggctcctctcagggctccttcccctgccccc

SEQ ID NO: 225666 - DNA, 122 bp, Homo sapiens
cgccagcactgagctgttctggacagcgacccaggcgggcaggggcctccggccctggagcgggtgggacccctgctgtccaggacgtgggaggaggcccccaacctgcactgtccggctgg

SEQ ID NO: 225667 - DNA, 122 bp, Homo sapiens
acggagaaggggcggcgggtgagtccctggctggggacctcccaccctctccctggacagcgccaagcccccgcatgctgaagcaaactctgcccgctcaggtaggtccccagatcggggca

SEQ ID NO: 225668 - DNA, 122 bp, Homo sapiens
ttccagtatggtgcataagttacttattaatatatacattgtttacggtggttctaccttcgctaaaatctaggctcttaggctccatgagggcaggaatttttgtcgtcttgttcacagtt

SEQ ID NO: 225669 - DNA, 122 bp, Homo sapiens
gtgccgttgaaacatctcaggtttaaacctggcattggctatcttcacacattcctcaagcgttgtgatgaacgtgttacacgtggcactaagcagagaagaggcttcattgatgttctctg

SEQ ID NO: 225670 - DNA, 122 bp, Homo sapiens
ttctacctaacctatacttctgtgacccggtgtgttccactctaagccgttgcccctcagcgcactttcggtccacccagctcttgcgccctctcacgctttttcgcgcttgtgctctcaca

SEQ ID NO: 225671 - DNA, 122 bp, Homo sapiens
tttgtcttcggtgacgggaagtgagtttcttgtgtagacgtctgtaaacgatcctcctgccgtccctgttcggcgcccgggaccctgccttcccgcgtggccgcaccgagacgagggagcct

SEQ ID NO: 225672 - DNA, 122 bp, Homo sapiens
acggggcatgtgaagacacacctgaaagttagagccagtttatgtagaaaacattctccccgaggcacctaaaagtagggaaaaaaaaagacaagaggtattccaatgcctgtcaaaaaggt

SEQ ID NO: 225673 - DNA, 122 bp, Homo sapiens
cagatgtacaagagaatgaagaaactagagagtgatctctaagacacagaataaagaaaacgaggtgctgaaattgtatatggtctgtcatcttttgtattagcaacagcagtggggaaagg

SEQ ID NO: 225674 - DNA, 122 bp, Homo sapiens
ttgctcagagtggccacagagaggttaacgcttctgctggcttccctgctgcgctggggacgcgtggtgggtgggcactcataggttgggggccgttgagacaagggctccagaagctccag

SEQ ID NO: 225675 - DNA, 122 bp, Homo sapiens
cagggggagcggaaatgtcaacagaacagacacttcgcgtcaataaactttaggtttatccggagcagatctcatttccctgagtacgatccagaggaggccagaagtaagaagccttccca

SEQ ID NO: 225676 - DNA, 122 bp, Homo sapiens
cttgtgtgcagtgtctgcccccatcaactccgtgctgttgttcctcatggggatggcgtgcgccacaccgctgctgagtgctgctgggcccgtggctgcccctagggaagccttccgggggc

SEQ ID NO: 225677 - DNA, 122 bp, Homo sapiens
tcagttcaaccgactcactgcatgatatattggcctttctgggtctttggtggctatactcgtttggcttttctccttcccagcttggaggctgctttatccaaatgctttcttcagtcctc

SEQ ID NO: 225678 - DNA, 122 bp, Homo sapiens
ccagtccccccaccaccaaaaacaaaaacaaaaacagagcatgaacacccagatgtctgacgtcccagctccccacaataatggaaaagggatcccagtagctacctgcccccacagaaccg

SEQ ID NO: 225679 - DNA, 122 bp, Homo sapiens
tatatatatatattggtggattcggtttccctttatgtttctcagaaaaccgtgtgagcccgtttggagtcactccgtctccaagcgacaggcacttccggacgcggggcactgtgggaagt

SEQ ID NO: 225680 - DNA, 122 bp, Homo sapiens
gaggggacgggcgggacctccgcggacagccccgggtgcggaccagcgggcagcggccggcgagaccctccctggatccgcccagagcttaccggaccctgcgcgcccccgtcccggctccc

SEQ ID NO: 225681 - DNA, 122 bp, Homo sapiens
gacagctcccccaaccaccatgctttctggtgaaacaagaatcaaaactaaaaccaatgccggcatttttttcactgaactatgcctccattctgaaacattgatactcgagatggtggtgg

SEQ ID NO: 225682 - DNA, 122 bp, Homo sapiens
gatgtgcagaatgtggcagccgccccagagctggcgatgggagccctggagctggaaagccggaattcaactctggaccctgggaagcctgagatgatgaagtcccccacaaacaccacccc

SEQ ID NO: 225683 - DNA, 122 bp, Homo sapiens
gaactctgcacacagtcctgggtctggttgggggggcaacctctgggcactgcacactcacgttgttcttcctccggtgggcacacacaggggagtcttattgactcccctggcccgacagt

SEQ ID NO: 225684 - DNA, 122 bp, Homo sapiens
tgcctcttgccagctgtgtggcctagagtgagtccgacctctctgggcctcagcttcctccgggatgaatgcagtcacggaacgcgccaatgcaggaggcccccaggacatcctgagcgctc

SEQ ID NO: 225685 - DNA, 122 bp, Homo sapiens
ccggcggggggagcgggtgtagcggaggagcaggcggaagtgacgtagggccccagcgcccgggccatggcggcggcggtggcgggagctgctgtctgagcagcggttgcggaccgagcgaa

SEQ ID NO: 225686 - DNA, 122 bp, Homo sapiens
gctgccgccccaggacccgcacctgcccctcacctccctggtctccatcaacgcggacaacggccacctattcgccctcaggtctttggactacgaggccctgcaggagttcgggtttcgcg

SEQ ID NO: 225687 - DNA, 122 bp, Homo sapiens
gggagtcggctcgggctaagctggccagggcgtctccaggcagtgaaacagaggcggggtcggcgggcgattagcggccgaggcacgctcctcttggggcgggctgggcgcccctcgctggg

SEQ ID NO: 225688 - DNA, 122 bp, Homo sapiens
atctgcggggtgcagtagccagtagaggcggccccgtgtatgcctcggggctgggcgtcccgcagagggggttactcactgctgactcagccccaggtgctcatttgcatgttactcatttc

SEQ ID NO: 225689 - DNA, 122 bp, Homo sapiens
gaaagtaaataagctagaaatcaatagaacgtatggttctctacataaaaaaacttgccccgaaataaaaacaaagccaaaaagtcttctattttctaagaattgggaacatatagagaggg

SEQ ID NO: 225690 - DNA, 122 bp, Homo sapiens
cccgccccctagcgccgcggtcggagccatttcgccgattcctccatgcgagttgctgtgcgtttctctgttgtctcggtagaaggccagagtcacacacggtcctaagagctgggcaccag

SEQ ID NO: 225691 - DNA, 122 bp, Homo sapiens
tcagggaagcttcatctggccagttagacatagccccagccctggcttggggccaagtttcggaattagtacaaagagaagcaaaggctgcaggtccaggccctggcttgtctacaccgctc

SEQ ID NO: 225692 - DNA, 122 bp, Homo sapiens
gaggaggagagaaaacgtctgtggtttcgttttccttcctggatttcgacaatgtggatgcgtccttgggggaaaggtgggctcgggatccaggcatagaccgtgcgggggcctctccagga

SEQ ID NO: 225693 - DNA, 122 bp, Homo sapiens
tacccaattcccagtaatgctacagcgaagtctccttcacatcagtagcgagaattacaacgcccagtgtcttagtcacaactcttcctgacgctgctccctggggctctgctgggaatccc

SEQ ID NO: 225694 - DNA, 122 bp, Homo sapiens
ctgtaatgtttctgcagttctaataaaaacagcagccagaacacaagggccactgtctatcgagaacgtaagaaacagtgagcccagcctcgttcacacttgataaagccaactcagtgatc

SEQ ID NO: 225695 - DNA, 122 bp, Homo sapiens
gacgaaactcacccagtcacctgttggctctgctacagatttgggtagctgagaaccaggcgctggacgcaaagggaaacagctaggtagagctcgatgatggaggatggggacagtaggcg

SEQ ID NO: 225696 - DNA, 122 bp, Homo sapiens
gtagataaaagggaaaaattaaaagcaactaccaggctcttacctggaaaaatagaaacacggtgggtgggtgagctggtgaaaataataaaataatacaggtaaaatccttgctcttctgc

SEQ ID NO: 225697 - DNA, 122 bp, Homo sapiens
tcccaaagcaaaatcaatcaagcctccctgtctttggtgcttcttaacacccggcgagtgcgctcagcggctgaggttgtaactgctccctggggttggggttggggagggcaggaaggtaa

SEQ ID NO: 225698 - DNA, 122 bp, Homo sapiens
tggcggcggcagcatggcggcgggggcggctgaggcagctgtagcggccgtggaggaggtcggctcagccgggcagtttgaggagctgctgcgcctcaaagccaagtaagcggggcggcgag

SEQ ID NO: 225699 - DNA, 122 bp, Homo sapiens
tcagagcccctcgagtcgtagccgagctccgggcctcgccgcagccctccccacgctgggcgccccgctacctggcgctgcttctgcgctgggtccccgcatccagcactggccgcagggac

SEQ ID NO: 225700 - DNA, 122 bp, Homo sapiens
gggctggcctgagccgtggggccgtaggaggcgtcgtttccccaaagtcgtggggtcggccgctgctggttaccttggtcacacaactctgcgggaggcgcccaagggtccaggtccaagtt

SEQ ID NO: 225701 - DNA, 122 bp, Homo sapiens
ctcaggtgatctgcccacctcggcctcccaaagtgctgggattacaggcgtgagccatcgcgcccggccaggagtgtcgtaattttaaataggatggtcaaggtaggtctcattgagaaggg

SEQ ID NO: 225702 - DNA, 122 bp, Homo sapiens
caattagatctcttcctcgcggaaggggagaagcatcccaggcacctcgcccggccttatcgcacccttccaggaagacccgatccacccacctcgcggtctcggaggcagcgctgcagccc

SEQ ID NO: 225703 - DNA, 122 bp, Homo sapiens
cgccttttaaactgcgtttctacctcctctcgctcagcgcggcggctaatggaacccgcgcgagccgtctcgccaatcaccgccgcgcttcctcccgtcgcccgccaatggcggcgcgcgtt

SEQ ID NO: 225704 - DNA, 122 bp, Homo sapiens
taacatgcccattgcttctctcttccctgaagagatgtataaaagaggcttcttccagggcgaagctcagcagaatatgccacactgttttccataagtaaaatggctggtcctctcagctc

SEQ ID NO: 225705 - DNA, 122 bp, Homo sapiens
ccaaccctctaatcttccggaggaggaaacccaagctcaggaaggtcacgtggtagccgtcgggatgagactggggccttcggagtgcctgttattcccagacggtttactaagtggtgatc

SEQ ID NO: 225706 - DNA, 122 bp, Homo sapiens
actgaaccaaaggcagttgcggccgaagtgcaggcgacacacagggttacacatcaccttcggagatttcctccaggaatcaagacgcttcccccttgggtccagcgactcacaggtgaccc

SEQ ID NO: 225707 - DNA, 122 bp, Homo sapiens
aagaaggggcctggggagtgggtcagggtcgcgctggcccggcgccagaggcaactccctcgcggcggcggacgcagggtggggcgggacgggatgggggctggaggggtcccactcacagg

SEQ ID NO: 225708 - DNA, 122 bp, Homo sapiens
ctggaggcaggacagaacagcaggaacctagcagcagcaggcaaggagaggtgaggcaggcgagtggtgaggtttacagggcaggcactgcacaccaaaggccttgcgatccaagtgaaggg

SEQ ID NO: 225709 - DNA, 122 bp, Homo sapiens
ccccgccacgctcgccgattcccctgcgccgtcgcgggtcgggcagccggatgaccgacccgaaagcctaggctttgggaatgagactgatggacacaaaagcgccatttatctagagctca

SEQ ID NO: 225710 - DNA, 122 bp, Homo sapiens
cctccccacgccacgtctggaaaagatgcaggcagaggtgggaggaggagctggcggcggcgcctgccccctggtggtcacgatggagagctgcccattgcacctcccactcccctcagccc

SEQ ID NO: 225711 - DNA, 122 bp, Homo sapiens
acggaactcatcacaaggctcgtatgtttggtgctctgaccgccaggtcgtacctggccgcgatgacctgtcaggtttacctgttgggtgggacatgcaaatgagcgcccggggcaccctgg

SEQ ID NO: 225712 - DNA, 122 bp, Homo sapiens
cttccgaccagcagcgggccagtggtcgacgtaggcgggcggcgtggcggggcggaaaaccgtttccgggagagaccttccgtggtggacgtcgccccaggctcccacacttagaaaactaa

SEQ ID NO: 225713 - DNA, 122 bp, Homo sapiens
tagactgtcagcattacatcaaggcatatgtctgattgataggtctaccaggcacccttacgtacaatcaaaactcagcctgtcttgaagataattaccagcttcagcacatctcagctgct

SEQ ID NO: 225714 - DNA, 122 bp, Homo sapiens
tgtgcgtttgtgtgtgtgtttgtgtgtgtgtgcgtgtgtgtgtgtgtgtgtatcttttgccgctaaaagtaatattgccgtcatatgggaaactgggagagggagaaacaggtccccctggt

SEQ ID NO: 225715 - DNA, 122 bp, Homo sapiens
aaggccctatttggacacctttccccgtccctccagatggtgagcacagaggaagaattgcgttaggccctttggccccggaccagtgtctgccagccacgtgctcagcctcccgtgcgcta

SEQ ID NO: 225716 - DNA, 122 bp, Homo sapiens
aaagaaaggctgagaacacccagaacaggagagttcaggtccaggatggccagcctgttccggtcctatctgccagcaatctggctgctgctgagccaactccttagagaaagcctagcagc

SEQ ID NO: 225717 - DNA, 122 bp, Homo sapiens
tcacacagcgggtagatgacagaaacgcaacttcattcagagacatttgattccaaagcccgtgtacttgtagtcatgtattgctggctcctccagtggcactttgatagtaagaaactaga

SEQ ID NO: 225718 - DNA, 122 bp, Homo sapiens
cacagttgaatgtactggctgaatgctctggcttgacatccatcagaaccattattaaggcgtatgtgatcattcaactcagacacatatgacactcaagcaccttgtctgaaaatggagaa

SEQ ID NO: 225719 - DNA, 122 bp, Homo sapiens
cagaagggtgtttggctgactcgagtgctcagctcagctgcctggtgagatgtgccaagtcgcagtactttagaagggtgggaggcagcccgtgcctggaaacagcaccctggctgccccca

SEQ ID NO: 225720 - DNA, 122 bp, Homo sapiens
gacttagactcaaccaaccaaatgctctttccttgcatgggagaatttgtgtgagaaaggcggagaaacagagatggctgtagtaccaccagaggtcatgggataggcaagctgaacttttt

SEQ ID NO: 225721 - DNA, 122 bp, Homo sapiens
gggggccgggccttcgctggttttcttggcccggccgcgcctcccccagggtagggctgccgtgccccgccccggcccccggcccccggcccccggtatattgtttttcaggactgagagaa

SEQ ID NO: 225722 - DNA, 122 bp, Homo sapiens
ctgcctcatctctgaggctctctggagtctctccctgtctcactgggtctccggcttctgcgtctccttgtctcgttcagtgagctggtctctgcatctctccctccccacctctgttgtct

SEQ ID NO: 225723 - DNA, 122 bp, Homo sapiens
catagaatacaaggaacaggcaaagcagatcagaaactatgaagcagcaacagaggcggccggaagataacatgtcaggcatgcaacccactggctgctgagacaccggacatccacagagc

SEQ ID NO: 225724 - DNA, 122 bp, Homo sapiens
ccgccgcagcctaagctgcccctgtgcgacagcctcatgatctgggtgagtgcgaggaggcgagagggcgagggggccagggggccgaggcgaggagcctggggcgcccggttctcccaggt

SEQ ID NO: 225725 - DNA, 122 bp, Homo sapiens
acaccatgaaggtcagggcctcctaaacaaactgtagtttatctggtgagggtttcgggtcgagggttttttagatggaagaatctcagcgcttcgccttgggatatggggagaaaagcaaa

SEQ ID NO: 225726 - DNA, 122 bp, Homo sapiens
gccggtgtgaaatgcagcgccctggattgaacatcagagacggagcccacaggagtcgtgcgtttcctgcgggggctgtaacagattaccatagacataagggcttcaaacatgaatgtctg

SEQ ID NO: 225727 - DNA, 122 bp, Homo sapiens
cagcgcgctccctcccgtgccactgtgttcttccatttgcattcagtctgtctgcagctacgcgttgaagatgttactgccgtacacgctgacctaaagatgtccagcacctggtgtaaaca

SEQ ID NO: 225728 - DNA, 122 bp, Homo sapiens
gggctccagcggaagctacttcgtcaaggaccctcagggggtgagtgcgggggtggggaccgccgccgcgggctgagggccggcggcgctcctggggagttgggggcttcgcacagccagag

SEQ ID NO: 225729 - DNA, 122 bp, Homo sapiens
cctcagcccctcaaacagcctctcatgcctacgaagacagaccacagacccgatgagctgcgagcctgcgtcctcctcctcgtgcacgcgccgtgtgaggccacagttctccagcgacagtt

SEQ ID NO: 225730 - DNA, 122 bp, Homo sapiens
cacacttttgcgcctttgttcttccatttgcctttttctctgctgcagccacccagcatgcgggacccatggtttctgctcccagcccatcccccacctgtctcttcctgttggcttttcac

SEQ ID NO: 225731 - DNA, 122 bp, Homo sapiens
ctgtttttctttctcccaggctgaagcagctgagcgtcgagccctacagtcaggaagaggcggagagggcagcgggtatgggatcctatgtgccccccaggcggctggcagtgcccacggaa

SEQ ID NO: 225732 - DNA, 122 bp, Homo sapiens
ttccttctgccttgggctggcccccgttggccaaggtgctccatggccctgaaccagcgacgcccagggtcccctgggcctcacgaatgcgcggtggggaggcactttcattcgtggggggt

SEQ ID NO: 225733 - DNA, 122 bp, Homo sapiens
ggcacaaagctgagcagagcccatcggggcccaaacgtgcactcacagaggcctgctcctcgtggggtgacatcagaacgacacccgcagaaacccaaagcccaaagctgcccccgcttctc

SEQ ID NO: 225734 - DNA, 122 bp, Homo sapiens
cagactgggaacggaagtcagccctgctggggctgggagctgaagcatctgttccttcctcgcgggtgtgagacaaggaagagtgatcattggtgagggctgccctttgctcccctaggtgt

SEQ ID NO: 225735 - DNA, 122 bp, Homo sapiens
gattttattttccttctgtctccagacaggaaaatatccccttgccctggggggtggggccgcaggtctcttgcctgaggctggggttgatgccaccccagaagcaccctctgctcttgaat

SEQ ID NO: 225736 - DNA, 122 bp, Homo sapiens
ggagataaatgggctggcagcggggagaggagaaggggagcacaggaaggcaggaaacttcggcggaatatttatgctgactttatctccgtctgggtgccagcccttgaaagtggaaaatt

SEQ ID NO: 225737 - DNA, 122 bp, Homo sapiens
caaactcctccaggaagacactgagcccagacgtccctgaggtgctggcattgggccggacgaggaacttgaggaccgtccccgcctcagaacccaggaagacaacggtctggttgccccag

SEQ ID NO: 225738 - DNA, 122 bp, Homo sapiens
caacacaacacagtgctggaagctctggccggtgcacacagagagacaaggaaaccctcgcgttcaacacaacacagtgctggaagctctggccggtgcacagagcaagacgaagaaaccct

SEQ ID NO: 225739 - DNA, 122 bp, Homo sapiens
gcacaaacaaaccttatcgattgcagcagcagcagccccgtttcagacctctcaggcttccgccagtgctccacgacaccagcccgcctcggcctccagcacagccgctagcccggcccatc

SEQ ID NO: 225740 - DNA, 122 bp, Homo sapiens
aagctcagctgactcccacaaagtttgccgggaacacagggctgtcagtgacattcctggcgccaagacttaagcacgtgggttgcacgcatcggccagtgtctgtgccacgtacactgacg

SEQ ID NO: 225741 - DNA, 122 bp, Homo sapiens
atggacagcgtgaggcggctcttggaaccgcccgcgcccacctcggcgatcttgaggaagcggcccttggcgttctgcttcacatctaagtagaagcgcttgttctggatgtccagccgctt

SEQ ID NO: 225742 - DNA, 122 bp, Homo sapiens
gggagggggacccgggtgcttccagcggtccgggcccgcggacggagtgcgggccgatcccgctcactgtccccttccgcagtccgcgtgcagctccagggagctgtccgccccggtggttc

SEQ ID NO: 225743 - DNA, 122 bp, Homo sapiens
cccctcctcctcggagctgctgggggagccgcagtccacctcttggagggagggcataggcggaaggctagggccactgcctgctggcacgcggtaccccactgagctctccctccgtagca

SEQ ID NO: 225744 - DNA, 122 bp, Homo sapiens
taacaatgggatcttctgaaaagccgtgtccataattgagcctgagcgcaagggacgatccggtccacggagctcgccgtgagattctccccgctctctgagcccgctcaggggggtccacg

SEQ ID NO: 225745 - DNA, 122 bp, Homo sapiens
ccggaccctcgacggggaaggggtcagctcggcggccccagaggccactgggccagaacacgtgctccggactccacgtgcgcggaaaatgaactcgtacccgcgacgcggccggcgggggc

SEQ ID NO: 225746 - DNA, 122 bp, Homo sapiens
acttaaggacagagaaccaggctactatttcctgcagtgccacttgcccttcaccaagcccgaagatgaggtggtgggcacaataatggatatgcctctgtgctggacttctatactacctt

SEQ ID NO: 225747 - DNA, 122 bp, Homo sapiens
tgcaggtagagacaggaaaggcagactctgaacaaaacccacatcctttcctagttcctccggtgcctaagtagaaaatgcccagatttcctacaaatcaattctgaatgtccatcatccag

SEQ ID NO: 225748 - DNA, 122 bp, Homo sapiens
gaaatcacaatttgaaactagaaagatgaggtatttagccaggtgaagagtgagaactaacgtcccccagatggaacagcagtgcaaaagtcccgaggcagaaaagaactggtcccactgga

SEQ ID NO: 225749 - DNA, 122 bp, Homo sapiens
tgtgcctctttggggctttatacatatgaacattgtcactgtggagcaaattactttctgcgcatggagagggcttctgcatgcctgctcacctcacagacattatagtgatgttaggaagg

SEQ ID NO: 225750 - DNA, 122 bp, Homo sapiens
gccagcccccaggcccgcggtccttagccacggcctctgccacagcctctgcacctcccgcggggctcggtccttcttggtgctgagaacagaaaacaggccacgtcacccaaacacggagt

SEQ ID NO: 225751 - DNA, 122 bp, Homo sapiens
aatggattatttggctcctcgagttgaaacccttcattttctgggctggtgacagtcagccggttctccacacacaaagggcgttaagtggaacccccgccccggctccgcagcgtccccgc

SEQ ID NO: 225752 - DNA, 122 bp, Homo sapiens
taggtaggagtcatgctgctcctagatatctagtgtgaggtcaggctcacctggcagggccggctggatcaggagacaacagcatgacccgtgtgggagtcacctagcaggcgggaaagccg

SEQ ID NO: 225753 - DNA, 122 bp, Homo sapiens
tcggctccccctcctgccatcttccgttgcaaagcatttctgggagctgcatgtgggtgacgcagcagcattgttcgcaggcacaggaagccgcggctgagctgaagggctcgagaaggagc

SEQ ID NO: 225754 - DNA, 122 bp, Homo sapiens
agatgcttgtataattctatggaatttccagcaattaccatgttcgtttcagggatgctgcgctgggatgttggcaaaggattgtcactggcctttatgattggacgttctgaggccattcc

SEQ ID NO: 225755 - DNA, 122 bp, Homo sapiens
acctagtttccttgctttgaagtcagtatattttggaaaaaaaccaaacaatttccaaggcgctcaagtggaaaggaatgtaaagtccaacatttcgggcacagggctacagcagagaaggc

SEQ ID NO: 225756 - DNA, 122 bp, Homo sapiens
aaactaaatgacccaaataaggcagatactatggggctcagccaagtaaaccattctgtccgcactggtatcccagccatgtcttatttatttacctagctttactttagatttttatctta

SEQ ID NO: 225757 - DNA, 122 bp, Homo sapiens
gcgacccgcagcaggcgccgcacgcgcttcgtatttcagaaggtgggtcctggcgtggcccgatgggaaaagctgctggccaggtcaggcctgccctgaccaggtaccctacccctgcccgg

SEQ ID NO: 225758 - DNA, 122 bp, Homo sapiens
tcatcccgccctgcagggccgctctgggttcggagggcgcgtagggagggcgggtcaggccgcacaatgagcttaattgaggttaatgcctcccgcagctccgcgattattaaattatcatc

SEQ ID NO: 225759 - DNA, 122 bp, Homo sapiens
gcttgtttagactaaggctagctgggatccggttaaaggtgcagaataaaattccctgaacgtgtcggacttaaatccttgggctggaatcctcccactgcagtccccactctacctcccct

SEQ ID NO: 225760 - DNA, 122 bp, Homo sapiens
ggggtcgcgtgcacgcgcttccagcccagtgccaagaggtgggcggggtcggggttgggccgccgggagggaggcgaagggtctttcactgcccggggctgaaagaagggctcacagaagat

SEQ ID NO: 225761 - DNA, 122 bp, Homo sapiens
accgtgtggaggcagcaaaatacttccctgttcaaggaacagaagagagtgtggggagagcggttgcatatgcaatggagagataggcaggaggcagatccgagggaccttgtaggccatgg

SEQ ID NO: 225762 - DNA, 122 bp, Homo sapiens
gatacgccgagtcctcggaaggacatctggacaccactttcagccacctccttgcaggggcgacatccgccaaagtcatcctttattccgagtaataactttaattcctttctaacatttac

SEQ ID NO: 225763 - DNA, 122 bp, Homo sapiens
ccaagtttattaagactcactaatttacattaatatctggtaatgacaggatgttgtgctcgtaagtgctgctctatagaacagttaatataccataccaggtgagggagaacttctggtac

SEQ ID NO: 225764 - DNA, 122 bp, Homo sapiens
cctggaggtgaggtgggtgcctctggcctgtaggatgggaagctgtactggtgcgatgcacggacagacaagattgaacggatcgacctggagacaggtgagaaccgcgaggtggttctgtc

SEQ ID NO: 225765 - DNA, 122 bp, Homo sapiens
acgcctgcatcatcccctggacagccatgcagaacccgccctgtgcaggcattggagggccggggacaggaggctaaccctccatggtggggtccaggctaccccgcacagcatcctgcaag

SEQ ID NO: 225766 - DNA, 122 bp, Homo sapiens
gtgactgagcctagggacctagtcccgcctccagccctccccttgccgcctgcccaggcccgtctgctcacccctggatatacttctttgtcaagagaagcagaggtgtggacgctgtgtat

SEQ ID NO: 225767 - DNA, 122 bp, Homo sapiens
aaactgtggaatcaagctgatatttactactaagtacacacttagaaattatgcaacatacgccaatgagcttttttgttttatcatctcagagtgaagttgctgaaaccaggaactgtaat

SEQ ID NO: 225768 - DNA, 122 bp, Homo sapiens
cacggtgctgggcgcgctgggcagcgagttcttgcgggagtgggaggcgcaggacatgcgcgtgaccctcttcaagctgctgctgctgtggttggtgttaagtctcctgggcatccagctgg

SEQ ID NO: 225769 - DNA, 122 bp, Homo sapiens
accttttgctcagtggcacagctctgggttccccagggtgccgaacatgtttaaggtcatcggctcacccactgcccagcctatgatgtcaaacatcctgcgtctttgaatgtgcttggatc

SEQ ID NO: 225770 - DNA, 122 bp, Homo sapiens
ccccccccacacacacacatcccttgctaaattattacatcaaatcatacaggaatctggcgctatcagagccagggttaaggcctaatagtgtcactagttactgagcttcttgattaagt

SEQ ID NO: 225771 - DNA, 122 bp, Homo sapiens
gagcactcacactgaaaccagtgggtccccaggtggactgaggaaccacaaggaccaccacggcgggcacccggccctcgcatgcacacacgggcaactttacaacctggcctgggaagaag

SEQ ID NO: 225772 - DNA, 122 bp, Homo sapiens
cgcgcgcctcaggcggcaggcgaacgacgtgcggcaccgggcggagctagggggcgggggcggagctgataccgaagctcctattggccgtcggggacgccccgcctctctctggcgttgca

SEQ ID NO: 225773 - DNA, 122 bp, Homo sapiens
atctgtgggtcagcggaactggaatccagatcttttgcaggacgccctggggggatggcacgtagcccccagagccgttggccaccggacggcctcctcgggtggacggggcagagcgggcc

SEQ ID NO: 225774 - DNA, 122 bp, Homo sapiens
attctcttgctatcctaattttttgccggctcaaaggactaaccgttttccccaaacacgcggccctgagcctccggtgctttgcgaaagccgtcccctccggctggaatgttctttgtctc

SEQ ID NO: 225775 - DNA, 122 bp, Homo sapiens
gagtcccgccacagccacttcccacaggtttcaaccagcccttcccctctctcgggatgtcggacggcactctcaccatttctaggcttccagagggtcctggagtcttagctgtggatctc

SEQ ID NO: 225776 - DNA, 122 bp, Homo sapiens
aggaaaggaagaaagccaggcaagagggaaggggtgacatcaaacgtgccctctgtatttcgctccagaaaacagctcacaattatgactacctgccttgttttgcagctcagcataaaagt

SEQ ID NO: 225777 - DNA, 122 bp, Homo sapiens
cagggggtgacggagaaaagctgtgggcgccctcgcccccctttgctcacccgcactccacgctctgcggagaggctctgccggcagccccatgtgattccccgctctgcctagccggtttc

SEQ ID NO: 225778 - DNA, 122 bp, Homo sapiens
ggagaagccgctgggtcccgcgccaggctcgcggtggcttcagagtagcaggggagcaggcggctgatccggaggccagtgtggggccggcaagcggtgactgtctccagaggagcaaagga

SEQ ID NO: 225779 - DNA, 122 bp, Homo sapiens
tcccagctccagctcggcctttgggtttgctgtggtgtccttgtctcctgcaggaccggccgcagcatggacgctcccaggcggtttccgacgctcgtgcaactgatgcagccaaaagcaat

SEQ ID NO: 225780 - DNA, 122 bp, Homo sapiens
cccaccagaaggaagaaactccgaacacatctgaacatcagaaggaacaaactccggacacgctgcctttaagaactgtaacactcacggcgagggtccgcgactttattcttgaagtcagt

SEQ ID NO: 225781 - DNA, 122 bp, Homo sapiens
ggcagcactcctgtgcctcagtgtcacccttgggcctcaccctcaacccccaacctcacccgataagacctcggggccacagctcgccaggtggaatttctgctgctgtccggccattaacc

SEQ ID NO: 225782 - DNA, 122 bp, Homo sapiens
ggcgcccagcctacatccactgaggacccactagccgcgtacgagcaaccaagtgggaggcggcttccggtttcccgggtgggcggagggaaggcggggcaagcacagcgagcgtgcgcaat

SEQ ID NO: 225783 - DNA, 122 bp, Homo sapiens
acgtcctgcacacaggcaccatcccctcaattaaaaccagctggaggcggcggccttggccgtcaactcggctgctggctaacaggacaggccgaagcggcgctgcgcctgcagttacggcg

SEQ ID NO: 225784 - DNA, 122 bp, Homo sapiens
gggtgagaggcagaggaggggcaggccgggaggaggggcaggccgggaggaggggaaggccggggaaggacagcagctgctgtcctgcagggccgggtcatctccacctgcacttgtttttc

SEQ ID NO: 225785 - DNA, 122 bp, Homo sapiens
gcaggggctgaaggacgtgggcgccaacgtgcgcgcaggcatcagcggctttgggggcggcgtggtggagggcgtcaagggcagcctctctggcctctcacaggccacccacaccgccgtgg

SEQ ID NO: 225786 - DNA, 122 bp, Homo sapiens
gcttcccaacgggactatccaaagtgcagttgcaggacctgccaggagcccgcagggctgcgggtggttcttgcgtaatcgcgccaagaaagacctggttccagtttcagggacaactcgcc

SEQ ID NO: 225787 - DNA, 122 bp, Homo sapiens
ggagcgggggcttggatgagacccatgattcacctctcttgagtccttaccagactaagacgtcctcaagggccagagaccagcctgccactcaccattttgccaccagacacagatgagaa

SEQ ID NO: 225788 - DNA, 122 bp, Homo sapiens
aacaacggggacaagtgggaggccgagatcgccgccaacatccaggctgactacttgtatcggtgacgccccaccggcccgcagcccctgctgcccaataaaaccactccgaccccacggcc

SEQ ID NO: 225789 - DNA, 122 bp, Homo sapiens
cagtgcagcagccttcctgaaggcacgctgggctgccttcacctaccttattgatgacctcgaccttgacttcttcctggtcagcaatggccttctctttgctgaccttctcggcctcgatg

SEQ ID NO: 225790 - DNA, 122 bp, Homo sapiens
actggggacccgacctggcgcccgttcaacagacccaagcctcccatcccagcatcgggccgtgatgtgccgtccattacacaacgatggaatctgctctgggaagaataaatggctctggt

SEQ ID NO: 225791 - DNA, 122 bp, Homo sapiens
tcaggactgaaagggcacagacaggtcactgccagcattgttggggcaagcctgcaagcacgcatcactggggatctgacatgacaatggccgcctgccccctctgagggctacaggactta

SEQ ID NO: 225792 - DNA, 122 bp, Homo sapiens
cgcggtgctcagggtgacccgggagcgggtctggctcagggggcagtgggagcccgggctcgtcggagggtgcagcgcggggtcccgccgagccatccagacgcaggccccgcggggcgcac

SEQ ID NO: 225793 - DNA, 122 bp, Homo sapiens
ggcagccgaacttggaagacttgaagcgacggatgatgtcctggagggtggcagccaccacgaaatactcctgcttcagccgcagctccttcccttcgaagaactggggacagcatgaggca

SEQ ID NO: 225794 - DNA, 122 bp, Homo sapiens
agctctccgcagtaacacgtcgcaggggtcccgggcggcgcccgccccctccgccgccagcgcaaccgcctgagcttacctgcctcatgtttagaatcccatgacccatccggcagggagcg

SEQ ID NO: 225795 - DNA, 122 bp, Homo sapiens
tgacacgcttctctgagagttcccagcgggcgcaatcacccatcaaggagaaaggcattccgtagaaatggtcaaagccatgatggagagggtggtggcaatgatcactggctgactcacag

SEQ ID NO: 225796 - DNA, 122 bp, Homo sapiens
gggtgatagcggctgcggcgcctgcagtccagatcctcgcagttctgcgggcgaaggaggcgaacggaatcggcccccagtggggagcgcaacaagccacagtagccaaaccccgcgctcct

SEQ ID NO: 225797 - DNA, 122 bp, Homo sapiens
ccgcagctcagctgaccctgcctctcccgggtggctgggggtcgccagccaagggggcagcgggcggaggatgaaccccggagcaagggaaagcgacagcgcgcgccttcaccctaccgcca

SEQ ID NO: 225798 - DNA, 122 bp, Homo sapiens
agcagataaaaagtacatatacagttcatacaataatcttatgtatgtaaaaccccgttacgatgtcggcgacggggcccatcagtaactattacgtggactcgctcatctctcacgacaat

SEQ ID NO: 225799 - DNA, 122 bp, Homo sapiens
cccccgccgtcctggggcgccgacagccccgcggccggccagggtgcgcgcctgagtgtgcggtgagcccgcgaggctgcaagcagacaaaataaacaccccgtcccatgcttcctcctccc

SEQ ID NO: 225800 - DNA, 122 bp, Homo sapiens
ccacgaaacgtcttgtgcgttttagaaaaatacgccccctggcggacgcagtttagcaaacgtaggggcggctgagtttctgccccctcctctccacgccctcgcgtcgctctacccagcgc

SEQ ID NO: 225801 - DNA, 122 bp, Homo sapiens
aaatgacctccctaagggacactacaggaaaccagccccgaagtgatttcttttgaaattcggggcagcagcaagctcatatttcttttggttagttccttcaccatggttgccagtctcag

SEQ ID NO: 225802 - DNA, 122 bp, Homo sapiens
atcacaaacacactgacaaacgcgtccctactggcctccaaagaagtgacaacttctgagcgcgtttccggcgccccttcttcacgctgagccagagggggcggggggcacgtaccacatgc

SEQ ID NO: 225803 - DNA, 122 bp, Homo sapiens
caggagcccaattggtgcccaggagctgcaggctcgggtccccagccaggcgggggactgcgggccgcccgcgctgcagggccgcgggtcaccgcagggggcgccggggcgctacgggtcct

SEQ ID NO: 225804 - DNA, 122 bp, Homo sapiens
ttgtgcattcttttcctcctcccccagcttggctccctaagcagagatttgatgtgtgcacgaaacactcatagaagctcaaatggcgaatcttcacccagaggtcacaaggtcctgggggt

SEQ ID NO: 225805 - DNA, 122 bp, Homo sapiens
cccctcctcccctcccccctgtcctcctccctctccccgtttctctcccgttccaacaagcgccttcctggtgcctccctaggtgccactgaggggagttctttgccccaagcctttcggga

SEQ ID NO: 225806 - DNA, 122 bp, Homo sapiens
tacttcaaatacatttaaatgtattacttcaaacctacacttcaaaaggtcttttcaggacgtgaatgcatacaagtgcacaatccctgtacactggccagaaccggtccatggtcggtctt

SEQ ID NO: 225807 - DNA, 122 bp, Homo sapiens
agagacgcccggtcggaggcggattcccggggaaagcctatttctgggtacccaggagcgcgtctggggaggccattcccagctttttggtttaaaagtcccgggcctacttctctgatgga

SEQ ID NO: 225808 - DNA, 122 bp, Homo sapiens
gaatgactctggggacccccattgccattgctgagctgggccacctgggacagctcctcccgctgtgatgtgctgcctggctggttctccttactgagtcctaagcatcccggccacccagc

SEQ ID NO: 225809 - DNA, 122 bp, Homo sapiens
taagcagattataatatgatctgcagtgacaaatatttgtgtcaccgatgaaaacatgagcgggaacctcacccaacaccatgtgacaaatacccgaaatggacttcctatttcaactactt

SEQ ID NO: 225810 - DNA, 122 bp, Homo sapiens
acttttctccatgacactctggggcaggctacagatagcacagcacgcgccctcgcattgcgcagatgtggctcagatcccacgctgccattcggtagatatgtgtctttagataagtgact

SEQ ID NO: 225811 - DNA, 122 bp, Homo sapiens
agaaccaggcgcccagggttccccaccccaacacaccctgcagcagagcctgtctggagacgcaaggggccgccaagaaaacgctggaaaacggggcaacgattttttttttctatttcatc

SEQ ID NO: 225812 - DNA, 122 bp, Homo sapiens
cggagaggggccgacgtgtcgaggaatgctggatccccggagccccagggcgcgcctccccgagccacatccatcactggctccttgtgacatgaacgccacttcacagtagagcgaagccc

SEQ ID NO: 225813 - DNA, 122 bp, Homo sapiens
gagggacggaggggcggggcctgggagaaatggggcggggccggacgcgggcgccgagcacgtcacgccgcgacaggcctaccagcccgcacgcactgggcgaccagcctgaggccccgccc

SEQ ID NO: 225814 - DNA, 122 bp, Homo sapiens
ccaagtctataattagcgaataatagatatcctactggtgaaataaatacaggtgacagccgtaaatgtctaacttggaactggaagtgttagagctgtgttttaaggaagctgtgttttag

SEQ ID NO: 225815 - DNA, 122 bp, Homo sapiens
actgctgcagagatccccgaagacgtagtagcactgctcggagaaggtgatcttgttgaccgtgtgccgcaggaagccgtgcttcagcaagctgctggcgtacttccgggcctcccgccgct

SEQ ID NO: 225816 - DNA, 122 bp, Homo sapiens
tttttcttcaaatagaaatgtttagtctcccaggctttcttgaatgtttccctaagaaggcgtccaggtttatgaagctgagcagcttctggatctttaaggcagtgtggggaatggcaggg

SEQ ID NO: 225817 - DNA, 122 bp, Homo sapiens
ccacggacaacaccgaccacgggcctgagataggcctgcaggatcgagggtgggcggccacgagcgctcgccttacctgcctggctgtccctgggcttacactggacctcctccacgcactc

SEQ ID NO: 225818 - DNA, 122 bp, Homo sapiens
ctggcgcctgcagcaggacttcccgctcagagcccgggagtagctgttggcttccgggcgcgccgcgttgaatcgcggctgcggggtcgtcccgtccttcccggggggagcatctgcggacc

SEQ ID NO: 225819 - DNA, 122 bp, Homo sapiens
agagacccggggagcatctgggcttccaaggtcctcggtacggcccaaggcagcgaaggacgcgcggctccaggctgcgggagccaggacgaccgggggctcccagagcgcgaagtcgcgat

SEQ ID NO: 225820 - DNA, 122 bp, Homo sapiens
ctcacatgaccaagagagggatcatcgctcaacgtctcataaggtcactaatcccattcacgaaggctccaccctcatgacctaataattacctcccaaaggcccttcatccaaatactatc

SEQ ID NO: 225821 - DNA, 122 bp, Homo sapiens
gcagactatacccaggtagccacgcgaggctctgttcaataaaataaaaattcagtttctcggtcgcagcagctgcacttcaacgtgctcacttatcacctgtagctaaaggctgcagggac

SEQ ID NO: 225822 - DNA, 122 bp, Homo sapiens
agatttcttttatgattcctacagcagaaaaatgagaaacgtttgttattatttttttttcgtgtttaaggtttgaatcctcagtgaaccagggcagaaaagaatgatgaaatccttgagag

SEQ ID NO: 225823 - DNA, 122 bp, Homo sapiens
actcctcagcccttggtggtcgatgggactgggcaccgtggagcagggggcagtgctcgtcggggaggctggggcctcacaggagcccatggagcgggtgggaggctcaggcatggcgggct

SEQ ID NO: 225824 - DNA, 122 bp, Homo sapiens
ctggcaaggagggctgggtgccggccagcagcctgtccgtccggctcggcccgtccggctcggcccagtgcctgagcagctcaggtaaggcccacgtgccccgagcccacccgtgacgctgc

SEQ ID NO: 225825 - DNA, 122 bp, Homo sapiens
ggtaatccgcccgccttggcctcccaaagtgctgggattacagttgtaagctaccacgcccgagcaaatacatttttagtaaagttctgaggcaaatgatgaaaacagggttagtataaaat

SEQ ID NO: 225826 - DNA, 122 bp, Homo sapiens
gaggttacctatgcttgctctgaaatgatgacagtgccgtggctgggccgtctagggagacgttggcacaatctggtttacagaaaggggctgcagatgtacctcctacattagacctccac

SEQ ID NO: 225827 - DNA, 122 bp, Homo sapiens
ccagtcctccccgccagcggggccgagagcccggcgactcttgcgtgaccgagcgggctccgctgcctacggcagcccacccccagcccctgctctgaggcaccgagaaacgaggaggcccg

SEQ ID NO: 225828 - DNA, 122 bp, Homo sapiens
ggccctgacacccggcatttatttaaagcctcgaggctggatgcggttgcgacagcagggcgtgttcagaggaaagaaggggctggagcccgggcactcgggttaggcaacgtcaaggggct

SEQ ID NO: 225829 - DNA, 122 bp, Homo sapiens
ctgggaagagcctccaggatctcacccattgcccacccctgccttcttacctggtcctctcggttttgtgctgcaggaatgctgagaaaatcctagggtaccttaacaccaacgtcctgagc

SEQ ID NO: 225830 - DNA, 122 bp, Homo sapiens
ctcctcctttgcaaaacggatcgctatgtctccttgcttggcactttgcaaattggggaacgctaagcccacattccggccacgggtttcgaacctccagcctgcacgttcccggccggtgc

SEQ ID NO: 225831 - DNA, 122 bp, Homo sapiens
gggcatgacggcagccagcacaccccaggcctggaagcaaggagaccaggtcaccccaggcgccagcctggccttaagccctgccctgaggcccagaactcagctggcccgtctgcccctgc

SEQ ID NO: 225832 - DNA, 122 bp, Homo sapiens
ccgccacccccgcccgcgcagccggggcactaaaagcaacccccggcgccccgctccgggcgccccgctcccgccacccccagcactgctcgcgtagatggcgctcctgggtcgcgaagtcc

SEQ ID NO: 225833 - DNA, 122 bp, Homo sapiens
acatatcatccttggacaccaggcagtagaagtctgtgcgggcactgtagtttcgcgagccgagatccgagacgtccacttcgctgctccggctctctcccagcgagaccccactggtgtgc

SEQ ID NO: 225834 - DNA, 122 bp, Homo sapiens
cctgcccaggccaccctagcacctaggagcgtgaattcctgatgcgggttgtgggtggcgcgccctcccggttcccgctctcgtttttgtttttggtcgggtaaggcgatgctgtagaggct

SEQ ID NO: 225835 - DNA, 122 bp, Homo sapiens
acaagggtaatagtgaagtgtttgtactcccttagtggaaacaccgaggggactttaggtcgtgatgtttaggttatttgggagcaaagggagaagacttcctccccttggccctcacagcc

SEQ ID NO: 225836 - DNA, 122 bp, Homo sapiens
tatctacacgcttcttttggagggttcctcaaaatgacatcttctaactgttagaagatccgaggatttattaaactcctgctgagaattgtgcttggtgttgagaaagacttgaggggaaa

SEQ ID NO: 225837 - DNA, 122 bp, Homo sapiens
gaccgcggggtgggccccgggcacacaggaggatcagcagcagccggtcggtaggcggagcgctgccagaggcttgggcctcacaacaaccctcacaggaccaaaacaaacggcgagacggg

SEQ ID NO: 225838 - DNA, 122 bp, Homo sapiens
aggcccccaccagcgccaccctcagctcttcgcccaggatccccctgaggctgcgccctccgcctggtactcgctttcgcccagctgcccgcccctgcgccaccccggcgcaccttaggggc

SEQ ID NO: 225839 - DNA, 122 bp, Homo sapiens
ccggaaaggtggagtggatgaatcggactatcaaaaatagtgctatactattgtcttccccgctggatatttaaaacagcaccacaaggggcgtcaaaccacctgctaaatttgagggaatg

SEQ ID NO: 225840 - DNA, 122 bp, Homo sapiens
actggcgggccgccgggtcacattgcagacgcggtacttcctcttcatctgcccacagtgcgttatctccacctttagacctggggacacagaacacaggcatcggcatcggggctgtcccg

SEQ ID NO: 225841 - DNA, 122 bp, Homo sapiens
cgttcccttccaccatctgacacccactgctaagtgtgagaggacccagggggtaattgccgggccgcaggcggccttaggaactccgcttcccgtgaggcttcgcggcggacggcgctggt

SEQ ID NO: 225842 - DNA, 122 bp, Homo sapiens
aagggaatggttttcctgagtgcctcagagagatctgccccagccctgtcacgcacaaagcgccacacacagctttggggctgagggttttacagttttccaaccacagggtgcttgctcta

SEQ ID NO: 225843 - DNA, 122 bp, Homo sapiens
gaaaaccaaggccggggaggggccgtcacttgcccagcgtcgtgctagatctcgggcctccgcctctggctgtgtagtgctccccactaagcccctcgtccccggagtgccacctgcatcca

SEQ ID NO: 225844 - DNA, 122 bp, Homo sapiens
cctccacttggtaggggaggacgtgatgctgccttttcctcaagagcatggccccgggggcggcgggggtgtggaagggaggtggtcaccttccggaagtggatttctcacattgactgttt

SEQ ID NO: 225845 - DNA, 122 bp, Homo sapiens
gtcccctcaggaagtctctctccaccactcatcatggcttctccctgcagcatgtcccctcgctgctgcaggcaggctttgccaggctgcagatgcatggccacaggcccctctggattccc

SEQ ID NO: 225846 - DNA, 122 bp, Homo sapiens
cggattgcgtcactcttctgatatatcatccttctgttcagggtttttgcactggtcattcgctttgccgggaaatctctttgctccgatatccctgtagctaactccctcacttccttcaa

SEQ ID NO: 225847 - DNA, 122 bp, Homo sapiens
cctagcgaactttcaactgaggttgggggagaagggcagggaccctcccaccatgagaatcgtaaggtaggactggagaaaaagatcagagcacatctctcatgtactctagaactctccag

SEQ ID NO: 225848 - DNA, 122 bp, Homo sapiens
tatgaagagatgtgtaaacggagactgttttcaatgccttccaagctgggacaggagaatcgggaaggggtctacagaccatggtctccactcagcttgttgaatcttcaacaatttcgagg

SEQ ID NO: 225849 - DNA, 122 bp, Homo sapiens
caaagaccgatcgcaccgcgggcaccgcagccaccgggtccagcggaccggaccgggggacgcaggccccccccgtgcgctgcacaaaagagcctggccggccggtccccagcgggggtctg

SEQ ID NO: 225850 - DNA, 122 bp, Homo sapiens
ctacttctcccccggactccttggtagtctgttagtgggagatccttgttgccgtcccttcgcctccttcaccgccgcagaccccttcaagttctagtcatggtgagtggggttccctcggg

SEQ ID NO: 225851 - DNA, 122 bp, Homo sapiens
aagagactttctttgggtttcttcccagctcacatgaccacttcactgttttcctttgcccgttggcgcaggcttctggtaactgtgtttatatgccgtagctcccagccagttgattagat

SEQ ID NO: 225852 - DNA, 122 bp, Homo sapiens
atcttcccagattgccagagccgggcgttgcctgctccgtgcgctgggaggcggtccagccggctgggttggggccaccctgcgcctcctggaaggccttatttaggagtagccgcacgtga

SEQ ID NO: 225853 - DNA, 122 bp, Homo sapiens
cacaggtgatcgctttttcagctttgtaccttcctagtgcagactcaggtcccaccagggcgcacctgcgctctggggcgtctgcgtggcaggggtggggacccgcagacgctctcaacccc

SEQ ID NO: 225854 - DNA, 122 bp, Homo sapiens
tttctgaggggagacagtgaagctaagacggagcccctgtcagacatttcggtagctgagcgatcagagaggacagggtccacacgcggcctcttactggttgtgtggaccggcattggccc

SEQ ID NO: 225855 - DNA, 122 bp, Homo sapiens
gcttgccgctgccgctccctcttcccctgcccgcgccctcgaagtccccgtctgggcccgcgcgctcaccccgtcgtcccgcgcggcccctttaagaaaagagaacgagagagtgagtgaga

SEQ ID NO: 225856 - DNA, 122 bp, Homo sapiens
ttctctctggagtattcggattgctatcactggctgatgctattgagaatgtttgtaaaacggcaatttgggacattgtctatttataatggaagtggagcttcagctatttcacatatagt

SEQ ID NO: 225857 - DNA, 122 bp, Homo sapiens
agccaactaacagaagccccttttacaacagcacgaatccactcaccaaggtggagcccacgtgacctcaacgcctcccaggaggccccacctcccaacaccatcactctgggatgaagttt

SEQ ID NO: 225858 - DNA, 122 bp, Homo sapiens
ttgattgtcctgccattccaggcctgcaacgagttcaccacccacgtgatgaatctcctgcgagagcaaagccggaccaggcccatctccccaaaggagattgagcggatggtcagcatcat

SEQ ID NO: 225859 - DNA, 122 bp, Homo sapiens
ttcttttccattatcttcttcactggttcttcttccttaaaggtaataaagcagaacccacgcctcttattggtcttgttgtccatggggagctctatggattccacctggtattaaaaaac

SEQ ID NO: 225860 - DNA, 122 bp, Homo sapiens
caagagcggcctgcctgtcttcggaactgctgaggcggtggaggccgagagcagggtcatcgtgaggcctgaagtctcttacgcttttggcagctcccctcgcagcccctctggaaacgtac

SEQ ID NO: 225861 - DNA, 122 bp, Homo sapiens
gaaaacccaaacgctttaaagtgatgtacaacgaccttggctgcctctccagccacatctcgggccacctgccttgcttttgattccccaaggacaaagaactgccagtcctctgaagcacc

SEQ ID NO: 225862 - DNA, 122 bp, Homo sapiens
ccgtgggcgcggacagctgccgggagcggcaggcgtctcgatcggggacgcaggcacttccgtccctgcagagcatcagacgcgtctcgggacactggggacaacatctcctccgcgctttc

SEQ ID NO: 225863 - DNA, 122 bp, Homo sapiens
cgcggaggaccggagagggcgattcggtaaagggaggcggacgggtgtcggggcgggaggcggtgactcacctgggaggtaatcatgatgctggagtcgatgaggaaactcatggcgaagtg

SEQ ID NO: 225864 - DNA, 122 bp, Homo sapiens
agactcacgacagcccggcggggctgcgcgcggggagcgccccgcggggctgtcccccagcgactggcccaccagggagtgccccgaaggcgccctccgccctcaggcaccgcctgcgctcc

SEQ ID NO: 225865 - DNA, 122 bp, Homo sapiens
ggatctcgatggtgtagtccagctctgccgaggccatggtgaaggcgccggcccagagcacgggtctccagccggaactcccgcttgcgcacccgtgcctcacccgggcgcctcctgggcgc

SEQ ID NO: 225866 - DNA, 122 bp, Homo sapiens
atctttgcataggtgttctgtctaatcacaattatggatgtttagggtcttgctttggtccgttaagtgatgcaagtttaagtgataaagtttacaggctctaatctggagcatgtgggtcc

SEQ ID NO: 225867 - DNA, 122 bp, Homo sapiens
aggcggcggcggctcccccgggccctcctcctgggcccgcggcgacgagcgcctcagccgcggcttctccgacggcggcttctccaccgcctggctcttgctcccggcctggctagcggagc

SEQ ID NO: 225868 - DNA, 122 bp, Homo sapiens
ttgcgatttcttacgttcttactccgtttctgtaatttgctatgttgctaagcgagtcaacgtaactacctaggaaaagtctcatgggaaccctgcaaaggggctacaacagagctactctc

SEQ ID NO: 225869 - DNA, 122 bp, Homo sapiens
ctgatgttgggatgtgttcggccttctggtggttcgtggtctcgtgagtgaagctcacagcggtgtggggaggctcaggcatggggggctgcaggacccaagccctgccctgcggggaggca

SEQ ID NO: 225870 - DNA, 122 bp, Homo sapiens
gggggagctccgttgtggggaggcggccgcggcgggtaccggtgggcggagctcagcgggcggggcggggcggggcgggggcggggggagcttcctcgtcgtcatgggaacggcgcagttat

SEQ ID NO: 225871 - DNA, 122 bp, Homo sapiens
tgctgtcccgtcctaatgataggctgcgcctagggctaattctcattcagccccagcgaacgcctctaaatattattatcgctttcggagggaggcggaaaaattgtgggatgccagagcga

SEQ ID NO: 225872 - DNA, 122 bp, Homo sapiens
agaccccaagcctgggctctggcagctggctcctttcttgcaggtctcttggaatcgcttcgcgcttgccggcctggttgtggactgagggctcctggagggcaggtcaggggtccagcccc

SEQ ID NO: 225873 - DNA, 122 bp, Homo sapiens
gacaaagcgagcagggtaagagctcgagcccgacccctctcaaaaaatatagacccggaacgcgcgcctgcgcagaacgaatcctcccgcgcacaagccgggcggaagagctggggcgggca

SEQ ID NO: 225874 - DNA, 122 bp, Homo sapiens
tggtttcttttcattaacgacaaatgaaagagctggggcctcgccaagcccctgttcaaccgatggaacctctgagaggggctgtgaccttcctgaaagcattacaggggcattgtggcaaa

SEQ ID NO: 225875 - DNA, 122 bp, Homo sapiens
tggccaaggccggagccagctccctctgcttgccagcaggtgtggagtgagagatgcgggcgggaaccggggctgcacgtggtgcttgcgggctagtgcaagttccaggtgggcccgggctc

SEQ ID NO: 225876 - DNA, 122 bp, Homo sapiens
gcagggcagctgggggggctctgcctctgtgcggctcttccgtggttccacgctgggctccggggtgaccacagtcctcagcagcccacaccctcagcccgaagggggcccaggccccgtgc

SEQ ID NO: 225877 - DNA, 122 bp, Homo sapiens
gaccccgcccctgttccagcccctagatctgcagtctggaaaggcccacagacctgggtccgctccggcaggatctcaggaaacggcccccacgtgctgttccgttgtgcagccatctcgtt

SEQ ID NO: 225878 - DNA, 122 bp, Homo sapiens
tgccacctagacgccagggcggggaccgcaaggtgggcgggaggcttggaggccgggatgcgggggaatactggtagggtgcaaggagaatgctggaggggtgcaggggggatgccgggggt

SEQ ID NO: 225879 - DNA, 122 bp, Homo sapiens
tttgactgatacgataagtagagcgctggcatttcctgatggtcccaacacgtcggcctacgaaagccagatgagctccctttgctcacacagatgccgtttgctacagagaacctgcacat

SEQ ID NO: 225880 - DNA, 122 bp, Homo sapiens
ggggaaattatcagggctttctacagattaatgctgtgtagcttcaggctcttgggtgcgcgcctcgcctgagtgtctcatccctgcttgggatgcgcccctccctgaggctcacttagagc

SEQ ID NO: 225881 - DNA, 122 bp, Homo sapiens
gcacagtgtagtttcggaaggtgctgagcgtcctcaccgtcatgtggttgccctggtgttcgatctccttgtccggcttcagcagcagcgcgatcttccgcacagccaagctgatgtctgtg

SEQ ID NO: 225882 - DNA, 122 bp, Homo sapiens
cacactgtgggaagtacccccggacaggaatactgggtctgatggatcggatagcgtcttcgaggtgttattacaaaccgatctggtaaagtcccacgatccctgcagagaatgcgagacaa

SEQ ID NO: 225883 - DNA, 122 bp, Homo sapiens
aaagaggaaggcagcggcgtccccaccgcttggctcgctagccctccgcctccctgctggcggtggcggcccctcagccacatcgggattccaccagtccctgctgtcgccgcggcagtctc

SEQ ID NO: 225884 - DNA, 122 bp, Homo sapiens
gctgttggccgaggtgctttcgcgagggtagcgctgtcctagtcctagttctccaatctgcgccgggattcctgagctgcctgggtgtggggttaaaaggcaggggccgtgggggaaaaaac

SEQ ID NO: 225885 - DNA, 122 bp, Homo sapiens
aattaaagcactcagaaccttgcttagatcaagcccgcgggggtctagggggggcacgcacggaactccacgctcgggctccgccttcgggcgcccccaaggggtctcctacccggatcgag

SEQ ID NO: 225886 - DNA, 122 bp, Homo sapiens
ccggggggagcggcctgtgagccccctcagcccagcggggtaaccttggggggcgggggccgcacaaagccctattgtggctcggggatgctgccacagagtggtttttgttcttcggctaa

SEQ ID NO: 225887 - DNA, 122 bp, Homo sapiens
tcagtggtctgctggatggtagcaatcttcttccagccccacttttcaaagagtttcacgcgggtagggttgtggagtgtggctgatgggtgcgttcggaagaaagtggggaaacgctgccg

SEQ ID NO: 225888 - DNA, 122 bp, Homo sapiens
atgcactttccgtgtgatccccaatacctttgccgtcttctgtagcaagtcagccacaaccgcaggcccgttatctgagccaatccggaagggctgtcccaatctacgaatcagatctcgaa

SEQ ID NO: 225889 - DNA, 122 bp, Homo sapiens
acgtcactgctccaggccagatggcgtgcccaccgtgtccttttgctgctggggctgcgtcgcaaagcggttgtttacttagttatgcagaggcaggcactcctaagacttcagacaccaat

SEQ ID NO: 225890 - DNA, 122 bp, Homo sapiens
tggaggcctctatagcctcacagagttaggaaggacccatcggcagatggcaactactcccgtgggtgaaatctgagtgctgtctttttgtgccttatctataaactcctttgagtatagaa

SEQ ID NO: 225891 - DNA, 122 bp, Homo sapiens
ctcgggagggtgggggagatcctcacctttgttttagtccggctggccttggccttggcccggcgctggggcttcaccgcctcggccatagacccttccgcggcgccgtcaccgtttgtttt

SEQ ID NO: 225892 - DNA, 122 bp, Homo sapiens
acgggtggggaaaggaggtgggggcggggagtattgaatggtggtggaagggtagagaggcgcggagtgaaccccacgccctgtctaaagtgtattttcagagccggcccgcctctcctcgg

SEQ ID NO: 225893 - DNA, 122 bp, Homo sapiens
gataaggccacgccaccggctaagagttccgccaggggcccagctctcaggaggcctcttcggtgccgccagcctcccgaagtcatccaaggtagcaggcaaatccggcagcagcaaactag

SEQ ID NO: 225894 - DNA, 122 bp, Homo sapiens
cccttcagggctctcctgttccaaggctgccattttctgggtctgaggcctgaggattggcgtgatcactttagttttccagttattggcggtgccagagtcccagctgcctaagctagaac

SEQ ID NO: 225895 - DNA, 122 bp, Homo sapiens
attgagagaccgggctacacacgtgtggatgtcccccgtgcatacacacaagcacccatccgataggctgggatccagctgcaagtttggacactgacaagtctcaagtctaacaggaaata

SEQ ID NO: 225896 - DNA, 122 bp, Homo sapiens
caggagctgggccctccccggttgctgggaggagacatccaccgggagtgccctccccagcgcaccgtcacggttccctctcgcacggcagcccagtgagacctgggcccgtgggcctcgcc

SEQ ID NO: 225897 - DNA, 122 bp, Homo sapiens
aaaactgtggtgtttattgatcctctgtggattgactgtatacattacacctcttcataacgtaaagactccttatgtgaatatgccaggttggcagacttgacaatgagatatgggtttgt

SEQ ID NO: 225898 - DNA, 122 bp, Homo sapiens
gccacggccgccgggggtcccccagagcgcagagggctgcccggggctggggtcgcggggcgcggccggcatcccccgctcagagggcgcggccccgccccggggagcggtgaggggggccg

SEQ ID NO: 225899 - DNA, 122 bp, Homo sapiens
tcaactgcctgtttcccccttccctggccctcctgtcttgctctcaagggaagcattttacgcatcaattgaaacccatccatcaatttgcattttttttttttaagaaagaatgaaagacc

SEQ ID NO: 225900 - DNA, 122 bp, Homo sapiens
cataaaccctcagaagtggaggtatcacggaaatgagcttaatgttttatgctttcctgtcgccttaaactgccaagaaggctggtgcacctcagaggaaagaatactcacaggaattagtt

SEQ ID NO: 225901 - DNA, 122 bp, Homo sapiens
ataatatataccacagagagtgcatcattaatgacagttttgaaagtgacagtgtctgctcgagttccctaattaatcccatagagctcagttctctaggttatttctcctagctgttagca

SEQ ID NO: 225902 - DNA, 122 bp, Homo sapiens
cggccgctgcgacccccgcctccggccgccgcggcccccggggagggaaccgacgccgcccgcaacccaagacggcgggaaaagcaagcagcgaagcctgggaagccccttcgagcaactgc

SEQ ID NO: 225903 - DNA, 122 bp, Homo sapiens
tcaaagtaggcaggggggctttgaccgttaaccgcacaatttagcctgcctgttgtgtctcgcgggccccacctccttggagtttctcagattagaaaagaacgccccagccccttataaat

SEQ ID NO: 225904 - DNA, 122 bp, Homo sapiens
gcagaagacaggggcggcagcgccaaggcgggtcaggggccggtccagccaagtttgctccggcttagataaactttctgatggcagtttttcctggttgcagcctgggttccttgtaacag

SEQ ID NO: 225905 - DNA, 122 bp, Homo sapiens
cgcctcctacctccaacgcaaagcagagacatgtctccgagctcgcaggtgggccggaggcggccgggccggctctgtcgggtcgggctcagcggccgctgggctggggcatctcccggctg

SEQ ID NO: 225906 - DNA, 122 bp, Homo sapiens
ataagttttattttttgcttttctattttttgagacaggttctcgctctcacccagactgcggccttgatctcctgggctgcagccatcctcccacctcagcctccagagtagctgagatta

SEQ ID NO: 225907 - DNA, 122 bp, Homo sapiens
ttccgcgcttttatcccaccgaccaatcgcacagcgactagcaccgattgacaagctccacggaccagccacttgcgcgtatgggcgggactaagctagccagagtctagaagcccgcgcta

SEQ ID NO: 225908 - DNA, 122 bp, Homo sapiens
gctcctgcgggacgctcgtgctgcgcaggagccaactgaggcgggagagctcagacatggcgggctgcaggtcccgagccctgccccgcggggaggcagctaaggctccacgagaaatctag

SEQ ID NO: 225909 - DNA, 122 bp, Homo sapiens
accgtgaccgcgtgcctgggcgagcccaaccacatcactcggctggagcacgctcaggcgcggctcaccctgtcctataatcgccgtggcgacctggccatccacctggtcagccccatggg

SEQ ID NO: 225910 - DNA, 122 bp, Homo sapiens
tgttcatgattcctctatgtgtgtgtgtgtctgtgttttaagaaatggggtggagtctcacgaagtcacccagactcgagtgtggttgctattcacaggcatgatcatagtacaccacagcc

SEQ ID NO: 225911 - DNA, 122 bp, Homo sapiens
agacagccctgagctgcatccctggcccttttggactttaggcaagctgctccagtcttccggcctcctcttagtcccaactcgaggggcgatggtgtttatggctcccaggatgccgcccg

SEQ ID NO: 225912 - DNA, 122 bp, Homo sapiens
cttggcagctcatggccaggggcatggccatggaacatggcttcttgtctaaagagcatccgctgcagcgcaaccacgaagacactttggcaaacgccggggttctgtttgataaggagaag

SEQ ID NO: 225913 - DNA, 122 bp, Homo sapiens
ttggtgggcggggcacaggtgggcggggagcatgcaaaacagcccagggcggcggccaatcgcggcgcgcgccgggggtccaggccccggggatccgaggcgccgcccgcgcgcagtctctg

SEQ ID NO: 225914 - DNA, 122 bp, Homo sapiens
gaatagattctcctaggcggagacacaacagggtattatggacggagggcataacaggagcgagaagctcaaagagtgaaagattggtgttgatttgtatatgtaccagagatgtaaacatg

SEQ ID NO: 225915 - DNA, 122 bp, Homo sapiens
cggtggggacaggctacggaggatttcgggacttggagtttttgcattgagtgtggtgtccgcaggtttcagcacgttcttttgggttgtaactggggaaggcatggtgctacattagagaa

SEQ ID NO: 225916 - DNA, 122 bp, Homo sapiens
gagtagcctcgcgctaacttgagcggcgcaggcgcagaggagacgtgtagaggtcacgtgcgcaggcgcagactgagactcaaaagttggcatatgcatccgcgtttcccagatctgaggct

SEQ ID NO: 225917 - DNA, 122 bp, Homo sapiens
ggaagctgctgataagcagggcataacccagtcctccctgctgactccctgtgcaaggggcggggcaggcaatgggtgcacgcatgcgtgtatgagacgtgtgcacaggggagagtcaggcc

SEQ ID NO: 225918 - DNA, 122 bp, Homo sapiens
gagctggccgagggcggagccggctccctctgcttgcggggagatatggaggaagaggcgcgagcgagaaccggggttgcatgcagcactcacaggccagcacgagttctggatgggctcgg

SEQ ID NO: 225919 - DNA, 122 bp, Homo sapiens
ggacttttttgttcctcctctactttcaggaagaaacatattgccgagtggatgccgccgcgcagcgtgtttgcttgaggcagaagcttcagcatctgctgggataactggaggaagaaata

SEQ ID NO: 225920 - DNA, 122 bp, Homo sapiens
ataagcattcattgctatgggtattttactgccttaaagaaatccaccccaattccctgccgattgatttcttaagatcacagaagaaagtggaatgaatcctagagaggccttcaagctcc

SEQ ID NO: 225921 - DNA, 122 bp, Homo sapiens
cggtcccggccggcgctgcccgcccctcagcccggggccaggatgatgcgtgctgccccccgccaggaaggagccctgcctgccttcccagcactgtcactgcacggctgtgcgatcccggg

SEQ ID NO: 225922 - DNA, 122 bp, Homo sapiens
gagagcgtgctccgggttttcggctgtggtgtggactggggtgctcttcctacatccgggcgctggggacagcagggggcaagggccggggtcggcagggaggaagggccggggtgaagccc

SEQ ID NO: 225923 - DNA, 122 bp, Homo sapiens
tgcaggtcctcgttcagggacatgaaatctccttgtcgtaggcggacttaaagtgtccttcgaggaagctcctgtccggagccaccacccagccagacagcagcatctgcaggtgcggtgcc

SEQ ID NO: 225924 - DNA, 122 bp, Homo sapiens
aagtgactacaagtctgatcccatcacctacctgtttaaaaatcccaaatatgggccagacgcagtggttcatgcctataatcccagcactttgggaggacgaggcgggtggatcacctgag

SEQ ID NO: 225925 - DNA, 122 bp, Homo sapiens
gtggagggctcaccgctgccgggcctcactgcttcgaagagaggcagcgggttaggctggcgaaggcggaatggggcgctggacgacagggaggagccgggaaagcagagatgcagtggcct

SEQ ID NO: 225926 - DNA, 122 bp, Homo sapiens
cctactgccaccctgtggtcaggaagcctaaggatgactttcttacaggtgaaagacatacgaagccacaatgatttaaggagaaactgtcaggcactttccctatttctaccaggataggg

SEQ ID NO: 225927 - DNA, 122 bp, Homo sapiens
ggatgagtggaagcttcattaggaaagaggagaagcccataggcaagtctagaaaacctacgtcccatcactgtactggaagactcatgaagtccggacaaagtgtgatacagcctggtgta

SEQ ID NO: 225928 - DNA, 122 bp, Homo sapiens
agctttactcatggcagaaggcaaagcaaaggcaggcacttcacacagtaaaagcaggagcgagagagaggtgccacactgaaacagccagatctcatgagaagtcactcactattgcaagg

SEQ ID NO: 225929 - DNA, 122 bp, Homo sapiens
gtttccgcagctggggccaccttgaagggtgtggacccctctgcctttctctctctgttccgcttgcagtttgcaagtgtatccttctgttgcatccctgaattgggacgcaggacatcgtt

SEQ ID NO: 225930 - DNA, 122 bp, Homo sapiens
gccctcgccggctcctcacatacttggcataactctgccgcgggaaggcgtgggggagggcggtggcgccgcaacgcgcatgccccggagccccgggccgcgacggggcgcgcgggccgggg

SEQ ID NO: 225931 - DNA, 122 bp, Homo sapiens
ctatcccaggaccctgtcgccacagccatgccatcgtcagtcacgcccaggcagctgacgcggttgtcatgcccagccaagacacctgggagcaaacaacagcagaatcacaccaaagccca

SEQ ID NO: 225932 - DNA, 122 bp, Homo sapiens
tgtagctcaatcctcccaaggtcagcttgtgaagaagggaaagaaaattatggaaacaggcgtctctgtaggggatgctccaagacgcatttggaggcaggaaaatgcctgaagtccctcaa

SEQ ID NO: 225933 - DNA, 122 bp, Homo sapiens
gcgccaagacgcaagagcacacgcgcaccgagcgctcggtgctggagctggtgcgccaggcgcccttcctggtcacgctgcactacgctttccagacggatgccaagctgcacctcatcctg

SEQ ID NO: 225934 - DNA, 122 bp, Homo sapiens
tcccatggagtgcaggttcctggtcccatcgtggctcccaactctctgtgggtcttcgggcgcgttgcttactttccaggctcaatttccttgcgtgttagctggggctccggcccggagtg

SEQ ID NO: 225935 - DNA, 122 bp, Homo sapiens
ccttccacacagtgtgtgcgagtgaaggcttcgaccccctcaggcaggggttgagacgcacgtccgggacagaaccgcgtggggcagggccgctcacctgcagaggtagtccagggccagtt

SEQ ID NO: 225936 - DNA, 122 bp, Homo sapiens
aatacgaatgtgtgaggaacaggtgagtttgcagctttaggggacaggtgggatggctcacgtacaggtaggaaggggccagtgtgacatgaaatgagataaaatgcagggattccagtgga

SEQ ID NO: 225937 - DNA, 122 bp, Homo sapiens
agccacgaggacggcagctggggctgtcaggagccctgggggacacttcatggccccagccgcttcccatctcctaaggaggaggggagctcagagaggtggtggcggcccggggtcgcacg

SEQ ID NO: 225938 - DNA, 122 bp, Homo sapiens
ggcttgagcctgacagcgaaaaagtttgcctgaaacggggcttgcttgctccatttgttgcgggaagtggcaggaggaaggcagcggagagagccccacttagtctggcagcagccaccgtg

SEQ ID NO: 225939 - DNA, 122 bp, Homo sapiens
cgttcacattgcaaatgacttggctgcagtaggcacagaaggtccagttccattttgacccgccccgccgcgcggcggactcccgcgatgctcctctggtcacggacttctccagagccgct

SEQ ID NO: 225940 - DNA, 122 bp, Homo sapiens
tcctgcaggccatcgcgtgtggtggagcgtccggcgcttatcgtggtcagtccccctctacgccaccgtccgattcccccgacgcccccgccgaccccggagcttgccctcagccccttcat

SEQ ID NO: 225941 - DNA, 122 bp, Homo sapiens
tcctcaaacccaaagactgagacttctaggttcttggttaaaaccttcatgaggcctttgcgacagcagacctggaccatcgccaaggcaagacttctggattcttggttagaactttcagg

SEQ ID NO: 225942 - DNA, 122 bp, Homo sapiens
ttgtgggcccacacatttctcttcctctctcagatcctggtgtatagcctggaagcaggacgccgcctcttgaagctgggtaacgttctccgtgacttcacgtgtgtcaacctcagcgacag

SEQ ID NO: 225943 - DNA, 122 bp, Homo sapiens
tagtcttttaaccgtgacttgctttccccaccattgctcagactataaccccattgtgaccgccctgactccaagtcctgtcttctcataaatagttgattaatcccccagctgaagcaatg

SEQ ID NO: 225944 - DNA, 122 bp, Homo sapiens
gggagcatgaccgtctctctgttggcacaaagcgagagcatcaaagacagcgtcagcccccgcgagggtccacgcatgctcacactctgcgctcatggatggccacacacaccctgaaaacg

SEQ ID NO: 225945 - DNA, 122 bp, Homo sapiens
gcttagattttcgaaacactgtttcatgagcgattgtctaccaatctcacactctttgaacgcaccactctaggccctgcgattgagctgccttggctctgtgctgagtgtgtaggtctttc

SEQ ID NO: 225946 - DNA, 122 bp, Homo sapiens
gcagcgagtgctgcttggcggttttgttgctgatccagacgctgcagagctgccgctccacgtgcttgcagtagaacatgtgcctgaagagcatctggtagcgagtgagggctttcctgcaa

SEQ ID NO: 225947 - DNA, 122 bp, Homo sapiens
caccccaggcgggccgtgaggggagcaccagccgttggcagcggcagcaacaggaagccgcggggtctcctcccgcacctgggaagcaggcttctcgctgttacccggtggggaatagccca

SEQ ID NO: 225948 - DNA, 122 bp, Homo sapiens
cgtcaaggacactttctttccagacccctggtgctccctgccagtagctccgggcagcagcgttgtttttaattgccttgtggtgtgtaagggagaagagctttctgggataaccaagacag

SEQ ID NO: 225949 - DNA, 122 bp, Homo sapiens
agttagcatgactcttgcaccagcttcttatctgaaaagatctaaaaatgacacaactggcgtgctctaattctgcagaggcagggctggcttctgtccaccttctcgggcataaacgggaa

SEQ ID NO: 225950 - DNA, 122 bp, Homo sapiens
gtcttgtcagttatctggagtctgaggaccattttggtgcggagtagccccgtgtgagatcgtacagtgcaggcaaggggtgggtgtgtcccgtctccctccccagcccgtggccaggcccc

SEQ ID NO: 225951 - DNA, 122 bp, Homo sapiens
gcccccctcgccgggccccgccccgcgccccccgccccgcccgcgccccccgccgggccgcgccccccgccccccatgcaccacctcctggagcagtcggcggacatggcgaccgcgctgct

SEQ ID NO: 225952 - DNA, 122 bp, Homo sapiens
gctccctggaggtccgtgctgaggcgacgcggcgaccgttctgcctggagactgcggcagcgctccgactgcccccgccgctgccgacgtggcgaccgccccccacctgctgattgggcggc

SEQ ID NO: 225953 - DNA, 122 bp, Homo sapiens
gctccgacggataggcatgatgaaaattaaaagtctccatcaccttgtgtctggctgcagcgccccagccgacaaggacgcagtggggcggaggccccccaccccgccaaattagggggaaa

SEQ ID NO: 225954 - DNA, 122 bp, Homo sapiens
gtgcttccctgcgaaaagcagggtgaagcgacgtctcggggccaggaccctgctctgtagcggggcggggggtcctccagagggagaggaggaaggaaagggcgttgggctgaggggattgg

SEQ ID NO: 225955 - DNA, 122 bp, Homo sapiens
ttttttataactacttattgtgtgccagacactgtgctaggttttagggaatcctgctctcgtggaggtgacattctgtgaggttggcaggataatgaagaggaacacaattctcagcacag

SEQ ID NO: 225956 - DNA, 122 bp, Homo sapiens
acaaaacaattagagatatcgggccatataatgcaagcacatgatgtgataaagggagaccgggctggtgatacgttgcatggaagctggttaaacctgaaggaagcccttatcttggttgc

SEQ ID NO: 225957 - DNA, 122 bp, Homo sapiens
agtgcaataactttatttctaggacctctcagagcctttgcctgtgctgttcccacttgccgggaatgcctttcccttcatccccaatagttcaagccccaccttttcctgagcccagctca

SEQ ID NO: 225958 - DNA, 122 bp, Homo sapiens
aaactgagactcaagtcagctcacacagccaaggtcacatagctaataaacggcagagaccggatctgtattcagagttttgacttcggagccggtgttcttgaatctctaggctttgttac

SEQ ID NO: 225959 - DNA, 122 bp, Homo sapiens
gcaaagacgacgaggaggctgcgaaaagttaagggccggaccgcaggctgtgctcgcttccggaagtggcttctgcgacaacatgcttgcggacctcggcttaatcggaaccataggcgagg

SEQ ID NO: 225960 - DNA, 122 bp, Homo sapiens
agtatatctaagagcttccctgagttcagtgggccactctagcaaattaatcatatccaacgagggcgttgtggaaaccccaatctagtcaatcagaagcacagggaaatccacctggagct

SEQ ID NO: 225961 - DNA, 122 bp, Homo sapiens
gtccttggtcagggaccgtaacctcctccagccctacagaggcataaagactgatgaacacgaggccgattccctacgactttgggacccagctccgcctccttggctgcttcccccacatc

SEQ ID NO: 225962 - DNA, 122 bp, Homo sapiens
agcctattggcgatggaggccagggtcagcaggtaatgctgcaggccccggccatacaaccgcgccatggacgcgtcagccaccagaagcagctccacctggcgggcccgggagatggagcg

SEQ ID NO: 225963 - DNA, 122 bp, Homo sapiens
caacgggcactgtgctctgtttgctggctctgctggttctggtgaaacagctgatgagctcggctgtgcaggacatgaactgcatccgccaggcccaccatgtggccctgctgcgcagtggt

SEQ ID NO: 225964 - DNA, 122 bp, Homo sapiens
tgggtcctctgcgaacccagagatgaggccaatcccagcagggcccaggcacagagaggccgtccttgaaccgaatctgagtgagccctgtgccccgcaccactctccccgtcgcctgcaca

SEQ ID NO: 225965 - DNA, 122 bp, Homo sapiens
ggcataatgaccgtatcagaacagacatctggtagtatacaccacatagttgccagactccgataccaagggcacatctaagttctcccaccctgatttgcatgcctcaaattcagaattag

SEQ ID NO: 225966 - DNA, 122 bp, Homo sapiens
tttggcttggagcatttccaatgcgggtcaatgcgtagtagcacttttgcgggaagctagcgttgcatggaacattaggccgcacccgcctctccaggtcccggctgggctctggttgctca

SEQ ID NO: 225967 - DNA, 122 bp, Homo sapiens
aatggtcttatgggtggtgagctgagtactgaacaatctaaaaatagcctctgattccctcgctggaatccaacctgttgataagtgatgggggtttagaagtagcaaagagcacccacatt

SEQ ID NO: 225968 - DNA, 122 bp, Homo sapiens
tgggttgccatagggcctccactctctggtttctgctctcaggggcaggacaggggagcacggctgaggtgtgagtggccagggcaggggtgcaggcagagctccagtcccagaaaatgact

SEQ ID NO: 225969 - DNA, 122 bp, Homo sapiens
agtgtggcgccagcctgtgcatgagggtggcagtgagcagggtcaccaccagctgtactccgaggaccgcctggggggaggggacatgactggcagcacctgccagagggtcacaagttccc

SEQ ID NO: 225970 - DNA, 122 bp, Homo sapiens
cccacccaggcccttgtgctctgggaaattcctcactgggccccagccatggggctgctccgacaccgggagtcagtcaggggataatgtggggctgggaggtgggcaagtcctgggaaggg

SEQ ID NO: 225971 - DNA, 122 bp, Homo sapiens
ggcggtaccggccgggggtggcccagctggggtgggcttggggccagatgggctgcgcagcggcggggaggcagggccggcaggcaggggccgcgcgttgccatggggacgggggtgggggc

SEQ ID NO: 225972 - DNA, 122 bp, Homo sapiens
cgaagtctgggcaggggatggaaacctctggcgtccccactcaacagcagggtgccaccacggcggtccggtgcatggcctcgccagcgatggcgggaggctcttggaggccggcggaaggt

SEQ ID NO: 225973 - DNA, 122 bp, Homo sapiens
ggcggagccgagtgcgcggggcggggctccagagccgcaggtctgggctgcagtaggtcccggcaaccgcaggctcgcggcgggcgctgggcgcgggatccgactctagtcgtaatggaggc

SEQ ID NO: 225974 - DNA, 122 bp, Homo sapiens
ctccacaacctaaaaacagagacgctaggagagaggctgaaagacgcgcaagtcccgccccggccccgccccggccccgccctctgccggttctaaagggcaaggtctcagcgcctcgcgcc

SEQ ID NO: 225975 - DNA, 122 bp, Homo sapiens
cttgctcctgatccccaacctgctccctccctctgtgagcacacacacacccttgagacccgcccaccaatgtatggggtggctgagatgcaccccaaggacatgagagggcaggatggcgg

SEQ ID NO: 225976 - DNA, 122 bp, Homo sapiens
ctgcaagggcggccggcaaggcggggaggcgacttctaggacccgcaagtttcccaactacgtgccggagcccgagcttcgccttcctgccgccttcctttccctctgcagttcggactgtg

SEQ ID NO: 225977 - DNA, 122 bp, Homo sapiens
cggctcttgcaagaaaatccccttgtggcctgagaataaagttttaaccagcagcaagggcgcgggccgaggcccggccaggctggaggacaggcctgcggaggtgacactcccttattctc

SEQ ID NO: 225978 - DNA, 122 bp, Homo sapiens
ttccatccaatgattgaagggtacttggtgtaattaccatgacgtcaatttttaccatgacgtcaatttgatcttatcttgtttcaacccttaggtcatttttgtttggagccattttcagg

SEQ ID NO: 225979 - DNA, 122 bp, Homo sapiens
gctgtgagcgcgggtctggggccaagagcagaggacaggagaagactgccaagccaccaccggtcctgcgacatattcaccagctgccggcggcgaggtcagaccccagattcgggtttgcc

SEQ ID NO: 225980 - DNA, 122 bp, Homo sapiens
catctgtaagtggttcaacttgcgcatgggattcggcttactgtccgtgactgcccgcgccgtggtcgcgctcgacccaccagtggacgtctttgtgcaccagagtaagctgcccatggaag

SEQ ID NO: 225981 - DNA, 122 bp, Homo sapiens
catttagcaaaggtgcaatccaaagagaaagactgaagaggtaaagggtgttatgaatggcggaggtaaaattcactagaaaagtcttttgtattggaatttggcttgaaaaatgcaagaaa

SEQ ID NO: 225982 - DNA, 122 bp, Homo sapiens
cacgggcccgcgtggggacctccagcccccgcagaggaggacgctgcccacgaggcagggcggcaccaggccaactgggagacttatgaggactcctcagaggaggtgactgtgtgctgggg

SEQ ID NO: 225983 - DNA, 122 bp, Homo sapiens
acatcacctgtcaaattccacctttgaatgaaaaggagcatactagatgagatctaatttcgtggactttgcctagaatgccactgggaacagagcacaaacagaagggggcagccttattg

SEQ ID NO: 225984 - DNA, 122 bp, Homo sapiens
ctaggcaggcgtgagggtgtgacggccgcgcattcgccagacgagagcgatggctgagaacgccgcaccaggtcgccttagactcaccaggtcgccttagacttagatgggacggggaggcc

SEQ ID NO: 225985 - DNA, 122 bp, Homo sapiens
ccacgcaggggtgagtgaaagcctggagaccctcatttgagtggaggggacccgtattagcgcataggtggtgacacggccacccccattacaccgtaaggatcccttccccagatgacgat

SEQ ID NO: 225986 - DNA, 122 bp, Homo sapiens
aggagccgccgggaccctcgcgtcgtcgccgccgcggcccagatccccacaccatgccgtcggagaagaccttcaagcagcggcgcaccttcgaacaaagagtagaagatgtccgacttatt

SEQ ID NO: 225987 - DNA, 122 bp, Homo sapiens
agtggagtggtcttaacaatccttgagttcaggctggagctggcagggaagatggggagccgcagacagcgtcctgtgctctaggaacacgggtacctgcactcaagccttaggaggcacgg

SEQ ID NO: 225988 - DNA, 122 bp, Homo sapiens
ctcctcaatgcccggggccggctccgctggctgctccgagtgcggggcccgccgagcccacgcccatccagaattcgcactggcccacaagccgcatgggcagccctggttcccacccgcgc

SEQ ID NO: 225989 - DNA, 122 bp, Homo sapiens
tcttcgagcctctgctttcaattctttcgggcagatgcccagaagtggatggctgggtcgcgcggagagtctacatttaattttgtggagacctgtcatgctgtcttccgtagtaaccgcac

SEQ ID NO: 225990 - DNA, 122 bp, Homo sapiens
ctccccagaatcccgaggagaaaagcgccaaaagccctgtttccacgggagctgacaccacggtaagttcacagcgtgtttacatgtgtttactgatttcaacttcgatgcttactctgcgg

SEQ ID NO: 225991 - DNA, 122 bp, Homo sapiens
ggcggtcgaggcggaggcggggcctttcggggaggacccgccctcccagatagacggccccgccccaccttgagagagcgggggacccctgatccccggtctgcgccacaaatctcccctca

SEQ ID NO: 225992 - DNA, 122 bp, Homo sapiens
cagaatggtaagctcttgtttattacctgggttaggacagaggagggcaaagaaggctgtcggtctctgtagcccaggaacttggattttaatgttcatttggcaataggacttgaggccat

SEQ ID NO: 225993 - DNA, 122 bp, Homo sapiens
ggcaagtccttgaatttctgtgtgcctgtttcctcaaatgtgaaatggggtaatggtgtccgcctcacagagttgttgagaataattaaatgaattaatatatgaaaagtgttggccaggca

SEQ ID NO: 225994 - DNA, 122 bp, Homo sapiens
ccttccagaggtgtcccagaaactgggacggtaatgatagcctatgtccagttctgggcacgcgtttgtggatcagaatatctcccttccctaaggggacatccctttcacatatttttttc

SEQ ID NO: 225995 - DNA, 122 bp, Homo sapiens
ggaggggggcgggggccggggagaagtgaccaggcggcggcggctctgctgaggtgacaacgtgctagcagccctcgctcgctctgggcgcctcctcggcctcagcgtccgctctggccgcg

SEQ ID NO: 225996 - DNA, 122 bp, Homo sapiens
gggaagttcgtactgggcagaacgcgacgggtctgcggcttagggtagggaggccgcaggcgacacggctcgaggactcgcgcgccgagccgggggcgcggaggcgggcggccggggctggg

SEQ ID NO: 225997 - DNA, 122 bp, Homo sapiens
gtagtgacatcttactgaagcttaataagcatcaccaggacatcgcgggagcccagcaaacgcgcttccctgccactgggttagggaaggcttgccggaaggacgatttcggaggacagcag

SEQ ID NO: 225998 - DNA, 122 bp, Homo sapiens
ccacgccccttccactgtccttgcgttttgtcatctttgggctgcccacattcagctttccggtgtcttttttatctcattcgagatcagagccctgaatctcctaggaagctacctggact

SEQ ID NO: 225999 - DNA, 122 bp, Homo sapiens
ccgcctccgtgcgccagtcccagcctcatgcggccgccgggctattgggaggtgggtggtcgcggccgcagcgccaagtcgggctggcgggctcagtgctcgctgggggcagggcggcgaac

SEQ ID NO: 226000 - DNA, 122 bp, Homo sapiens
acctcctgcacaggatgcggagcttctcagaagtagagcttcacaacatgaaattagtgccggtggtgaataacagactatttgacatgtcggccttcatggctggcccgggaaatgcaaaa

SEQ ID NO: 226001 - DNA, 122 bp, Homo sapiens
caaagctgcaatgagctgtaatcccaccactgtacaaaagagcaagaccctgtctttgcccgggggggagggaagtactcaggttgggggttaaaagttgactaaggcagtaggatccttgt

SEQ ID NO: 226002 - DNA, 122 bp, Homo sapiens
tccctaccaaggctccaagctagacccagttcatgaaggcagagagggtaggtatcaggccgaagttggtgggttcttgctcaaggttggtatttcagaactaaaatctgcaagtacatttt

SEQ ID NO: 226003 - DNA, 122 bp, Homo sapiens
aaagtgacatccctctgggttctgaagagcttaagccacctgctcggtggcgggaaagggcgtgcaaggctgaagcgggaagtgcagtgaatgagctcaggcaggacagggagctgggcctg

SEQ ID NO: 226004 - DNA, 122 bp, Homo sapiens
ctggcaaagcataacctcatattcactgtaaagggggaccgggagctgctgagtccagtccgttatctcggattcagttctagaaggcaaactgagggatgagaggcagtaactggcacaga

SEQ ID NO: 226005 - DNA, 122 bp, Homo sapiens
tgagaacaatgctgcaccacgtaccctcactgagaccccagacattctcgaagactaaatcgtctcaggtgctggagaggatgtgagagctgggagggtgaacagcagtggcccttctggaa

SEQ ID NO: 226006 - DNA, 122 bp, Homo sapiens
gaggagagggtgaaatggaaggcgatggggtgagcgaggccccgggccactgtggcttctcgctccagctctgtgtgtagggttgtttgagcccctgcaccaagtccctgtctttagaaaga

SEQ ID NO: 226007 - DNA, 122 bp, Homo sapiens
catgaaatcgtacgttccatccaggcagggctttgcattttacattccagtttgcatccccgttccagacaattccagggcttttgaatcatgcctcagccttcctggccggtctcgcctcc

SEQ ID NO: 226008 - DNA, 122 bp, Homo sapiens
accagcggtgagcttcaggcctaaatgctggagtcctaaaattactcgagtctgaccccccggtttttggtcttgctctatatttagggacaatggccctattgatgctcactcgctgaacc

SEQ ID NO: 226009 - DNA, 122 bp, Homo sapiens
ttcaacttcaacctcttgcttcatctcccatatgtgctttgtgcttggttcacagcttggcgcagaagaaagagctctgggtctgccacgagaatacagggctctgaattctgtccatgcaa

SEQ ID NO: 226010 - DNA, 122 bp, Homo sapiens
taaaaagtcctccctaatctcctgccaactaaaaagtatacatggaaaaaaagagcacaccgttaataaataactcagcaacccattttagcaggagggctgagtcaaactctctccaggca

SEQ ID NO: 226011 - DNA, 122 bp, Homo sapiens
cgagcagaatctgcactctcggtcccagcccgcggtggccaggacgaggataaggttgggcgtgagaaggacacttcgaaggggctccccgcccaggccgcaccccagctgtctgaagaaaa

SEQ ID NO: 226012 - DNA, 122 bp, Homo sapiens
tcctgatggctgcacagtaaaacactagtttccttggaggaagagttcccagaggaactgcggaaccccagtgtcttgagcgaaaggcaggacctgctttgttcaccttgtccgtgccaaca

SEQ ID NO: 226013 - DNA, 122 bp, Homo sapiens
gccgaagacgactagacctggtccccttgctcggggcttccaacttctacgccccagtgacgagaaagtcaggacctgtggtgtatgaaatagattcctttgggtttgtaacttcaggctgt

SEQ ID NO: 226014 - DNA, 122 bp, Homo sapiens
cgctctcttccaaaccaccccctcatattttccatccacctcctcgctcctgccctcccccgccctccccaacccacgcccgggtgggccaatcgctgctcggtattccaggcgctttctca

SEQ ID NO: 226015 - DNA, 122 bp, Homo sapiens
agaggccccagcgcccgcctccccggcccccgcccccacccccgcccccggctctgcccacgccctccgcccgccagcccggcagccagcgcagctccgggcctcgctccctgtgcgtcctg

SEQ ID NO: 226016 - DNA, 122 bp, Homo sapiens
accccacttagcaagttaggcataatgttacatgacctgctttcttctccatctactcctcgatttactattcttaatactaaggtatcatttagaaaccatggtgttactcgtgtttactg

SEQ ID NO: 226017 - DNA, 122 bp, Homo sapiens
tcccctgatgcctgctgtgggcctcagttttccacctgttacagagaacccctcgcccttcgggatgggttgcagttgtaggcagatctggaagatgccctagtggaggagagcactctgaa

SEQ ID NO: 226018 - DNA, 122 bp, Homo sapiens
ttcaccaagcctctcctcctgcgctcgccctcttctgcacttcggtctcaggcgcaaacacgttcaaagtcgctaggccaaagcgctgagatacggtttcccaagccaattagagagcggct

SEQ ID NO: 226019 - DNA, 122 bp, Homo sapiens
tttaatctctttaatttttgcccagcctgtgagaaaactgaaagcgtggttgggagggggcgggagatagaagttacaggtcatgagctgagtggcagctaaatcctgtgggaggaagcaaa

SEQ ID NO: 226020 - DNA, 122 bp, Homo sapiens
agaaggatgtcaagaagcagagtttggcggcttttggctggttgcgcgtgcaacccggggcgtgttagcactgcaaagggcgcctggaaagggtttgcagttcctcctaattctcagctttc

SEQ ID NO: 226021 - DNA, 122 bp, Homo sapiens
ctccttgtccccgtggctcaccaggcaggaagcccgtggcttggctgaggccccaggaagcggagtctgggaggtgaaccgtacctcaggcccagccgtgttcagcttggagtagcttctga

SEQ ID NO: 226022 - DNA, 122 bp, Homo sapiens
ccaccgggcacgcgagttcacgccagcgacagtggaaagccctcccctcgcagcgcgctccgccactagccgcaccccgccgagctctgacctccgaagagggtccctgtggcgatcccgcc

SEQ ID NO: 226023 - DNA, 122 bp, Homo sapiens
ccaggtaacggtcataggccatgaaggccaggagaaagcactcggtggcgccgaggaatacgaagaagtagagctgtgccatgcaggcagagaaggagatggcttggccccaggacagcagg

SEQ ID NO: 226024 - DNA, 122 bp, Homo sapiens
tccggatgaaacgctagggctccttcccttccttgaatcttgggcgctggaagccagccacgggcgtcttgccacgcgagtgcccctagacagcaacacacccactggaaacgcacgtgaac

SEQ ID NO: 226025 - DNA, 122 bp, Homo sapiens
agagcagctgacacgctgtcctctggcgacctgtcgctggagaggttgggactctggatgcgtgcggggctctggcctaccggtgacccggctagccggccgtgctcctgcttgagccgcct

SEQ ID NO: 226026 - DNA, 122 bp, Homo sapiens
tgaactcctgatctcaagacatctgcccgcctcggcctcccaatgtgctggggttacaggcgtgagccacagtatcgggcagccagatggtttttagtacaagaacgacactgtattttaaa

SEQ ID NO: 226027 - DNA, 122 bp, Homo sapiens
gaaatgctgagtcacagtggattcatgttctcaccctcctagacattgccagacttcgcccgctggttttgctaacactcactcccaccagcagagtttgagagctggccttgccctgtatc

SEQ ID NO: 226028 - DNA, 122 bp, Homo sapiens
caaccttacaggaaaggagaagagaaagccttttaggcattacgatgatttgaggggctccggaaagcatttctcaaaagtactttgtccatagacctggcactgaagactcgaatttaacc

SEQ ID NO: 226029 - DNA, 122 bp, Homo sapiens
aaggtgccatccagagagtggcggggctgctgcaacgggtcttgggcctgactgcccacccgggatgtgcttcgagaagccccaccattcgcatcctacactagacgggctgtaaaagtcta

SEQ ID NO: 226030 - DNA, 122 bp, Homo sapiens
cgatccatgggctttatttataattgcaccttaaaaaaatcttgcaggcctcccctccctcgacagccagccgctcagctggtggggcttttgcaagcaacgatacctagctggtgtgtagg

SEQ ID NO: 226031 - DNA, 122 bp, Homo sapiens
acgtggcccgggcggaagtgtccttgcagcgagcaggagctggcgctgggagggcagacacgtggtccgggcggaagtgtccgtgcagcgagcgggagctcgcgctgggagcggagacaggt

SEQ ID NO: 226032 - DNA, 122 bp, Homo sapiens
gaagcgggtcaacttctccacctccaccacggctgcgtccttgtaccaggtgatggagggcggcggcacacctgtgggcaagacgtgggcccaccgtcaacctgcctcctgcctcctctccg

SEQ ID NO: 226033 - DNA, 122 bp, Homo sapiens
cagacttgctcacagacctcataggtctgtgaacagcttgccttcctcctcaccatcctccgttcctttggtgacatgagcagaatctagaccatggaaagtacatgaccatttgtaaactc

SEQ ID NO: 226034 - DNA, 122 bp, Homo sapiens
tagacaaaagaagagcagtcacagatcaccagccaggtaactgggcagattggctggcggcgagagggtatcaagtatcgtcggaatgagctcttcctggatgtgctggagagtgtgaacct

SEQ ID NO: 226035 - DNA, 122 bp, Homo sapiens
agagtcgcgtgtgccgtgatcccaggcagctgcagctgcgtggatgccacatggggaacccggcttccagacccgccctcaagggccgagcgtctcacgcccagcttcattcctccccatct

SEQ ID NO: 226036 - DNA, 122 bp, Homo sapiens
gaagctaccaggaccctggcaagaaattgtgtcctgtgtctcgtggcccagcctggcactcgccctcctcgccccgctcagctttagggggcaggaagcagtgcagctccttaacccacttc

SEQ ID NO: 226037 - DNA, 122 bp, Homo sapiens
cttttcttttcctggcagctgttccatgacagattgttataaataacacaatctggcaaccgatttcttatgacaaggagaaagaaaaacacatttactcccttggaaaaaaactgtcaggg

SEQ ID NO: 226038 - DNA, 122 bp, Homo sapiens
ggtgatccactcgcctcggtctcccaacgtgttgggattacaggcatgagccactgtgcccggcctcaatttgatcaattctcaggtacattgagtttctgctgaattgttttttggcttag

SEQ ID NO: 226039 - DNA, 122 bp, Homo sapiens
aagcagattaactccttctggtcaatctgaccaggattgggttttcagacaattacttctcgcatctaaaacaagaaatgcaccgattcccgaagacccaatcctctctctggctagtcttt

SEQ ID NO: 226040 - DNA, 122 bp, Homo sapiens
cactacagtaagatgagatccacaggtattcattgcttttcgctggcttgcttttgacttcgttctcagcacagctttggcaatgtagccataggatataagaataaggatgagaggtgtga

SEQ ID NO: 226041 - DNA, 122 bp, Homo sapiens
ttggccaagaagttgggtggcagcgtggaggtcatgctcagagtgagtgggcgcaagagacggtggcgggagagggagtggagatcataggcgtggatggctcttatgagccttttctctgt

SEQ ID NO: 226042 - DNA, 122 bp, Homo sapiens
taaggcactttacggttttcatattggacagtgaggtacacaggatatatttctagggttcgttgctgttaacaaaaagaagaagaagtagcaccatgttgtgacattagctgagtcaggct

SEQ ID NO: 226043 - DNA, 122 bp, Homo sapiens
tacaattgtcactcaactcttgccccagtggtattcacagaggagcaggagttagtgtagcgttcttttctgatgactcacacctggctactttccaagctattgcttctggctttaggaaa

SEQ ID NO: 226044 - DNA, 122 bp, Homo sapiens
tgcaacaaaaccctagcagcctgaagaactctaagccaggtttaattggtttctttttctcgtgggtagacttaataattttctacgtattctgacaaagaaataaccccgaagcacgttcc

SEQ ID NO: 226045 - DNA, 122 bp, Homo sapiens
agaacaggtgtcttgctttttcctatgtctccctcccacctccccaagggttgggtctggcgccttagacacagaaggagggcactaaaataattttacttatttgaccctgaggcaagtgc

SEQ ID NO: 226046 - DNA, 122 bp, Homo sapiens
ggccctgtgactcactaacaccaccggcttgcccctcctgtgtcagcacccagtgagcttcggcatgttcgcgtggcattccccacccgggcatgggcatgcagcacattcctggacacggg

SEQ ID NO: 226047 - DNA, 122 bp, Homo sapiens
cgccccgtgttctataagatgcgcggacggcgggcgcgcctctggggtgggggctgtggccgtgtctagctgttcgggtgtgctgtggtcatcctccctgcgcacctacagccgcagaccgc

SEQ ID NO: 226048 - DNA, 122 bp, Homo sapiens
ggatgtgcgtccaggcgtgccttgcaggtgtgtgggcagtgactgcgcccacccctctgtcgggtctcgccacgcttagctgggtgggctccttccaacccaggctggggctgagcaggagg

SEQ ID NO: 226049 - DNA, 122 bp, Homo sapiens
gggggccgcggccccgcacccctgccccggcccccgcccccgcgccctcctccccgctcccgcctcccgccagcccggtccctggcacttcggtccctgcgtctccagattcgccgccgaac

SEQ ID NO: 226050 - DNA, 122 bp, Homo sapiens
atcggctgctgcgggtgcagggcgtgactcaccgctgggtgcttgccaaagagatagggacgcatatgctttttaaagcaatctaaaaataataataagtatagcgactatatacctacttt

SEQ ID NO: 226051 - DNA, 122 bp, Homo sapiens
gtcaaagtactccaagcatatttcttgaatgaatgaacaaacaacaaataactgctctaacgagcaaccctgataacagggttagcaaggaagtacctaacattatgttatcgcagcatggg

SEQ ID NO: 226052 - DNA, 122 bp, Homo sapiens
agcatggaggagtgtgaagcgctctgctcgcgcctggccatcatggtgaatgggcggttccgctgcctgggcagcccgcaacatctcaagggcaggtgagccggcgcggcctccaggcaggt

SEQ ID NO: 226053 - DNA, 122 bp, Homo sapiens
cctgactgccctggttttattcttaggagaatcacctttgtctgtggttctccaggaccacgtgggaggtcactttgggagccactttgaaagaagtaaaaagaaacaggtggagtcaattg

SEQ ID NO: 226054 - DNA, 122 bp, Homo sapiens
tttgagagctgggtcttttgccaaacagattcatttgaataagacaccaggtccttgcctcgaattagggaattcaggaatttgcagctgtgggtagtccaggcttcttctgtgggggttga

SEQ ID NO: 226055 - DNA, 122 bp, Homo sapiens
acaaggaagaagagaatgggcagcctggagtccaagatcctgctcccaagctactgtcctcgctgttccacacccggctcctagaagccagcttgggtaccgggtcagtttcccgattctcc

SEQ ID NO: 226056 - DNA, 122 bp, Homo sapiens
cctttcctgccattgaatattgccatgtctggcatgaaaagtagattcattctgacttttcgccttcctcgcagacaccaaccttggcatgtatacaaatctttcctgtatgtccagcatca

SEQ ID NO: 226057 - DNA, 122 bp, Homo sapiens
cgcgcgccggaagttggtaccatagagactggagagccggaggtgcccccgccaccggggcggggcggggcgaggtcctagctagctgggttagtaagcggcgcgagcgtgcgagtttctga

SEQ ID NO: 226058 - DNA, 122 bp, Homo sapiens
ccgttccaaggctctcacgctggaggaactctgcggggttgtgcctgagcagctcctgagcgccgtgatccgcgttagcttaagaagcaccaggctgcctcccccagcatcttcaactaccc

SEQ ID NO: 226059 - DNA, 122 bp, Homo sapiens
catacaatgagatattatctgaccataaaaaatgaagacctacagatccacagtaatgcacggaccagccttgaaaccaccctgggtgaaagaagtcaatcacaaaaggtcacacgccatct

SEQ ID NO: 226060 - DNA, 122 bp, Homo sapiens
tcttctacccaatagaaggccagaaagccaatccggaccgttagggagcccaatgggcgtcgccgccaggccccgttgcagagcgcgtctagccaataggcagcggcggcgggcgggcgcgg

SEQ ID NO: 226061 - DNA, 122 bp, Homo sapiens
ctccagcaatcctcctgcctcggcctcccaaagtgctgggattacaggcatgggccaccgcgccaggtaaactgttgattcttaataaatcccagtagagacgtgcgcttgcgtgggcaaaa

SEQ ID NO: 226062 - DNA, 122 bp, Homo sapiens
gacatactctactgctggaagggtcttcatcagctaagcatccagttcctaacacgacaacgtcttcctggaggcctgaatgggtccttggaacctggaatcctgtcctccaatctcaagac

SEQ ID NO: 226063 - DNA, 122 bp, Homo sapiens
gacaaataatgcgccctttcctgagcgcgccttcctaggctgtgcctttgtgttttcatacgggcagtgggtagacctactctagatcaccgcttgtagatgcatttttttcctccactcct

SEQ ID NO: 226064 - DNA, 122 bp, Homo sapiens
acactcgaatgccgggatcccgaagggactttcccctcagcatctcggtctctggagagtcgtgggacagaaccaaggcgagagaaggagggggaactggacggggactagagatgagaggg

SEQ ID NO: 226065 - DNA, 122 bp, Homo sapiens
cactgtgatctggagagttggaaactttcggcagtgtagtccattgcacagaacacgcagcgtgcgcaatcccagtgcggccccacagaagtgggaaaactgcaggcggctcccagccttgg

SEQ ID NO: 226066 - DNA, 122 bp, Homo sapiens
agcggcggagactcggtaatatactggccacgcctactctgccctgccagtctcttctcacgtgtgcccctggaaggctctgccttaacgcatgcgtagttaccttagttttcgtcgcctct

SEQ ID NO: 226067 - DNA, 122 bp, Homo sapiens
tggcctggcgctgacgagtgtgggaaggtgcaactgaccagacgccctgagagggactcccgcaaacccagagcacctctgtcctgggacccaacccaggctccagggctcccgcacgtcct

SEQ ID NO: 226068 - DNA, 122 bp, Homo sapiens
gtactgtgagattctcaagggcagggactgtgtgtctttgttttgcggtgtggcagtgcccggcatctggtagacattcataaagtgaataaatgaatggttcactatactattaaggacct

SEQ ID NO: 226069 - DNA, 122 bp, Homo sapiens
gcactcctggcccggacagctccctggttgggtagggggtggggccggacctcagccggacgtcttagacgtgcttgtttcagatcctgaggacggcattcctacccctcccccattcccag

SEQ ID NO: 226070 - DNA, 122 bp, Homo sapiens
aggaaggtactccaggatggaagcctggtgctgtctgtacatgtccaaaataattcgaaccgccgtctcgcggacctcatacactctatgctccagggcactcactgaaaactaaagttggg

SEQ ID NO: 226071 - DNA, 122 bp, Homo sapiens
tctgtttattgaattacagacacttatctgtaaatgatgatgatttttttggcgggggggcggggtaagaggtactttgttaaatgctttgtgtgcattatgttatttaattcatgtagtaa

SEQ ID NO: 226072 - DNA, 122 bp, Homo sapiens
ttaagatgggagcaagcgaaccattgaggaggcaggttaccctagttagccaatgcagatcgagaatgggaaatctttcatttattcatgcaacagatatttaacgaagccctgccgtgttc

SEQ ID NO: 226073 - DNA, 122 bp, Homo sapiens
gcacgctcaggcgggagtccgggactctccttcttcagagagtctcaggagattgtgaagcgggctgagatttcgagattccttcctcgccctagagccggcgccaaagaactgcagatact

SEQ ID NO: 226074 - DNA, 122 bp, Homo sapiens
gggggtcccctgggcaggcccccagagggttctgggggtgtcggtgggtggcgccgggagcggagctgctgccgagactggagttgatggcgcagttcagagacacgctcctctttctggag

SEQ ID NO: 226075 - DNA, 122 bp, Homo sapiens
ttatttggcacagtcagaaatatggctcagaaatctgctcttaaaattgtaattaacggccgcccgggaggcagcggctggaggagcggacgggccccgcggggcccgagggcaaggagcag

SEQ ID NO: 226076 - DNA, 122 bp, Homo sapiens
caggctctctttagagctgggtagtccattctcactacaacaacatagaggcaacagcatcgttacgaagcttctaaattatcctgcttagtggcaagaagtaaaaatgattccttctgacc

SEQ ID NO: 226077 - DNA, 122 bp, Homo sapiens
gaaatgacgaagaaaatcgggctcagaatagagtgggaccccttcggtagtgaataatcccgcagctcattattgcgaacagcagcccttagagatcgtagctggctggtaaaggcggcttt

SEQ ID NO: 226078 - DNA, 122 bp, Homo sapiens
aaccagcaacagggaaaagagaaatattatctttcaatgacatgtataggtaaggagctgcgctcagttgataacatagttgataatacatattttttgaattgacagttgacccttctctc

SEQ ID NO: 226079 - DNA, 122 bp, Homo sapiens
attttcactcaagtgtaatgcaatctttggtgtctggctgaaaggtctgtacaagtattacgtatacctgagtaggattatttagatcctgaaaatgcagcaaaatttgtttctttatgaaa

SEQ ID NO: 226080 - DNA, 122 bp, Homo sapiens
ctggttttatatataaaggctagaaaagcaaaagagaatatgtattcctattttaatatgcgtgtgcttctaccacatagcattgaatggtaaatgtgacctagttaggaaccttatgttat

SEQ ID NO: 226081 - DNA, 122 bp, Homo sapiens
cgatcgaatgtttttctcgatcaaagggcttgtggtctcacgggcttcaaggaatgaagccgtggaccgcagcagcgagtgttacagctcaattagagaaacgcacggacccaaagtgtgcg

SEQ ID NO: 226082 - DNA, 122 bp, Homo sapiens
cggagaggaaatgcggccactgggggagcctgccaccccgtcccagcctggccccacttacggaactgaatgaattatcaatactctcggtgctggaggagagctcctgggaaagggccaga

SEQ ID NO: 226083 - DNA, 122 bp, Homo sapiens
aacaagaaatagaggacacattcctttattgcctttagccaatcatctgaagccactgctcgactccccctccctctttgcagtttcaatgtgacagctcgccagtttcacaaggcaaccct

SEQ ID NO: 226084 - DNA, 122 bp, Homo sapiens
gccagaagagtatcctgaggtgttcactcaaacgtgtcccaagcctgcctccgagtctctcgggcggtcgcatccacacactcgcacgacgatgacctgcttgcatcaaacctgcacacatc

SEQ ID NO: 226085 - DNA, 122 bp, Homo sapiens
ccagacccccacgcctgcgggggcgcccccccgggtccctttccctccccttcgcagtctcgacacttccctcagtcacccgcagcgcctggcgctcgccccacacccagcaccctgttttt

SEQ ID NO: 226086 - DNA, 122 bp, Homo sapiens
cacaaacagttcccaccatgaagagagagtaggtgaccggaaaggagtgcgtcttaagcgcgttcgctgaatttgcaccacccaatccagccccgccgcccggcgccgctccttagacctgg

SEQ ID NO: 226087 - DNA, 122 bp, Homo sapiens
cgcccgggcttccaacgtggagacgacttttactgagctggtttaacagttgcccacgaacgcttaagcacgcccagacccactcaagtacaggccaagaagtcggtgggatcggggagggc

SEQ ID NO: 226088 - DNA, 122 bp, Homo sapiens
gcgattgtgcgctgacgtcacttccgctccgagcctcgggccgggcggggctcctgggttcgagtttcagccacataggacccagtcaaacacagaaattgtagtttcttcccgggtgggcg

SEQ ID NO: 226089 - DNA, 122 bp, Homo sapiens
atggtcattaaagccccagatcaaagggctctggaaacacacgctcattaggaaggccagcgagccggcaggccgggggcgtagatggggctctgctgttcattcaccaccaccggggtcag

SEQ ID NO: 226090 - DNA, 122 bp, Homo sapiens
gactggtaggtttggagagttggacctggagtgacagatggcgccttcccctctgtctctcggtttggaatggtcatactcggttgctctttgatcttggacctcagctttgtcacagaggt

SEQ ID NO: 226091 - DNA, 122 bp, Homo sapiens
ttgagtcccctagggcagcgactgccctggcagcctgaggcagagcttggccggacctggcgacccctgagcttctgggaaatggacatggccagcaccgccttcaggttcctgcccagggc

SEQ ID NO: 226092 - DNA, 122 bp, Homo sapiens
acggggcagccgggcagagacgctccttacctcccagacggggttgcggctgggcagaggcgctcctcacatcccagacggggcggcggggcagaggtgctccccacatctcagaggatggg

SEQ ID NO: 226093 - DNA, 122 bp, Homo sapiens
atgacactttggtcagggagctggattagtcgcctatctaccaggctccaagcaaccggacggtcatccaggccccgcttacttctggttccgcagactagaatggatgggagtctgagtag

SEQ ID NO: 226094 - DNA, 122 bp, Homo sapiens
cactggtggttaagggacttcccaaaggtcataaccctagtaagtgccaaagccaggattcgaattcaagcagcctatcttcaaagcccacgcatactgcctcccttaatagtaatgattaa

SEQ ID NO: 226095 - DNA, 122 bp, Homo sapiens
gacattgagtctcggagttggtctcagcgccggatccacttttcggcaaagtgacgtggacgtcaacagcaatggcggaaggagaagatgtgccgccgctgccaacgtcgagcggcgacggc

SEQ ID NO: 226096 - DNA, 122 bp, Homo sapiens
agatgtgagccgtggcacttggccagtggggttgctttagggcccagctcacaccgcacccggctgatggggttgttttagggcccagctcacttcccagtgttcccacaccgcccaccagg

SEQ ID NO: 226097 - DNA, 122 bp, Homo sapiens
agtatcactgctggactttggtcctgcagacacccctgctcaagaagttcatgtggctcccgccgcccagtggtcaagtccagcgtccatagccttctgtagcccggccctgccccctgccc

SEQ ID NO: 226098 - DNA, 122 bp, Homo sapiens
tgagaggtcacttactgcagccggacataacggcgctggccccgccccttctcgagaactcgcagagctgggctggtaaaattgcagtgctgaagacactggacccggtaaggagactgggg

SEQ ID NO: 226099 - DNA, 122 bp, Homo sapiens
gcacggctctggcagaggcctgggtgcccactgtgcactcagccaatgttgattctcttccgagtgtagagggcatgctgccctcctctctccacctaactgcccgccagcaagggagcggt

SEQ ID NO: 226100 - DNA, 122 bp, Homo sapiens
gggggcgggggtcgtgctcaccgtcgtccagttcaccggcatgttttcaatcagccatcacgagcgaagtgctgcttcgtgtccaccagggaaagcttcagggagcacgttattggcactca

SEQ ID NO: 226101 - DNA, 122 bp, Homo sapiens
gaaaccacatttagtttgacaaacctgggctgctgcaccaccccaaacacttgggtagtgcgaagggctgtagagacccctcagggcccactcactcctcagggtcagggagggtgggtgga

SEQ ID NO: 226102 - DNA, 122 bp, Homo sapiens
ggtagccataatctggcactctagtggaaagactgcctgtagtctgctggtgtgagccaccgcacagcctgctgtatggctattaggctcgaaattgtttaccactatgtccctgaaaccaa

SEQ ID NO: 226103 - DNA, 122 bp, Homo sapiens
ttccttcctcttggagcccgtgcgggctggtggggcggctcactgtcagctccgtgatcccgcgcttggccgcgcgcctggagaggtgcgcccgggccaggagcagagcagggcgcggcgcc

SEQ ID NO: 226104 - DNA, 122 bp, Homo sapiens
tgttatgaggacagcaccaaggcgatggtgctaaactcttaatgagaaaatccacacccacgatccaatcacctcccaccaggcaccacctccaatactggggattacaattcaacatgaga

SEQ ID NO: 226105 - DNA, 122 bp, Homo sapiens
gctcagggccatggcaatttaccagccaatatagaagaattttaatattccagccatctgcgggatgcagccctgcacacaccccacactattccgtttcttccctgggggagcatcctggc

SEQ ID NO: 226106 - DNA, 122 bp, Homo sapiens
cggaggagcgccctctggtgctcaagaagggaaagacgcagggaggcgttgacagcgcttcgctgaaggacgaataaaaaccttgaaaagggacttaactgcgaggttaaatcgtggaggtg

SEQ ID NO: 226107 - DNA, 122 bp, Homo sapiens
aatggtgagagaatgagccctgacgtgtcctctctgatttggctatggtccagcccctcccgatgatgtcaccactcggctacttcacactggaggcccccaaaacgtctgtctttgcaacc

SEQ ID NO: 226108 - DNA, 122 bp, Homo sapiens
gccagaaaggcagacccgctagcctgccaatttgccctctgtccatgcagtaattgggggcgactggggcattggaatcaggcatacttgtatttcgaccacttaactggctgtgagatcta

SEQ ID NO: 226109 - DNA, 122 bp, Homo sapiens
agctgacatgggagtccggtcggcagactcatccccacaccctgtacaaagctggacacccgcggagacctccggaagccaagatctaagcgcttcgatcccacattcacaagccccctcag

SEQ ID NO: 226110 - DNA, 122 bp, Homo sapiens
acaggaagagctcagggtggaaacacaggccacttctaagagccaggcagggcagggggccgcccaggaagtgctttctctatttcatcttcaaagaaatgctttgcaagtcggccttctac

SEQ ID NO: 226111 - DNA, 122 bp, Homo sapiens
ggccggatggtcgggcacgtccaggctaaagaccttggcgctcttgatggaaccactggacgacacgctgcaggtcttgcgggtcacggccgcgtcggcgctcagctggcgctgtagtgggt

SEQ ID NO: 226112 - DNA, 122 bp, Homo sapiens
ccgggacctaggcgccgcgatggttccccgaagcggccctgcaagcacaagccgcgcctgcgctcacgcccgcccgacctacggcctccagcccgccgctaccctcaccgctctctggctgg

SEQ ID NO: 226113 - DNA, 122 bp, Homo sapiens
tcaagcagatcctggaatgtcttcaagctgatcctgaaatgtttctccccaggacacctgcggttgtctatctgaactccacaccctctcttgcctcctgactttcatgtcacttctgtgta

SEQ ID NO: 226114 - DNA, 122 bp, Homo sapiens
cagagtgttcggttcactgggtggagcatgctctgagcccctggaggtacagggattttacgggaggaggggtcgcttcgaggggaggtggctgcgtccatgtctggacggaattactcact

SEQ ID NO: 226115 - DNA, 122 bp, Homo sapiens
tggggctctccaaaggacttgaagactgtgtcacgtgggttcgctgccccctgcgaggtccgtgtctgctgctccttgggaaaccatggcgggccgtgttctcctctcagcagatggcgctc

SEQ ID NO: 226116 - DNA, 122 bp, Homo sapiens
ccatctaaattataggctgccaaatttgctgtttaacatttacagagaagctgatacaaacgcaggaaatgctgatttctttatggagggggagacgaggaggaggaggacatgacttttct

SEQ ID NO: 226117 - DNA, 122 bp, Homo sapiens
ggccgggccggcaggaggcagtccctgccggagagcagacaaaggcccagccggggcctgcgggaggagggggccggcgcccgggctggtcccccacaaccggccgctaattaaaggccctg

SEQ ID NO: 226118 - DNA, 122 bp, Homo sapiens
ggttgtttaaaagtgtgtgttatctgtccccttcgtgtcttttcttgttcctactctccccgtgtgacaggtgggcaccccctttgccttctgccgtgactggaggcttcctgaggccttac

SEQ ID NO: 226119 - DNA, 122 bp, Homo sapiens
gagtgtacctgtcttcactcttgacttagctcatgaatagtcacctccccagatctgtttcgtagttcactttagcttgtggccaagatacaacttgacctaagatttgaacttatgatttt

SEQ ID NO: 226120 - DNA, 122 bp, Homo sapiens
agggcgctagttcggactggatcctgggcccgaggcctgcttatttgcataatcctagcgcgggacaatgaaaggcctcccgcactggaaggagtgatttgcatattccccggaggggcctt

SEQ ID NO: 226121 - DNA, 122 bp, Homo sapiens
ctcctttctcagcctccagtctgacatgttccactatggccttgggaagagcaatgggcccggagtcgccgcatctaaccctgctgtaactggtcgcaagtcacagtttgctcatctataaa

SEQ ID NO: 226122 - DNA, 122 bp, Homo sapiens
taaggagaacgtgttaggggatgcctgtaccatggaaagagctcattgtattgtatataccggactcgaaggttctggacaccagggttacctgggcagtggccacatttaggaagtaatcg

SEQ ID NO: 226123 - DNA, 122 bp, Homo sapiens
atagggggctggttaaattaatataacacatccacacaatataacacacacagggtattacgtggccattaaaaataccatggtaggctgggcgcagtggctgacacctgtaatcccagcac

SEQ ID NO: 226124 - DNA, 122 bp, Homo sapiens
cttaattctggagtaaaataaaaactttcagaaagactactaactaaagtattgtctgtacgtattattctctaaagcatcattagcataggctttgcaattaggaagtctgtgggtttgtt

SEQ ID NO: 226125 - DNA, 122 bp, Homo sapiens
aaccaaccccaggactgctggaaggagtagtggcaggggcgcaggtcggggcggtgctgccggaaacacatttagccacaaagggaatcgtcatgacctattgagtaagaaaattagcatat

SEQ ID NO: 226126 - DNA, 122 bp, Homo sapiens
tagtgcatttccacttttcttcctgcaaagggcctgacccctcagtttccaggctccgagcggtgtggcaggcagagtggttggttcctcatggtctggccagagaatcatcagtctcgatc

SEQ ID NO: 226127 - DNA, 122 bp, Homo sapiens
tggaagaagtctgagtgggacatttactcagatgagccataattgacactcctttcctgtcgaagtgtgaaggagtacatccatctttctttggcttttaagaatcgaatcaatgaatgcaa

SEQ ID NO: 226128 - DNA, 122 bp, Homo sapiens
tttggggagccaaccgcgccgtctgtccctggcaagccagcggcggtttaaaggaggtggcgggaagcctgtgtgtgcttcaaatcgtcaccctcatggtcgctccggtaagtgctgcgggg

SEQ ID NO: 226129 - DNA, 122 bp, Homo sapiens
gtgatcatctccagaacccactagaggcaagataaggcaaaatgggtttcagttctctgtcgtcaggtgacttttgcttgcacaggtggtaaagtgaattttcttattttcttttttatgtt

SEQ ID NO: 226130 - DNA, 122 bp, Homo sapiens
atcatcacagtaatgaagtgggggccgctgcggagactcacctctatcagacctctcctccgcccatcaacacgcgggaatgcggcgctgaggagctggtctgcgccgtggaagccgtgatc

SEQ ID NO: 226131 - DNA, 122 bp, Homo sapiens
gggctgtgtgcggtgctcgcgtgccagtgcgagttccgggtggatgtgggctcggcgggccgtactcagagctgctggccagtgctgctagccccgggcagtgaggggcttagcacccgggc

SEQ ID NO: 226132 - DNA, 122 bp, Homo sapiens
aaaaatgtttaacgataagaagaaaaaaatgttgtgttgtcaacactaagttttaaaacacgctataaggtggttactgaaaattgcctgctgtgcttggtatgttgtgcacagcattatgg

SEQ ID NO: 226133 - DNA, 122 bp, Homo sapiens
cggccacaggcctcagaagcagcaggagtgagctgtgggcacagctgtggggcagccaggcgcgtcaggcctcacatgtctgggagatgtaggctgcctgggctggtggcccctgagccgca

SEQ ID NO: 226134 - DNA, 122 bp, Homo sapiens
ggaggagaaaaggtggggcaggggtgatttgggtggatggataggagggcttccgacctgcgttaggcgggtcagttaatcttcagtaactccttgatgcgtttgatagtcctcccaactta

SEQ ID NO: 226135 - DNA, 122 bp, Homo sapiens
accagctccaggtggaccacgtggctctggggaactcttgcgcccctctgttgggaataacgttcaaaatcctaaggaaattgaacactcaaacaaaggatgcttagcaaagcaattttgct

SEQ ID NO: 226136 - DNA, 122 bp, Homo sapiens
aggtttttctctccctgctgaagcgaccatctggctgatagactcggcgctgggatgatacgctgacccgcggaatcacggctaagccgctcccggggggccacatgccggctgggcagccc

SEQ ID NO: 226137 - DNA, 122 bp, Homo sapiens
gaggccgagccacggttcccttttcaaacccactaatcactccgcaacatgcaaatgcaccgctcgctctcacacaaaatattgctttatgcaaagcagcgccggggcctcgcgccagccga

SEQ ID NO: 226138 - DNA, 122 bp, Homo sapiens
caggacgtcgtccgggtgagcgtctgccctgccccgcccggctcaggtccagagctgcggcgggagttggaggcaactgtgtgaccctaggcgggtcacttcgcctctctgagccctttgga

SEQ ID NO: 226139 - DNA, 122 bp, Homo sapiens
tgtgaaacaatgtacaagtaagagagtctgcgatgctgatttgctggagggtgacaaagccgtttaagagaaggctgctttggcctttgatttgctaatcagttggtagcgtcataggctgc

SEQ ID NO: 226140 - DNA, 122 bp, Homo sapiens
ctcaccttcccgcccggcacgtcagaagacccgagattccgtgagtgccaccgcaccttccggttcccgccggaagtttttcaaacgccagaaggtccgcctcgcttcttccggaccaagtt

SEQ ID NO: 226141 - DNA, 122 bp, Homo sapiens
ctgacaccagggctacctggcagcctcagatgggtttgggagggctgtcgagcaataacccgctattcaaatgttctggttatccccagcgctctttccaccttcgggacgcagcggtgctg

SEQ ID NO: 226142 - DNA, 122 bp, Homo sapiens
cgtccacctgtcctgtgctcagcagcaggctgaccatctccaagttcccgattttggctgcgtggtggaggcaggtggaaccgtcctcctcctgagggagacacgggcaaatgagcctttgg

SEQ ID NO: 226143 - DNA, 122 bp, Homo sapiens
cagggcgggaaggcaggagcggagagcgtcgcggcccgcgatccagcagttagaggctagcgccgaagccgagctgccgccgcccaccatcaaaccgtgggagcagctgccgcggccgtggc

SEQ ID NO: 226144 - DNA, 122 bp, Homo sapiens
gcctctctttccccggtcggagcgcgggggtgcgtgtgccctcactctcacgaatacagacggagagcttcccagaaggaaaaacaaattcgtcataatgttcagcgcagccgagagtttcc

SEQ ID NO: 226145 - DNA, 122 bp, Homo sapiens
ctggacccacctctctgcatagcaggcccctccctttatcccagacccgccccggccctccgtagaccacgcccctccgattccgggcccgccccaatccttggtttctggtcccggccccg

SEQ ID NO: 226146 - DNA, 122 bp, Homo sapiens
gcgcagcttatgccctggcttgggcagaaaataatattaattactgatcctttgtgctcccggtcctggcttcctaaagcactcctctctcattcagcaccctatcttatttaaaagagcac

SEQ ID NO: 226147 - DNA, 122 bp, Homo sapiens
gccaggtggccttgactcagccaagttctcgcagctagccggggtcatctgggactcccgcgctgggcttccagggccatgttcattaaggcctcatcacaggacccaggacaggctgacca

SEQ ID NO: 226148 - DNA, 122 bp, Homo sapiens
tcctgtaggtggcaatctccagatccagggccagctttgtgttcatcagctcctggtagtcgcgcagcaggcgggccaggtcttccttggcctgctgcagggcatcctccaggtcattcagc

SEQ ID NO: 226149 - DNA, 122 bp, Homo sapiens
gcaaggttcatttttgactttccttctcctgagtatatggtggagtgttccagagcctgacgtgtgatctgactgactgcagaagcagacatgagaacatgagaatccagctgtcttctacg

SEQ ID NO: 226150 - DNA, 122 bp, Homo sapiens
tgattgtgaggagtagaagacccctatatggtccagtgtatgttctcttcaatctcaaagcgtgtttagagtattgccattgctatcagaaatgtgaactttcccctcagatcctagatttt

SEQ ID NO: 226151 - DNA, 122 bp, Homo sapiens
cacgtcactagtggctgtgattcaagacttggtgctttcaagacacactcagacccaggacgctggagcggcgatcctgggatgcgcccatccgttcgtccacgccagcgcgtgcacactca

SEQ ID NO: 226152 - DNA, 122 bp, Homo sapiens
tctgctacacagttccttggaggtcttccttccttccttccttcctatagctgcagctcccgggtagcaggaggccccgcaattcatacaacccacttctgggctccctccactgtggcttc

SEQ ID NO: 226153 - DNA, 122 bp, Homo sapiens
ctaacgcggagccacagcgcccagggaccggagggcaggcggcggcggtaaaggacaccacgcaagtctccacgtaacccccccgagcagtgcaagctcccaggactggcgcgcgtcccggc

SEQ ID NO: 226154 - DNA, 122 bp, Homo sapiens
ggtgaattgggggcggggagggcggccagccttaagaagactggaacctcgaggcctgttcgcggggcggcgggtaaaaccctgttgtcgccgaggtggagaggccccaggtcccctccgta

SEQ ID NO: 226155 - DNA, 122 bp, Homo sapiens
aggccccaccctctgccctaactggagttgaagaccttagtgggggtggggcctatccctcgcaggtggaagggtgatctgcaccgggagagctgtgactgtcccggttccgcgatccctgg

SEQ ID NO: 226156 - DNA, 122 bp, Homo sapiens
gttatttcaatgcatgtgagggggagaggtttgagtttgctcttttatgtagttcagaagcggttttttgttttaaaaatgcaaatttgataactcagagatgcaagaaaagtcttccctct

SEQ ID NO: 226157 - DNA, 122 bp, Homo sapiens
gccacggccgcagtaggaataggctgagtggcggctgtccccactggcattggagcacagcgactcagtggacgtccaccaggagccagggccacggggcagcgagctcaggcgggggcggc

SEQ ID NO: 226158 - DNA, 122 bp, Homo sapiens
ttgacttccctataggaacagcatggcgcacaggcgtcgcgtgtgaaggcccctcatagccgtgatttgttgatctgttttttttcagcttcagcagcgctccgtgaagtgacaaccacgtc

SEQ ID NO: 226159 - DNA, 122 bp, Homo sapiens
catgggccggcgggtcctcctagacccgcctcagtcctggaaaccccgaggggacgacagcggaagccgcctgggccctgcgctctgggccctggggtgcaacccctgaaactcgacagtta

SEQ ID NO: 226160 - DNA, 122 bp, Homo sapiens
ccggagtcacggctacagccacagaaagcggaaaccgagctgcagtccagaggggatccccgtacatttccagcgggctcagacacagggtcccccacaagaaagaaacaggacagaaaaag

SEQ ID NO: 226161 - DNA, 122 bp, Homo sapiens
cgccgcacgtgccctctctgcagtgtaactgtgaaacgcctcccaagatgaccgcagcagcgtctcccgccgcacgtgccctctctgcagtgtaactgtgaaacgcctcccattgagaggcg

SEQ ID NO: 226162 - DNA, 122 bp, Homo sapiens
ggggctgagcagctttcccaggcccagccccatggcccgttcctctcccacctgcagacccgctacgacttcacctcatgcatgggcgtgctcctggtgagcatggtggtgctcttcatctt

SEQ ID NO: 226163 - DNA, 122 bp, Homo sapiens
ctgccgtaccgagcaccagaccatgcccactagcacacatatgatcagaaacaccagcagcgccaggatgccgcccacaatggcatagggaaccgacgtctgagcctctaccaccgcaccag

SEQ ID NO: 226164 - DNA, 122 bp, Homo sapiens
tgttttggaatggatcattctttgctgtgggaactgtcccatacattgtagaatgcttagcggcatctgtgacctgtacccactaagatgccagtagcattcccctagttaacaaccaaata

SEQ ID NO: 226165 - DNA, 122 bp, Homo sapiens
atatggaataaaatgtgcaagttaaggcatcgtaggaaagcagggtaaatcccaaggtaccgtgagaatccgggccggctgcagagtgcatggcagagaatgggagctgatgctgaaggaaa

SEQ ID NO: 226166 - DNA, 122 bp, Homo sapiens
aaccgaggacaaaaaagcagaatgaacttttagcatagaggttgcagggttttttttgagcgctcgggaagataaatgtcctggacaaagaagaaaagttttataactactgggactcttgt

SEQ ID NO: 226167 - DNA, 122 bp, Homo sapiens
cctccccgcggggcagagcttgggacctgcagcctgccatgcccgagcccctcccctccgcgggctcccgcacagccggagcctccacgggcaccaccccctgctccacagcacctggtacc

SEQ ID NO: 226168 - DNA, 122 bp, Homo sapiens
tgatgtttgtttatctctttcattgattctgcatcccctgtacagcaaggacaccatcatcgctgtccactgagattactgtagcatcttcatagctggacttccctggatcagtcttgcat

SEQ ID NO: 226169 - DNA, 122 bp, Homo sapiens
tgaagaatcataggatttagtgaagttctcattttttaattcgagtctgctcagaagtcacgttatgagtgttcagccctcaccagcctttctaaaatagcctgacagtaaccctatgccct

SEQ ID NO: 226170 - DNA, 122 bp, Homo sapiens
acttcaaaggaccccgagagggtctagctcctcacctgtgtccccatctaaggcctggagcgcacaagccagtcagcgctccacaaccaatgtgagtaaacagaagggacccggacgatcca

SEQ ID NO: 226171 - DNA, 122 bp, Homo sapiens
atgaacagaataaagcttttatccacctcacagtccagtggggagacagatagcttaggacgaaaggatagatggggtttagacagagtgtgggagggtaattagggggtaaagggatggtg

SEQ ID NO: 226172 - DNA, 122 bp, Homo sapiens
cgccggccgccttgcgggcctcgcgcccctgcccaccccctgcgggcgccccggcgcccgcgctcacgcacgcgaccccgggagcaatgcgcccgcgccccttctacacccgggagcaccgg

SEQ ID NO: 226173 - DNA, 122 bp, Homo sapiens
cccgccgccggggaggggtttcccgggacgatccggcccctttcatccaggaagtgaaatcgacgtcggggtcaatgaaaacaaacggggagcccagggggaaggaaggcaggcgaggaaga

SEQ ID NO: 226174 - DNA, 122 bp, Homo sapiens
cgtacctgggcagcagccacctcgtagccgtcggggttcatggatggcaggatgtgaatgcgcgtgtcctggatgagctggacgatgcgctggttcctgttccggaactcctcgcacagaaa

SEQ ID NO: 226175 - DNA, 122 bp, Homo sapiens
gaggttagggacctggtcacccgctgtgcacagaggcgtgaggttacggacctggtcacccgctgtgtccaatcagagacgtatgaggttacagacctagtcaccagctgcacacaatcaga

SEQ ID NO: 226176 - DNA, 122 bp, Homo sapiens
accctgtgctgcatgccgacaaggcgcgtggccagcagaactggtgctggtttcacatcacgacagcaacgggattcttttgctttgaaaatgttgcagtccacctgtccaacttgatcttc

SEQ ID NO: 226177 - DNA, 122 bp, Homo sapiens
aacgacggcaaagcgtgttcttgactgcttctgagcacctcacacctttcagacccagggcgcctttattcccagctggaagcccagcttagagcaatggtgccactaaaaggggtgtgttg

SEQ ID NO: 226178 - DNA, 122 bp, Homo sapiens
ataaatccagataaaaatagatgctctacagatcacttaaccctgtgtttttcaaacatccgacatttatttgcctatcaccttgatggtttatgtcatatctaaggactacctgtactatc

SEQ ID NO: 226179 - DNA, 122 bp, Homo sapiens
ggtccgcttcccggggagagcgaccgaggcaccacagaagaggcgtgtttggaaacaaaacgacttttgggtttagaagtttcagcaaagtggccaccagcagccaggctgcagaggatgga

SEQ ID NO: 226180 - DNA, 122 bp, Homo sapiens
cccaggttagactcctaaacacagaggaaagcacccagacacagagtggagaagaccccgcgttgactgtgatcatcgtgaattaaatgaaattaagattctaccacctggcatcatgcagt

SEQ ID NO: 226181 - DNA, 122 bp, Homo sapiens
cgggatgtggctctgagcttcggggtagtccgcgaggctgggttccgtgctgaggggcgtcgcgtctggccgtgcgctgcgggagcgcgcgggcctggcccgctgtcctggccgctgcgagg

SEQ ID NO: 226182 - DNA, 122 bp, Homo sapiens
ttcagctgctggccggaagcggaagtgggcgtccgtcgcctcgccatctcccatagctgtcgcctgcagctgagaaagggttgctgtcccagcaggccaggtccaggtgcgccccactagtg

SEQ ID NO: 226183 - DNA, 122 bp, Homo sapiens
tttgcatctgcataatgggatgagcaggccccagtgtgggcaggagggggcctaaaatatcgcaagggccagctccgtccctcgacccagaaagaaacaaccctgagaggccggtgggcgtg

SEQ ID NO: 226184 - DNA, 122 bp, Homo sapiens
gggctcggcatcagcgggttcacgagtgggcttggtgaggcaacagcaggcctttcctcacgccagaacaatggtaagaggcctcgctcccaagagagtgaggagggaagtggggactgcac

SEQ ID NO: 226185 - DNA, 122 bp, Homo sapiens
cctggggcatgcagggtccacgtcagggccagctcgctgggggaacgcatgctgtcagcacgcagctaggacagagaccaccggatgttcccacctggccactgatgggccctgccgcagga

SEQ ID NO: 226186 - DNA, 122 bp, Homo sapiens
aatgaaacagtttttcttgctccacccacttggtgaccaaatttgaaaaaaaaaaaaaaccgcgccaactcatgttgttttcaatcaggtccgccaagtttgtatttaaggaactgtttcag

SEQ ID NO: 226187 - DNA, 122 bp, Homo sapiens
gagctgatcctgtaggagcggcacgacatcgtgtgaggctgagcagagtctgagaggcagcggaaggtggtgcgggcggcagagtgcgaggctcaggatccttctgctctctctgatcctcc

SEQ ID NO: 226188 - DNA, 122 bp, Homo sapiens
cccggcaggcctcgctgttggccttgatggtgaagataatcaagggcacccccagaatcacgatgatcaggagcaccagaattcctatccccagcagaagcttacagcgcttatccccgtct

SEQ ID NO: 226189 - DNA, 122 bp, Homo sapiens
tttcacagcgtgtgccgcaggggcgcaggggccgcgctctttcctcacatgtgggagaagcggaggagccgccagggctggggccaggctctgcccactggggttccgcccgttgtcgccct

SEQ ID NO: 226190 - DNA, 122 bp, Homo sapiens
tcagttggataaggcagcttatggtccttcttggtaagtctgtattttcttttccataggcgcctgcatattaatttgacttttgtgtagtcagtgcttgcattttaattggcttttgtgta

SEQ ID NO: 226191 - DNA, 122 bp, Homo sapiens
cctcctggggtcgtgaggccacaccagtgcccacactcctcagcccaggatgctcacccccgctggaaagcccagcaccgcaagccttggtgacgtcctacccacggtgaacggagtggccg

SEQ ID NO: 226192 - DNA, 122 bp, Homo sapiens
gccgggcgtggtggctcacgcctgcaatccggagactttgggagaccaaggcgggtgtatcgcttgacctcaagttcgagaccaggctggacaacatagaggaaccccgtctctaccaaaag

SEQ ID NO: 226193 - DNA, 122 bp, Homo sapiens
ctcttcctgctctccatcatggcggtgagtagctgggacctggatttgctttcctttatccgtcgccatccatggcaggccgagcctgcgggggctacttcgcccgcagcccgaggaatatg

SEQ ID NO: 226194 - DNA, 122 bp, Homo sapiens
cgcctccgcggctgttcgttgctcccggaaccggaagtccgctgcctgcctctcgggctccgcctctggctaagcacctgcgcactattgcctcgatgtcgcgtgcccttaatagggaggct

SEQ ID NO: 226195 - DNA, 122 bp, Homo sapiens
ttggcccccattcttgagaaatcccaacaaaggaggaagcaccaccagcacccacacctgcggggagccccgcagagcaaaaccaaggaagatgtcttctctgctcgtctcgtcaccccaaa

SEQ ID NO: 226196 - DNA, 122 bp, Homo sapiens
atggatagtgcacgcggtgtggtgaccgtgtgtgatcggcaaggccatggatagtgcacgcggtgcggtgaccgtgtgtgatcggcaaggccatggatagtgcccgtggcgtggtgtccatg

SEQ ID NO: 226197 - DNA, 122 bp, Homo sapiens
tatgtgggagtgtgtgtgtcgcctggaccctttctagccgtgtatgagagtgtgtacacgcgcctacacacacacacgttgtgttaccggcgctcggccgccgggggaagacccaggccaat

SEQ ID NO: 226198 - DNA, 122 bp, Homo sapiens
taatttaaacttctcagttttattttcaacctcctaggagatagaatctgattggttcagcgagggtcatttgtcttgggtcattcgattaaccctggtccaatcagcaatggcttcgggga

SEQ ID NO: 226199 - DNA, 122 bp, Homo sapiens
ttggtaggaagccatgatgcggatgaggtggacgcagtgacttgccttccacatcaggcacgctcattcacggtttcagaacaaaaggaaaacctcacaaaagaggtcagagggaaagaatg

SEQ ID NO: 226200 - DNA, 122 bp, Homo sapiens
atttctttaaaaagggtgagaaactggccactgtcttgcattttgacttctgactcacggcgaatatttcaaggcttatagactcaatctatttttccatatcttggtcaatttattaacca

SEQ ID NO: 226201 - DNA, 122 bp, Homo sapiens
gtttattcccacttctgcagctgactaggtgtccaccttgttaccacactatagcctctccgcccctcagtttcctcacctgtaaaatgaagagctggactttctctaaggctccactgaac

SEQ ID NO: 226202 - DNA, 122 bp, Homo sapiens
attggtgcacttgatcagcactgagacttgggggtcaaacacgaagaatttgtttggcaccgaggcaaaaatatgaaggccctgacatgagaagagaagtccaagctggcttcagattttct

SEQ ID NO: 226203 - DNA, 122 bp, Homo sapiens
agcacagcccatcctggcttcgggccaggctgattattcacagccgtgatgtcattgaatcgcaggaatttggaagtgggatgggaccttaagaatcatcttcctttagagtcctagtgtcc

SEQ ID NO: 226204 - DNA, 122 bp, Homo sapiens
taacctgccacggcctagcgccaggcggctctccccaggccccgtgtcgcccgggagccccgctgggctggaaactcacgctttggttgaacatgtctgtttcatgccgcagctgcgtgtac

SEQ ID NO: 226205 - DNA, 122 bp, Homo sapiens
cccgggggcggggcgggggcggctccgctgcggacacgccctcactccccgccccggccccgcccgcccccgggacccccgcctgcccctggccgccctgggccacgccccgccgtccgcgg

SEQ ID NO: 226206 - DNA, 122 bp, Homo sapiens
gggcggagctaaaggagagggtattttaacgacattaactgtgtttttgtgttagtaactcggaaagagagaggctgccccaagtcagcgcattgaaagccgcagacctagtgtctccaggc

SEQ ID NO: 226207 - DNA, 122 bp, Homo sapiens
ccggcccggaatgtcaggtgcgccgcgggccgggcgcgcgggtggcccaccgggcgggggcgcgatgacaaagcacaaagggactgcgcgcgaccaccatccgctcggcctgcgccagggcc

SEQ ID NO: 226208 - DNA, 122 bp, Homo sapiens
ggcctggagtcagagctgcccgaaggcggcccgagggcagctgcagcctcagcttgatgccgggctagtggtttcaccttaagcaaatgactacgttattattcccaagttttgcatctgta

SEQ ID NO: 226209 - DNA, 122 bp, Homo sapiens
ttcgcctttctaaagagtggaaatttccatcatgtgataggggcaacatccccagtgtcgcgtttcctgcggaccctcccttccaggccagccaccaatcgtcaggcggcaacctgagaagt

SEQ ID NO: 226210 - DNA, 122 bp, Homo sapiens
cgggcctcggcttccttacccacccctaacattctgccgcctagggcgccaagccaagttcgcggcttaaccatttaggaaaccggtgcctgctttgcagcggcctcgttcatccccacttg

SEQ ID NO: 226211 - DNA, 122 bp, Homo sapiens
gcccgaaacacggtggtacaacccatcgcgcatggcagctctgaggaccgaagatgttgccgccatctttattgaggacgtgagcgttgctcctggtgctgaacagagcgcgaaggttcgcc

SEQ ID NO: 226212 - DNA, 122 bp, Homo sapiens
atggccgcggcggcctcaggtccggcgtcactcagacaagggggcgggtggaggaggaagcggccaagtccacagtcctgctcccgtgccgccgagcaccgcccacctcagctgaccagccc

SEQ ID NO: 226213 - DNA, 122 bp, Homo sapiens
ggtgctgactcaggtgaccagcgggtcaacaaccgtctcttgctcccccatcacacttgccgtggcaggagtcaccaaccatggccagaagagacccttggtgactccccaagctgcccccg

SEQ ID NO: 226214 - DNA, 122 bp, Homo sapiens
tcggtggaggaatattgtaccggacagcccgcggcggggaatattctaccggacagcccgcggcggaggaatattgtaccggacagccctcggcggggaatattctaccagcagctggtcgc

SEQ ID NO: 226215 - DNA, 122 bp, Homo sapiens
agggccggaggcagcggcttttccttcccactccgggttgaccctaaagacacgatttaacgtggcggcggcagctgcccacgctgtctggaggagcagggcgcctgggatgcggcggcgaa

SEQ ID NO: 226216 - DNA, 122 bp, Homo sapiens
cagaaccgcctctgcccgccggacccagcgaagctaggggaacaaatcccaaaaacagttcgggcctttccggtgcgctcacccctacacacgcgcctgctcgccacccaggagcggcgtcc

SEQ ID NO: 226217 - DNA, 122 bp, Homo sapiens
tcacgtgtgctcaggccacgggctccttagatttggaattcagctcccaccgccagccgccggccatggagcctcgctcctggaagccccaggtccacctggtgtgttgcgtcgacaccacc

SEQ ID NO: 226218 - DNA, 122 bp, Homo sapiens
aattcagtaatttccacagggttggagatgactcagcagttccactcctgcacgagcacccgagagttgccctgatagccgtgcacttgggcgttcatcacagcatttgcttcttacatgaa

SEQ ID NO: 226219 - DNA, 122 bp, Homo sapiens
cttaaccgttggaacaatcacaaacccagaaacttttagctgagtgttatttataaaaagcgctgttttgactgctgttggacttggaaaagctttgcccacgatactgaaggtaccactct

SEQ ID NO: 226220 - DNA, 122 bp, Homo sapiens
atggctgggcagagccactctagcctctgtgggccgggcgggcgggtcggcaggttcacacgcttcagacgtgagtgtgagcaccctgcataatagggctttgtcccggctcctgggagcca

SEQ ID NO: 226221 - DNA, 122 bp, Homo sapiens
ggaagcttcaaattcctccgaggtccgggtcaggctggcatcttgcaaaaggagtgcgctcggcccattaaaaaaaaataaaaaataaaaaataaaaaaatatatatatatttaaaaataaa

SEQ ID NO: 226222 - DNA, 122 bp, Homo sapiens
gcggctgcgcggggggcgccaggccctgctgctgctgctgctgctgactgcggtagtaggcggcggcggccacggcggcaaagttgtgggtctggatggcgagcggcgtgatgaggctgctg

SEQ ID NO: 226223 - DNA, 122 bp, Homo sapiens
acccagcgcctcgccccgaggaatccgccattttcccgccttccacctcaaggcccgacccgccggcttttcaaagccggacccgcccccttgcttgcgggtcggaccatttgtggagacgc

SEQ ID NO: 226224 - DNA, 122 bp, Homo sapiens
tggtggaaaacgtcgatgagggccaccatggccttctccagctcagacatcctaggggctcgcaaaggaaagttgccttctcatctatacctcatcctaaaacatttcatatgttatcaata

SEQ ID NO: 226225 - DNA, 122 bp, Homo sapiens
ccatgaccaccgtgggctacggcgacatggtcccgcgcagcctgcccgggcaggtggtggcgctcagcagcatcctcagcggcatcctgctcatggccttcccggtcacctccatcttccac

SEQ ID NO: 226226 - DNA, 122 bp, Homo sapiens
agttattcatccttcctccatgctagtcagaactactattttgctcagttgtcaatttgccgagtcccagggtataaatcatgattggtttgagtcaattacaacaatgctgtttttcttta

SEQ ID NO: 226227 - DNA, 122 bp, Homo sapiens
cgataacaggagggccctcgggtgggtcagcccccctgtgctctggcagggccacaattccggcctccctggccaaccaactctgcacggagcagccagcagccaggaagcaggcgggtgct

SEQ ID NO: 226228 - DNA, 122 bp, Homo sapiens
cagcagcagcacactgcaccctggaggcagaaagaggagttcccgcctcccaccgtgtcccgccagcgccctctactggcaaaacttaacatcgacctgtgaaggagaaactcacaggatgg

SEQ ID NO: 226229 - DNA, 122 bp, Homo sapiens
ggctggagaggagcgggagcgcgggcccgggagagacttgggtatcaggaaactcggaggcggggctggggggtggtgcctggcccggaccgtctgcaggggcggggaccgacccccagggg

SEQ ID NO: 226230 - DNA, 122 bp, Homo sapiens
ttttttggctgcccaggatgtggcccagaggtgcaaggagccaggtatcactgccctacacgtcaaactctgggccacaggaggaaataggaccaagacccctggacctggggccagtcggc

SEQ ID NO: 226231 - DNA, 122 bp, Homo sapiens
ccagagcgcaccacctcgatcctcggggggaaacggatcaccccggctgtcctccgagctcgggatcagccaaagtcccactatatttagcttcggctaataaaaaatatttctagtgccat

SEQ ID NO: 226232 - DNA, 122 bp, Homo sapiens
agcgaggcggtggcgacggccccaactcaggtcgcccgagttcctgtccgctgccccttccgggctccgcctctggaggcagagacgtaaagcacctggaattctgcacgggagatttgtct

SEQ ID NO: 226233 - DNA, 122 bp, Homo sapiens
ttcctactccagccctgggctcggagaaggccgcgttagttctttttctagggatgtctgcggaaggggcgccaggctgagggccagcctggagaaagaaagaaaggaaggaaggaaggaag

SEQ ID NO: 226234 - DNA, 122 bp, Homo sapiens
ccagacaatgatttgtggcaaaggtttgtctccgtgtgttgacagacttcagtcttcttgcgatatgagttttcagttaatgaaaactcagagaagagaccagaggtaattgttttcttctt

SEQ ID NO: 226235 - DNA, 122 bp, Homo sapiens
ggtcagccctgccggccccagcggctccttccatccccagatcagctctgccagccccagcggtcacgcccggcccagccctgccggccgcattgggcactcccaggccccaggcagtgctg

SEQ ID NO: 226236 - DNA, 122 bp, Homo sapiens
caggatttcagccccttttgagcccctggcagggaccaatttgaagaagcaccctccaatcgcagagtggcattcatacacacccacctccactccctacacacacccccttcctcttcagt

SEQ ID NO: 226237 - DNA, 122 bp, Homo sapiens
ggaggcagacgacagaagacgagggcttctgaaaaggctcttctccttgctgacaacctccgtctctctgtgtgtacacacgtgccagcatctggatggtgtgactctcagtgcttgtgtgt

SEQ ID NO: 226238 - DNA, 122 bp, Homo sapiens
ctgaacggaaaaccccagtacaggcccggggctgcctcagtctacttcggcagcaaaagacgaataagcccactggcagagaccactgtgcaagcctaatcacttcccaagaagggttttgc

SEQ ID NO: 226239 - DNA, 122 bp, Homo sapiens
acagcgacttgagatgagacacaaccccatggatgccttagcccttcctggtggggtattcggtgcagaggggccgagattttattaaggtccgccgttaccctgtgacttgacattcttcc

SEQ ID NO: 226240 - DNA, 122 bp, Homo sapiens
tttccctatttactttttatatttagtcatctgttatcaccatttctttccttgtaggagcgaatggatggatttgaaaaaagagtatttagcgctacaaaaagctagcatggcttctttaa

SEQ ID NO: 226241 - DNA, 122 bp, Homo sapiens
agcgcctttctaagcacaagtgcacacacgcgtgtcttggtgtgcatagctgtgctcgaacgcatgctcccccaggttgcagatgcttcctgccaggagacgaagaccagctgccgaactgg

SEQ ID NO: 226242 - DNA, 122 bp, Homo sapiens
aatctggacttttttttacagtcatatccatcaaaacgaccagtggccatcagcccgctgcggccatcgatcgggtggcccctgcccccgtgcaggccggcgtgacccggctcctaggtgag

SEQ ID NO: 226243 - DNA, 122 bp, Homo sapiens
ttaaggtgtccattctcgctgtacttcaaagctaagcctagggtaagctgtaatgcacttcgaggtgtttgagagaggtggatagctgttgttgctgatggcaggtaaagaagaatgtctgg

SEQ ID NO: 226244 - DNA, 122 bp, Homo sapiens
gcccagcagatgagaaattggctgtctgcaaccaatcagactgattgcaggccgagtcctcgtttgcacagaagtataactttgtaacttcaccttagcctctgattggttgcaaaaagcaa

SEQ ID NO: 226245 - DNA, 122 bp, Homo sapiens
aagttacagaaaaaacctcgttttgcaggcgagtgacttagtttccctctgtagctttgccgtcataaaaagcaagtccctcccctctcctgagctggaaggcggggaaaggttatcagcgg

SEQ ID NO: 226246 - DNA, 122 bp, Homo sapiens
ggcgagggcacttgggggtcattatttgagatcgtaagtcttgtttcccacagacctggccgcgtcaggcagatcatcgcctggggggcctttgccaacgtggggtctcttctaacttcagc

SEQ ID NO: 226247 - DNA, 122 bp, Homo sapiens
gcctgcgttccacagcgaggttggagctaacagcttctgtcttgcggcccctcctctagccggccgctgtggaagagtgcccaggcagcttccggcggcctctgcagctgcgtgggactcac

SEQ ID NO: 226248 - DNA, 122 bp, Homo sapiens
ctccctggcgtctcggtgcaaatgcccagagagcggctggaacccctcgaggctggagcacggggacgccggcctggggtgtaggtctgggagcagtcggccgtcaggtagttcacggacac

SEQ ID NO: 226249 - DNA, 122 bp, Homo sapiens
ggggcgtggttgctttgctgggccccgccccgagctgcgccctgcgagcctctgccaggccgggccgggtcctgacccgcgctggagcatgggatactgcctcttcattctagcttctggtt

SEQ ID NO: 226250 - DNA, 122 bp, Homo sapiens
ctagatggcatctccttccaatagaaggctgttttgtgtatattaaaaatctctgccggacgcagtggttcacgcctataatcccaggactttgggaggccgaggtggatggatcacctgag

SEQ ID NO: 226251 - DNA, 122 bp, Homo sapiens
cacctccacagcccccaactcctctctcccagttctgcccaggatatttatggtgagtagcgagttatctcctctttggcagtcatccctgctttcctgtgtggaggaattgcccacattcg

SEQ ID NO: 226252 - DNA, 122 bp, Homo sapiens
ccgggtccgagcgcgccccgggtcctagcgccctgtcggttcaccggcccgggcagcccccgcgagtggagaggaactacatgccttcgccaaaccccagatgaaaccaaacccaaacatcc

SEQ ID NO: 226253 - DNA, 122 bp, Homo sapiens
agctcggagctggcagactcgctcaggaccctgaagcccgagggcgacatccttcgaggccggttcaagagcttccagaggaggaatatgatccagcctcgacagagagccaagttcaaacc

SEQ ID NO: 226254 - DNA, 122 bp, Homo sapiens
caggcaagagcagtaatttaacacgagtatgcattccagccacattttgttgtcagaaaccgttaccaggggcagcaatggaatgtgaggcatgatggtatgtgccaggctgtggtttctct

SEQ ID NO: 226255 - DNA, 122 bp, Homo sapiens
tttgtatagaaacataaagggaggcattttaatatacccctgacattcaatgaaaaaatacgaggctcagaataccataaacccagatactgtatttgtttaaactaattgggcttttttat

SEQ ID NO: 226256 - DNA, 122 bp, Homo sapiens
ggtcagggcggggctcaggtgtgctgtctggagtgcagggagctggacgccgcctgttcccgccacacctcagccctgctttcccatctcccgtctcttttttttttttttttttttttttt

SEQ ID NO: 226257 - DNA, 122 bp, Homo sapiens
ggggaggcgaaggaggctccagtcttagaaagagcagcttctggaactcaccacccaggccggccgccgctcggccccgtcccgcaggctgcaggcggccctggagggggcgccctcgccga

SEQ ID NO: 226258 - DNA, 122 bp, Homo sapiens
tcccttcagctgcccataaagaactgatggcgcacaggtagttttgcaaaaaagcaagtccgggctccgcctctgggcgctggaacaaaccggctcctgcagctctgcaaaagtcctcggag

SEQ ID NO: 226259 - DNA, 122 bp, Homo sapiens
ctcctgcgtaccctccacagctgctggcccgggtgctaagcccctcaatgccgtgggcagcggcgcccaccggccgctctgagttttgggccggcaagcccacgcccacccagaactcacgc

SEQ ID NO: 226260 - DNA, 122 bp, Homo sapiens
tttccagggccaatgtcgcactttggtgaggaggaaaggcctggtcacggcttggggtgacgcctaggaaactgtcagcctcgcaaacccataggcgcagccccaaggtcagggtcacctcg

SEQ ID NO: 226261 - DNA, 122 bp, Homo sapiens
cccaccaccagtgggttttgttcggggctaatgaggcgcgggaaaggcggaaggtgccggcgtgacagctcagaagatggaactaatgagaccttgttgctggacaaaggtggcattcaggg

SEQ ID NO: 226262 - DNA, 122 bp, Homo sapiens
gaagctaatgcaacttctctgtattggtaatcagcagagccagggtttccagggtgaacccgggcagtttgactcctgagacaaggggctgaggtagcggcagtacacaagcctttgccctg

SEQ ID NO: 226263 - DNA, 122 bp, Homo sapiens
aaaggaaagaggttagaatggccatggttctgcaggctgcacaagcattgcacccatctccgctcggcttctgggcaagccctcagggagcttttcctcatggtggaaggtgaagcaggagc

SEQ ID NO: 226264 - DNA, 122 bp, Homo sapiens
ctgcacctgggaaggcacaccgagggagaggggcgggaagcatctaagattccatttgttcggtgtcgccattccgctgggagggtcaggaacccctcctgccacaaggcatgggcagaggg

SEQ ID NO: 226265 - DNA, 122 bp, Homo sapiens
agcggctccgctgaggcttagggcgggcacccgggaggatgctggccctgcccccattgacgtcatgccaccatgtgactcactctgaccaatgagaggcaagcggaagtgacggttattcc

SEQ ID NO: 226266 - DNA, 122 bp, Homo sapiens
accgcacagggcttggtgccttccctaagctaagtactcactcaccaggcctggttctagcgggagctcaggaatggtcgctattgtgacaaatagaaaacccgccaggagacagagaggag

SEQ ID NO: 226267 - DNA, 122 bp, Homo sapiens
ctttggctcaggctaggcctcttcttctccttggacttaacgtggcttaggtccctgagtcggccaagacctcccagaggagacctgcccagctgccaccaccaccattattgattggcttc

SEQ ID NO: 226268 - DNA, 122 bp, Homo sapiens
aagaacctagattttaaactcagcatgataacatgtatgatctagagagatgtttcagtgcgtccccaatgctaggattcatgacaaacgcttaccagattcctacaagcacgtctctccat

SEQ ID NO: 226269 - DNA, 122 bp, Homo sapiens
cagattccctattagcacgatttctacgaggcccaacacaaacccagtttaccagacctccgattatacaagaaatcttgcagaagaaagaaaaagcaataggtatgtggctttggctttcc

SEQ ID NO: 226270 - DNA, 122 bp, Homo sapiens
agtggcagcggctcacctgggctcacacctaacccggccccatgcctgcagtcccacgggcgccctcatcagcagccacatagacaggcatcacacgaacctggcacttcccagcaaggccc

SEQ ID NO: 226271 - DNA, 122 bp, Homo sapiens
ggagtgaggcgaagctcggaggcggggctagagacgaggaccaagtccggaaggcgtggccggggtggggtgaggatcggaggcggggctagagaccaggaccaagtccggaaggcgtggct

SEQ ID NO: 226272 - DNA, 122 bp, Homo sapiens
agagcaggcaagagaccaggctaagtcacttccctaaaggatcttatctcaatctgatttcggattcccggggttcaccatgggatcaggcagacctcctgatgtatgtgctgatgaaaagt

SEQ ID NO: 226273 - DNA, 122 bp, Homo sapiens
gacgcggtttcgccatgttggccaggctggtctcgaactcctgacctcaggtgagagcaacgtagtactccactgtgcgtgcataccatgatttactttgcagtcccagatttacggtttcc

SEQ ID NO: 226274 - DNA, 122 bp, Homo sapiens
cacccgtctttggggggttcaaaccctggatctgcctcttaccagctcagtgcccgtgggcgcttacttagttctctatggttcagtttcctctctataaaaagtaataatataatagcacc

SEQ ID NO: 226275 - DNA, 122 bp, Homo sapiens
aggccaggcgcaggacgggaggcacatcgcagaggaagtggttgatttcctggtggtggccgcaaaagggcagggtgaagattaaggcggtgagctgcagggaggggaagagggccaggccc

SEQ ID NO: 226276 - DNA, 122 bp, Homo sapiens
ttgcgcttgagcaaacagcagaaccacctggaggtttagtgaaacccagatggctggccccgcccctggagtgcctgattcagtaggtctgggtgggcctgataactgcattttcagcaagt

SEQ ID NO: 226277 - DNA, 122 bp, Homo sapiens
tctcggtggggcctgcactgttcctgggtgtccttgggctgagcctctgccctgtgaggacggccgctcaggcatgatccgtcagcgaagccgtggctgtgactctgttttccgcagtggag

SEQ ID NO: 226278 - DNA, 122 bp, Homo sapiens
tcctcctcatgggcattaaccacaccaggcgtgctgctagtgctttatgtaattatatcacgtaatcccctcacaatcttcttcttattcctttatacctgaggaaaccagagctcaaggag

SEQ ID NO: 226279 - DNA, 122 bp, Homo sapiens
gctggaagagcagtgaccacaaagccaagtccaacagcaacgtcttcatgaccccaatcacgttagaaccatactccttgtgcccacttgctttgctctgttgggctcctagggaggcaggg

SEQ ID NO: 226280 - DNA, 122 bp, Homo sapiens
tttctttttcctgttctcaggcgcgctgcgggcacctctcggacaaggccccagccgtcgcgggttgccgggcagagtcggacgccgccagctcttcactccacgcccacctctctcctgga

SEQ ID NO: 226281 - DNA, 122 bp, Homo sapiens
acgctgcaggtgggaaccgagagccaggatggtcagggagctgacactgcaggtgggaaccgagagccaggaagcccagggagctgtcgctgcaggtgggaaccgcgagccgggacgggcag

SEQ ID NO: 226282 - DNA, 122 bp, Homo sapiens
tccgcctgacccgtgggatgcattgactgaaccctggtttctccttcttcaccttgggaccgtctcctcaaagtccctgtgacaatcctggggtgtgaaagaagtggggtagctctgattga

SEQ ID NO: 226283 - DNA, 122 bp, Homo sapiens
tctgcatttctaacgggctcccacgtgatgctgctgctggtccactgaccacactgttagcggtgagaacctaagagtctgtaattgcctccctgctcattacccccatgcccacgtgagct

SEQ ID NO: 226284 - DNA, 122 bp, Homo sapiens
gctggagcgaacatgtccggggacagggagggaggcgccgcttgcaggggtgtggggactcgaggaaggtttccagatgtcgccctatcctttaacctcaacccgagatgtgcagcgcgcga

SEQ ID NO: 226285 - DNA, 122 bp, Homo sapiens
tcttgaagtggcccagactttctcaattttaattggtgtacaatagatcctcctacaatgcgtgacactttttcccaggttaacaatctgctgaacacaatgaaacctgacattggtcttct

SEQ ID NO: 226286 - DNA, 122 bp, Homo sapiens
gggttaggtgaccccgaaccgtccctagagggacggaggagctagtcaggagcggagccccggaggactaggcagcagccggctgcagtctccagtcccggaacaataagcagcaggcggtc

SEQ ID NO: 226287 - DNA, 122 bp, Homo sapiens
gacgtgatgcattatttatgagatctctacagtcttccgtctttggcttctgtggaaagccgcagagagggcgtggaggggcggagccggctcgaaacacgtgggtgggtaggccccgccgc

SEQ ID NO: 226288 - DNA, 122 bp, Homo sapiens
tgggtctctttcccaaccagcatcacttataaggaagaggaggacttgacactccagccccgttcctgcctccagtgctcctgagtccctagtaggcctccaggagggcaaaagcaccgagc

SEQ ID NO: 226289 - DNA, 122 bp, Homo sapiens
tgggtgggaagagagaggtcgggctggaggacttggagacatggtgtaggtggttttcttcgagaaggaggagggatccaggacaaggtgccactaggagctgatgtcacctttgaggagag

SEQ ID NO: 226290 - DNA, 122 bp, Homo sapiens
cacccaagttcacacagctagtcaggtgcagaactgggatttttacccagttttgctgaccgccagagtccccagtgtcattgaccaccaaattatccagttaggtgtctgcaaaggaaaaa

SEQ ID NO: 226291 - DNA, 122 bp, Homo sapiens
ggctggccctgtttggctttttgtgcattattttgccttaccctgggcattgttcatctccgtgccctgcattctaccttcaagctctattttactgactttcttctgttactgggaaactt

SEQ ID NO: 226292 - DNA, 122 bp, Homo sapiens
agggctgcaggcccagggccagatcctgacttgcccacccgccggctgtgtgaccttcagcgcgcgactaacctctctgtgcctatttcctcgaggaaaatgccgggaaatagcagcgcctg

SEQ ID NO: 226293 - DNA, 122 bp, Homo sapiens
gagcccctcacaccagtgccaactgacccacaggcccctgagacataccccggggttcctcgctcctctcatgatctttgggatctgagttctagacgcgcagcccccatgcaacgcgctca

SEQ ID NO: 226294 - DNA, 122 bp, Homo sapiens
ttgcacagagctcaggcagcattctagcaccatcagacaaattcttcatgagtcagaaatcgcacctgtctcttaatagcgatctggcctcaggtggctgaaacacacagggttgaaatgct

SEQ ID NO: 226295 - DNA, 122 bp, Homo sapiens
tccccaccctacaaacaaggaaaatgaggctcaggaaggcaaagagctgggtttcagacccggatctgtcagattccatggaatgctctctgaattttgagttctgaagcacaaatgctggc

SEQ ID NO: 226296 - DNA, 122 bp, Homo sapiens
gcccccgagaccacgtggcctccgagcagctcagggcgcccttgaaagttcttggatctgcgggttatggccggtcccttgcagggcggtggggcccgggccctggacctactccggggcct

SEQ ID NO: 226297 - DNA, 122 bp, Homo sapiens
agtcgcccagatggtggtcccagggcagggagtgttagcacctgccgggctcagcctgggcggctcagagggcgggacctggagaaggagggccgctcggcaaccgctgagccggcgcaaga

SEQ ID NO: 226298 - DNA, 122 bp, Homo sapiens
tccccacagccaggagggcccccaggaggagaaggctctgggtcctcatatttctgctgccggctcagggcccagggccccccagattaacacctgcagcctcagggaagccagagaaactt

SEQ ID NO: 226299 - DNA, 122 bp, Homo sapiens
aggccgggagagggaaggctgcagctaataagcatcttttccaagtactccacgtgcattcgccagtcttatctgagtaggggaggaggaagaggccaggcacaagggcctgctccttggcc

SEQ ID NO: 226300 - DNA, 122 bp, Homo sapiens
ggggaataaaacaccccactcatattatgtcataaccacatatttgaaatatcttggacacgatccaggagccagtttgggattttctttattctttctttctgagctgggaaggcaattac

SEQ ID NO: 226301 - DNA, 122 bp, Homo sapiens
tagaaggctgtgcattatgcgtacggcgggagctgggccaacgacggcctaggacggggacgtttccgacggctcacgccggtgggggcgggacttccgggttgctcgctgcggacgccatt

SEQ ID NO: 226302 - DNA, 122 bp, Homo sapiens
tagttgccccaccactttaatgaatgccgtgtggcccggcatgggaaggctgggaaagcccgaaaaccccagtcatctctggcaacgaagtttccccgagttggctggctcccttaccccct

SEQ ID NO: 226303 - DNA, 122 bp, Homo sapiens
agtagagatcccctcagaaactgtggagtgaggcccaggaacagatcggctgagaggcttcgagctgcctcactcagcgctggaagtctgtgagccatggtcagggaggccgggggaccagc

SEQ ID NO: 226304 - DNA, 122 bp, Homo sapiens
cattcgtgcctccttcgtcacaagggcggccacgcaaaagcgtttctttccacccaatcacgtgttccctgatgctgtgtctcgcgcacagacaccagagttatttagaggtggctttcctt

SEQ ID NO: 226305 - DNA, 122 bp, Homo sapiens
gggctgtggcggaggcggcatggaggcggcggcggcgctggggggagctgagcgtggcggcggcggccggcggggggctggtcggcctggtatgctaccagctgtacggggaccccagggcc

SEQ ID NO: 226306 - DNA, 122 bp, Homo sapiens
ggggcggggctgagaactaggctggcgccgctgcctggtaagcgggtaccaagaggcccacggcctccatcaggaaccaggtgcttctccaaatcccggacttcaaggagcagcaacggcgt

SEQ ID NO: 226307 - DNA, 122 bp, Homo sapiens
caggaggcacaggactggcactgtggctgatgtcctggctgtgggaccagcatttttttccggctgcttctggttctccccagcctcaggcccagctgccagactgtggcccgcagtgtgaa

SEQ ID NO: 226308 - DNA, 122 bp, Homo sapiens
cagacaaaggtgcgggaaatgggaccggtttgacttgttcaggtgggcactcgggggtcccggcaaaccgtctcctcaaaagccccccgtgcactagcacgcctccccaaatcccgtcccca

SEQ ID NO: 226309 - DNA, 122 bp, Homo sapiens
gaggatgcttgagagagccctgatgttctgacctcccaaaaggtcaagggtgctggcagccggtgagacgccgcagtttgctctgctccccggggctgtgcttgccaggagacatttcggct

SEQ ID NO: 226310 - DNA, 122 bp, Homo sapiens
tagaatccaagtctgaaagagctctgtctagcttcttttattttagtcacctctaccctgcgctgccctgccagtgattgctacagctgttgctattcagtaagaactacagctactttctg

SEQ ID NO: 226311 - DNA, 122 bp, Homo sapiens
ctgttcccaggccacaggcacattagctccatggggaccgggttgtccccctgccttgctcgctgttgcatggctggctctgaacgcccaccgtgcacctggccctgctgtaggtgctgagg

SEQ ID NO: 226312 - DNA, 122 bp, Homo sapiens
aattgttagcctacaacttgggcaaaggcactatccagaatcaggactccaaaatcatcacgggctttttcctcagtgtagatgagtcacaggggtagtaacttaactattcctttccttaa

SEQ ID NO: 226313 - DNA, 122 bp, Homo sapiens
gttgctgaatgctgttcttcagtgtctcttttgagcaaaaaggcactcctcagcttgctccgtcttgggagagagccttgggaagagtggatgcaatccaagggtgttactggaattagggc

SEQ ID NO: 226314 - DNA, 122 bp, Homo sapiens
ggctgggcgtccgggtggtgttggtgctgggagtggtgctgaggtagcagctgttgtcgtcgtcctcttcggtcagactggtgatgtcccctggggtctcgtcgctgccaccaaaggaagca

SEQ ID NO: 226315 - DNA, 122 bp, Homo sapiens
agggttttaactcctggggaaacggatgatgttccctcagtaaggttcctccagccccttcgtcattttactggtggtgacaggaagtccactaattactttccattttattttcctccaaa

SEQ ID NO: 226316 - DNA, 122 bp, Homo sapiens
acgaaccggtagtcgtaggcgagcggctcaggggctgcgggtcccgatggggggacctggcggcgcgtcagcggcagggttgcccagcgcaggcagctcgcgcacgtactgcgcgggcaggt

SEQ ID NO: 226317 - DNA, 122 bp, Homo sapiens
gagtgtgagtggaatctaatgagtgggacagacctcccaagtgagcattgaatatgagggcgggtggggcatggtagctcatgcctataaccccagcactttgggaggccaaggtaggagga

SEQ ID NO: 226318 - DNA, 122 bp, Homo sapiens
gcgcaccctgcggcagcggctgcgctgcctcagcccacagctcagacctgcgggtggccgcgactcaggccgggacccggtcgcacctctgtgacgcaaagccccgccccccgcgcgttgcc

SEQ ID NO: 226319 - DNA, 122 bp, Homo sapiens
gaacaacgaggctgctcgcaccgggagtaatagggctgcgggaattcaaactggaagtcacggcagctcctgtgcccgtaggcccctggtatatttcatctttagtaatacgtacatcagga

SEQ ID NO: 226320 - DNA, 122 bp, Homo sapiens
gggctttcaaagtgtggccgcgagggcgagcgtgggggatcggttatgagctcccgagggcggggactctgctctgtgtcccctgaggaagtccagtcttgttataaggtatgagaaaagta

SEQ ID NO: 226321 - DNA, 122 bp, Homo sapiens
accaagaccaccatgtgcatatcggccagggcaagacactgctgctcacctcttctgccacggtctattccatccacatctcagagggaggtaagccaatctctctctgctgctccctcttc

SEQ ID NO: 226322 - DNA, 122 bp, Homo sapiens
accttgccttcaaagggcccgagtcctagtgatgggggagtggagtcgggtgaggagatacgcatttcaatctaaaaggtgtgctagaagcagtgtgaacacaaatggcttagacaaaaatg

SEQ ID NO: 226323 - DNA, 122 bp, Homo sapiens
gggtggccatcaaagagcaacggcaggaaggaagccgggcacagacttcccagaaggctgcggggctccactagaccatgagggagccccacagggatgaaaaccacaccagacatccagtg

SEQ ID NO: 226324 - DNA, 122 bp, Homo sapiens
ggatgtcgttacagggcttttacattgcatagatgaaaccagccattcataaagccaaaacgttccatttttaactgggatccattcagaacccagctgaatcacatcagggatttacagta

SEQ ID NO: 226325 - DNA, 122 bp, Homo sapiens
cccttggagaaaggaaaaagtcaaggcctcggttcagagcatcataaagcacagcagccccgagacatcccagagcctcatgggcccagcctttctccctcacagcgggggcggggcaacag

SEQ ID NO: 226326 - DNA, 122 bp, Homo sapiens
cttttagagagtgggtgaagagaagtgggaggcacagccccagtgctcaccccagggggccggagggagcaggatctgtgtgttcaccccacagtggctccagagaacatgggcggctgtcc

SEQ ID NO: 226327 - DNA, 122 bp, Homo sapiens
atgtctgtggtctcagctaccggagaggctgacgtgggaggatcgcttgagcccaggaggcggaggctgtagcaaggcgtggctacacaactgcactccggcatgagcaacagagcaagact

SEQ ID NO: 226328 - DNA, 122 bp, Homo sapiens
acatgagggcaggcgggggcatcaccagctacgtctcggtactccggtctcagggtctcccgacactgacgctccctgcctcctaaggaggcaaaagctggaagcaacaccttcgggagtga

SEQ ID NO: 226329 - DNA, 122 bp, Homo sapiens
atataaaggaaaaaaatcaagcatttattcttctgtctattcgagggtacccaaatcattcgtaagggtcataaatgcaacaaaatggtagaattagaaagtcactattcacacctcctaat

SEQ ID NO: 226330 - DNA, 122 bp, Homo sapiens
tttttttgtctgcaagctgtaagcctgctgctgctgcttcctcctacacacccatccaagcgtcaatcttgaatgatgagagcagtcaaaacaaatgcagaaaatagcaagattcaaaagca

SEQ ID NO: 226331 - DNA, 122 bp, Homo sapiens
tggggagagggagttgggaaggacttaacttttcaccgcagggcctgagtcctggctttccgcggtggggaaggggtctcccgggtcccctcggtgtggccggccctgcaggccgggaggct

SEQ ID NO: 226332 - DNA, 122 bp, Homo sapiens
tcgttccaccattgatgtacatactcatgttttacatcttttctttctgccgctcggctccggccattttgttttatacaaaaatgggaaaaaaaaaaaagaaattatataaagttcctaga

SEQ ID NO: 226333 - DNA, 122 bp, Homo sapiens
ccatatattcctattttattaagagtttttaatcaaggctgagtgttggattttgtcaaacgcccccatgaagagggtattctataaattgatatcctaaaatcaagctgacaggctggtcc

SEQ ID NO: 226334 - DNA, 122 bp, Homo sapiens
tggtgaggcgtgcaccctggcggcgctccccagggaactaaatatgtttgctgcactgtgcgtggagatggagaatgtacaattggctgaccctgtgctaatctggtggaactccatgccag

SEQ ID NO: 226335 - DNA, 122 bp, Homo sapiens
cggccgaggccagtggcttcccaggcccgggtctcagcctggctgactgggagactctcccgatagcccggcacatccctcctcacccgctccgccccctccaggccccagaggccccctcc

SEQ ID NO: 226336 - DNA, 122 bp, Homo sapiens
ctttcctggaatacagtcttgtttgtggcttttcctttgttgtacgctagcgtgcactatcgcccgcacgctgactgacccctgttctacaccgcccctgataccactgaatagggagtttg

SEQ ID NO: 226337 - DNA, 122 bp, Homo sapiens
ccccaattaggggctcgtctagtgaattgggggtattctccttcgaatgagtacactacccgccgcaccttggccgggtttcagatgccccaaacttaaaagaagcctaaaaggccgtcagg

SEQ ID NO: 226338 - DNA, 122 bp, Homo sapiens
gaccctgctatcctctttcctgctgcatactgacttttttgtgaattttaccacagcaaccgctaaaaaaccagcttcacaaagacatatcatctatagaaatgtggcacaaccttgaaacc

SEQ ID NO: 226339 - DNA, 122 bp, Homo sapiens
agtagaagaacttgtgcaggagaagctgctgtctgggtggcggatagtttggctgggtatcgaagtcccttcgaaggctgcacccatccgtggttctcattcagtgctgctggcacaaagat

SEQ ID NO: 226340 - DNA, 122 bp, Homo sapiens
gactctgcaaaggagagggcctgggggcccagcgcctaacgataggcccgagccgggagccggacccctggtccctgcctctcaccagcatcctccaggagggtgttgcgggcgaggccaag

SEQ ID NO: 226341 - DNA, 122 bp, Homo sapiens
gaaacgagaagtcttcctctgatggaaggtttttctcgatcgaagagttcgtggtctcaccggcttcaaggaatgaagtgttactgcttgattagagaaaggtgcggacccaaagagtgtgg

SEQ ID NO: 226342 - DNA, 122 bp, Homo sapiens
cctcctgctccgattatgaggaacttctttcccaagctccccaccttctttgggcttggacggctgcagagttccagttaactgtgcgccgccttcgttccaattgtacccctcgtgctccc

SEQ ID NO: 226343 - DNA, 122 bp, Homo sapiens
gctacgatgacttggcacctgaggcacattctgttttctagaaaccttcaaagtctggcacgtctcaatgtcagatgtcatcctgtgcccatgagcctactctgggggtctggggggcagca

SEQ ID NO: 226344 - DNA, 122 bp, Homo sapiens
atgccttaggacgcgacagatgaaaaatcttttcttctgcttggcggaacactttggatgcggcttatggtgggtcttgagagcaagctaagatgtcccgccagacgctcaggaccatcgct

SEQ ID NO: 226345 - DNA, 122 bp, Homo sapiens
gctttggtgtcttgtgagagcctgatttcttgtagatggtgtcttcttgctgggtcctcacgtgttgaaagggggcaaggcagttcttggcactaatcccattgatgaggaccccaccctca

SEQ ID NO: 226346 - DNA, 122 bp, Homo sapiens
cttgaacaacatgggtttcaactgagtggctctatgttatcatggattctcttccacctccgccacccctgagacaacaaggccaacccctcctcttccttcttcacttcctcacctattca

SEQ ID NO: 226347 - DNA, 122 bp, Homo sapiens
agttcaggctattatctacttacctggactactgagatagcctcataattgctttgttttcgtagtccattcaccataaagcagtcagttatctttttaaaaacacagatcatatagtttca

SEQ ID NO: 226348 - DNA, 122 bp, Homo sapiens
cctcaagtgatccacccgccttgacctcctaagtgtggggattataggtgtgagccactgcgctcggcccagactaaacttcttgaatgctattcttactgatattgagtctatgattctta

SEQ ID NO: 226349 - DNA, 122 bp, Homo sapiens
atggcctttctaaatagcattccagctgcaagctcaaggtcagtctttacctgcatgctgcggagaacggcctctgtttcctatcagccttttgaatccttcataaagttggaagccagtac

SEQ ID NO: 226350 - DNA, 122 bp, Homo sapiens
gtcacgtaaaggggggggcggggcggtcgtgggggtggaacatgcgtattactaagcggtcgccgggctgatgacataaaaaccgggtgccggcaggcgccagtcgcaggtgtgctgctgag

SEQ ID NO: 226351 - DNA, 122 bp, Homo sapiens
cgggattcccctgactccacctcttcctccagacggctgccacgccgaccctgcctgcgacgcggaagccaccttctcccagcgctgaaacttgatggctccgaacaccctcgaagcgcgcc

SEQ ID NO: 226352 - DNA, 122 bp, Homo sapiens
ggaggtgaatccgctgatgctgacacatgttggaactgtgccggaaggccttcccacactcgctgcacttgtagggcttctccccggtgtggatcctccggtgctgaatcaagtacgtgctc

SEQ ID NO: 226353 - DNA, 122 bp, Homo sapiens
atggaccatatgattgtggagttttggaggaatcttccccgatctctttggactgtgcatcgttatcatccctccatcttgggaaaccaggtgactggcagcactctgcatacctccactct

SEQ ID NO: 226354 - DNA, 122 bp, Homo sapiens
aattctttgaagcccatgggacgatctccataatattcatcaatcccaggataaaagccccgaatgccaaatcatttagataattgatttatattttccatgtgtactatgaactatggaac

SEQ ID NO: 226355 - DNA, 122 bp, Homo sapiens
cgctacaggtgggtgaagttaagtggctgctggagcgtctcgggggacagccagtgtctgcggcgccgagagggccgttcgtggactcaaatgggtatcacccctaccgtttatagtcctcc

SEQ ID NO: 226356 - DNA, 122 bp, Homo sapiens
ccacacggctgtggccagcccgctgcagaacaccttgctcatcatgctgctgtaatgcagcgggtggcagatggctgcgtaccggtcataggccatgaccgtgaggagcagcagctctgagg

SEQ ID NO: 226357 - DNA, 122 bp, Homo sapiens
aaaaaagataatcacgtaaccgaaacctggaaatctgccttgggcacacaaaagagcaggcgcgacctcggaccagctccgaggcaaaattcactcagcgcgggacagcgacagggaatccg

SEQ ID NO: 226358 - DNA, 122 bp, Homo sapiens
agaaaaaaaggagagagaaaagtgatttaaacagggtggattccactctgtgggagccttcgatggaactcaaggtggagctcagcctttccaatgagctctaagcatgtagatagcctgag

SEQ ID NO: 226359 - DNA, 122 bp, Homo sapiens
tggggctgcgcagggctctttgaggtgggtggcttcttttggaaagtactatgaacgtctcgaagcagtattctagtgataagaattcttaacatagccaagcgccccacgtttgttcccca

SEQ ID NO: 226360 - DNA, 122 bp, Homo sapiens
agattactccaaaggtttcggcggcaaatacggtatcgacaaggacaaagtggataagagcgccgttggctttgagtatcaaggcaaaacggagaagcacgagtcccagaaaggtgtcttcc

SEQ ID NO: 226361 - DNA, 122 bp, Homo sapiens
ccggggttgtgggaggtgctcacaggccagtgcgagttccaggtgggtgcaggctcagcgcgccctgtactcggagcggccccgggcagtgagaggcttagcacccgggccagcagctgcag

SEQ ID NO: 226362 - DNA, 122 bp, Homo sapiens
ttccccagatacctgtagggcttttttctaacctccttcatggctgtgctcaaatagcaccgtgttttaaaatgtaatccttaatccaggtgagcatactctattccccttccttgccctac

SEQ ID NO: 226363 - DNA, 122 bp, Homo sapiens
ataacccaaaagacaaaagactgccagtggacagcaacgtctcactagggctatagagtacgatgcctctatcagagaccgagggccttgctcattcaattcagcattttgtgggcatctct

SEQ ID NO: 226364 - DNA, 122 bp, Homo sapiens
gggcgggcccggggcggagacgagcccgaaggggcggggcctcggcggcagcaagaaaggcgggaccggggcatctcggggcggggcttggggctggatctatgagccgggagcggggatcc

SEQ ID NO: 226365 - DNA, 122 bp, Homo sapiens
tcctaaaccacagcgcccctgccggtctgaatctggttcattcatttggccaacatgtaccgggcgtctcaggttttgccaggcccagtgctgggcgctggagacaaagagaggttcagaca

SEQ ID NO: 226366 - DNA, 122 bp, Homo sapiens
ccttctgcgtccgcagctcggtccccacgttcccgctcgctgggccccacaggccaggagcgttgcccctttaacaagagtagcccgggtcgctcccggctccttcccgggaccgcgcgtac

SEQ ID NO: 226367 - DNA, 122 bp, Homo sapiens
aatggtgaggatgctggcagcgccagcgttcccggcctgcactctctcctggcctcccctcggacgtcttctgcagcccaaatctgaacagcagtgaaaccgtaaacatgccccccaccagc

SEQ ID NO: 226368 - DNA, 122 bp, Homo sapiens
ctccgctgcgaacctgcgccccaccgcggcccgcacacctgggccgagccggggccgcctcgggagcccctcgctggctcctgggcgccccactcggctcagcaatgtccgggccagacaaa

SEQ ID NO: 226369 - DNA, 122 bp, Homo sapiens
ggccgtcgcttccatcatcctgcggtaagcagcatgcccaaccgaaaaaacaaagctcgtcgcggagccgccagcgtcctcaactcagcgccgccctgacgcccgcgcacgcacggcctcgc

SEQ ID NO: 226370 - DNA, 122 bp, Homo sapiens
ttctctgctacacttgtctccacggccctggtctgaaacacatgatgcttcacctggactcgtaggcgaccgatctttctgcctcttggcttactactcttaagtctcgccttcacgggcag

SEQ ID NO: 226371 - DNA, 122 bp, Homo sapiens
gctggctctcactgggtttattggagcacctaggcttagaacctcggatttctagaaccccgaaacctccgcggttccccgaaccttaggatcctctcccacatgtcgtagaatcttggaat

SEQ ID NO: 226372 - DNA, 122 bp, Homo sapiens
actaaagattccctccatctctcacttgggtgcatttgtttccggggcaggtgttgggcccgctggggctgggccaggagtgagctccgggttctgggctggggcacgctcctccacttctt

SEQ ID NO: 226373 - DNA, 122 bp, Homo sapiens
gtcccccaccaccccagggcgctggtgaaggctcgggggacacgcccatttgtgatctcccgctcgacctttgctggccacggccgatacgccggccactggacgggggacgtgtggagctc

SEQ ID NO: 226374 - DNA, 122 bp, Homo sapiens
acccccaggagcgaatccgggcagggaaaccccggacgcccgcacactcagcatcagtaccggcacccagcacccagcaccgagcaccgagcacgcagcacccagcaccgatcaccgagcag

SEQ ID NO: 226375 - DNA, 122 bp, Homo sapiens
ccaacgcaagaaagccgggggagcctcggtcgcattgctggaagatcgtctaaacatccccgctgctcggccgctaggccggcaggtgttcgggccccgctcccccggcccgccccaccccc

SEQ ID NO: 226376 - DNA, 122 bp, Homo sapiens
tgcagtcttaccacactccatagttaggaaaaaaaacaatcagttgtaaccgatccagaacggacaggatgttagatagcacagaaagacaacaagaagcacctcagtacctggaaagacaa

SEQ ID NO: 226377 - DNA, 122 bp, Homo sapiens
agtgctgaatttcatcccctttcttcttaaggaccttagtgcataaataagtccctagtccgtatccctaaatcatattaacaatactgcttactgggtgccaacaatatgtctggtactgg

SEQ ID NO: 226378 - DNA, 122 bp, Homo sapiens
ggtgtacagatacctattctatctctaggaccagtggtaggaaaagactcttgtccttcccgatcacctagagagaggctttcacaagggcatgtcctgcagtctttcaggccagagcattg

SEQ ID NO: 226379 - DNA, 122 bp, Homo sapiens
tgcgaacgtctccatatctagatacaggtattttaaaagctgttgtgactttgttttgcacgaacttgacattgtgtttgcaggattgcagtgctcccaaggaaatgaataaactgccagcc

SEQ ID NO: 226380 - DNA, 122 bp, Homo sapiens
tactgaagctcaatggtggccagaaggatgtgaaatgaggttaaagagaaaagtaggatccgtattgaagtccaacatgcctcggtaagaaatctgaatgctagcttaagtcactggaagcc

SEQ ID NO: 226381 - DNA, 122 bp, Homo sapiens
acagtgaagggaaggacccccagtccaaaggtctgatcaaagtcttgagggtccctttcccgatggagggagtcatggtgggcttactgtctgtcggaaaccgggaggctgagccgaccaga

SEQ ID NO: 226382 - DNA, 122 bp, Homo sapiens
ttacagtcactccctctgtcatacttgtctccgtagttaaaatcagctcaccatctacaccgcggcagctgaatagggctagagaaaaacaaccatagtgacagatctcactttacaattgt

SEQ ID NO: 226383 - DNA, 122 bp, Homo sapiens
aagaaggcaggatgtgagctctgaggatgagcgggaggattgcctccaagcacaatgcatcgcgtggacacaaggtgcttacttaatgtcagccctgtgggggtttacatgcattttaataa

SEQ ID NO: 226384 - DNA, 122 bp, Homo sapiens
cagggcgggccgcgcctttaccgcccagctgcctcccggagcccccgcgccctcccgacgcgcagagccatggcctcccacctgcgcccgccgtccccgctcctcgtgcgggtgtacaagtc

SEQ ID NO: 226385 - DNA, 122 bp, Homo sapiens
aggaccctccgagccaggtgcaggatataatcttgtggtgcgccgttttttaagcctgtccgaaaagcgcaatattcgcgtgggagtgacccgattttccaggtgagtccgtcacccctttc

SEQ ID NO: 226386 - DNA, 122 bp, Homo sapiens
cgaagccccagtgccatttggcatggcctagctgcctgcctccgacgctgtcccgccctccggaaccttcctgttacagggtttccaggaaaaaaaaagttgtatttgcgtgcctagctcaa

SEQ ID NO: 226387 - DNA, 122 bp, Homo sapiens
cactgggctgggccatgcaggtggccccgttctggcaaggcctggactcacatgggttcacgtgatcctggcacaggctgccttggaatccaggggggcagtggcagaaataggaggggccg

SEQ ID NO: 226388 - DNA, 122 bp, Homo sapiens
ccaggctggaggagagcaccggggatggactgttcccatctgcccagctccaggaggccccgccaaagccctcgtccccggcggtcctggcaacccccaaaccacctcggatggtgccaccc

SEQ ID NO: 226389 - DNA, 122 bp, Homo sapiens
cttgtgatccttcacttgcaaaggtcctatttccacatagggtcacattctgagtttctgcgtagacatgaattttttgcgggatgttggggggactatgctcacttttcttcatcctcact

SEQ ID NO: 226390 - DNA, 122 bp, Homo sapiens
accgcggcaccgctcggcccggtcgccggcgcagggagcagcttcgggggccgaccccaccgcccgagcctagccctgggctccgacaggcgctccccagaggcgccccattacctgctctg

SEQ ID NO: 226391 - DNA, 122 bp, Homo sapiens
tggaatgatgccgagcttcctaaatgtgcttttaaattattatttttagaaacagagcctcgctctgtcgcccaggctggagtggagtggcgcagtctcagctcactgtagcctccaactcc

SEQ ID NO: 226392 - DNA, 122 bp, Homo sapiens
ttttcaggtttgctttggttgcaagtgacagaaaatctacctgaactcactttggcgaaacgaggaatgcacttgggcccaggcagggctccagatgctgcccggctgagtgtgcccgtttc

SEQ ID NO: 226393 - DNA, 122 bp, Homo sapiens
gcccccagcaccccagccggcggcgcagtgcgcaggcgctgtcgggcccgacgcgagggacgtccagacgcgcggccccacgccctatcccggcccgggttttgccccagccttgcgcgcgg

SEQ ID NO: 226394 - DNA, 122 bp, Homo sapiens
gactgactcctgctagcatggataaaagctaacagccatgttgtgaactatgtggccacacggcaaggatctgagagcagtccttggccaacagctaacaagaagatggggacttcagtcac

SEQ ID NO: 226395 - DNA, 122 bp, Homo sapiens
aaaagggtgagtcaagggggacgagcaggtatctcccagatgcagaggttcaaacaggatcggagagaggtcgggaggccagggcaggtggagcaacaggaagtgagcgaagggctgttttt

SEQ ID NO: 226396 - DNA, 122 bp, Homo sapiens
gagctggtgacagaggctaacttcagagaaaagctagccccgggtgggaggcaggatcctcgcgcggatagcaaggtattcgcaccctcggtctgcactgcgcagtcgggcgccagaaaccc

SEQ ID NO: 226397 - DNA, 122 bp, Homo sapiens
gggcggctggccgggtgggggggctgaccccccatctccctcccggatggggtggctggccgggctgaggggctcctcacttcccagtaggggcggccgggcagaggcgcccctcacctccc

SEQ ID NO: 226398 - DNA, 122 bp, Homo sapiens
ccatcttccagtcctcacctccccctggacctcagacactggcccctcttctgtgctccccgatgcaggtgccctgcattgccctcctgagccccaacacatctgtcctctgtgtgtccgga

SEQ ID NO: 226399 - DNA, 122 bp, Homo sapiens
atccatccgaataggtaaaatgctcataatgaaagcattcctcacctgatagcttgttctcgttgagcctttctaacttcaggtttctgattcctcttggccattatatcagcaagagatgc

SEQ ID NO: 226400 - DNA, 122 bp, Homo sapiens
tggagctgaggcacctgatggggaggtggaggcagcatctggagccctgaggccaggcagcggcctgccagctccctagggtcttattagctgcagcggctgcggctgcagcatctggggca

SEQ ID NO: 226401 - DNA, 122 bp, Homo sapiens
tggtggggcagcgggcagacggtcctggagcaggaagcgggcagtgggggtggcacccgccgcctcccgggcagcccaaggcaagcacaggcaaccggggccgggccacggcacctgggggt

SEQ ID NO: 226402 - DNA, 122 bp, Homo sapiens
gacagactcacgtggtgtaaatacagctacacagagcggtggtgcaaagtcaggtggtcacggggatttctgcttatgattctagtatggtatacagagcccagtttccaaaacagccaaat

SEQ ID NO: 226403 - DNA, 122 bp, Homo sapiens
atctgctccaaacgctctcggacagttttctttttgatttgttcatgttcctgtaagatacgctccttctctctctcctttgcttcctggcgcagcctctcttcctcagccttccgcacttt

SEQ ID NO: 226404 - DNA, 122 bp, Homo sapiens
cagccaatggaaaacggacacagcagttgtcaggttataaatgaccctgtctcctttgttcggtgtactctcgtggcaaaactgctggcgagtgtaccctttctggaggaagtaaaaaatga

SEQ ID NO: 226405 - DNA, 122 bp, Homo sapiens
cgtcacttccgcaacgcttccttcgcggggctttgtgggtagccgactggggtctcctggcgacgaccatggcgggggatgtgggcggtcgcagctgcacggactcggaactgctgctgcac

SEQ ID NO: 226406 - DNA, 122 bp, Homo sapiens
cactgtatcatcaaacggcccgacaaccagcacgtcatcctgaaggtaggtgtgcactgccggccccgacgcggccgggttgcttgagcccagggcaaggcgcgggccacccaggatccccc

SEQ ID NO: 226407 - DNA, 122 bp, Homo sapiens
atggtctgggggaggggacaggccggtgggctggggtcagcagctagcaccaagtggtcccggtccttcctgccccattgtggcagcctggtggtggccttcggtgactgcggtgtgaccat

SEQ ID NO: 226408 - DNA, 122 bp, Homo sapiens
tcttaggaactatatttaagccaaatatctacataagttacaacagaaaaagactgacgccgcaaataccaaactgccaaataatatacacagatttgtcaatgcccataaaaaatgtgaag

SEQ ID NO: 226409 - DNA, 122 bp, Homo sapiens
cggcacccctcctctctcacggcggtctgttccgggtcccgctcctgcacgagcaaccagcgcgacagctcgtccccgccccgtaatctcccggctattcggggcccttcgccgagatttct

SEQ ID NO: 226410 - DNA, 122 bp, Homo sapiens
ccggagcgcagctcttgggcatggagcggacgaaggagagggcggaaggaccgtggcgatcgcaggtttgtccccagttgatagttccgtgagttcctcaattattcctccgcccaggttca

SEQ ID NO: 226411 - DNA, 122 bp, Homo sapiens
tgaggcgcggggaaactggggaggcccggggactcccctctgcccctcacacagcccctccggtcctggcccaccaggcctgtacctacctccagcctcggccaggcccttccagtcaccct

SEQ ID NO: 226412 - DNA, 122 bp, Homo sapiens
gccctcacgaggcgccaccactgccgcaagtgcggcttcgtggtctgcgctgagtgctcgcgccagcgcttcctgctcccgcgcctgtcccccaagcccgtgcgcgtctgcagcctctgcta

SEQ ID NO: 226413 - DNA, 122 bp, Homo sapiens
tgcccgatgctggggcttgggtctgatgtgaccccgattccttctccagtgcgggactcccgccgccctaactttcgcgtacatcttgtctccaggcccgcgaccccgacccggagttgaag

SEQ ID NO: 226414 - DNA, 122 bp, Homo sapiens
tccgcctgggccccgcggccgctcgggagggagcggcggactcggaacgcgcgcgcgccgcggccccggccacagccgccgcctcggtccccgcctccgcccccgcccacccgcccgccggg

SEQ ID NO: 226415 - DNA, 122 bp, Homo sapiens
gcggccgctgcgttggcttgcagctgcagccacacgggccgggtgagcagcaggcgctcccgcaggctcacaacgcgccccggccgctgcggcccgcctgcctgcccgccgctggcattggg

SEQ ID NO: 226416 - DNA, 122 bp, Homo sapiens
ttgccctactgcctccttttgctctgagaagcgaggtggctctggacagggtgggggtggcggtgaatcacaggccctggcctcgattgctgggatggccagcctcatgtgctctcagcgtg

SEQ ID NO: 226417 - DNA, 122 bp, Homo sapiens
gacccacaagtggtaaaggacaggtggccccactcaggaagacactttctcaggcagaaccggaatgacaatgggaggccagttgtggagagcctgggacgccagaataagtgagcacgaga

SEQ ID NO: 226418 - DNA, 122 bp, Homo sapiens
ccctcgtcctgggagcgggttggctgctgagctctcggagaagcgcctgtatttgcatggcgttcggggtttttggtaggtagagcagcccgtcactctggaaggccgggaccgcccactcc

SEQ ID NO: 226419 - DNA, 122 bp, Homo sapiens
ccgggcacatgcaccagtgtggagaccacggttaacaccaggtggtcgcttgtcaagatgcggttgtcaagatgttcacttttcaaacccttcagtgcatccggaaggccttcagggaggaa

SEQ ID NO: 226420 - DNA, 122 bp, Homo sapiens
tagggcgctgctgccgccacagtgggtaccttaggggtggcccccagtgctcatagccagcgcagtcccctgtccctgatgtgggctggactgcgtgactcaggactggattctagggatgg

SEQ ID NO: 226421 - DNA, 122 bp, Homo sapiens
ccttcctttattcctcggcgatatgctctgcggcaggcattaatgccccaaatttaggatcgcttgagctcaggaggccgaggctgcagtgagccgagatcgcgccactgcactccagccgg

SEQ ID NO: 226422 - DNA, 122 bp, Homo sapiens
atgaccctctgagccaggtgcgggatataatctcgtggtgcgctgttttttaagccggtccgaaaagcgcaatattcgggtgggagtgacccgattttccaggtgcgtccctcacccctttc

SEQ ID NO: 226423 - DNA, 122 bp, Homo sapiens
gcccgccgtggggacacggggctcgcgcgcagcggtcgcgaagagaacgagcacgtagagcgggcgttcaccccgcacgcgaagctcctccccgcgcccctcaagcttccgcctccgagccc

SEQ ID NO: 226424 - DNA, 122 bp, Homo sapiens
gcttaggcaggagaaccgcttgaacgattctagtcagttgctgggttccttttagagagacgggcacaggggggaaagcagggcttagaatcgcttgaacctgggaagcggaggttgcagtg

SEQ ID NO: 226425 - DNA, 122 bp, Homo sapiens
gagatgtgttctgatgtccctgagtctccatccctaagagacctgagaaagtcgtccttccgtgcagcctgggaggacttcatagagcgaagagcagaggcaaaggctggtgcggagagtga

SEQ ID NO: 226426 - DNA, 122 bp, Homo sapiens
catgccccatcccttgggataagctatgtcagtcatcggtcatctgtacatcacataactcgtattttaagaagaatttatgtaatacttactaaaagtcttacagatgtcagaaacagctt

SEQ ID NO: 226427 - DNA, 122 bp, Homo sapiens
tgactggatgtatgatttgcaagacttgcaactgtccctctgtttgcttgtagtagcacccgatcagtatgtcttgtaatggcacatccatccagatatgcctctcttgtgtatgaagtttt

SEQ ID NO: 226428 - DNA, 122 bp, Homo sapiens
catgtgtctcaccttggtgggtgtgccagagtacacatcctggaaaacagaagcatggctcggttgacattcatctcaccctgaaaacaggggccccttcctacaccccactccttatgtgg

SEQ ID NO: 226429 - DNA, 122 bp, Homo sapiens
aagtgcccctgggaagggatccgcagggaacagctttgaaaggaccacagcccccagccacgaggggagcaagcacgagccgggaagagagctctgcgctcgcacacgggattcatctccgc

SEQ ID NO: 226430 - DNA, 122 bp, Homo sapiens
ctactactaagcttcagactcaaatttatttccaaaccaaagaacgctcaagggtcttttcgcatgctgcaactgctcaattcacagaatcacccctaagggtgaaaaaacagagcatacaa

SEQ ID NO: 226431 - DNA, 122 bp, Homo sapiens
ggctggtccaaaatcacatccaataaagggactcaggagctaagtacggatggcaggagtcggggaaatggaaagaagttaatgcttgtcccttaggtttgtatacatatttgttaacatta

SEQ ID NO: 226432 - DNA, 122 bp, Homo sapiens
gtcctgtggactgtgcggtcccctgcagattgtccagtaccgagggcagcaaaaggttgacgctgagagtgagagcggggcaggcggctggtggtggtgctgtgctgccgcgaggctgttgg

SEQ ID NO: 226433 - DNA, 122 bp, Homo sapiens
ctgctttcaggagagccccatttttcaccatcacctacctagtgtcccacctccccaacccgaggccccgcccccatggccccgcctcagatgacgcgacacgccaagtgcgtggggattcc

SEQ ID NO: 226434 - DNA, 122 bp, Homo sapiens
acctccgcaatagaaaacgctcggagaacacgatctcccgcccagctcttttcaactccccgcggaagtgctcacaccggaacccctctgtgtccgcactttgccattggccgaggcttccg

SEQ ID NO: 226435 - DNA, 122 bp, Homo sapiens
ttataaaaagaataaattcaagaagcagatgaatgggcttggttgtgacctggactgcaacgcggtctctgctgtctttactttcacattcttgtccttcaaggctcaatgttatgtctttt

SEQ ID NO: 226436 - DNA, 122 bp, Homo sapiens
ctcctcacttctcagacggggcggctgcagggcggaggggctcctcacttctcagacgggcggttgccaggcggagggtctcctcacttctcagacggggcggccgggcagagacgctcctc

SEQ ID NO: 226437 - DNA, 122 bp, Homo sapiens
aggaaagaccaaaaacaggcaagactcatcaactcatgttcctgctcagggactttgctccgtaacttatttcccaccacacttggatactcaacctcattctcttggtttctgccactcag

SEQ ID NO: 226438 - DNA, 122 bp, Homo sapiens
gtgatgtttgcttggttgcctgttcccttttctacctgcagagcacggttcccataagggcggcgagatcagcctcctgtctcatctggaagaccaccactctggggtctcagaggaatgat

SEQ ID NO: 226439 - DNA, 122 bp, Homo sapiens
gaggcagaaaaattctactttccatctgcttggctgcggaggaccttggggtgggctcagcgtgggggctgcaggcagaaatgggtccagaaggcaaggtcgaggttagagccaagcctgtg

SEQ ID NO: 226440 - DNA, 122 bp, Homo sapiens
cgggacctgaccccgccaggttcccgtccagtccgcggggtgactccacccacagctggccgcgccaccgctcaggtttcaatttttattggttcgcagttctcaccccagggcgggacact

SEQ ID NO: 226441 - DNA, 122 bp, Homo sapiens
ttgcggccggtggccacagaaacttgagccgcggcagagaaacctctgctccggtctctgcgtcctcttcccacactcccgtgcgctgctttcggcgtgggccgctgcgctcctagggagtg

SEQ ID NO: 226442 - DNA, 122 bp, Homo sapiens
tagaaaattatttgacattttgcgctggacagttctttgctgtgtgggcactgcactatgcgctatgtttaatagtagcatcccattgcctcaaccagctagatgacaatagcacccaactc

SEQ ID NO: 226443 - DNA, 122 bp, Homo sapiens
gacctgtcgatggcgtggtcctggtactggccccggtctcgatgatcgaagtcgtgaaagcggtggtctggccggggaaagtctgcacgatatcggtcctccattgccacacgctttccttc

SEQ ID NO: 226444 - DNA, 122 bp, Homo sapiens
cccgggacagacctccaaagcttcttcctgcgccccctggcggccggagggggagcagcgcggacacgtcccccggccaaccgttggttaccaggctggagtggggtttttttctgttgttt

SEQ ID NO: 226445 - DNA, 122 bp, Homo sapiens
cgcgggcgcggcgcgggggcgggacgcggggcggggacgctggagctggggagcaggtggcgcgggcgggggctgcggcccagcccggcgggtccccaggggctgcgcggcgctcgcctcgc

SEQ ID NO: 226446 - DNA, 122 bp, Homo sapiens
tgtgccctggagccttgccagcaggcttagatgaagtgatgcgtttaatatgcctggagccgggcctagcatgaggcataggcttaataaatggcagcttctattgtcactggatgagaaag

SEQ ID NO: 226447 - DNA, 122 bp, Homo sapiens
gttcccgtagactcgactgaggcagcagagacccaacagctcctttccgcccaccccacccgtccatctgtgtgacacgggccctgtgtgagccgtgctccccagcgtgaggcttcgccaca

SEQ ID NO: 226448 - DNA, 122 bp, Homo sapiens
acctggtgttttgatgaccgctgtcctgtctagcagatacttgcacggtttacagaaattcggtccctgggtcgtgtcaggaaactggaaaaaaggtgactgaatgacatcggattaacttt

SEQ ID NO: 226449 - DNA, 122 bp, Homo sapiens
ggctttagttctggggaagctcagcttctccacttgaaccagtgacagccgggcacgccgcgtccccctggatgtgctgttccctgatcatcaactcaggacagcagtgagtggcctggaat

SEQ ID NO: 226450 - DNA, 122 bp, Homo sapiens
ctggtctccctcggacttagtctctcttctcttgactctcttcccttggggctctgatcccgcatctccccagggctgggtctccgctcccgggcctccagaggcccaggctttctctctgc

SEQ ID NO: 226451 - DNA, 122 bp, Homo sapiens
ctgcaatccagcctgggcgacagagcaagactgtctcaaaaaaataattaactaaataaacgaggcaaaattacagtgacagaaaacagatcagtggttgctggagcttggggttggggaag

SEQ ID NO: 226452 - DNA, 122 bp, Homo sapiens
aagcgggattcgaaccggcggattcgtttctctgcagcccggagccgcgtagccccgccccggtctccctagaaacaggcacccgtgtctccatagcaaccgctccatctgattgcccctcc

SEQ ID NO: 226453 - DNA, 122 bp, Homo sapiens
ggtgctgggtggagttaccggggtgtgggcagatccccagattccgtctagacccattctcgaaaaccggggatcccatcccccacccgtggccttcttgcccagatctttgggctggctgc

SEQ ID NO: 226454 - DNA, 122 bp, Homo sapiens
atccttcttcttccgagtcggaagaggaggaggaggaagaacaccaggaatcatcatcctcgccgtagagtcccagaaaccgattcattcctgggttctgcaggccataatcggaagtggca

SEQ ID NO: 226455 - DNA, 122 bp, Homo sapiens
ttaacaacccttcttactccagagtctcatgcttgaatcttttcctttgcttcatggcttcgtgttgtagaaacttgcaaaaacttgtcagcaatggcactattttttcttagatttctttg

SEQ ID NO: 226456 - DNA, 122 bp, Homo sapiens
gaggggtccaagctccaaagagaagcctccagcaccagcctggggatggagctgcagcgacgaggaccgggaagctggaactacctcaccccgagcccagctcagcccagcccagcccagaa

SEQ ID NO: 226457 - DNA, 122 bp, Homo sapiens
gctcctttggagatggctggagaaccacgcctgtgattccactgtccctaaccaggccagcgactccgccctccctcaccacaccggcgactccaccgtcagcaggagcccagggatgaagg

SEQ ID NO: 226458 - DNA, 122 bp, Homo sapiens
atcacatgtataacagaaaccatggattgctaaatatgaaggccccttatctgccttgcccgtggccacacatactaatgtaaatcaaagagatagtcctaaagacaaattacaatgacttc

SEQ ID NO: 226459 - DNA, 122 bp, Homo sapiens
gccgcagcagcagcaggcgtggccagggcaggctggaggggcggcctctcggaacgggggcgggaccaccgccggcagggcccgcgcccctgccgggactcagagccgctgcagccacagtc

SEQ ID NO: 226460 - DNA, 122 bp, Homo sapiens
tgaaatcagttgtttctccccggcctcctctcgacactgcgcactccgctgccctgcccccgcccatcgccctttagcggccccttttaacggcgtcgtttgcccagcacagccccgcactg

SEQ ID NO: 226461 - DNA, 122 bp, Homo sapiens
acgccgggtggccgcccccgggcccgcggggccacccctgggataggggccggcggggcacggaccccgctcagcgcacccgcctccgcggttcccacccacgctccccggaccccgtccca

SEQ ID NO: 226462 - DNA, 122 bp, Homo sapiens
agccaattttattgaacaattcctgttcaataaatgttgtttaaagtacagttgagaaaacgatggtaggtttatttcttgaactttcagaagttcaagcttaaagcatcacacgtttttct

SEQ ID NO: 226463 - DNA, 122 bp, Homo sapiens
gcatccgctccgagagcagcagccctgattgaagtgaggccttcgagccccccgcatcagcggccccggctccggacaagcgcagcttgggaacagtcgagctagtctggagactctcggtt

SEQ ID NO: 226464 - DNA, 122 bp, Homo sapiens
ggtgcggttttcagtagggcccttacaccttcttgcttttcccagccaatgaggcatccacgctgctgcttaggagtaggggaaaggatgtaatgcacgcgagaggcagtgtccacaccgtg

SEQ ID NO: 226465 - DNA, 122 bp, Homo sapiens
ctggatctaccattgactatctgtgaccacgggcaagtttttaacttctctgagcctcagcgctctaatctacgaagtggcgatatctctttggactattaagaagagtgaatgagaacagg

SEQ ID NO: 226466 - DNA, 122 bp, Homo sapiens
gccgtgttcttgaccatctcagccgcccacccgtgttcttgaccatctcagccgcccacccgtgttcttgaccatctcagctgcccacctatattctcgaagttagtgtcagtggtcaactt

SEQ ID NO: 226467 - DNA, 122 bp, Homo sapiens
ggaggctgaggcaggagaatcacttgaacctgggcagcgcaggttgtagtgagccaaaatcgtgccattgcactccagcctgggctatagggcaagactccatctcaaacaaacaaacaaac

SEQ ID NO: 226468 - DNA, 122 bp, Homo sapiens
ccaccacttgggaagttcttgtcatgctcaatatgacctgaagactggggtggagttgggcggctgggagagaaccggacccagttgctttctgagttgctgacgcctctgctgacagagca

SEQ ID NO: 226469 - DNA, 122 bp, Homo sapiens
gcctcctgaggaaggaaacagttcctccctccaccctcatcctggcaggggttgggccaccgttgcttcatcaagtgtcgtggagcctccgctctgtgccaggagcggggcctgtgccacaa

SEQ ID NO: 226470 - DNA, 122 bp, Homo sapiens
tggctgtgaatactatgggaggtttcatcacagatgcttgccatttacttttagggacgtcgcatacgacgtccgtaaattactggctcgggttttgagctttacctggctctcgtcccctg

SEQ ID NO: 226471 - DNA, 122 bp, Homo sapiens
cgcgggttttgtgcaagccacaatggtccgtggggctctccccttgggcggagtggggcgcggtggggaacacagcttggacgcctaggcgtcctgagcccggcaccctgcgcgcagagcag

SEQ ID NO: 226472 - DNA, 122 bp, Homo sapiens
ttcgctcgagccccagcccccagactcgggcaatacccacaagcaagatggcggcaacggcggcaccccctactgcttagcaccctgacttgccattggccagagcccggagtgaagcagcc

SEQ ID NO: 226473 - DNA, 122 bp, Homo sapiens
cctggtgggcgctgccatggcctgtgccttgggtaagcccttctccaggctactagtggccggaaaccgggccgcggaggcacgatgagagccgtgagagccctagcacgacttgcccaaag

SEQ ID NO: 226474 - DNA, 122 bp, Homo sapiens
tcaaaattcctaggtctcagaaggggcgactgattaggctaaatttatatctcccggccccgtagttgtcagcccaggtagcgaatttaaaacactgggggtggatgagtagtttgaagttc

SEQ ID NO: 226475 - DNA, 122 bp, Homo sapiens
agctgccgcctggcccccacagcttccccaagaagggcctgagcccttgggggcagctggcgtctgtgaggatccgggatgggggctgtctgctcctgctgggaacggcccctccagatgca

SEQ ID NO: 226476 - DNA, 122 bp, Homo sapiens
gctgaaaggctcctacgcttgaagtgtttgctggatgcacaggagatctgggatacatcccgaactcggcaacaggaccagctcctttcctcagggttacagaacagccaggttccagttca

SEQ ID NO: 226477 - DNA, 122 bp, Homo sapiens
gactctgtctcaaaacaaacaaacaaaaaagagtggtggatgaggaatttgatcagatatcggggtgggtggcttgtaggattcttgctaaaactgggcctacttaaggactcaggagtcag

SEQ ID NO: 226478 - DNA, 122 bp, Homo sapiens
gccctccgtgtgcgccccttcgcccggggactgaaactgactggcccgggagacacgaggcgcccagaaggactgacagcgcggcaccaactgctctgcagacacttgaagggaaagactgg

SEQ ID NO: 226479 - DNA, 122 bp, Homo sapiens
ctctttgcctgaataaataatgcacagattcttcgggacaggctgcttcctccaggccgccgcttccaagggatccggtcgctttgtgggtttagtggtggcccacagctggacgcggggtc

SEQ ID NO: 226480 - DNA, 122 bp, Homo sapiens
gactgaggcaaggccatgaggaactcgtgggcggggaggcctttgttctgcaaatcttggcgtgcagtttgcactctccgttcaattaggatcagacttgaagaggagacagggcaaaggtg

SEQ ID NO: 226481 - DNA, 122 bp, Homo sapiens
agagagtcaaggttcctggctggggttaccagagactagggagagggctgtggggccagacgccacagaggccaggctctgcgtgcaggacttgagtgagcaagctaaggattcagttcagt

SEQ ID NO: 226482 - DNA, 122 bp, Homo sapiens
agcctaaaatatttattatctaacacttcacagcaaaagtttgctgactcctagaatagacgaacagcaaatagtaatttgtggcaaataccccaccaccaggcactgggctgggcacaaag

SEQ ID NO: 226483 - DNA, 122 bp, Homo sapiens
ttgacccctgatctagtcaaattcttccattttataggcaagtaaagtgaggcctagacacgtggtcaaggtcataagttaagacaacagggaacagggaataaaactccagtccagggaat

SEQ ID NO: 226484 - DNA, 122 bp, Homo sapiens
aaacaaaccaaatacaaatgctgaatgtatagtatatatcaacaaattcagattcttcaccgaagaaaacaataaaagacaaattttctgtgacatgtcacctgttcattagttctttaata

SEQ ID NO: 226485 - DNA, 122 bp, Homo sapiens
gtcctcggccctcagcgcccggccctcagtcctcggcctcccgacccagcccccagccctcggcccccagcccccggccctcgaccctcagacccagcccctggccctcagcactcgaccct

SEQ ID NO: 226486 - DNA, 122 bp, Homo sapiens
aatatctaacaataacccttctgttgagttttgaaatgtaaatgtttgctaatgctttgccgaagacagcttcacttgggctgagagctatgtgtaaagaaacattaaaatgcatcatttgc

SEQ ID NO: 226487 - DNA, 122 bp, Homo sapiens
tcttgccgctggcaaatcgagctgctgggaacgttcacattcatgtgccagcgtttgtatcgacatgttctttcatttcttgcaggtaaatgccatggagtgcagcggctgggtcgtatggg

SEQ ID NO: 226488 - DNA, 122 bp, Homo sapiens
ctgggagaggtgtcgcctgtgactgtgggctcatgacaggcatgaaccccttgtgggaggcggggccccctgtgatccctttctattcatttccttcgtctttccccacagatgctgtgtgc

SEQ ID NO: 226489 - DNA, 122 bp, Homo sapiens
gtggggccgagaatcgagcggtcccggagatggccgcgatccgggtgggcttgccggttgcgctaggcaaactggaggagggttctatttattatgaagagcagggtgaaggtcccaaggtg

SEQ ID NO: 226490 - DNA, 122 bp, Homo sapiens
ctgtgcccaaacttggaactctggaaatgtggcttcgctcactggcgccttgagcttgggcgactgccgggcccgcgaaacccgacccctgcagagctgactccgggactattttagtttct

SEQ ID NO: 226491 - DNA, 122 bp, Homo sapiens
ccggcggcggcgggcgccaacttaccaaaatggccgtggagcgcacgctgacacatttaacgtcttgagggggggctgacggttctattggagggggggagaacgtgggggggtggggaagg

SEQ ID NO: 226492 - DNA, 122 bp, Homo sapiens
gccgtaggccgtgcttccaagggatgcggaagcgcgtgcggctcttgttcacccaggccacgccctccagttgccccaggtccagctgcgacaccagccagggcaggatccgtggctttggg

SEQ ID NO: 226493 - DNA, 122 bp, Homo sapiens
gtcgggcgcggaagccctagggcgctgtggggcgcgggccaggagcgtttacggggagcccgggccctggggacccttgcccgcctccccgcgtcgcccgggccccgactcctttcctgggg

SEQ ID NO: 226494 - DNA, 122 bp, Homo sapiens
agggctttagggctaaccagaggtctgaccctagaatgccaaggaactgagaatgggctccgatgaaaaccttccttttcagattccctgtctgctcaattaaagatgtttgaatccaaagg

SEQ ID NO: 226495 - DNA, 122 bp, Homo sapiens
actgaagatggaaggcagctttctttatagacactttattaaaactgctacagcctgctccggcgtgcgctgggatgtggtgaacccagccgacgacgctatctttcaatggttactttgtg

SEQ ID NO: 226496 - DNA, 122 bp, Homo sapiens
tggggccgcgccgcgctggcgagagccgccgcccgcgagggatgctggtgaggaagccgtcgggagccgccgccgccatctgagggaggtaccctggaaaccaccttttatcggtggggaag

SEQ ID NO: 226497 - DNA, 122 bp, Homo sapiens
cggagctacgctggagttgcacgacagaaccagaaccccagtctttaggggtgtggcaagcgtgggttgcgctgtttgtaactagctaatcactcctgtctacaggcctgtgaggtgaggcc

SEQ ID NO: 226498 - DNA, 122 bp, Homo sapiens
tcagctgtgtgtcaaattccacagctcactgaagctaagtgcttggtgcagggactggcccgaagctgagcacctggatcccatggccgcagggatttcctgagggctgggggccgtgagga

SEQ ID NO: 226499 - DNA, 122 bp, Homo sapiens
cctggtgctctcaaatgaccttaaagggtcccagcactgggaacggcggttcgtccaagccggacgcctgcagcagccacctcctgggcctcacggcggggccggagaaggccagggctggg

SEQ ID NO: 226500 - DNA, 122 bp, Homo sapiens
agacggaggatgatcccagctccttaatgccggatcatcgcctaggccccacccggctcccgcggctaccagtgacccagaaggtgcaactgaccaaacgcagcgactcaaccgactgtgct

SEQ ID NO: 226501 - DNA, 122 bp, Homo sapiens
atagagcagtggcaagctcgcgcggcggagtgggaggcgcagagaccgaaagcactgcagcgccagagcgcgggctgaccaggctggcgtgaccgctttcccgacgcctgccacgccccgcg

SEQ ID NO: 226502 - DNA, 122 bp, Homo sapiens
cccacccaggaagcagcttctgtccactgcctttgcttctccatggaaatgtcctccaagcgacaggctggcactgtgtctgcagctcttgtgaaggctcgaggtagcgtgccccgggagag

SEQ ID NO: 226503 - DNA, 122 bp, Homo sapiens
gtcagctcccgcgaggcagccggtctcggggctccgcgggaggccgacggcgggagctcacggcttgtgttcctgggtgtgtgtcgcaggagccctggtggagctcaccccgacccccggcg

SEQ ID NO: 226504 - DNA, 122 bp, Homo sapiens
tacgcttcaagaccctgcttaatgataatagtggcagccagtatttgtttgggactgtgtcgtcagcagagcatttctgattctgacttaattgttttgtgtttttcaaacaattgtggagt

SEQ ID NO: 226505 - DNA, 122 bp, Homo sapiens
tttttaagtttaaacctcaaaatgaatgattagatatattccggctttggtcctggcattcgttatacatttattttggtcttttgagtcgaccttgtggttgccccgggtgaccacgtggg

SEQ ID NO: 226506 - DNA, 122 bp, Homo sapiens
ggtgggccctgctccgcctcctgtggccaaggccgctcatcacccaggaaccgacacgcacgagatgcagaatctaaaagagaaagcggcaccgccaccagcaagcacaagagggacgtggg

SEQ ID NO: 226507 - DNA, 122 bp, Homo sapiens
taattcctgcgggggaggggtcccgcccagggaaggagagggccggctacaccggggatgcgcctttgtctacaggcacactttgccaaggtagctggggtaccaggaagagcagggcctgg

SEQ ID NO: 226508 - DNA, 122 bp, Homo sapiens
tcaccatagctcagagtgacctgaactgggagtccaagcacagactggccaagcccagcccgtgagcgacggccccaggacgcggcgccgagctctgcccccagctccagctcccagcggcg

SEQ ID NO: 226509 - DNA, 122 bp, Homo sapiens
cttggggggcagcgaacatggtaataaacataaagctcagagctccccgccaagggtgagcgcttccagacggagaagtacacgggccggccagtcagatgggcatgggttctgatgggggc

SEQ ID NO: 226510 - DNA, 122 bp, Homo sapiens
gagccgagcgtggtgaggtggggcctcaggggcaggtgggaggtgctcgggttaaccgtccgaggcccggagacccgcccgtctagggcgcctgagggaatcccgttcgggcagcggcctct

SEQ ID NO: 226511 - DNA, 122 bp, Homo sapiens
tcagccattgcgtgcctcccggggggggcagccttgctccaggctttttgcatagacgcccgggcaactgaatacaaaaagggcaggcctcctgcgccctccttcccaccccccttcctgcc

SEQ ID NO: 226512 - DNA, 122 bp, Homo sapiens
gcacctcctcccttcttctggggccatttccctgtctgggacctaccagtctcacggcagcgcagtacaggccggggtttcttctctctatggtgggaggtccctcagttcttcctcagggc

SEQ ID NO: 226513 - DNA, 122 bp, Homo sapiens
gcctaggatccagaagcttcctgagcacagctctcagcagtgctgtcctgcctccttctgcgctgagcttcttcccggggcaggagcacctctcaggttcatgggcggggtcaggcccagga

SEQ ID NO: 226514 - DNA, 122 bp, Homo sapiens
agcgcaggccaggccaggggttaccggcggtgcctgctgcacctgtgagaacccaggaggcgcaccccggttctcatacaccgctctgtctgtaccaaacgccaccgccctcatccattttc

SEQ ID NO: 226515 - DNA, 122 bp, Homo sapiens
tggcaccgagaggaagcagaggcagctgagggccccgcctgccggcgccagccctcccttcgctgtggggtcggtccctcctcgctgcacccttaattacaagtgtcctgaaatcctgccag

SEQ ID NO: 226516 - DNA, 122 bp, Homo sapiens
cttaatagctgtaatgctcaccgcgaaggtctgcagcttcacttctgaagccagcgagaccgtgaacccaccagaaggaagaaactcggaacacgactgaacatcagaaggagcaaattcca

SEQ ID NO: 226517 - DNA, 122 bp, Homo sapiens
aaaataaaataaagcagaaatgatgttgtgtttttgacgtacatcatgtcatggggcttacggtgcgggaacgtctcaccgcttgtgacgttgccctcgatcacttagtaggagggtttccg

SEQ ID NO: 226518 - DNA, 122 bp, Homo sapiens
agggctgtgcgcgtcgctggtgtggggagggcagcaggctgcccctccccgcttctgcagcgagttttcccagccaggaaaagggagggagctgtttcaggaatttcagtgccttcacctag

SEQ ID NO: 226519 - DNA, 122 bp, Homo sapiens
ccctcctggtcttgtgcgtgggtggggggtccctgcctttgcgtctggtccctgtcctggcgcccgcccttccctgctcggctccttcgcgccccagggtccgagagtccccgctagcgccg

SEQ ID NO: 226520 - DNA, 122 bp, Homo sapiens
tgggggacaggtggcgttggcagagcccacgggggacagaggtggcgctggcagagctcacgggggacagaggtggcgctggcagagctcacgggggacagaggtggcgctggcagagctca

SEQ ID NO: 226521 - DNA, 122 bp, Homo sapiens
cccgggtctgagtctccggtctgagatccaccccgaggctgcgggacctgcccagaccctcgaccagggaagaaactcgggcgcctttacccggtttaatttcagtttaggccaaaatcccc

SEQ ID NO: 226522 - DNA, 122 bp, Homo sapiens
tacccttcatcctcctttaggatcctgcttttttttgagtcagagtcttgttctgtcttccgaggctggagtacagtggcgctatctgttcactgcaacctctgcctcctgggttcaagcaa

SEQ ID NO: 226523 - DNA, 122 bp, Homo sapiens
gcggggagtcctagccatctcctgaactccagggcacttgtccactggtttgtgatgtgccggcttgcaccgtcctgtcccccatctgaagacacagagatggggaggtcagctggagcagg

SEQ ID NO: 226524 - DNA, 122 bp, Homo sapiens
gcgaagagctgccggggggacatggctctgggcttgggccaaagccgctctgcagggatgcgccggggcgcgcggggcccggccgccatggtgcagctggaggggcctcgggtccgcggagc

SEQ ID NO: 226525 - DNA, 122 bp, Homo sapiens
cctaaggtttgcaggttttttatgaggcagcctagagggctgttttttagaatggagggccgggagtttcccataatgaagggtaggcacaggagaacagggaaaaaggagacagtcctgga

SEQ ID NO: 226526 - DNA, 122 bp, Homo sapiens
accatatattttattattctgagtcagtcccacttcatgtgatgttcacttcctgtgtcacgtataactggcagaccttaaatacaaactgaagagcaatcattttcttggtcatacataag

SEQ ID NO: 226527 - DNA, 122 bp, Homo sapiens
gaggaaagagccggttctgagcggcaaccccgcccccgagcacacacaaagtcaaaaagacgtttgtccgaagggcctgtcacagggaagacgttcttttatttatttcgtttttaaataat

SEQ ID NO: 226528 - DNA, 122 bp, Homo sapiens
ggttcctgaataattgagtagaaggccaacagctgaacacgtgaatggacttgacatgaacgagaaataagcctgaactatgtttagttactgagatgttttactttatctcttacagcagc

SEQ ID NO: 226529 - DNA, 122 bp, Homo sapiens
tgagaagcagctaagccagtggaccactctgccaggacaagaatcaacaggaaacctccccgcgcatctcgttcacattccaggggcaccgagtccagcccagagacaccgtaacaagacac

SEQ ID NO: 226530 - DNA, 122 bp, Homo sapiens
ctctgtgctagagatcctgacaatccctaagccccttccccagcctcggtctccccatcccgggagcagggcggtgatgccaccctgtacatgcctctgtccccagccccggctcttctcca

SEQ ID NO: 226531 - DNA, 122 bp, Homo sapiens
ttttttttttttttaattccactgacacctggtgaagccacccttatggttcactccacccgccgcgtctcctgttccgagcaactgacgctgcaataagcggccgccaccgggaaatgccc

SEQ ID NO: 226532 - DNA, 122 bp, Homo sapiens
acagctagccggcccggctctcttcccgaacgccagcggcgggcacggccctttcagtggcgagcagatcaggccagagtagggacactaatgcttgggccgcctcaaaggccccgccaggt

SEQ ID NO: 226533 - DNA, 122 bp, Homo sapiens
cggggcctagaaggcagtatgggagccacttctaggttctggaatgtgcaaactcagccacgcacaaaccctcagcttccggcccaacctcctgctgagttattgaggcagataatggaaga

SEQ ID NO: 226534 - DNA, 122 bp, Homo sapiens
gatgttgagaagtgtcttgaatgcggaatcagtcttggaatgcaagcttcattctgcaggcgctggagtgccctacaagaccttagggaagcacagaaccagggtggtgagcagaggacagg

SEQ ID NO: 226535 - DNA, 122 bp, Homo sapiens
attcccagcttctcctgtaaaatgcaaaattgagggctcaaattgtggtttcaatttacacgtttcacagtcctctgagaagagactaaggttggaggatgcaggaaggccttaaataattc

SEQ ID NO: 226536 - DNA, 122 bp, Homo sapiens
cgcgccccttcccgccccggtggtggtgcagccctgcctccctcaagacagcactgccttcgtgctggacacagttctgtggtggagcctggagtgcctgtagcacaaatcccggagttggg

SEQ ID NO: 226537 - DNA, 122 bp, Homo sapiens
aaccagtcatgtcccttatcaacactctccattggattcccatcttattcaagataaacgcgtaagtccttgtcttgacctgcagggccctgcataatctggtccctgactgtccctctgac

SEQ ID NO: 226538 - DNA, 122 bp, Homo sapiens
agggactcccccgggccacagcctactggaggctcctgtccccagagacagctgggccatcgcccccaaagctgtggaagccccacccacgatgccatcataccacggccaggacatctcgt

SEQ ID NO: 226539 - DNA, 122 bp, Homo sapiens
cctctttcccacgccgcagagcgatagaacccgcaacaggaaaacggaaaggccgtgcgccggaagaacaggtagggactacgactcccagaagcctcttgacaaggactacatttcccaga

SEQ ID NO: 226540 - DNA, 122 bp, Homo sapiens
gtgaccgtgataggtaaagatcaacaagcaggtatagttaccaccaagaaggggaaagcacgctgcagacacctgcagatggctgagttcaagtcaatttaagttttttgaatgtccagtaa

SEQ ID NO: 226541 - DNA, 122 bp, Homo sapiens
gatgacgtttatgcgcccaccggaagcgacgaagtcagacactggcttaatacagaacatcgccccgcttacagggtctcttgcaactgcgtcggccttaggctggaaaatgcaggttcctg

SEQ ID NO: 226542 - DNA, 122 bp, Homo sapiens
cctcagcactttctaattgcagctccaaacagccgcagctgcagtcatagcaacaggccccgcccaccgggcttcgctcctggcgtccagcacgtgacggcgacgcctgcgtcgctccctca

SEQ ID NO: 226543 - DNA, 122 bp, Homo sapiens
cccaagtctcaggaccgccgactctgcccttcctctccgccgtctggggccaacccgcctcgttggcgcgctgcgcctttatagtctgcaaagccacactgaagagaccagagatcacctgg

SEQ ID NO: 226544 - DNA, 122 bp, Homo sapiens
tctaacatggacttgacagtcatctgacaatacccagaccctgtgcgctccgggttccaccgctgtgcccagtttgggcccaagaaatgaggaatcaatcgtgttagtactaaggtggccga

SEQ ID NO: 226545 - DNA, 122 bp, Homo sapiens
ccccgcaccacagtcccctgagagggaatggcagcaacaacacgcttcctggctcctacccgaatctcaccgagtcatgctccttgtgaaatgggtccaggaatcggccatttttgagcaag

SEQ ID NO: 226546 - DNA, 122 bp, Homo sapiens
acctgccctgcctacaggttatgattcagaggaggaggaagagagcaggcccatgagttacgatgagaagcggcagctgagcctggacatcaacaaattacctggggagaagctgggccgag

SEQ ID NO: 226547 - DNA, 122 bp, Homo sapiens
gttacccctcgcccctgggtggctctgagcatgcctctagtccagttccagccagtggcccgtcttcggggccccagatgtcttccgggccaggaggtgccccgctggatggtgctgacccc

SEQ ID NO: 226548 - DNA, 122 bp, Homo sapiens
agtgggtgcgggtcaaggccaatgagagtgtgtgtggccaagcccgctggtttcctgaaccgaaattctccggggagggagagaagaggagggtgcgggagacggacttggaggcgagaggt

SEQ ID NO: 226549 - DNA, 122 bp, Homo sapiens
tactacccaattttaagcttcccatttccaagaaaagtgactgcaagagttgttcacattcgctcggcgccgcccgcccggcctcccgagaggctttggggactagaccttggacgcggatc

SEQ ID NO: 226550 - DNA, 122 bp, Homo sapiens
agagtccagggaagtttggaagccggggtcagccttgcggtacagctgcggggtgtgtcccgggcctagtcctcatctttgggagcccattccccagcggcgccagaggggcctgtgctcca

SEQ ID NO: 226551 - DNA, 122 bp, Homo sapiens
cccattgagaagttatacaaaagcttctaacatgaggccatatatatgtctcaaaaaggacgcaaacacaatgctaggtgagcaatattatttttgactggggtgatgattgcaagccagat

SEQ ID NO: 226552 - DNA, 122 bp, Homo sapiens
aaagaacacgtgggtttggtgtttgccacttgctggctgtgtggtcacgagaggctcctccgtaggtggcagaggtgggggttcgaggagacagtggcactgagccccgcacgcggcgggac

SEQ ID NO: 226553 - DNA, 122 bp, Homo sapiens
caataaacgacagcattggcgccaagcctggccgcgtgtgattgcccgagacccgcagggcgtgcacccttcctgaagacagtggctcctgggggtggcaaaagagctttatttacacactg

SEQ ID NO: 226554 - DNA, 122 bp, Homo sapiens
gaccggcaagtgggaggaggcggcgggaggcgtctccgcttaagggagccggccgggtgccgccgctcggacggacgcgcggacggaaggaaggagcggggcagccgggccgggcccgggga

SEQ ID NO: 226555 - DNA, 122 bp, Homo sapiens
tgccgcagccaccgcgacggagcccgcaggcgggaacctgcctccgcgcgttagcgcgcacgcgcgcctcatgtgtcgtccccatcagcgccggcttccgtctataggccagatgcactgtc

SEQ ID NO: 226556 - DNA, 122 bp, Homo sapiens
acaaaggtgagcggccggctgtaggtagttgagcaggggttggaaatacaggtagtttgtcgagagcaagtcacctggcaagggttggagacacatgaagttcgccggtaacaggttggctg

SEQ ID NO: 226557 - DNA, 122 bp, Homo sapiens
atacaaattatgtgattcccttttctcctcttagactgccttgctcatctgctgcttggtcgaagccatttgctcctcccccacacgctttgctcatcaagcaaccagagcgttcctgccac

SEQ ID NO: 226558 - DNA, 122 bp, Homo sapiens
gcgcgcgcgggtggggctctggccatgggcatggggcggggccgtcagcgggggcgtggtcggggtgtcgcgcgggaacccgcgcgggaggagagcggggattccggaactagagtgtggga

SEQ ID NO: 226559 - DNA, 122 bp, Homo sapiens
ctgtcaccacggcagcccccccggagccgtgccgggagcataaagccaccagggccgctgcgttgccactgccttgcacccccgggagctggggaacagacccgcacagccgtgaccacctg

SEQ ID NO: 226560 - DNA, 122 bp, Homo sapiens
cacacacactcacacacacacacacaggagcccacagaaaaaagcaaatagacgcagaaacgggcacgtgcagtagttctggccacacatgttccctaggtatccacagaatggcatgggta

SEQ ID NO: 226561 - DNA, 122 bp, Homo sapiens
ccggggaactgcccaatttacagcgccaggggacggactggggaattctccaatcagagtcgccgacgttggcagcactgtccaatcagaagcgcggcttcccgagctctgtctaatcaggc

SEQ ID NO: 226562 - DNA, 122 bp, Homo sapiens
cggtgcagccccgcgcttccagtagggtcatgcgaatgcagccctcaccgttctctcctgcgcatccgttctgcgcccagcctgcctctgagccctgagaagttttcactctaatgtcaccg

SEQ ID NO: 226563 - DNA, 122 bp, Homo sapiens
aggcggccgggcgaggagcggggaaggcaggggctacggcctcgggcagggggctgctggcgggaacccccggcggtcccccctgagccgcactttgcgcgcctcccaacttcgcggcgccc

SEQ ID NO: 226564 - DNA, 122 bp, Homo sapiens
gcctctgccgggagggcggagaagcctcggccgagctggggcccactggcgaattggcggcggcaaacacccccctcctagcctaagtggaacctgaaactccggacttggtccgggtgggg

SEQ ID NO: 226565 - DNA, 122 bp, Homo sapiens
tgtgccaatttatctccaaactgcagagtccacgagatcccagcagagaacagtctctgccgcacgtggcatcaccagactctaaatgtttgctcatctgcatctgtggctgtcgctccctg

SEQ ID NO: 226566 - DNA, 122 bp, Homo sapiens
ccctaacatgctctccaaagcaggtacacacttggtgtaataagcagacacataggtggccgtatcgagcttacccaaaattcctgtactctttacaatgtagtgctgagcaacaaagaagc

SEQ ID NO: 226567 - DNA, 122 bp, Homo sapiens
ggaactcgacctggattgtactaaaccagttccaagattctgtttttcggctgtggcgtccggcgctgcatccactacggagtcgccttggaagccaccggaagtccttcgacggagaaaca

SEQ ID NO: 226568 - DNA, 122 bp, Homo sapiens
caacgtcgcagtcaacaccttctctctgatgatgtcaataagaatatcaatcacaatgaacgtccctgtccggccaattccagcactgcagtgcaccaagaccggccctgcatccatgatgc

SEQ ID NO: 226569 - DNA, 122 bp, Homo sapiens
tcactcacttccggtggcaggtatggaacctatagggggcctgtcacccagcacgtgcatcgggggctgtcccgggggtcaggggagggaggccagcgggccggcggggtccgccccgaccc

SEQ ID NO: 226570 - DNA, 122 bp, Homo sapiens
ccggagctgactcgtctctctcttctttcccctgcaggaatcttccgataattctgccgccgcgactttaaccgtgcgcaaggcgagagctcgaaacaaacatcacatctaaattaaaaaaa

SEQ ID NO: 226571 - DNA, 122 bp, Homo sapiens
attgaggcttaattctgagctggccctttccagccaataaatcaactccagctccctctgcgaggctggcatgattgttccatttcacccagccactcagtcccttgcctgttacactgtgg

SEQ ID NO: 226572 - DNA, 122 bp, Homo sapiens
gcctcatgtcgcaggactgctgtgtttgtgaaagcgcgtttgtttccacaagacaagctccgtgtagtcgccagcgggtgcctggcccaggagctgccctgtggagccagcgttgtccccga

SEQ ID NO: 226573 - DNA, 122 bp, Homo sapiens
tccgccgagagccttacctgagatcagcagccaagctttaaatagcggagcacccagtcccgtttccatgacctcctttaaacccttctctctgcaaagttccccctcagccctccgaccct

SEQ ID NO: 226574 - DNA, 122 bp, Homo sapiens
cagggctttccagtgcaggtggtggtttccggcttttgagcggagtgcctgtgtttatcgcggaagtcccccacaagcaaaaacggggccgcagggtggcgtgttgcatggcagggactcag

SEQ ID NO: 226575 - DNA, 122 bp, Homo sapiens
tcctgagtcatggcctcaaaaatcagggccaccattgtctcaattcaaatccatagatttcgaagccacagagtctctccctggagcagcagactatgggcagcccagtgctgccacctgct

SEQ ID NO: 226576 - DNA, 122 bp, Homo sapiens
ttgaatgtaaagttacgcacaaagtgggatgtttagttggaactgttccctcaggaaatacgattttttgggcgtgggggacagggtttcgctctgtcgcctaggcctgagtgcagtggcgc

SEQ ID NO: 226577 - DNA, 122 bp, Homo sapiens
gcggacgcagccccgggtcggtggctcgcctggccgggtggggtgggagcgattttctggcggtggcgtttgcaggaggggaggagacagcgccacccagggcctccccgagcactgccggc

SEQ ID NO: 226578 - DNA, 122 bp, Homo sapiens
ctggtccgcaggtaacccagtctcagtagcttggtagttaccatggctcccagtgctgtgcgtctgacgtcattctgcggcgctggctgatggcgcaatcagttgcggcgtcctgtgagcgc

SEQ ID NO: 226579 - DNA, 122 bp, Homo sapiens
tggggagggggatctcagaccaaaacaacagctccaaatcagaagccctctctaggagagcggagtctctctaactctggtctgtcatcttctgccccttcccatcatcctcagggctccca

SEQ ID NO: 226580 - DNA, 122 bp, Homo sapiens
atgctggaggctgtactttgctaagacccaacccagagggctctgcagtgcacactcacccgtgacgcccacagcagacactgggcccacgcgccgcccctcgtggaggccgtacaggtgca

SEQ ID NO: 226581 - DNA, 122 bp, Homo sapiens
ctgagttacttctctagagagaggaaagtgagaaatgaaacctcagcttcagatttgtaccgttaactttgcagtcgtgtattgctcttcataaaaacagcctcgaagtcaagagtaaaaat

SEQ ID NO: 226582 - DNA, 122 bp, Homo sapiens
gccacccaagggtcccatcaccccacagcctagccgggccccctttccactcttccaccacgttccctgcagcctctctgagacttcaaggctctcgcaccggcgcctctgaaacccccggc

SEQ ID NO: 226583 - DNA, 122 bp, Homo sapiens
gatggaaattaaagggacatgagcaccgactataacacatgctgatgccagcaaagactgcggcgccaggcgacggcaccgccctcagatccggagccagcagcggtccagatggtgaccga

SEQ ID NO: 226584 - DNA, 122 bp, Homo sapiens
agcagggagcgcggagtcgttcccgagagaggcggccaggctatgctcgccggtttccggcgttccgctccggccagccagagtctctgtctcaacctgtgtccgtgctccagcagtctcct

SEQ ID NO: 226585 - DNA, 122 bp, Homo sapiens
tcaaatagaatgatctattcagaagcttctggaagcgttagcccttgccacagaggacctcgtttatttagtgtttctatcaggaactgccacagttgtcttgaggtctcactcccagagga

SEQ ID NO: 226586 - DNA, 122 bp, Homo sapiens
gtggagggccaggattggtgggtgagctttagggagcagctgctcgtttggagtcctggacgttggagggattacccactactgatacctgcagaatggactgcagaaaagtctcaaaaata

SEQ ID NO: 226587 - DNA, 122 bp, Homo sapiens
ttactcgctttgtttaatggattccacccctgccttcctaggtgaccttggacaaattctcgaacccattcaccaaccacacaagtttgttgtgagtcataaatggataatgaatataaatg

SEQ ID NO: 226588 - DNA, 122 bp, Homo sapiens
gctgggtacaggattgtccagggatgtgccaggaggcgggcttggactcccatttcccatcggtttttcttcctcaccaccactggggcctggcagctgtttatccaagcttgagctcttgc

SEQ ID NO: 226589 - DNA, 122 bp, Homo sapiens
gaaaggagctgtccttctaagtctttgtatctccatttgtctgcagtttctcctcggtctcgtgtgtctgtgtgtgccagtcccttgtgctgacacaggacgtcccttaaagtccagtcctg

SEQ ID NO: 226590 - DNA, 122 bp, Homo sapiens
cacactgctccatgtatgtccctcccgaagctgcacgcttgaccaaagaggatgaccatccggatagaggaggactggtcttcagtcaagggtatatgtatggttgtactcccctgctagaa

SEQ ID NO: 226591 - DNA, 122 bp, Homo sapiens
ggcctgggggtgggagagagggaacgcctttgccgcctggcctgggtccgaatcctgcctcggttcttgtgctcccaaagggaatgcgcaagtcccgcgcctgtgacaagtgaggttggatt

SEQ ID NO: 226592 - DNA, 122 bp, Homo sapiens
actcccccctcctgggcggggattcatctcccttccggatgaaaggtactaaagagccgacggggggccgcggcgggccccaggcccttgatgttccggttgaacaggtgctggtgaaaagg

SEQ ID NO: 226593 - DNA, 122 bp, Homo sapiens
tcacatttttcacgatatagctggactttcactaggcaataaatgggggtgggggggaaccggccgaacaaaccccaaacaactgttttgaacccacagtgttttcccagaggggttcaagg

SEQ ID NO: 226594 - DNA, 122 bp, Homo sapiens
ttaggacaagggatcaatttattttgtaaataacaagaggaaagaaccttcttatgacgtcggccttatgacgttggcctgggtcccaagaagtgtagttgttttcattctttctgcaaaca

SEQ ID NO: 226595 - DNA, 122 bp, Homo sapiens
gccaagctcttggacaaggtttcacaggcttcgcccagggatattcacggctgccatagacggagcgcttactgtgttccagacactgtgcgtttaatacagaaatgtttattgagccctta

SEQ ID NO: 226596 - DNA, 122 bp, Homo sapiens
ggctggggaggcctcacaatcatggtggaaggcaaaaggcatgtcttacatggcagcagacgggagaatgaaaaccaaccaaaaggggtttccccttataaaaccatcagatctcatgagac

SEQ ID NO: 226597 - DNA, 122 bp, Homo sapiens
gcgccagagaaaggaactacaacaaagcctagctgctgagtccagagcgcacagcacagtcgccctcccagctcttccgtcggccgggaggagtctcctttgctcttgtctactgctggagc

SEQ ID NO: 226598 - DNA, 122 bp, Homo sapiens
aggcctggattcaaacctcggctgagtggccttggacaggtcatcaacaaacagagccttcgtttattcatgtgcaaacggggccaaggaccgggcctgccccgaggtatgcctgaggcttg

SEQ ID NO: 226599 - DNA, 122 bp, Homo sapiens
ctgtgaataacactggccactggtctccatactcctgcactctgctatggtgtcagctcacgtacttacaatgttcttttcaatttcctcttggattttgttgttgttgttgttttgaagga

SEQ ID NO: 226600 - DNA, 122 bp, Homo sapiens
gacccgtagctggtggtggagctgagggccctggggcatggcgggcagggacttgaggcccgcaggaggagggggccgtgccgatgctggctgtgccggggctgcctgagaacccgcggagg

SEQ ID NO: 226601 - DNA, 122 bp, Homo sapiens
gccgggaggggaaacgtgcgcgcgccggggggtgggggggcgcctagcccagcgccagcacggaccatgcacagatcagcaatcgctggccgccaggccttcggagggtctgtccgccgcgg

SEQ ID NO: 226602 - DNA, 122 bp, Homo sapiens
gggtcatactccacgggttccggtttccactccctgtgaaccaaaagccagagaggcccacgcacgagtccggaagtgagggagggaggactttcgtacgcagccgcctcccagctggaacc

SEQ ID NO: 226603 - DNA, 122 bp, Homo sapiens
ggccaggagcttccgctcagcgctggtgaggcggagccaggaggagcggctgcgctcctgcgggcctcaggctcttgggccttggccaggtccctttaagatcagggcgcttgctaggaatt

SEQ ID NO: 226604 - DNA, 122 bp, Homo sapiens
gcagaagctggcactcgggcagcagtgaggcgtttgggagggacgacgttgccatctgcccgtgttaggttggcacagtgcccgcctcaggaggcgcttgataaatgcttccctgtttgcat

SEQ ID NO: 226605 - DNA, 122 bp, Homo sapiens
ctccctgatccacccggcctacctcacagatgggaagactgaggaccggcttatccggggcggcccaagttccaccgggatcccgagatggcagtcccagcccccgtccatgcacaaactct

SEQ ID NO: 226606 - DNA, 122 bp, Homo sapiens
ctcgtccccgccggtgtccggccggctggccttaaaggggacgcggtcagagtggcagctcgcggggtggcccccgctccggctccgccccatttcacgcacctcgcccctccccatgcttc

SEQ ID NO: 226607 - DNA, 122 bp, Homo sapiens
aacaaaagccccaggttctctgcctgggatcaacctacatctgaagttctgggctgcagacgcttaccttgttcagtcctcgtggagctgggctggcctgtgcctcgccgtagactgcagac

SEQ ID NO: 226608 - DNA, 122 bp, Homo sapiens
ctcttgccaaaagccaaggtccttttgttcacctttagggttgccaagtcaggcctacctcgcccctagatgttgtttcctgcaggcaatgggaaaatgatcttggagccagagaagggaaa

SEQ ID NO: 226609 - DNA, 122 bp, Homo sapiens
gggccagcccaaggcggcaggaagtcttgaaaagggagtcgaggcaccagcagtgtggaacgaaaacacaagaggcgcgctagaggtgacccccacgggcgaaagtgccaacccaccgtgca

SEQ ID NO: 226610 - DNA, 122 bp, Homo sapiens
atccaccaatctgggtctcttcctttggataggcacttcccatctatccctaagcaagtccgagggcaacggagttccgcccgcaggctgctgtcaccaatccgagcatgaccctctgcaaa

SEQ ID NO: 226611 - DNA, 122 bp, Homo sapiens
ccagagcgttgataacgtgatctgatccctaagttgagacctgtcttcctgtaacgcttccgaataagaggtccggtcgaaaagagttgaaagatacgaaattaggtggtcgttggaatcct

SEQ ID NO: 226612 - DNA, 122 bp, Homo sapiens
ccctcttcccgtcacgtgacggtgcgcggaggcggtggtggagttgcttcccctgctaggcgggctcgaaccgggcgggagtcactgtccaccttgcttcgccagggtgttatcgccagcca

SEQ ID NO: 226613 - DNA, 122 bp, Homo sapiens
gagcctcggcggcggtggcggcctctgaaccgcgggggctgccctcggggctttctggcccgtctggtgctttgggttcgtcttggcttttccgcagttgctttttatgcttcatccgccgg

SEQ ID NO: 226614 - DNA, 122 bp, Homo sapiens
ggctctagtgctggaaatttatctttgacagaggaagaatgcttttgaaaacagttcttacgtgattttatgtaacttaatttgccctggaaaggaaatgtctcgtctctggtatgggaaaa

SEQ ID NO: 226615 - DNA, 122 bp, Homo sapiens
ttccatgtctgaccttcttaaggcataaaactgcactaaaacattttggggcaccctgtgcggtggactgagtggcagtccccacgatggatgtccgcgtcctagtgtcttggcgcccgggg

SEQ ID NO: 226616 - DNA, 122 bp, Homo sapiens
gagcggatgcacaccctccccccacccctaggtctgatgggggctgttggtgctgacttgcgggaccgcctggaggaggacccggcgtgtgaggagggtgcgggggtcggggcagggaccgg

SEQ ID NO: 226617 - DNA, 122 bp, Homo sapiens
gaggagtgcagctgcatctgctgtgtagaagaatctgcctggggagtggggaatagcagacggcagtaattcccaccagctcccacgcacttggcaaggcaggtctctcgtaggcagtgttc

SEQ ID NO: 226618 - DNA, 122 bp, Homo sapiens
aactgcttgattaaaagtatgctgtctttggtgacgtggactgaaaaagtatggggtaagcggggtgaattttatgcttggagctgttattatcccatgtggtatctgttgcttacttctca

SEQ ID NO: 226619 - DNA, 122 bp, Homo sapiens
agctataaaacctgggtcccctgcctgccatttcagtgctcctcccgagtcctcccactacgcttctatttatggtagtttatccaggtttactagaagtaaaattctactacctttccacc

SEQ ID NO: 226620 - DNA, 122 bp, Homo sapiens
tgtcagagagcaaagacggcaaaaggttagcaacagccgaatcagagtgaagggcatgcccgtattctttgtgccatccttgcaacttttctgaaagtttgaaattatcttaaaatacaaag

SEQ ID NO: 226621 - DNA, 122 bp, Homo sapiens
gtctccctggacaaggacatcctgcttgccctgcctgggtgtgtttagaggagccaccggcggtttaacttcacagcccatttattggcccgcacttacaaaaagccccaggtttaattctt

SEQ ID NO: 226622 - DNA, 122 bp, Homo sapiens
gcggtttgtgccctactgtgtcaagggagggtctggctaggagcacctgagggacacgcccggtgcagaggacactcactgggctgctgagagccatgtagaaccgcagagcagttcctaga

SEQ ID NO: 226623 - DNA, 122 bp, Homo sapiens
cttccctgggatctttggactagatgggataaatagaaatcaacatagacagagcctctccgtctggggttgagcctgtaacgctaacctcggagctgtcagtctgggctggagatgctgag

SEQ ID NO: 226624 - DNA, 122 bp, Homo sapiens
cacacgcaaccgcccggcgtcgcacgactgggcaatggcgtgccagctcattggctgagccggaccaaacccgagcaaggacgcttgtttcctggcaacggctaaacgcaagggcggggtcg

SEQ ID NO: 226625 - DNA, 122 bp, Homo sapiens
ctcgcctgcaaccgcctcaaaaccggacccagctttttgaagccgagccccttaaacttccgaagtcgaggaccccaagtcattgagagggccactgggattccttctggggccctccaaat

SEQ ID NO: 226626 - DNA, 122 bp, Homo sapiens
tccgccggcggggggagcgggtgtagcggaggagcaggcggaagtgacgtagggccccagcgcccgggccatggcggcggcggtggcgggagctgctgtctgagcagcggttgcggaccgag

SEQ ID NO: 226627 - DNA, 122 bp, Homo sapiens
cactcgcagctgtgttcctgcttctggaacagcagctgagtggctgcttggaggggcagacggccgacccctgctgaatgacggtacgacggagctggtcacaagtgcagtgcaacgaccac

SEQ ID NO: 226628 - DNA, 122 bp, Homo sapiens
cctcggaagaaatcaggcagaaagttgaccttttggcacttgcagtgcaatggaaggtagcgccgcgtgcgccccttccttctacgagtaagagcgacgatttaggaacagccagccttgct

SEQ ID NO: 226629 - DNA, 122 bp, Homo sapiens
aaaaggcctctttgtagatcctcccctaggacgctccggaggaaacagctcccctcgaagcggtattcagcattcacggctgtcacccaggagtccctgctgggtgctgggcccagtgccgg

SEQ ID NO: 226630 - DNA, 122 bp, Homo sapiens
acccctggacatgttcctgaggccatgctttctccaggtgaagaaaatatcacttctggccgggcgcagtggctcacgcctgtaatcccagcactttgggaggccgaggtgagcggatcacg

SEQ ID NO: 226631 - DNA, 122 bp, Homo sapiens
ctggaagctgggaaggccgggagggcagtcccttcagagggcagggctgaatctcggccacgccagggccccagggcaagcgcacacctgaggagaccccagacccggccacccccacgctg

SEQ ID NO: 226632 - DNA, 122 bp, Homo sapiens
agaaccagtcagctcagtctggtagtgactgtcccttatctgagggcctcaggcccttcccggccattcctcttgagaaccaatcatcgagcttgactttggacctggaaccaatcagggat

SEQ ID NO: 226633 - DNA, 122 bp, Homo sapiens
attgcagagtgtcggcctctcggcaagcaccgtttccagactgcggaccaagcggagattcgcattaatgtaaatctggggagcactaaaagctctcactggctttgtagaaggcgacaatc

SEQ ID NO: 226634 - DNA, 122 bp, Homo sapiens
tgccgctgtctgtgacgcccccgcagcccgccgctcattggcctaggccgccctgactgacggctcagcgccgcctcccattggccctcccgcgaccttcccgcgccactataggctctcag

SEQ ID NO: 226635 - DNA, 122 bp, Homo sapiens
cttcaccgcacgaaaaacatcactagcctgctctcagcccaggggacgactagtccctggcgagaagctgcctgcaaggtcactgtcatgccacctgccccaagtgctcaggggaaactgag

SEQ ID NO: 226636 - DNA, 122 bp, Homo sapiens
tggacccagaggccatgagaatctgacgcacgcggttgtggaagcgctgcattgactcatcgtccacacgcaggaaacactgagctgtgcgctccttagtaacctaaaccacaaagtcaagg

SEQ ID NO: 226637 - DNA, 122 bp, Homo sapiens
tcttctggaagttcgggtgaggacgatgacttcaagagctgtccccagggtccacagggacgcgagggcttggcttttctcgtcagctgccctgaggggagagcggactgtgccagtgagtc

SEQ ID NO: 226638 - DNA, 122 bp, Homo sapiens
acaatgggaacacggtcatcaagggaggagcagtgcatatctgcagtgacgtcaacactgcggtggcgggggatcattcccggaggaatttgccagcaaactctctctgctccttgcaccac

SEQ ID NO: 226639 - DNA, 122 bp, Homo sapiens
agcagacacgctctcccaaaggggcggacacagacgtcctcacaccgcggcccgaccggccgcacattaatccgggtggatttggccatcttgtgacatagccaatcagttcgagggagggg

SEQ ID NO: 226640 - DNA, 122 bp, Homo sapiens
accacacaggctcaagccatcctcccacctcagcctcccaagtagctgagactacagtcacgtaccacacccaactaatttctgtgggttttatttttttgtagagacagggtttcaccatg

SEQ ID NO: 226641 - DNA, 122 bp, Homo sapiens
aaattacccaacactaaacaggttgggtgctggatttgatttcagatgaggtggtgccagcgcatcggccttttccattatatatgttgtgttgcacaagtaacgctattactgtgtgagaa

SEQ ID NO: 226642 - DNA, 122 bp, Homo sapiens
caacacagggagacctcatctctacaaaacatacaaaaattagctgggtgtggtggagtgcgcctgtggtctcaactagtcaggagactgtgtctgtggtcccggctactcaggagactgag

SEQ ID NO: 226643 - DNA, 122 bp, Homo sapiens
gcaaacaaaagagtggaaactaagaggattatcatgggaggccacccacagacatggaatcgtgactctcaatagatgtgtttgtcacaagggtccttgcacatgcagagacaatgtacatg

SEQ ID NO: 226644 - DNA, 122 bp, Homo sapiens
cagacatactctgatctcagtctttggatatgccaagtcccacgcccttcaggtcccaaacgccaagcctcctgtatagacacttgagctgccatctgccatgggcatgggagacttgacac

SEQ ID NO: 226645 - DNA, 122 bp, Homo sapiens
ggggatgccgcgccttcgggagccagaggggctggggttggggctggtgcttggtgtctgcgccgccgccaggcccggcgagtccgagcctttgtctttctggggcgccgccttctgcgagc

SEQ ID NO: 226646 - DNA, 122 bp, Homo sapiens
gtgggcaagacgagactggggcctctacatctgagtgccccccaaacccagcagtcatgccgtgagcaaacaaatcatttcttctagttgcttgacaagtttttggttgtgctgtttctgcg

SEQ ID NO: 226647 - DNA, 122 bp, Homo sapiens
gtaattttccgtacatttctcacatgaaagtataagtaatccttatagaaatacttttcccgaggagcggttgttcagaggatctaattaaacagggtatgtcaaagtgtttcaaaataaat

SEQ ID NO: 226648 - DNA, 122 bp, Homo sapiens
tacccctcccaaaacaaactgagtattctgacttcaggcttatgtccagctttttagctccgaaacccccccactcactgcacagctgtgttcctttcctggaatgcagttttctatcaggt

SEQ ID NO: 226649 - DNA, 122 bp, Homo sapiens
cgagagggtgtcccctctcagctactgaaaacaaaataacactgggtgaaactgtaatcacggcgcagatacagtgtcctgcacgccccgcggggggctcggctccgagactctcccctctc

SEQ ID NO: 226650 - DNA, 122 bp, Homo sapiens
tgcgcaagcccggccggcgcccgagcccgaccccagccccgacccggcggcccagccccgcggcccgcagccaaccagggcgcggccagcaccagcgcagccaaccactacggggccggccg

SEQ ID NO: 226651 - DNA, 122 bp, Homo sapiens
cgccgccaccccccggtgctacgcatggtgctggaggcgctgcaggctggggagcagcgccggggcacgtcggtggcagctatcaagctctacatcctgcacaagtacccaacagtggacgt

SEQ ID NO: 226652 - DNA, 122 bp, Homo sapiens
gccacacagggggaaaggaagcagctggagagtccgctgcccacaccaccccgggctccacggcctcacccccaggccgtcacagagctccagtctcccgccacttcagtgcaaccctcgct

SEQ ID NO: 226653 - DNA, 122 bp, Homo sapiens
gccgcgcagggaaggagtatcgcagaccggcgcccaggcccagcgggggaatccaagggccgtgttgcaggactcggcattcgttctgcgcgggtcaccttgaatgtctgtccggatccctc

SEQ ID NO: 226654 - DNA, 122 bp, Homo sapiens
gcagagctttgttttggaggttctgtctgggtgcctcgagtaccggaagctgctgaccgtcgtggtggatgccttctacgtggaggatggccgactctgcctgcgggttgaccacagccgct

SEQ ID NO: 226655 - DNA, 122 bp, Homo sapiens
tgcccgttacacattcacactccatcacagataacacacagggcctcagggactgcaacacgtgcatgtgtagtgacgcacgacaaattaagagtgagtgagaatgaaagctcatgcttagc

SEQ ID NO: 226656 - DNA, 122 bp, Homo sapiens
tctgaaaaactgtggttctcatgttagcaaatttgggacgaaatccgtatgcagaaaaagcgccgggccgcccgcaatccacccactccatgacccttttttaggacaaaatccctgggcgc

SEQ ID NO: 226657 - DNA, 122 bp, Homo sapiens
gggcagctgcagccccaccgagagcaggggtgtggtgagctggttgcctggggcccggggcggcacctgaacctgaggagtctcagctctgggacaggggactcacagagcccccggcagtg

SEQ ID NO: 226658 - DNA, 122 bp, Homo sapiens
cctcttcaaccaggggtcccgtgctgcactccgcgcccctcccagtgccccccatatctccgggatcttcctggtcacgggcaccctcctggcacatggtgcttcagtgtgatcgggccctg

SEQ ID NO: 226659 - DNA, 122 bp, Homo sapiens
tcggctgctggtttccatggtgatggcgctggactggtgggctgaaccggctgacagggtcggggacagaaggaagagcaggtttctcacggcatgtcagcccagggctcccacatgtggcc

SEQ ID NO: 226660 - DNA, 122 bp, Homo sapiens
gggtctgagagacagccacgcctgctccgggtcactccggccacctggggggcgtcggcgcgcagactctggccagttcagtattcaaactcttcaggagtgctaacttactcatgacagcg

SEQ ID NO: 226661 - DNA, 122 bp, Homo sapiens
atttttgaaaatttgacagctacatgaaacatgagaaaacattttcctcacttctgaagtcggtttgcagctggtaacttgttcatccagaaaacattctaaagcaatgagactttgtgagc

SEQ ID NO: 226662 - DNA, 122 bp, Homo sapiens
atagcagaccaggggttggcgaccatgtcactgtgtgtgaaagcagccggacggtgtctgcgtgcgtgggcctggctgtgtgccggcacacctcgacacgcgtggctgctgaggttgggctt

SEQ ID NO: 226663 - DNA, 122 bp, Homo sapiens
acgagaggggctcctccctgagagcgaccagaagccttccgatggcggagcgagttgggccgccccggctgtgactagggctcgggggcccaggtccaaatcacagagctggggcgagacct

SEQ ID NO: 226664 - DNA, 122 bp, Homo sapiens
gttaggatttctcacctggagtggcttccgccataagcgccgggatctggaaggacggcacgtttgacttctgttgtcccaacctcacttgccagcccttggcaccgccccagcttggatcc

SEQ ID NO: 226665 - DNA, 122 bp, Homo sapiens
attcattcagctcaggtcatagaggcctccttgttgttccttgattataccaggggtgctcgtgccttcgggcctttgcacttgctattttttatgcctgaagtacttctccccaagacatc

SEQ ID NO: 226666 - DNA, 122 bp, Homo sapiens
cctcccagtggtcaagcccaatttgaagccagttggccaggtagccagggtgatacaatacgcaggagtcagcctctctgggaacaaaacagagtaaagaatggaccgcagcaaatgaaaat

SEQ ID NO: 226667 - DNA, 122 bp, Homo sapiens
ttataattccattaataacaacaataggacatctttctttctacaagagtaccaatgcctcgggtcgatgtgggaaagtgctgcttggctccttatgttagggagctacagccctggctggt

SEQ ID NO: 226668 - DNA, 122 bp, Homo sapiens
gggagggcgggaaagttaccgtcaggcgcccgggtcacgggcagccttttaaaccctgcacgctggtttggtgttccgcaaatctcgtggcatctctcaagtcagtagtaaagaaagttagg

SEQ ID NO: 226669 - DNA, 122 bp, Homo sapiens
taggcgccgggagccccggcgggagctccagggggtgcgggcgttagagagggctagggccgcgcccaggcggggtgcggggaacccgggagatgaagccgcccaggggcgggggtgtttgt

SEQ ID NO: 226670 - DNA, 122 bp, Homo sapiens
cgaccgcggcggcagtggccggaggagattcgcggagcggagactgagccagcgagtgcgcgcctagaagtttttataagtggccgccgccgatgatgaaacgcgctctccctcctccctct

SEQ ID NO: 226671 - DNA, 122 bp, Homo sapiens
gggagttccccctggcagcctcctcgtgggcaccaccgagggtgagaggagccagctcagcgggtcccacccccagggttgcccaccttgaccacaaggaaaggagggaggagttattgggc

SEQ ID NO: 226672 - DNA, 122 bp, Homo sapiens
cacgccgtataggtcacccctatcagaaccggacgccccccaagaagaagaagccgcgcacgtccttcacacgcctgcagatctgcgagctggagaagcgcttccaccgccagaagtacctg

SEQ ID NO: 226673 - DNA, 122 bp, Homo sapiens
cagggagggccgggggagacctggggccgtgcagaggcgggtgggttgagaggcgccgggcgtaggattgattctttgcaggaggcattggtgacacctcggctgagagcccatggacgagg

SEQ ID NO: 226674 - DNA, 122 bp, Homo sapiens
gggagcagggatgagcaacagaggtcatgatttggcaacagcaatggctgaaagtttaatcgtttgttcatgagagttttattctggttttagttttttattttgttttgctggctgaggca

SEQ ID NO: 226675 - DNA, 122 bp, Homo sapiens
acctaagtgttgggattgcggatgtgagtctccgcgccaggtttcttctcttttcttgtgcgtttcacgcaaaaaaacccgagtccctgaagctacgctgctttcctgcctctagggaaaac

SEQ ID NO: 226676 - DNA, 122 bp, Homo sapiens
tataccagcccagagaattagtctttttcaggacccctttcaccctggtccctcgggtagcgcctccactatctcagccctaagggacccccgaaggtagcagctccaatcccagtacagga

SEQ ID NO: 226677 - DNA, 122 bp, Homo sapiens
agggatggggctaggcctagggcccagactcccttgggtggcttggcagctggagcccaccgtggatctttgtaaatttacaactctaaatggcctgaaggtagtgggcaggggacagggaa

SEQ ID NO: 226678 - DNA, 122 bp, Homo sapiens
acacacagtcacccacaatctctcagcatcaccagtaatctcagtgtcacacacagtcagcgacatgtcatctctgacatatgcagtcccactcagtctctccttgtcgcacataatctcat

SEQ ID NO: 226679 - DNA, 122 bp, Homo sapiens
cctctcctccacaaaaacgaaacaaaacaaaaccccaggtccaggagctcaggcccaggccggatccaagacgcggcagccaggcagccccgccgcgagcctgtgcgggcttgagccggctt

SEQ ID NO: 226680 - DNA, 122 bp, Homo sapiens
ctaggctggcatgggcgatgcggagctactccgccctcaggaagcaggcgaggtgcccagcgggagaatcacccacatcaccgtctaatctctgctgtgaagtggaagcgcgagaaggaggg

SEQ ID NO: 226681 - DNA, 122 bp, Homo sapiens
ttgtgtcgttactgagagcaaagcacacttttatagctttagcacaattagtcctcttggcgcaattgaatcccaggcggaaagaattaagggattgttcaagatcttttgacagattttct

SEQ ID NO: 226682 - DNA, 122 bp, Homo sapiens
tcatccccacgtgaaggaagcacaagcccagtcagggaaaggagctcatccaaggaggttcgcaatgggagcgccaggctgcaggtccaaatcctggattcccaccactctggggtgatctc

SEQ ID NO: 226683 - DNA, 122 bp, Homo sapiens
tgctgggtggaggggtgcccacatccaagatggcgtccccaggagctgggagcgggtgaccggcggcggggaagcggcctgggttggccctcagattgcggggtctgggggcatctcgccgg

SEQ ID NO: 226684 - DNA, 122 bp, Homo sapiens
cggggctcgcaagggcggtgggggggcccgaggaagtccgggggccctcggtgatgcccccgcccccgccgcgtcagggttgctccctgcgcttccgagtggcgactgcagcgggtccggtg

SEQ ID NO: 226685 - DNA, 122 bp, Homo sapiens
ggactgaagaagggcgagggcgagcggcggggactggggaagggcgagcagcgggaggcacgggctctctctagcaggtggctgcagccatggagaggctctgtgccgccgctgtcaagggc

SEQ ID NO: 226686 - DNA, 122 bp, Homo sapiens
ctggaggaccttcttacctgggggaacccgtctcacctggaagaccttcacctgggtaatcgccgtggcctcccactacggcgcagccgggtcggctgcccgggcttcaccctaaaataagg

SEQ ID NO: 226687 - DNA, 122 bp, Homo sapiens
ctcaaggctgagtggtctcgaccaagttacttaacctttctaggcctccttttcctctgacgaaaaacaagggagttgcactggataagttttaaagtcccttttcaaatttcattgaaaca

SEQ ID NO: 226688 - DNA, 122 bp, Homo sapiens
tgagaccctggttcaaaacaaaaaaaaagaaaaaaaaaaagaggtcggagcagtggctcacgcctgtaatcccaacacttagggaagtcaaggagggtgcatcacctgaggtcaggagttcg

SEQ ID NO: 226689 - DNA, 122 bp, Homo sapiens
aaatccaaagtcgattgtttgatgacttttcacgttgaatatacctggatcaccacctcccggatcaagattgagagcattcccgtcactccagaaagtttccggttaccgcccaccttgtt

SEQ ID NO: 226690 - DNA, 122 bp, Homo sapiens
cccagcgacgctctcggtcacggtcacagtcatggtcacggggtgggacgtgcgccctgacgtcgagcgccgcgggcctctgcactgcgatctgctgccccttggtgggcacgcgcggcact

SEQ ID NO: 226691 - DNA, 122 bp, Homo sapiens
ctgggtgcctctgagcacctgcattttaatgactcacgggaggcagccccacggtggccccggaagccgcccacccagccctgcactggccccttaggtggccgcctcccatctgggcaggg

SEQ ID NO: 226692 - DNA, 122 bp, Homo sapiens
gcgtcaggagcctaggttgccaacttacagaacaccggacgggaccatagccggaacaggcggtgacaggaggctgaccgccccgccggcggggcaaagtaacacccggcggcgcggcgccg

SEQ ID NO: 226693 - DNA, 122 bp, Homo sapiens
gagcgctggacgctcagggaccaggacccaggcgcccgagtccccagctccactgtcctccgcctctacactcggggattctggagaccacgtcgacccgcaatgaactggaataaagattc

SEQ ID NO: 226694 - DNA, 122 bp, Homo sapiens
atgtaatagaaatcactgacatcatctatttttttttttttttgagacagagtctcattgcgtcgccgagactggagtgcagtggcatggtagcggctcactacaacctccacctccccggt

SEQ ID NO: 226695 - DNA, 122 bp, Homo sapiens
tgggtacagaattcatctcaactacttcctccttcggcttctcgttcttgctgaaattctcgtctggctggtacctgaattagagagagtagggcaagattaacccaggtccctgttcatcc

SEQ ID NO: 226696 - DNA, 122 bp, Homo sapiens
aaaataaacggccgcattttatagtcagacacaaccacaacatggttgtgaccgggcagtcgaaccctcaggatcgacccaagagacatgaaactacccacacaaaggctgctatgggaaca

SEQ ID NO: 226697 - DNA, 122 bp, Homo sapiens
agcttggcccgcgctccggtcctgctctggcgcccccagcggccgcttgaggaacaaggccgctcctcgagagggatgccccgccctttccgttagcgaaccctccccggaagtgacctctc

SEQ ID NO: 226698 - DNA, 122 bp, Homo sapiens
aaagtgagggttgccgagtctgtcccgcaggctctggccgggcgatggatggaagaagttcgctgacgtaggtattctgcctgacagcgcgactaagggaccacacggctctgcctcgccga

SEQ ID NO: 226699 - DNA, 122 bp, Homo sapiens
cgtctcgtctctctttgctgccgatttattttactgattcactagtgagcatttattgagcgccttctgtacgcgtgggccgatgcccagcgctcggatggtcgccgacctgctaagggaca

SEQ ID NO: 226700 - DNA, 122 bp, Homo sapiens
ctgtttttgccccaaagctggaaattcatcacaacctgaggcccaggatctgctctgtgccggtcctctgggcagtgtggggtgcagaatggggtgcctaggcctgagcgttgcctggagcc

SEQ ID NO: 226701 - DNA, 122 bp, Homo sapiens
gtgctcagtgcggtggggtgaaaggagcaaagcatcatttaccaagtgtggtatggtgggcgagtttctctatcagcctgcactgggatttgagggagcagggccccagcaagtgagagtgc

SEQ ID NO: 226702 - DNA, 122 bp, Homo sapiens
ttcagttggccactgctgagcagctgagaaggtggcgacgtaggggccatggggctgggccgggtcctgctgtttctggccgtcgccttcccttttgcacccccggcagccgccgctggtga

SEQ ID NO: 226703 - DNA, 122 bp, Homo sapiens
gtttattgtttttatgtgcatccgccttggatttagggagtcacctgtgctttgcagcaccgtcttttataattagtagcactgtgattccaatacccattcatgctcaggacatccctaga

SEQ ID NO: 226704 - DNA, 122 bp, Homo sapiens
cacggtccagtcgccagggggcgcgctagccggcgccgcggatccccgaactgcgcggcccgactcgagtccgccatattggatgccgcagccgctgctgccagcgcttcctcctctgtctt

SEQ ID NO: 226705 - DNA, 122 bp, Homo sapiens
catagagtcacagtccccagtcaattcccagaaataagccagttcacagacccagagtcccgtgtccgaatgggaagccaggtcccctccagaaaggactctgctccactgccaaaaattta

SEQ ID NO: 226706 - DNA, 122 bp, Homo sapiens
tggaataacgcttccagggtggacggggccggagtggaggtgggaagtccgggaggaccgcgcagagggtgccaggcgtccggtctccccagctggaacccgctcccagcccccagccccca

SEQ ID NO: 226707 - DNA, 122 bp, Homo sapiens
gcgaggagggggcggggccaagcgggatagatgacacgagcggggctaagcaggtgggctcgggcgggggtgggggtgggggcgggggcgcaggcgggggcgggggcgcggacaggccaagc

SEQ ID NO: 226708 - DNA, 122 bp, Homo sapiens
ggatttgaattcagccctgtttagccccaagctccaagagatctcaagggccacaagctgcgtcagaacagtgaatgtttccctttgttgctgttattattattattattattattgagata

SEQ ID NO: 226709 - DNA, 122 bp, Homo sapiens
gagtggcctgatcgggcggggcgcagagatggcccctgccccccaaacccggggctgcggcgctgcccccctctgaccacaggcgggaagggtggcctccggcccctcccctcggagttctg

SEQ ID NO: 226710 - DNA, 122 bp, Homo sapiens
agcacagccaaagaaaatcattccattccattgagcggagtcagaaacatgactaggtcacgatcacaaccccgtgtgtgccagggtgaccgagactgggtgactttatggtgtttcaacgt

SEQ ID NO: 226711 - DNA, 122 bp, Homo sapiens
cctgcaccctccccatgtctggtgatgctcaggccagcaaggcattggctgctctgctcacggctgagaggcagagctgctgattcgctctggaaaggctgtggctgtccccattggaccct

SEQ ID NO: 226712 - DNA, 122 bp, Homo sapiens
gcctccgcccggcttctcgctccctcttccctctccccgaccccctcccgggctgtcagccgactgccaccgtcaccatggctacgcggctcccgctcagttccacagtcagcaggagtcga

SEQ ID NO: 226713 - DNA, 122 bp, Homo sapiens
agaggcagagggaaggggctcccgggcagtgcgggttccaggtgggcacagctggtaagccgggcggctgggcagggctctgcttcaggtgtgcagagtgggtgtgagttctgcacagcaca

SEQ ID NO: 226714 - DNA, 122 bp, Homo sapiens
cagtgggagcccagaagagctggggtttgaaagcctctccttgtcttgaggactggactgcggtccaagggcacctaccagccctcttttttcatttacatttgaattcacagttgctgccc

SEQ ID NO: 226715 - DNA, 122 bp, Homo sapiens
cctccccagggattcagcgtcgtaaaggcctttggatttgcgtaggggagagagggaagacgtgtaggggacacgtcttgcctgggagcgaataagcagatttcagctcccttgaagggatc

SEQ ID NO: 226716 - DNA, 122 bp, Homo sapiens
ccgctggcccgagtgctaagcccctcattacctggggtcggcagggccggctggctgcttcgagtgcggggcccgccaaaccctcgcccacccggaactccagctggcccgcaagcgccgca

SEQ ID NO: 226717 - DNA, 122 bp, Homo sapiens
cctcctacttctcccaaagttgcaggcgcggtggtgactccccctgccccgggctgggagcgtggcccagcccttccgtgcccggcctcagtcttcccgccccgggtctgcagagtgggccc

SEQ ID NO: 226718 - DNA, 122 bp, Homo sapiens
tgtcaatgacgatgtgcagcaggtctcccagagccaagctggcgatcaagatattgggaccgtttcgcatgcacttgttcttgtagataattctcagaagtgtggagttcccgatgatcccc

SEQ ID NO: 226719 - DNA, 122 bp, Homo sapiens
cctgcgggccgtctgagtgttccgtgctgacgcaccctctcctcctcgggggtttcatggcgtctccctcggcccatggtgggggcttctcaccgctcttctgttcggagggtttcctgggt

SEQ ID NO: 226720 - DNA, 122 bp, Homo sapiens
tagattgtatctttccttgaccatcaaggcattctgccacggtgactaaaaaaatctttccgcaataaagtccccaaatatattgcctggtaggtagaaacagtgctgaatttcctggtgtt

SEQ ID NO: 226721 - DNA, 122 bp, Homo sapiens
gcttgggcaacacagagggaccccgtcgaaaagaaaagaaaagagaagagaaaagaaaaacgaaaataaacgaaaagaaacgaaaagaaaaaagaaaagaaggggctgggcacggtggctca

SEQ ID NO: 226722 - DNA, 122 bp, Homo sapiens
gagagagcgggcgggggtcctgggagcggcccccgagagtggggtctgtggggagcagggcggccccggggacagaggaagccgcggtggaggcctagggcagacgcgggcggacgcgagga

SEQ ID NO: 226723 - DNA, 122 bp, Homo sapiens
ctccttcccctatctttgacttctgcaatagtatttcttatcttttctgattgtaaatatcgccataggagagactccccttcctgagcctgggtttctcctcattctcacttgagaccaat

SEQ ID NO: 226724 - DNA, 122 bp, Homo sapiens
cgggggccgggcgcggggccggcgcgccggaggaagcgggacctggctcctcgcgcccgccgggccgcccccattgttctgccctagcaccgctgttagccgagcacgtcctgaccgaggga

SEQ ID NO: 226725 - DNA, 122 bp, Homo sapiens
taactgctgtcgctcccatatttatccctggtgcaagtgctgtcagccctgtgtggtcaacgaatactactacaggaagaagtgcgagtccattgtggagccaaagccggtgaggccgctgt

SEQ ID NO: 226726 - DNA, 122 bp, Homo sapiens
ttcctgggctcctttcacaaccactctggtatcttaccctccttacgagcaggtacaaggcgcgttccaggtctctccgccaatacagctgccgacattgttcaagggcctctttatagcga

SEQ ID NO: 226727 - DNA, 122 bp, Homo sapiens
ttcaaatgctttcctggaaacgagcatgctcagagaactgacaaatcattgtccagtgaccgggaggaaatgatcgttgctcttcatttataatgcaaattctgaggtgtctccagaagtgt

SEQ ID NO: 226728 - DNA, 122 bp, Homo sapiens
tactcctagtaaaccacttacaagaggcaaggagcttagtgactctgtatatgatattttcgaacatttgtggaaaaccagggaatatagtgacgtgggctggttaccagttggttgctgga

SEQ ID NO: 226729 - DNA, 122 bp, Homo sapiens
gtcacacagacatcagttcacttgcctgagacacacagccacactgggacacaggcacaccggagtgccacactcatgctgggggccaccaaggctgacatggcagacacaggctgcgcaag

SEQ ID NO: 226730 - DNA, 122 bp, Homo sapiens
gcaagggcaagtcttatttacctttatctccccgaacctagaagcgaggtcaaacagaagcgctcggggtagcaagaaggctttgtagatattgaaatgtgaatgcatgcccagcccttacc

SEQ ID NO: 226731 - DNA, 122 bp, Homo sapiens
cctgggactcaggcacatggagctccctcggggccaaatttgtgtcacgcgcagggacaccggaggcgcgtgcacagtccgtgtaacggctttgcttggcgcgtctccgtttctcttctgag

SEQ ID NO: 226732 - DNA, 122 bp, Homo sapiens
tggggttcctagttgctgtgcaaaaatgactgtagccatgtttccaactgagcctactggcgatgtccaaagcccctgccaagagcctcagagcagagactttagtagaagatggaaaatga

SEQ ID NO: 226733 - DNA, 122 bp, Homo sapiens
gaccggctcgcgggtgcgggtccgggtgaagcgggaggcagccagagtcggagccgggcccgagcaccaggcgcaggtcggcgcgggccgattgggccgggagacggggtcaggccctaaag

SEQ ID NO: 226734 - DNA, 122 bp, Homo sapiens
tttttccttcatttccactttggtgattctgacaattatgtgtcttggagttgctcttctcgaggagtatctttgtggcgttctctgtatttcctgaatctgaatgttggcctgccttgcta

SEQ ID NO: 226735 - DNA, 122 bp, Homo sapiens
aaacagagctcctggcccgagcagagagcgtgcacacgcatgaaatcgtgctcctgggtgcgccggcggccaggtgcccgatgtcggtcttggaagcagcgccggagtccgtctgaacccag

SEQ ID NO: 226736 - DNA, 122 bp, Homo sapiens
ccagcttccaaaatcagccatagggagagaaagagagagagagacagaaaaaaaaaaagacgctgttagcggccaggcctgaaccccagtgggatattctacttccccatcccaggaatgga

SEQ ID NO: 226737 - DNA, 122 bp, Homo sapiens
tcctgggccttacctcccctgccagggctcgggcgctgtggctcctgccttgatgaagcccgtgtcctgccttgatgaagcctgtgccacctgcaagtgcccgccctgcccctgccccaacc

SEQ ID NO: 226738 - DNA, 122 bp, Homo sapiens
ctgcaagctattatttcagcggtgctctatttttacgtccaggttgctgctatttaatgtcgcttccagtagtgtctaattttcttgcagagaggagagcagatactggcagtgtttgactt

SEQ ID NO: 226739 - DNA, 122 bp, Homo sapiens
tgcccggcgatgtgggacacattatcatctctgtgagagatttttggtctcttttgtcaccgcccttctctcccagctcctagaactgggcctggctcacagtaggtgctgaatgcatactg

SEQ ID NO: 226740 - DNA, 122 bp, Homo sapiens
gtcggcccgcgggccactccgggcgccatggtcggccggtcgctctatcagtcagtggagcgttacaactccgactccagcacaagcggtctccgcccggaacagccgcggcgccggaagtg

SEQ ID NO: 226741 - DNA, 122 bp, Homo sapiens
aatcctgcacccccacccggtcacgggcggtgagcgcactctccatggtcacccgaaccccgtcactgcccagggcctgcagagaatgggccacagaagagggtcagagtcatcgggggcgg

SEQ ID NO: 226742 - DNA, 122 bp, Homo sapiens
cccactcgaggagggctggatggagacagacttgagtcgggccctgagccccagggagtgcggcccggtagatctcggggcgaggggaacaggatcgggtacacttgatccggaacaagaac

SEQ ID NO: 226743 - DNA, 122 bp, Homo sapiens
aggatggtctccggcctgctgtgtagtctcttctgcacacaagcgtgagggcagcgcccccgcctcggctgtggggaggagccactgggacgtgagctctggtggcatgcagcagcttttgt

SEQ ID NO: 226744 - DNA, 122 bp, Homo sapiens
ggctggccccggggagaggtgggatcttgcccacagcgtctaagccgctgccgggccagacggggcaggtggggtaaattgtattcaccgccagcctcactggcagagctgggaacggcctt

SEQ ID NO: 226745 - DNA, 122 bp, Homo sapiens
ttaaattttaatccacagggggtatttcctttcctgtttacccgagcgaagagtggcccccggtggcccaaggaggggcgcctccaggcgcagggctccggcggctccagctgctcccgggc

SEQ ID NO: 226746 - DNA, 122 bp, Homo sapiens
gagaatccacataccttgtgtattgaaccccaggaaaaggaagaggtcgaaccaaccctgcggaaggagcatggtttcaggagtttattttaagactgctgggaaggaaacaggccccattt

SEQ ID NO: 226747 - DNA, 122 bp, Homo sapiens
gcatcccacggaagacgaggccagcagtccctggagtgtgctgaatgcagaacttagcagcggcgatgacttcgagacacaggacgatcgcccctgcaccctcgcttccacggggaccaaca

SEQ ID NO: 226748 - DNA, 122 bp, Homo sapiens
ttgcagccccgcaaaccccaggcatctctgtgatcccctgtctgagtcaaagctggtctgcgggctgtgtccctgatccttctgcccagaggcccgctggtaccagccacgcaagtgctcgg

SEQ ID NO: 226749 - DNA, 122 bp, Homo sapiens
tccaaatactacaaccacctccaaccacccaacaatgcctcaggccgagggtgggccacacgcgacccagcgctaaagggtcacagccaagctgtccgcctcctgccttccctttaaagaag

SEQ ID NO: 226750 - DNA, 122 bp, Homo sapiens
tgaggaaataggagcttagggaaggtacaacaggcagacatggtcctttggatggaaagccgcagatgtgagattcaatctgagttcagtctgacttcaaatagttacactttctccaccac

SEQ ID NO: 226751 - DNA, 122 bp, Homo sapiens
ccccgccccccatgctcccgttctgaccccgcccccatcagtcccctcccacaccacagccggcctgaccccgcctgcactctggaagacccggcctatctgccccgcccatattctgggac

SEQ ID NO: 226752 - DNA, 122 bp, Homo sapiens
cagggcgcccagccagatgcgcgcagctgggcgtgcgtcagcgctgactcacccatccggcggcccccgggaccccttgggggctcctgagaaattcctcgggaaaaacacccaaggctcca

SEQ ID NO: 226753 - DNA, 122 bp, Homo sapiens
actcacctctgctcccggcctgcggggccagagtagccaggatcccgcgcagctccgacgcggagatccgcacacgctccagcccttccgccatcttcgcggctgctgctacagccgtagcg

SEQ ID NO: 226754 - DNA, 122 bp, Homo sapiens
gaactctatctcaagaccattactaattcagaggtctttagatgttcctgctgtttgtcgcgggttaaggaaataaagaggacaggacactctaaaaggggaagagacaaatagtccacaca

SEQ ID NO: 226755 - DNA, 122 bp, Homo sapiens
tgcattttacattctagtttgtatcccgttccagacaattccagggcttttgagtccatgcgtcagccttcctgggcggtctcaccttcaccacccgaaaacaggtgctaggagagaagctg

SEQ ID NO: 226756 - DNA, 122 bp, Homo sapiens
agccccgtcttcttttccccaccccatcccctcccaaagcgggtttgttgggttgggagccgggtgcatctccggcgaggccacgggcggggagccctcctgtgcctgccagagcgcccaga

SEQ ID NO: 226757 - DNA, 122 bp, Homo sapiens
gcatttgtaaacctatttactaattaagagcccaaacgaggggggaaatgcacggagcaccgaggccttttttgttgttgttaattcttggttatctatatgctcttattgcctccctatta

SEQ ID NO: 226758 - DNA, 122 bp, Homo sapiens
ttcctgaggaaactctgataaaggatgtggcctatgattccccttgctctaattctgactcgtaaacaaagcgcgatgtttctcccatggccctgtgctgtgtggaatgccccttctcgtag

SEQ ID NO: 226759 - DNA, 122 bp, Homo sapiens
ctgagctcagcgccggagggacgttaggtggaagcgtctttggcagagctggtagcgaatcggagaggtgatttccagcgagtgtggttattggaagcacacacttgctttctgactttaag

SEQ ID NO: 226760 - DNA, 122 bp, Homo sapiens
gcgtcgacacctctccagatttcggatccagtcacttttcaaaaagatcaaggagcctgacgccccagccagagaccgcgcccggtcagggagcagggtccacccggaaacgttgcacccaa

SEQ ID NO: 226761 - DNA, 122 bp, Homo sapiens
gggagcggcccggggcctcgggcctctagagagcgggagtgaccctcggtttctggcctccgaggggcgggagcgatcctcagccatgtccctagtctctggcttgcggctgatttttaaat

SEQ ID NO: 226762 - DNA, 122 bp, Homo sapiens
ggggggcaagaggggctggagaggcgggtgctattagtccccgcatcgcggggggcgcctcgcccccctgcgatttggatcgtaatatccggggaggagaggtgggtgctattagtccccgc

SEQ ID NO: 226763 - DNA, 122 bp, Homo sapiens
aggcaagtcaaagtgaaagagaaacccaggaagtcagctccgtggtggtggtgatggtggcggccacagactctggagcaagtctgactttggagcaagtcagggttctagggggttctgcc

SEQ ID NO: 226764 - DNA, 122 bp, Homo sapiens
ccctgctctctatccacaggggcggctgacggggctgggcggagaggaccttcccaccatcgtcatcgtggcccactacgacgcctttggagtggcccccgtacgtatgtgtgtccccattc

SEQ ID NO: 226765 - DNA, 122 bp, Homo sapiens
gggtaaatggaatgctgaggcttaggcgcccccttcccctgctgggatccgggtaggatccggttgcctttctgcggtggaggaggaagtgttggatttcagcgctaaggcgtcggcggtgc

SEQ ID NO: 226766 - DNA, 122 bp, Homo sapiens
tcccaagtctgaatcttgagcgactggtcagtcagcaagcactgggtgaacatctgctggcgtggtcctggcatgagggactcccccagctcttggtccgaccaagataagctatgatcctg

SEQ ID NO: 226767 - DNA, 122 bp, Homo sapiens
gaagaaaatcgctgaagcttgtggcctcacttcttccaagaggcagctacagacactctccgggcctggctgcctgtttgttgggacggggcctctggcttgggtttgctgtgcttcaacgc

SEQ ID NO: 226768 - DNA, 122 bp, Homo sapiens
atacgtattccggatgttcacgtccacacctccctgggtgcacagtgtcacatgagcacacgctaagcactttgacacccctcacccgattctctcagctacccgggacataggtactatta

SEQ ID NO: 226769 - DNA, 122 bp, Homo sapiens
tggaccccagtcgccgtcgtgacggccccacgcagcctcgcgcccggccgccgcctcgtgcgggactcgtgcccgcattcccacctcaccgggtgcagccggcccggccccgggctgtgcga

SEQ ID NO: 226770 - DNA, 122 bp, Homo sapiens
gaagtgaggttcacactgggcaggagaactttgaagcgggaggccggtgggtggtgcgatcggaaatcacactcttcgcagcttcccagacttatttccatcttgggccggattgttcctag

SEQ ID NO: 226771 - DNA, 122 bp, Homo sapiens
ctctgtagatgtgccccaggagggggccctgcactgacaggttgccttgctttatggctgcgggccatgggaagtattgctgggggtgaccgagaaggagaagaatgagaccactgtatttc

SEQ ID NO: 226772 - DNA, 122 bp, Homo sapiens
ctgacgcaagggggagagaccaggctggcttccctctacgtagtaagttcctggggtgtgcgcccctgccccagacagcagagaaatcgcctgactgggagatggagaagaggggccacctt

SEQ ID NO: 226773 - DNA, 122 bp, Homo sapiens
tgggctgagcagacaattgtcagagttgctggctagaccacagatgtgtcagagggaccacggcctttctgtaagctcatggtcagaggcggaggggagttgtgaacgttctgatgaaagca

SEQ ID NO: 226774 - DNA, 122 bp, Homo sapiens
accaaggagggcactgggcccggggcgcacccagtctgcgtggacgctgctccattaggccgctgttcagtagttgcgggatatccagacaatattgaaacattcccaaatgaactttgcat

SEQ ID NO: 226775 - DNA, 122 bp, Homo sapiens
tacaaagagagggccgcacattaagcatcgtattatgtgggtacagagtattagggttctcgatgaccagaaggagaatgagtgcagtttgtttcctagcaagccttctttagcttctcttc

SEQ ID NO: 226776 - DNA, 122 bp, Homo sapiens
cagaaagttctactggacaatgcagctctaggaacttactaccactcataaagcacttagcgcatattgccttgcattattatttgtgtactatcttacctactaaatttaaaaatcatata

SEQ ID NO: 226777 - DNA, 122 bp, Homo sapiens
agggactaacaccaagaaggccctccaggcagtgtacagcatgatgagctggccagatgacgtccctcctgaaggctggaaccgcacccgccatgtcatcatcctcatgactgatggtcaga

SEQ ID NO: 226778 - DNA, 122 bp, Homo sapiens
tcttttggtgggagcagagccccagagccagaggacctgcctgcttgcttggcagtcccccgagcagacacaatttaggaacaggaaaccctagagaaacctgagtcaggatgctgtgggtc

SEQ ID NO: 226779 - DNA, 122 bp, Homo sapiens
tgtgctgtgctttccagagacaccaaagatccagcaagccccggtttgtgtcgagtgtcacgggaatggagatgccttaaggctccggcttggacggcctgttgttcgcgtgctgagtgcac

SEQ ID NO: 226780 - DNA, 122 bp, Homo sapiens
caggcaccttgctctcctccgttccctgagctcaggtggcataggcgttgccgtgagctgcggagaaatctccacgcagagtcgcctgttgataaccctccagttaaaacgttcttggcagc

SEQ ID NO: 226781 - DNA, 122 bp, Homo sapiens
cactcggcctgccacacagccgtgtccttcaccgaggggtagtagacctccacatagttgcggatgagctgcaggtgcagcgactccagcttgcgcttggccgcaaagccacaggcactgca

SEQ ID NO: 226782 - DNA, 122 bp, Homo sapiens
atcctgggatttgtagttcccggccgcggagccgggccgcccaggtgctgggagaagaggcgccccaggccggggcagtaccgctccccttacagcagttcctcgtcttgttccttccaggc

SEQ ID NO: 226783 - DNA, 122 bp, Homo sapiens
gctggagatttcgcgccaaacctgaccaatgaacggcgcctctccaagagccccagcccacggaaagggatttcgcgccaaatgcaaagcccttctggagaaagcccatctgcctttgcgcc

SEQ ID NO: 226784 - DNA, 122 bp, Homo sapiens
gctgactagctggacagggcataaactaactctctgtgtcaggagagctcctgaattcttcggtgtagagtccagagctgagggtcagtagattctagtcactagaccaccaggtctgactg

SEQ ID NO: 226785 - DNA, 122 bp, Homo sapiens
ttgtgttccttgaggcaagtcgtgaagggctctcatcactgggccttatgccaaacaactcgttacaaaagagctaaggtcccagaccgccctgaagcttcataagacctctccttgtctgt

SEQ ID NO: 226786 - DNA, 122 bp, Homo sapiens
gaaaaagactaagaagagttcttggtggtattaaatgttttgtgatattcgacaccttaacgtctctgacttgacaccagtactcccgcagagagttctttcctgggttaggaatttcagag

SEQ ID NO: 226787 - DNA, 122 bp, Homo sapiens
ggggagagatggggagagctcccgagggatttcagggtgtggattgaggtgcttctgtaacgtttgtatcgccctcccccctcctttcctacgcgaccccctccgtcatcccttgccccgca

SEQ ID NO: 226788 - DNA, 122 bp, Homo sapiens
tttcaggcctctccttacacatcacttctttccaaaaatctgccttgacactccaggtctcggtttcctaggtgtaccctataactccacccctttcatagcatttctcactctggctggag

SEQ ID NO: 226789 - DNA, 122 bp, Homo sapiens
tgttttgtggagggtggcggttgaggaaagcaggtgatggtgatgacgctaactccccttcgcgttaatgggaccattcattttaattggacttagtgttgcaaccaccttcttataaatta

SEQ ID NO: 226790 - DNA, 122 bp, Homo sapiens
aagtccttcaccaactggataaattggagttcgtttccttccttgagaatctccgccccgcgcacaagctgctcaaacagattccgcatattcagcatagtagtatccatctttttcagtca

SEQ ID NO: 226791 - DNA, 122 bp, Homo sapiens
agctacttctgtcctttcttccagcctcctgctaccaaagaggctcaaacttctggtggccgccagcgtctgtgactgcttacttcccttccttccctatatctctcactcaaactcctagt

SEQ ID NO: 226792 - DNA, 122 bp, Homo sapiens
caaagtctcctttgaaacaggaaattgagacacgccggttgtgaaacctactgaagtgagcggcggcgccaggattcctgggaccccgacctctttgcagctcgcacagctaagggcgaggg

SEQ ID NO: 226793 - DNA, 122 bp, Homo sapiens
ttgctcacggtccagctggtctccccgcagctgctagaccccaggaacttctggagctcccgtccttggagcctcctctcaggaagttagatgtggcactcagggttagttggctctgaatt

SEQ ID NO: 226794 - DNA, 122 bp, Homo sapiens
agtggcaagcaggaaactgttgtgtggattttccacactactcattagaaacgcagccagcgatgtcctgccctgtgtaacctacggattcacgaagtgtcgtgggggccacagcgtttgat

SEQ ID NO: 226795 - DNA, 122 bp, Homo sapiens
gaaaaaaatccatgattaaaagcttttatattaacgggggaacctctgaccagaaagagccgacagggggcgttcctggatgatctggggctgtcaattgcgagacgcggaggattgtggga

SEQ ID NO: 226796 - DNA, 122 bp, Homo sapiens
caacaatttcacagctctgatgatcagaaatgatgtaatggccacaggcggctccgcctgcgtcatccatgatttcatcacacacctcgggaggctcagggtgacagacagtgcatgcaagg

SEQ ID NO: 226797 - DNA, 122 bp, Homo sapiens
ttacaaagataggaaaagacaaagccaggcttagaacccaggcaatctgacttcagcaaacgttcctttaattatttcaccctacagtctactgcaattagcttagcacacatgtgataaga

SEQ ID NO: 226798 - DNA, 122 bp, Homo sapiens
taacattcacttaggagttttgttccctggcacacaccagtgctttgtcatgtagaggttcgctcatttgtataggtgatgttactttgaaaaagttgtctctaaggtctgctcagtgaaag

SEQ ID NO: 226799 - DNA, 122 bp, Homo sapiens
gggaccgaagggcaggagagcgagaggacttgtccccagaggtggagtccgaagtgggggcgccccagttgacccttcgggacaaaacgtgacttcagccttaaggatctaaaaccggccgc

SEQ ID NO: 226800 - DNA, 122 bp, Homo sapiens
gcccggcacctcggcggatctcacctgccctgacccgcgagaggagggaggacgcgcggccggtgcaggttcccccacaggcacatactcctaggcctccggaaggttgaccgcaggctcgt

SEQ ID NO: 226801 - DNA, 122 bp, Homo sapiens
gcgcgttttttgttctgttttgctttcaagacaggtctcactctgttgcctctgctggagcgcagcagttgcagtcatgactcagtgcagcctcaatctcctgggctcaagcgatcctccct

SEQ ID NO: 226802 - DNA, 122 bp, Homo sapiens
ttgtgcaacctgttttgctgtaagatctgctgctgctggtctcggatcatctgactgtgccggtcgtcgtcggcgaggctggtgcccgatggggaagtggtgctgagctcagatcctctctc

SEQ ID NO: 226803 - DNA, 122 bp, Homo sapiens
cgcaggtgacagccgaagttcatttcgtggtctgcttctttcctgtgtgaccttgcaaaacgggcttgacctccttatttatcgacctctttatcttcttagtaaattgaagatattagtcg

SEQ ID NO: 226804 - DNA, 122 bp, Homo sapiens
agctaaaaataatgaggggattcacacatctcagtgtcaacacacacaacacagttgacacgccccttaatcctacagctacgccatcaattctcgccgccgggtccgtccgcttgtcagtt

SEQ ID NO: 226805 - DNA, 122 bp, Homo sapiens
ggccagacttgggacctgtcacttggaaaattctcttgatctccattccccttgtgagggcgggcccacagaagggcaaaccgtcccgggacgtgcccccttccctcgccacctgccaggga

SEQ ID NO: 226806 - DNA, 122 bp, Homo sapiens
acacagcaacctcagcctggagctcgggccgctggagtctggagacagcggcaacttctccgtgttgatggtggacacaaggggccagccctggacccagaccctccagctcaaggtgtacg

SEQ ID NO: 226807 - DNA, 122 bp, Homo sapiens
gggagctccacgctacttttactctggggggcgtggtctgctcttggccccgcctcggggcggggctgggatagcccagactcggggaagtccctgtccaccgccctagccggagctgcgcc

SEQ ID NO: 226808 - DNA, 122 bp, Homo sapiens
gccgcggactagagctagctggatgcagcttgggatcccggcctcgccaccgcctggtcgcgcgacacaggctgaaccctgcccaaccctaaggtggacaacaggccaccggttcccgagtc

SEQ ID NO: 226809 - DNA, 122 bp, Homo sapiens
cagtaaaaacttgggagcaaccccgatgactcatctctgagttgtctcaacagtgtgttccgggaactggtagaacaaatggaatctttcaaaggcccgggtcgcaagaagctcacagccca

SEQ ID NO: 226810 - DNA, 122 bp, Homo sapiens
tttgggtggatatttggagatgattctaacatgtttagaaaaaagcttattttagattaccggaaaactgttggtgatgcagactattaaaacttgaagtcactctaatgagtttctagttt

SEQ ID NO: 226811 - DNA, 122 bp, Homo sapiens
catgcagaacgagtccccgaaaagcaccgccgagcccgcgacagtaggggtcaacacccgcgggaagtagggctatcggactgagtctacccccacagtctaaattccaacagtgacctcca

SEQ ID NO: 226812 - DNA, 122 bp, Homo sapiens
tgaaaaaccctgggaagcctggaggcctttgtttgtgttttggtgtggtgattgttttcccggtcatgaggcagagggatcatttcagtatcacagggtcagcggtggcctgtgctttttac

SEQ ID NO: 226813 - DNA, 122 bp, Homo sapiens
cttgagccacggagagatcagacggtggtccccactcctcagcctggagcctggcagagacgctcaaggaagagggtgggctgaccgcgcacgcctctcctttcttcatatcctgcgcggct

SEQ ID NO: 226814 - DNA, 122 bp, Homo sapiens
gccaggcgggtcgcgggtgctggagccgcctgaggactggaaccccctgaggacaggagccgcctgaggactggagccccctgaggactggagccgccctgaggactggagccgcctgagga

SEQ ID NO: 226815 - DNA, 122 bp, Homo sapiens
tgcccctccaggtgtgctgtgacgccatctgcaggtgcagggagctcagatctcctttcccggagctgcgcctctgcatgtgttccctttcgggtctcattccctcccccgatatgtcaggt

SEQ ID NO: 226816 - DNA, 122 bp, Homo sapiens
ggggcttgggttggtgctgagaccggagacacactctgctgtcacatccttcagggtccccgggggccagcacggagggccatgatcatgtaaattgggacttaaatttaactctatgtaaa

SEQ ID NO: 226817 - DNA, 122 bp, Homo sapiens
attttaagaaattgctacaggcaccgcaaccttcagcaaccaccaccctgatcagtcagccgccatcaacctcaaagcaaggcgctgcaccagtgaaaagattatgactcactaaaggctca

SEQ ID NO: 226818 - DNA, 122 bp, Homo sapiens
gcgcctgggtcgggtgggtgacgccgagagccagagagatgtcggatttcgacagtaacccgtttgccgacccggatctcaacaatcccttcaaggtgagcttcggccccagcatctcctgc

SEQ ID NO: 226819 - DNA, 122 bp, Homo sapiens
gcgcccggcttcccacgcccgccggcccggctcgctcaccattggagcggctgcccgactcgttcttgcagtagccgcagcggtagaagtcctcgctagggaaatagtccacgacgctgggc

SEQ ID NO: 226820 - DNA, 122 bp, Homo sapiens
cacgtgggcagagtcgttgccatgacaccgcgggcaggtgggcggctctggcggctgtttcggcccaacccccatgctcacagcccaggtgggaggggagcggctgcagcaccctggcccct

SEQ ID NO: 226821 - DNA, 122 bp, Homo sapiens
gttttctaagccaatgaagcacatccctgaatgtacaagagaaaagtgatgcttgctcttcgtctgcagctatgtgcagccaatgtcctctccatgagctgtgccacaggacaagtttcccg

SEQ ID NO: 226822 - DNA, 122 bp, Homo sapiens
tagagatttaatgaggacaatattaagtgcgtggagaaaccagaaccaggagcagccctgcgtgtgtggagaaaccggaaaccaggcacggccctgagcgtgtggagaagccggaacccagg

SEQ ID NO: 226823 - DNA, 122 bp, Homo sapiens
catttaagggaaaagccacagcagagtgagctggctgtggtttttcttttactctgtaaccggcccactttcccttgttttaacacagaaaaagactttggactccttcagaccaaccacat

SEQ ID NO: 226824 - DNA, 122 bp, Homo sapiens
ctactcctaaatgtaaatgtcataactccctttgcagctccatgtgtgtgcctgtgtctacgttttaaatttattttgcataattcacactgtgcagtccactgttgactgagcatgtagtt

SEQ ID NO: 226825 - DNA, 122 bp, Homo sapiens
gggcggggcgaggggcgggcctggccccgagcagctgaagcctggggtcagcaggcgctgcgggcgcagctccggtgcaagcgaggacacgacacatgcagtggcttctggactgcgcgatg

SEQ ID NO: 226826 - DNA, 122 bp, Homo sapiens
cactggactgaaagttaaaacagtctgcccaattcaacccaaggaatgtggccaccctagcgacaaacagcctgcagtcctcaatcaaaaacctcctttctggcctcgatctagggaaagag

SEQ ID NO: 226827 - DNA, 122 bp, Homo sapiens
tcttgtaagttttgagtttttctagttaagtgaccaatacttaagggaaaaaattgctaacggatgactgatcggcatcaactgtggaaggttttgtggtttgaattgcagtaagatgactt

SEQ ID NO: 226828 - DNA, 122 bp, Homo sapiens
ctttgcctggtagagaatacaggctagaggggtcctagctgtgacccaagtggtgttgctcgtgtgtctatgaaaaagccatgggatcaacctgatagcctgtgccttgtgaagcttgaggg

SEQ ID NO: 226829 - DNA, 122 bp, Homo sapiens
ccagattccaccagatggtgtgttgtgggcagaggaatctacctttttaacaaagatccccggggtttctgatggcccaaggcttgtcctctaagatggcatttcagggccaacccctgcct

SEQ ID NO: 226830 - DNA, 122 bp, Homo sapiens
cctttcgggcccatgttctgtcagaagtgtgcacactaacccacactcccctccaccacccggacttcgaggtccctgcccgccattcagaggggtgcacgccacccttgacccctgaccct

SEQ ID NO: 226831 - DNA, 122 bp, Homo sapiens
tcgggcagtaggaaaaggagtagacacaggatattcccctctcgcttctttttcttctgccgctgagggcatttgttcctttctggaaaataccacttggtaaggaggagggttatttggat

SEQ ID NO: 226832 - DNA, 122 bp, Homo sapiens
tattttaaaacataagaacgtcattttgggacctatatctcagtggcacaggtttaagaacgaaggagaaaaaggtagtttgaaccttggtaaattgtaaacagctaataatgaagttattc

SEQ ID NO: 226833 - DNA, 122 bp, Homo sapiens
atcatctaaaaatctttctccaacacaatggtaaatgatctgaagtgctttgcttatctccgctcatgcctcactcactctcctgccaatcttgttcgccttttcaaatcttcctcctcaag

SEQ ID NO: 226834 - DNA, 122 bp, Homo sapiens
aatagaaatcagggaaagttgtggggaaagtcatttcaagtaaacagattcaaaagcgctcgacagcccctcggcggctccgctccgaataaccccaccgcggtcagcaggtttcggagcgg

SEQ ID NO: 226835 - DNA, 122 bp, Homo sapiens
cccattggatgggcatcggaccaatggcgggctgcgaaacgggaggggcgggcctcacagcggggcggggcgcgcctgtgccgtgtcgcgtgccgagccgcgagccccaggcaggccaggta

SEQ ID NO: 226836 - DNA, 122 bp, Homo sapiens
tccccgcgctccgggggccctgatggggagagtcacagccacctgaagccgtttcctgagcggtggctgttgccacaaggaggactctgccctcctcttcatgtttctggatcatctggata

SEQ ID NO: 226837 - DNA, 122 bp, Homo sapiens
agcctcgggccccgcggggctccccggggctccagcctcccagatggtgcaagtggtccccgcaggagctgggcctggtgttatgacccctcagggcctgccctccatccagattgtccaga

SEQ ID NO: 226838 - DNA, 122 bp, Homo sapiens
ttgtcaaccttaagatctctgctttgacgttaatgcaggtcagctgtgcctggatttcaacggaaggcgggtataaggagcctgtcccacccccacttcccatcacggtctgaactagtctc

SEQ ID NO: 226839 - DNA, 122 bp, Homo sapiens
accgggaacaaggcggcacttcgtcccgcccactccgcgtttagaccaattgcaaggcagcgaacctgaccgtgacgagccaatcagatcctgaggaaagttgaccgcgatagagtccttcg

SEQ ID NO: 226840 - DNA, 122 bp, Homo sapiens
gcagttcctggagagtgcaccattaatagagtagttagccagtactgttttgttgtccctcggagtaaaagggaaagtgaagcaagagaacagagatttaatactacatattttttcactca

SEQ ID NO: 226841 - DNA, 122 bp, Homo sapiens
gggaatggggatcagggaagggggctccggagaggcctgaagcgtgtgggggtaaccatccgcctgctgacattagggggagctacagcacagctttgggggctgagatcagaaaaggattt

SEQ ID NO: 226842 - DNA, 122 bp, Homo sapiens
aaggaattgggggtataaaaaaatttctggagcatacatgtataaaggttcacggcatgccgaaagacaaagtcaaaggagcattcacaatggagctggcatccttttgcttcaaaatgaga

SEQ ID NO: 226843 - DNA, 122 bp, Homo sapiens
cagcgggtgtggaccggcgcaggtctccatggtccgcagaccgagctgtcagtccggcggcggctcaagccgcgccagcctagcaccgctgagcaatgcccccagaccccagagccagcggg

SEQ ID NO: 226844 - DNA, 122 bp, Homo sapiens
gaacaccctcaccacgtaggtgctgcccctgtccccccggagcctggttcctaagcagggcgcctggtgtctgcatgcgaaaaaatataagaggaaccggcccaggtcctctgcccagggcg

SEQ ID NO: 226845 - DNA, 122 bp, Homo sapiens
cagccccacccggcctgatctcggtgcttgttgaaatcctgggcgcatctcatcctcctgcgagcagggaaagcgcccccgtgggcgtgtgcacctcaccggggtgctgaccaccaaggact

SEQ ID NO: 226846 - DNA, 122 bp, Homo sapiens
cccctctggcctgaaagatcaagcctattgctgggcatggccaggtaaggaaactccaaccgtggaaaggacattccagggaggtggtgctgagataaggggggcagaaagagacaggtttg

SEQ ID NO: 226847 - DNA, 122 bp, Homo sapiens
cagcaccgacgatgcatggctcatgtagacaccacacaccatattccctatcagcactgacggacgcatggctcatctgtagacaccacacaccacattcccgatcagcaccgacagatgca

SEQ ID NO: 226848 - DNA, 122 bp, Homo sapiens
ttgtttatttttaattattttatttaatgtggttatgaagatactgtaaatgacatgtgacgcttgcattatatttctattgctcagtactgcacttgatgctcccaggagatacaggagat

SEQ ID NO: 226849 - DNA, 122 bp, Homo sapiens
tctaatgcacctccgcatccccggcacgcaggacccggccgggctgccgcctctcagaatcgctgtgcaattggcgattgcgacattcatggaataaattccccttcgcgacacatggggac

SEQ ID NO: 226850 - DNA, 122 bp, Homo sapiens
tcacttctcggacggggcggccggtcagagacgctcctcacctcccagatggggtggtggcggggcagagacactcctcagatcccagacggggtcacggccaggcagaggcgctcttcaca

SEQ ID NO: 226851 - DNA, 122 bp, Homo sapiens
ctaaatagttccaagtcctttgccctaatacacatatacacaccccaagaggaatgattgcgccagactctatgatctcatagcactttatatctctacgataatattaatgtatattttat

SEQ ID NO: 226852 - DNA, 122 bp, Homo sapiens
aagacacatgaaaagttgtgaaaacaaccccaagtgcacttacaccttacataaaaaaagcgaactgaaattggtggctagggatatttgtcttcaaacaaagcagtcttctcagttgcttc

SEQ ID NO: 226853 - DNA, 122 bp, Homo sapiens
tcgtgaactcacgcgtccacgcctccctcttccggggcaatcccctcatctatcagctgccggattttctggggggtcccttctggggagcgaactactgcaccccaattcttttcaacccc

SEQ ID NO: 226854 - DNA, 122 bp, Homo sapiens
atgggaaatgcagtctacaaatgtgaaagtaaatctgcatcttcttgattcctatgaatacgtaagtgaaaagcaattctcatgcaaattagggtctgtattattgcttcagggattttttt

SEQ ID NO: 226855 - DNA, 122 bp, Homo sapiens
tacgtggcgccgtctgtcctggacagcatcaaggagggcttctccttccagcccaagctgcgctcacccaggcgcctcaacagtagcccccgggcccccgtcaggtactgagggacgtgggg

SEQ ID NO: 226856 - DNA, 122 bp, Homo sapiens
accctcctcctcgccccgctcccggcaccgccagaatgcacgttacgcacggcgtgcaaacgtcacttccgtggcctttggctcaggacgggaggaggtgtggatccaaaggtggcgcgtgc

SEQ ID NO: 226857 - DNA, 122 bp, Homo sapiens
ctgctgccaccccagagtactgcagtggacaggtccctgcccagagccggcaggtgttcacgtgtgtgctcccatgtgcccccggaggtgaaagtgtgaacatgtgcctgggctggtgccct

SEQ ID NO: 226858 - DNA, 122 bp, Homo sapiens
ttccgcctccctcacagaaggcagtcactgcaacgtgcgtggcctcagttgcgtcatatccggcccttgcgatcagggcttgaggaacccgcgccatgaagtgcgtgtttgttaccgtaggg

SEQ ID NO: 226859 - DNA, 122 bp, Homo sapiens
tccctcaccacagctgaatcccagccttgatgcagagagatggagctaagtgcatgtggccggactttggcccttttcagaatcttgcaaccacagggccaggctcagagattgtgcaaact

SEQ ID NO: 226860 - DNA, 122 bp, Homo sapiens
cgctctacacgcaggcctccaaccacaccggtctgtccggatctccctccccgtcagtggcggctgtccccaccacgcgcggtctgatccgccaccccgcccccacagcccacttttcccag

SEQ ID NO: 226861 - DNA, 122 bp, Homo sapiens
ccaggtgaagaagtccagtgaatgcgggtaatgccctgggctgccgaaagagatcaatgacgggtagagaaattcaattcccccgttaaggtgcaagacggtttctcccatgcaggaccgag

SEQ ID NO: 226862 - DNA, 122 bp, Homo sapiens
gaatcacgtgcttttgttgtccagtcgtaaatcctgcctgatgacctctagaggtaaactcgtgcactaataggggagttgggtggaggcgaggggggtggcgcgcgcgccccgggcgcgtg

SEQ ID NO: 226863 - DNA, 122 bp, Homo sapiens
atgctgccttaagccttatgaggtcgccatggaaccgcaggtgagggtctacttgaactccgtagctttcgctgtggagctacaaactggaggacaagcgcaagcccttgtcctccctcatt

SEQ ID NO: 226864 - DNA, 122 bp, Homo sapiens
cggcggtaggagctgagacgaagctgggtggcagtccgcttggggatccgagggggtccccgcgcggaggggtcacccgaggagtttgcggggggactgcaggggcccactttccccttctg

SEQ ID NO: 226865 - DNA, 122 bp, Homo sapiens
gaccctctttccctacagaggggctaagaccggcatgcactgcgcgtgcgggggtgggggcggggtaggctctagggacttgggcaaaattactgaagctaggagagaaacaggacgaggcc

SEQ ID NO: 226866 - DNA, 122 bp, Homo sapiens
ccagattccagacagcaagcacatcaccatggacagagccctgtctgtgcccagagagggcgggaggaaaaagccggccaaatgccccactgggcaggcagtgaggcaggagggatcagagg

SEQ ID NO: 226867 - DNA, 122 bp, Homo sapiens
ttcattactcctgcgtgtcaacatatacaagagaaatgtgtgtacaggtcatccattactcggaacagcaccgagccctctctcttcacctccctttgttgatgagccaggagccataaatt

SEQ ID NO: 226868 - DNA, 122 bp, Homo sapiens
ggctccggctccggctccggctcgcgatccggggccggtttctaaggctccggacggcgccggcagagtctgtcttaaagcgacagcgcgcacagccaggttccagcagtccctgcgccagg

SEQ ID NO: 226869 - DNA, 122 bp, Homo sapiens
tcaccaaaatggatgggaactggaggcggggctccaccgcgggaggttgcaggaactacccgagtaagggctgttgcatataagggctgttgcaatgcggggccaccaaaggccaaagctcc

SEQ ID NO: 226870 - DNA, 122 bp, Homo sapiens
tccccctaagagatgggatctttgcctaaaagttactgagaaacgaaggctgcaaaaagccggaaaatatcccagcttttaaggcacactgacagccaaacagaacgctctttccgtttgca

SEQ ID NO: 226871 - DNA, 122 bp, Homo sapiens
aggcagttgggtgtcatggtgtccaagtagggccagtgggagatctccaagaccttgagtcggtacagcctcttgaaggagtagtcccggatggcattgatgttgaggtgccggagcctcag

SEQ ID NO: 226872 - DNA, 122 bp, Homo sapiens
caacatgatgaaaccctgtctctacagaaataatacaaaaattagccaagcatggtggcacgcacctataatcccagctactcaggagatcgaggctgtactgagccatgattgcaccacta

SEQ ID NO: 226873 - DNA, 122 bp, Homo sapiens
cagaaactcagagcgtccgacgcctcgcgtctgggcggtcgtgcccgttcactcacacgccgctctgagtggtttggcgaacctcacacgtgactccctgggcccttcacccctcctgccgc

SEQ ID NO: 226874 - DNA, 122 bp, Homo sapiens
tacaacctgtgactgaaatgcttctgtccttggccagtagatcttccagcatcttggggacgatggtcagcgtatagcaggtctcagagaaggagagtgcactaaggaagagatacataggg

SEQ ID NO: 226875 - DNA, 122 bp, Homo sapiens
gtggggtcctcgcgcgccgggtcctgcagagttgagggggtcagcgccgggtggagttgccgacgggcggggggcgtcactagtccgcgtaggcacctccggggtccgcaggcgaggtgggc

SEQ ID NO: 226876 - DNA, 122 bp, Homo sapiens
caatttatttattcactgagtcattcagacttttctgtggtagtaaaataaactgaaaatcgagaagaattttgccaggcgaatgagaaacacccttgattttttttgcagttgtataagtg

SEQ ID NO: 226877 - DNA, 122 bp, Homo sapiens
atttaccagctggttgcttaacctctgctttttgtctgcctttgaatatacatacagcttcgggcagtcaaaggaatcaatactgccatatattcctatcactgagcatctgcgtttatagt

SEQ ID NO: 226878 - DNA, 122 bp, Homo sapiens
gcaggcgaggagagggatcaggcagccctccctccctcggtcacagtcacggggcggcctcgggccagacaggaggagatgacagacgacaaccagacggtaatatccaaggactatttaca

SEQ ID NO: 226879 - DNA, 122 bp, Homo sapiens
gctggaggctgaggagggcctggatgtggagcctcagataccgagtgcttcccttcaggccgggccgcttgctcagagccagcacacagggatgcccggatcacgggggccctgagagggtc

SEQ ID NO: 226880 - DNA, 122 bp, Homo sapiens
cccccgcgccctcacactgtatcatccttcccctctcgccttcccgcaccgttccccgcacgcccacgcggctgcccagcagaccccaccgcggtcatgggcagtgcccacgagaagccgcc

SEQ ID NO: 226881 - DNA, 122 bp, Homo sapiens
ggggagccagtccggccctccgctctgggaccagccgccccgcctccctgccctgctctccggactctcaacttacccgctccaggaggcgggagtactgcttcaggccagagccgaaaggc

SEQ ID NO: 226882 - DNA, 122 bp, Homo sapiens
ggaggtgtgactgaaccaagaggtaaaatctggccctctgaatagactcttaataggtttcgtggctaacaggtattgaattcaaaagggacttcttttgatgcaaattgagagctgttggg

SEQ ID NO: 226883 - DNA, 122 bp, Homo sapiens
cgagaccagcctggccaacatggtgaaaccccatctctactaaaaatacaaaaaattagccgggcgtggtggcagaagactgtaaccccacctacttgggagcctgaggcaggaaaatagct

SEQ ID NO: 226884 - DNA, 122 bp, Homo sapiens
aaccatggaagcgccccagcagtgtggaggtgcgcctgcgagacttctgcgcttgggacccgtaaagtttgttcctttcgccagactgcggggtgggggtgaggggagaatactggaagctt

SEQ ID NO: 226885 - DNA, 122 bp, Homo sapiens
taaaacttggggtgggaagactgttcatgctgggttttctctgggagtgagacctcaggacggttttggctgtttctactaggaacacaaactaaataaaccaggccctctgtagcaagggc

SEQ ID NO: 226886 - DNA, 122 bp, Homo sapiens
ctgactgagccaggactccgtggctctggttcaaagacgccccacgagttgccggggctccgtgctgagcaagtcgagaggaggtgagaaagtcaaacagactgtcaatgccgcctcccccg

SEQ ID NO: 226887 - DNA, 122 bp, Homo sapiens
actttatgaggatcataaggaagggaatgacctctagacagccgccttctaattgtgaaacgggggaagatcttggacctggtctctggagcgctccctatcttaaccaagtcacttactct

SEQ ID NO: 226888 - DNA, 122 bp, Homo sapiens
cccaggacctcactgtcaaatcctgtcatccttgtctttaaaaactgttctttttggtctcgtggggtcacgtccctgtactctgttttacaatatggtagtttaatatacaatggggaaat

SEQ ID NO: 226889 - DNA, 122 bp, Homo sapiens
ggggagggggaaacctgtcagtgttcattccacaagcatcaccgctcttgagtttcagcccgagaaagcagtgtttgccatgtgacccatgagatgccaacccccaccttcctccctcctgc

SEQ ID NO: 226890 - DNA, 122 bp, Homo sapiens
gtggccagcgcagcgtgctgggggggccatggccccgttgccaggcagcgcctccctggacgccagttgccatggaagccgcttcctgcccatgttgccagggcgtccagatggcctcgagg

SEQ ID NO: 226891 - DNA, 122 bp, Homo sapiens
tttcagacttgccggtgtgtgccaaaccatgaattcaaaatcttgaactacccgatcccacgggactaaggcaggagggggtcgcagggggcctggtgctggaagtccagtttgcaaataaa

SEQ ID NO: 226892 - DNA, 122 bp, Homo sapiens
atatcaccccggagcactggaacccgcccccgcttcttgttttggcactggtggtgcttgcggtgaggtccaaggagcccagcctccctgagtggaccgccgggcccctccccgttccggga

SEQ ID NO: 226893 - DNA, 122 bp, Homo sapiens
agagtcgaatgctggacaaagtagatgggtcttgaatctgtggaaaatggagaattattgcggagttattggcaggggtgtaatattgtcagatttacatattagaaagaacactctataaa

SEQ ID NO: 226894 - DNA, 122 bp, Homo sapiens
cttcttggctgccactgtgtccagcagagggcaaccttatccccattctttgtcaaatgccgtaggacagtttgaaagcgtagcttaaacataagaaggaggtgccaagaacaagaataaaa

SEQ ID NO: 226895 - DNA, 122 bp, Homo sapiens
cttgggagaaggggcgccagcctctcctggcctgctgtgcgctctgccaaagtcttcgctcgaccccgcacatcttgctccgttccctagtccagatcccagctggaggggccagctgcagc

SEQ ID NO: 226896 - DNA, 122 bp, Homo sapiens
tgtggcttcctcgtcccctctacaaaagcgcacaggcttggccagatgacggatctaagccggcctccaagactactcacccgcatcaggtgcagctcccggaatttgcgcagtctctgttc

SEQ ID NO: 226897 - DNA, 122 bp, Homo sapiens
gccgtctcacaggtgcacgtggctgtgggccgctccaaggtcaggctctatgtggactgccggaaggtggctgagcggccccttggggagatgggcagcccacccgctgcgggcttcgtcac

SEQ ID NO: 226898 - DNA, 122 bp, Homo sapiens
tggtggcctgagaaggctcttcccgcagaaacagcctcatcccgagagcgctggcaggaacgcagatcagaggcctgggctagatgggaccagttttcacgactctgctagatacggtgaca

SEQ ID NO: 226899 - DNA, 122 bp, Homo sapiens
aggaagtcgccggcctcctcgctgctctggtggaagctgtaggcgtggcggaccagcaggcggccctgctggcgcgcccccaccagcaccgtcttctggaagctcacgcccgccgcgtcgcc

SEQ ID NO: 226900 - DNA, 122 bp, Homo sapiens
tttttgaaccagtaggcgctttcttcatcagcaggccctgattcttagaatcaaaatgtacgaagctcaacctgtaaatgtgtaattcttgttaaccttgatgtgccatcaagtttccttaa

SEQ ID NO: 226901 - DNA, 122 bp, Homo sapiens
tttgggttttgtttagagtgtgttcattcattcaatatttcttgagcacctaccatgcaccgggccccattctaggaatgaggctacagtggagatcaggacagagaagccctcaagaggct

SEQ ID NO: 226902 - DNA, 122 bp, Homo sapiens
acaggcccttgagaagccccagcgtgctgcctttgaggccaccctccaccaccatcttcccggtgtgctttcacccccgggcccactacccggaggagctgcaacccttactcgctggggag

SEQ ID NO: 226903 - DNA, 122 bp, Homo sapiens
tttagtgctttttttttctattttattttattttatttattattattttttttaagatggcgtctcacactgtcaccaggctggggtgctgtggctcactgcaacctctgcctcctgggttc

SEQ ID NO: 226904 - DNA, 122 bp, Homo sapiens
ggagctgcatcccggaagtctcctgctgtgagggctgacttccctattgctccccctccacgttcagctgggtctgtgcccattgattctagcatcgctggggttctcccctagccggaaga

SEQ ID NO: 226905 - DNA, 122 bp, Homo sapiens
gccgcctggcactccttgttggccagcatggtgttgcggtcgcggcctgccaggcactgccgcagagtgcggtagcgagagctgcagttggattcggcggcacacagctcattggcccggac

SEQ ID NO: 226906 - DNA, 122 bp, Homo sapiens
ggaataagaagagagggaagagaaacgttaaaacttggggacaaggtgctttttgggatccgacaggttcccgaattgcccgaagtccaatactctccaggctcccaaatttcccctcttcc

SEQ ID NO: 226907 - DNA, 122 bp, Homo sapiens
tcttgctcagctgggcttcagtgacagagactggtgacatcttcctaggaagttggtgaccggagttgaaacaatggccagttccccaggagacttggcttaggaattggtctcctagaatt

SEQ ID NO: 226908 - DNA, 122 bp, Homo sapiens
tttacagaacccccagggctttgagagaacgggcagagccagcaaggagctcgggagtctcggcctagggaggaggtggtgcagatttgcaggcatcggtgccccacagacggcgagcaggc

SEQ ID NO: 226909 - DNA, 122 bp, Homo sapiens
aggggtagcatggagcaaagactggtgataggggaaaaaactcattcgccacgtacaatccgagtggcatgaatagggtagggccttggttctgatgatcacctctgaaggttggtaatgtg

SEQ ID NO: 226910 - DNA, 122 bp, Homo sapiens
gagccgtcgccgggcccggtccgactccgtgagtcgcggccggccccgcgcctttcggcccgctgcgccctcctcggctgctgcctccccgcccgcgcccgcctcagcctccgcctccgcct

SEQ ID NO: 226911 - DNA, 122 bp, Homo sapiens
tctctctctctcgatttctctctatgttactagcaaccactaatgaccagagcctggatccgttaattcttctgtgaaaaaaaattactcctcatccactatttggttacctagtggtatag

SEQ ID NO: 226912 - DNA, 122 bp, Homo sapiens
ggtgatccgcctgccttggccttccaaagtgctaggattacaggtgtgagccaccatgcccggcctagtcataaaccttttaaaccaaaagggatgttaatagggtgctcatttcacacatg

SEQ ID NO: 226913 - DNA, 122 bp, Homo sapiens
gccaaattgttttagtagctgttctgggtggtacatatattgctcacgaaattagaaaatcgtaaagttggaaaaattgtgatgtggggatagtcataggaaatgtgactcaggaggaaagt

SEQ ID NO: 226914 - DNA, 122 bp, Homo sapiens
ggctgtcctcggcctgttgagcgcgtgggcggccccgccgctccccgacccccgacctcacgtcttttatctacttcggggctgcaaggaggtgggcagcgggcctctccccgccccccggt

SEQ ID NO: 226915 - DNA, 122 bp, Homo sapiens
tgcaggctcttattatgaggcctagccaatggtaagtgctttataaatgttagctattaccgtgttgccatttgtataaaaccctcagaaacttttcactgtccacaggattgagtccaggt

SEQ ID NO: 226916 - DNA, 122 bp, Homo sapiens
ccgcgtgcgtcccgggacacagcgtgctgtgacctctgtacagaagccccgccgcggaagcgctcaccttgtctacagggggtcaaggaaagcagggcactagaaccaagcacccagatgac

SEQ ID NO: 226917 - DNA, 122 bp, Homo sapiens
cggcaccagctcggtgggcggcggggacggctgcatggcgtggggggccaggagccggagcgccgcgaggacagaagccgggccgcgcgtgcggccacgccgccgccgtctgggcaccgagg

SEQ ID NO: 226918 - DNA, 122 bp, Homo sapiens
aaaaattcccagaaattaaaattaaaatcccacaacattatccctccattttaccattatcgtttggattgaatggagcctagtgtgtggctgggagggaaagcaagttgtccgtctatgag

SEQ ID NO: 226919 - DNA, 122 bp, Homo sapiens
gaaatgaacgctgctttccccctcaaggctggagggaacgtgatgcaggcagtggagctgcgggctcggccccgggatcgtggggagagagagccccctgccgagcgcggaggggcgccctc

SEQ ID NO: 226920 - DNA, 122 bp, Homo sapiens
catggaatcagtagtagtgctgacactcatttttgacttgatattctttcacaaacaaaacggcatataaggaaaacgagtcttatgctgtaggatggaatgatcttatagctatggaatct

SEQ ID NO: 226921 - DNA, 122 bp, Homo sapiens
aaaaacatttaagaacttccatagtcttgttcatattgtttacctatcttctacacaaggcgtgtccttgggtaagttatttaacttcaatttaccttacctgtaaaatggaacaaataata

SEQ ID NO: 226922 - DNA, 122 bp, Homo sapiens
agtatgcaacaccctaaccagcatcaaagggtgtacccaactcaatctgcacagcaaatgcgcccaaccccacacaccccgcggggtgctaaccgagtcacggctcgaggcctctgggtcct

SEQ ID NO: 226923 - DNA, 122 bp, Homo sapiens
ggctaccgcccgtcctggcctttaggtgcttcgactgagacagtttggagtatgggattccgaagggactcggatgctcctcggtggccctgccatcggtcatggggcgggcattttgggcc

SEQ ID NO: 226924 - DNA, 122 bp, Homo sapiens
agcaggcgagtgagcaaagcttcatctgtatttacagtccctccccacggctctcattaccgcctgagctccacctcctgtcagatcagcagcagcattagattctcataggagtgtgaacc

SEQ ID NO: 226925 - DNA, 122 bp, Homo sapiens
ggccacaggcaccccgtgaccccgccccggttctccagacagcaggtgacccagagtccccgccctgcccggcgcagctgctgccgggacccagccctcaccttccggctcctcatgagtgt

SEQ ID NO: 226926 - DNA, 122 bp, Homo sapiens
agattcttgctttgtctgtctccatcctttcgaccacctccagaagctacaggaaataaacgctctttccatcctggtccctttgccacccacaaatacggagaagttgcgtctaggtaaat

SEQ ID NO: 226927 - DNA, 122 bp, Homo sapiens
cccggctcctttcccggcccgtccagaccgcgtctcccgatcatccggaaagccacggctcggctcgggggcaaatggaggcgcctgaaaaacaatggtgttgctttctcccccgcccgcac

SEQ ID NO: 226928 - DNA, 122 bp, Homo sapiens
aggattagtttttcctttcccaatccatgttgacaaagtgggtcataaagatccgtagatcgtttgcccagatctgccctcaatctgcgaatcagcttcctcgttttagaaaatctgaaatg

SEQ ID NO: 226929 - DNA, 122 bp, Homo sapiens
gcgctgcctccaccgtccaagctgggggaaggggcgggcaggggcagcgggctgctttcccggggggaaggacattgccttcgccagtcaccaggaaaaccgtaactgtacacccggaatcc

SEQ ID NO: 226930 - DNA, 122 bp, Homo sapiens
cttgctcagtcctcctgccgggcgggccctgaggatgcaagggacggaggaagtttcgtgcgtgcgcccttcctatagcgcccagtagaactaacagtacctgtctctgtggcgcaatcggt

SEQ ID NO: 226931 - DNA, 122 bp, Homo sapiens
gctggcgcaaaaggcaaaagccgcgccagatcccggatgccgccccctcctctccggctgcgcgcctgattgggcagttctcaatccagcgctctgattggataagataccaagctccccac

SEQ ID NO: 226932 - DNA, 122 bp, Homo sapiens
tctcatcgtgtctaactttgtctttttagaagtaaggtatttttccttgcctgtggttcacgcagaagtggagataatgattgtgttgagaattcagggagagcctgcaagtaggtaataga

SEQ ID NO: 226933 - DNA, 122 bp, Homo sapiens
caaactcctgacctcatgatccgcccgccttggcctcccaaagcgctgggattacaggcacgagccaccacacccggtaactttggtattttttatagagacatggtctcgccatgttgccc

SEQ ID NO: 226934 - DNA, 122 bp, Homo sapiens
actgcctctccgtctgtcaactgctgctgctccagaataaacaggcagccgggcttctcgcggttgtggagaagcagcccatgctacacagaagaactgcagttgctaaactggccgcatac

SEQ ID NO: 226935 - DNA, 122 bp, Homo sapiens
gcgagttcgactgcgggcgccgctctgcgaggtcacacggctgcgcccattgcagagtaccggacaggagcggctataatggctgtggaaatcactcttggccacctcagtgcctttctctc

SEQ ID NO: 226936 - DNA, 122 bp, Homo sapiens
gctcctcctcccagggaataaaattacaagtctctccagctttcagatgattgatccccacgaacccctgggagtgagcgccacaaaggagtccccttctccgcccctgcctcgctgccctc

SEQ ID NO: 226937 - DNA, 122 bp, Homo sapiens
cgtgagggccagattcagctcggctggtcaggggagattccaggggctgggaggggcgttcgtgggcagtggcttcgtggaccccagtgggactttgtggtggtctgtgcagcgcagccagg

SEQ ID NO: 226938 - DNA, 122 bp, Homo sapiens
tatgatgggaagaattgagtcctgtctagaggtttccttgacatgcacttcccaccttttcgaggctgagatacctggttcttagataggctatcttcattcaggaaacaaacgtgactccc

SEQ ID NO: 226939 - DNA, 122 bp, Homo sapiens
caagagcacaacatgagttgaaggcagaaccaggcctacaactcaggaccactgcttatacggtctcttcatttcagcttaggaagtggcaccagggacggatgctggaagaccttgactgc

SEQ ID NO: 226940 - DNA, 122 bp, Homo sapiens
ggccagcacgtccacagccggcactgtccttccaggtcggaggagcggccggtgaagaagcgcaaggtgcagagctgccacctgcagaagaagcagctgcggctgctggaggccatggtgga

SEQ ID NO: 226941 - DNA, 122 bp, Homo sapiens
gagagtcaggggacggccaccagatggccctgtggaccgccgcccgacccccgagcaagccgtgtgccccgagggcccgacccaagatcacacagctctctgccactcactctgggtacgtc

SEQ ID NO: 226942 - DNA, 122 bp, Homo sapiens
cactcgactctaaggagtactgctctctgtgacgtcagcacccagcacagggccctggcacgtggcaggaactcagtgcgtggtgaatgaacgactacatgaatgatcagattatacacagc

SEQ ID NO: 226943 - DNA, 122 bp, Homo sapiens
gtgagtgccctggctctgtcccgtcagggctggcagtctgggccagggtgtggtttccagcgtcaggccaggctctgctgtctcgcgagggtccggcctcaatgctccaggccccggcgttg

SEQ ID NO: 226944 - DNA, 122 bp, Homo sapiens
tctctaccaacaaacaaaaacatacttggaacccaagaggtaaaatctcacacaattcttcgttcaaaaaaaaaaaggccatcacgtgtttatggcaccattggaacaccaaagatctatat

SEQ ID NO: 226945 - DNA, 122 bp, Homo sapiens
gcccataccgcagtaggctcctcgggctgcccctcggtgagtacagttttgatgtcggctcggccgcctgccgccaacccgagatttggtattgccagttgtgggagggcgtcctgctaaaa

SEQ ID NO: 226946 - DNA, 122 bp, Homo sapiens
ctctcgcacagagctcccgtcctccgttcctggtcttcctcctgcccctcctccctctcccgcatcccacatcctcggagacccgcggagaatagaagtggaagggccactccgtcttggtc

SEQ ID NO: 226947 - DNA, 122 bp, Homo sapiens
aggtgctcggggtggggtcaggaagggccgctgctgccctcctgtggccaagcggccacccgctcctgctgcacctgggacctcgcgggaagcgggactgggaaagggtatccgccgggagg

SEQ ID NO: 226948 - DNA, 122 bp, Homo sapiens
gaccttcctcccctgcctttctcttccaggaggtttactagaactccaggaactccaaaacgcgacttttctttctctttgcttttcgtcttaagggaacacggtgggcaaaagaagggagt

SEQ ID NO: 226949 - DNA, 122 bp, Homo sapiens
ccctgctggccacaggccggccccatgaggggtccaaggctcaaagtgatgggcctgggccggggccctatctaagggatgggtggttagagttgtggagagagttatgtaggggacatagg

SEQ ID NO: 226950 - DNA, 122 bp, Homo sapiens
agtttgcacctctctggttgctcaacagttcactgaagcctgagtcggtggatgggtatccgacctgaacttgggtgggtaattccagaaagttttcacaggagtgaggcagaagacagaaa

SEQ ID NO: 226951 - DNA, 122 bp, Homo sapiens
aatgaaagaacagcgatgtgactgcagtgcgacacctgcctctcaggacacggcagacggcgaggtcagccctgcccaagctgtttggaattcattccgctctgagcttcctcaactttcac

SEQ ID NO: 226952 - DNA, 122 bp, Homo sapiens
ggatggagggcggggctgcggatggagggcgggccggggaccttaccacgccgtcctcctcgcgcaccacgtactgcgccaccttgaaggagctcaggtactcgttcatgttctgtagctcc

SEQ ID NO: 226953 - DNA, 122 bp, Homo sapiens
tggggatgacaagagacacgttacctgtcctggatgtgtggggtgagccttgaagcccttcggctgcactgaatcaccctcagggccttgcaggtaccagccctctcttctttttccagacc

SEQ ID NO: 226954 - DNA, 122 bp, Homo sapiens
gggctgggggcttggacagctagaggttccgggggtggggggcgatgacgcacagatttgcgcaaagagaatccatcagagagctgggtccggtgaagggagaccagccgtgggcgggggtg

SEQ ID NO: 226955 - DNA, 122 bp, Homo sapiens
gatgtgtctgaaaagtgtggtgagagctgtgttccctgcgcatttctgaaggctcctagccgctgcagttgccgggagccatggagccacgtgaccttgaggtccaccggggagaggagggt

SEQ ID NO: 226956 - DNA, 122 bp, Homo sapiens
aggaggtggttaggattttctctcatatgtatcatgattaatgattacttgttaactctgcggaacataggaaagagtactagttacagaagggtaataagtaacatttaaacccgtatacc

SEQ ID NO: 226957 - DNA, 122 bp, Homo sapiens
tggttactagaaaatttaaaatttacatatggctcacattttatttcagaaaattacctccgttctaaaatttcagacggcctgctgaaagaccagaagccgggaaggtcataaaatccgaa

SEQ ID NO: 226958 - DNA, 122 bp, Homo sapiens
gcgagtgaagccgagcgcggaggcgagcagggacccctcccctgcctctggccgctggggcgctctgcagtcttaaagcagcagcagagacgtgcagccgaactgaggcaggaccggggaga

SEQ ID NO: 226959 - DNA, 122 bp, Homo sapiens
acagcatctgtgctcggcccggctgacctcgctgggtgctggcctgtcgggcagggacaccgctggctgagccgagcttgtcctcatcacgttctcagcacctgacagagcaggaggcctgc

SEQ ID NO: 226960 - DNA, 122 bp, Homo sapiens
ggaaggaggtactaactaggaaggagatgggaactgagggaccaggagtactgttatctccgtgtcgtctttttatagaggtgtctctgtcacactgagctgggaataggaagggaaagagc

SEQ ID NO: 226961 - DNA, 122 bp, Homo sapiens
attgtcacgccttgaattttagctttccagttcaacagtccgggtccttacggaaagggacgcctggagtttttagactgccttatttgataggttaatgggtgacagtagattaatgcagg

SEQ ID NO: 226962 - DNA, 122 bp, Homo sapiens
caggactaagtggggcggcggaagggcgcaaggaggagctcttttgtttccagcgccttgcgtctcagtgcgcctgtttaaggatagcctcagagctccgcccaggctacctgctgttctga

SEQ ID NO: 226963 - DNA, 122 bp, Homo sapiens
agcttagtttgtttctccaggaagccgtgccaggctcgcctccctctttcattcttttcccgtgattccctctactgggactcctgaccctcctagtcgccagatcacaggcccaacgcatc

SEQ ID NO: 226964 - DNA, 122 bp, Homo sapiens
aacagcgcagtgcttgtcctgctgcagcactccacaagcatctagacacaaaaacctctgcggctgaggtggatttttccatgaagctaggaagctgagaacccagaatgtgtgaggcccct

SEQ ID NO: 226965 - DNA, 122 bp, Homo sapiens
agcgctgttcccgggcgtggcgctgcttctcgccgcggcccgcctcgcggctgcctccgacgtgctaggactcagggacgacaacttggagagtcgcatctccgacacgggctctgcgggcc

SEQ ID NO: 226966 - DNA, 122 bp, Homo sapiens
cgcccagtttcacccctttcatttgtcccgggttgcttaatagaatctgctgggaaggggcgaggggctgagaaggaagaggaaggaggagggaagagggaacaggcaagaggggaggagga

SEQ ID NO: 226967 - DNA, 122 bp, Homo sapiens
cggcttctgcacccttctctccttccacgacatcaaattccacagtctcctcatctccaacgctgcgcagaaacttcctgggcttcttttaatagctgtctggtgaacaaagacatcttcct

SEQ ID NO: 226968 - DNA, 122 bp, Homo sapiens
caacccctaaaattgctgtcttagctagaattaccataatcaaattgcctcctcccttagcggttctcagataggaggaagtggtttgaacagagtgtacttatttccttcggaacttgtag

SEQ ID NO: 226969 - DNA, 122 bp, Homo sapiens
ccaaggcttttctgaagccctgcttccggctggcgactttgaagctgagacgcaggttcacgcgcagtttccgaagacctattccgtccccaccctcctccccttcctcggagacacctcca

SEQ ID NO: 226970 - DNA, 122 bp, Homo sapiens
aaaacccagcatggatttcatcttggggatgctgtggttccagttctgacactcaagaaacgacagacggagagaagaacgaggaccacctacgaaaagagctcgagagggaagcagggacg

SEQ ID NO: 226971 - DNA, 122 bp, Homo sapiens
tgttagcagtggctgctatgaaaggtccacagtctaaactcactatcagaatggcagaaacgcaggacttctggaaactctaccatcatcagaggctgtcctcttgtcctatgccctacaaa

SEQ ID NO: 226972 - DNA, 122 bp, Homo sapiens
tgcacggggtctctgctcacacttactggagccaattgtggcagattttagtctacaagtcgcttttccccctatttctctgtaaacttcagcattcttacagaaatatttacagtccttag

SEQ ID NO: 226973 - DNA, 122 bp, Homo sapiens
tcaaactcaagatccagtctttaatttatcctgcccttcagcctcttgatgtagatttaccgtcatatcaagaaaattcaaattttctatttctatccaaatcactcatggtcagattctgg

SEQ ID NO: 226974 - DNA, 122 bp, Homo sapiens
cttccctgcatcccaagcagcccttcctgaatacccctgggagggtctgggctaggggagcggtccgcgatctcatccatcaccaccagactcctttgtaacctcgagcagccgaagtgttg

SEQ ID NO: 226975 - DNA, 122 bp, Homo sapiens
tatcaaaatagcttcctttccctaatattggttttcttaattcctcactgaagctttctccgaaggagaattactggaagattcagccagccttagtctcttcatacttggactcagttgaa

SEQ ID NO: 226976 - DNA, 122 bp, Homo sapiens
gcacatacccttggatccccacagtttggtcctcctcccagctacccctttatagtatgacgagttaacaagttggtgacctgcacaaagcgagacacagctatttaatctcttgccagata

SEQ ID NO: 226977 - DNA, 122 bp, Homo sapiens
ggtgtcctgaccctcttgggacgctgaatgcctggagctgtctcgtgcctgctcgtggtgcgatccttgtcttcctccagtgctggtcccggtccgtccatgggcagagtcaggctgttcat

SEQ ID NO: 226978 - DNA, 122 bp, Homo sapiens
ggtgtgagagggagtgcacggacgatgaggcagcctggcaggagagccactagaggctctcgtgtttcctgaaaatccccccacccaaacctcccccagggacctgggatctgaaataagta

SEQ ID NO: 226979 - DNA, 122 bp, Homo sapiens
ggttctttcaaagcatgtattttctgaagaaactttagaaccacgtttattttaaaagaacgaattggagaaaacaaatcggtgagtgactacctcatggctgagttaacacttctctgacc

SEQ ID NO: 226980 - DNA, 122 bp, Homo sapiens
gaggcgaggccggaacaggccgatttctagccgccaagtggagaacaggttggagcggtgcgccgggcttagcggcggttgctggaggaacgggcggagtcgcccagggtcctgccctgcgg

SEQ ID NO: 226981 - DNA, 122 bp, Homo sapiens
ggggacacgactgccccagcaacttgcaggagtcgcaccacctccatgcacttgtcccggcgctcccggcccgagtagcctcccgcagcccacacctgccctggcagttcgcaccctagcag

SEQ ID NO: 226982 - DNA, 122 bp, Homo sapiens
cagcagcaggtggtgctactggcttcttggtgacctctgcacggctcagttcttctgtgacgcaccacccccccgcgttgtgactgcctccctgtgcacatgaatattcatctgtgaggctc

SEQ ID NO: 226983 - DNA, 122 bp, Homo sapiens
gcggttgccgtaggtggctcagcagacgtgagcagggcaggatcgggcccatccccccaccgggaatgtcaggccaccatcaggtgatggtcaggtggctgttaactgtctaaaagaactgg

SEQ ID NO: 226984 - DNA, 122 bp, Homo sapiens
tgcagttgaaggtggcgtcgtactggcccatgacatcgtagtagccgtggcagagctcggcgggagggggcgcccgggccgccgcgcccgccccgcccgcggggccggtcctggtgccgttg

SEQ ID NO: 226985 - DNA, 122 bp, Homo sapiens
ctccggaggccatgggctacccggaggtggagcgcagggaactcctgcctgcagcagcgccgcgggagcgagggagccagggctgcgggtgtggcggggcccctgcccgggcgggcgaaggg

SEQ ID NO: 226986 - DNA, 122 bp, Homo sapiens
acaatctaagtagtcattcaaatcatgccttgtacactgctatttgttccaagtgaccagcgagcatttttaaaaatctcttatttctgtcaagttcttcataaatctttttggcctttcat

SEQ ID NO: 226987 - DNA, 122 bp, Homo sapiens
tctgtaccctctcccctctccctgaagctggatacagtcctactcccgcttggggagcagcggaagagcctgtggctccctacttctgactcgggagatcgtgggctgatcctaggtgggaa

SEQ ID NO: 226988 - DNA, 122 bp, Homo sapiens
ttcccagcctttcctctgcattggtgccctccccaggaggcatctgagctgcaaaaggggcgaatgcgatgtagacacttgggccccgggactcgcctgtgtcatctgggctgggccccaca

SEQ ID NO: 226989 - DNA, 122 bp, Homo sapiens
agcgcgctgatcgtgctgttccgggggtgttaatcacagtggatcccctgggagaggacacgtccctagtcccatttcacagatgaggaagttgtggctcagaaaaggggcggtaagcggag

SEQ ID NO: 226990 - DNA, 122 bp, Homo sapiens
tctcagttccctcatctgtaatgtgctaataataatggcacctacatcatggggttgtctcgagtactgagttagcatacattgaacacttggaatagttctggcctgtagtcccatagcat

SEQ ID NO: 226991 - DNA, 122 bp, Homo sapiens
tgaacgaagccgtcataggcagtgacaggtcggggatgtgcggggagcccctgaggcaagcgggggctcacaccatactcattcccagttccaggggggcctgaaggaggctgaccgctggc

SEQ ID NO: 226992 - DNA, 122 bp, Homo sapiens
ataaccccaacagacacacaagtgcggaatggcaaagggcaatcagaaacatttgaccatcgttaaagaaaagatatgagttaacataaacctgcttccagatccttcagcggtttcagaca

SEQ ID NO: 226993 - DNA, 122 bp, Homo sapiens
caactcgcgattatgacctgagggtcccattggtcgctgcggcgcggggcacgttgggcccgccccggaactaccgctcccatgacaccccgcgattgtgattcggggcgccattggtctgc

SEQ ID NO: 226994 - DNA, 122 bp, Homo sapiens
agttgaggggtcaagcaaaaaaaatagctgaaaagaatctattggaattagttacatgaacgtcaccagtgacactgataataaagcagtttttggacagatggaggtggagaggttggttc

SEQ ID NO: 226995 - DNA, 122 bp, Homo sapiens
gggaccttaatgctgcttcagcatccttggtctgggctgatgtggtccttcagctcttcccgggtttcttctcatcagcagcttcttaaatatgctgtcttgaatctagttattgccactcg

SEQ ID NO: 226996 - DNA, 122 bp, Homo sapiens
cgtcgggccatctcgattcccgactctctaggaaggctgcctttgggaattgccaggtcacggggtcatgtgaaattagcagagtgtctggagcacctgcagagagatgagcaggctcagct

SEQ ID NO: 226997 - DNA, 122 bp, Homo sapiens
agaatttttctttctctaacactctaaagaaatgttcttgagctaggaaaggattactcgcgcctcgttagaatcagacatggcttcaggggatgcaggacgctcccctgagctgcctgtca

SEQ ID NO: 226998 - DNA, 122 bp, Homo sapiens
agacaatcttagctgggcctcagcctcccaaagtgctgggattacagacatgagcaacggcgcccggcctcaagtggtatcttctctgcttcacagctcttgtggggttttttgtttggtat

SEQ ID NO: 226999 - DNA, 122 bp, Homo sapiens
atcttggccccacacagccccatccttccctctggcccgatccactagggatgcactcaccgctggccttggcagcctgcacgcacaggtcctcagccaagtggtccccaaaggagaaagat

SEQ ID NO: 227000 - DNA, 122 bp, Homo sapiens
cccagaacccgccccgtatccccgcactgacctcacgtcaccgccccgcccccgcgttaccgtcccgcccgcaggacgcatctccaacgcctcgccccgccccaaggattcgctcttgcgtc

SEQ ID NO: 227001 - DNA, 122 bp, Homo sapiens
ttgctaatcatctaggggcagggacaacctctctgtttttgattctcactgcctaggtcacgggggccacttatcaaatgctggataggtgaatacatgatatatgcatctcatacatgaac

SEQ ID NO: 227002 - DNA, 122 bp, Homo sapiens
cgtgatccgcccacctcagcctcccaaagtgctaagattacaggcgtgagccactgtgcccggccctgcagctatttttaaaataaggaataagtggggtgtggtggctcatgcctgtagtc

SEQ ID NO: 227003 - DNA, 122 bp, Homo sapiens
accctcaaacagagtcacaggaccgctcccctgaggtttagcatcagtctttaatgctgtcgcacttcattgactagtcacacactttggtctcatgttggcagtggcaacttacaatgagt

SEQ ID NO: 227004 - DNA, 122 bp, Homo sapiens
gagacggtttaaagtctcacaatcaccttagaggttaatcagaataactgggatcagccacggacacctggtgagcgattagcccgcagagtgactacaatcctgaaagatacttgagaaac

SEQ ID NO: 227005 - DNA, 122 bp, Homo sapiens
ccactgtcttgtattcataggcctgactactacctaaaatattatccacacagagatttgcgtgggcaaagaacaacaatgcagtgggaggttcttaggacatatgggaaaacgggtctgtt

SEQ ID NO: 227006 - DNA, 122 bp, Homo sapiens
agcgtcccaccagcaggagccacagcaccgctgtctgttcccaccgatgcccagtgtcagcgtccactgagtcgcagctcccctctacactgggtgtgcccgagcttgctgcatgggaggaa

SEQ ID NO: 227007 - DNA, 122 bp, Homo sapiens
ctgcctatccagggccgagaatgtgcatttctaagtagttctcaggcggtgctgatgctgcggatctggggactgtactttgagaaccaccggtgcagaccctggccaacgttctttagtct

SEQ ID NO: 227008 - DNA, 122 bp, Homo sapiens
cgcgcccgtggcaggtgtgaggtctgtggagcccctggcaccagcgtggggatggtgacacgcgtggcacgggcgtgggcaacgtgggtccggcacaggcggcgtggttttcctggaacggg

SEQ ID NO: 227009 - DNA, 122 bp, Homo sapiens
aataaccagatgttatcttcatcatcacactagagcactgtaaaccacatcaaaacaaaacgaaacaaataacaacttccctggccaccaaaaatagatggcccagccagaaatagtgctgc

SEQ ID NO: 227010 - DNA, 122 bp, Homo sapiens
tggagtctggagggacggctggagtggagtgtgtgggacctgaaggtggtcgtaaggctccgcgtgcggctcgtgcccatggcgactgcgcagaagacaggcggggttttttttctccctct

SEQ ID NO: 227011 - DNA, 122 bp, Homo sapiens
ttttcagtagagacggggtttcaacatgttggtcaggctggtatcgaactccacccacctcgccctcccaaagtgctgggattacaggcatgagccactgtgcctggccagagcccaggagt

SEQ ID NO: 227012 - DNA, 122 bp, Homo sapiens
cccaggtcccaggttggagaacacttcctctgcgaagaggtcggggctgggtcacctccgcggacaggacgggactagccactgcctgcatctcttcccccacgccctgagccccgcagtgt

SEQ ID NO: 227013 - DNA, 122 bp, Homo sapiens
ctcccgagttgagcagcctctgcaccagcgtcttggccagcacggtgggtgtgaagagcacgggccggcggcgctcgcagtagaaggcgcgtaccaggctgtaggggatgaggctgaggttc

SEQ ID NO: 227014 - DNA, 122 bp, Homo sapiens
tccaccgcctcctctggctccccggtcagagggccggagcgagaagatggcgaagacgtacgattatctcttcaagctcctgctgatcggcgactcgggggtaggcaagacctgcctcctgt

SEQ ID NO: 227015 - DNA, 122 bp, Homo sapiens
tgcccagcctcatggcttcccccaccagcaatgtcccccctcccagtgcccacgccataccgcttatcattccagcaaacacaaagttctctcgggcagggagggggagccaggcacctggc

SEQ ID NO: 227016 - DNA, 122 bp, Homo sapiens
cccggcgcaccctctgcagctgctggcccgggtgctaagcccctcactgcccggggccggcggtgccagctgtctgctctgagtgcagggtccaccgagcccacgcccacccggaactcgtg

SEQ ID NO: 227017 - DNA, 122 bp, Homo sapiens
gctctgcctctggaccctgagtggaagggctcaggtgggctagtcaaagctctgtggtggcgctgtttgtggaagatgagctcacagagctggagttctagaaggccctccgttggcctgga

SEQ ID NO: 227018 - DNA, 122 bp, Homo sapiens
aaaagaaaaaaaaagagaaagtaatagtaattgatggggaattccccacagaacaggcagcgcatgcaagtttgtttttatatagacaggatacaagaattcaactacaaaaccatggctga

SEQ ID NO: 227019 - DNA, 122 bp, Homo sapiens
gaaaagtccaaatctgttggggagggttttattctactattgatgaaaggggatgtggatcgcagctagccttagaatttgggatggcactcaagtagaagtctgggaagaagttacgcagg

SEQ ID NO: 227020 - DNA, 122 bp, Homo sapiens
caggctccgctcccccgtacgccgccttccggggcgctggcccccatatccgcccacgtgcgccccagtgcggagaccctgccctcaccaccacctggatcaggccttccttcttggccact

SEQ ID NO: 227021 - DNA, 122 bp, Homo sapiens
tctcactgacctcaagaataaaccgcggaccctcgcggtgagtgttacagttcttaaaggcggcgtgtctggagtttgttccttctgatgttcggatgtgttcggagtttcttccttccggt

SEQ ID NO: 227022 - DNA, 122 bp, Homo sapiens
cccctaaagaatccaatccaacacagaaataattgccagatacagtcatgcagcttttaccgacacgtttgtagcaatctggaggagactacacgcaaccatctagccaaatcatcccccac

SEQ ID NO: 227023 - DNA, 122 bp, Homo sapiens
ctgcgtttcacctcctttaacgcggaggcgcggagttgcacgtgtgggtctcagtggagccgccacaggtcttattacacaacaaagggcagggagggcaaggccaggagcctcgcggggcg

SEQ ID NO: 227024 - DNA, 122 bp, Homo sapiens
actctagacattcagattcccattttcgactctacaggatacaggttcccaaagtcccatcgaatccatggcaacatttcccccaagtcctgcccctgcttgatcagctttcctttcccact

SEQ ID NO: 227025 - DNA, 122 bp, Homo sapiens
ggtgtggaaatgatcttgatccgggtggtggctccacgggtgcgtgcagacgaaaaaaaacgtggaggagccgtgctgtgaagatgagcacgctgaagggtccgtatgctgtacacaaattt

SEQ ID NO: 227026 - DNA, 122 bp, Homo sapiens
gtctacgcttctagagcttgagccagcggggcgaccctgcagtggcaggactcggcaccgcgccctccaccgccggttggtggcctgcgtgacagtttcctcccgtcgacatcgaaaggaag

SEQ ID NO: 227027 - DNA, 122 bp, Homo sapiens
ccctccacacatgctgtgaggccccagaaataagaagccgaaaacactgtacaaacagtccgatcccttcagggcggttcttctccccgggctttggattgcacctaaaatcccctgatcca

SEQ ID NO: 227028 - DNA, 122 bp, Homo sapiens
ctgctttttggggctttttgcccccctaccaccgcggctttttgccccaccccgccgctgcggctttttgcccccgcggcttatcccccccgtcaccgcgggtttttgtgggttttttgcac

SEQ ID NO: 227029 - DNA, 122 bp, Homo sapiens
gaattcccaggaattccaagtctcatgggggagcaatagcctctcggagccccaggtctacggtggacattggacatgttggttttcctgttctcacggacctctttttcttgttctcccag

SEQ ID NO: 227030 - DNA, 122 bp, Homo sapiens
ctgggctcaggggttcctgcggatgttgcagggatcgagtcagccttacagctgatagcccgggtgggttggcttgcctccccacacccagccgcggcgaccgtggaccggagtccacctcg

SEQ ID NO: 227031 - DNA, 122 bp, Homo sapiens
agctcggcgtgggtccgaggctgtggcttcctgtctggactctcacacagtcgtttctatcgtttcaatcacttccaggtcagactgcgagggggagagaagggtgcactcatccggttccc

SEQ ID NO: 227032 - DNA, 122 bp, Homo sapiens
cgcggaggagccgagctggcctgggaggggccgccgagggacgcccgcccccgacgcgcccgggcccccccactcacttggtcctgcagtccatggttacatgtcggtgtggggctgtccgt

SEQ ID NO: 227033 - DNA, 122 bp, Homo sapiens
agggtctacggtaaatgcggcactgcagggtgtctggaatctttgggtttgggagcaggccgcctcctgctaggactactgagaatccaatcccaggtccagcattgccctggggggtctga

SEQ ID NO: 227034 - DNA, 122 bp, Homo sapiens
ggaaataggacttgaggtgcaatttggggcagggcctggggtccaggccagcagctgggccgagtgcgctccaggagggaggcctgttgctggtgtccacgtcaacaaggtgccgggcgctt

SEQ ID NO: 227035 - DNA, 122 bp, Homo sapiens
tcgtgttcctcggttaatatgtagatttcaccattcctgagtgcccgtaattcagggaaacgcagtaatttgataacaagaaaaggtcagcctccctcgctcgacccttagcccggttttta

SEQ ID NO: 227036 - DNA, 122 bp, Homo sapiens
aagcttgccagagcagagccgggtggaaactgtcttcctgcaaagccaggttttccttcacggcccctcctaatgatgtttcttttcctatcattgtcgagcccttagaaccccaggatcga

SEQ ID NO: 227037 - DNA, 122 bp, Homo sapiens
tagagaggtcacactctaagtggggtcgcggcgtggccacgcttcacggtcacgctcgtccgtcctgcagtggcgtgtttacatggtcacacgtgtgtgtatcaccagtgggtcaactgctt

SEQ ID NO: 227038 - DNA, 122 bp, Homo sapiens
gtctggagtggtgggtttgacatgggggccggctcgccaaggtggaggtggggaagggggcgtgtctggtcccctaccccgaagacctcagtagctggaggaatgggcgctccacgctccca

SEQ ID NO: 227039 - DNA, 122 bp, Homo sapiens
accaggcaaggggacttggacaggcttggctgtccccacggcctttaatctgtctctcctcggctaacagagctctctaataaacaaacagcctcagacatcgttctttctaagcaaggcca

SEQ ID NO: 227040 - DNA, 122 bp, Homo sapiens
gcccccggcttcgttaccctatttttgcccccaaatacagctgtgaaaggatggcagcctcggaccgcccgcaaggttcttgctaggcatgaactgcaggagctgagtgaccggcggggacg

SEQ ID NO: 227041 - DNA, 122 bp, Homo sapiens
aacatcttctgtgggtggtgtgcacccgggcaaagaaatctcagtaagccttgattatcacgggatttcttccccctcaaaataaaatgttgaatgtttttacagagacttcaagggcagtt

SEQ ID NO: 227042 - DNA, 122 bp, Homo sapiens
tcctcaccttattcattacactagctgcctaactgatctaccttcttcagagaaaagccacgacgtctatcagggcctaggtggagtttcctctgtgatcttctctaccaccactccttgtt

SEQ ID NO: 227043 - DNA, 122 bp, Homo sapiens
ggatgggttgcagggaatagaaataggttggggccgcagcaagatagcggagagtgagatcgaagctaggacttccaaagagcgaagattgatagatgccagaggttggtgaaggaagaatg

SEQ ID NO: 227044 - DNA, 122 bp, Homo sapiens
cgcgaaccaccatccacagccagggcactacctccccagagccggggagccgggcggcctcgcgtccacctcgccaccatcccccaccccagggtctggcggagaagccccggggcgggggg

SEQ ID NO: 227045 - DNA, 122 bp, Homo sapiens
tcccggaggtccgcatcataggtctggaagcaagggtggcaggccacgcacaccgggtagcgattacagtagcctcgctggcactggtcacagcggggcccggtcaagccagggcggcagag

SEQ ID NO: 227046 - DNA, 122 bp, Homo sapiens
aggcgctgggcagaagctgggctggaccgtagggccgccccggctttgcaggcacacacccgtttgggaagacagctgctagagactgctgcgaagtccggttttccttggagtcccaactt

SEQ ID NO: 227047 - DNA, 122 bp, Homo sapiens
gggacacaggggcacaggctgagcggtgcccaccaaggaggcaggagcagcgggtggaggcgccggggcagactgtccctctcctggaaatggagtgatttacatttggcatctgtttggac

SEQ ID NO: 227048 - DNA, 122 bp, Homo sapiens
agtaaaactgaaactgcctttgagccacaggcttgctggggatgaggtgacaaagctaatcgaggtggcaattggggaaggggttctgggctgccgcaggcacacaggccagagcttcgtgg

SEQ ID NO: 227049 - DNA, 122 bp, Homo sapiens
ctttatatatggacatggcaggccgatttgggaaccaagctattcctttcccttcctcttcggccctcagatgtcccttgatgcacagagaagctggggaggagctttgttttgggggtcag

SEQ ID NO: 227050 - DNA, 122 bp, Homo sapiens
aacctctccgagggagtgctattgtttttcatgtcagctgcattttaaggctacatttcacgtcagctgtgacttggaaggaaagagggcccggcctttgaaaaatgaagaaattgagccgg

SEQ ID NO: 227051 - DNA, 122 bp, Homo sapiens
agtagcacctgccttccaggctctgtcacgtcggctcctgccggagcgaggccttgtctgcgagctgcgtgattattacagactctgtctgcacaaagtcgctggagctgacacccagcaag

SEQ ID NO: 227052 - DNA, 122 bp, Homo sapiens
atctccctcatggccaaggcaggattagggcggcaggagaaacgcgaggaggagcagacgcgcagtgacccagcccgccctccgccaacgctgaaatagccccacgcccacctccctcaacc

SEQ ID NO: 227053 - DNA, 122 bp, Homo sapiens
tcacttaacaagctgggttgttttttttttttaaacccatggcatagtattggaaagaggcgctaatgcataccactgcatgtctagcttcttactgtattatgatgaattaaagctttaga

SEQ ID NO: 227054 - DNA, 122 bp, Homo sapiens
agcagatggcacctgggctgctgctctgtgggtggagctaaggtgcctgggggatgcctgcgcatcatgggagtcctcagaagccatgaactgggctgatttgcttttttaggaagcccctt

SEQ ID NO: 227055 - DNA, 122 bp, Homo sapiens
tattcattccttttgaagatggagttactaagggaagctttacagagaaggtgtcacttacgccaagacttgaagaatgggtaggatttatcagttgaactagaaggaaaggtattccaggc

SEQ ID NO: 227056 - DNA, 122 bp, Homo sapiens
ccgacctctgtgtggcttccggctgctgaccacgcttccctcccctccactcagtgtccccgctgagcacccccggggcaggcactgcccctgcccttattccacagtcgtcatagtctttg

SEQ ID NO: 227057 - DNA, 122 bp, Homo sapiens
ctgttgagccagtaagaacagattctccactgcaccgatgtccggcacgcagtccccaggcgggcacactgcccagcagcccagtggcaggagctcagagctgacttgcttcttgcccaggt

SEQ ID NO: 227058 - DNA, 122 bp, Homo sapiens
ccaaaagacgctgaggaacatcccgagggtcacagggacagtgcagagccaggaccagcccggcccatggtcccccagcgtgcaccacctggcccggcactgtgtgctcagccatgaggact

SEQ ID NO: 227059 - DNA, 122 bp, Homo sapiens
tgcccctaccagccggggactgggcttgtgggtggcggcgggggcccgctggggacgacccgcccctctggcagcctcttgcagccggggagccgtgcccactgagcgcaaacagggagcac

SEQ ID NO: 227060 - DNA, 122 bp, Homo sapiens
cgggggggcggggaggtgtgtgagcgaggctgcgcaggcgcagtctgcaggctctcgggccgccctccctcctaggggaggagcgtgcacacgcgtcccctcccgcgctggtgcgtgaaggt

SEQ ID NO: 227061 - DNA, 122 bp, Homo sapiens
agctctgtctgggtggggtgtggggaatttgtcttgagctgttctaggtgctgaacacctcgagaaagaaggcactgggggatcccatggatgcttcctgagtccccagcctggtactggac

SEQ ID NO: 227062 - DNA, 122 bp, Homo sapiens
tctgtcctgcgcgcagattcgcgaaaacccggaagcggatcgcgtggagtgacggtcccacggcagcgcgtgagtttggctctgtgttgtattaggtctgcacttcccaggtccctggcgct

SEQ ID NO: 227063 - DNA, 122 bp, Homo sapiens
tcattggcacacggcgaactgcgcgtcattaacgtgggcggttcagtgagttctgaggaacgcatagcaggtggatccgtcgccacagtcgggaaagcgagcacggcctctccgaagcctgc

SEQ ID NO: 227064 - DNA, 122 bp, Homo sapiens
caacgccctggcgagggcgaggtggggtgtgcgccgcgcctgagaggcgggtccctgcctcgccgcaggtgacgggctcccctccccaggtgtgtgggcgcagccggccgccgccgacctct

SEQ ID NO: 227065 - DNA, 122 bp, Homo sapiens
ggcctgcagggtcactgggtcatggcccagggcctcttacttccagatccttcagggtagcggatgatccagagccctccgcacagatacctgttgctgactacaagagatgagagtgcgca

SEQ ID NO: 227066 - DNA, 122 bp, Homo sapiens
ctcccatctttgaagtggtgaaaaaaggccctggggtgggggagtggggcagagggctggcgtctgtctgcctgggttagtcttggttcgggagtgtcccgagcaagcctggggagatgact

SEQ ID NO: 227067 - DNA, 122 bp, Homo sapiens
gtgggggctcatgcatgccttcctaataggagatggttttcctcctggggctggaatttacggttacacacaattgggtggaaaggatccaaccatccctgtgtgaaaagggaagctatgag

SEQ ID NO: 227068 - DNA, 122 bp, Homo sapiens
atctcggtttgctgcaaccttcacctcctgggttcaagtgattctcctgcctcagcctcccgagaagctgggattacacacctggctaatttttttgaatttttagtagagtcggggtttca

SEQ ID NO: 227069 - DNA, 122 bp, Homo sapiens
ttcacggaggactcccagactcccagccccaaatgcagctcttgctgctgccccacccaccggtaagagaagcctcaggagaccacagcacaggcagatctagggtctcagagtgagactgg

SEQ ID NO: 227070 - DNA, 122 bp, Homo sapiens
ccgagaaagcggatactgcagtcatctcagctctgtgtaagaaccagaggggcagaaacccgcacgaaggaaaacctgtggtttcaggtggagaagcggcggcgtgaggccttcttcactgt

SEQ ID NO: 227071 - DNA, 122 bp, Homo sapiens
cttgctctgctcgtcctgttgctcctggggcccggcggctggtgccttgcagaacccccacgcgacagcctgcgggaggaacttgtcatcaccccgctgccttccggggacgtagccgccac

SEQ ID NO: 227072 - DNA, 122 bp, Homo sapiens
acgattatgcttttactcagtagaccattacctaaccggcaaaatttgaaattggcttgacgctccttattatttttaattatgtcgtttttcctaatccctggtccgtcaattcccctcca

SEQ ID NO: 227073 - DNA, 122 bp, Homo sapiens
gtctgctcacccgtgggcttcccaccccgaacacaacgaggactgtccaggtgtcagtgacggtcaccccgacctggtcccctgtccggcctcgccaggtcagcacccgccgcgcgcacagc

SEQ ID NO: 227074 - DNA, 122 bp, Homo sapiens
gcgtcgcctacgcatgctctcttagcaaaggctgttttaggcggccttctgctccgcccccgaagctcctgcagggctggcaccttctgcgcctgacagagagcatgtgggctctataaatg

SEQ ID NO: 227075 - DNA, 122 bp, Homo sapiens
cttgactcccacctcagtgtggtccctggtgtctgctcctcagccatcgcatatccggggcggcctgggctcacccggaacagattttttcctccttggatgactccgtcatggacacctca

SEQ ID NO: 227076 - DNA, 122 bp, Homo sapiens
caacccctgtggctcccgagtggcacgcgttcgaccccaagaccctacactcaccatggtcgataagtcttccgaacctctgagctccggacaggctctggaagtgctttagcttctttcct

SEQ ID NO: 227077 - DNA, 122 bp, Homo sapiens
agattccctacgttggggtagggtggctatgggattggttggggacttcctgcttccttgcgctagggctgttggtgatgaccccgccacaaaatctagctcaactcactaggagtttgcag

SEQ ID NO: 227078 - DNA, 122 bp, Homo sapiens
actaacgggctagaagccagggacttcccagatgtacaatgaataatattctctttctcccggaggtcaaaatcttcgccgcctgaggttttatgtatttgactcctccagacagtcatttc

SEQ ID NO: 227079 - DNA, 122 bp, Homo sapiens
agcctcacgctcgacctcttcatgctcggctacttccagctactcgagatgggcctgagccgcgaggagcgcaagttccgccacctactgtgctacgagatgttcgaccgactgggcagcca

SEQ ID NO: 227080 - DNA, 122 bp, Homo sapiens
ggggaagggctgaatgcaggcaccactggtcacgagggcgtgactgggcaattcctccttcggcgggcgcccacctcctggcacccgtggcacagctccgggaacggctgcgggcccagccg

SEQ ID NO: 227081 - DNA, 122 bp, Homo sapiens
atataagcaatatttgttgtattctgttataagagagaacaggctgggcacagtggctcacgcctgtaatctcagtacattgggagcccaaagtgggcagatcgcttaaggccaggagttcg

SEQ ID NO: 227082 - DNA, 122 bp, Homo sapiens
acaaactcccacccagcacagtatttatgtcggtcaaaaatggaaaactatgtgtccgggcgtggccaggaaggaggatcccttcaggccaagagcagcctagcaatatggcgcaaccccac

SEQ ID NO: 227083 - DNA, 122 bp, Homo sapiens
gccgctggaagcgcgccccaattgtcgcgccgcgtggttcgctcggttaaagccccgacccgagggttatcgagctgcttccgcccagtggatacgaacccggactgtcctgagtgcatttt

SEQ ID NO: 227084 - DNA, 122 bp, Homo sapiens
ttggattaactgtccctggacccagcctttgtgcatatgaagttctcttaaaacatctttcgggactagggagtcatttgggctactggaaatttacccacattgaaggcagagcagctggg

SEQ ID NO: 227085 - DNA, 122 bp, Homo sapiens
caccgaagccatctggaagagaactgtcacagagcccgtctcactgtggactcaggggctcgtgggaatgtgtctttggcatcctttttcccaggagcactgcccacctccccgagattccg

SEQ ID NO: 227086 - DNA, 122 bp, Homo sapiens
ccaaagcagtccagaacccccgttgcacattagtgaagcacccgtacagctccttcatggcgctttgcacagggatcattccaattcactgcgggagaagtggggagggatggcctcctaca

SEQ ID NO: 227087 - DNA, 122 bp, Homo sapiens
gttcccctctccaaacttactggggctggggcctgcaggggggctgggggctgcagggggcgtcagggagtagcggagggagtagggcaaggagagaggtgagtggactggtggcgtagcgg

SEQ ID NO: 227088 - DNA, 122 bp, Homo sapiens
cagacagccgccgtaagaatcccatgccaccaacttgacaatctcacttgaagagactaccgaatcaaatttttcttttcttttttcttcttttcttttcttctcttttcctttcctttcct

SEQ ID NO: 227089 - DNA, 122 bp, Homo sapiens
cgagccttctcattatcattccgggagtaaaatgtgtctcgctcaacatagttttaaaatcgttattattattttcctgagcctgaagccgggccaaggcgcaggcagcgcccagggtgcgt

SEQ ID NO: 227090 - DNA, 122 bp, Homo sapiens
gatctatgtacatttcttcctaaacccaaaaggtttgccaagcactgtgctgctttccttcgtgatgagatatgcaaagcacatcttctcatcttatactttagaggagaaaatctgacaag

SEQ ID NO: 227091 - DNA, 122 bp, Homo sapiens
cactctccgccttatttcctccccgccaaggactttacagcccagcacagaattaagcctcggaggtgatccgagggtgggaagcagaggggccccgaggctccgccagaagccccggcagc

SEQ ID NO: 227092 - DNA, 122 bp, Homo sapiens
gcgcgggagaggagaggatatgaacggacgtggaacgaagttctgtctgccaactccctccgtctgattcttggaatccggtggcatcttaaaggacggaattgagggcaaggagaagatta

SEQ ID NO: 227093 - DNA, 122 bp, Homo sapiens
ctcggcggctggggggtgggcggagccgcggccgggcagttcattatgttggacagggcgcgtctgcgcctccggccgccgcggctcccggggcctccgcctgcagccggcggcggaacgag

SEQ ID NO: 227094 - DNA, 122 bp, Homo sapiens
gcaggctccgtggcttgccaagcaactctcactgacaaaagtgtaaactccctgaacagacggcctctccagtgagtagagaggccagccccagggagtacatgcctcaccagcggcttctc

SEQ ID NO: 227095 - DNA, 122 bp, Homo sapiens
ggggatctacagtcttaaagccgctagaggatcaagttgcatagagtgagctgccacggacgcccggccgaggtgaggaagccaggggtgccgtcccccagagaagaagggccacagtgccc

SEQ ID NO: 227096 - DNA, 122 bp, Homo sapiens
ggggtgcggggccgggaggactgggaggctggggttctgctcccctcagggttcctttcccgccgccccgagaccagttccccggcgcggggtccgagtcctgccccgcggcggctgccggc

SEQ ID NO: 227097 - DNA, 122 bp, Homo sapiens
acatgcaaagcaaatggaagaaatggggacatatattttcctagtagtctgtggtggcatcgactttaaccttgggatacctggaataaaatgccttgtgatgggaagaattgagaaattaa

SEQ ID NO: 227098 - DNA, 122 bp, Homo sapiens
ctgccgctgaagattttgatattcggcgtcttggccaactaccagaggcactccgtcgagcgatccagctgccgctgaggctggaacggaagtgaagcacagactctaatggcttccggttg

SEQ ID NO: 227099 - DNA, 122 bp, Homo sapiens
gaaaaaatttaagacatggacttgactgtggattttcattctcaagaccactgcaaacctcgcgtctttgcgaaaacccttcctgactccctcccacgcatctccgacctccccttgggtcc

SEQ ID NO: 227100 - DNA, 122 bp, Homo sapiens
gccttcctggccccctggtgaatttcagagaaaccgccggtcaagcaggctcctccgacccggcttttccgagatggggccgattattctgaagccagaacgctgcgcccctgacccggcca

SEQ ID NO: 227101 - DNA, 122 bp, Homo sapiens
tcctatctaaggggcctgtggagtcacaccctacaaaacataaaatgttatcaaatgggccgggcgcggtggctcacgcctgtaatcccagcactttgggaggctgaggtgggtggatcacg

SEQ ID NO: 227102 - DNA, 122 bp, Homo sapiens
atcccaggaaagaagtgaacagatgggctatgatgtaaaacaaggagacctacttagatacgttttcagagaatctgcctgagacttaaaggatgaaaagggagaagacatttaaaggaatt

SEQ ID NO: 227103 - DNA, 122 bp, Homo sapiens
ggccgggctccgaggcgagaggctgcatggagtggccggcgcggctctgcgggctgtgggcgctgctgctctgcgccggcggcgggggcgggggcgggggcgccgcgcctacgggtgagtgc

SEQ ID NO: 227104 - DNA, 122 bp, Homo sapiens
ttatttcaattaaaaggatgaaaaaaactcctcgttttctaattgattcagtcagccaatcgcctggtggagtctggtttgggttatatcattgggttagttcgtgttacttagtgttctgg

SEQ ID NO: 227105 - DNA, 122 bp, Homo sapiens
aggctccggccaacgggctgcgcagagccgcggcgccggaggtaaccatgggcaggtgttcgccgggtacggggagggggcggctgcggacgtgcgggtccctgcgactccgccacgcgggg

SEQ ID NO: 227106 - DNA, 122 bp, Homo sapiens
gggaaggttttaagctcaccaggccctgtagctgaggtttcaaaatggcagctagctggacgccatctggtctaaatctgctcacccaaacctccctccagttctccaagggatgtccctaa

SEQ ID NO: 227107 - DNA, 122 bp, Homo sapiens
ccctctgaggctgagctgcctgcctcaccagacgccggggtcccctcagatgacacgctgcgttcctttgacacggtcattggagcagggacgccaccgggcctggctgagccgctcctggt

SEQ ID NO: 227108 - DNA, 122 bp, Homo sapiens
tttgaataaacttaggaacagccatcaacggctaccttagatgctgtctcctccctgaagcggtcttcagtgtgtctaaagttgggtgttccctccttaggagggagcgggtgagtgaatat

SEQ ID NO: 227109 - DNA, 122 bp, Homo sapiens
tgagacctttacccgggacgcctgttccctgctggggctttctgtggagtccccccttagcgtcaggtacaacccagccctgtgagggcagcacaggtgggagggtagagaggtaatcatca

SEQ ID NO: 227110 - DNA, 122 bp, Homo sapiens
gagcgggccttcggcgtgagggttgtgtggcaataacctccccgcagcctctcttttctccgtggcgatttatgccgtcttttagtagatgaaaccggctggattcgctatccatctgcctg

SEQ ID NO: 227111 - DNA, 122 bp, Homo sapiens
ctcactcacccgcgcttctcctgagcagggaaagggccaaagcccggcccggatccacggcggttgttgtgtaattctttgtctaattgaattctgtttaacatatttcataaggcacctgt

SEQ ID NO: 227112 - DNA, 122 bp, Homo sapiens
cccgggaaagacacattttcagtgttccggaaggtcgctccgaggcctcaaaaccataatcgggtctcaacagactctgggactttatacgtcgcccggtgtttggcactgagcccactatg

SEQ ID NO: 227113 - DNA, 122 bp, Homo sapiens
gcccgagggagggggcgcggccgggcctgcgggggccgcagtcctcccccctgctcccaacgcggcgtgcccccgcccccctaaaggcccggccttcccggccccgccacgtgcgcgcgtcg

SEQ ID NO: 227114 - DNA, 122 bp, Homo sapiens
ccccagagtcctgctggacacggagtgggtgcctggtgaatcaatgatggtgtgaatgaccgagtatgggagagacggtgctgtgcatctccaggcaagtcaccatccctccctgcgccatt

SEQ ID NO: 227115 - DNA, 122 bp, Homo sapiens
aggaatcatttatttcccactgctgagctgagtgctggcttccaaggaaattccagtcaccggacaggcagcatcctccagccccagggaaggacttaagggtactctattggtacctttag

SEQ ID NO: 227116 - DNA, 122 bp, Homo sapiens
ctcagaggtggaatttttatggtcacccacacggtagtcgatccgctctcctctggaagacggtcacctttcgaggacctgaaaattttttttaggtggcaccccccaacaagccggccgtc

SEQ ID NO: 227117 - DNA, 122 bp, Homo sapiens
cacccagaccaccgcccccaatcaataatggaggcttaaacaaccaagccaccaagggaacgaggatctcaggataccagctgggaagcagcctctggcaccatcaggtggaaataaggtca

SEQ ID NO: 227118 - DNA, 122 bp, Homo sapiens
gggccaaagcgagcccctccctgccgcctgcatgattgggtactatacagccaaaaatagcgtttttagccattttaaaaaggaagatccagctgtagaacagactgatcacgaaagcgaag

SEQ ID NO: 227119 - DNA, 122 bp, Homo sapiens
tggcggtgggctacccttttgttcctcttttaccacctgggttacgtttgtgggcagatccgctacccggtcccagaggagtcacaggaagggacttttgtagggaatgtcgctcaagattt

SEQ ID NO: 227120 - DNA, 122 bp, Homo sapiens
ccaagtccacagaagcgctggtccctgggccctggctctgctgctggttgagttaagcaacgtttacttctaccccatcaaacttttaaacccctcctaaaaatatgtcacttggtgtctct

SEQ ID NO: 227121 - DNA, 122 bp, Homo sapiens
cagaaggtacgagaccgtcagagcctggctttagaagcctggaactagtggagaaattcacgttacttgagactagagaaataatgaacttgggtcagaacaggaacaatcagagaagcaca

SEQ ID NO: 227122 - DNA, 122 bp, Homo sapiens
aggggacgacgaggggctatgtttcagcctgagcctctcggtgggcccggagccggagtccgtccatcaggaacacaagtccccagccgggcagcacagcgaaagctttgggatgctaatgg

SEQ ID NO: 227123 - DNA, 122 bp, Homo sapiens
cacactgtaaggagatttaagtagcttgttgaagggtgcaccgaggacccgacccttcctcggctctccctctggatacaacgtgaggttaggggttggaggctgagaggaccccgtgaact

SEQ ID NO: 227124 - DNA, 122 bp, Homo sapiens
tcaatctctccgcttccggcctccacccggcgggaaaaaactcccgcacgtgggcctccacgattccttggcatgcgtgtcactctgggcaacaggctggtcggccacgactgcgcaggcga

SEQ ID NO: 227125 - DNA, 122 bp, Homo sapiens
aacaccacccgtttatatcgtaatagcgcaagactccggcgcccgaatcacccagagagccgactggccgagccggggcccagccacccaggccgccactcttcgctgattctcaagagttg

SEQ ID NO: 227126 - DNA, 122 bp, Homo sapiens
cctccctggcctcctcgcaactttgagtaaccgcggactccggggtcggcatgggggtggcgccgggcgttcaaaggaaagttgggtgcgacggaccgcagcctcgggggccaaaggacccc

SEQ ID NO: 227127 - DNA, 122 bp, Homo sapiens
ttgagtgaattcaagctccctagtgtggcgttcatggtgtttcatttagttcttccctctcgcctatccacccagatccattcatccatctatccactcatcggtctagaacaagggctctg

SEQ ID NO: 227128 - DNA, 122 bp, Homo sapiens
ggacgcgcctgcccccaattctgccacccggcggcggtgggaggcgtctttggactccaacgcttcgggccagccctctaggggcagcctgggccctagcatctcgcgctgtccaagcctct

SEQ ID NO: 227129 - DNA, 122 bp, Homo sapiens
tctcacaatctcaaacatacggcgttcggtctttagattgcccctttgccctagtcccgacgtttggaagtgaggtacgctaagaggtagcagcttcagaggtctgcgtttcagcacctggg

SEQ ID NO: 227130 - DNA, 122 bp, Homo sapiens
tgctggtgcctctgctggtctcctttgtggccctgtcctagaaatgcgttctcctttttacgtggttcaactgtatttgcaattacaatggtctcccagagcattaagaaggctaggtcatc

SEQ ID NO: 227131 - DNA, 122 bp, Homo sapiens
taaataaagcaaatgtgccaattagcgtaaacttgcggctctaaggctcctttttcaacccgaatattaataaatcatgagagtaatcaaggtccaatggctctgtgtttctgttctacctt

SEQ ID NO: 227132 - DNA, 122 bp, Homo sapiens
cctgcccctgcccctttcctcccacgcatccgcacccgagcagccccacctgctaagccacgccccctgtcctgtgctgtcctgcactcccaggtgccccacgctttcccaccctcccagtc

SEQ ID NO: 227133 - DNA, 122 bp, Homo sapiens
ctgggagggggtgccacgctgacctcccgggagcccctgtgagccgcttctaccagtgcccggatgtgtttgttgggattctgcgccctttgagtgtctcggggctctcctcgaggtgctgc

SEQ ID NO: 227134 - DNA, 122 bp, Homo sapiens
tcatttttcttccatgttttctggcactcagctttataaacacttgctgacccgcctgtacgtgtccagagctctagctggctctggtgacacaaagatgaataagacatggtattttcttc

SEQ ID NO: 227135 - DNA, 122 bp, Homo sapiens
tgaccataccaaaggagatataaatacccccaaagtgatgggatcattttttagtggtttcgctgaaatttgctctaagtgctactgagtagaggtatgcgggaataagaataatcagtttt

SEQ ID NO: 227136 - DNA, 122 bp, Homo sapiens
ctgagaaagccacgcactctaagaaggggatctggtgtccaacgctagacagaaaaccaccgtggaatccgtttggcctcgcccactcagagaagcctggggagctttgcagaagaggaaac

SEQ ID NO: 227137 - DNA, 122 bp, Homo sapiens
catcattttctccaaccgccatgaaatccggcgcatcgatcttcacaaaggagactacagcgtcctggtgcccggcctgcgcaacaccatcgccctggacttccacctcagccagagcgccc

SEQ ID NO: 227138 - DNA, 122 bp, Homo sapiens
ctgaactcagctaatcctttgctttgtcaggcatgagctgaatagacaagcccatggggacgttttttttctagctcgtcaattagaagaaatgctttaaaatctattgttgattttatgac

SEQ ID NO: 227139 - DNA, 122 bp, Homo sapiens
ttactctgtgccaggaactgctctagaccctgtccaatataggagatgagcgcacatgcacgcaaagacatcactataagacaaaatgatcaggccaccacgtgaaaacgggacgttgacac

SEQ ID NO: 227140 - DNA, 122 bp, Homo sapiens
tgcatcgccgcgcgctccggccgggcggcggggcccactgcgggctgcggcgccgcctcgcgcctatccctgcagcccggccgcattctcccggccggctcccgcgctggcaggggcttctc

SEQ ID NO: 227141 - DNA, 122 bp, Homo sapiens
aaattcttggtgtcctggaaagcattctatggaaaacctgcctggtcagccaagcccacacgtgagtctatgcagacatctcctctaacctcgcaagccccaggaacctcctctaacctctc

SEQ ID NO: 227142 - DNA, 122 bp, Homo sapiens
aagaccataattgaacccgggggcgtctaggaaaaccgaaaacagttctagacagacctgcggttttatagcagttttggcagtcaacttcagcttgtgcctgagcagacggggttgtggtg

SEQ ID NO: 227143 - DNA, 122 bp, Homo sapiens
acaactatcgttcatctccaactcccaaaaacaaaggaaattcccatgaatgagagcatccgcagaccaaaagagcagatcctggaggtcagagggcatggtggttccaggaactaggcggt

SEQ ID NO: 227144 - DNA, 122 bp, Homo sapiens
cctgatcagataaaacaagggctgacctagagaaagtctcttgggtcaacatattcttagcgataacagaagatcactccaactgttctacaccccaccctacaacattgaccccccgcttt

SEQ ID NO: 227145 - DNA, 122 bp, Homo sapiens
gttcagtctgcatcccctaaaatcctagggacacgcgaccagtctcccccatctgcattccgggagtttgccccaaaccaatcctgctctccgcgaaaatagccttggggttccctgtcctg

SEQ ID NO: 227146 - DNA, 122 bp, Homo sapiens
ggccgagtcaggcggagaccccctggggtgggtggcgggagcggggccgcagcaacagggcggcgtggagggggagaaacaccttacccagccggcggccccctccagcgtgcagctggaac

SEQ ID NO: 227147 - DNA, 122 bp, Homo sapiens
tcacttccggccccctactgtctagggaaagccggaaatggtaccagccttctttgatggcggggaggagtcaagaccggtagtcttcctatttccgttgttttgctctggagcctcccgga

SEQ ID NO: 227148 - DNA, 122 bp, Homo sapiens
tttccctttgactgcctcaacttcctatgtttgtgttgacatgccagatccttatttctgcggaatgagaaatctcttgagaataaagttttcctaaacagaacaaaagtatcaaatcactt

SEQ ID NO: 227149 - DNA, 122 bp, Homo sapiens
taaaaataccagccatagttcctaacaagggcaaaagaggcgtgtcttccttctcccatccgcccaccctgaattcccgtttagtttgtcacgggtctcttgacaaaaagctgtaaaaaaaa

SEQ ID NO: 227150 - DNA, 122 bp, Homo sapiens
tgttttgtctctttacatctatctagaactccactcttttttttttcctttttttagagacgggggttctctctgttgcccaggctggagggcaatgacatggccttagatcatagctcact

SEQ ID NO: 227151 - DNA, 122 bp, Homo sapiens
ggaggcaagactttggtgggagctgctcgtcttcagcaaagcgagggccggctgcaaaggcgcaggctggcagttcgggtcatttcctgccgattccccattcccctcggagcagcttggag

SEQ ID NO: 227152 - DNA, 122 bp, Homo sapiens
caggatcacgagagcacagcaagtgcacctgtgtagcggatccaaacgcatgcccaaagtcgatcccgatcacgccgccagtctccatggccaccataaagttgttcagatgtctgtctcca

SEQ ID NO: 227153 - DNA, 122 bp, Homo sapiens
ggagagtgctgcctggctagacgctagccctcccagccatcccagctagggcaccagacacgtgagtgacaagccatgtgggaagacctgcccaggtaaggctcaggactccagcttcagcc

SEQ ID NO: 227154 - DNA, 122 bp, Homo sapiens
gtaggaggcgggtacgtgagcgcaccaatctgtggccggcgagcgtaaagggcggggctccgcccaggctgcaccgcccagagcgcgcgtgcgcgagaccggaaacgcagccccctgattgg

SEQ ID NO: 227155 - DNA, 122 bp, Homo sapiens
acttgtccctgtgcctgtcactgacagagggccaagtgctgtcccagagccaggctgctccgtgtttctgacacccatgctagtgtggtccggtccttaatcacctgaggttggggggcttc

SEQ ID NO: 227156 - DNA, 122 bp, Homo sapiens
gctcccgggcgggccggggcaggaggctgtggggcgtggccagcccgcaggtggcggggccgacgggatgggtcagggtgcacagagcacacgccagcccctgggggaagcccggcccgtgc

SEQ ID NO: 227157 - DNA, 122 bp, Homo sapiens
caacttgtttaggtgggtgtgcgtacgagtgtgtgcaggagcgcacagcctcggaaactccgcgaaattttactcggttccagtgccgcactgaggatccaagaccccttttaggaaccctt

SEQ ID NO: 227158 - DNA, 122 bp, Homo sapiens
ggccctgcccggctggcccagccccagggccgcttcgtgtagccggcgccccggtaccgccgtggggatcagcctcacccgagccgcacaggcaccctcaggaagctcggcccggggtccgg

SEQ ID NO: 227159 - DNA, 122 bp, Homo sapiens
cccaccagcctgtgtaccacaagatccagggggatgactgggagccccggcccctgcgggcggcatccccgttcaggtcatctgtccagggtgcatcgagccgggagggctcaccagccagg

SEQ ID NO: 227160 - DNA, 122 bp, Homo sapiens
tctttggggcatggtttcactaaaaacatgcaaaattggtttctctaactctttgggccacgctttcaggaagacccaggaatcctcctctgggtacctcgccatgaagctatttacagcct

SEQ ID NO: 227161 - DNA, 122 bp, Homo sapiens
attcttcgcgctcgggcacacccctccgcagtgaggattggtcgggccgagccccctcggcgaggcgaggctcctaagaggcccagacgcctgccaatccccaagggctgtcaaaacaagtc

SEQ ID NO: 227162 - DNA, 122 bp, Homo sapiens
tctttagccacattggctcataaattacttttggtcaaggtaatgagctactaacaaccacgtctaaattagcaatttgtaattctgttatggaataatgaaggggataataatatgttaat

SEQ ID NO: 227163 - DNA, 122 bp, Homo sapiens
ggcgtcgtggattggcgggcacagggcggggcgggacggcagtgcgggactgagattgatcgaccgcgggggctgccgcgcagagatatccgggccgccggtgggtggtcgctagggctggg

SEQ ID NO: 227164 - DNA, 122 bp, Homo sapiens
tcgcggtcgccaaactacctcaggggcgaaagcgtcgccagcgtcgccggccggccgcggcggcagctctccatgctcggcggaggctgctcctgttagtcaagagttactttgctcgggga

SEQ ID NO: 227165 - DNA, 122 bp, Homo sapiens
cttttgatattccattggccagggatggacgtctatcatctagtcagtccatccttcccacgcagagtaggaacttctcattggccagatgtgttgtcaagtgtggaatctgagtggaggaa

SEQ ID NO: 227166 - DNA, 122 bp, Homo sapiens
tgggccctgcaggtgctgggcctagaccgaccgacagacaggcctggccactcagggccacgccgccgctgtgccgcgcctgccccctccccgcccgccacccccgccactggggcagggac

SEQ ID NO: 227167 - DNA, 122 bp, Homo sapiens
cctcctcccccatcaccacccactgctcctcaccatcccttttgcactgctgtgctcctccgccctcagtccatttgaggaccacgtatgttgaggggctggaatagaatctgctctaagtt

SEQ ID NO: 227168 - DNA, 122 bp, Homo sapiens
ccctgggcgcctggcgcatggggggcggggcggggctcgcggggtgacgtcacagcccgacgcgccacccagctgtttttgtgctcccagctctagcgaaaagccgccggtatttctccatc

SEQ ID NO: 227169 - DNA, 122 bp, Homo sapiens
ccagtcagctgctccagaagaggcagccagcaaaagagctctggagccctctctgggcaccgtgcctcctaaaatttgagcacaggccaatcttgttgcccctcattcttagacggcatttt

SEQ ID NO: 227170 - DNA, 122 bp, Homo sapiens
agggtggggatggaccatgtctctcatctctgcttgtaggtcctcaaggcctgtgatggccgaccgtatgctggggcagtgcagaaatttctagcttcagtacttccagcctgtggggacct

SEQ ID NO: 227171 - DNA, 122 bp, Homo sapiens
cagagaaggtttgttcattcattcgctcattcattcattcattcatttccctcaagcctgcgtccccgcccggtcagcatcgcaggtgttacccaaactctgacggtccctttaagaactca

SEQ ID NO: 227172 - DNA, 122 bp, Homo sapiens
aggaagcaaagggcactggcgtaatccatttccctctgagatcttgggtgctaagtgggtcgatgaaacaggagctccatcctacagaacttactcctggagtctctgttttctgacattaa

SEQ ID NO: 227173 - DNA, 122 bp, Homo sapiens
acctcaggcgatccacccgccttggcctcccaaagtgctgggattacaggagtgagccaccgcgcccggctaaggctgttaataccactttttgtatcagtaagatcatggctggctgtcac

SEQ ID NO: 227174 - DNA, 122 bp, Homo sapiens
ggcaaagagaagggagaggagcctgccctcctctctgcctgagacacagactgggcgtcccgctagcttcctctccccaccccttgatgcctcggcgccctccctgccccctgccgcagacc

SEQ ID NO: 227175 - DNA, 122 bp, Homo sapiens
cctccaacgccaacaaggcaccgacacccagcaaggtaccgacgccgagccaggcaccgacgcccagccaggcaccaaggaggaggaaggcagtgagagtccactccccaaccccaaggtct

SEQ ID NO: 227176 - DNA, 122 bp, Homo sapiens
cccacccccagtgacgagggggcggtcccacgcgtttcaagcccagcgacccgaaagacacgccccacacccaaacgcaagagcgatcccgccctcccattggctaaggcgccaccgtgacc

SEQ ID NO: 227177 - DNA, 122 bp, Homo sapiens
aatgaatgagaagcccggggctgccggtcgtggagtctggcctgaaagtgggtcctttaccggagcaaccttctgcgttccctttttcctctttccctgttccccgacttgcctggggcttg

SEQ ID NO: 227178 - DNA, 122 bp, Homo sapiens
actggcctgacacttttcttttggccaaaataggtcagtgattacttaggcacagtcacacgtggacctgcttccagggcgcttccacaggttaatgctggcttatgtagtttatgtggtgg

SEQ ID NO: 227179 - DNA, 122 bp, Homo sapiens
cgggcgcctcccggcggggtggtgggtaattaatgagggccgggcgctgattggctgcagcgtcgtggccgggggcagggcggcggggtaggttgttcctgaggtgggaggcggtacccgtg

SEQ ID NO: 227180 - DNA, 122 bp, Homo sapiens
aaaaagaaaaaaaagaaatccggtatgtattttacatatacagcatgccgccattcagaccggccacatttcagtgctcagtagacacatgtggctggtggctcctgtattggacaaactag

SEQ ID NO: 227181 - DNA, 122 bp, Homo sapiens
tggcccgggctgcgcgcccccgccgccaccgcgcgccccctgttcgctcgctccttcgctcgccggctttaaagtctctgccaggatccatgctcacatgttacttcctgtatggaggcatg

SEQ ID NO: 227182 - DNA, 122 bp, Homo sapiens
cactcgggacccctgtgtgcctggcctagcccagaggctgctcacctattcattttcatccgtactccaggaaataccaaaaagaaggggtcctggaggagagagatgggctgccgtgggta

SEQ ID NO: 227183 - DNA, 122 bp, Homo sapiens
gcctacgcgaccaccgcgacgacagcgccattcaccccgggccaggcgggcatcctgggccgcgcagctaccttacgtcagccgcctctcaaatcacacggctctggccagttcttttcagc

SEQ ID NO: 227184 - DNA, 122 bp, Homo sapiens
gttgcgcacccaagccggtttatttggtctcccgcacacactcaggcctgcatcaccggccgtgatttctccgcttgcagcttcactccggagcccgcgaagccggtaccgccctgggggag

SEQ ID NO: 227185 - DNA, 122 bp, Homo sapiens
gctttttgccgaataactagagtgcaaagttgtttttcaaacagtgcctacatgccaaatcggcttgctttttatcctcaagcgagagtgagggtggcggctgtgcggacgccaatcgggat

SEQ ID NO: 227186 - DNA, 122 bp, Homo sapiens
cctacctaccaggtgaccccaacaagtcacttcccatcttagaggccgggcttctccttccgtaaaaggactgattttgcccgttcctgcgctgtccccgggaaaagcccttaccaccgagt

SEQ ID NO: 227187 - DNA, 122 bp, Homo sapiens
ctcccatgccgctgagcagtggacagcggggactggagacctccaggtgaggaaggggaacgaagtcaagaaggccacatgtcctggcttccaggcttggtgtcctcagaagcctccagaac

SEQ ID NO: 227188 - DNA, 122 bp, Homo sapiens
tcgccctgggcagccgcagctaaaagccggaggctccaaagtggaactacgttgtcttgtcgagcctggggcgactcgcctcggggagggcgagcctgaactgcagccctgcgctccttcca

SEQ ID NO: 227189 - DNA, 122 bp, Homo sapiens
ggctggacctccgagaaagccagcaagaggggtctcccagggcctccatcccgtatccagcgccccctacgctccacaggcctctcccggtggggggcaggcttagaccctggcgagccccg

SEQ ID NO: 227190 - DNA, 122 bp, Homo sapiens
gtgaaatgttaatacctattgtacttataggtaaaccttgcaaatatgtaacctgtgttgcgcaaatgccgcataaatttgagtgattgttaatgttgtcttaaaatttcttgattgtgata

SEQ ID NO: 227191 - DNA, 122 bp, Homo sapiens
taattcaaattaaaataggagcaaaaattgttcagcattgatgcccactgtagacagaagcgagagatgcccaggctgatgagaatcatgtccacaggcatcagccttctgacttgcagcca

SEQ ID NO: 227192 - DNA, 122 bp, Homo sapiens
cctgcgtttccccagagcctctgcccattttactgcaccgggatgcagccctatttccagcgaggctgctttcctccgagcacactgcttctgagttgttttcgtagctcaaaatgttcctt

SEQ ID NO: 227193 - DNA, 122 bp, Homo sapiens
tatagattgcattttgaaaatcaacgaatggatctaaaatttacattggccacatgatgtcgctgtacaccacaaagtcttgtcaatagaagggagctactgatcactaaaagtgaaggagg

SEQ ID NO: 227194 - DNA, 122 bp, Homo sapiens
ggggttgggaggagggagaaaatctatagctgttacagtttcccagcaatgatccagttccgcagcaatgacccagttctccagcaatgatccagttcttcaggttggaaacagcacacaca

SEQ ID NO: 227195 - DNA, 122 bp, Homo sapiens
atttggacgagaggatacctgaccggtctcagtgcacctctccgcaacccgggaccatcacgccctctgcctcaggctgtgtcagggaaaggacattgccccgaaaccactgcgactcttgc

SEQ ID NO: 227196 - DNA, 122 bp, Homo sapiens
cagtctccgctcacctgccagggccgccgtcgccgccgccaccgcgggttaaaccgcagccgcgcccacacttccggggtccgccaggcccgccccctaccggatgtgacccccttgcaacg

SEQ ID NO: 227197 - DNA, 122 bp, Homo sapiens
cctccccatccccccagtgtgcggtctcctctccccagcaaagatgttcggtggcacttacggcccctttttaacaccaggcgaagccaatattgttaggaaggaagaactgctgtggcagc

SEQ ID NO: 227198 - DNA, 122 bp, Homo sapiens
tccctggcctgacccagtccggctgagccagaggcgcagcttccgggccggggatgagcgcgaagcctggagatcctaagccctaagtgggacgagcgtgcgccgcttacctgccacctgcg

SEQ ID NO: 227199 - DNA, 122 bp, Homo sapiens
gggatgattatgaacaactactcaaaacaccatgcctaataaccccagggtggatgtgggcggggactgggcctagagggagtagttgactgggaaggggagagcagggaggcccctgggaa

SEQ ID NO: 227200 - DNA, 122 bp, Homo sapiens
gacgccacctagtgtgaccattaccagccactgcgcctgcgcagactcgggttttctgtgcgcgccagaggggcggggcctgggccgggaaggggcagaagtagaccgacggctgggccgcc

SEQ ID NO: 227201 - DNA, 122 bp, Homo sapiens
gcggttgcgggcagaggcggcggagtgcgggcggtggcggcggcggcgcggggaggtgtgcgcggacgccctgcccgctgccgctgccacccccggcccggccccgcccgccccccgagccc

SEQ ID NO: 227202 - DNA, 122 bp, Homo sapiens
gcgtcggccatggctttgggcatcacgtggccacagctgcagcctgagaagtgggggtgccggcatccggcaggggcggctctgcaagctgtggctccgggttggggaggcaaagtgctccc

SEQ ID NO: 227203 - DNA, 122 bp, Homo sapiens
gtaagctggagagggaggacttgagttcggaccccctcgcagcctggagtctcagtttaccgctttgtgaaatggacacaataacagtctccactctccggggaagttggcagtatttaaaa

SEQ ID NO: 227204 - DNA, 122 bp, Homo sapiens
accaccccccctccttttttgcttcatagtcaacattgatcaaggcagaacggagcgcctcgtctcctggaagggctgggcagactcaggagaacagcacatttcagtatatggaaatgatc

SEQ ID NO: 227205 - DNA, 122 bp, Homo sapiens
ccgtcggagcccttctgcctgggacctgcctcatccccggcccctcacagggcaagacatcgcagtaaccgcaggtcttcagagcagcctaccctggccatgccaggcgggaacagcagatg

SEQ ID NO: 227206 - DNA, 122 bp, Homo sapiens
aagagaaaagtgaaggggccaaagaagagactttctggaattagcctttctcaacctgcacgaatcccaggggaattccaacagatgggtaacttgttccaatgccatttctagcagtgtct

SEQ ID NO: 227207 - DNA, 122 bp, Homo sapiens
aacgtcaacagttaataagataaccaaaaactgtgaaaatcaaacgttcctggaatgcatcggagcttcacactttagtccttcgcttgagactcaaaggccacatggccagataggtcttt

SEQ ID NO: 227208 - DNA, 122 bp, Homo sapiens
gcggggaagggaaggtgccggaaccagggctgggagatcactgagggttgaggtggggcccgtctcctgtacacccctgcggaaaagcctgctgggccccagagccggcgtccgctgcctct

SEQ ID NO: 227209 - DNA, 122 bp, Homo sapiens
tcaccagccccgtgcggcggctcagcagcggcaaggccgacgggcacgtgaagaagctggcgcacaagcacaagaagagccgcgaggtccgcaagagcgccgacgccggctcgcagaaggac

SEQ ID NO: 227210 - DNA, 122 bp, Homo sapiens
caagtggctcacccatggtcacacagttaaggactggcagagttgggtaagaaccaggtccgtcacactcaaaaacccaggctcttttgtaccagactgcctggctttctgtcccctcaagg

SEQ ID NO: 227211 - DNA, 122 bp, Homo sapiens
accacgtcccctcgaacagaagccctgattgacgcttgagacttaaagggccaggcagcccggggattaagaacaccaaggcggaaggaagcaggcggagagatcagagtatccagctttgg

SEQ ID NO: 227212 - DNA, 122 bp, Homo sapiens
tgcttgagcccagacgtgggaggctgcagcaagctatgatggcaccactacactccatcccgggtgacagacagactgagacttcatctctaaaaataataataataataataataataagc

SEQ ID NO: 227213 - DNA, 122 bp, Homo sapiens
cactgcctccgcgctgccagcgcaccttcactcctgcccgctctgtctcggcctcgaacacggcagggctgcctgcggccacttccactgaccgtggcttcttgctaaaagctgagactgaa

SEQ ID NO: 227214 - DNA, 122 bp, Homo sapiens
actcttaagagcacatctacccagtgactgacaaagctgggctcttaccaggacactcttcgactctgcctgcgggggcactgctagagtttgcctctcaaactgtccctgtgtggtccttc

SEQ ID NO: 227215 - DNA, 122 bp, Homo sapiens
ttctgaatggatctgtttcaattccctgacaaacaggtgttgatttacttctacacttaccgtcctcctaccaagatgcatgctttctgtttaaacatatggtcacactttgatgttttttt

SEQ ID NO: 227216 - DNA, 122 bp, Homo sapiens
ctagttaaaagctttcctgtgtctttaaaagggggaggcatcctatcaaatggaccctaacgcataggctgaaggcacgtgaagtcccacccactttctatgacgtcccgcgtcccggcttc

SEQ ID NO: 227217 - DNA, 122 bp, Homo sapiens
cgttgctcgccgactatggcttctctttctagacacgccccaattcaaattgcgacagcccggggagcagaccttctgggaaatgtagtccagagcttgacagcctcaggctggctacgtgg

SEQ ID NO: 227218 - DNA, 122 bp, Homo sapiens
aaaggggggtctcacggtattcgccaggatggtctcaattccctcacctcatgatccgcccgccgcagcctcccaaagtgctggtagttaaccccacagcaccgagcccagcatgccacgct

SEQ ID NO: 227219 - DNA, 122 bp, Homo sapiens
tctgaaacgatttgatgtcagcaagaattccccatacagctcacagccctaccccgagcacgcctccctcttgggtatggtgagttcagctccaaatttattctgacaagaaagcacaggca

SEQ ID NO: 227220 - DNA, 122 bp, Homo sapiens
ccagtgtccagggtaacctttcaagcccgatgtagaggtttgcgatgtcctcccagatggcgggggcagctgaatctccctaaaaatccccctgttctattcgacaggggcagatttatgca

SEQ ID NO: 227221 - DNA, 122 bp, Homo sapiens
gtaagaattttcttagcagtggcctcaactaggacacatatgccaaggggttgaggaatacgggagggacaaggcagaacatatggaaatttctgtttatatttattgtctatctcatcttt

SEQ ID NO: 227222 - DNA, 122 bp, Homo sapiens
cgaccgtggtaattgcaactgctcaggggcagggcttgccccagcgccgagtagtggcaacggcgtggttgcgtcgggggtgcctgggagcctggagtcccgggggcctgaaatcggcagct

SEQ ID NO: 227223 - DNA, 122 bp, Homo sapiens
agttatatacagtaagactttgggttctccatgggggtgggaccaggctgacgggccccacggcaggctggggcgggaggtgggagccagggccactgcgaggagaacgagggtggttggag

SEQ ID NO: 227224 - DNA, 122 bp, Homo sapiens
agggcctctcatcccgccccaagcaggttgacgccacggtacctgcaagccctgccatggcgccgccgccactgtcgccgtctgccgcagcctgcctccacctcagctcgccaccgacgccg

SEQ ID NO: 227225 - DNA, 122 bp, Homo sapiens
cctcggttaggtagtacccgagagggcgggggccagtaccggctacttggggcctggggccgagttcgccccgagagaggaaaccgccctccttgggcatccctcctggatctggcgggccc

SEQ ID NO: 227226 - DNA, 122 bp, Homo sapiens
ccgagccaaacatctctcggtgtccagacgtccctcctcttctctctttctctgctacgtcgttttgccgtcagtcggcttgcctcgtatctcctcacctgctggtatgctctggaggttgg

SEQ ID NO: 227227 - DNA, 122 bp, Homo sapiens
ttttccctctgcagcagcaaaccctctgctttgctccaccgcccgctaccactgcaagaacggcctctgtattgacaagagcttcatctgcgatggacagaataactgtcaagacaacagtg

SEQ ID NO: 227228 - DNA, 122 bp, Homo sapiens
ggacggcgtccaacccgcattcatgtcaggagtgagtcgcacgtggctttgtggtcatggcgacttaatccgcctggacggtggctccgtctccctgggcttagacgaccttggcacttctg

SEQ ID NO: 227229 - DNA, 122 bp, Homo sapiens
agaggacactttttggacttagtggaattactctatcagctttccaataagtgaatacttcggttaagctaggagttcacatttttggaaatgctgtgattgatgttcactttaaaatttta

SEQ ID NO: 227230 - DNA, 122 bp, Homo sapiens
ttgctttgtggccggttccattttaatttggtctcaacggagtagaaaatgggagagagccggcgcgtgctccagacagaaatcagccaacgagcccatgagaccccaagtcactgaatccc

SEQ ID NO: 227231 - DNA, 122 bp, Homo sapiens
ctgtgacccaggctggcgttgctcctctccggatttcactcctggctgaactggtgccttcggtaaacagctgcttaaagagtgcggggactgctgcagggacttcctttttccactaggcg

SEQ ID NO: 227232 - DNA, 122 bp, Homo sapiens
gttatagtacacccaaagggataaactggcatctgtccatgtttgaacacactgaattaacgaacttctgagctattcaactgaaatattgagcacttcatttccacaccatgtaatataac

SEQ ID NO: 227233 - DNA, 122 bp, Homo sapiens
gtgttacaatactttcacacccatcgtctgactccttccgacagcacagcgaggcaggtacggatcattcccattttgcaggtgagaaatattgaggcaacataaaggcctggaaaaggttg

SEQ ID NO: 227234 - DNA, 122 bp, Homo sapiens
cccggccagttccattctcaccacgcccggcggaagctatcgccacgatttggggagggccgcctctgagcctcctctggaggcggcacctctgctactccattgcacaaacggggaaacca

SEQ ID NO: 227235 - DNA, 122 bp, Homo sapiens
cctgatcacttggtgagcagctgtttcagctgcccggatggagggcagtccagtcagttacggcctctccctctcccgagctgcgccctgtcctcctggaggcgaagggctgagtctcagat

SEQ ID NO: 227236 - DNA, 122 bp, Homo sapiens
caggccccctccccaggcccgcccaccctggtggaccgtgcggccaagcacgcccacccccggacactggctgcccggtcccggatccccaagggcgacgtttctatttgggatccacaaca

SEQ ID NO: 227237 - DNA, 122 bp, Homo sapiens
tatccccagaccgcttagtccttcataacatatatctccacggaaaagggtatttcctcccgtcagaaaaagcgccccagtctggtctgggttggtttttatttcacgttgttgcaagtagg

SEQ ID NO: 227238 - DNA, 122 bp, Homo sapiens
gaacgctcagggctggcgccagtcgcctggtccctcgctcgccgcagcctagacggcggacgctccctgtcaaggcctaattcctgcaactcgccggcccccggtaaccgttttccttcccc

SEQ ID NO: 227239 - DNA, 122 bp, Homo sapiens
ctgcctctctccgcttgcgccgcggctcacgggggttggagacgcaccttctccacgtgccgttttcaaaaagctcaggcagggagtcgtgttttgagttgaggctactcacttcacttctt

SEQ ID NO: 227240 - DNA, 122 bp, Homo sapiens
attttacagaggttggacacttcactgtgtatgatgtgccgtgtgcttaacaagagatggcgtgcgggctgctgtgacggttctcccttgattccctcgtgaagtgcagcagcgctcttcag

SEQ ID NO: 227241 - DNA, 122 bp, Homo sapiens
caatgttagagagctcaacaccactccccttgggagaatctctgatgttagagggctcttcgataccccccaaccctcaggaaaaaatgtttggggctgggcgtgccaagggctctggtcct

SEQ ID NO: 227242 - DNA, 122 bp, Homo sapiens
cgcccagcctgcctgattttaaacattttcattaccccaaaaggaaaccctgaaaccattcggagtcactccctgttctcccccatttctcctcccccttccagccctaggcaatcattaat

SEQ ID NO: 227243 - DNA, 122 bp, Homo sapiens
ctgggaaacgccttgccagcctccgtcatgggctcagctgcagcagccacctgcacatggcgggggagcagccttgatggcaaccccagaccacgctttcacgccagccaggcagactccag

SEQ ID NO: 227244 - DNA, 122 bp, Homo sapiens
agggacttccagaaaccaagttgccaacagatattcacctcaaatggtcagtgcccagcacggaaacctcatgggcctgagaacagcaacagaaactgggagggggctgtgctatcaccagt

SEQ ID NO: 227245 - DNA, 122 bp, Homo sapiens
tgctatatcctcaagatccagtatagggcctgggtatagaagttcttccaaaatatttgtcgaatgaatgaagaagctccagtagcagtggtgcagttccaagattcaccaggaggtggcac

SEQ ID NO: 227246 - DNA, 122 bp, Homo sapiens
gtgaaaactatattcacaggtgagaagccagcatcttggctgtattgaaaaaaattcatacgtttttctactgtgatttgtatgaaaggtaacatcaaatcaaggaatagattcagtaaagt

SEQ ID NO: 227247 - DNA, 122 bp, Homo sapiens
tctctccagtgtagacccttgtctgagaccgagctatgtggggcgacctctggctcctcccgcctgcctctgccaatccgggcactgggacagaggtcggtgttgaacgcgcgggccccagg

SEQ ID NO: 227248 - DNA, 122 bp, Homo sapiens
aggggaactggcctgaggggctgctcactgaggcgggtggtacagcctggagcatccagccgctggagctgcgagggaccctggacccctcccacgccgaggtaaagccctgcgctacgcgc

SEQ ID NO: 227249 - DNA, 122 bp, Homo sapiens
ctcgagctccccaggggtctaggaatccggagggagagaggagaaacaggagatgagatccgggggaatggtatccttgcccccttgaacaggaactggtaaacccttaccaattacggcca

SEQ ID NO: 227250 - DNA, 122 bp, Homo sapiens
gatctgcaatttaacaagatccctaggtgatcacgcgcatgcacattaaaggtcaagaaacgctgatgaaaaagcactgacatctctggcattactaactgtgtcactttgggcactttgtc

SEQ ID NO: 227251 - DNA, 122 bp, Homo sapiens
agctaagcagctggtggccctgctgcgcgacgaggaccggctgcgggaagagcgggcgcacgcgctcaagaccaaggaaaagctggcacagaccgccacgggtgagtccctccctgcggccc

SEQ ID NO: 227252 - DNA, 122 bp, Homo sapiens
accctaaaatttcaggggggatgccggggaggcctgaagaggaatggcccttctctccttcgctaatcttgccggaaccccggtcctggagcctgtctcccaggggcggaggcacttccctc

SEQ ID NO: 227253 - DNA, 122 bp, Homo sapiens
acagcaagggccccactagctgaaaccaagttgcagagttttgagggtcccaccgccgaccgccggcccgccgcgagccctgccccctgcgcggccacgcccccttgctccccgcggcctcc

SEQ ID NO: 227254 - DNA, 122 bp, Homo sapiens
gcatgtctccatctagaatttgagaattgttggagtcagtgaaagaccttttgacttcgacgtatgatttttttttaagggagtggagcagacttctgtaaaacagggatattgcagttgaa

SEQ ID NO: 227255 - DNA, 122 bp, Homo sapiens
gttccaccccgggaggcccgctgtatgagatggagggcgggctaaaggcgggacgagactcgattgagcgcaattatgaccaatcaccttgcggaatattcggcctatagcgaaggaggagc

SEQ ID NO: 227256 - DNA, 122 bp, Homo sapiens
acggcacctcgcgcaggcgctggagcacctggagaagcagggcccgccggcagccgaggccgccactaagaagccgctgccgcccctgcgacacctggacggcctggcccaagactatgctt

SEQ ID NO: 227257 - DNA, 122 bp, Homo sapiens
cgatggagcctggaattaaggtgggcatcgggggcccatctggggggattgctgaggcatcgcgggagcgcaagcgtgccctgtctgcccttccactcacctcaaagtgccttgtacgcgac

SEQ ID NO: 227258 - DNA, 122 bp, Homo sapiens
tgatgcggaataccggggccagggcggcatgcatggcaggcaggataaaggcccggcggccgttgagctgggccagagccagcagcgtggcatactgtcccatctgattaccaaaccggcca

SEQ ID NO: 227259 - DNA, 122 bp, Homo sapiens
ctggacgccgaattagtgtttggcagcgcctggtggtcttcaatcccagcccctccggcccgccgcgccccccgggaccaaaacaagcggaggcgagcgcgggcgcgcggggcatgccggga

SEQ ID NO: 227260 - DNA, 122 bp, Homo sapiens
ctaaatagagaggccagggagtgaccggagggcattttcttgtacacacaggggttgccacggaactcccgtgaaacagactcccgggccagccgcggcgctcaagcttcccctgaggtcct

SEQ ID NO: 227261 - DNA, 122 bp, Homo sapiens
gggtagggctggcgtatggcgaggcagaggtggtgcaccccgttcagctgggcagcggcacgagcgggactgcggatcagttcacaccgtttaaaataggcacatgagtcttctggctaatt

SEQ ID NO: 227262 - DNA, 122 bp, Homo sapiens
tgcccggccgccgcccattggccggaggaatccccaggaatgcgagcgcccctttaaaagcgcgcggctcctccgccttgccagccgctgcgcccgagctggcctgcgagttcagggctcct

SEQ ID NO: 227263 - DNA, 122 bp, Homo sapiens
gtggtgggtggcgggaagttgtcagtggtgcgtgtgggatgcccctgggccaggtatcaccggggcgcagcgtgccgagctcctccagcaccaatgtgcccagtgcggacgctcagcgagca

SEQ ID NO: 227264 - DNA, 122 bp, Homo sapiens
gcggggctggccgcgggggcggggccagggtctcacacccatctagaggatgtctgtctgcgacgtggggtcggacgggcgcctactccgcgggtatcaccagcttgcttacgatggcaagg

SEQ ID NO: 227265 - DNA, 122 bp, Homo sapiens
ttgctgccttccaaacaagcagtctaaaaggcattctgcagataacccagttcattagaccgattgcagcttttagaacaatttagttgttatcttgcctttattcctattatctctctctc

SEQ ID NO: 227266 - DNA, 122 bp, Homo sapiens
ggagacaacagcgacctggtggaattgctgcagctcagcggcagcggcggcgacggcgagcgcaccacctccagcccctgcccacgtgcgcccgtcatagggactgagcaggagtccgagga

SEQ ID NO: 227267 - DNA, 122 bp, Homo sapiens
tttaaaagatggcttgaagggagtgggggtcttggtgatgatcatctacttcctagctcacgctgctgcagtggggctcagttgccctctggatgtggtacgaagctgttacactgagatca

SEQ ID NO: 227268 - DNA, 122 bp, Homo sapiens
ttttatttgcttttctatcaatggctcaatagtctttcagaatgtgttttactttttgatcgcaagtcctactgcagatctaagaaccattttgggaaggtcgttggactcaggaaaatgtt

SEQ ID NO: 227269 - DNA, 122 bp, Homo sapiens
ccggaggctattttgaaatctctcccgtctcagccaacaggcatgcaggaggcgaatccccgcgccagcgccggccaatgagcgcagcgctatgctaaggagtcgggggcccggcccctccg

SEQ ID NO: 227270 - DNA, 122 bp, Homo sapiens
agcctgagaggcaggctgaggcagctgtctagagacggttgacagtccctaacacccacacgctgaatggggatggacatactgatgaggagtacaagagacagattattatggattgcaca

SEQ ID NO: 227271 - DNA, 122 bp, Homo sapiens
gggatccacccggccccgggccgctccagacctgccccacgccctggcgtgtccctttcccggtggggaccctctagcggcctgagtttgagagaagatctaagctaagccgccacagcgag

SEQ ID NO: 227272 - DNA, 122 bp, Homo sapiens
aacccagaccttgcagttcgcatttcctcctctgtccccacacattgcccaaggacgctccgtttcaagttacagatttcttaaaactaccactttgtgtgcagttgaaggcccttgggcac

SEQ ID NO: 227273 - DNA, 122 bp, Homo sapiens
gtcccctctctccatttcccattcacacatcaaactccgtcctccgcacccctatcttcccgtgtcttcttagttatgtgaatgtgtgtcattaggcttactcggacactggatgggtgagt

SEQ ID NO: 227274 - DNA, 122 bp, Homo sapiens
aggccgccctgggggccattgtggaggcagaggcctgggcacggatgctgaaggccgccccggggggcattgtggaggcagaggcctgggcacggatgctgaaggccgccccggggggcatt

SEQ ID NO: 227275 - DNA, 122 bp, Homo sapiens
ctgaggcacccaacctgctggttgttcagagcggggcagctgaggagttgctcactggcccgggccccggggaggcgggggatggcgaggccagcactggtgtggtccaggatgtcctcttt

SEQ ID NO: 227276 - DNA, 122 bp, Homo sapiens
gacttaagttttaacaagatccctggggccaacactatggcaagttttaacaagatgccccggatgacagtttcgctgtcgccttgtgagtgaccctaagccggaacctcccagctaagcca

SEQ ID NO: 227277 - DNA, 122 bp, Homo sapiens
ccttcccatgagctgcagggctggttgccgtccttgcaactgtgtcttatttgcctgtgccgttatatcttggtgacccctccacgtgtacactactgacaaacgggtggagtgctggggag

SEQ ID NO: 227278 - DNA, 122 bp, Homo sapiens
ttttaatgagttttgcaagcaagtggcctcttcctgtgactcattctgccttttgtgcaccggagattgtggttttaagtttcactttggaaagtaaccaccacttctgctgctttctccct

SEQ ID NO: 227279 - DNA, 122 bp, Homo sapiens
gaggagaaggagatttcttgaatgggagtggtctgttgctgagagggatcctgaaagacacggggacagagacaggggtaggatccacataatgaggaagcagctgagaacaaaggagcccc

SEQ ID NO: 227280 - DNA, 122 bp, Homo sapiens
caaaaaatcccaggaccaatcagacacacatcttttctctctccttcagcgacaagaggtcgattttgccatcaaataaccatgattgaagcaagcgaggggcaccaggtgtacaactgatt

SEQ ID NO: 227281 - DNA, 122 bp, Homo sapiens
ctttcacaaaagggatttcattttgtgaaatatttgaaagcatcgaagtctagcatttcacgttttgcaagctggggaaaagcattcattccctgagaagcagcgttggtctgtcaggcttg

SEQ ID NO: 227282 - DNA, 122 bp, Homo sapiens
ttagaagcttgtcagatgattctaatgtgcattcacagcggggatccactcctctgatcacgtttccacgtggctgccccagcttcccttagtactcacatgcccttttgggtaatttagtt

SEQ ID NO: 227283 - DNA, 122 bp, Homo sapiens
gaggcaggcagatcatgaggtcaggagttcaagacctgcctggccaacatagtgaaaccccgtctctactaaaagtacaaaacttagcagggcatggtgcctgtagtcccggctactcgggg

SEQ ID NO: 227284 - DNA, 122 bp, Homo sapiens
ctggcttggtcatggcttgctcctcagtttgtaggagactctcccactctcccatctgcgcgctcttatcagtcctgaaaagaacccctggcagccaggagcaggtattcctatcgtccttt

SEQ ID NO: 227285 - DNA, 122 bp, Homo sapiens
tcagaggtacaagattgaggtcagaggggttaatcgaagtgcacaggggattcactgttgcgtatctgcctgtgatgtgtcaagccctgtgctgagcacactgtactggcaaaaaatactga

SEQ ID NO: 227286 - DNA, 122 bp, Homo sapiens
cctaaagctgaatcaagggaaaacaccaaggtctgggggcaggactctgaggccaattcacgataatttcccaaagctggaccaaaaggggagcacctgtgtctggggcagggaaccaaaga

SEQ ID NO: 227287 - DNA, 122 bp, Homo sapiens
ctgataagcatgacggagcccagtgctcctgacaggactcacatttccagccggatagagcgccatttacatgaggcaggcactgtgaattcagatcagggcgatacgggcagcggcgggct

SEQ ID NO: 227288 - DNA, 122 bp, Homo sapiens
gatttttagtacagacggggtttcaccatgttagccagaatggtcttgatctcctgatctcgtgatctgcccgcctcggccccgcaaagtgctaggattacaggcgtgattctgatgttctt

SEQ ID NO: 227289 - DNA, 122 bp, Homo sapiens
gaaatgctttgaggtctgcaatgttctcctctcccagagagacttgatgttggctcttgacgggaggcgggtgcttgctgtcggggtcacctccattgggttttgggacgtaggaggggtcc

SEQ ID NO: 227290 - DNA, 122 bp, Homo sapiens
gggggtggttctgacaatcagctgctgccttccctttcgtccccctcccccaggatgccccggaggcccagctagccccagacttcggccccatgcggctcacccgctgccaggctgccctg

SEQ ID NO: 227291 - DNA, 122 bp, Homo sapiens
gacggtggggaggggcttctgtgtcgccgcaggtgtgaggaggacatcaatgagtgcgaacgagaggagtgtgagaacggaggctcctgcgtgaacgtgttcggctccttcctctgcaactg

SEQ ID NO: 227292 - DNA, 122 bp, Homo sapiens
tccccagcccctcaccacacagggtgcggccaggcctccgatccgtggtggtctcactgccgcaaggccccactctagtgaccagcatgaccacctctggtctaaagcacactcttcagtga

SEQ ID NO: 227293 - DNA, 122 bp, Homo sapiens
tcaatatacttctgttagtacagagcagtataatagtcagaatttaggaattaaagcggtcgtatgcctggtttcctagttattggagggttggaagttcagtcattcttgtcactttcaca

SEQ ID NO: 227294 - DNA, 122 bp, Homo sapiens
gcccctcaggggaaagtggagaccgggacaccagaggccgcggtgtttggatttgctgggcgtggagtggggacggaagatgagcgcgggaaaggcactccaacctcactcttcccgtctgt

SEQ ID NO: 227295 - DNA, 122 bp, Homo sapiens
ttgctcaagggtatcgacaggtctgagcccggttggaggaagcgctctggccaagcggggcggaggagagggttttccggagacagcaaggggtgttcagggtcctgggcttgccgcggggt

SEQ ID NO: 227296 - DNA, 122 bp, Homo sapiens
cttgagccagggggacatctgagaccctaggcaccggcgctgcggctggatggccctccgcgctcgggcccccgcatccgacactgcgcggatcccacgccccctgctctaaccgggtcgcc

SEQ ID NO: 227297 - DNA, 122 bp, Homo sapiens
cgcgtttctgctggtgaacctgactgtgcccttctttgtgggatctgcccaggatggcgtcgctgggtcgaggggcatgttcagcatgaacagctggtgcccggtgccttctccagagcggg

SEQ ID NO: 227298 - DNA, 122 bp, Homo sapiens
tctgtttattttgacaccattagctcacttacacacattggtcacaagtctaggctgcaccgttattgaaagtttaccatctgactctgagtagcttgaggatcctatcaaaactcaggaga

SEQ ID NO: 227299 - DNA, 122 bp, Homo sapiens
agtggagggagggccccttgctctccagcaaaagcaccaaggatcggaagtagggcctgtcgctctccagcacgtccccccccggcagtggagggagggcccgtcgctctccagcatgagca

SEQ ID NO: 227300 - DNA, 122 bp, Homo sapiens
ctcctccgcgggctctgagcagaagggtcgcattctctcccgcctgagacttcttttcctcgccccgggagctcaggcggcgccgctccagcccggggccccgggactccccggctgcacac

SEQ ID NO: 227301 - DNA, 122 bp, Homo sapiens
ggggcccaagtacagggcatcagcaagaaagcgcagcgcccttctcctgttcccttccagcgtgcagaacctcgcaggggctattttgtatgtgttgtgtggttagttggatggggcgggag

SEQ ID NO: 227302 - DNA, 122 bp, Homo sapiens
cgcacctggctcacatctctgagtacgcagtgaccctggatagctactggccaggcgtcccgccacgcctcccagccatgttctccggtggcacaggccccgcgactaggccactgtccaga

SEQ ID NO: 227303 - DNA, 122 bp, Homo sapiens
ctttggccggtaacgcctatatttttctttctcttgcttagtccagcttggcttctggcccgtcgtagagctgttcagatgtcctctgcatactgctttcacattctaaggcacaatttact

SEQ ID NO: 227304 - DNA, 122 bp, Homo sapiens
ctggctcggattcagcgctcagctgtccattcctttctccttcccacctgttgggtggagcggtgcaaggtatttttttcttagaccaaacgtttcacttgaggggtgcgttaggtagggtg

SEQ ID NO: 227305 - DNA, 122 bp, Homo sapiens
gatggtgggacacgggctcctctccgccggtgagtcatccccagccgtcctcccagcctccggatctgcccttccagaaggcaaacagagggcaggcactgtcttcccagttctcaggcaat

SEQ ID NO: 227306 - DNA, 122 bp, Homo sapiens
atctctgcccgtgtgcaacttgcagttttgcagttttctgcagcagctgaggcgctggtgcgggaaggcggagctcccctggatggcgtcaggtttgcgggcacagagcacagcccaccagg

SEQ ID NO: 227307 - DNA, 122 bp, Homo sapiens
caccgtcacactctgggctgggtcccccggtggcaccatcgtactctggactgggtcccccggctgcgccatcatactctgggctggttcccccggcggcgccatcatactctggactgggt

SEQ ID NO: 227308 - DNA, 122 bp, Homo sapiens
tgtgttttacaagctcccttagagagtcttacagcaaggtttgagaagcaaagccaccgtcgaagccttaattaactcaaagcctccaaccagaaaagcccgaggaaaacccgagatcttta

SEQ ID NO: 227309 - DNA, 122 bp, Homo sapiens
acttgagccagttaacctctgtaagaatctctttaatttctctgcaaattgccagaaagccggcagctgaaaccctatcaggtcctggatcatatcagacctgctttaaactggcaccctcc

SEQ ID NO: 227310 - DNA, 122 bp, Homo sapiens
ggctctgcgctgcctttggtggctcctccctggtcctctaaatgtgacaccaggcggatgcggggccacaggaccctggggcttgagtcacacaagaatgtctctgggagacccgagagact

SEQ ID NO: 227311 - DNA, 122 bp, Homo sapiens
aagggagacaagtaggaggggcatacaaataatgattacatgctgcttcagtgtaaatctcggttcattgtgtgtccatgggcacatgccttcaaattcaagtgcatgcctctctctctgcc

SEQ ID NO: 227312 - DNA, 122 bp, Homo sapiens
tgaggccaacctgactgcccaatttaaaattgcaatccccaggccagacatggtggttcacgcctgtaattcccaccactttgggatgccgaggtgggtgaatcacttgacaaggtcaggtg

SEQ ID NO: 227313 - DNA, 122 bp, Homo sapiens
tatggaatcccgaaggaaggctgagacacccggtcaggagagctgcggaaggggctgcggcggaactgggagcatcccctagcctttccaggtttcaaagggaaagttggaatttgcaaaaa

SEQ ID NO: 227314 - DNA, 122 bp, Homo sapiens
aacacgaggagatgtcagtcgggtgccactgctaatgaggcagcccacaactggtctcgacgtgcgtctgtgcctgtaaaagatgaaagtgcagcagcaccctgagaaatcacacatcttcg

SEQ ID NO: 227315 - DNA, 122 bp, Homo sapiens
tgtttgatcttgtagaacccataccggctcatacagatctgttatttaagtaagctgaagcgtaacttcagttggtggagaagggattaaggtaaggattttgcttatatatgtgagcctag

SEQ ID NO: 227316 - DNA, 122 bp, Homo sapiens
ggaggccgcgccgcgggtgtggaggtgtgctggccagcaggccccggggctccggcagcgcgcgggcgtgggcgtgtgggtgtgtacctggcttgtgggtctggccttgaattcgtgccggg

SEQ ID NO: 227317 - DNA, 122 bp, Homo sapiens
tacctgcgtcacccctcatccatctccatgcagtgcatcatggagagagacgccatttggcggaagaagagagacatccacaggggactttaccttaaaacctagtaccagcaccacaatag

SEQ ID NO: 227318 - DNA, 122 bp, Homo sapiens
tttttataactgaggaaaccgagggtcataaagtttaagtaacttgctcaaggccatagacgtagaaagcagcgatagggccaccgatccaggcgagggcagcagtgctcgccgcctctaac

SEQ ID NO: 227319 - DNA, 122 bp, Homo sapiens
ttctccaagatcaggggtcaaaggcagcctgtgtctactacatgtagggggcacccgatacgtggtggccaaactactaatgttatacccatgaaggaagcctctctcctctgagaaattca

SEQ ID NO: 227320 - DNA, 122 bp, Homo sapiens
ctccctgctctgtcttcaagtcatcttcttgtttgtcttgctccatttgggctgttatatcgaaataccataaactgggtggtttgtaagcaacagacattattttctcagggttctagagg

SEQ ID NO: 227321 - DNA, 122 bp, Homo sapiens
cccctacgtccctcctcgtgccgggccctgctgctcccgtagtcttccctctgcagtcaccgcttcccctgaaccagcattgggcaggtcccaggggcttgtcctttgacccgggatattct

SEQ ID NO: 227322 - DNA, 122 bp, Homo sapiens
actgttaggttgggtaactgaaaaaggctgttgtaagaatgtgatcttgacggtgatagccgagtgacaaggaatttacatcccagacagtgggaacaactagtgaaaggagcttggatgtc

SEQ ID NO: 227323 - DNA, 122 bp, Homo sapiens
atcctgatcctggggaatttttccttaaggattcagacctcctcgttctgccatcagttacgctattttggagcatcctgtgtcaatagagtgaggataagcacctttcgaaagctgaagag

SEQ ID NO: 227324 - DNA, 122 bp, Homo sapiens
tccccacagcctctggcagtgaccagtctaccttctgtgtctgtaattttcactacgctacgtgcctcttgtaagtgggatcacacggtgttcgtcttacctccctgagcctaacgtcctca

SEQ ID NO: 227325 - DNA, 122 bp, Homo sapiens
atttcttcaagggagctgccggccggcgcagaacccccaggagcacaggtctctccgggccgctgtcctgcgtaactgttctccagagcgccagccagccacgggcctgattccagaggagc

SEQ ID NO: 227326 - DNA, 122 bp, Homo sapiens
tggaactggaagttctggaggctgcctcggctctaaaaaagcccatttctggatgtcggacgtttatcctcagtctcttgcaatttcctttgagaacagccagttaaaaagaagtgagtggc

SEQ ID NO: 227327 - DNA, 122 bp, Homo sapiens
ctccgcgtgagtgcttctatgtctttatattggtagatcttacttagaatctgactttttcgcttgtcaagttgtcataaaactgatttccatttcaaatgtctatatggtattcacatatg

SEQ ID NO: 227328 - DNA, 122 bp, Homo sapiens
gccgatcctgtgccacagagtgaaatactgtcagccctctgtctccatgggttctgcattcgtggattcaaccaaatgggaatggaaaatgtttggaaaaaacaggatggttttgtctgtgt

SEQ ID NO: 227329 - DNA, 122 bp, Homo sapiens
tcgtgatccacccgcctcggcctcccaaagtgctgggattacaggcatgagccaccatgccggccaagtggaatgaattttcaagagcactgaagttactataagaggcctagaaatattct

SEQ ID NO: 227330 - DNA, 122 bp, Homo sapiens
gttgggagctgacgcctgagggacgatccgctgagggtcaggctctgctgcgcgactgcccgagccgccccatgttcgagacctgtgccaatcccatggacattctcctcccacccagccag

SEQ ID NO: 227331 - DNA, 122 bp, Homo sapiens
aaggagggggtctgggactttctcactttctcagtttctgaagcatcccctgctctcctccgaacgtcgttaccagtaactctgggccttcccgccaccctacctctgcttccttccttcca

SEQ ID NO: 227332 - DNA, 122 bp, Homo sapiens
cccctcgaccagcattccaccttctgttggccacactgtggtctcctagcccctgtagtccgggctccatcccgtctccccatattccgagctcacctccgcatctccctgtctccactctt

SEQ ID NO: 227333 - DNA, 122 bp, Homo sapiens
cttgcagcgcaggctttgaaagctgctcccccacctgaatggaaactcggaaccgccgggcggcgcgttccttctcgcccagccttgcaatccatgccgagaggaaggcagtgcgagcccgc

SEQ ID NO: 227334 - DNA, 122 bp, Homo sapiens
tagtatccctcttaggagaagcaagagagatttaggattgcttatttattgcagaacccacgtcttcttgcagattgcaaagccaattctgaaactgcctttgcaaaaattaaaacagtgag

SEQ ID NO: 227335 - DNA, 122 bp, Homo sapiens
gctcgtggctgccaggtccggggcctatccccgtcggcccgccaaggtccctctcaccagcgtcctgtttttactgcacacatagtttgcagctgccctgagggccgactttagagagagca

SEQ ID NO: 227336 - DNA, 122 bp, Homo sapiens
gccaggcccagatccgggccccctgcgctgcaaggccacctcaaagctcgagcgggtaggcgcccgtccgtcccttgccaaacctgtgctgtgggccaggcctgagctgggagccggggacc

SEQ ID NO: 227337 - DNA, 122 bp, Homo sapiens
ccctggaacgctgtggttttcgaggggaaaagtgagagtggctggtcctgcctccgctgccgcttggccctgagatccccactgcccacgggataggccccagtccacccagccggggcccc

SEQ ID NO: 227338 - DNA, 122 bp, Homo sapiens
ctgtctctttaaataaacactgccactactgttttccaggaggtcagccagccagtcagccgttcctctctttgaatgcattttatcttccttcaataaactctgctacttaacccttgttg

SEQ ID NO: 227339 - DNA, 122 bp, Homo sapiens
gccccagctgctggaatttgaaggtgagtctgactccaggcagggtctcccagccctatgcggactctgaaagcctctcctctcccacgccggcccccaactcttcacctgccacccccaca

SEQ ID NO: 227340 - DNA, 122 bp, Homo sapiens
tcaccccacgcgccctccccacacagtccacgcgccagcagcttcgcggatgtcagtgaacgctcttcgcttgcgcagtcagaacgtcctccgcggccgtgtgaacatccgggtcacaggcg

SEQ ID NO: 227341 - DNA, 122 bp, Homo sapiens
actctccggaggccaaggctgtctggtgaacggctaggggctgctgggcacagagttcaacgctgcaaatatttattagacacctactgtattcccaggccctgagcagagctggcctccaa

SEQ ID NO: 227342 - DNA, 122 bp, Homo sapiens
ctggccaaggtgcagaggccgggccgtgtgcctgggcggggagggccgcggcgcccgcctcgtccagcaacccccccctgcgcgccacgtgcagagatctgcctgctcacccggggccgccg

SEQ ID NO: 227343 - DNA, 122 bp, Homo sapiens
accagagggctcctgggtctagcggtgaagccagcgcctgggaagacgcccgttgccaagcggaccatggtctagcggtagcgtcagtgcttagaaaaggcaccggttacttagcagaccgg

SEQ ID NO: 227344 - DNA, 122 bp, Homo sapiens
gatctctggagttctctgtgtgcagttctgtcttcttcagtactgtgccctgagaactctcgcactcatggcttccctggactcctaaatctttcttctacactcaggtagaccaccttatt

SEQ ID NO: 227345 - DNA, 122 bp, Homo sapiens
ttgggactccgttattcttccacagcgtccttcctcccgtaatatccagcctctttatcgcggggctcgggagcccttggagttgatctcgccaccattatccccccgggcgagcgcggagg

SEQ ID NO: 227346 - DNA, 122 bp, Homo sapiens
ctggggagggtcggcgcggcgggcagggaggagttaactacagcggcgcctctccgctctcggctgcttgcgttccgcacacactgatcccgctcacgctttgcctctggttaaaactcaac

SEQ ID NO: 227347 - DNA, 122 bp, Homo sapiens
gtttccagggaactgccagacaggtcaaatatgacagttcttttggagatgagacttttacggtattccaaaccattctttcccttccagtggctgctagtctgctggtttttactgctgct

SEQ ID NO: 227348 - DNA, 122 bp, Homo sapiens
gtcctccaaggactggccagtctccagatgcccgtgcacacaggaacactgccttatgcacgggagtcccagaagaaggggtgatttctttccccaccttagttacaccatcaagacccagc

SEQ ID NO: 227349 - DNA, 122 bp, Homo sapiens
gacggcatctgtggcagcgcacatgtacacaccgtgtgtggtggtgcagctgcctctgcccgggatgcatgatgctctctgtggtcctcgtctactgtgttttttttttttaattctacatg

SEQ ID NO: 227350 - DNA, 122 bp, Homo sapiens
gtgtcgacttggtcccgtcagccggaccccacctggacggctggggccacttgtggtcgccgggaggtaagagagaaaaccaatggaagcaccttcagaggagagtgccttggaaggaatct

SEQ ID NO: 227351 - DNA, 122 bp, Homo sapiens
ttctatttgaatgcatccttgtacagtctagtcaatgtttgcagaagaaaattctgcaaacgtatgaaaagtgtcttttctgtcacaggcaggcatgcttggttgaggtcaccagtacggag

SEQ ID NO: 227352 - DNA, 122 bp, Homo sapiens
cggcaagtgggcagctgaagatgatgaggatgacgatgttgataccaagaagcagaagaccgacgaggatgactagacagcaaaaaaggaaaagttaaactaaaaaaaaggccgccgcgacc

SEQ ID NO: 227353 - DNA, 122 bp, Homo sapiens
gtggcgcccgcttaccttgaggctgggtgaggctcgccccgaaatgcggggcgtggggggcggggggcagaggtccctgcctagaggggaagaggggcgtccatgtggcggaatggatttat

SEQ ID NO: 227354 - DNA, 122 bp, Homo sapiens
aggtggactaccaccttctgatacaattgttctcaattgtggcttcactttagaatcatccgggaaactttaaagaacccctatctaggaattgacattgacagagacgttaaaacctaccc

SEQ ID NO: 227355 - DNA, 122 bp, Homo sapiens
aggaaggacgagcggctttgttggattggggctggagccccgtgcccggctgtgggtgctcgtgggagagcctcgcccggccctgcgcttcccgagagttcgccgggagcacaagccctgga

SEQ ID NO: 227356 - DNA, 122 bp, Homo sapiens
tccagggtttggaggggcgcgagctgccgggggttggaggtcgaggtgagtcgcggggcgcgcgcgctcgcgggtggccgggacggggcggccggttaccatggccaccgcggggcgggccc

SEQ ID NO: 227357 - DNA, 122 bp, Homo sapiens
gattaaaacagcaatgataatccccatgtgcttgtactataaacactttcaggccaggcacggtggctcacacctataatcccacagtttgggaagccaaggcgggcagatcacttgaggca

SEQ ID NO: 227358 - DNA, 122 bp, Homo sapiens
gctgcggggatcctgtctttgtgggaggcaccaagcgataagtaaataccccttgcctcccgcctgcctcgtccccactgactcagcttgtagcaacctggcccgtgggtccccagtgttca

SEQ ID NO: 227359 - DNA, 122 bp, Homo sapiens
cggagacgcacgtccacacagagcccggagacccacgtccacacacagcccggagacgcacgtctacacagagcccagagacgcacgtccacacagagcccggagcatgaatgttctcagca

SEQ ID NO: 227360 - DNA, 122 bp, Homo sapiens
tctggagtttgttccttctgatgtttggatgtgttcggagtttgttccttctggtgggttcgtggtctcactggctcaggagtgaagctgcagaccttagcggtgagtgttacagctcttaa

SEQ ID NO: 227361 - DNA, 122 bp, Homo sapiens
ccggagtgtccgcacccaccctccccagcgcggtccccacctccgctctcccagagcccacgcagatggcctcagcccccgcccccggagtgtccgcacccaccctccccagcgtggtccca

SEQ ID NO: 227362 - DNA, 122 bp, Homo sapiens
aggaaagcctggataaaggtccagagagatgaatgacccaaatacacacgaccgaaccatcgcctgaaagtgaccatgcgttcaaacgttttaaaagccgtctaaacccgcagagcaggtgc

SEQ ID NO: 227363 - DNA, 122 bp, Homo sapiens
tgtccagggagggagagagcatgatattccgttcaatatcgcactaggtgtacacccacccggtgatattgatccgaatataatctccagggggtggagtatgacgttacttccaatatagc

SEQ ID NO: 227364 - DNA, 122 bp, Homo sapiens
aattaaagtggttccaatgtgaagagatgggctatttttgttccccctctggtcttgtttcgtcctgttttctcttgaaattgtctcttttactagttcttcactcttttgtacatgttttc

SEQ ID NO: 227365 - DNA, 122 bp, Homo sapiens
ggggatcagatgtctcatttcccaggctctaatctccaggcattcgtctatgaagcgattcgtcactttctacccaagatgacacaggcagaggctgatcctgggcaagccgcgggccacca

SEQ ID NO: 227366 - DNA, 122 bp, Homo sapiens
cccctgcagcgggctggccatgtagtagtctgcagtcactatccttactgaaaacatgttcgccgccgccgccactgcctcccttcactggcgacccggcagcggcagcagcagcggcggcg

SEQ ID NO: 227367 - DNA, 122 bp, Homo sapiens
ccagatgctgcctgcctgcctgcagaagcctgcagtggctgctgctcctgcctctgcagccgcccctcctcctccacccaggccccaactcagaggctccgcggcccggccagccctcagct

SEQ ID NO: 227368 - DNA, 122 bp, Homo sapiens
cgtggtcctgcgaggaggtgggcggggcgcactgtggggcggggccggtggggacgtgggcggggcgcattgaggggaggggcctgcggggaggtggggtgggcccactgtggggcggagcc

SEQ ID NO: 227369 - DNA, 122 bp, Homo sapiens
ctgcagtcacctgtgtgccgcccgcctgtggtcctgggagcccgaggccagcccggctgccgcatcctgctcttcgcactccaggtctcagacaggagtcactcgcctcttcgtgccacgcc

SEQ ID NO: 227370 - DNA, 122 bp, Homo sapiens
ctatcctggcagactgaagctggggaaagtgtgcaagtgacacgtggtcagcaagcacagcgccatccaacactaagatgtggggccaggaaggtggacccagctatcagaggggagggggg

SEQ ID NO: 227371 - DNA, 122 bp, Homo sapiens
caccgaagtactttaattcactaacacgtttcacgctgtcatgctgacccgaagccgggacgcaggagggccaaagaatccaagcaattttagaaaccccgttactgcccagcttgaattaa

SEQ ID NO: 227372 - DNA, 122 bp, Homo sapiens
gcggtaggaagggcgcagagcagcctcaggatgcagccagcgggcgaggaggcggagacccgctcgcccggcgcctggactcaccgcgcagccagccggcacccgcgtgcgtgtccttgagg

SEQ ID NO: 227373 - DNA, 122 bp, Homo sapiens
acacaagattacatgatccttattcccaactcaatcaaaaaggttggtgttaatggcatccggtcttgcaaaataattttcaaatctcatcacaatggaaaaagaaaactctggaagcttac

SEQ ID NO: 227374 - DNA, 122 bp, Homo sapiens
actaaagagtagtggagatggagcagccgggcgcccaggcgtccccaggacgcttagagacgccgaggctgccggcggcgtcgacagcgacagcgtttggaatgacgcatgcctcggtgaag

SEQ ID NO: 227375 - DNA, 122 bp, Homo sapiens
gccccgggatccagggactggggtcattgatttgggggaaggtagagaaggtaaaccccccgcctctgggttgtgttgactgtggtaccccgaccccagagctctggcttggtcctccctgt

SEQ ID NO: 227376 - DNA, 122 bp, Homo sapiens
gattatcatttcctctatgtatttttttcttatccccttcccctgcaaaatgaaaaaattcggtagtgaaaagtgtgaaggaaagacaattgtttcagttgagcagataggcttatcaaaca

SEQ ID NO: 227377 - DNA, 122 bp, Homo sapiens
tatgatccgcccgcctcggcctcccaaagtgttgggattacaggcgtgagccaccgcgcccggcctcatagaggtcttatacggatttctgggtagtattctaagcatgtaccaagtacttt

SEQ ID NO: 227378 - DNA, 122 bp, Homo sapiens
cccggctcggccccaacgccctctccctggcgcgcaggtttagaaacagggcggcctctccggccgccgcctcggcggctcgggtccccatatatagtcatatccaccgtcaactgggaggc

SEQ ID NO: 227379 - DNA, 122 bp, Homo sapiens
ctgcacccagatctcggattatttctactggaaaatcaaatggatgattgccctccacttcgttctgcctatgtagacaagacctgagacatgccccagcctctctccggaccagatcctta

SEQ ID NO: 227380 - DNA, 122 bp, Homo sapiens
aaggatgggggcaggtccctgcgcaccgcggtatcttcccgcccgctcaccaaaagtgcgcgcggcagggacggacccactccatggatcgcgcctctgtcaggccttctctaggaaaaggg

SEQ ID NO: 227381 - DNA, 122 bp, Homo sapiens
gctgctggcctgtagaggcgccgcttcgatgcccgggattccgcaagggtcaaccctgcgcgctcctgcctcctggtgttctggaggcagcagacacatcaagtttgtcgaagttagtcgtg

SEQ ID NO: 227382 - DNA, 122 bp, Homo sapiens
tggggtctctgctttctgcagctagcttccctgcttgactgcctagaaggcctctgctttcgggtttccatctctttcccctccagaggaccctacagcctaggcgggaggtggttaaggct

SEQ ID NO: 227383 - DNA, 122 bp, Homo sapiens
ccccactctcggcccaggcaccacctgcgccggtccccaggggctaagaacccgccgcctcgcagcacttcccccaggaccaccacagttggttgctgggcctgcgcctccctccagagagt

SEQ ID NO: 227384 - DNA, 122 bp, Homo sapiens
agaggcccagcgtcttcgcagggatgcaggctgctccggatccacctctgctccaggctccgtacccacgtgccttcccgcagcgcctcgtacagccacggttcctccggtacagattgagg

SEQ ID NO: 227385 - DNA, 122 bp, Homo sapiens
cgtggacttttacaattaattttgaaaactttaaagactggacccaagcccagccaagtccgtggccacgtcgggcgcagggagccaggggtcagggctgcgccttccccagaggccgagga

SEQ ID NO: 227386 - DNA, 122 bp, Homo sapiens
ccccggggccgaggaatccgcctgcccgcccaggcgtcggccacgagagagcgggagcctcgctggtccccatttcaggtactcccttggggcacctttcgtggtcccacaagatttcccaa

SEQ ID NO: 227387 - DNA, 122 bp, Homo sapiens
aaacaggctggaccggttcaagttcccagccagaccaggggtgggggtggcgagtgtgcgcgcgcggaggagggcgcggggggccgggaatgggcgcgctgtgggggcccgcgccacggcgg

SEQ ID NO: 227388 - DNA, 122 bp, Homo sapiens
aggccttttgacctgttttcttagttatttccccacagcctgggaaatgcggacgccgtgcgcctgtgcttctctctctctccctcggacagggggatggcctggggtgaggggtgcgcagg

SEQ ID NO: 227389 - DNA, 122 bp, Homo sapiens
tgttctgtcaataggaccatctgaacccgtaggagctccttgctggacaatgccaaagtgcggctgcagtatgtggttaaaagtcccgtggagagttggtaatgaggaggtgggggtgagga

SEQ ID NO: 227390 - DNA, 122 bp, Homo sapiens
ctgcctccccactcacagaagaccgagtggcttccttcctcggagtcaccaggcccatctcgcttattgtacagatgagaaaagcatctcagagtggagcagggatgtgaatgtgactcctg

SEQ ID NO: 227391 - DNA, 122 bp, Homo sapiens
ccgccggaccgagaaggagcgggcggcggccggggcagcggttacagttgtgcggcctgccgggccgctgagcgaggaccgagggtcaaagactgagtggaagcccgaaggcccggcgccga

SEQ ID NO: 227392 - DNA, 122 bp, Homo sapiens
ctcaagagacctcacctggcctgtggccagggtcccctgtagcaactggtgagcgcgcaccgtagttctctgtcggccggccctgggtccatcttccagtacagtgttggatggtctaattg

SEQ ID NO: 227393 - DNA, 122 bp, Homo sapiens
ctcctgacctcttaaggctctgtcagtcttaggtaacttgagtcagtaggtgggtgtagacgcctggtcaattcctgggaagcacagttcccctattaaccccttgtcataaagacgatttt

SEQ ID NO: 227394 - DNA, 122 bp, Homo sapiens
gtgcggctgggttcaaaatgtccccctgataagggagaaaggcaccaagctaacatctgacgtccagacatgaagagatgccagtgccacgaggcaaatccaaattgtctttgcttagaaga

SEQ ID NO: 227395 - DNA, 122 bp, Homo sapiens
tggtgatgaggggtgctggggccagggaggtggcaggagctggcagctctgcaaatggctcgggtgctgggcagctggtgaaggcgggtggtgcgggactgggctgcggcggtgccgggcgc

SEQ ID NO: 227396 - DNA, 122 bp, Homo sapiens
gagctattgttggtatttctaatctacaatttaatacactacaaagcataaactacatttcgggaaaatacaggttcagttttctggtgaatagtgcagctatattcctggaaataggaccc

SEQ ID NO: 227397 - DNA, 122 bp, Homo sapiens
gtcactgccagggctcgagggtggggggaggaggagacaggagagaggagaacgctgccacgccccgcccggctcccacccgtcactctgcctccgccgctcccacccgcacacctgtacat

SEQ ID NO: 227398 - DNA, 122 bp, Homo sapiens
atgtaccctcattttacagcagggaaaactgaggctcagagagggtaagcaacttgcctgcggtcacacagccaaaaagagaccaggatgggagccagccaaggtagcttgactcagaaact

SEQ ID NO: 227399 - DNA, 122 bp, Homo sapiens
ctggggttcaaatgagggcagtttcccttcctgtgggctgctgatggaacaaccccatgacgagaaggacccagcctccaagcggccacaccctgtgtgtctctttgtcctgccggcactga

SEQ ID NO: 227400 - DNA, 122 bp, Homo sapiens
cgaggcccctgggaatcccagcatgtgggtgctttacagacgaggctggggttgaggcagcgtgaatctccccgtttgcgcagcgggagccgaacgggcctcggactgaccgctccagatcc

SEQ ID NO: 227401 - DNA, 122 bp, Homo sapiens
agcggatcctccgcgaatcctcccagccttgactccgaaacgctttgtctcccatcgccccgcggccacccggatcccactcccgaggtcaggagcccccgactcttcctcctgcacctact

SEQ ID NO: 227402 - DNA, 122 bp, Homo sapiens
ttactcttgtgaaaggatgcactgaagcctgccctggttacactggagtccaaggtgaagcggatgaccgtgtactctcagtagaccggatgggcccagggatctctctgccacagagaact

SEQ ID NO: 227403 - DNA, 122 bp, Homo sapiens
tcctccgcagcgcgggcgccatggacaagatcttggaggcggtggtgacgtcgtcatacccggtcagcgtgaagcaggggctggttcggcgcgtgctggaggcggcgcggcagccgctggag

SEQ ID NO: 227404 - DNA, 122 bp, Homo sapiens
gagacctccctttcctgttacatctgaaagggtaacaggactttgctcatgtcctgctttcggatccccctccccctcccccccaactgtgtcccctgagggtctcgttaatagattactgc

SEQ ID NO: 227405 - DNA, 122 bp, Homo sapiens
tatctagttcctgtgaaaattaccagagcaactgtgtggttttctggacacattgttatccggctatttcaccttccctggcttttagtttaccacgcctttagacttcaaggtgacggtca

SEQ ID NO: 227406 - DNA, 122 bp, Homo sapiens
ccgcggggcaagagcggggctgcctgagcccgcggagccacgtcaggcccccagctcccccggatcccaccacgcaccaggcccctccgcccggcaagtggcccaagcaggcatccgcaacg

SEQ ID NO: 227407 - DNA, 122 bp, Homo sapiens
ggtcacagggtcctgaggagggaccgtctgtctgggggtcacagggtcctgcggagggaccgtctgtctgggggtcacagcgtcctgcggagggaccgtctgtctgggggtcacagcgtcct

SEQ ID NO: 227408 - DNA, 122 bp, Homo sapiens
gcctcgccgccccggctctgcagaactgagttggactccgcatttcaaaggccgctccagcgctgacatgctctgactgtgattctacccagatccgggaggatgggggcgggggcttcagg

SEQ ID NO: 227409 - DNA, 122 bp, Homo sapiens
gcgcttgcgcgggttgagggcggtggctcaggctcctggaaaggaccgtccacccctccgcgctggcggtgtggacgcggaactcagcggagaaacgcgattgaggtaggtgtcctgatggg

SEQ ID NO: 227410 - DNA, 122 bp, Homo sapiens
tattcagccactgaactatgcgctcatttgtaggtacttacggtagttgaaggcccgctccgatgttggagattctccagtgagctcctccagatgcagcaaactgcccggcatgagaagag

SEQ ID NO: 227411 - DNA, 122 bp, Homo sapiens
ttagggcgaagacgtaactttgcttagtctcggtttattggccgatctcttgtcaagcggcggaatcgttccgttcgggaggtgggaggggagcggggccgccgggggcgggcgtcttcagt

SEQ ID NO: 227412 - DNA, 122 bp, Homo sapiens
ctgcgaggaggcgtgtgacgtggctattcccggcttgtggtggggacggtggaggcagagcgggcactgggtgcagatgcggaaactcatcctgcttcatgctcgctcatgctcatgagctc

SEQ ID NO: 227413 - DNA, 122 bp, Homo sapiens
ccctctccgcccctcccgggctttccctacgaatggagcggacccggcaggtggagcgcccgcagcccagggcctcgccgccttcccggtgcaccccccgacctcccccgtcccggcctcgg

SEQ ID NO: 227414 - DNA, 122 bp, Homo sapiens
cactgggtaggactgaaaggcagggactaaggtgacagctgactctgccggggcggagtgcgtgtcctcccaccgtgctggcgctgaactgactgtccgctgccaagggaagtgacagccgc

SEQ ID NO: 227415 - DNA, 122 bp, Homo sapiens
acggcgcggggcggagatgccgatcaatagtggggctggaggcacgagtctggccagtcccggctgggaatggggttgaagacgaagggcccagcctgggggtgcctgagactttgggcggg

SEQ ID NO: 227416 - DNA, 122 bp, Homo sapiens
ggagtaactgcaggaagagaatgagcagggtggatgaaagaaacacgtttgttcttaagccgcacagatagcattactctctggagctgtcacgagttcagtgttaatccaataagatctgt

SEQ ID NO: 227417 - DNA, 122 bp, Homo sapiens
gttgccgtttcacacactgcatattgctttgcagtggagagctgaatccacaggcagggccggacccaccaatgggctgccgtggataggctttgggctccagcaccacacacatggccaca

SEQ ID NO: 227418 - DNA, 122 bp, Homo sapiens
ttctggtgccaggcttgcttttcagttgggcctgacccacttctcttccaggaaagcgcccgccttccttctgcacccgtcaacctctggagtgtcctgaaaaccctcccttgtgggagtct

SEQ ID NO: 227419 - DNA, 122 bp, Homo sapiens
aactggagcggcgctccgcgtttggaaagggttttgaagggggttctaagggggagtgggcgcctaggactccctatgggagtcggtgggttataccttgactgccgttgatttttatttaa

SEQ ID NO: 227420 - DNA, 122 bp, Homo sapiens
aggcatgcatgtccagtgactcttgtgtttgctgctgcttccctctcagattcttctcaccgttgtggtcagctctgctttaggcatattaatccatagtggaggctgggatgggtgagaga

SEQ ID NO: 227421 - DNA, 122 bp, Homo sapiens
ctcacggcctccctctccctccacgggcccctctgcatgccgtcctcacagcctcaccgacgtcaccattgctggccccgcttcaggtgacaggccacagtagcacctgtcagctctgtccc

SEQ ID NO: 227422 - DNA, 122 bp, Homo sapiens
cccaattccagccacagttcggagctttgtacattgttgcatccttacttagctttcaaccgcaactgtatccctgccatctctacttcaatgttatctctgcaggccaaacataacccacc

SEQ ID NO: 227423 - DNA, 122 bp, Homo sapiens
agagagatatggaaaaatcagaggtcctactcaaggttaggggtgcctgtggacaagttacgggggctggagggggatccctggctgcctaatggacaaaccactctgacctggggactgtc

SEQ ID NO: 227424 - DNA, 122 bp, Homo sapiens
gccttttagcgcctcctggtctccagtgagctggtccgcagaaccccaggggcgtggggacggggctgccactcccggacccgcccccttccacacccttcccgcagctcctctgcaaaacg

SEQ ID NO: 227425 - DNA, 122 bp, Homo sapiens
gctagtgcatgctctgtcttttccttcagaaaacgaccttcaggaatcagcctgagtgttcgcgcccgagcccgattggaagcaggtgcgtggtcgcttcactctccccgtgcacaccttga

SEQ ID NO: 227426 - DNA, 122 bp, Homo sapiens
tgattatacgacttttaagcaaagttgggtgtaattaggtgaaaacagcccaggtcctcccgggagcacagaggggctaggggctggtccttctcgtttgctctagtcttgctttgctgtct

SEQ ID NO: 227427 - DNA, 122 bp, Homo sapiens
cttcggcacggtgggagttgtagttctttctctgatgtacacatttgcatttccagggtgcgtggtttggctactgaactacaattcccagcgtgccctgggcgctgctcctcgcgcgattt

SEQ ID NO: 227428 - DNA, 122 bp, Homo sapiens
aacaataccattgactggtactgtttggggaaaaagctcaaatcctggggcttaacagttcggactataactgattgactggttcctgtgctgagtactttgcatctattatttcaatcaat

SEQ ID NO: 227429 - DNA, 122 bp, Homo sapiens
ctgagcctaatttccttactgttaggaacttgataagaatatctaacttcctctcaggatcgtggctggaattaaatgagacaaaatatgaaaaataccagcacaaggccatcagtaattgt

SEQ ID NO: 227430 - DNA, 122 bp, Homo sapiens
gtttgtttcattgagagacagtctcacactgtcacccaggctgcagtgcagtggccatctcggctcactgcaacctcctcctcccgggttcaagcgattctcctgcctcagcttcccgagta

SEQ ID NO: 227431 - DNA, 122 bp, Homo sapiens
acccacagacgtgcagctagagtgtccccgaggagctgagtctgcccaggagcactctgccgcgggggtgccaagggaagtgccagctcagagggaccatgtgggcgcaggcacccaggcgg

SEQ ID NO: 227432 - DNA, 122 bp, Homo sapiens
gtcacgcactacatatcccagggtgggtcgcggcgaggtgggtgaaatggacgtcgctcacgcattttgggggaattctgggcattgtagttcctcattgagggaggctctagcgcagtaca

SEQ ID NO: 227433 - DNA, 122 bp, Homo sapiens
tgctcgcatgagccaccacgcccagtgtattcagattttcttcgtgtttcttttctcttccgggatcccatgcaggacaccacgtcgcatttagttgtccaccacggtttttttgtttgttt

SEQ ID NO: 227434 - DNA, 122 bp, Homo sapiens
acctggggcccttgagggtggacgcaacctccgagccgccagtccctggcgcagggcaagcgctgcggtgtcagtcccggccccagtcccggtcccattcacaagtcagcggcggctgcgag

SEQ ID NO: 227435 - DNA, 122 bp, Homo sapiens
ggattaaagatcaggggtccgctgagccctaggaagcagtgacagacacctgcgccaaggcggagcgagaagagcctggaatggctccgggctttgcgtcacgcagctccgcccctcggcct

SEQ ID NO: 227436 - DNA, 122 bp, Homo sapiens
caattttagccctggagactattccagaggtggagtgctgctgctattgctgtctcttaccgcccttctttctctgtcacacagtccagcctgactggtgctccggccagctgcctgcctcc

SEQ ID NO: 227437 - DNA, 122 bp, Homo sapiens
ctccagagtgggtggagaggggctgttgagcccccagccccgggccacagagctccgagacgttgcggcgggcgcctgcagctcagcagcagaggccgagcccgcgctcatccccccacctg

SEQ ID NO: 227438 - DNA, 122 bp, Homo sapiens
ggcattatgtatgaaacttgagcataacatatactttataagccagtaatacctctactacgtatatattcaacagaaatgcatacgtatgtgtaacaacatgtataaaaatgtttatagtg

SEQ ID NO: 227439 - DNA, 122 bp, Homo sapiens
tgtgcgacgggccgggccaggactcttaaacccggagctgggatcagataagggcttgtccgggggccggggccggggtcgggccggccgggggcagagctgggccgggccgggccgccccc

SEQ ID NO: 227440 - DNA, 122 bp, Homo sapiens
gcacccagcctgtggctggcggggcaggggacctgcaggtcaggccaagcagagtggctccggctatgcccccgagcctgcaggctacgccacggtctggcggctgaagagctcgagggtga

SEQ ID NO: 227441 - DNA, 122 bp, Homo sapiens
ggcgctgccactgctgccgctgcccctcccagtcgccgctgactccaaaccactgggctgcgcccctgcggaagcagacaagggacaggtgggcatacgcttgtctacgcctgtgcacctga

SEQ ID NO: 227442 - DNA, 122 bp, Homo sapiens
gaaaggggcgccccctgggctcggcctcggaggagcgggccggcccccaggtccctcggccgagcccacgtcccgggcctcgttctggagaaccctccagctgctgcttgggcgtcttgggc

SEQ ID NO: 227443 - DNA, 122 bp, Homo sapiens
ggcggggtgtattaaaggggccgcgggggcccacgctcccctggagcagtggctggagcgcgggcggagaaagaagcgctctggacttggagtgcagagctagttccctcaccctgctagct

SEQ ID NO: 227444 - DNA, 122 bp, Homo sapiens
gagggggtgcctggaccgactatcctgccttcagagaagtcgcctaaatccagggcaaggcggccctgctcacaggatgggaagggggcacaggcctcccccaccacagcctgctgcctgcc

SEQ ID NO: 227445 - DNA, 122 bp, Homo sapiens
gaggtgccgaggcgcaccgagtggccactggccagagacgtggatgacaggcgccgtttgcgggccccactacagttgttggggatgctgaaggcacagcgcttgtggtagttcagcccgca

SEQ ID NO: 227446 - DNA, 122 bp, Homo sapiens
aagggccagttgagacgctgtccacggtgcccaaaggatgggcccgggtggggcggggggcggggggcggggggggggctggcgctgtcctcctccgtggtgctgaaaccgggaggaccagg

SEQ ID NO: 227447 - DNA, 122 bp, Homo sapiens
ccgcagccacgtgcgggactccctcctgctcgcggatctcgagaccggaagacgaaggaacgtggcctcgtagtaaaccgtagtaaagagagaagggaaacaaaatggggctcgtcacatgg

SEQ ID NO: 227448 - DNA, 122 bp, Homo sapiens
ccgcagctcctagtaggtggtgggggcgcagcggctgtccccactcagtcctggtggggtcgcacgtaacggtcctgagctatgcataagccgtttgaccacgcatggagaattttaccacc

SEQ ID NO: 227449 - DNA, 122 bp, Homo sapiens
tcctccccatctctgctcagtccccctgaccaagattcttcagagttcggtgtccctcagcgcccatgccctaccccttccttctcaccggggcccttcttatcatcagtcactgcatcctg

SEQ ID NO: 227450 - DNA, 122 bp, Homo sapiens
gggtgggctgcccactcggcctcaatgtgggaatgcaggagctgtgtcctggggagcaatcggatctacctgggtgggggcagggcagagggaaggagaattggaggcgggctatctgtgac

SEQ ID NO: 227451 - DNA, 122 bp, Homo sapiens
ggcctcacccagcaggcaggacgtggcaaacgggccacagaccccacggcagctccggcacgcccccagacatccagagcaaatacgtgtcacatagcgggggcagctggcgcgagggcact

SEQ ID NO: 227452 - DNA, 122 bp, Homo sapiens
gacatcactgagagagatcctgcctatgtcccttccattcgcagaccttttgggggtgtccgagcctctgccacaccctgagatgctacctcacactccccagaggcgcttagaaccccacc

SEQ ID NO: 227453 - DNA, 122 bp, Homo sapiens
gtgccttcgcggtaccttcgctgcacggtgtgtgttcccctgggatccactgacaagcagcgtgggaaaacatcccatggatgtctctttacatgggcgggacgcttaagcacgacttggag

SEQ ID NO: 227454 - DNA, 122 bp, Homo sapiens
gcgggcacggcctccagcagcagatgcatgcagcgcacggtggtgcggaagcacaggcagcggctcggacaccctgcgcccggcttctgggccaccacggccagcgtcccccaggcgcagaa

SEQ ID NO: 227455 - DNA, 122 bp, Homo sapiens
ccgggcgcgcgtagtagggctcccggctccagatctcctgcccgtaataatcagggtcctcgagggctgcgccctgggctccgaccccggccagggtcactgccaggagcaccagggccagc

SEQ ID NO: 227456 - DNA, 122 bp, Homo sapiens
gggagcggacgggccaggggcctctagggaagcggcgctccgggaccggggtggctttcccgtctctgtgtgcgcggcgatccccacacccagctcgggcggaggagccctgagagaagcgg

SEQ ID NO: 227457 - DNA, 122 bp, Homo sapiens
ggcgcgcacctgggtctcggtgagcatgagcgaggtggccacctcgaagcgcttgggccgcgacaggtacttgttgagcttgaactggtgctccagctccagcagctgctggctggtgaagg

SEQ ID NO: 227458 - DNA, 122 bp, Homo sapiens
gaaacgatgctaaatcttaacccccctctcgttgggaaacgacatctttaatcgcgccctcgcctccagacctcggttcccgctccagcacgttaagcagggcgcactcaccgcatccccgg

SEQ ID NO: 227459 - DNA, 122 bp, Homo sapiens
catgttcaacatgcagaaggcaggccagtgtaactgtaggatgagctacaacagggagggcgcaggaaatgaggtggagaggtagatcacgtggaactttgtaaaccacagtagagtcggga

SEQ ID NO: 227460 - DNA, 122 bp, Homo sapiens
atggtggtgtggtctccatctttttcctgaagggccgcagcagcaaggccaagaaaccgccgggggagaatgacttcgataccatcaagctcataagcaacggtgcctacgggtgagccacc

SEQ ID NO: 227461 - DNA, 122 bp, Homo sapiens
gctggggttctcccaggatctgggcacaggccgcttgctctggctttggcgcccggccgccgcccttatatgcagcctgctcggctgccccgccccggccctcccagctcggtgcgtcacgc

SEQ ID NO: 227462 - DNA, 122 bp, Homo sapiens
accacgggccactgtgaacgcacatttattacccggtgtcagttgacgcccttctccaatcgcccaagagaagatggcttcaaaggccacaaacaatctccacggcaggacagagtgctggc

SEQ ID NO: 227463 - DNA, 122 bp, Homo sapiens
gcattaattctcatcgttttgcattctagcagtctgtgacaagcaagcatgcgctgcgtgcgtcaggcaaccagactgcaaagaggagaggaggctggggaagccgaggcgagagttcaggg

SEQ ID NO: 227464 - DNA, 122 bp, Homo sapiens
cagaataagaaaatgaatgaatgaggcaaagaaacagatttgtcactccccacgcgatcgcgcccacaaaagaaaacatggttttaaggcgtggaaaatgaagttgtactacagacaaaatt

SEQ ID NO: 227465 - DNA, 122 bp, Homo sapiens
ctgacttcaagaatgaagccgcggactcttgcggtgagtgttacagctcttaaggtggcgcgtctggagtctgtcccttctgatgttcagatgtgttcagagtttcttccttctggtgggtt

SEQ ID NO: 227466 - DNA, 122 bp, Homo sapiens
cccacatcaccaagcattacccctactaccggacggccgacaaaggctggcaggtgaagccgagtccccagggccggatcgcctctgaaggcccttagaacatggaactcacaggcatattg

SEQ ID NO: 227467 - DNA, 122 bp, Homo sapiens
gaccgctagtggctgggaagtgggcggtgctggggggtgagtctcggcccctccaagatgcgcctcccatgaaatcctccagtcccacgtgtactcacacgcatacggatgcatgcacacgc

SEQ ID NO: 227468 - DNA, 122 bp, Homo sapiens
taaaatctcaaatcaggagaaatttctaactgtaaccaaagggagcaggcaggacccagacgctgcaggcggtgaagccagctgaaactggcatggtcatgcagcctggggcggacgctgtt

SEQ ID NO: 227469 - DNA, 122 bp, Homo sapiens
ggaaggcgcaagatgccctctgaaagggtgacctatcccagcagttctaagccgccgttgcgtgtttttagttattaataggacttccagaacaccgctccgtggcggtggttttctaagtg

SEQ ID NO: 227470 - DNA, 122 bp, Homo sapiens
cctagttcctcctcctcttacaacagtctaagtgggagatccagctcttgctaacagacccgaaagcaatgagcgtacctgagatccagatgttcagcctcgtaattaaataaatagtgaaa

SEQ ID NO: 227471 - DNA, 122 bp, Homo sapiens
tctcggtgcccaaggtcaagagagacaccgaagcccggaaatgccctaagcgggaatcttcggagcctgcccattggcttctgctgaacgggagggtgggccctggggcgctccgcttactg

SEQ ID NO: 227472 - DNA, 122 bp, Homo sapiens
cgccatatctgctgctgccgccgcagttgcgaatgcagcatcggcgcttagctgcctccgcggtgcagctaaggttcgtgtcgctaccccttggcccttcgctcttgctgccttaaccccgc

SEQ ID NO: 227473 - DNA, 122 bp, Homo sapiens
cggccagagcgcgcttccttagtaggtggatggtggtcggagcgccgactcccttctcgtcgtcgccattttgagctggtgactgtggccggctgggagtaggcggcagtgagtttccctgg

SEQ ID NO: 227474 - DNA, 122 bp, Homo sapiens
tcctagaaaaacagtattatcgtattttgttcccggaggtgcaggcgagtgcctggtctacgggtgtttacaatcatcaccgggcacccacaagagaccctgaacttagaatatttccgcgg

SEQ ID NO: 227475 - DNA, 122 bp, Homo sapiens
tctctggggcatgttcatccatttcatcacaacctccttcctcgtttatgtcaatacgttcgtcttcactaagttcctctgctgcacatgtggagccaaatggtggcgacgtcgtcggtgga

SEQ ID NO: 227476 - DNA, 122 bp, Homo sapiens
aaggaaggatggctcccatggcaccagtttggttgccctacactgtgtgtgtgtgttatacggtgtatttacataaatacgggcatgggccatttaacagggacacattctgagatatacat

SEQ ID NO: 227477 - DNA, 122 bp, Homo sapiens
ctgaggcattgtgggttcggggtgaggaatgctggcctcccacggcaggccagggcaggtcgccccgggcctcagctccaccccatgcagcaaacttaataccctggacagcttgcatcagc

SEQ ID NO: 227478 - DNA, 122 bp, Homo sapiens
gagtgatacaaaagggacttgatttgggtaaagtgcttcaagcgctacttaggagaaagccgtacattctcgcgagtattattcataatgtttatggatacatgttggttcagccgctcaga

SEQ ID NO: 227479 - DNA, 122 bp, Homo sapiens
catatacattcagggcgcacagtcacacacacatgcccccatcgttatgcacaatgaccccggcaggatcacactccttacatgagcatcctccggtgcatgcagacccacacagcatgtgt

SEQ ID NO: 227480 - DNA, 122 bp, Homo sapiens
cggcccgggcggggctgctggccctttaagagcctcgttttggcgccgcctcggggttatcgatcgcagccttggaaacgcgattagattatcccggctgggaacggcagcctggcgggggc

SEQ ID NO: 227481 - DNA, 122 bp, Homo sapiens
agagcgtgtgggtctctcggtgaggcctccacagagatcagtttacgggctgcagcaggccgtttgctgagaagctcagtgtttgggtgcagcagctccaagcaacagtctctccaagttaa

SEQ ID NO: 227482 - DNA, 122 bp, Homo sapiens
cctcctgtgactcggctcctgcccagctcccagcggcctccgtagacccgaagcctcctccggtccagctctccaggcctgcctcctgcctcgtggcggccttccccggccatgctcgtgcc

SEQ ID NO: 227483 - DNA, 122 bp, Homo sapiens
ggaaccactcttggtgatcaggttttcctctgaggtgtcatttctaatcacactgaacggcggaaggtccttgggtttctttcctgctttgtgtctgcagcatctcaaagccctctgcctct

SEQ ID NO: 227484 - DNA, 122 bp, Homo sapiens
gagtgtccagagaaggtgttaaaactcagcggctaatatagaacgctttatgagtttccacgagaataagtcaaatgtaaatgagcctcaagtctggatcacaaaggtctttccctaggtcc

SEQ ID NO: 227485 - DNA, 122 bp, Homo sapiens
gctctgctgtgttggttcttctgcagccctttctgtcttaccgataggttgcccctgccccgcaggagccaagagtgcccagtgaagctttctctgtggatgggactgatacacaccatgac

SEQ ID NO: 227486 - DNA, 122 bp, Homo sapiens
agactagggactggggagtgcccttggggcggagagtttgcctgggttttcgcccagcgccggacctctgccattgagacctcttcaggtcctggaaaatccatggatacccgggtgctgcc

SEQ ID NO: 227487 - DNA, 122 bp, Homo sapiens
cccggctatgtaaacatgtaaaaataattctgagcttgcggggccggacaaagtaggcggcgggtcttggctcgcctacccctgctatataaatcattaattatgataccaatcttaaggag

SEQ ID NO: 227488 - DNA, 122 bp, Homo sapiens
atttgttaagaatcactgccttactgcagaaaccatgacaaatctgcaatattttctgtccggattcactgatttttagctgacctcctctactcatttctaccaactcaactttctttcca

SEQ ID NO: 227489 - DNA, 122 bp, Homo sapiens
tgtttaacgtgccagtcacaaagatcacagaaacagtgtatgcccgggcataagatagcacgactgtgtatgctctggaggactgaaaggctgtacaagccctatgtattttttttcaaata

SEQ ID NO: 227490 - DNA, 122 bp, Homo sapiens
ctgccgtgcgcgcgatggagaaccgggccccgcgcgctagtcggcggagggaaactgaggcgataaaagacgcacgagtaccagaccgcgcccttgctgaggacagcccgggagccggacag

SEQ ID NO: 227491 - DNA, 122 bp, Homo sapiens
tgctattgcagcttgtgcgcggtaattaggttgatgtaattatggtgaaataaaggcagtcgcactgataatttcacagtgaatattaaagacatatgtgccttccagtgtacaatgaatga

SEQ ID NO: 227492 - DNA, 122 bp, Homo sapiens
cccagaggccttgggggcaacctgacacacatggtcctgcatgtgcgacttgggaggcgacgtgaccagctccaccaagccggccatatgcagggcccggccgaatcccgggtttcggcgct

SEQ ID NO: 227493 - DNA, 122 bp, Homo sapiens
cagtggagcgactcttactgctccctcctccaaccatgaacttccctttgcccagtccaacgcgagcacttagcgccagctattcctggggcgcaagcgctgcagccatctgtgaacttagg

SEQ ID NO: 227494 - DNA, 122 bp, Homo sapiens
gggccggaacctcaagaaggaggtcagccgggtgctgtgcaagcggtgcggtaagttcctcgcccttgggggcgcgaacccgcggcgaggagggcgcatcccgggcgcgcgggcagcggggc

SEQ ID NO: 227495 - DNA, 122 bp, Homo sapiens
ccctggggccctgcagcaccgagggccgcgctgatctcagggctcaggcggacgaggggccgccacaggcaccttaggaccctggcggcctgaaggcctggggccttcaggaaagcctcggg

SEQ ID NO: 227496 - DNA, 122 bp, Homo sapiens
ggcactggggagcccacgtgactctgtgggaacgaggccatcacagtggcctcctgggagcggaaggtgttgcctgatttgcttctttccccacaggctgagctggttgcccacaggggccc

SEQ ID NO: 227497 - DNA, 122 bp, Homo sapiens
ctagcctttgtcagaaatgcagcaagtcatgctaacttgcaagggagtcaacagagggcacgcggtgcctgcggggccgggacggaagccccgcccccggcgcagttcccgcctgttagcgg

SEQ ID NO: 227498 - DNA, 122 bp, Homo sapiens
tcctgggcgggccagccaggtgagcgtcccgcaggcaccctgacggccccgcagcacccacgccacacaccctcctggccccgcctcaccttgcaggtgcccccatgctgacactgcccgcg

SEQ ID NO: 227499 - DNA, 122 bp, Homo sapiens
gggggctcagggggtcccctgggcaggcccccagagggttctgggggtgtcggtgggtggcgccgggagcggagctgctgccgagactggagttgatggcgcagttcagagacacgctcctc

SEQ ID NO: 227500 - DNA, 122 bp, Homo sapiens
cacaacgcctgctgctacgtgggtgtcggcacgcagctgaaggagcgatgggcaacccagcgggtgccaaccacaggatgggcctgttcaggtgtcaggaagagatgctgagtgagatcacg

SEQ ID NO: 227501 - DNA, 122 bp, Homo sapiens
gctcccctgtgccttattctacctggtacatcgtctcgactcccttggggctgtgtttttcggaagacatcagtctcacacaaacccatcccaggaggacaagtgatcccaatgattgcatc

SEQ ID NO: 227502 - DNA, 122 bp, Homo sapiens
attgtgtgtggaactatcccaggcttaggaggacgttttagcaaccttggcccctgcagccgggtgaatgccataacaacccccagttattgttacagctccaaatgagcccacacaatggg

SEQ ID NO: 227503 - DNA, 122 bp, Homo sapiens
gcgcgtagacatctcggatgcactcccccttggggttgaacaggaatttgtagtagctgccgtctgcacaaattgctgggatagaaggagaccattttacctgtgtgtttctttccctcaag

SEQ ID NO: 227504 - DNA, 122 bp, Homo sapiens
aataggtaaaagaactgtcaacttacccgccaaagtatgctgacgcgcatatctgctttccgcttcatttcgagttcataaatttaaaaagagacagtgagagaaagaaaaagaaaaaaaaa

SEQ ID NO: 227505 - DNA, 122 bp, Homo sapiens
gccacgggccgggcctcacctgccggttcccacccacacctttcccggttgtagtttctgcgctcagcgaacaaggtcaggaaagaccacaaatgcaagcggctgtattctcctaggcagct

SEQ ID NO: 227506 - DNA, 122 bp, Homo sapiens
tggccccaggccaatcacacctgcctgcagtcccttgggccaccagcagagggcaggcaacgcctgcttctggggcaaaatatgggcccgctggggcggaggcctccttccccagagtgacc

SEQ ID NO: 227507 - DNA, 122 bp, Homo sapiens
ctgtcatgtctgtgccttcttataattacatgtgttggggtgtgctcagagcagggggcccgaagaatgcctcctctgtttacaacacacccaataggaatctggggtcattgtgacaaggg

SEQ ID NO: 227508 - DNA, 122 bp, Homo sapiens
ctatgcaagaggcaacagctaggacctataaaacataaggtccatcaccacaaaattccacgtagtattatgtcagaccgaagaacctactttatagcaagggaagtgtatagctggtccat

SEQ ID NO: 227509 - DNA, 122 bp, Homo sapiens
gagccactgggccagggtgcctctgccttcctggcctggctgaatccgctttgtgtgccccggccactcctgtcgggcagcagagccgcccagccgccccacgtgcagctctcacctggcgg

SEQ ID NO: 227510 - DNA, 122 bp, Homo sapiens
aatctccgtcttttccaggcaagcctgttggtgtatgtttaataataagtttccacttatcgttgcttaccatgtaccaaggactgtgcaaagcactttatttctttagtttgtttagtttc

SEQ ID NO: 227511 - DNA, 122 bp, Homo sapiens
tccaagaaaaatcacacagggtctggaagcaacttttatttggagaactagacttgagtacgttcaactgaaagccaatgcaagcttctgttcctctaaaatgatgtcttttgcctaagaat

SEQ ID NO: 227512 - DNA, 122 bp, Homo sapiens
atatcctaccttggtatgccagaaattctttcctgtgggcctcatggtccccaggcaaatcgggatatatgactagaaaccgcttgggtgtctttaagtattctgacggtgaaggtgattat

SEQ ID NO: 227513 - DNA, 122 bp, Homo sapiens
aatagtctgacatcatgtactaaatttccagaaaacagattatctaatatcttgggaacgcgattcaaggagcacgttcttctgagataaaaaacagcttttacaatacaagctattaaaag

SEQ ID NO: 227514 - DNA, 122 bp, Homo sapiens
gatcagctcagccaggcagcctccttcaaagttatcacgtgctttttctctttgaaccatcgaacccagcagtcagttaagggcccctgcaaggcgcttatcttgtttctggctgttggggt

SEQ ID NO: 227515 - DNA, 122 bp, Homo sapiens
ctctgtgtcaccaggaaggcgagtggccctctctccctctggctctttggcaggtggccacgcttgtatcacatggggaatttggcaaatcaagtccgattcttttgcagtgtagctgcagc

SEQ ID NO: 227516 - DNA, 122 bp, Homo sapiens
ggaggcttccttctgccttggctggatgaggtgtgctttcttcttcacggatgcagctcgcgggatccccaagcctttggtagtaaacacacttcctgggctgtcttttctctgagtccatt

SEQ ID NO: 227517 - DNA, 122 bp, Homo sapiens
tttgggccgagaggtccttctgcaaagacggcgtcaattaagccggctgttgggagctgccgaaggccccatcttttatagtcacagagtcctgtggtgagaactggtaatggaagagagtg

SEQ ID NO: 227518 - DNA, 122 bp, Homo sapiens
gcgcgcgccgaagatggctgagaagcagaagcacgacgggcgggtgaagatcggacactacgtgctgggcgacacgctgggcgtcggcaccttcggcaaagtgaagagttgagtacgcgctc

SEQ ID NO: 227519 - DNA, 122 bp, Homo sapiens
agggaggaaggtagtgctggaaccccttgcaggcctgactaaaagttgcagtggagaagtcgggtctgcaggaggcttggctggtgtgcgccgggtttcccagggtgggtcggggtgcccgg

SEQ ID NO: 227520 - DNA, 122 bp, Homo sapiens
tctcacgtctcttggctttaaatgagtttatgcctctggaccctgcaagaaagctttggtcgagggtagcatgacctcattgagtgtccgcagttggatcttcttctgtgggtctggaggtc

SEQ ID NO: 227521 - DNA, 122 bp, Homo sapiens
ctacctccccgctgggcagggttcgggacctgcatcccgccatgcctgagcctccccctccgagccgtgggctcctgcacggtccgagcctcccccaccaacgccgccccctgctccgtggc

SEQ ID NO: 227522 - DNA, 122 bp, Homo sapiens
ccctcagtcgtttccgtctgctggcgatagtcccggccgggtcgctggtgttgccagttccgcccaaagcagcttctaatagcatcaactgaaagagacctcctagaccttgtgtctagatt

SEQ ID NO: 227523 - DNA, 122 bp, Homo sapiens
cgccttcccccgttatccattggctgctcgttccgccgcaagttgggggcggggttagggcgcctttcgattgcatcagctggtccagccgaggccaagtcccgggcgctagcccacctccc

SEQ ID NO: 227524 - DNA, 122 bp, Homo sapiens
ggctgcggagctacagctggctgagctggagcgcaatgtagccctcagggaggctgaggtcgaagacatggcctcccggatccaggagttcgaagcggccctgaaagcaaaggaagcgacga

SEQ ID NO: 227525 - DNA, 122 bp, Homo sapiens
tggtggctgttggcttcttgtcaaaggtgcggctctttcgcagctcctggtacagctcctcgggggtaggggtggcgggggcgtactctagaatccagtagatttttctcaggtcataaaaa

SEQ ID NO: 227526 - DNA, 122 bp, Homo sapiens
gcctgaggagagggagctgtgggccacgcctgggaggggcccagctggggttactggccccgcatgagcctcggccatctctccctcctgccctctgcttgggggactcagggctccattct

SEQ ID NO: 227527 - DNA, 122 bp, Homo sapiens
aggtcaggtaatggaacttgtggaagctgtaatctgttctgggcaggaagaggctctcagcgacaccctcagtgaccagctccccgttgcacagccacgtgacgttgagcactggtgggaag

SEQ ID NO: 227528 - DNA, 122 bp, Homo sapiens
agccttaggaaagtggcaaagaagaagtttgcagaaaaccttaaggtaatttcttattatcgatgtcttcaagacaagtcctctgactgctttacatttgcagggcaatgggggatttctgg

SEQ ID NO: 227529 - DNA, 122 bp, Homo sapiens
atgaaaaagtgcttcacagagggctattcccgcatgtttttatgcacgcagccctggtggcgctgtactgtcgtggactctgctgcgacgcagttgtcacttgctgtcctgcgttgaagacc

SEQ ID NO: 227530 - DNA, 122 bp, Homo sapiens
aatttatattttaggtgacttctaagtattaccatcataaagaacactgtgggctgggcacggtggctcatacctgtaatcccagcactttgggaggctgaggtggtccctggagctcagga

SEQ ID NO: 227531 - DNA, 122 bp, Homo sapiens
ggcactggctcggggccctgcccactgtgcatccaggcacggaggatgttgcattcctgccgtcacctttgtcgctgcgagggcggcggttgggatctggcctttccagccccgagagggac

SEQ ID NO: 227532 - DNA, 122 bp, Homo sapiens
tgtggaggaggcgccctggctctggtctgaggttgcccttgaacgatttcgaggctccctcgggcaaggctgtggctccgagtgggacgaactccccgccagctctgggcctccccacctgc

SEQ ID NO: 227533 - DNA, 122 bp, Homo sapiens
cattgcctgctttatgtccctctaaagctcgcgttttccacagggaatagctatatataacgcttttattagccagaaaaagttgtgtttatacaacaaatatcagaatgctttattactac

SEQ ID NO: 227534 - DNA, 122 bp, Homo sapiens
cggtgcccgggcccaggcggcggggagggcgccttccgcccgctcggtttctttcttccccgctggctcccggagaccgcgttatagagaactgccccctcgctgccccaataccagcgccg

SEQ ID NO: 227535 - DNA, 122 bp, Homo sapiens
gggcagacacagcaaactaaggacgcaggccaagctcatcctagctattgttgtctgaggcgctcgccgggagccacctgcgggcgggggagggcggaggccgcggctcctctctggagctc

SEQ ID NO: 227536 - DNA, 122 bp, Homo sapiens
catcctgcacatggcattagagaaaacaaagagaacacagaaagtgacagagagaaggtacgagtggtgcccgcgttcctggcagccttccaggttccagtcttgatgaccgccagctatta

SEQ ID NO: 227537 - DNA, 122 bp, Homo sapiens
cgaaaggcttttattgaaaaatatcaagtgccccttccagggctgccggtccctgcccagcgcgagcatgggggcagcggcccgatggggctcgacggggtggtcaagtattggcggtcacc

SEQ ID NO: 227538 - DNA, 122 bp, Homo sapiens
ctcgctcctgcttatgaccctcgcagccacaggagcccccacttaggtgaacatttcggacggggccccggcggttcagacccggaggcggctcctcccggaggcagatcctcccggcgtcg

SEQ ID NO: 227539 - DNA, 122 bp, Homo sapiens
gcagagccagctggggactccccagcatctgaccgctccatcctcacaaccacgccagagcgagcagctcattcgagagagcatgtggccaacaggaggcagcactgggaccgcaagccaga

SEQ ID NO: 227540 - DNA, 122 bp, Homo sapiens
gggtctcccacctccagtggatacacagctgcgacctggacccggaccggagcctcttcgcgcggggatgaacataccctacgatggcgccagttacctcgtcctaaaccaggaactgctct

SEQ ID NO: 227541 - DNA, 122 bp, Homo sapiens
ataaagagaacaagtgagggacggatccttaaagaaaactaggacagccccccagctgggcgccccccgagcaggccaaacacgccagcaacaacgggagtgctttccaattcttcgccccc

SEQ ID NO: 227542 - DNA, 122 bp, Homo sapiens
gaggccccagaaatggggggtacaggatgggaggagggatagcaggggaggccccctgaacggtcaaatctgggtgggtcgaggagcaccccccaccaacaggtggagaatgggggtgttca

SEQ ID NO: 227543 - DNA, 122 bp, Homo sapiens
ggcccaggcgcctttacccggtttcattttcagtttaggccaaaacccccgcgggttggtcggggcagggcggggctcgggggaccgggctgaccgcgggggcggggccaggttctcacacc

SEQ ID NO: 227544 - DNA, 122 bp, Homo sapiens
cttcaaaagggcaacaaaattagccttaaatagtatttcttggattgcctttaacaatggcgataaggccaaagcttctagtcttgacagaagtggtttcatgacaacttgtttttatcttg

SEQ ID NO: 227545 - DNA, 122 bp, Homo sapiens
tctccctgcccatcaaggaatctgagatcattgactttttcctggggcctctctcaagcacgaggttttgaagattatgccggtgcagaagctgacccgcgccggccagcgcaccaggttca

SEQ ID NO: 227546 - DNA, 122 bp, Homo sapiens
ctgaattgtttgcaatggtaggaacttgttatataaaatgttaattaggtggcccgtgctcgaaaactgctctcaggatatgaccaatgggagagtagacctaagctccttcatttgcatgc

SEQ ID NO: 227547 - DNA, 122 bp, Homo sapiens
acacaatggagtactattcagctctaataaaagaatgaaaccctatcatttgccacaacacggataaacctgaggatatcatgtaagcaaaataagacacagaaagacaaatacctcatgat

SEQ ID NO: 227548 - DNA, 122 bp, Homo sapiens
tgggggcgggctgggggtggagggcagctctgtggccctgggcgagtcgattcccctctccgagcctcagtttgggcatctgttttgtggggatggccatacgggtggggcggtggctggga

SEQ ID NO: 227549 - DNA, 122 bp, Homo sapiens
ggcagggcccatggcccgcacgctgggctggctgcagcaggaagaggagaccagcagaaccgccttctgcccgcccgctcgctgtgtgtgtggcagggcccccaaactgttgccaccctaaa

SEQ ID NO: 227550 - DNA, 122 bp, Homo sapiens
tcgggctgggccggcagagcggccactttgcgcgcggcctctggagctccagctgcgccccgccaccactggccgctcgcactaccagcctgtctcgcacgctaagtaagtagacagctccc

SEQ ID NO: 227551 - DNA, 122 bp, Homo sapiens
tgatttatgagcaaagcaagtgttgtcattttaagccactagagatggttttctgtgcagcgataaataaacaaaacatagaattactaccccttctaggtggaaggggtttaatatagtca

SEQ ID NO: 227552 - DNA, 122 bp, Homo sapiens
cgggaacgtgaaggggcggggcctcgaggtcaggggtcagcacctccctggttgccgtggcgactggaggcgcgcgacgcgggcgcaatggcggggacccggggcttgatgctgcttgggcc

SEQ ID NO: 227553 - DNA, 122 bp, Homo sapiens
cagtcgagcttcccaaatccaaaactccaaaatgctccaatgagcatttcgtttatgtgtcgtgtcagcactcaaaaagttacagattttggagcatttcggattttggattttcaaatttg

SEQ ID NO: 227554 - DNA, 122 bp, Homo sapiens
ttcattcgttttaaaagaacactttccctttaaactataaattccttcccaaggctagttcggcctatgcccagaaatgaacaagggcaggttagcggttagaagcaagatagggtgagtta

SEQ ID NO: 227555 - DNA, 122 bp, Homo sapiens
caggacaccccaccaggtgcatgagccctcgaagccttcacttctagcaggtgccctcagcgattagggacagagggagacggggttcccagggctggccctgttcacatgtgggaagctga

SEQ ID NO: 227556 - DNA, 122 bp, Homo sapiens
tggggaatgggtcctgcataactgctcatgtcaagagctgtatacctaaattaggagggacgccagggataagactccctgggctatagcctaggtgcctgaggacgcagcgtagggcttcc

SEQ ID NO: 227557 - DNA, 122 bp, Homo sapiens
ctcaggtgatccacctgctttggtctcccaaagtgctgggattacaggcatgagccaccacgcctggcctctagctctgcttcttacacactgtgtgtccttgggcaaattatttaactggt

SEQ ID NO: 227558 - DNA, 122 bp, Homo sapiens
ggagcctggaagctggccctcgcgaggcggcgcggggagggtgggtgaagagcgcctgtgcgcgctaggcggagcctcacccgccgccctcctctgcggcaccgccccttccatggcagggc

SEQ ID NO: 227559 - DNA, 122 bp, Homo sapiens
tgcctcagaagactagtcatttggcaagtcgtaaattgcaaagaaacctgtgaataagagcgagtataatacatacactgggctttcaggatgaactaagctcttgaatgtccaaaaagcac

SEQ ID NO: 227560 - DNA, 122 bp, Homo sapiens
gggcggactaggggccgctctgcctcccgccccctagtggttgtggccgctctgtcaccacggctcccggggcctctgtcggctccactttggttgagacgtctccacagcccaacaacggc

SEQ ID NO: 227561 - DNA, 122 bp, Homo sapiens
tggattaaacatgcatggtctaacattgattggcatgttaaagaatccttctgtggccagcgattggcgggcgtgtctgggctctagccaatccggaaaggggcgggctggttaagcgtcag

SEQ ID NO: 227562 - DNA, 122 bp, Homo sapiens
ggcaagtctttggaaagggctgtggcttctgattgaccctcgcgtaaggaagtctaatggcgattagcgagggagggggtataacaaggcgtgtccaaactccccattccatcatggccagg

SEQ ID NO: 227563 - DNA, 122 bp, Homo sapiens
cgcttgcgggccagcgcgagttccgggtgggcgtgtgcttggcgggccctgcactcagagcggccggccggccctgctgccccgggcagaggggcttagcacccgggccagcagctgcggag

SEQ ID NO: 227564 - DNA, 122 bp, Homo sapiens
tattattagcctgtgtcggggacagttgctaaactcagcaacaggctcacagctcagcttcgtgcctctggttccagatgtgcaggggccagggcttccagggacacgcccccgtgggcctc

SEQ ID NO: 227565 - DNA, 122 bp, Homo sapiens
gcctgagcaaacgcttcccatatcggaaatgggcagtaccagttaccgaagaagttactgcgcctgcgtgcgcgggtaatgacgcatgcccggaacggcccctaaagtaggacctagttctc

SEQ ID NO: 227566 - DNA, 122 bp, Homo sapiens
tgcagaggcagcaccagctcctccctaccttgcgatacgaagcaccctcctccgctttagcgactcgctggttcacgtagaacacacgggggatgctcagcctgatgcagtgcaagtcactg

SEQ ID NO: 227567 - DNA, 122 bp, Homo sapiens
ggctagccctgattttgggactacagaacccctaagcccaggacattccccaacggggaacggatagactctcaggtcttgctctgactgtgcctttgttggcagtaggtgactcaggggac

SEQ ID NO: 227568 - DNA, 122 bp, Homo sapiens
gtgacactgacacttggtgccgggcaatctttcccggcagcatctcatgcaggaggcacccgtcccgttcgacgcctctggccgccccgtccttgcttctcatctcacagggcactgcgagc

SEQ ID NO: 227569 - DNA, 122 bp, Homo sapiens
ggaaacagagaagcctggggctggtgagggccaggacagaaggccggcgtgggcagatggcgaaggctgcgaagggtaatgagcgcttcctgaggactctcagaaggcgggggtggctgggt

SEQ ID NO: 227570 - DNA, 122 bp, Homo sapiens
ccccctcagccttattcagtgaacttatttgaccttgattccactgccacaatgtcacaccggaatacccgacttaagtttcatatgaagtgtttgccctggtggtgaggggtaaggggtga

SEQ ID NO: 227571 - DNA, 122 bp, Homo sapiens
acccagggtgtcagcctctgaaagatacacgtgcctgggcctcttccctgaagatggacccggcaggtctggagggaggcccccgtgatgaatcccgtgatgagccgccgatccgagctcag

SEQ ID NO: 227572 - DNA, 122 bp, Homo sapiens
atgtagaaactgaggctcagagaaataaagtcgcttgatcaaaatcccacctcacaaagccgtaaactgtttacctgaattactaaaacttgtcagagtcatacagcgtaaacatatagagc

SEQ ID NO: 227573 - DNA, 122 bp, Homo sapiens
aacccgctcagctagggactgggtgaggcatcgcaggcaagtgacttcacctcccagcgccggtgccctagtcttcaccgaagacagcaattccaatctgggactgtggtgaggcttaaata

SEQ ID NO: 227574 - DNA, 122 bp, Homo sapiens
acgatcaactagggacgatatgcatgctatgagcgctgtccaccaccaggtggcgatgaccggccgcttacccactactgcagtagtcgttattccagtccaccggttgtgggggaggattt

SEQ ID NO: 227575 - DNA, 122 bp, Homo sapiens
ggtgatccacccacctcggcctcccaaagtgttgggattacaggcgtgagccaccgcacccggcccttgtgtacatttttataagagaatttttttagctaggagttcagaatttttaaagt

SEQ ID NO: 227576 - DNA, 122 bp, Homo sapiens
actacctggtggtggctgccatgatgatttccattgtggggtaagtggggtccccctacccgggacaccgatccggggcgagcacggaggggcctcggggtgcaagatcccgggatgtagag

SEQ ID NO: 227577 - DNA, 122 bp, Homo sapiens
aaaaaacaaacaaggccgggcaaagcggctaatgcttgtaatcccagcactttgggaggccgaggcaggcagatgagttgaggtaagcagtttgagcctggccaacatgttgaaaccccgtc

SEQ ID NO: 227578 - DNA, 122 bp, Homo sapiens
caaaatattttctatccgcagttggttgaattcacacatgcggaactcatggatagggagcgtattgtttctcccccatcactagaacatggagtcaggaccgtgcaagtccctcttggtca

SEQ ID NO: 227579 - DNA, 122 bp, Homo sapiens
ctggggtccgcggagaaacgaaggcctggagcgggggcgctgggttgtccaggctggcggcgagctgcaccgagtgggacgggcaggctgcccctagtgagggcggggagggtgtcgccgcg

SEQ ID NO: 227580 - DNA, 122 bp, Homo sapiens
cctccttccccggccccagtacctgggggagcctgaggcgcggtccggcagggcgatggccgcaacgaggctgggctccgagtagcgcgcgggcgggcccgtcctcctggctggctgccggc

SEQ ID NO: 227581 - DNA, 122 bp, Homo sapiens
cagccgcccaggtgccagttgcgtaaccacggcaaagctcgcggcagggggcggggcagacgctgactgtcgccgggcggcggtcacgtgagcgggagcgcagcaggccggcggtccgagtg

SEQ ID NO: 227582 - DNA, 122 bp, Homo sapiens
gttcatgatttcagattttaacagaacgagccaagacccgctgatgatcaagataacgcacgtccatgtgcacatgcggtatgacgcggacgcgggggagaatgacctgtcactgctggagc

SEQ ID NO: 227583 - DNA, 122 bp, Homo sapiens
agcgggccctggcttatttcaccagcagagtggctactcctgaatgtttgccaatgaaggcgtgagcgagagaatgaaatgaatgccaaggtcatgtgtgtgcctgcacatcaactggttgt

SEQ ID NO: 227584 - DNA, 122 bp, Homo sapiens
acgtccctccccaaaccccggccgctacccctgcaagaccttgtggagcatgttaggtttcgtggcgtcgccaagttgtacctcctgcgcttcgccgcagataaagccccagcttagagcat

SEQ ID NO: 227585 - DNA, 122 bp, Homo sapiens
aacaacttgaccaatgttacactgattaaaatagcacataacaagggcgccagccagtcccgatgccctgaagtgacagaagtaatgtggtttgtatgatgtgctgagtacaaaacctttaa

SEQ ID NO: 227586 - DNA, 122 bp, Homo sapiens
tcacctcctccatttttagtctgggttggctggtcctctgtgctcttgtaatatcctgcacgtttttctctcagagcacctctgtgggctatgatcaacaggagacttgttggtctctctgt

SEQ ID NO: 227587 - DNA, 122 bp, Homo sapiens
tgctcctctgccagtggcaatggaagaagagatccccgcgctcttcattgacaatggctccggcatgtgaaaagcagctttgctgggacaatgccctccgagccatattcccctccatcatc

SEQ ID NO: 227588 - DNA, 122 bp, Homo sapiens
cagctcttcctctggctggctgtgtgaccttgagcaagttgctgcacccctctgagccagcgtcttctctaatatggagatgaggatagtgctggcctcatgggttgctgtggaagtaagtg

SEQ ID NO: 227589 - DNA, 122 bp, Homo sapiens
cgtccgggactgagggcgagtgatcgttgtcctcaggagcccgaagctgagagccgttcacgccccttccttcccgcccagccggggtctccgcggcccgcgcctcacgacgcccagcaccc

SEQ ID NO: 227590 - DNA, 122 bp, Homo sapiens
ttaatccatgtcttcttgttgtgtctcaatctgccacctaaactcatctgtctatccctccggtgagcctctcctctaagcttcaaattcctcattttgtcatgacattactgttcccctag

SEQ ID NO: 227591 - DNA, 122 bp, Homo sapiens
cggcggccgccctaggtggggcctcttggccgggccgtctccagcgcccgccctcccgtgcgtcccagctcggtggtgagcggcgtttcccgcctttgtcttccaccccctcccagctctgc

SEQ ID NO: 227592 - DNA, 122 bp, Homo sapiens
tttgtctagtttgctgactcttggcccagtcagactcctgatatctctgtttgtcttgttcgttcatctattccttcatcagcccttggcacacattgcaatctccccatcccagcaatttt

SEQ ID NO: 227593 - DNA, 122 bp, Homo sapiens
cgggtgagtagggaaatgcgcctcagcccctcccacgggccgcccacggattccaggatccgaaaacgcttccagctgctccgccaccccaggaaggcagcgcctgcctctgggcggttctg

SEQ ID NO: 227594 - DNA, 122 bp, Homo sapiens
ccctgagtcccagcttagaaccctgcacccgcacacaggggcagaaacacattaaccaggcgcctccggcctcccgcccacagcccctcagggcagacatcccaacctctcatccctgcccg

SEQ ID NO: 227595 - DNA, 122 bp, Homo sapiens
tcttctaacccccaatttgagggtcaactcctgggaccccttgcctcgggggtcaggccgcgcttggctcggtttggaaagggctggcacgcttcctcaggcggagggtatgcacagaagcg

SEQ ID NO: 227596 - DNA, 122 bp, Homo sapiens
gcctccagccggcggacagtccctctggcgacctggccttggctcccactggggcagagccgggattctgcaggatctgaggatctaaggggacccctagtcctgaactcggaaccaactgc

SEQ ID NO: 227597 - DNA, 122 bp, Homo sapiens
ccatcgctctggcctgaactcaggccccgcccccggggcgtggcctagcgatctggtggccgccatttcgaagctgaagaggttaggcgacgctgacttgctttcaggagaggcactcggta

SEQ ID NO: 227598 - DNA, 122 bp, Homo sapiens
cgggatgacgaagttgacgagggtgtcggcatgagggggtggagcaaggagcgcgtggcgcggtgcgcagtgggtggctccacctcgactgcgaattactgtttatgaggtgactcgctggt

SEQ ID NO: 227599 - DNA, 122 bp, Homo sapiens
ggggtgagggcttggtatggggaggaggttacgtgtcagtgtctgagagaggcagaatcgcggcaagtggaaggggctgcactggagatcgcggaaaacctagcaaagactgaagagaagca

SEQ ID NO: 227600 - DNA, 122 bp, Homo sapiens
agctcttctccagtgtggctgagcccatgatctcactaggcccctgaagagatccccactcggcactctaaggtcagactgggccaccttcctgaggtgcgcctgctcctgcacagctgggt

SEQ ID NO: 227601 - DNA, 122 bp, Homo sapiens
ccgcgggctgccgctccgggcctacaagctggcgacgctggccctggcgcagctcagcatcgccttcaaccaggacagccaccctgccgtcaacgacgtgctttgggcctgctctctcagcc

SEQ ID NO: 227602 - DNA, 122 bp, Homo sapiens
ttttaagcagtgcgcatgctcctaaatacgcttccccgtgggggacgtaggcggggccatcgggtcctaaggaaaaagtgtgggcgtggctgctctctgtatcttgtagccccaccccattc

SEQ ID NO: 227603 - DNA, 122 bp, Homo sapiens
aacaacacagagctttgtgagagtgatgcttagaatgctcctgatgttccattgggtgttcgagcagggggaatggactcggaggtgaactatgagccgagattcattttataaacgggaac

SEQ ID NO: 227604 - DNA, 122 bp, Homo sapiens
ccctaactgtttgactacaaatgcaaggggaccgtgcaacgccaaccttttgtccggctgcgctgaatgggcaattcaggctttgtgcagctcaattgaggaagcaaacataaagacaagat

SEQ ID NO: 227605 - DNA, 122 bp, Homo sapiens
cttctacacatgtgtgacacggataactcataaggtaaaacacattctgcctcatttttacgtgcagtgaaaagaataattaaattcttcagggaaaccccagatgagggctcttgagacta

SEQ ID NO: 227606 - DNA, 122 bp, Homo sapiens
gccgacgccagcggcgccctcctcccgccttctcccgcacccccctcccccagcgccggccggtcggctcccacctgacccgccagtcccacgctcctcagggcctggatccgcgacccccg

SEQ ID NO: 227607 - DNA, 122 bp, Homo sapiens
taaagaatctccattgtcgtcactgtcctgtggatgttaaacctcgtttttttccccacacgatattaaaacttaaagcaccagaaccagtcatggagaccagccagtttagatggtaagtc

SEQ ID NO: 227608 - DNA, 122 bp, Homo sapiens
catctggttctgagccaggcaggctgatgccggaggggctggcctagccaggcttgtctccgttttccaatatgtacagctgtttctcctgggcaggatctaggcctcctctctcaccctgt

SEQ ID NO: 227609 - DNA, 122 bp, Homo sapiens
ctggagcaccggagtatataaatagtgcagtctccagccagactctctcccagtcttgcacgcccccgcagtccccccaacccgacccccgccccttgtcactacgtgtcgggctcgctctg

SEQ ID NO: 227610 - DNA, 122 bp, Homo sapiens
ggttcagaatgaaggctgcactcccaacttcaacccggggacggccacggagcctcccgacgtcccttcgtcgcgtccccggcacccccgcgcccgcgtcacttactcctttgccgtcgcca

SEQ ID NO: 227611 - DNA, 122 bp, Homo sapiens
cagtcttgtggaatttgtaattttagtctgttgctgagagacggaccctctgtgaatacacggaaaaagtcctctggtcagaactgggaagctgagaataagagtcttcccctccaaaatgt

SEQ ID NO: 227612 - DNA, 122 bp, Homo sapiens
cccactggttaatcatgaaaggctcttctgattggctgcctcctggcagtagtgcctcagcgcgacggttcgggagcaaataaataattcccgctgggaagctgtttctcagacaggagcag

SEQ ID NO: 227613 - DNA, 122 bp, Homo sapiens
gcacgtcggacgtgccacctttaagagctgtaacacttcctgtggaaaaggtggcacgtccgacgtgccacctttaagagctgtaacacggctgggcgcggtggctcacgcctgtaatcctg

SEQ ID NO: 227614 - DNA, 122 bp, Homo sapiens
taccctctgaatgatgaggctggatcaggtgaggctggagtatcagtgtttccaccccttcgctcctggaaggttgggattggggggtggaagagtggggatatggtacaggctgatggtac

SEQ ID NO: 227615 - DNA, 122 bp, Homo sapiens
gattggggatgggatcctcactcagcagtctgggtagggccctttgaggcagagggtcttcggccagtgaagagagatttattctgctcagagtgctggggtcccatcctttctccctggct

SEQ ID NO: 227616 - DNA, 122 bp, Homo sapiens
cgaaaggaagaaaaacaccaagcacagattctaggggccgagggctgagccacaacgcaccgcaactccggaaaactgggccccggacctcagctccccttcctaagccaggctccgcccct

SEQ ID NO: 227617 - DNA, 122 bp, Homo sapiens
cgcctcaagcccctagggcaggcgctaggcgttccggattgtcgcgccctccgcctggttcggcaggtctgtccgcggccccttcacgttggcctccagctctcgtgccttccgctggtccc

SEQ ID NO: 227618 - DNA, 122 bp, Homo sapiens
aaacacaggaaggatgaaaaatccctgaggaagttttaccaaggcgccgccctgcctccccgccctgccccaggtgctggtcggttcattgctctccatttaggagacttcttcccagcctt

SEQ ID NO: 227619 - DNA, 122 bp, Homo sapiens
gacaactactgcgtgactgtgtctgctagtgccggcattggtgagtgccaggcctcagaccgtgccttcctcccctggccatctccctagcccgggccggggctcagcagaggccattgctg

SEQ ID NO: 227620 - DNA, 122 bp, Homo sapiens
ttttaacaacaaaagctgcgaagaaatccctagaaatgttggctcttctggctgggaaaacgcagtctgtcaacagttgcctcaaaaactcagaagctcagagagttggattcggtcaccag

SEQ ID NO: 227621 - DNA, 122 bp, Homo sapiens
cgcctcctcacccgcccgcggcgtggcgtcggaaagagccctcagcccctccctctctggcgctgatacccaatgggcagcctcaggcctttagcgggggcggggcaccccctggacgccgt

SEQ ID NO: 227622 - DNA, 122 bp, Homo sapiens
ttcttccttctggcctttagcgccacctgcaggctctgagggtacaacaaggtttgacagcgactgcagtgcaacactagttctcaaacttgagggcatcatttacctggggagctgggcct

SEQ ID NO: 227623 - DNA, 122 bp, Homo sapiens
tacaaccgcggcgagcaccccatcttcgtcaactccccgacgctggacgcgcccggcggccgcgccctggtcgtgcgcaaggtgccccccggctactccatcaaggtgttcgacttcgagcg

SEQ ID NO: 227624 - DNA, 122 bp, Homo sapiens
ctacggcagacagaattatctggtcacggcctccctgtagggaattacgtatctgcttgtcgtcataggacctgcttctttcgacagggtgtgagtgaagaggatgctggcggcgtcccggc

SEQ ID NO: 227625 - DNA, 122 bp, Homo sapiens
tcctgaagttcgctcccggcctctctatctcacgctagtcgttgctcctggagggctgcacggcggcttgtccctttggtagttgaatcccgcccattccaaaaagcgctgacagggatgta

SEQ ID NO: 227626 - DNA, 122 bp, Homo sapiens
aggggcggcgcgggcccgggctcagccgagaaggcggacaggcacaggaggctgctcgagcgccggggccaggcgtccgggaaccccgacaccctgcgccagacccggccgaagcagcccgc

SEQ ID NO: 227627 - DNA, 122 bp, Homo sapiens
ccggctcccgcctcccgcggcctacctccgcctgcgggacgtctctgtcaccattcgccgcgcctgtctgcgggacactgctgtctgcgggcagcttggacatctcagaccgtggggtcaac

SEQ ID NO: 227628 - DNA, 122 bp, Homo sapiens
gacggcacaattctatttcttctttcctttgggttctcttggtgataggcagtttgccatcggccacataatgacaaagaaatccaaagaactctctcaggctctccagtatttggcccaaa

SEQ ID NO: 227629 - DNA, 122 bp, Homo sapiens
gtccctctgcagtatttcacagagattaccaaagctcttgttcaatctgccaccggaacacgtgttttagtccaggttccctggaaaacaagggactgaagtgaagcccatgggctgaagct

SEQ ID NO: 227630 - DNA, 122 bp, Homo sapiens
gctgagaccacagccactgtgagaggaccagggagtaattcctggagggattccgcagggcgcaatcagagggcctttggggggtttccgaggcctcccctctccatttccttcctaattgt

SEQ ID NO: 227631 - DNA, 122 bp, Homo sapiens
gctgcgccccgcgccgcgccccgcaccccgcccgccacggcctgcgtccgccaccggaagcgccctcctaatccccgcagcgccaccgccattgccgccatcgtcgtggggcttctggggca

SEQ ID NO: 227632 - DNA, 122 bp, Homo sapiens
gcaaagccagagagccagccgcgggccgccgaaaagcgcccggctgaagattatgtgccccggaaagcaaaaagaaaaacggacagggggacggacgattcccccaaggactctcaggagga

SEQ ID NO: 227633 - DNA, 122 bp, Homo sapiens
agggagcgcgcgggaccaagtaggtgctggaggccaggcaacgtgcgcgggagaggctggcgacccagctcttcagagatccgcctgcgtccacgctcggcggcagcaaatggcgccgcgac

SEQ ID NO: 227634 - DNA, 122 bp, Homo sapiens
ctatagcagagtcaacaaaccatgtgagcagcagaaaactcatgtcctatttaaagaacacgctgctttctgaaatgaacatggcaactaatctgccaattaattatttgtcaataatgaaa

SEQ ID NO: 227635 - DNA, 122 bp, Homo sapiens
gatggagacagcagcctcctccggaagccggcccagggcacaattagcagggagcggagacgcccgcgaaggctgatttaattaggtgacacggtgccaggcagggatgcggggggagggga

SEQ ID NO: 227636 - DNA, 122 bp, Homo sapiens
gaatcggggaccctgctaaggtctggcggcggggctggagagcagtggcagcaagggctgcggtggcgtccacgcagcgggatgtgcgagagttactccaggtcgttgttgagggtctcggt

SEQ ID NO: 227637 - DNA, 122 bp, Homo sapiens
ctgagacgaaacctgtccagggaccattgctgaccagtgctgattcacatgactgtgtcacgaaaatagaagatgtcattgggtttgggttcctcttggaacaccaaaataaacacagattg

SEQ ID NO: 227638 - DNA, 122 bp, Homo sapiens
ccccggccgcccctcccgcaagtccggtgttgcccccgcccccagagtccataacaaccgcgggcccacagtgcccgcgcctctccggagcgcgcccaccgccccctccaagtttgcgggca

SEQ ID NO: 227639 - DNA, 122 bp, Homo sapiens
taaattgaggcaacgatttaagtataacttgagcaagtccatatagagtggagccaggaacgcagacaatgagacaccataccccatggtcttaggtcacagtcattcagtgggagacaggg

SEQ ID NO: 227640 - DNA, 122 bp, Homo sapiens
tccccgagcagcccctgggcgcttcgccgcccagctgtgggcaggtcagcaaggctgagtcgcagggaacaggaggggcctctccaggatccagggccggggcccttggaactcagcagttt

SEQ ID NO: 227641 - DNA, 122 bp, Homo sapiens
ttgcgggaggcaccacccatccagcaagtcaggcaaggagaggaggtgttggaagaggtccgcatccgttttctgacttcaggtcttggaatctatgtagtcagttctattgctggactcat

SEQ ID NO: 227642 - DNA, 122 bp, Homo sapiens
ccacgcagcctcggcagaggcccccgcacttcgcgaaccccagcaatggccccttccagacgccacgtccagctaccgcgcgctcacacctgcagggccccacaagaggcctcccagtgtgc

SEQ ID NO: 227643 - DNA, 122 bp, Homo sapiens
tggattcagcaacagcagcttcatttctcttcctggcttcatgtggattggttttccagtcgatctgtgacactaattctcctctattaggagctccgtgagtcagtggcaataccgaggct

SEQ ID NO: 227644 - DNA, 122 bp, Homo sapiens
cgctctctctgcagaggagatggccacgtacctgcgctatgtgcggcgcctggacttcttcgagaagcccgactatgactacctgcggaagctcttcaccgacctcttcgaccgcagtggct

SEQ ID NO: 227645 - DNA, 122 bp, Homo sapiens
tactttcaaaggtaattttaacatttcgggaaaacttacatttgtcccctgtatttaatacgttaatacgatatttaagaactagatcctactttgtacagtatttcaaggtatcatgaaat

SEQ ID NO: 227646 - DNA, 122 bp, Homo sapiens
ctgacatcgctgccctgagatggctctatagagccagaggactggacaggacctgcctcccgctcgtttggttccggcctcaggcttaggacaatggggtgttcctagcacccgagcgggcc

SEQ ID NO: 227647 - DNA, 122 bp, Homo sapiens
ccttgctggctctgtctgctgaggttttacccaagtgactccattttgaatcttacaactcgcacactactcatgtggaagatttaaatgtacattccaggacctggtgctttctcttccgc

SEQ ID NO: 227648 - DNA, 122 bp, Homo sapiens
tctgatctgcccacctcagcctcccaaagtgctgggattacaggcgtgagccaccacgcccggccctccagggtcttaatacaaaaccgggtggctggtggcgatggtacagtaagaaaagc

SEQ ID NO: 227649 - DNA, 122 bp, Homo sapiens
ccaacccaccaagcacacggctaaatatgtcttccccaagagagccaaaaaccttgaaaacgccgagaaagggctcccctttgaaggaaagggcctgcccttccctgtctggggccccggct

SEQ ID NO: 227650 - DNA, 122 bp, Homo sapiens
gtgctcacaccgcccgctgagctctgtgatgtagccgcttgcggagactgcaagcagccacggcgcgccctcttccgtgggaatggaaacatctgccacacgtgccggaagccaagtggtgg

SEQ ID NO: 227651 - DNA, 122 bp, Homo sapiens
cgtcacctcctaccaggttgacctttggccattccttgcctttgatgtgagtgataggagcgggcgattctgcttctccctccatctcccggcggggattgtacggtgagagaatgagagca

SEQ ID NO: 227652 - DNA, 122 bp, Homo sapiens
gcaaaaatccacatgctaagggcttcattcatgaagtagaatccccgaagcctctttcatcgtgagtagagacctggaggctggggacagggagggaagttgggggtggaatgggagagtga

SEQ ID NO: 227653 - DNA, 122 bp, Homo sapiens
atgcttccagagaggaacagcgggcagcagtgtctccgggaggaaagccaggcggcttcacgtctgatgtgggtcgaggtgcagctccttccacttcccagcgtggacctgaggggctgccc

SEQ ID NO: 227654 - DNA, 122 bp, Homo sapiens
gcgacaaggcgggggaggaaaaacgcgccggccggggccaagatgcccatggcagccccgcgcgggctgcctctgacatttagggaggctccggaagccttgcacccggcccgggcggttgg

SEQ ID NO: 227655 - DNA, 122 bp, Homo sapiens
cctactctgaggccttccactacagcttcgcagcccggccccgccgcctcacgcagcttgcgctggcgcagcgtcccgagcctcagctgcttcgtctgcgcccctcctcgctgcgcacccaa

SEQ ID NO: 227656 - DNA, 122 bp, Homo sapiens
accactctcatgtaaacatctaaaatacatttttttttccccaagacagtgttctgctgtcgcccaggctgaagcacagtggtgcaatcttggctcactgcagcctccacctcttgggttcc

SEQ ID NO: 227657 - DNA, 122 bp, Homo sapiens
caagtcctccgggtttttctccacaaggatagatgacggttccgagttaatacctcacaacgttggtctcacttattgcttgtttttctgataaattctcagaggggatacctaagttcaga

SEQ ID NO: 227658 - DNA, 122 bp, Homo sapiens
tcttcctcctggaggcctcccttgaccactccacgctgtccgagagctcaaaggccctcacggtatacactcacgctgggcatccagtccacatgggacccacagccctgaatggccccaac

SEQ ID NO: 227659 - DNA, 122 bp, Homo sapiens
ttggaagaccatcaggcaaaaggcagcaagagtcctaaaaacgcaccgctctctgactggcgatttcagtgagggggtgttagcactggtgctgtttatgacagtaaaaaaaaattggaaac

SEQ ID NO: 227660 - DNA, 122 bp, Homo sapiens
ggaaggaagaggcaatttttcataaaagtacaagtggcccatagccccaggggaagatgccgtccctttctggtaatcggtggaagggaaacacaactacaaggtgatgagattatcgaaga

SEQ ID NO: 227661 - DNA, 122 bp, Homo sapiens
caggaaaaattctgtgcacagagtgcaagccagaagaaccacaattaatcagctactcctcgggcagcgtttcccaaagtgtggaacgcagaataatttcaggaggaacaaggacgcactgt

SEQ ID NO: 227662 - DNA, 122 bp, Homo sapiens
gccccggaagggtacgcgtccactctataaatatatactcctccgactgagatgtcctttcgcacctcttggctatctgtactctccagaaaggaacgttagaggctgcgaatttcaccaaa

SEQ ID NO: 227663 - DNA, 122 bp, Homo sapiens
tgggagaccatgcaccgcccgggagtctctccgggcagggtcggggagggacttttttgccggtggccgtggaggaatcgtcccgttgagcaatgaccccggtgacgcggctgagggctata

SEQ ID NO: 227664 - DNA, 122 bp, Homo sapiens
ccctcactgtgctgcctgaaacagggaattgcagcactagggacagcccgcgtgtctgagcgtgtgtgtcctccatggccatcgccccaagtgaccgtgggggtggaagccctgggggccta

SEQ ID NO: 227665 - DNA, 122 bp, Homo sapiens
tattatcgtccatcgtaaggctgccggtgagtgtggagtaagagctatacgctggcccagcgcagaagtccgccaaattgccattgctgctgtgttgcaggagcctttgtaaagacattgtg

SEQ ID NO: 227666 - DNA, 122 bp, Homo sapiens
tccagtcccttgatcataggaagctcccttctctccagcgcaacattggagtaagcaccccggagtttcccgtgatggcaggcggttggcgcggtcgtttgtgctcagaggccaacaagcgc

SEQ ID NO: 227667 - DNA, 122 bp, Homo sapiens
aaaaaggcgagcagcaggcgctgctttagttaccagcactttgcttcctccgtctccccgcgccaggcatcgggcatcccaacctcgactttggccttcaacttggcgcgctccggagctag

SEQ ID NO: 227668 - DNA, 122 bp, Homo sapiens
ctccaccgaaagctaccgcctgcaggactcctccccaatgcctcccatccgagaggggaacgtcttcataccctggtaacacctctgcgctgttggcgtagccctcaatacaattgagttcc

SEQ ID NO: 227669 - DNA, 122 bp, Homo sapiens
aggtcgtgactggggtgggggtgggggtgctgttggctgtgcgccgcctcccggctgggccgcctgtcactgaactggggggcgggcgggaactacggccccaacagcaccaggcgccgcca

SEQ ID NO: 227670 - DNA, 122 bp, Homo sapiens
cggatgtccttcttgaggttctgggggccagaggaggtaagcacagcaggcccctcgccccgccctccgtggcctctcgcccgccgggccccgtccttctgggtgctgccctgtggggacct

SEQ ID NO: 227671 - DNA, 122 bp, Homo sapiens
atatgaactgctgaagcggggatgggtagtgtcacacacgttttaagcagatacttgcagcgcttgagctcactacagtaacaacaggaagtggctacattaacagcacactgtgtactata

SEQ ID NO: 227672 - DNA, 122 bp, Homo sapiens
tgtttttataaatacctgagaatcaatagtgccttcatcattaggtgggagatagttggtcgagttttgtgccttagcatagttatctgggtgatttacacatagcggcttagtgcaaatag

SEQ ID NO: 227673 - DNA, 122 bp, Homo sapiens
gttcaaaggttcgcgtcccagtacgggaatgagcctctttgatctcttccggggctttttcggctttcctggacctcggaggtgagagtaggtccggctcggacaagggtgggggtcgtctg

SEQ ID NO: 227674 - DNA, 122 bp, Homo sapiens
tgggaggcaccgagggcctcgaggggctgcgggactcgggcttggtgtggagggcaagagcgctgcgacgtgcggactggagagtcagcctttgggctggagacacgggagcgggtggctac

SEQ ID NO: 227675 - DNA, 122 bp, Homo sapiens
ccgtgacctttactttcagggtggccggccagatggtgggcagtcgtgggagaccgacctcgaccttgggagaaggaatctgcattttctcaaagccccagtgttgggcccgcccacagagg

SEQ ID NO: 227676 - DNA, 122 bp, Homo sapiens
ataaggtctgactgcctgtggggctggacagaacagtcatatttttcttattgcaaaaaacgagtaggaaaaatatcgctgaattctttccccagtgaggaataaccctgggaacggaatgc

SEQ ID NO: 227677 - DNA, 122 bp, Homo sapiens
acctattagaggatagagacaaaacacatttacttgaatgaaatgtttaataaagtacatcgggacttgtttttattggtattgctctatgaatactttatgtgctaatttagggcttagga

SEQ ID NO: 227678 - DNA, 122 bp, Homo sapiens
actaatctgttttctgtctctcaagattggcctgttctgcacacttcatatacttggaatcgtataatatgtgaccttttgtgattggcttctttaacttagcagttttcaaggttcttcct

SEQ ID NO: 227679 - DNA, 122 bp, Homo sapiens
ggcagaagagaaccagcagctggacatgggccctgccttcaaggtgacagtcacagaaaacggaagggactctagctgacatccaggcagcccacttgtctctcagacaagaaacaggccca

SEQ ID NO: 227680 - DNA, 122 bp, Homo sapiens
tgctgctgctgctgctgctgctgctgctgcttttcccttccttttatctttgagcccagccgttcttaaagtgaaagactgtcctcccccctctgcttgtctctcttcctcttttaaagaat

SEQ ID NO: 227681 - DNA, 122 bp, Homo sapiens
aaacccgctgcccgccgccctggtccagccccacaccgggaaactgtgctggttcttggacgaggcggccgcccgcctcctgaccgtgcccttcgagaagcattccactttgtagctggcca

SEQ ID NO: 227682 - DNA, 122 bp, Homo sapiens
caggcaatccacctgccccggcctcccaaagtgctgggattacagcatgagccatcgcaccgggcccctcactcagaggattttaagtcacaccgtggtgtttagagctgctcagggtcctc

SEQ ID NO: 227683 - DNA, 122 bp, Homo sapiens
agacagggggcttgatgaggggccccggtccatcccaaagtgctctgagtcggagaccgacgaggattacatcgtggtccccagggttccgctgagggaggatgaacccaaggacgagggca

SEQ ID NO: 227684 - DNA, 122 bp, Homo sapiens
agagctccattttattttgtgaatgttcttttgttgagcattctgttcttgtctcacagacgcaccattttctttagtctctgatgatattttgtttttgaagttttcttcttcctgcagag

SEQ ID NO: 227685 - DNA, 122 bp, Homo sapiens
gatctaaatgagatacggcaaagtcacagaacctgtttttatgtttttgcctgattcatacgggcttctccggtgaagatgggcctgaagtaacgcttgggttgcttctgacgttataactc

SEQ ID NO: 227686 - DNA, 122 bp, Homo sapiens
actgacaggcaccagcagacatcaacgggacattgacagtgggacaatgtggaatttagtcgggggtggtcggaggagataccagccgctgagcggcccgatgccgggggaacaccaccaac

SEQ ID NO: 227687 - DNA, 122 bp, Homo sapiens
aaagccattggtggagctgctcttgctgtgtgtgggaagacagtgtcaaggcggaaggttcgtgttttgactagacacttccctgggggactcttacactcgcataccaagtgaggaatttg

SEQ ID NO: 227688 - DNA, 122 bp, Homo sapiens
atcacacagatcatagtgccattctaagctgcaccagcttattagctatgagactgtaggcggcaactcgatgtttctagcctgagcatccttatctgtaagatgggaagagtgcttcacag

SEQ ID NO: 227689 - DNA, 122 bp, Homo sapiens
aggggtcggcgggtgacttctttccggaagaaagcgaggaacgcgctctgcggggtgagccggactccccaactccggacgatcagcccaggactgagagccccgaagtccccaaccacaag

SEQ ID NO: 227690 - DNA, 122 bp, Homo sapiens
ccaaaggcagagcttttttacttttaactgtgcctttttgtgtcactttctaatcagggtcgggttcaccacagtaattgccttttggatggacttagctttccaccacgcacttggtaatt

SEQ ID NO: 227691 - DNA, 122 bp, Homo sapiens
ctaggtcttcaaggatttccttgcactagattattctgtcttccatatgtacaaatttcacgagccattttccagaagaaaattcatcttctttacctcctattcgccttcccagtctgtgg

SEQ ID NO: 227692 - DNA, 122 bp, Homo sapiens
cggctcagctctgggcacgccctggtacagcccctcgcccacgaaatccgtgtaaaacagcgtgaaggtcatgagtgccatccagctgcacagctcagccacgaagagccggcgcagggtgc

SEQ ID NO: 227693 - DNA, 122 bp, Homo sapiens
taacctccgtgttccccgcaggacaggctgtggtggaggcgcacacacagcacccagaggcgggctctgtggagttcgcatctatatgtcagcaacttagggtggtttgggccatgtttcac

SEQ ID NO: 227694 - DNA, 122 bp, Homo sapiens
gaccgctttccattctgagtagcaacaacgtactaatttgatgcacacatggatgcctcgcgcactctgcaaattcatcacccgcatcttgcattagtcatctgacggactgccaagtgttt

SEQ ID NO: 227695 - DNA, 122 bp, Homo sapiens
cactgcgcgcgggagtggctcccaagtctgcctgacccgcgacgacactgatcctgccctcgcccagccagcagatgtcctgggcaaaaccaacaccagactcccctttgcgctgtcggcct

SEQ ID NO: 227696 - DNA, 122 bp, Homo sapiens
actgattccaagtggaaaacatgccccgggtgccatccagggtgggacaagcatggtgtgcggcagaccgggcagcccctgggccagccagatcgcctccacctggaggggcccttgttgaa

SEQ ID NO: 227697 - DNA, 122 bp, Homo sapiens
cgcccgggccgggccaagcccgcagccctgagagtccagcctgagacggccccgagactacgacctccacagccaccacctccaacgcccctaagccgaggagcgagaggggccccgcccga

SEQ ID NO: 227698 - DNA, 122 bp, Homo sapiens
aagcagaagtggtgaccccccacccccacacctgaccaacatctgaaggacttctgtacccgctggacatgtctgtcagtgcgttggtctcccaagcccatcactgtggttcattacccacc

SEQ ID NO: 227699 - DNA, 122 bp, Homo sapiens
agtctctgagcctgagcgtgagcctgagcgcgcacggggcgcgtgctcgccaagagctggcgcagatttccgaagtgccacgaaacagccgccgcagcaatcaccgctaagacccagacttc

SEQ ID NO: 227700 - DNA, 122 bp, Homo sapiens
gcgcaccctggctttgcaatagcccctggctcggagccgctttccagcgagtgcaagaaccgggcagccgagcggtccttttatagtggaccagtgaaacccccacccccaccccactcctc

SEQ ID NO: 227701 - DNA, 122 bp, Homo sapiens
agagtttgtatttaatgctgctggaaatctgatgatgccactccacttgcataaaaccctcggtggctccccaatacccttgcaaaagccataaatcctcactagggcttcaagatccacct

SEQ ID NO: 227702 - DNA, 122 bp, Homo sapiens
ttgctggaaacgaatacacagccacacggtctgctgccactgcacaatcatggtctccaacgccccctgcatgctgtcagctgcccagttacccctctagtctttcccattccctgctctca

SEQ ID NO: 227703 - DNA, 122 bp, Homo sapiens
ttgataactgctccctgcagaccatggcgacgctctctggggaatgcccccaactccgtgcggcccagagtccctgaggctccctgcagctggaatcctgtgggaggcaggagctcccagca

SEQ ID NO: 227704 - DNA, 122 bp, Homo sapiens
gtgctgggagctctctgtgggctggaggcgccttcctgggtttcctcacgctgcagcagccggattccaagagcaagcggcctagagacaggaactgcccttctctccaagcccaggtccag

SEQ ID NO: 227705 - DNA, 122 bp, Homo sapiens
ggtgcgtggtgaggggcggtgagatgaggatgccagcgctaagcacaccccacaaacgggcgccgcgcacctggcatttaaccctgcacacttcctcaccaccctgatgcacagggtgggaa

SEQ ID NO: 227706 - DNA, 122 bp, Homo sapiens
gatgctttcttctttcaggttacatgacttcatttgcttcattagcttcctagaaagctccgagaccaacaaacagctcatttccaataaacggggagaaacttatggcacatatttgaggg

SEQ ID NO: 227707 - DNA, 122 bp, Homo sapiens
ggcaggtgcccccgtttctgcagtgagggggaccctgggtctcacactcatccacatcttcggagcagtcccagcctgcagggggttggggaggggacgagggctaaggctgggagccctat

SEQ ID NO: 227708 - DNA, 122 bp, Homo sapiens
tcgggtgactcatgagcaccaaggcaggcctgtgtgtccaagcgcctgcacaggcagaagcgaggctctttcccataaccggaacccttaccgtgcccctagcaaactcccagctcctgcct

SEQ ID NO: 227709 - DNA, 122 bp, Homo sapiens
gggtctcagctctcaaactaccccaggccgaccctgtgccccatacagccccacttcacacgggtaccactgccaaaggagtggtcaaagccagaggctgcctgccaaggtcccggcacctg

SEQ ID NO: 227710 - DNA, 122 bp, Homo sapiens
tcaattggcgtttgtgttgggtttccccttttcaacatcctgcggttgtctggctggttccggggggtgcggggctgttgttcttcggcgacactttggtgggggtgggttgtttgtcgcca

SEQ ID NO: 227711 - DNA, 122 bp, Homo sapiens
agattgggctttggaaccaaatttggtgagtgctggcctccaggaaatctggagccctggcgcctaaaccttggtttaggaaagcaggagctattcaggaagcaggggtcctccagggctag

SEQ ID NO: 227712 - DNA, 122 bp, Homo sapiens
gttcggcgccaaagcgcggagcggaggccgaggcgagagcctggcgctgtaggactagaacgaaaggagtgaggcgccgagagcccagataccattttggcgtgagagctggtggttggcaa

SEQ ID NO: 227713 - DNA, 122 bp, Homo sapiens
ttgagctcattattgcatcttggggtgagcagattctgggacagcaatgtataatacctgcgctcacatgagactgctcactgcttcatttacaaggggctgaatctttctgggccaggagt

SEQ ID NO: 227714 - DNA, 122 bp, Homo sapiens
agccctcatttttatttgcaggtccactcctccctaatttcagttcctatgcatggtgggcgcagcatgtggtctgggctaaggcaattagcatttctcattctctgtcccgtgaccatgct

SEQ ID NO: 227715 - DNA, 122 bp, Homo sapiens
cggcccggaaggaagtcgcgtgctgaggggtgtgacggttttcttgctcgtgggctcggacgagtacggagcgcctgcagggacagcctggtacgcggcccccgccccttcgtgcgcgcgct

SEQ ID NO: 227716 - DNA, 122 bp, Homo sapiens
gtatgatatatgctgccattcgagaggcaaggaaaacatatctccaaatttccttccaagcggtctaccggcattgacagtaccgcggacaaaggagagtaccaaataaatactccttcgaa

SEQ ID NO: 227717 - DNA, 122 bp, Homo sapiens
cgggggccaccgtttgcacatcagcggcgtttgggacagcactgtgcaagatctgtgactcggctttcagaagcttctgccacaaggcttcaaaggaaaccttcaattttcacatttcctag

SEQ ID NO: 227718 - DNA, 122 bp, Homo sapiens
ccagccgcggcggggagaccgcagctccggggacttctgcttcagcgctgaggtccgctccgtctctcccaacctcgctaccggctctggtccgccagctacgctcggccagggcgggcgtc

SEQ ID NO: 227719 - DNA, 122 bp, Homo sapiens
gatcttctggttctgcaggagactcgtctcctttctgtagggtctccattcccatggcgtcgttttctaggaagattttatcctcttgcttttctgtcttcagaagggtcctctctggggtg

SEQ ID NO: 227720 - DNA, 122 bp, Homo sapiens
tgggcctgggtgattttacgtgcggatgcagaggaggggcagcgtcggggcggcggagtccgacctcgggggattcaccctgagggttacaggcaaggccgctccaggcacgcagcacctgc

SEQ ID NO: 227721 - DNA, 122 bp, Homo sapiens
aagtttgttcagaaacctgcttaggggcggggagtggtgccctctggtcctgcctgctggcggggggtggggggttttcgccagctccgccccttcgtctcgtggctgtactcacagtgtgt

SEQ ID NO: 227722 - DNA, 122 bp, Homo sapiens
gggccactggctccgactcatgtgaagatggataaacaaacccatgcccaagagagaactcgttcagctgtttttctttgcctttcagttatcaaagccaagttacggagggaggctcgaat

SEQ ID NO: 227723 - DNA, 122 bp, Homo sapiens
cgctgtacctcagctgcagcagcaactgcagttccggggcgggacctccacgcacgtactcgtgcgcgctggggaggaagtcccgcccctatggcaaactcagctacctgattggctgcctc

SEQ ID NO: 227724 - DNA, 122 bp, Homo sapiens
aaaggaagacaatgggtaaagtatcagaatggtaccagcagagagtaggtgctttgtaaacgctaggatcaaattcctatactgtgctacagtcagcgagagccaaacaggacacaagtcag

SEQ ID NO: 227725 - DNA, 122 bp, Homo sapiens
aagagggaagggcggctgaactggaggacaggtccctgggggccgcgccgggctgggagacggggcatgatggccaaggtcgtccctgatggcgtccagttggtcctgaaggaggcggatgc

SEQ ID NO: 227726 - DNA, 122 bp, Homo sapiens
ccgcaccgcctgattccgaggggcgggagcgcattgggctgcgcacgggtgggggcgccgcgccagcttcgcgtagctgctctgacgccgctgccgccgccgccgccgccgccgccctccgc

SEQ ID NO: 227727 - DNA, 122 bp, Homo sapiens
ttgtactgaactatctagtgatcacgttaacacctaactctccttctttcttccaggggccgggctagagcgacatcatggtattccccttactaaaaaaagtgtgtattaggaggagagag

SEQ ID NO: 227728 - DNA, 122 bp, Homo sapiens
ggttgctctgagctagctgattggaaagccctaaccctcgaactccgggctttctgggaacgcgggctctctcccctctttccctccgcccccacgcgcacacaggcgagcaccgtccgccc

SEQ ID NO: 227729 - DNA, 122 bp, Homo sapiens
tgacccatgcaaagactctccaagaaacactgtactcagggccagaagcgcaggctgcagcgtctgttacagacgaattctgaaagaagatgccaggtagggcacctcagggcctggagggc

SEQ ID NO: 227730 - DNA, 122 bp, Homo sapiens
tcggactacgaagcgggacggaaactacaattcccagcaggccttgggcctcagtgcggccgcgaagcagagcgggctgtagagccttgcgcgcgcagtggggatggaacgttgctaggctt

SEQ ID NO: 227731 - DNA, 122 bp, Homo sapiens
ctacattaaccctttatcagcaagtcaagatgaaccttttatctcctatggaagggaaaacgtcttgctgagatggcccttccatagacgggcagtaaaaatgtttagggtttctgtgcatc

SEQ ID NO: 227732 - DNA, 122 bp, Homo sapiens
ggattttcgaggagggcccaggggctggagggtgcacaggcccatcttgcacaggagccacggccccggccttagctgggcggagcaattccggtgccgccgccccttccccgcccggccat

SEQ ID NO: 227733 - DNA, 122 bp, Homo sapiens
cacctagagctcgcctcagaaacttggggccaagtttaggggaggccactgggagcgcagcggggatcaggtcggaccggggttctggtccccggcccgccctcctcagcgccccttgcccc

SEQ ID NO: 227734 - DNA, 122 bp, Homo sapiens
cacccatgattaccagacagtctcagatgccgcctcccttagagtgtcaggcagatcatccgtcccattgctaattcttctcccttctccttacgtacatgttacatctcccttgctaaact

SEQ ID NO: 227735 - DNA, 122 bp, Homo sapiens
atcctcggtgggctcgcctcctcccccggaacagctgtctaaaatccatgggcgtggaaacgccacgccacgccccgctcccgacttcttcagctcaggccccagaactgaccaccccacca

SEQ ID NO: 227736 - DNA, 122 bp, Homo sapiens
tttgtcttgtgctccagctggagctttggtcccgtattctcggctatttatccccagctgcgggaggccctggtgactctgctgctgcagtgtctggtttccctgtgacctgcaggtactgg

SEQ ID NO: 227737 - DNA, 122 bp, Homo sapiens
ccagggtcacccccgaaccaacaaagcacacacacacccgagatgcgccccaggccgcagcgccaaccccccttcagatgtcccggagacaggcgagcagcggtccccagggctcccgtcgc

SEQ ID NO: 227738 - DNA, 122 bp, Homo sapiens
aagcacttattaagagaaacagaaaaagataatgagtttaattctggatgtattagagaacgtttccacattaatggttatgagaagaaaagagtctatattaaaagctagaagaagggact

SEQ ID NO: 227739 - DNA, 122 bp, Homo sapiens
gaaaagtagagggaaaggcatatgcaaatggctggaggagaacaaagaactggtcattagcggagatgggggtaggaacaggaactcggcttaccttcacatcatcttcctgagtcacatca

SEQ ID NO: 227740 - DNA, 122 bp, Homo sapiens
cggctcttccaaaaaacctggcgttccctgttacccgctagctctttctaggcgggtgggcggggtggagggggccctctgccagcgtccctcaattcgcacattttcagaaaggccccaga

SEQ ID NO: 227741 - DNA, 122 bp, Homo sapiens
aagacacctctgcagaagatgcaagcggcgaagccacggtgcggaccgttcgacagaaagcgttggaggcctcccagggacatgtcaggggacagggagcacgggagcgagtgattcatgcc

SEQ ID NO: 227742 - DNA, 122 bp, Homo sapiens
ctcttgcgagccgccttggtggccagctgcttgcgcggcgctttgccgccggtggacttgcgagctgtttgctttgttcgtgccatggctaagtagacgtacctactcaacacaaatgagag

SEQ ID NO: 227743 - DNA, 122 bp, Homo sapiens
taaggagtctttccccaccacgctctgtcctcctccccacttcaccctcccgccgtttcgcgttatttccaaggcaatttaaaaaatcaagccaaacaaagctccccggttgctgccgggcg

SEQ ID NO: 227744 - DNA, 122 bp, Homo sapiens
agcgattctcctgcctcagcctccggagtattacagtattactggtattagaggcacgagcgaccatgcccggctaatttttgtatttttgatagaggcgggctttcaccatgttggccagg

SEQ ID NO: 227745 - DNA, 122 bp, Homo sapiens
agttacgcccgtcggctgcagttggagctatggcggcggcagctgtcactgggcctagcccggggtgtggacctggggactccccagaagggcccgagggggaggctcacggagcgtcggcg

SEQ ID NO: 227746 - DNA, 122 bp, Homo sapiens
ggcggttccggcaagccaagggggcgttgtcgtgatgattccgcggccagcggatcgctgcgagtggccttgaaggcagctgctgcaggtgaagagtaggcggcggggcagagagcggcctc

SEQ ID NO: 227747 - DNA, 122 bp, Homo sapiens
tttaaggacggtgaaagtagcggccgcatcccttggtagggtctgtatagccctggccctcggctagggctgggttttattatttcatgtaagcttcccaacctctcagtattgcagatact

SEQ ID NO: 227748 - DNA, 122 bp, Homo sapiens
gtttaggacgcggcctttagagtctgctccgctcccgtggcccacgcactgtttaggacgcggcctttagagcctgctccgctcacgtggcccacgcgctgtttaggacgcggcctttagag

SEQ ID NO: 227749 - DNA, 122 bp, Homo sapiens
actcaaaggctcaccctgagcgaggtggggctagaggaagcctctgacacaggaagtgggcgcatagcacttgctgtggaaatctgtgcctgcccccctgcctacgctggtgactcttgtca

SEQ ID NO: 227750 - DNA, 122 bp, Homo sapiens
ataagtatccagatgtagaattgcataaatgcacacaaataaaacgcaatagagtgataccgtgcattacaacagacagactctgtcacgatattatggacaattattaatacatcatctca

SEQ ID NO: 227751 - DNA, 122 bp, Homo sapiens
tctttagggggctgttattctgcctacctcatcccctttggcctctgtgaattacatgagcgcctgtcaatcacagatccagggatggaggtggagatgtgtctggcaccccctctctcctg

SEQ ID NO: 227752 - DNA, 122 bp, Homo sapiens
caaactcctgcactcaagccatctgcccatctcagcctcttgagtagctgggactgcaggcgtgtgtcaccacgcctagcccttggcattctttagcttatatttgtatcactccaaattct

SEQ ID NO: 227753 - DNA, 122 bp, Homo sapiens
caagcaccaggacagcaacgttttataaaatccagccatggccatgcggagattacaatccggtgagaccaacagatggcaaatggcctgtcaaagcactgtgtgtgaggcgctgtgacatt

SEQ ID NO: 227754 - DNA, 122 bp, Homo sapiens
gtaatgcgtatgaggaaaacgagccgtacaacatctgtcctgttatcagataacgtaacccgagcgcctggttgccgcctctgctttaagcggtgcctcctttgcacctttaccttgaggac

SEQ ID NO: 227755 - DNA, 122 bp, Homo sapiens
caagctaccagcacctggggccctgccagcctgtcgcccagaggccgagcgccgctgtgacgtctgcgccacacacctgcagcagctcacacgggaggccatgcacctgctgcaggcccctg

SEQ ID NO: 227756 - DNA, 122 bp, Homo sapiens
tattgcatcacagtaattgctgtacgaaggtcagaatcgctacctattgtccaaagcagtcgtaagaagaggtcccaatcccccactctttccgccctaatggaggtctccagtttcggtaa

SEQ ID NO: 227757 - DNA, 122 bp, Homo sapiens
ttatctttgcatggcagaaacggaaaaaaaaatataggggagagtgcagtttggctttcacgcctacctccaaaggagcttggaaggccgggcctgctccgtcagaggggccgctcagctgg

SEQ ID NO: 227758 - DNA, 122 bp, Homo sapiens
tgttcttttaaatcggtgagcacggtctgtctactttccctcagttgtctagagaccacacgccacccccgccccgggggagtcgcccggtcgagggtcccgggacaggcgcagcactcgca

SEQ ID NO: 227759 - DNA, 122 bp, Homo sapiens
gctgcagaagaatctgcggcggtctttagttggatccaagtctcaaatgtgcctggctctcgtccgggatgctcctgaacagctggtcctgaggaaagaaaatatcagctggtagtgatgcc

SEQ ID NO: 227760 - DNA, 122 bp, Homo sapiens
ggcattcttgaagtcatggaacccttggcatgaacattgacagctccctctcgcctgtcacggagtcctgttcacgatattccttggggcatacctttctctctgtctgcgggccgcctctg

SEQ ID NO: 227761 - DNA, 122 bp, Homo sapiens
tcctctaatattgtgaagcatattatatgaaacaggaacacaaatttctcaaaattcctgcgatgtccaataaagattttcataatttcagctctgcaatcttaataggatttcctaatact

SEQ ID NO: 227762 - DNA, 122 bp, Homo sapiens
tctcagggtcctgctgacatttttctgccatctgtctgaggctctgacagacagcaataacgtcactggattgtgcaaccatattccctgttgatgagaaagtgttctctgtaaggtttgct

SEQ ID NO: 227763 - DNA, 122 bp, Homo sapiens
aacacagcacattgaatcagcacctgctaaccctctattgactttactgctcctaaaagacggtctagaagtgcttgagttagagcagaaaccctcctcattagccagttctccttctgcat

SEQ ID NO: 227764 - DNA, 122 bp, Homo sapiens
acgttcagcagctctgaaattaatgccaaggcgagcaaacgcccgccccccaccccctgccgccctcgccttatgccgagactttgctgttgaacacgaagtaaacgtttcccagaaagccc

SEQ ID NO: 227765 - DNA, 122 bp, Homo sapiens
tcccctttgtaggctgttgatatggcgcatgctctgaataaacttggaagccagtttcctcgaacagtcaacagggcgcagacacagcgcacaggttccgtaatgtggcgctgtccggcaga

SEQ ID NO: 227766 - DNA, 122 bp, Homo sapiens
tgaggatttgttccactgtgattggtaaattagggaacaatttgagtgtcatgtcaatgtcggtttgctcaggcaccattttgttgctcagaagccaggtgaatgtaataggaaggatggat

SEQ ID NO: 227767 - DNA, 122 bp, Homo sapiens
catgtcctaattggtctcggtagcaggctccggggtgcgctttcgggggctaggggacagcgaaagactcagccacaaaggccgcagtctggtcctaaaactagccagtggcgtcacactgc

SEQ ID NO: 227768 - DNA, 122 bp, Homo sapiens
tgagggacgagcgcagggttacctgcctgggctctcacctggtggccggctcagaggtggcgcgccggagacgtatcataaccttcctgggtcccccttcccgcgccacgccctggtggggt

SEQ ID NO: 227769 - DNA, 122 bp, Homo sapiens
gagaagagttgtgagtggtcaaagcacagagtgctaaaagccacctaaaaaaccctcaaccgccctggggtctgagttccagcagagccctgggggcacggggagccctgggagcaggcgca

SEQ ID NO: 227770 - DNA, 122 bp, Homo sapiens
tggtctgcccacaactgccaggaggcgattttcagttctttgaatgcacgttgtgactgccgtgcacccacccagcagcatcaggttcctcatattcacatagtgaccatgcagcatcaggt

SEQ ID NO: 227771 - DNA, 122 bp, Homo sapiens
ccggtccacggctgcgaccccggccccggatgccactggcgaaacctctgcggaagccaccgcggttccccatcccagggccaccagggcctccaggcccccccactgcaccggcgtcatcc

SEQ ID NO: 227772 - DNA, 122 bp, Homo sapiens
tataatgaacttcatatacttaaagtatataatttgataagtgctgccacaggtacacaccggagaagccaccgtcataatcaagagagttaacatatctatcatcaccaaaatttaccgca

SEQ ID NO: 227773 - DNA, 122 bp, Homo sapiens
gtcagggccgtggccagaacccaggactggacccagactggaagctcacagaaaagcattcgcggggccctccggcccctggagttgaaccctgcagggagagcctcacagccagcctgggg

SEQ ID NO: 227774 - DNA, 122 bp, Homo sapiens
tgtccctgacatggagtggcccaagtctggaccgggtcatcctgtcccacgggcttcagccgattggtcccccagtgggccctgactctagttgagggtcagactctcctcctgaagcctga

SEQ ID NO: 227775 - DNA, 122 bp, Homo sapiens
aatacctttttccagaaggataagccttcagtaatggtggttatcttaacaagccagccccgacttagtgcctaatgtgtctgagatactctttcacggtcactgtcacccaaactgtgtca

SEQ ID NO: 227776 - DNA, 122 bp, Homo sapiens
ggcatttagaattggtggtagtccctcatcaaactggacgtccaccactgcgccaatgaccgccacgatgcgcccggtggcggcgcctgcttttggcgaaggagatgtttgcgccgcatagt

SEQ ID NO: 227777 - DNA, 122 bp, Homo sapiens
tactggttaaactgtcattttgcttcttagtgcgcatgcttgagcccacttgcccagcttcggagatcttatcaggaagttgctgatcaccagcttccggtgtttcctgtcttttgggagac

SEQ ID NO: 227778 - DNA, 122 bp, Homo sapiens
tcaggttggccctgtaccggaaggtcttgtcgcactcagggcatgggtagggccgctggccggtgtggacaacctgatgagtgacgaggctgcccttcaggaagtagctcttctcacactca

SEQ ID NO: 227779 - DNA, 122 bp, Homo sapiens
tctattcttgtctcaactgcacctgcatacatcctgcatcttggactctcaaggccctaacgtaatggcagagtattaactctacacttaaatgactgttcccctaaagtaggggtaggaag

SEQ ID NO: 227780 - DNA, 122 bp, Homo sapiens
cagacggccctgtccacggttgctcctgctctcctaggaggccccgtgtgggccgcggcccggccctcaccatggagtccatgttcgaggacgacatcagcatcctgacgcaggaggccctg

SEQ ID NO: 227781 - DNA, 122 bp, Homo sapiens
caaaaacaccagcagccagcagcttaccagtctctgaggtggctgtcttctgtatccagtcgctgggttgggaatcacttgttttaaggtcattgtcctcttttctgctttcagcattggag

SEQ ID NO: 227782 - DNA, 122 bp, Homo sapiens
tgtcttggtaccaccagacccgtagttcctattgattcatcagattttgcattggatattcgcatgcctggggttacacctaaacaggtgagaggaattttgtctttcattattcacttgtt

SEQ ID NO: 227783 - DNA, 122 bp, Homo sapiens
ccctaaatctgaggcggtggctggagggggaccaggcttccttacaaatccggcttctgacgccccttccctgtcgcaggtgctgggctctggagccacactgcgtcttccgtcggtggggc

SEQ ID NO: 227784 - DNA, 122 bp, Homo sapiens
tttttaaagaagatatttcactctctagagaaccaaacttgggtagatttcaacatgacccgcactgccacgtatcttacctgaatctcagtcttcactttcagcactgtcagttttcatgg

SEQ ID NO: 227785 - DNA, 122 bp, Homo sapiens
ttatttttatcctttaaaatatcctttgtaataaacaggcaaacatgtttccctgaattccgtgagccactctagcaaattaaacccaacgagggggttcatgggacctgaaacttggggtt

SEQ ID NO: 227786 - DNA, 122 bp, Homo sapiens
ggtaaactgaaacatggagatcctctgcatgagcggttcataaaaatgctagttatgggccgagcacagggctcatgcctgtaatcctagcacttagggaggctgaggaaggaggatcactt

SEQ ID NO: 227787 - DNA, 122 bp, Homo sapiens
ggagggggcgggacagagctgttgccgtggcaactgggaggcactctcaggctgttttcccgaggacctcaaatccggactttttttctgtttttctttcttttttggttttgttttggacg

SEQ ID NO: 227788 - DNA, 122 bp, Homo sapiens
atgcacagtgtgatgttgacattctgtaaatctttgctaccagtgatgactggcgcactacgtggttgagaacagcagtcaaagataattggtttttgtacacatgggatgagaaagtgagt

SEQ ID NO: 227789 - DNA, 122 bp, Homo sapiens
cttggatgattctgtgccttcgcctcccacagcgaactgagataagacctggggacatctcgactctcactctcccctccttcaccccgtcgaagagaggatctccgttgttcagaaaaata

SEQ ID NO: 227790 - DNA, 122 bp, Homo sapiens
ggaggtgtcacctagggtcacgttactgctaagtgagggagcccaagtcatgaagtcatgcgtcagcatccaaccctgcgcttattgtttgctaagaactagacagatgctgtggttacaaa

SEQ ID NO: 227791 - DNA, 122 bp, Homo sapiens
gttacttcactgaaaactctcaccgccagccagagttccttgttcttccctttgtgacctcgtagccttgtcacagtgctctctgttgtgttggaataatctgtttacttgatgtattaggc

SEQ ID NO: 227792 - DNA, 122 bp, Homo sapiens
atcactcgcccagccctcagccatcgcccggctgccccggtgcccaggaagcctcgcgttcgcttagtgtcctgagcatctgtgggaagctgacacagcctcactcctgcttcacttcatgc

SEQ ID NO: 227793 - DNA, 122 bp, Homo sapiens
tgtctcagagcagtttacagcaatgttcaggtgcaaggccttcctctactggtacacgggcgagggcatggatgagatggaattcaccgaggccgagagcaacatgaacgacctggtgtctg

SEQ ID NO: 227794 - DNA, 122 bp, Homo sapiens
actaactccataaaaccaactttgtctgaactagttatataattaagacacctgtatggacgggaaagtagagtagaaaagttagtgaaataaaatcaggatatgagtttgaatccaagttc

SEQ ID NO: 227795 - DNA, 122 bp, Homo sapiens
actacaggaaaaagtaatgcagactgggggatgcgaaccaaagcacagacgaatgtgccccgacgattcctccgagaacataatgaaatggcggaccttcctgccagaggagcgcacagtca

SEQ ID NO: 227796 - DNA, 122 bp, Homo sapiens
ctaggcaaatgggccccgccctgtcactccattcctcccggcccatttctctttgctttacggtctggatgctcaggcttgacagccgttggagcttccttcgggggacaggcaaattctgg

SEQ ID NO: 227797 - DNA, 122 bp, Homo sapiens
aacttggtcgtggaaaacacctgcctgtggccaagagacgtgaagttagagcttcagaagcgtccaggccgggcacagtggctcacgcctgtaatcccaccactttgggaggacaaggcggg

SEQ ID NO: 227798 - DNA, 122 bp, Homo sapiens
cgcacagcccagctccaccttcgatgctctctctccatcacccgccatcccctccaacaccgactacccaggcccgcacagtttcgacgtgtccttccagcagtcgagcaccgccaagtcgg

SEQ ID NO: 227799 - DNA, 122 bp, Homo sapiens
gctgcggagcgcgcaggacccagaggactcaaaggggacctggagggtgacgaggccttccgtggccgggggtgaggaggagggaagccgcgcgggcggagaggcgctggtgggtcccaggt

SEQ ID NO: 227800 - DNA, 122 bp, Homo sapiens
tctgcattattgatggtcctgtaaggcgggcacctcggggagtagagcctgtagcccctgcgagagcagagccgggtggtgcactgcacagaaggtcaccgcgggaggccaaatccccgggg

SEQ ID NO: 227801 - DNA, 122 bp, Homo sapiens
aggactcgctcgccaagcggggctgcctggcagaagccgacgagcgggtggtgcgcgctgcgccctagcctggctgctgcagtcctgtgccgggcaaagtccctgccacccaccgcgctgtc

SEQ ID NO: 227802 - DNA, 122 bp, Homo sapiens
aagatgaacgtgatatgaatgaaatctgagctttatcttaggagcacaacaaacttactgcgtagcccacaaaacagggacccctcctactctgcagggaagttccctatcaatcagggcat

SEQ ID NO: 227803 - DNA, 122 bp, Homo sapiens
aggcctgaacgtgacattgcccggccggcagcacccatgatcacagggcctgcagacccccggccaatctctgcactcaactgctagtctgtcccacggctggatgcgggcaaggcagcggg

SEQ ID NO: 227804 - DNA, 122 bp, Homo sapiens
ccaacaccttaaccactcggccatcacagctccgaggacactttttgtttcagaggaagtcgtgttaggctctttgactctctcgctttttaatgttcccacggcaggttaatgcttccgtg

SEQ ID NO: 227805 - DNA, 122 bp, Homo sapiens
aaatgccgcactggcttcgccgcaggccctgccccgcgtgatgcatgccctgaatgcagacgccctgcctcggtcttgcatgcgctgggctagcaaggtggttctaggccaagctcttaccg

SEQ ID NO: 227806 - DNA, 122 bp, Homo sapiens
caaagtgtgggactcagccaatcggaaccgtgcagggcggggctggcctgcggaagggggcgggttcggaggagtgaactgtgcggttagtgcgcctttcagcctcacctgcagctgcgcct

SEQ ID NO: 227807 - DNA, 122 bp, Homo sapiens
ttgcatcttgtaacacaactctatgaggtaggttctatgatcgtttcactttgcagatgacgaaataggcacagagaagtgaaggaacatatctaaagttccacaagtagtggtggagttgg

SEQ ID NO: 227808 - DNA, 122 bp, Homo sapiens
ttgatctgtgtgggaacagctccctggcctgtgtgtaagtggtggcaggaaggcaggtcccgccctggggtctggagcttatcttcttcctgtgagctgtgtgtgggtggctcctgtgggct

SEQ ID NO: 227809 - DNA, 122 bp, Homo sapiens
tcctctttcagggactccaggaaggccggggggaggtggggctggcggaagtggacgcggcgaccctcctgccgcaggcgcgtccagaacgataccttggccactacttctgcaacagctat

SEQ ID NO: 227810 - DNA, 122 bp, Homo sapiens
aagaagaatttggaaaaaaagattgaaggagggtttcaattctagagaagatgaggtaagcgtctgttaccctgtttgtgcctttgaatacaactgtaagtcttggatagaatacatggaga

SEQ ID NO: 227811 - DNA, 122 bp, Homo sapiens
caaccagccagctcgactcctagttccttgtgctaaacctcctccttatcccatgccccccggcccatgcagtgtggcaatggctgtggcctcagcagttcatgtgtcagatcttggcttct

SEQ ID NO: 227812 - DNA, 122 bp, Homo sapiens
cagacctgaccttagccacgttggcaaagttaataccagtaatgagacatattgaagtcacgcacccttggatatgatggactgagcagagtgcattgcttctgtaatgttcttttcagaaa

SEQ ID NO: 227813 - DNA, 122 bp, Homo sapiens
cagggtgcaggagggcatggcaggagaaacagggatgcctgaccaaaggccagagccaaacggaccaggcaggcgacttctgattggctgcctatgacatcaccaggctgggctgctattgg

SEQ ID NO: 227814 - DNA, 122 bp, Homo sapiens
tcctgcagacagctgctggggggagggtgcccagggagtccacgctggctccaataaacccggctcccagagacgtgtgtcctgtcgccaggcctgctcgccccagagaggctgtggggcac

SEQ ID NO: 227815 - DNA, 122 bp, Homo sapiens
agaactacaaattccctcggccccacccagaccgacgccaagggcagctgtggagtggggcgcggcaatgcgccccttaacagccctccaggtgattctgccgcgcagaggaggaaagaatg

SEQ ID NO: 227816 - DNA, 122 bp, Homo sapiens
gccagccgccatggaggccgtgccccgcatgcccatgatctggctggacctgaaggaggccggtgactttcacttccagccagctgtgaagaaggtgagcttgccttccatcttccccccta

SEQ ID NO: 227817 - DNA, 122 bp, Homo sapiens
tcttggtgagcctggaggtgttccggcattccgtgagggccctgctgcagagagtcagcccggagcctcccccggccccacgcctcacctacgagtactcctggtccctgggctgcggcgtg

SEQ ID NO: 227818 - DNA, 122 bp, Homo sapiens
agttggactgggaggccgtgagccctaggagctgactgtataggccctcggctcggcgctcggtggcctgcaggttggactctgtgctcacgtgcacgttgccatagaccatgaagagcacg

SEQ ID NO: 227819 - DNA, 122 bp, Homo sapiens
tcaccacgcttacaggtacatccttaagttcccttaaccatgttacagaggaggctatttcgaggaaactcaaagccacttcagaggaaggaagtgccgctgattctatgtaatcattctga

SEQ ID NO: 227820 - DNA, 122 bp, Homo sapiens
cattcaggctgttctgtggcagagaaggggaatactaatctagaaacaggcatagactaacgtgctgtgatgtttaatttaactatggaacacagagctcctggggagagcactgacaggca

SEQ ID NO: 227821 - DNA, 122 bp, Homo sapiens
cgaggagccgtccagaagcaaggagccgactttcggcggctcctgaaacaaaggtcccggcggccacgccagcgatgagctcccaggtttttctttattggtgttaactttggggagtccct

SEQ ID NO: 227822 - DNA, 122 bp, Homo sapiens
gacactgtgattgaaacacagtggctgtgtgttagtcttcaccaggtgctcacgtctgagcgtcggtgctctgacatgtggtctgtgttccctctgcctggtgtatcctaagaactggtgtc

SEQ ID NO: 227823 - DNA, 122 bp, Homo sapiens
tttgaagatttaatacgaagaaaagaacgtaaaatctcaatttttaaatatttgtttaagcgttgaaatgataatgtctcagatatactaggctaaatgaaacatataattaaaattaattt

SEQ ID NO: 227824 - DNA, 122 bp, Homo sapiens
aggtccataaatacctctaaagaaaaatccatggcagcacacttagtcctcttgctgaggcgccccactgcactcttctgcagtgttctgttaccgcctaaggggttcaccttgcccatgcc

SEQ ID NO: 227825 - DNA, 122 bp, Homo sapiens
tctgcttcctggtggaaatcgcaatacttgtctttagaccctgtgtgctctgctggctcccggtaacgcatttttgcatctatcagatgatgaatatcctaaagggccatctaaaaagtgat

SEQ ID NO: 227826 - DNA, 122 bp, Homo sapiens
cagactccaaagaccttcacagagaggaacaaggatggctgctggtcagaagctgaaccacggtcacaggaggcaacagggagactccgtgtctttgttaaaacacccacagcccgggacag

SEQ ID NO: 227827 - DNA, 122 bp, Homo sapiens
gagacagccttaggttccctgcttccagacttattctcctgccttaggtacagtcactatcgtgatattatctatcgctgtgtcaacacaacaccaatccaagcccaaccgcagctctctca

SEQ ID NO: 227828 - DNA, 122 bp, Homo sapiens
ggtctaaacacacgccccttgacgagaacctagagggatggagaatatttcgttatgcttcgtaataaacttccccaaaggagactccgggtccgccccgtcaagttcaggaaaggcggacc

SEQ ID NO: 227829 - DNA, 122 bp, Homo sapiens
aagaagagtgagagctgaagagacaggagaatcagggaccacgagagcccgtgcaagatccggagcacaggggcttccctgggtcccaggctttctgcaggactcacccccaactaccccgg

SEQ ID NO: 227830 - DNA, 122 bp, Homo sapiens
attgatttgtctgtctggacaaagaccagactgtcctcgttcttaaccatcactgtggtccgcttcttaaattcttgggttggtcctttcacttggacagtgaggaacattacctcctcatt

SEQ ID NO: 227831 - DNA, 122 bp, Homo sapiens
acggcacagagcagtgaagacgatagctggatctctggcgtcagcgagagacaatgggcccgccaaagccggaagccggaaaccgtcctgttcgctacagctgcgtggctgattggacggtt

SEQ ID NO: 227832 - DNA, 122 bp, Homo sapiens
tcacctctgtcagaaagttgatcttgaagcccgtagtcttgttggttttgggctgtccatcgttgagatagttgcccatggccaacacaaactgtggacaagaaggtgggtaggtcctgtcc

SEQ ID NO: 227833 - DNA, 122 bp, Homo sapiens
gccgggatagctgagcggcttcttgaatggggggctgggggggcggaggcgggggggccgcgggtccacagcctctcaaatgcccccggtgcacgcctctaagaggaggagaggggaggaga

SEQ ID NO: 227834 - DNA, 122 bp, Homo sapiens
acctctctctgtatcatgttctgaggcagaatcttatgtttatggctcagtgagacttgacgggaaaacaaaggctttgaagtctcaggggatccttctccagttgcctctactgctgatcc

SEQ ID NO: 227835 - DNA, 122 bp, Homo sapiens
ggaggggggtctttcgcaagtggggcctcgggggatccctgctctccttctggtgcattccgcaactttaaaagccttccttggggttctgagcgcggatgtctgacttgaatgacctgaga

SEQ ID NO: 227836 - DNA, 122 bp, Homo sapiens
ggaagtctttgcacttccgtcttccgggcggaggccacccggggcggacgcattgcacgccgggagacaaaatgtctcaagaagccttgagaggcgggattttggaacccgggcgctgacga

SEQ ID NO: 227837 - DNA, 122 bp, Homo sapiens
cccgcctgtggtaagtgatcggcccaactgggctttctttcctcccacatcccccctacgcgcagcaactcctcaccgccagaccagctaccgctcggctcagctggcgccggcgccaaccc

SEQ ID NO: 227838 - DNA, 122 bp, Homo sapiens
ggaggggcggctgccctccgacccgggacctgcctgcggggaccgagctgcgtccctggccggccctccccgtccgtcccgcgtcaccccggccagcctggcgcctactccgggtccccggg

SEQ ID NO: 227839 - DNA, 122 bp, Homo sapiens
ggcaggcttgtcccagagctaggctgtgatgcccagaacctaccgggcatctgcttggctcggctgtaccaggtgggccacgtcattgagctggacattccggcgtatgagatccacagccc

SEQ ID NO: 227840 - DNA, 122 bp, Homo sapiens
ggggtggcgtggggggcgtgcgaaagaaactcggggctggcgcggaggccgagggtccttcgcggggggctgctccggagtgggggatgcgaggaggcgctggggacggcggagcagaggcg

SEQ ID NO: 227841 - DNA, 122 bp, Homo sapiens
gcaggcaccccaccggagtcattgccgggaccctcagcgcaacgcgggcctgtgtcctctcgtttctctttagaaaaagactggattttaagactcgttttaggccaatgatttaaaacaaa

SEQ ID NO: 227842 - DNA, 122 bp, Homo sapiens
accatcgaggagaggaccttgaagaacatagcagccaagggcagtgccaccagacttctccgttttcccagaagatccgggggatgggggagagacccagcaatgaggaaatcatgcgtttt

SEQ ID NO: 227843 - DNA, 122 bp, Homo sapiens
caatttatacgaactctgtattgttctgctcctcccgctctgccacctggaatgtgttcccggctccggatcaggccccacgctgtcttctgtaaaacacttccttttctgcgatccattcc

SEQ ID NO: 227844 - DNA, 122 bp, Homo sapiens
cctggcataaggagacagatgactgcggcttatgccttcaacactggctctttctgagtacgttttacacttgctggtgggggccacactaggaaaaaatttccctttgcattttccttcca

SEQ ID NO: 227845 - DNA, 122 bp, Homo sapiens
tatccataatgactaaggctgatgtagacacctgaaaatgtgggtgagggtggtaatggacgtctgcttacaccaggctgtatccagatggtaaaaatcactattgtcaccttgtgaaaaaa

SEQ ID NO: 227846 - DNA, 122 bp, Homo sapiens
gtggggaggaagcagggccccaggcggaaccgggaaaacacaccggggctttaaacagaccgggccactcccatcgaatttggaaagcggttaaaagaggtcgtgccgcattctgcgccgcg

SEQ ID NO: 227847 - DNA, 122 bp, Homo sapiens
ctccttgtgatgtctctcaccacggcataaccggagccatcgaagaagtaactggcagcccgactctgagtgaaggccagcttatctctgaaatggaaacacaacggtcatttgaacactac

SEQ ID NO: 227848 - DNA, 122 bp, Homo sapiens
gatcagaagttcagagatgcctccagctccaaattgccaacaacaagtgtggctactatacgtcaaggactctgaagccgtgagagagggggaagaacaacagtagagaggatgcccagctg

SEQ ID NO: 227849 - DNA, 122 bp, Homo sapiens
agagctaaaactctgtctcagaaaaaaaaaaaaaaagtacctggaaaaagtcgcagacagcgagcttttcgccagtgccaggaatacagataaaacgagagagactaagggagggagcgcga

SEQ ID NO: 227850 - DNA, 122 bp, Homo sapiens
gtatatgggcatgtttctctatgcagttgtcaggtcatgggatattgtaatagacactctcgaattgctttatctaagtggcttccatcagcagaggataggttctttagtcctatatgttt

SEQ ID NO: 227851 - DNA, 122 bp, Homo sapiens
agccgggggtctcgccccatcccgccctggactttcccctgggagacccctcggctgccccgccccgccccaacctcggagacctccagtgccccgaagcaggcctgccctggcctctgggc

SEQ ID NO: 227852 - DNA, 122 bp, Homo sapiens
gtggccacagaatccccttcctacaactggcaggggtcggcatgggctggagctcagagacggccagctaggacttcaggacacacagcaaactagctgcgccccgctgagggtcagcgcac

SEQ ID NO: 227853 - DNA, 122 bp, Homo sapiens
ctgtcaaaaacatgaatttcaacactggatattgactaaaggcacacaaactataagaagcgtttgttcatgaaaatgacccacgtttaggtgacactctagcattcagtcccaagtcccct

SEQ ID NO: 227854 - DNA, 122 bp, Homo sapiens
caagaaaccaggggctggggatacggccttccctggaactggtggcttctctgccaccttcgactaccagcaggcttttggcaacagcactggtggctttgatgggcaagcccgtcagccca

SEQ ID NO: 227855 - DNA, 122 bp, Homo sapiens
agatggcgcctggaggcccgttaaaaattaccttgcccttttttctgccctctaccaacacggcttccgtggcgtcgttcacgtgacattcctggactacggcgcgggagagggggtaggag

SEQ ID NO: 227856 - DNA, 122 bp, Homo sapiens
accagggccactggatccatgcggcttgtgcctggtgatgtagatatgacagtgagcgcccgccgccatgcagaatcggtcctggagacaacccgggaaccgactccaggaaagagcgggtc

SEQ ID NO: 227857 - DNA, 122 bp, Homo sapiens
gggaaacagggaggggagagcatttccaggcagagggaccacaggtctccagcccttgcccgccgacaccttgtccaggtgtcttccaggtagggagtgtccctctgccctgctcaccacta

SEQ ID NO: 227858 - DNA, 122 bp, Homo sapiens
agaggttctccccctgctccagagagcagcatcacgcccaactcgagtagtgggggggcccgctctcttttgacagacagccctgaggagcgtgctcactgctgagaatcacggaactacag

SEQ ID NO: 227859 - DNA, 122 bp, Homo sapiens
agcgcggcggcgggtggcggggccccttggggcgggcctggcggggcgggaggtgacatacgcggtcctgcgccctcgcctcagacctctcgggcgagcgcggcgcagcgcaggtaatggct

SEQ ID NO: 227860 - DNA, 122 bp, Homo sapiens
agcctgggcaacatagcgataccctgtctcttcaaaaactaaaatagtagctgggtgtcacgcctgtgggcagagcccagccaggtgcctggcattgtgtggcagctggacaagtcagtgtg

SEQ ID NO: 227861 - DNA, 122 bp, Homo sapiens
aacgtaattaatgtttaaaattaacaaataaaaatggtatctattctcacgcgtgctgagcgctttctgtgcgcattggacctttccgaattaccctgcgaactttctccccatattacaga

SEQ ID NO: 227862 - DNA, 122 bp, Homo sapiens
cagaggacaaactgcagaacaaggctcaaagatgagactgctcatcaaacctccaggtgacgaagcacacacacgcgctgccacatcggagcgacggatgaagggagcggttatctggggga

SEQ ID NO: 227863 - DNA, 122 bp, Homo sapiens
ctaattgcagtcgtggctctttttgagatgacaaacagactgcatgtggatgatcttcagcgtaaggcatgcttctgattgctgctttcctactgccagtgctgaacattcaccttaacccc

SEQ ID NO: 227864 - DNA, 122 bp, Homo sapiens
cagcaacggcgccaccctccccagcgccctgtcggcctccaagtccaacctggtcatttccgaccccattccgggggccaagcccctgccggtgccccccgagctggcaccgttcgtggggg

SEQ ID NO: 227865 - DNA, 122 bp, Homo sapiens
actttaaccttgcccttctcccctctttcacttcatgaactaataaccatgggactcccccgcccaaccctttaaatatattgtaatgatgctacctgggaatggaaaagtccaggagaaag

SEQ ID NO: 227866 - DNA, 122 bp, Homo sapiens
gacgagacctgcgcggctgcaaccgctccttcttcgcgggtggaagcgcggaataagccccgtaaaaccacagaagtgggtgctggagttagaggaccctcaaagaagtagagacctgtcag

SEQ ID NO: 227867 - DNA, 122 bp, Homo sapiens
agctgaagctatggcagcacccagtgacctcaagagccccctttcctcgagttaggtcctcggatgctgaagaccccagtcctgactcaggacaaaaagggccgccccgcgaacgtggtaaa

SEQ ID NO: 227868 - DNA, 122 bp, Homo sapiens
cgctcgatggcgtggtggagccaggaggctcgcctgactgcatggggggactggggaacccgcctaaggtgagaggtcttaagagactagcttgacgaattggggatgtcagagactcctcc

SEQ ID NO: 227869 - DNA, 122 bp, Homo sapiens
ggtagcgcgcggggtacccattgcaggtgtagctgacgatgaggctgctcttgcccacggcgccgtcgcccaccagcacgcacttgatgcccagctctgggggcgcgctacgccgccgcggg

SEQ ID NO: 227870 - DNA, 122 bp, Homo sapiens
cctccagcccggaggacgaggtgctgcccagcacctccatgtacttcaagcagtccccaccgtccacccccaccacgccggccttccccccgcaggcgggggcgttatgggacgaggcactg

SEQ ID NO: 227871 - DNA, 122 bp, Homo sapiens
tccatccagcctgaggaatgagagcgaaactccgtctcaaaaaaaaaaaaaaaaagtttccgagcaattcaccttttcgcacattggggcagggtatgccatttcctgggaggcacagtagt

SEQ ID NO: 227872 - DNA, 122 bp, Homo sapiens
aatgggtgtgtgtggcccatctgaccccccgcccgccttgttagtagaatgaactagtgtcgttgtcaagaccacacggacaaggggaggggacttgcccttatttgcaccgcgattaaccg

SEQ ID NO: 227873 - DNA, 122 bp, Homo sapiens
tcaaccgggtgcattctgggccaggaggaggggcctggggaaggggggctgggatgccggcgagcccccggacccctccgccgccgcgtgttcctgtcccgggcactgttgtttttccggtc

SEQ ID NO: 227874 - DNA, 122 bp, Homo sapiens
gcgcaggaccctccgagccaggtgccggatatactctcgtggtgcgccattttttaagcccgtcagaaaagcgcagtattcaggtgggagtgaccgaattttccaggtgccctccgtcaccc

SEQ ID NO: 227875 - DNA, 122 bp, Homo sapiens
tgggaatactgacactgggcttgagagatgggaagatggggtgttctccaggaccacgagcgtggagagtgcttaggagaaaaagcaaccgcaggaaagttcctggcccagctttgggccaa

SEQ ID NO: 227876 - DNA, 122 bp, Homo sapiens
caagtggccttaattaagtgaagctgttaagttcctctgtgtctcctttctaaatcacatcgccctcatcaaggcaagtatctgcaactttgctgcctttattaccttcccaacaggtttag

SEQ ID NO: 227877 - DNA, 122 bp, Homo sapiens
gatggttctgttttagtaatcagcagactaactgcagggcacttcctcctagcgggaagccgagtctgggctgtcaactgtgaaggagtacagaaaggtcaggcagcaaagggattctaaag

SEQ ID NO: 227878 - DNA, 122 bp, Homo sapiens
tggcacagggtggaaggtgaggacagacagccccccagcaaaatggcaggtgggcgtgggcgtgcaggcagacgtgctgtctgtgctgccaggcgggggcccctgcctgctcgccctcctgg

SEQ ID NO: 227879 - DNA, 122 bp, Homo sapiens
cgcttgtgggagattttcatcttcttggtacagccgctgtagatctcttcaagggagactcgaaggtcgtgggtgactgggggatcttgcttctttcgggcgggctcttgggcagagcggga

SEQ ID NO: 227880 - DNA, 122 bp, Homo sapiens
gtgaagcgatccgcctgcctcaacctcccaaagtgctgggattacagacgtgagccaccacgcctggccggtctctggaacttctaagcatacgtaactagataagctagcaaggcaagctt

SEQ ID NO: 227881 - DNA, 122 bp, Homo sapiens
ctgcgggtaggaggggcgagagaaaggatgggggtacagaaccggaagaaacgaagggctcgtccgcttcggcttgtcctaatttggtgcccaatctgaagctgggctgtaccattgcatac

SEQ ID NO: 227882 - DNA, 122 bp, Homo sapiens
agaagctgtctgcgttgacagatgcggctcgaggttaagtggtccacccgggccgcctcacggttgggaggccttttaagccaacctcaaaatctggaggcctgtctcaccgtgcagggtgc

SEQ ID NO: 227883 - DNA, 122 bp, Homo sapiens
gacgtgggtttgatttctaagtgtttcacagtgtctgtaaatcaagaccaaagagcctgtcgatgagactgtttattaccagattcacttctgaattggccagaggaaatctgaatgtatta

SEQ ID NO: 227884 - DNA, 122 bp, Homo sapiens
ccagatcctgcggatctgcacgcggtacacgcccgagcaggacaccatgaccttctcggacgggctgaccctgaaccggacccagatgcacaacgctggcttcggccccctcaccgacctgg

SEQ ID NO: 227885 - DNA, 122 bp, Homo sapiens
ctcctccttcgtgtgagcaaagcgccgcgcctccctcagggcggaacggaggcaactttccggagtctatttttgttaagacaatcaactccaataactgagctgaagtttttgtttaaaaa

SEQ ID NO: 227886 - DNA, 122 bp, Homo sapiens
gcgacacctgccagccagcgcctgcgcctccgcctccgcctcccgccggaagtcccgccccgccacgttaggttaagtcccagagtccggaaccgctgcctgcggcttgacacagggttggt

SEQ ID NO: 227887 - DNA, 122 bp, Homo sapiens
cccaggctgaagtgcagcggtgcaatcaaagcttgctagtttcagccacctgggcccaaacgatcctcccacctcagcttcccaagcagctgggaccacaggtgtgtgccactacacctaag

SEQ ID NO: 227888 - DNA, 122 bp, Homo sapiens
ctgggcggggccaggcccggggccggcaggatcggggtgacatccgccacatccaaggtgcgcctgtgggtctgtgtgagtggcagccccctccggccagcctcacgttgctctgggatcag

SEQ ID NO: 227889 - DNA, 122 bp, Homo sapiens
gagcagtggcgctggggtctgtctgcgtcctccccgcccccggggtgagacagacaggaccgccctagagcctctgggtcaggacagtcggagccagagtccccatctgggcctccgtggcc

SEQ ID NO: 227890 - DNA, 122 bp, Homo sapiens
gccctccgtgcaagcaaaactaaaactcttcggaattatattagtagcaacctttctgcccgacagggtgtgtggaggagctacacattgtgtcactttttttcttcttcaatagactcttt

SEQ ID NO: 227891 - DNA, 122 bp, Homo sapiens
ggcggggaaagggtaaggttgcccaatgagagcaagacggtgggaccttgcgacagtctgcggatgcttccgcgtgggcccggcgagcgcgggtatccgcggatgctgagggcgggaaaggc

SEQ ID NO: 227892 - DNA, 122 bp, Homo sapiens
ttaaaatggctcagttatagtcagttacatgtgtaacgtgaacttcataggcaattagcacggactctaagcttgagagctttaggcccaggcccagtatctgaaaaactcaaactataaca

SEQ ID NO: 227893 - DNA, 122 bp, Homo sapiens
tgttacagcccagggaggctgccttgttggcggtgggagccgccatcttcatgcaaaacgcgccgagtagcagctccgcggcagcgcggcacccacccccgccccccaccccgcccccctgg

SEQ ID NO: 227894 - DNA, 122 bp, Homo sapiens
tactactcagtcttagtgaagatttaccaagcacccattttgctgtgagtgacgacaccacgtcctcatctccactgaatttatattcttggtgagggagtgggggaaacaaacaataaatc

SEQ ID NO: 227895 - DNA, 122 bp, Homo sapiens
cacagagaaagcagcggccagagggaggaggaatcggacaggctgatcacttggagtgttcgcctaagcagtttctagaaatggaggcagggaccatcaggaagctcaaaacctttgcttca

SEQ ID NO: 227896 - DNA, 122 bp, Homo sapiens
tcttgaacttttaaaaggagatttggtccagacagtttttcaaacttcacaaagctttcccgtttgttgtttctgagtagtgtcaaaaaatatatatggtggctggacttctaagatttcct

SEQ ID NO: 227897 - DNA, 122 bp, Homo sapiens
ccctccgcaaccctctacctctcttccccgccaagatcttcacccaaggtctcaagagggcggttcccaacctcacgtgacacagcggtcacgtgacatggccccggggagccgaggtgagc

SEQ ID NO: 227898 - DNA, 122 bp, Homo sapiens
cccagggccacggcccctcaggacttcaggcggccggaggttgtggggacgaagcggagtcgggagccgggcttccggccctcactaccccgtctcggcccgcgggttgcctgcgtgcccgc

SEQ ID NO: 227899 - DNA, 122 bp, Homo sapiens
tgacgtcaccggggtggccggtagcaatccggtttagttaaccagccactgtaccgtcagcgccgcgcgttcctcatggcgttagggctgacgggccttgttgctgaggggccttcattcaa

SEQ ID NO: 227900 - DNA, 122 bp, Homo sapiens
acaacacttccctgacttccctcacctttccatagtaggagtcatgcaatcttaaaatcacgaattcaattacaaaatttgccaggcttagtcccatgtccgacaatggcatatctgaaata

SEQ ID NO: 227901 - DNA, 122 bp, Homo sapiens
tagtcttggctctacccctgattcactgtgacaccctgaggttttctgtaacattctttacgacatgagaggggtgaagtatcccattccaatactttaagtggtataactgaaatgtgttt

SEQ ID NO: 227902 - DNA, 122 bp, Homo sapiens
ggtggaaacacggaggcagctgactatcgagaatcctaggagaatgggctttctgtgtgacgtgtgcctggaagggcttcctgaggctttatttcccctgctcttccctgctctgtcccagc

SEQ ID NO: 227903 - DNA, 122 bp, Homo sapiens
accatgaggtagggctgaacatataaggttctcaaactacttggtctcaacacctctctacgtgtttaaaacactttggaattccaaagaacttttgtttatatgggttagattactgatac

SEQ ID NO: 227904 - DNA, 122 bp, Homo sapiens
aattttcctcctaagaagtcacatgtgagctctgcgtttttatttaattaagaaaaatagcgtattgtgaaattttctgtttacccaagtttgagactgcagttttttttattagttctttc

SEQ ID NO: 227905 - DNA, 122 bp, Homo sapiens
ttgaaattctcggcccgtgcacgcccggcggagaaatccatgacgcattgtttagacagacgcctttaaaccgcgccgcggcggggggcggcggccgggggcgcctgcgcggggaaggtcac

SEQ ID NO: 227906 - DNA, 122 bp, Homo sapiens
cgttgtttaagattttaataaaggtggggcaaagggttgaattggtcgaaaagtcctcaacgtcctgacgggactcccctgaagccaaggcagtttgagtccattcattattctgtcttgga

SEQ ID NO: 227907 - DNA, 122 bp, Homo sapiens
ggtccttttgtgtccagaattggtgcgttctcggtctcactgcctttaagaatgaagcagcgaactgtcgcggtgtttcagttcttaaagatggtgtgtccagagtttgttccttcagatgt

SEQ ID NO: 227908 - DNA, 122 bp, Homo sapiens
caccccgatctaatcacctgatctaaccacctggtttctataaacccacagcacgatgtacgctgggtctctacgaccgccacctcccacctcgtttcagttccgcctcatcctccgtctcc

SEQ ID NO: 227909 - DNA, 122 bp, Homo sapiens
ctctgggccggagccctttccatggctggctcctctgggggcccttgggcctgtgagcagcgtctacttccctcagagaagaatcctttccttcccccatcgaagtgtccctttctgtatcc

SEQ ID NO: 227910 - DNA, 122 bp, Homo sapiens
cctctctctgtttctcaatctcccctgctctaagatggccagatatgaaaagctgccaatcgggatgccagaacatcaaagagatcgctcatgagagcacacaaagtcccatttgttcagca

SEQ ID NO: 227911 - DNA, 122 bp, Homo sapiens
cgggaccccaggccccctgcaggcgacttcagggtttgggacccgagttctggcacatctcggccctcagtctcctcggccgcaaggtggggttgtgccagcagccgggaccttgggcgtcc

SEQ ID NO: 227912 - DNA, 122 bp, Homo sapiens
atttgaagccaaaaagtcaaaatatcttatttcgcaactgtaattgctggatgccctgcgcgcagctgtggggcagccctaactccaccaggccaagcctgaagcttcctgcggcgcaagct

SEQ ID NO: 227913 - DNA, 122 bp, Homo sapiens
ggaggggatcgggtttcacggagtgttgggggataggactgggggcatccggcccgaaggcgccccctctgtgccccctccggggaagtctgggatccaggccctcgcccccagccgtgggc

SEQ ID NO: 227914 - DNA, 122 bp, Homo sapiens
tcagcctcctctgagtggggcggttgagggtgcagcagttcggaagttcagggcccgagtcgtggttttattttgtgtgttctgcgctctggatggtaagctgagggtggcagctgaatttg

SEQ ID NO: 227915 - DNA, 122 bp, Homo sapiens
gcgcggctttatatgccgcttctcctgtgcagggctgtcaatcagacacacgaggaagcacgtttaattcattccttcgaaggaatgacatcatcccccttctgatctcaccatttgctccg

SEQ ID NO: 227916 - DNA, 122 bp, Homo sapiens
agcccaggagctcgagaccagcctaggcaacatggcgaaacaccgtctctacaaaaaatacgaaaattagctgggcgtgttggtgcttgcctgtaatgccagctatttgggaggctgagatg

SEQ ID NO: 227917 - DNA, 122 bp, Homo sapiens
ggagcaagagcaccgtatagacctgcacatgatccggccttacatgaaagtggtcacccacggaggtgagacccgccccccggtgcccccttggggctccagcccggcccactgggcaacag

SEQ ID NO: 227918 - DNA, 122 bp, Homo sapiens
ccatcttagaggatcgaggtctgcagggcacggtgaccgacacctggcgtggggacagggcggagacgtggcgtgaagtgggagggaggtggggggcaccgaggctgcgtcctgggacccca

SEQ ID NO: 227919 - DNA, 122 bp, Homo sapiens
taccctgcgggctccatcgtagagggagttagtgctgtgcctgcttcaggctacacagcacgaaaagcactgagctttgtggaataaatcaattctcttttaagtggagaaaaccctaggaa

SEQ ID NO: 227920 - DNA, 122 bp, Homo sapiens
ggtcattatctggctcttcctggagttccgagagcatttgctcatcatcactcagccagtcgggaggtaaatgaccacagagctggtactaccggagttccagctctttcccgtgtagtctt

SEQ ID NO: 227921 - DNA, 122 bp, Homo sapiens
acttccataatggggccccttgatttctttcctgtcacgctggccatactgacctctctccggggacaggctcagatctctccaaggtccagacgccactgtattaacaccaggcgtggcac

SEQ ID NO: 227922 - DNA, 122 bp, Homo sapiens
catgccacaggcagtgcacacatgggcggtgcagccctaacagcacccaaacccgcactccgtggctgcccagataacgcgcctaccccgcagcctaccactctggctgagctgaagtctcc

SEQ ID NO: 227923 - DNA, 122 bp, Homo sapiens
attttaacttttgaacaggtgtgaagtaggagtcaaatttcttattttctttttttgacacgtgaatgttcaattgttttagtaacatttgtttaaaaagatgatcttttctttaataaatt

SEQ ID NO: 227924 - DNA, 122 bp, Homo sapiens
ggaatctctttggtactgtgtttcattaatcccacaaccatattcccacctattccctaacgacaacaaacttttaaggtccaggttaccgccgcgtctccctagcaaccgtgccctttaat

SEQ ID NO: 227925 - DNA, 122 bp, Homo sapiens
ggagacaggcccttaagaaccttccagagatgccttaactgggctaacagctcgccgcgccggggcaggcagaggggtgcggggcgcgctccttccaggacttgccagtccccaagaaccag

SEQ ID NO: 227926 - DNA, 122 bp, Homo sapiens
ggtgatccacctgccttggcctcccagagtgctgggattacaggcatgagccgccacactcgaccctaaaacagattcttacttgattatttccaggttccaaggggaaatacaaaagtcag

SEQ ID NO: 227927 - DNA, 122 bp, Homo sapiens
atcacaggcacgcatcaccgtacccagctaatttttgtatttttagtagagacggggcttcgccacgttagccaggatggtctgaaagtctgacctcacgtgatcggcccccgccggcctcc

SEQ ID NO: 227928 - DNA, 122 bp, Homo sapiens
gattccaggcggcccctccgctgctgccagccgatccccctctacccccacccactactccggccgccagacgttgcctacagtctcggctctgtctcccacggctgtgggtccggacccca

SEQ ID NO: 227929 - DNA, 122 bp, Homo sapiens
gatgaagtaagcgctcatcctggcagccccgtaggggaccgccctggatgggagtattcacgggggaatgtgtcattgccataattttttcaaatgatcctgaaggcgatttcatattcccc

SEQ ID NO: 227930 - DNA, 122 bp, Homo sapiens
cggagaggacgaccgccaccggtgcaaccaggtccccgcgcccctgcccggcctctggggcgcccaagcgggccgtcctcaccgcggcaactccacgcccgcccctccagcccaacctcaca

SEQ ID NO: 227931 - DNA, 122 bp, Homo sapiens
ttgaagaatctcaacaatgtgactatttctctgtctcaacattaatttttacaagacaaacgaaaataaacatgaaaaatttaaatgaggcactaaaggaaattgtctgaatacacacaccc

SEQ ID NO: 227932 - DNA, 122 bp, Homo sapiens
gctgactctggatacaacgcgtggctgtcgtatgaattgcagtcggcggcggttggtgcacgcatcccgtttcgcgtggggctgtacacgggcgagatcagtacgacgcgcgctctggatga

SEQ ID NO: 227933 - DNA, 122 bp, Homo sapiens
gatatcggattcctgatcccttttcctctagaatctgatgcgggagggaccatgaggaaacgggaggaaagggctctgagggactgaaagggtggttagggctgagcttctttaccatctct

SEQ ID NO: 227934 - DNA, 122 bp, Homo sapiens
ccctctgtgtgtgaagcagccacgtgtctatgaggttaggcaggcaactgagggggctcacggagctcccagcacagaagaaagactgcaaaccacactacccccctgctaggtttgtgctg

SEQ ID NO: 227935 - DNA, 122 bp, Homo sapiens
ccatctggctgctgattcatttctccttctgttacactaagcctgcctcagatttccagccggagtgggagctattgttaacccctggcagatacttccttgctaagacatcctgtttatga

SEQ ID NO: 227936 - DNA, 122 bp, Homo sapiens
gtcgtgccgccgccgcttctgctcccgggcccgctgcagttcctgatccagcggctcccgcggccaccacgcgcccccagccctcgcatcctcgcgccccggccaggacgacatcgcggcac

SEQ ID NO: 227937 - DNA, 122 bp, Homo sapiens
tgtcgctgcgacgataaggcctggcgttattgcttagaggcggctacctggagccggaagcgcggctgcagcagggcgaggctccaggtggggtcggttccgcatccagcctagcgtgtcca

SEQ ID NO: 227938 - DNA, 122 bp, Homo sapiens
tccgagcccaccacctagagtttcagaaactgtgcgctgagaatgaaagagaccggggagcgctttgttcttcagcaagaggtgccatggtaggggcacggacaagcgtggggtatggggtt

SEQ ID NO: 227939 - DNA, 122 bp, Homo sapiens
gaaacgttaatgaaccagtccggtggggagtgaagcagacaccgggagccctgggctgggcggggtggtccgtggtcttacgaggaggactcaggtggcagagcctgcggggcagatgccaa

SEQ ID NO: 227940 - DNA, 122 bp, Homo sapiens
cgcggaggatggcaaaacgctgcctgtaagggactcactgctgctctgggtgacagggtccgccttgggggcctctgcttgtaaagacgtacttttcctctccctgattctgttgtctaaat

SEQ ID NO: 227941 - DNA, 122 bp, Homo sapiens
actgagctccccttccctgtgactcagtgcctcgcaggctggtggccggaagggtgcctgcggctggctggcccggcccgattccgggtggcggggttcctgcagtgaggaacgaccctcag

SEQ ID NO: 227942 - DNA, 122 bp, Homo sapiens
gggctctgggatcgccctggagacgcggagctggatgctgaggagctaggagaccacgagcgtgcgcgccgtcgccggcgagcccactggccccgtgactgctcctctcctgagtccgactg

SEQ ID NO: 227943 - DNA, 122 bp, Homo sapiens
cgtggctgcgtcccaggaggcaggcaagttgctggcgtgagtggccactgccaggagccccggtcatggtcgctcgggggctggaggagggggcggcaggttcatggccgccaccagggctg

SEQ ID NO: 227944 - DNA, 122 bp, Homo sapiens
atttcaggtgtgtcagtgtattgggcgcctttattcagcaggcagcccagactccaggtgcgtcctgccagtgttgcggagactgggacttagggaggatgggagctgctccgggcgcggcg

SEQ ID NO: 227945 - DNA, 122 bp, Homo sapiens
cccttaagcgcgagatgtaacgtcagcgcgcgcctgcgcccgtctcctagaagcggccgacggtagggtgggtgctcaccctggtttcctggttacagcgtctctattccggacgccagttc

SEQ ID NO: 227946 - DNA, 122 bp, Homo sapiens
ccagagccagggagctgctcagccgccttctgggcttcctgtccacgtctgtcctccatccgcgcgctataagcccttctgaatttacggtgcagaaccccctacctccgcctctggccctc

SEQ ID NO: 227947 - DNA, 122 bp, Homo sapiens
gtcagccctggggtcagtgttcccctggtgctcagctcggcctctgcaccttttagtgctcggctgggctctgtgggggtcagggctgggtctggtacattagaggacttctaccaagcccc

SEQ ID NO: 227948 - DNA, 122 bp, Homo sapiens
acgtgcctactcagtgcagacacggtgcccgacgtgcctactcagtgcagacacggtgcccgacgtgcctactcagtgcagacagggtgcccgacgtgcctgctcagtgcagacagggtgcc

SEQ ID NO: 227949 - DNA, 122 bp, Homo sapiens
acagttttctgattaccaaggcaggggctcttcctgccaatgatgaccagcagctccctccgaaggctggcacaagcctggggcccagctccaacaccccaactcctcgcccaaaaatgact

SEQ ID NO: 227950 - DNA, 122 bp, Homo sapiens
gcgcggaaaccagccgggctgcggctttcacttgctcaaccgaccgggaggaggctctggcggatggcgaatactgcgcagaagtgaaactaaaaacagcaggattagaggaggcggccgag

SEQ ID NO: 227951 - DNA, 122 bp, Homo sapiens
acatttgagctgggctcttgatgggtgaataggaggagctcaacagatgaagaagaagagcggggatagaaggcctatcttgggcaaagaggcacatcgcctgggttgccaggctgagctgg

SEQ ID NO: 227952 - DNA, 122 bp, Homo sapiens
gggagttggagcacagcaatgcgtgcaccacaccgcccgccctggaagaggcagtcaccccggaagaacaacttagtctgccccggaatctgaacgccgtcgaccatagagatgagacattc

SEQ ID NO: 227953 - DNA, 122 bp, Homo sapiens
ctcccaggcccccatacctgagatcaccatggcctgatatggggtagactacaagcctaccgtgcctcagccatgtgcagggcgacctgtccctggcatccacacctgtggcccatacgtcg

SEQ ID NO: 227954 - DNA, 122 bp, Homo sapiens
ggggtatggaactggaccctggccagacctgctcctcaactctcttggtgacctatagaccggcccaacgtgcaggaccagctccaggtagagaggctgcagcacacatatgtggaagccct

SEQ ID NO: 227955 - DNA, 122 bp, Homo sapiens
ggaggcaaggcccacattctccttcagagacaggcactggcgccagaggcttccttggggcggggggagggcacctcagcccctgaagacaagcagcactgcagtggcaaaaatggaaacac

SEQ ID NO: 227956 - DNA, 122 bp, Homo sapiens
ccgagtctctggctgtgcgacctaccaggtggttctcgtcctgaaaggcgtagtgcagcgcggtgatccactggcagtcgccgttcaccagcacatcgcgctcctctcggaagcacgcggtc

SEQ ID NO: 227957 - DNA, 122 bp, Homo sapiens
ggatgtgggtggctccagagttccctgcccgcagtttaggggcgaagtgatcggtgtgtgcgcgctgggcactctgcgggttaaaaaggtttagcagaaagggatgcagatggaggcgggaa

SEQ ID NO: 227958 - DNA, 122 bp, Homo sapiens
cgccagggctgccccgcgactgttcctaacccagaatagtccgtgcttgttctggggtgtcgggcgcgcctctggttatcccgtttttacttcctcagtcctgagtgagcttcgtggagtca

SEQ ID NO: 227959 - DNA, 122 bp, Homo sapiens
caggcccttcccggaagcccgggaagcaggtgcaagggtaggcagtctccacgggcagggcgccagaccttggcttccctgaaactgggcacagcagctgggagaggtttccgggcccgcct

SEQ ID NO: 227960 - DNA, 122 bp, Homo sapiens
gagcccggaacggcccctctgcaggtgaggcgggggcaccctcacctctcggctctcggacggccaccgctgaggcctcttgcgggcttcccagggctggttaccgtttcgttagggctgga

SEQ ID NO: 227961 - DNA, 122 bp, Homo sapiens
ttttggtttcccgttttccacactgaaccgttctaactggtctctgaccttgattattaacggctgcaaccgggaaagattttattcaccgtcgatgcggccccgagttgtcccaaagccag

SEQ ID NO: 227962 - DNA, 122 bp, Homo sapiens
ggcatgcgctgggcccaggcagcgcagggcagtcatgggtgagggtggccactgagatgacgggatcgggggcggcttctgccgcagacccgggaattcacgtggtcagatggtccctgact

SEQ ID NO: 227963 - DNA, 122 bp, Homo sapiens
ccacccactcagattctggcgtatccgtgctccctcccgattctggacctggattctcagcgccgccggtcatagcccccgccccttttcaaacacgcacgctctctccacccactgccccc

SEQ ID NO: 227964 - DNA, 122 bp, Homo sapiens
tgcacaggatgccacatacacaggatgccgcatgcacaggatgccgcacgcacaggataccgcacgcacaggataccgcacacacaggatgccgcacgcacaggatgccgcacgcacaggat

SEQ ID NO: 227965 - DNA, 122 bp, Homo sapiens
aggagacccaaagccaaggtgagagccacggtgggatcaggtggcagggtccgctgtgaccgccgcccggacctggcttcagtgccgctttcccgttgcagacgccaaggagcaagtcctcg

SEQ ID NO: 227966 - DNA, 122 bp, Homo sapiens
gctactatcttcccctttctgggatttaggggactcccacctttactgaagtctcctttgcgcctgaaagaacggctagccaagtttccaatcaactaaaggtgggcgtttcattcatatga

SEQ ID NO: 227967 - DNA, 122 bp, Homo sapiens
gggaggcatgtccccacccacgggcgcctcctggaccacgagctcctctttctcctgcatcgcctcagaccccacccaggggttccaaggtcaggagcctggtcccacgtcccacagccctc

SEQ ID NO: 227968 - DNA, 122 bp, Homo sapiens
tgaagctgagtcagcacatggagtgatgtctgaggcagaggcacggggtagcatcggttccggggcccagggcaggacacacacccacactggtggactgggcagcatcccacccatagctc

SEQ ID NO: 227969 - DNA, 122 bp, Homo sapiens
gcttgtccttgtcgtagcggttcttgcagccgtaggcggagcaggactgcaccatccttccggtcctcaggcacttcacttctgccgccgcagaaggcaggggaagctgttctcagtgtcgc

SEQ ID NO: 227970 - DNA, 122 bp, Homo sapiens
ggcaggggcgggatccggttggaattttggcgggttcagctgtgaacgaagaaggcgtcccggcatcgggtgaggagcgcgggccccgggcgtgcgtgtgaccctcgggcggcggggccggg

SEQ ID NO: 227971 - DNA, 122 bp, Homo sapiens
tgcacagaagatggctctccgggaggaagattcctttccattttgttctctctctgcctccgcaaggctcgcagccacctctcgggagtgcagggccagatcctgtgccagcgggtaggaat

SEQ ID NO: 227972 - DNA, 122 bp, Homo sapiens
cgtcgtcgcgttaacacaacaggatgctgttgctattgtcactactgcctctcctgccgccgctgctgctgccgccgccgccaccgccgctggtcctccttctgcttttacttctcctgcat

SEQ ID NO: 227973 - DNA, 122 bp, Homo sapiens
aagttttaaaaaaatattagtggggaatattcaggataatacaactgtaattttaagtagcgtgtggcactttcccaagcactgagtcattctagtgaatttctgaacctgaatggatcgtg

SEQ ID NO: 227974 - DNA, 122 bp, Homo sapiens
gtcgccaatttcccactacggcatctctggattcaatcttccctgaccattggaggcaggcggtatggtctagggaggggatgtctgccacccccacggcttaccatcagagcagggttact

SEQ ID NO: 227975 - DNA, 122 bp, Homo sapiens
ttgtagttttgctaaacctagagcgcttcaaattgcaagcaaggaggccgcgaggcctgacgggatttgtagtcggcgctagacgccggcgcgcacgcgcagccggggccggggcggggcgg

SEQ ID NO: 227976 - DNA, 122 bp, Homo sapiens
cgctcctcacacccgtgcgtgtgggatctggagctccccgcgcacctgtgcgtgtgggatcgagttctcactgcgtgtgtctttctttgaaccctaaaagtttcatctggactgctgggtat

SEQ ID NO: 227977 - DNA, 122 bp, Homo sapiens
ctccagcctgcctgctggctgcctgctgctgctctctctgaactgagagagttaaccaagcgggccagggcagtctgggctgggggccgccccctggcccccctccagccccagctccagtt

SEQ ID NO: 227978 - DNA, 122 bp, Homo sapiens
cctttttgtctttaagctttggggggatttatgttgcgtttccaaactgcttctgcctgtcggcgcctgtgtggaaactgcgacgagtctgggagcggctgccggagaggcggggcagaggt

SEQ ID NO: 227979 - DNA, 122 bp, Homo sapiens
taagttcttttatataactgcagaaggaagttcttgcattgtgggtcactgagaatacatcgaatcccagcccactaaaccctttattgaaaattgtagaggtttgagttaacagtgctagt

SEQ ID NO: 227980 - DNA, 122 bp, Homo sapiens
cattaattgggccataaaaagttttatgagcctcatttacatacaatgctatgggctccacgcaatggcgcctccgctccaattaaaaccagaaaggctgcgccgggagtcacggggctacc

SEQ ID NO: 227981 - DNA, 122 bp, Homo sapiens
agtggttccctttgaaaggaactcaccgtgtaagcaggtgagggaattcgtaacagggcacgatcaaaagtgaactgggtaagcgagggaaagcaattacacaaggagatcattaattggaa

SEQ ID NO: 227982 - DNA, 122 bp, Homo sapiens
tgttggttggttccttggggcatctacagttctttttcaagttatttacttgctcattaccgccagtcccagctttcttgggagacctaaacatatttggggaatggaaataatgtgcttgc

SEQ ID NO: 227983 - DNA, 122 bp, Homo sapiens
ggaatggttttcagtagttgctttactgtcctgatgttgggaaaggctttatggtgaactcgttgattgttacacttagtgaaaatcagtcatatgaactgagcatgctcagtggactggaa

SEQ ID NO: 227984 - DNA, 122 bp, Homo sapiens
gaactgctgagtaacccatcgccacctcttcccgccggctcttaaactcctggggccgggcggctgtcacagtcctccctcagacagtcccggccctcggcccggctccccggaggctgggc

SEQ ID NO: 227985 - DNA, 122 bp, Homo sapiens
ctcactgtgtgattcacggttatttaatgccaggtgggcactccacctaaaataatctcacgtacctccaagtcatctttgttccacacttaaagaaatgtggatgttttgtatatttcaca

SEQ ID NO: 227986 - DNA, 122 bp, Homo sapiens
attcctgcggcccctgccttgccgcgcctgtcaccccgcagggctgtgccttacagccggcgctcgaccctggaaaaaattgactgtctgtttctgcctgactgctcgagagttacaggctg

SEQ ID NO: 227987 - DNA, 122 bp, Homo sapiens
acatatttgtttattctcccatatcctgtgtcctacttctatctaacacaatgtaggctacgaagctcctcctcctcctccctaaactaccacatcacaaataatacatatatttatgtatt

SEQ ID NO: 227988 - DNA, 122 bp, Homo sapiens
ctgcccccactctgctccaatgagtaaatgcaacaaatggttcatccccaggagtccgtgcgcccgcacagcggccgcctgtccagcctctgggaggctctggcatccgagtggtgtgacca

SEQ ID NO: 227989 - DNA, 122 bp, Homo sapiens
cagagccccttggttgtgaatctagtgggtattccttggtctttatcctacctgactttccgtcaacaactgagatgactaacatctgattcttaggacactttccttattgatagcattca

SEQ ID NO: 227990 - DNA, 122 bp, Homo sapiens
tcggcaaattcacacttaggaaatctgtgaaaatggtcatggacgccgaggctctgtcttcgacccaacgatgtctaccagccatcaacaaacagcaagggtatccgtgtggctaattccaa

SEQ ID NO: 227991 - DNA, 122 bp, Homo sapiens
ccccattgccgcagcctgggtttcagtggcattcagaacaagcccacatgttcctcaaagcggggttttacctcccggtagggagctccccgccgtggcgcagcgtaggtgagccggccgtg

SEQ ID NO: 227992 - DNA, 122 bp, Homo sapiens
ccctttaagaaaagaggcaccgtgttctttaagagttctgtagcagagtcctggcagtcccgggacttcacacgctgcacatttacttgtgcttttatttacttaatctctgtctgtcccgc

SEQ ID NO: 227993 - DNA, 122 bp, Homo sapiens
tttccaggctggcatctgggacaggcgctcccgttctgctttctctcggcctcgaacggacgcctcctcctgccggcgccgggctagcagctgtagcttccagtctgggatggtggccatgg

SEQ ID NO: 227994 - DNA, 122 bp, Homo sapiens
ctgagtcctgaagcaggcagaggggagtgcagatggtaaaggagcagacgcggaaagcgacggtcagggaaaagccagagagccaagcagcctggtggatctccggggccttggtttgatgg

SEQ ID NO: 227995 - DNA, 122 bp, Homo sapiens
caggtggatttacatctaatatgttacaatcctgatgtaaatccccaggaggaagcctggcgttagccacccttactctgcacagtgctatccttgctgttgctttcatctctggcaggagt

SEQ ID NO: 227996 - DNA, 122 bp, Homo sapiens
ccttgtccccagtgagaagaagggacctgggacagctggggacagactcacctgcctgcacgcaggtcctggggcccacactcagccctggaagagagttccctgtgagggatttgcccctg

SEQ ID NO: 227997 - DNA, 122 bp, Homo sapiens
aactgctgtcagtccaagtggcccatgacctaagctgacccaagccgactgaagggaggacgtattctatgcatgctatgcagttccacagggtgctggttgtcccagctgctgctggtggt

SEQ ID NO: 227998 - DNA, 122 bp, Homo sapiens
agtgtcaggatgtgacttctaaaatccaacccatggcagtggtctgcttcaccaagaccccgttcttggcctgcttggtcttctcggaaatggatttctctaggtccccccagtaggaatga

SEQ ID NO: 227999 - DNA, 122 bp, Homo sapiens
gccacgtggggccgggcctcgacctccctccccccaccccacccccgcaggtcagccccgcgcctaggcggcagcggagtcccgaaccgcgtttctcccgcccaaaccctgccggggccgcc

SEQ ID NO: 228000 - DNA, 122 bp, Homo sapiens
gtaaggaagaggacgtttattgttccgtgcacagctcaatctggaaagtacaaatacacacgtgaacctgttagccgttcgcccactcagcatgggttgtggacgacaaccctagctcatga

SEQ ID NO: 228001 - DNA, 122 bp, Homo sapiens
acctcgtgattcgcccgcctcggcctcccaaagtgctgggattacaggcgtgagccaccgcgcccagtcggaaacctgaaaggttttataaagagaaatgacaagcttagatttgcaatttt

SEQ ID NO: 228002 - DNA, 122 bp, Homo sapiens
aacgctcagctcgcgcggctctgaaccaccggggagcagcggctgctgctagtcggactacgccagcacctccttgtccagcccgggagcagccccgcctcgctcagggccgcgtgcgcgtg

SEQ ID NO: 228003 - DNA, 122 bp, Homo sapiens
acactctctgtgggatggagggggaaggtgagtggagggaacattaaatattaggaaacccgaagaaaaagcaaaagcaactgctttctcaggctgcccttcggaggttcgtagtccgggaa

SEQ ID NO: 228004 - DNA, 122 bp, Homo sapiens
gagtccgactacgagctggtgctctaagcctccagcacgctaggactgacgacggggatccggaaacaacaagctccactcccgcaacacacacacacacacacacacacacacacacacac

SEQ ID NO: 228005 - DNA, 122 bp, Homo sapiens
acgtgaagcagctccagcctccacgccagttgcatgttggttaaaagtttgtccttggtgcgataagtgtgtggaacgggagagagaccatctctgcctctgagattggattcgggtttcag

SEQ ID NO: 228006 - DNA, 122 bp, Homo sapiens
agtatattgaaaatagcccaaagtagctgtcaaggcataaacaactcaggaggaaagcatcgctgtggttttactgaacagatggtctgatgacgtcagtgtctccaaattacctgcagcca

SEQ ID NO: 228007 - DNA, 122 bp, Homo sapiens
cgggaaagccttgttccttgctagaaatgagcctcgcaggccaccaccatccgcaccgtacgacaggccgtccctcagctgcggcttcctgcctcaggcaggatgtaccaaacgtggaagcg

SEQ ID NO: 228008 - DNA, 122 bp, Homo sapiens
tggaggcaaggaaggcagccctgtgctgtctgtcccacgctagcctcagaatacttaagacggtgtgtggtggcaaaggcactctcactgctgctgaccatggcaggtgcacgggcacactg

SEQ ID NO: 228009 - DNA, 122 bp, Homo sapiens
tgcccgtgagtcagacaccagccataaacgtcagtgtgcccaccacccttccctctgccacgcaggtgccgatggaagtccttaaggtacgtgagtgttgctcttgttggttggaccaaact

SEQ ID NO: 228010 - DNA, 122 bp, Homo sapiens
ctgggtgtgggtggcttatgcctgtaatgccagcactttgggaggctgaggtgggaagatcgcttgaggccagaaggagttcaagaccagctgggcaacacagcaagaccctgtctctacaa

SEQ ID NO: 228011 - DNA, 122 bp, Homo sapiens
cagtgtttgtctccgagcttcctgcaatgaaacaacaagcaacgcactgggggcaggaaacggagccgtcagaggaaagcaccccagagacgctgttccccgtctcccgacactggagaaac

SEQ ID NO: 228012 - DNA, 122 bp, Homo sapiens
gatttggttgagtgagtgaaaggcattgaccttcattcctcctctcgcctgtgtatacagcgcttcgttccctccatccctgtctgtctcagagccccagggactcgcagatgggcgaggtg

SEQ ID NO: 228013 - DNA, 122 bp, Homo sapiens
tcagcggccccttagcctgtgagctgccctcattccccttcacagccctgagtgaggatgcgcagcctccttgggcaggaggaggcagcttctgggaggttgggtctcacagctccagtgcc

SEQ ID NO: 228014 - DNA, 122 bp, Homo sapiens
ctcgaacccttgacctcgtgatccgcctgcctcagcctctcaaagtgctgggactgcaggcgtgagccacctcggccagccagtttctgttatcttgtggtgggtaaatatggtcttggtgg

SEQ ID NO: 228015 - DNA, 122 bp, Homo sapiens
cagcccagcctgtggaacctaaatggcccaggtcccaggagttcccatcggagccgtgggcgtccccagggtttagaaaggctccccaggggcccaagctgccggcgagtgcagctcccgcc

SEQ ID NO: 228016 - DNA, 122 bp, Homo sapiens
ttgcaatttttcggggtgtttctgttttccaagattcccttagctgaccttgacagtggacgtctttacaatggcaccatcgcacgatctctcgatcactctcagctttcaaaagcagaata

SEQ ID NO: 228017 - DNA, 122 bp, Homo sapiens
atctggcttgtgggcaaccgcaacgctgccgcagtgaactgtgggagttgcggttcacggcgtagcctcagtttttttcctgggggaagttccagaactacaaatcccgtgagccagtgggc

SEQ ID NO: 228018 - DNA, 122 bp, Homo sapiens
ccgctcaactccagggaccaaaaagactttcccacctcccagcgttattaaaggcaaccccgcccccaagcctcagccactacgcggtgcagaaagaggcagagctgggcatgcgcaatttc

SEQ ID NO: 228019 - DNA, 122 bp, Homo sapiens
agcggcggggccggctctgcggctgcagcagccccattgtgaggccggcgagacaatgggcggcccgaggaggcacctgctcgcctgaaaggcccataaatcgccgccgcgtccagctgcct

SEQ ID NO: 228020 - DNA, 122 bp, Homo sapiens
tgtgtttaacgttaaaagcaagcagtgtgtttctctgaagtgtggctccaccatggtgttcggttacacccagaggaggaggctggtgggcagtcatagaagtgcatcttccagagcaggaa

SEQ ID NO: 228021 - DNA, 122 bp, Homo sapiens
atgtgcacaatgtagccatccctctccaggctggcaggcttcctagtgggctgcttaatgcgggacacaattcctctctgctcttgaaactggtcccagacctccgcctcttccacccttcc

SEQ ID NO: 228022 - DNA, 122 bp, Homo sapiens
cggggagaccctggcgtggcccgcgccgcccaggatgactttcctggcaagttctgcagacggtgcccctttcttgggacgatcaacgtagatgggcaaaccacaccatcttaaatagcctt

SEQ ID NO: 228023 - DNA, 122 bp, Homo sapiens
ttcactcttgtttgtggagctctgtagtaattaggaaaggattcgaaactccatttgaaacggaggctggtaatacaatgatgtgttggatgtttctcagtggagaataaggtgctccaaaa

SEQ ID NO: 228024 - DNA, 122 bp, Homo sapiens
ccccttccgagccccaggcctagtctccagggcaacctttaggactattccagccaggagcggttaggaagaggggtgttggataggagaggaccacttgggattagaaaagaaaatgaggt

SEQ ID NO: 228025 - DNA, 122 bp, Homo sapiens
ctagataagcacagcagagaagcaaccagctccgtttcaggtcctttcctgagactgattcggctggaagggagtaggtcccgccaaatgaagaagctgtgggaagacaggaggacaagaac

SEQ ID NO: 228026 - DNA, 122 bp, Homo sapiens
gtcatgatgcggagcgggctttatgacgtcacacaagagcgggctcctgatttgtgatgacgtccctggagggggcggctcctggagatcaggccaaaggggcggccccatcctgctgacgt

SEQ ID NO: 228027 - DNA, 122 bp, Homo sapiens
ggacagaacgtgttagtgccaaaacggggagggaaggagggcgctcaccttccaccacaccgcagaggaaccgccgagcccctcctgcagccccggccaccgccgctcccccagccccggcg

SEQ ID NO: 228028 - DNA, 122 bp, Homo sapiens
tagggccaggtgtcatgctcagcacagccaggtagggaatgtgcacagaacacattaattcggcttcacagacactcccattctcagcatgtaccccatggaaatccagtcaccccctttaa

SEQ ID NO: 228029 - DNA, 122 bp, Homo sapiens
gtttaggaaagccggccgctacagccacacaagcccccaccacaccacacctcccgaacccgaaccctcatcagtcctgggtctgtccagaagggatgggacaaggggtctgtggaatgatc

SEQ ID NO: 228030 - DNA, 122 bp, Homo sapiens
cagcagctggattgtcaaatagtgtctcttggaacttctcaacttctttttcctcggatgcgacattcggaatcagagaaaagttgttgtgcagaaagacaaatagttacctacgctgttcc

SEQ ID NO: 228031 - DNA, 122 bp, Homo sapiens
ctccccgtcgtcattggctgagcgcctcgtgacgtcactctgaggcgcctcatgcggcgccgcgcacgggtcccagagccttctgggtagcggtttaaccccgcctcttgcgtcggcgcctt

SEQ ID NO: 228032 - DNA, 122 bp, Homo sapiens
tggaaaaggataaatcatggaaacttattcacaataaatgcctggacttcttgagtttaccggaatcacagaatcagaatctaatccctaaagatcaccaaatccggatgcttcattttata

SEQ ID NO: 228033 - DNA, 122 bp, Homo sapiens
tggggaggaacctctcagagaagcccatagcccgcagcggccccgcgcggccggttccggcgccgcactgttccagcctctactatggtacagtccctgcgtcgcagcctcggcgggggctc

SEQ ID NO: 228034 - DNA, 122 bp, Homo sapiens
ggtcagcgtcctgctcctcatcaattcgggcgggcaggcggtgaagacaaaaaccaaaaccgcaactgccaagatcttggtgggaagcagagaacactgtgtgagtgcaggggtcggatttc

SEQ ID NO: 228035 - DNA, 122 bp, Homo sapiens
cgctcgcgcccgtgcccgcgcaacctagcctgctggccggggggcggggcgagcgagccgcggcgcttccgctttacacgccccagccggcgaccggttccatctggctcgggccactctga

SEQ ID NO: 228036 - DNA, 122 bp, Homo sapiens
cgtcccggaccgcggccgaaaggagccggggacgggaggagggggaggggcgaggcaggccggaggagaaagagggacaaagagcaaagacccagttagaggaaagagctgacggcatcccc

SEQ ID NO: 228037 - DNA, 122 bp, Homo sapiens
tgccacaagctctctgcgggtccatcctccccaccggggtccgtcctcgcaggccctgcccggcctctctgcagaccctcaagcgtcgtctgcatgagtgagcaggcgtgggtggactctgg

SEQ ID NO: 228038 - DNA, 122 bp, Homo sapiens
gagtcaaaaagagtcttttaactttattccttcacaaaacaaattaaaaatcagtagccacggatcatttccaagggggcctttaaacacttcttgaaaaagagcttggcatggctttaggc

SEQ ID NO: 228039 - DNA, 122 bp, Homo sapiens
gtgatctgcatagcccgaggaagctgggattcgggggtcttcgctggtctgcgcgggtcacgcgtccccagtcctcgggcggggtgagcttggcggagggtgtgtgtgagagaagtccgaga

SEQ ID NO: 228040 - DNA, 122 bp, Homo sapiens
acggtcacacccagcccaccccttgcggggagctcggcgtcaaggatgatggacgagaggcgggcagagcccatgggacctggccccagccccacacccacccacggctcagaggccccgag

SEQ ID NO: 228041 - DNA, 122 bp, Homo sapiens
tctacctcagtaattaaaataaggctctcttatgccatatttgggatactcaatcacagccgtgttcaagatcaaaaacttatgggatgtctgatgtttacatagattccaactagcagttg

SEQ ID NO: 228042 - DNA, 122 bp, Homo sapiens
tgaaagcccagtccacagcctccatgcccccggcccggcccgccccgcgcgcgtttcctgcgccgcagcccggacgtcgagaagatacccttcgcttaaaggccctgcgatgtccgcggccg

SEQ ID NO: 228043 - DNA, 122 bp, Homo sapiens
ggagctgacccagatggacagcttgggctctgccacgcgggactaggcaaggaaggggcacgaacaagcaggaagtggtgaggcggtctccagctagctgctctcccctgcccagactttgg

SEQ ID NO: 228044 - DNA, 122 bp, Homo sapiens
cggagaggtgcaatgcgggctccccctccccaccctgcagcggggccctgcagaaggtaccgggcggaacacgcgtgccctctagtggtcacagagtcaaacgtcaagttccatcctgcgga

SEQ ID NO: 228045 - DNA, 122 bp, Homo sapiens
gcttgtgcaggggacagtcacggtggccctgccagccgcccatggaggcaaaaggcactgcgtgattacagcagctcctaatatcacattccaaaaaccagagtgccctgtagacagagctc

SEQ ID NO: 228046 - DNA, 122 bp, Homo sapiens
gaaatgaaatgatacaggtgtcaccctttccccagtaatgtgcttgttatactgtcaatccgcattgagaagttcagaaacatagtaagagaactaagttgaaagggagtcttgtgactccc

SEQ ID NO: 228047 - DNA, 122 bp, Homo sapiens
cggcggtcaggtccaccgtcgacgcctcagtccggcggtcaggtccaccgtcaacaccagcggtcttgtccacatcaacgcctcagtccagcggtcaggtccactgtcaacgcctcagtctg

SEQ ID NO: 228048 - DNA, 122 bp, Homo sapiens
attctctaaaggaattaaatagaccttgctatttattaggcctatactctgcgacattcacgaatctccaaatgctttctaaaaagtaatttcccaccctaaaatgcagtgtagtaaaatct

SEQ ID NO: 228049 - DNA, 122 bp, Homo sapiens
ggctcaggatggctgggtgacctgcagactcatggctgggacactgtcttgggcaccatccgctttctgaagccctggtcccatggaaacttcagcaagcaggagctgaaaaacttacagtc

SEQ ID NO: 228050 - DNA, 122 bp, Homo sapiens
gggttgttatgtgggccacctgaataggggaatcagcagctgcctggcctcttgtactaacgccttcccttctgtctttcccagggtccctcagctaccctagagtatgtatgggaaatgcc

SEQ ID NO: 228051 - DNA, 122 bp, Homo sapiens
ctctggacacagaccctgcacacagaccctggtttgtggtgtttggtctcagctcttccccgtaggctctgccttagaacatcgaactcctccctctcaggaagtcctttgcaccccagtcc

SEQ ID NO: 228052 - DNA, 122 bp, Homo sapiens
cggtcccaaggctttccagagcgaacctgtgcggctgcaggcaccggcgtgttgagtttccggcgttccgaaggactgagctcttgtcgcggatcccgtccgccgtttccagcccccagtct

SEQ ID NO: 228053 - DNA, 122 bp, Homo sapiens
aatattcccagtaaaacatgtgcaactgtccaggtagtggtgacattttcagcttgatatcgtaagatgatcgtgaacttgatacagcataaatatgtgtgccatctcatgtgcaattcctt

SEQ ID NO: 228054 - DNA, 122 bp, Homo sapiens
ctattttaaaatactatttccgtactgtaaaattgatattagaggaaaaaaagtcacacacgatgcctaccaccaccagggtgaaaccaaatctttatctgcctatggctgctgtctgggtc

SEQ ID NO: 228055 - DNA, 122 bp, Homo sapiens
ggaagggctgtcaccgcgatggtgctctcagggaaccaaggttcacacattcagggaattcggggcactgagtcagcattctagactctgccaggatgaggaggagcaggggactcagtttc

SEQ ID NO: 228056 - DNA, 122 bp, Homo sapiens
caaagtcgctaggccaaagcgctgagatacggtttcccaagccaattagagagcggctctcggatatggggcggaaccctgaaaaggcgagagctgagatgccgctccgttctgccttacca

SEQ ID NO: 228057 - DNA, 122 bp, Homo sapiens
gggcaacgcacaggcggcagggcccttaaaagtgcagtcaataggtctgaaaatgatagacgtggctaatggcattcctagacatcacacaaagatttatcatagcaggatttatctttcat

SEQ ID NO: 228058 - DNA, 122 bp, Homo sapiens
tcagtgctgttacttctaaaggcagattcttgaacacaggttcgttagcttcagaacatacgcagtctcctcatggtagcagctgtgctgagttcctgaatggagagatgatttccacagta

SEQ ID NO: 228059 - DNA, 122 bp, Homo sapiens
tttgccccccaacactccacccagatgttcctcttgaggacaggatgatgctcctgaaagcggtcagtccacagcggaccccactgcctcgagacgctcccatcactcggctcccgtgacac

SEQ ID NO: 228060 - DNA, 122 bp, Homo sapiens
cgacctgcggccgcaggggccggcgctgtcgcagcccgtccgcctcgctcatggtacgggcgccagcctcacccgcagaaaccacctcacactgagcggcgccggctcagactccaggcccg

SEQ ID NO: 228061 - DNA, 122 bp, Homo sapiens
aaatataaaccatcttaaataaacaagagcatgtattagataatgaaagtgaagtgtctacgggtacattagcttcaggaatagctcaatccagctgttcaaatcaagaatctgtttcttta

SEQ ID NO: 228062 - DNA, 122 bp, Homo sapiens
caaacctacttataaataaactccaagaatgagccaggtctttccctaaaacataaacctcgaagctcaggtaccagagtatcccatatgtcttcttcccaaaggtagagacaatgagaatg

SEQ ID NO: 228063 - DNA, 122 bp, Homo sapiens
ttgtacttttagtagagacggggtttcaccgtgttagccaggatggtctcaatctcctgacgtcgtggtccgcctgcctcgccctcccaaagtgctgagattactggtgtgagccactgcgc

SEQ ID NO: 228064 - DNA, 122 bp, Homo sapiens
tgccttgtgtgtttatgacgaaccctccgggcttgcgggcccagacgtgagagagctttccgctgaagatgacgggcctgctttccagggcggcttgtcgaaagcccgggagcatctggccg

SEQ ID NO: 228065 - DNA, 122 bp, Homo sapiens
agcatttgtggagtcaaacggaggttgtgccggtccgtcgctgagacttatctcaggaagcgcacaggcacggtgctcgccctgagagtgagaatcgcttgaacccagggaatgaaaaggtt

SEQ ID NO: 228066 - DNA, 122 bp, Homo sapiens
ctgagagggagaattgcagagctctgattgttctcagctctcctgttttaataagggaagcggatgcaaggagcacactgtgattctaagaaggaaggcagcaccctgcatggcccagatgg

SEQ ID NO: 228067 - DNA, 122 bp, Homo sapiens
aggaggcctggcacaccaggcaggacttgaccgccttctgcttgttgccgatgcaggagtcgcacagcacctcctcggagccggacttggaccgtgaaaaaaggcccgtgtcggcccggggg

SEQ ID NO: 228068 - DNA, 122 bp, Homo sapiens
aataaagtatgagttctaatccagactgtctggctgcagggtccattcagatgttgacaccgcactgtgggaccaggaacaaagacatctgacttccagcattcagttgctaatgcctgccc

SEQ ID NO: 228069 - DNA, 122 bp, Homo sapiens
ggaggtgacggctccaggtgtggcttcagatgatagaggagcaacgcactgctctcaggtcgatttctgggaggaggaaacacatgccagcctcaccaccaccctgtcgggtccacacgatc

SEQ ID NO: 228070 - DNA, 122 bp, Homo sapiens
tggtgaatattgcgtctgtacgtcagtgagcaatcctcagttttcagctcaggcgagctccgaccctgttgtaggtattaaaagcctttgagttatcattggccttaaagtgcatatagttg

SEQ ID NO: 228071 - DNA, 122 bp, Homo sapiens
tctgcagtcttaaagcagcagcagagacgtgcagccgaactgaggcaggaccggggagagcgcagccaccgcacagtcacgcacagtcatcaggaggaatttcttagaggcttaaataatca

SEQ ID NO: 228072 - DNA, 122 bp, Homo sapiens
attggctattgcaaagggcgaggcctactgattggctgcgcggggcggagccttcgggcgcgaaaaagggactgggctctctgcatgatatagggctctcaatcatgatttacgcttgcgta

SEQ ID NO: 228073 - DNA, 122 bp, Homo sapiens
tagtgtcatcaccggtcacggcaggacaagcgccccagaggtcggaaaatcctgggacaacgcgaaagcggtggtcgccccacactctgcggagaaagtggtttcgcgcacgcgcgccacgc

SEQ ID NO: 228074 - DNA, 122 bp, Homo sapiens
gaagatttcttccagtccctcattttgcatcttctctgaacacggtatctgctgtcgacccggagtctgcgtttatcaacttctccacagtcccggagcgggtacctccttctgcaattgag

SEQ ID NO: 228075 - DNA, 122 bp, Homo sapiens
tctgaggaagttgcccaccctctcggaatctggtttggcctccgtaaaatgggcagatcccgctcggatggcccggttcccggcttccttttgcgggtcaacggcagcgtcacgcgcgcgag

SEQ ID NO: 228076 - DNA, 122 bp, Homo sapiens
taaacttatgttaaataaaaccagtttgcaggtgcacaaactatgagggtcttgtatccacgtaacacaggtagttacaaaaacatgttattgtactgtgtaaagatgcatagtcatctcat

SEQ ID NO: 228077 - DNA, 122 bp, Homo sapiens
ctacggtaaagggaggtgctccacatctctatgcagctgtgcagcgccgcaggttccatgcgcaggctcggttggctaaatgcgctttccagccatctttcagccacccagtcctttcccag

SEQ ID NO: 228078 - DNA, 122 bp, Homo sapiens
ggaaattcttgccataggaaattcagcaacttgatgcagtatgtgtcttggggtgccccccgttttgtaaatatcgtgtctgtgaaatgagtgtgtttatttatactcctgatgctttttct

SEQ ID NO: 228079 - DNA, 122 bp, Homo sapiens
gagaaactgctcaggagcaaatcctgtggcctagttttcccttcagtgctgtcagcttcccgcttgatgctcgataagcgcttgtttcagccactactgaatattttttgagtttgcttatt

SEQ ID NO: 228080 - DNA, 122 bp, Homo sapiens
aacatctatatgccagagtcccaaatttatacccccaacttatatccaactgcttactgccgaagaataaaacactgaagttaaaaaataataaacataccaggcaagggaacacttactag

SEQ ID NO: 228081 - DNA, 122 bp, Homo sapiens
ccgccgtcgttgccccgcccgccttgcaccccgtcttcgtcccgccccgcgccgtggccccgcccacacgccgtcagcttcgcgtctgtcctcgccccgccctgcatcatcgccccgccctg

SEQ ID NO: 228082 - DNA, 122 bp, Homo sapiens
attgacacaagctgcttgcagacagcaaaactgaaatagcacgatgtaacacaagcccatcggggctttgggagctgtaaacactcaaccttagacgattccatggggttggagcccaaaat

SEQ ID NO: 228083 - DNA, 122 bp, Homo sapiens
tctctggagttggtttcacttggggctaggaacagattcgctttccagggctagaatccccgtctgacgacaccaagaataatctctatgagtggaaggacctcatctggggctgtgtgctc

SEQ ID NO: 228084 - DNA, 122 bp, Homo sapiens
ttcctctcaacctggctttctccaactgcaagtccaatcggaagggcgatgccatgcccccgctatcatccctgtgttccacctcagcactgtttctgggtctttgggcctctttgcagcac

SEQ ID NO: 228085 - DNA, 122 bp, Homo sapiens
cctccccaggctcagcgggcgtgcaggttggtcgtgtgtccgctggaggccgctttgccgcggggccctcagggaaggcctccagccacctgcgctcaccgggatgggctccggaggcgacg

SEQ ID NO: 228086 - DNA, 122 bp, Homo sapiens
tagatctttgatctagcaattgcaattcaacccagaaatccaaaagctctgaaagcaaaacgaatttttttttctttgttttttgaaatagggtctcattctcttgcctaggctggagtgca

SEQ ID NO: 228087 - DNA, 122 bp, Homo sapiens
agccactcagactaccaggggcgggggcaggaggccgaccccagccacccttaaagctgccgccccctctgagccccagtcctgctgggccgtccgcccaacccgagggcccctttaagagg

SEQ ID NO: 228088 - DNA, 122 bp, Homo sapiens
ggcggcaaggatgtcttttctgctttgtgctctttgccggttcaatgggggagtgagatacgtggacagaaggaccaggaaacccaggaagggggccccagggcagcacccccacccccagg

SEQ ID NO: 228089 - DNA, 122 bp, Homo sapiens
ttccggcctggccacccgccagcaggtctcacccggttcgcatcagtcccgggcccccggcgcccctcagtagtagcaaattatcgcatccctgagcttaggatccccctttagtttcacat

SEQ ID NO: 228090 - DNA, 122 bp, Homo sapiens
accagcccagggcaacatggtgaaaacgcctctctacaaaaaattcaaaaattagttgggcgtggtggtgtatgcctgtagtcccagctaccagagaggctgaggcaagaggatcacttgag

SEQ ID NO: 228091 - DNA, 122 bp, Homo sapiens
ccatgggcccatggattagcattgcctctgaaatgctctgtctatcctgggcaccgcccccgctccgccgccacccgccaccgtatcccccctgcccacactcctttccctgctgggtgagc

SEQ ID NO: 228092 - DNA, 122 bp, Homo sapiens
atcatgaagttcatcaatgaccagtacgagaaatacctgcaggaggaggtcaacatcaaccgcaagaagcgcatcccggacacccgcgtccactgctgcctctacttcatccccgccaccgg

SEQ ID NO: 228093 - DNA, 122 bp, Homo sapiens
gtgttgtcactatttttttattttagctgtgccagtaggtgtgcagcatagtttggtttgcgtttccctgatgtctagtaatgttgaccatatcttttcatgcgcgtatttgccgtctatat

SEQ ID NO: 228094 - DNA, 122 bp, Homo sapiens
tgaccctgaggcccaggcggcggcggcagcggcggcggttggtcaggggcgtgttggccccgcacagattgagccgagttgtcgccccgctgggagaagtgaccctcctgcgcctggtgagt

SEQ ID NO: 228095 - DNA, 122 bp, Homo sapiens
gcgaggtcctatccgaagctcttcggcgtcatgagcagccaataggagttcgtgtagaagcgagtctgctcaacagcttgttatttggtggattgtggcagtaaatcggggcgagtggggaa

SEQ ID NO: 228096 - DNA, 122 bp, Homo sapiens
aaagtagggatgaaaccttgatattaatttagcttatattaacagcatatcctacactcacgccaagtgtaggcttgattttacaagagaaatattcaccattttgaaaaaaaaatcacata

SEQ ID NO: 228097 - DNA, 122 bp, Homo sapiens
tggctgccgccagctgatgtgggaagaacatggaaagaacagagctggaaaaaaaataaacgcattccattcaggaaagtcacagtgagccataggatggaacccacagcaagacccgaccc

SEQ ID NO: 228098 - DNA, 122 bp, Homo sapiens
cccaacttctcaaacaggacaaatttagcattcaaaaataataacagcaactggttgagacgcactatgtaaaaaaatcagtgagtgcatttattttttttaatgtcattgaccctcttgga

SEQ ID NO: 228099 - DNA, 122 bp, Homo sapiens
aatccccacaacctttctacaaaacatgttcttgatgcacatcaaagaagatagagaaagcgggaacaggtatcccaatgctggttctatccttgtgttctttaaccaacttattgaagttc

SEQ ID NO: 228100 - DNA, 122 bp, Homo sapiens
aaataaaaatagggaaaaacagcctttgtaaattacggtttcttccggctccatcctctccgtcaggcccacatcccaaggaaacagcaggcttgagcctggctgctgaagccaggggctgg

SEQ ID NO: 228101 - DNA, 122 bp, Homo sapiens
aaaacgcgactttattcctgcaggtccacgaatcctcctcgcagggctcgcagccttcgccggccgccagctctggctacgaatcctccacgcctcccaccatcgtgtctccctccacagac

SEQ ID NO: 228102 - DNA, 122 bp, Homo sapiens
atataatgatgggactggactaagtgatttctaagaccccttctgcttctgacattctgtcgagtggattttgttaaataaaaatcagacaactatgattaccctcaacgtcatttatgaag

SEQ ID NO: 228103 - DNA, 122 bp, Homo sapiens
agccttgcagaacagccaggtgtctgttctatagactacagttccttgtttccagaattacggtaaccaaataatacacaaggtcacctgattgcacttcccaacaacctgaacaaagagca

SEQ ID NO: 228104 - DNA, 122 bp, Homo sapiens
cagtcatgttttgtatctatgtaccatggcgatagggcagcatattttgttctgtaagttcgaactgaatgctctaagcaagcggacttcatcgtggtttttaaaaaatgactacatatgta

SEQ ID NO: 228105 - DNA, 122 bp, Homo sapiens
cgcgtcgccccttccccgcggggctgcaggcgccggagcggagaggccagaagttggggccgcggggttcgcgttctttgacgtgtgggtctgggaggtgtggagttgcgttggcggcggtt

SEQ ID NO: 228106 - DNA, 122 bp, Homo sapiens
catcgatgctttcatcattggcgcagtcatggccaagatggcaaagccaaagaagagaaacgagactcttgtcttcagtcacaatgccgtgattgccatgagagacggcaagctgtgtttga

SEQ ID NO: 228107 - DNA, 122 bp, Homo sapiens
acttccgcgggcgtttaaatagcagcctctctcccctcccaccggtaataggtgacctggcggccgagggcggcgggggagggaaccgggggagactcgggagcgagcctccgcggcacgtg

SEQ ID NO: 228108 - DNA, 122 bp, Homo sapiens
taaggtctctgggcagcaggcatggattgggttccagcattgccttcctctccttggccacgctctatcgctcacttgtttctcctaaaagttgtgcctaataacaactggccggaaacact

SEQ ID NO: 228109 - DNA, 122 bp, Homo sapiens
cgcaagactccgaggagtgcttgtcaccaggccaccgcagtgcttctgagagcgggaatccgcgaactggagtcccgtcttccttctggcgtcctgtcttccttttggagctccccctcaag

SEQ ID NO: 228110 - DNA, 122 bp, Homo sapiens
aataacttccactgtctttcctaatgtcttaattcggtcctcagttaaactggcggttggcgccagttttttccagggaaggattctgggagacggaggaggagacgccagcatttcgcccc

SEQ ID NO: 228111 - DNA, 122 bp, Homo sapiens
gcggggaggcagcggctgggccagctccggggacgcccgcgcgctcgcttgctcgcgacgcggcggagccagccacagccacccggcttcgcgctcctccgatgtcctcatttactgcaatt

SEQ ID NO: 228112 - DNA, 122 bp, Homo sapiens
gcccggtgcactgtggacgatgagtcagggttaggggcgccaggacgtgggcgtgcaggacgccagagctgggtcagagctcgagccagcggcgcccggagagattcggagatgcaggcggc

SEQ ID NO: 228113 - DNA, 122 bp, Homo sapiens
tgtgcccgccctcgcagcctcgcgcatgcgcgtagctccctgggcgcttcgaagatccagcggcttgctgtgagtccgggaggcaaaattgtacccatttcaaagatgtgatgactaaagtc

SEQ ID NO: 228114 - DNA, 122 bp, Homo sapiens
gaatcacaggaaggaaacctccgtgggcagcaggagcaagtgcaatccctggagacgagtcgaaggggcccgaggccccgagaagggcaggatgcgatgctgggtgtgtgacctcagccatg

SEQ ID NO: 228115 - DNA, 122 bp, Homo sapiens
tccgcggtggggccgcgactcccggcccccgccccaaccgtgggagctctgcgcgcgacgcgtcccaggtggccccgctattgttttaccttgcagggtgtttatatctcgctgattggaaa

SEQ ID NO: 228116 - DNA, 122 bp, Homo sapiens
tgactgtctggtggttgcagatgtggacgaatgccggaaccggtccttctgcggtgcccacgccgtgtgccagaacctgcccggctccttccagtgcctctgtgaccaggttacgagggggc

SEQ ID NO: 228117 - DNA, 122 bp, Homo sapiens
ctttggcaattctaggttggcagtttgcatccagggggtcctggttgcctttcagcttcccgtttcactctcccccagactgtgttgaatgctggtcaaactccgttagttgagttttagct

SEQ ID NO: 228118 - DNA, 122 bp, Homo sapiens
cctgctcgcctggagccttatattccgcggcccaagggtaggagggataggacccgaccccgcccccttcgacatccagattctgcccctctaggacccggcacgaggctcccggaaagagg

SEQ ID NO: 228119 - DNA, 122 bp, Homo sapiens
cctctgctgcggggcatctgggagggttccagcacctccctgttccacacggtgctgttacgaacattccagcacgtggctcttggtggacatatgtgtgcctttctgttggctccataaca

SEQ ID NO: 228120 - DNA, 122 bp, Homo sapiens
cattgcttattataataattgtgacatttttatagccctacattgtctttctcaaagtaacggattcaggaggagtccttttctgagtagagtccacagaagaggtattctattggtaagca

SEQ ID NO: 228121 - DNA, 122 bp, Homo sapiens
cgacaccttggtaattcccaggacgccaatgttgggactggacgaggtggacccgttgcccgtgcccaatagccccgcgatgatgcagcaaatgccttcggtgaagatgcccctgtaaggaa

SEQ ID NO: 228122 - DNA, 122 bp, Homo sapiens
agacagcctgggaagacagggtggcttgcagaagacgcccaccatttgcacagagctagccgaggcagctggcctgaacatgtgtgcatgcgtgtgcgtgcatgtatgggtgtgtatgtgta

SEQ ID NO: 228123 - DNA, 122 bp, Homo sapiens
ataacttcccaaattatgcctccaggactggtctccttacagagatcccactgaggtttccgcattcctgctgaaagctccatttgaatgaaagctaaacacttcaaatatactttgtctct

SEQ ID NO: 228124 - DNA, 122 bp, Homo sapiens
tctataataatcatcagagcagccggcagcacttactgagctccgagggactgccaggcccgggtgccaagtgcataacacgcattatcccgcttaatagtcacagaagtcccgttgtgatc

SEQ ID NO: 228125 - DNA, 122 bp, Homo sapiens
cccacagcccagcccgtcttcctgttggaggcatgtgacccctggaggacaagcatgaaacgccatagggctcccccaggtgctggaattatggcaccttgcagcttcttctccacgagttt

SEQ ID NO: 228126 - DNA, 122 bp, Homo sapiens
gaggcaacatacatcctcctcagcttacgtgatcacaggattaagagattaaagagagagcgccaagatggccgaatacgaacagctccggtctacagctcccagcgtgagcgacgcagatg

SEQ ID NO: 228127 - DNA, 122 bp, Homo sapiens
tcctcagtatccttggggacagacagagattgctggttaggaaaggggctttaagaaggtcgataagttattctcgaagaagttataggcatcaagcctgggcatgcaccttccttcctttc

SEQ ID NO: 228128 - DNA, 122 bp, Homo sapiens
cgctgctgatctgggaccgctggctcttctccagctcccgctccatctcctcccggtgggcgttcttcatggcttcgatggctgagatggtggccgctgtctcctcggctaggagtcggtct

SEQ ID NO: 228129 - DNA, 122 bp, Homo sapiens
tgagcctcctccgtttccagggagcctctgaaagtggggtggggggagatgaggcatgcacgcgaggcaaagacaaacaggaaagtgtctctatcgggaccaacgtgtgcgaccctacctga

SEQ ID NO: 228130 - DNA, 122 bp, Homo sapiens
gactataattgccacgtcggtctgcgtgttaagtgctccaaagaggtggccactgccatccgcggggccattatcctggccaagctctccattgtccccgtgcgcagaggctactgggggaa

SEQ ID NO: 228131 - DNA, 122 bp, Homo sapiens
ctgatttgcacctagagggtccccggatcctggcgctgcgtgggtcagtgtctcgggagccggggaccggcactggccgtgctcggttgctgagtgtgcctcactaactatcattccgttct

SEQ ID NO: 228132 - DNA, 122 bp, Homo sapiens
gctgcgcagcctcgggcacgaacagccgcctagcgcaccctcatggcgcccggcgcccggcggcgccaccagcccagggtggacatctcccgcgcctcccaaacctctcctcccgcagctgc

SEQ ID NO: 228133 - DNA, 122 bp, Homo sapiens
cgtagcaacccgcacccctcccaccagcgcccggtctgcactcttggcccctccaggcagcgccgctcaaccttgcggacccagcctgggatcccttaccgtactcaccgagagcttgagga

SEQ ID NO: 228134 - DNA, 122 bp, Homo sapiens
agactttccctgggctctgtgggttttgacacctctctgcaacctggcggggggccacctcgcacctttggtcaacataaaagctcaggcctggaggtggccaacccagcctcccagagcct

SEQ ID NO: 228135 - DNA, 122 bp, Homo sapiens
cgctacgtcgccggcgggcagcagcagcgcctacaaactggaggcggcggcgcaggcgcacggcaaggccaagccgctgagccgctctctcaaagagttcccgcgtgcgccgccagccgacg

SEQ ID NO: 228136 - DNA, 122 bp, Homo sapiens
tgtcacgccgctcgcggcctcgcccaatcgcgggccgccagaccagcgcgcggcgccccccgccccgcaccgaggtgggagccccgcccctagccccgccctctgcagactcttgcacgagc

SEQ ID NO: 228137 - DNA, 122 bp, Homo sapiens
cttctaccatgaataaaagcaaccctgaggcctcccccgaagccgagcaaatgctggtgccgtgcttgtacagcctgcagaacggtgagccaattgaacctgttttctttataaagtaccca

SEQ ID NO: 228138 - DNA, 122 bp, Homo sapiens
gcaagtggagacactcactccactcccatctggacacttcaaagtcactgctgcaccattcgagcaactggaaatggctgaatgtcactggtcatctcacagcagacattctatgcgtccct

SEQ ID NO: 228139 - DNA, 122 bp, Homo sapiens
ccaggtaatcaggaaaccctcacacaattcagtggcaaggtaggatgtttattgatttttcgcacttgatgttttcccaaaaacttacaaccctggaaagtgggaagctccttgttttgtca

SEQ ID NO: 228140 - DNA, 122 bp, Homo sapiens
acacgcaccacctggggctgcccgtccctgtccttgtactgcacggtgaaggagtcgaagcggccctgggggacggtccaggagaggctcagcgagtcaggggaggatcctgtcactgtcaa

SEQ ID NO: 228141 - DNA, 122 bp, Homo sapiens
aaaacaaacaagcaagcagacacacacagtgaacacatttgattaattgtgttgtttcaacgtttagggtgaagtgccttggcacgggatttctcagcttcggtggaagatacgaaaagggt

SEQ ID NO: 228142 - DNA, 122 bp, Homo sapiens
gggccacttccgcatcgtgcgcggcgtcaatgagtgcgacatcgagagcttcgtgctgggcgtctggggccgcgtgggcatggaggacatgggtcatcactgaggctgcgggcaccacgcgg

SEQ ID NO: 228143 - DNA, 122 bp, Homo sapiens
ctcccctccccccattgcaggggcggcttatcccgatctacccctcaccacgctgtcagccgggattttcaaccaaactgagctctcggctggggatgaggggcagccacgcccagggccac

SEQ ID NO: 228144 - DNA, 122 bp, Homo sapiens
caggctctggccaccttggcctctctctgtccttggtgcatgttgctttctctcctgccccggggcctttgcactagctatgccccttcaggtcccagctgaaatgtcacctcctcagagag

SEQ ID NO: 228145 - DNA, 122 bp, Homo sapiens
ggtgactgaaaggaaagggtgagtcaaaaggccttcttcccggaggactgccccgtccaacgctatgaaaaggaggaatgcggctgagctcatcccagccccacgacaggaatgtctcccta

SEQ ID NO: 228146 - DNA, 122 bp, Homo sapiens
tgaggctgggatgtccctgcccctccgttccctccagagtctcagctctgaacatcttcccgcacctctgaggagccaggcctggaaaccctctaaaatagatttttctgcctcaagacaga

SEQ ID NO: 228147 - DNA, 122 bp, Homo sapiens
agatgtcctgcggggtccgtttccctttctctagaaacgtggtggagttcagggtgataacgatgggcttctttactgatgccaaaccgtataaagcattggcctattttgtcaccgtggag

SEQ ID NO: 228148 - DNA, 122 bp, Homo sapiens
aaacacacattaagacttttgaaggctccatttctgaattcaagagagatgaaacaaattcgcccaaaagatagaaatctttgcctcggaaattatcggagaatattaacggagagggaggg

SEQ ID NO: 228149 - DNA, 122 bp, Homo sapiens
cctctgcatagccacagtacacataattctagcttccaatagggataagagtgatgtggccgctcctatcaggaagctgtcagttcctggacgctcctgtgggggatcttggggaaggaagc

SEQ ID NO: 228150 - DNA, 122 bp, Homo sapiens
agcaaataattacaacttgtgataaatatcatgaattcaatcacagggagtaacattgggcgggtatattagtttcctgtggctgctgtaacattacctcaaaaggagtagcttaaaacaac

SEQ ID NO: 228151 - DNA, 122 bp, Homo sapiens
gtatttcatatgttttgttgagttgcctcctctttgtctcactggactgacacacttgaacgtaacttcttttctggtcagggatctcctagggagtggctatcatggtaggaataaactgg

SEQ ID NO: 228152 - DNA, 122 bp, Homo sapiens
attcttcttatcgttattttatacatatatgattttttttggagggagggtgttggttgccggctgaagagcacttatttaaaatactaaaaaaagaacatttttgggcgatctccagggtt

SEQ ID NO: 228153 - DNA, 122 bp, Homo sapiens
cacagtaagtaaacacaattttaatttacaaaatatgattttgctgttgcagttttgatacgtatttccagtgtgtagatccgttcatcgcacacatctttgggttgaacaagctccacccg

SEQ ID NO: 228154 - DNA, 122 bp, Homo sapiens
actcccacgccggaaaggagggcgcctctgcggaagggccccgagtggcgacagcggatccgggactcccaagcaagcaggagccggagcagcctcttagcaacccctgtcccgggaaggtt

SEQ ID NO: 228155 - DNA, 122 bp, Homo sapiens
ctcgggtgggaggcagttgttctgaaccagggaggctgcgccctgcggggcaggtgcacgcggaccaccccacgccttcagccgaattgacttccacagaagggggcagggctcggggatgg

SEQ ID NO: 228156 - DNA, 122 bp, Homo sapiens
catcagttttctaacctgtaaggaagtcttggctgggagttgaaaccccaggctagaaggcgacccttagactttttaggtctgatggcgggcctatgctggtgtgggaataacaccgccgg

SEQ ID NO: 228157 - DNA, 122 bp, Homo sapiens
caggggcgtacacccacaaagtgtagctctccacgtaatgcagtgcgaagccccaagaagcgctgcatttcgtcatctcggccccctgccccaatgcctagtgggctgtcaaactgcgctgt

SEQ ID NO: 228158 - DNA, 122 bp, Homo sapiens
tagctaaaagcggaaaacagaggctcggaaccgctgcgtggttcttgctcttcactcggccgttttaaagggtgactctttcctgtcccggcctgcgtggtgtgggcttgtgggtctttgag

SEQ ID NO: 228159 - DNA, 122 bp, Homo sapiens
tccatggcagaaatctacttgccaggtaggcataggaaaagcggaaattaggagatcttacggaggatgtggagttcatggtgagtttcatttcatgtttcttgccacaagtgttaccatgg

SEQ ID NO: 228160 - DNA, 122 bp, Homo sapiens
gaacggcagtgcccgtgagcacctggagaacggcagtgccctttagtacgtggagaacggcggtgccctttagtacatggagaacagcagtgcccgtgagcacctggagaacggcagtgccc

SEQ ID NO: 228161 - DNA, 122 bp, Homo sapiens
acaccagggtgtgccctggccagaaattttcagttgccccaagactttcccagcctcatgcgatggtgaagttctccatgaaaggaaactggtatgaagagattcttgagattaaagaacag

SEQ ID NO: 228162 - DNA, 122 bp, Homo sapiens
ggatgcagcggcggggaccttggccggtggaggatgtggaggtggaagtggagcggatggcgctccccaagagctccgccacgcgaggtttcgggctcgtggttttgcttcctccgggtccc

SEQ ID NO: 228163 - DNA, 122 bp, Homo sapiens
acccgaagccggagccaattggctccctctggaaaaatctgtgggcagggtaaaggtgagcgggcgcaggcgtagtgaaattctcagagccctttaggccccgcccattccctccgagtcgg

SEQ ID NO: 228164 - DNA, 122 bp, Homo sapiens
ctcagaatgagacatacagacgtgtctcagaatgagacatacagacgtggtatgagtccacggtgtaagagtccatacagacgtggtctcagaatgagatcccagatgactgcaaataaact

SEQ ID NO: 228165 - DNA, 122 bp, Homo sapiens
gcgctggcgtctgcacaggtgtgtgcgtgctgtgccatcacgctggtcaggcctgtacgccgtggagaggggcgctgtgtggggctcgctgcctgagccctgggtggaccgtggctgcccca

SEQ ID NO: 228166 - DNA, 122 bp, Homo sapiens
gaagcctttagcaatcgctaacaatcctatttaccctgtgtaccagacaaacactgttaccgtcgccatctcactatttttatctaatattgaaatttctcttcctaagagcagccctgaat

SEQ ID NO: 228167 - DNA, 122 bp, Homo sapiens
aaaaaatcccctatggcagagatccgagtacacatgcagcagtttccaccggtggggccccgaggaaggggaggatgatgggagaagacaagcaactacaagcccccgcacgcagtgcgcag

SEQ ID NO: 228168 - DNA, 122 bp, Homo sapiens
gaaaggcagaattcaggacctgaagggcggtaggttggcagaaacttgtgtaccaagtgtcgtgtcacccctatccccaacagacacacagccctgtaccatccctcccatctcagaaggag

SEQ ID NO: 228169 - DNA, 122 bp, Homo sapiens
gaagagtagtggttctcaaagtgtggtttccctaccagcagtcttagcctcacctgcgaccgtattagaaatgcaaattcctgaggcccgtcagagacctgctgaatcagaaactctgacgt

SEQ ID NO: 228170 - DNA, 122 bp, Homo sapiens
ctcagccctgacgtgcccagggtggtcggggcccccgctgctgcccggccggctgctggccgggctcctgctgcacctcctgctgcccgccgcagccttcctgctggtgctcctgcccgcgg

SEQ ID NO: 228171 - DNA, 122 bp, Homo sapiens
caagaatgtgcactataacaagtcaccaggtgatgcgaatcccagggggttccaggaccacgctttgagaaccactagtctatcctgatgtttgcactgtttaacatagaagttcaaaaccc

SEQ ID NO: 228172 - DNA, 122 bp, Homo sapiens
ttcccttttaagtaataacatgcaggaagcatctcaccccgctgtcagtcagcctgcaatcgctctgacgccacacgcttcagtgcgttgagttaggagccctcacccatcccctttattag

SEQ ID NO: 228173 - DNA, 122 bp, Homo sapiens
gcccccaaatagctattgtttcaaatggttccccataatccccaaagctgctgactgctccggattccattagccttgaattgtgtacagatttctctcattggtccaattattttgccatg

SEQ ID NO: 228174 - DNA, 122 bp, Homo sapiens
gtctgtgacgcagttgtctaatttctggctatcaggtgtgggggttggtgccatggaacccgcttccttagagggatggccgggccctaggccgcgccccacgcccggggggcgcgacttct

SEQ ID NO: 228175 - DNA, 122 bp, Homo sapiens
gtatacctgcttgcttggtggtggaaaatgggcatctttatcttggtttccacgagcagacgctgaagccatgatgactttgtgcttgctctccttccagttgtttatcctctgcttactcc

SEQ ID NO: 228176 - DNA, 122 bp, Homo sapiens
cctctggcagcccgtgagaagtaccggaagcgagggcggggccgcgggatggcgagggagcggcagggactgaactctctccaaacccaccctgacagggaaatgggccccgcctgtgtctt

SEQ ID NO: 228177 - DNA, 122 bp, Homo sapiens
ccagactggtctcctactcctgacctcacgtgatccgcctgccttggcctcccaaagtgccggggttacgggcgtgagccacctctcccggccactattgtacatttttaaataacgaaaag

SEQ ID NO: 228178 - DNA, 122 bp, Homo sapiens
ggcccttgcaatacccggaatattaaaatcagtaatagcaattgtacattttgtctcatccgaagaattgaagaccttacctacctgacctcgcttgattgctaacttcctcatgacctgtc

SEQ ID NO: 228179 - DNA, 122 bp, Homo sapiens
ttccgtcttaaaggggccgcggcggccgggggaggaggaggtgggacgccccgcggcctacgctcctggcctccccgccttggcctggccgtttaaccgattctttcgcccgcaggtcacaa

SEQ ID NO: 228180 - DNA, 122 bp, Homo sapiens
atccgcaagagccagaagtatgatgtggtctgcgagggcacgatggccatgctggtcatccgcggggcctcgctcaaggacgcgggcgagtacacgtgtgaggtggaggcttccaagagcac

SEQ ID NO: 228181 - DNA, 122 bp, Homo sapiens
catttgggctggagcaggaacagtgggtagggagggtttcagtaggcagcaatcaaagagcggtctaccaggtggtgagaacagtctgagcaaaggcccagaggacagaaagcacgttgggc

SEQ ID NO: 228182 - DNA, 122 bp, Homo sapiens
gcactttccgtagaccttaaaatctcagaggtagggctgccaccaaggtgaagatgggaacgcagatgatccatgagtttgccctggtttcactggcccaagtggtttgtgctaaccacgtc

SEQ ID NO: 228183 - DNA, 122 bp, Homo sapiens
tctcaaaacaaactcttgttttgagtctctctctgctgcccagtctggagtgaagtggtgcgatcttggctcactgcaacctccacctcctggattcaagcgattcccctgcctcagcctcc

SEQ ID NO: 228184 - DNA, 122 bp, Homo sapiens
gacagcccggagattagtctccaaggccacaacgccagttgccataggcacgcaggcccgcgtcaggactgcgatttctcatcctggtcacgcaggcaggcggccgcccctgcccgcctgcc

SEQ ID NO: 228185 - DNA, 122 bp, Homo sapiens
gccgccggcaggggtggggcggggccggcgggacggggcagagggccctgcggcggcggacgcggcgggctcggccacaggtaacccgcaggagccgagagcgctgcctggcgcgcgggcgg

SEQ ID NO: 228186 - DNA, 122 bp, Homo sapiens
gagaggctatacataatgcctgtgaacaaacaaaagtcaccttggttattgactcattgccgcatgcatagctttttaatacaatgtgtatttggatgtattttaaatttattcacttgatc

SEQ ID NO: 228187 - DNA, 122 bp, Homo sapiens
gaccctcttccaaggaggcattcacatctctgcttgatgaaaccctacattatcttaaagcgtccactcgaatgccacctacttatataccatctcctgcaataccaatgggctcagcccaa

SEQ ID NO: 228188 - DNA, 122 bp, Homo sapiens
tatgtgatatgacacatatggaagggctctgtaagtggacaagtgctaagcacttgtgagcggcagttatctctgggcatatgtgcagattggggttagtgctcattagggatatgtccatt

SEQ ID NO: 228189 - DNA, 122 bp, Homo sapiens
agggatgtatgcaggcagccttctggcacagacgaaggaggttcaagtcctctccatggacgtgagctccaaagcggaagtcacaggtccaccataggaccactgttgaggttaggcatggc

SEQ ID NO: 228190 - DNA, 122 bp, Homo sapiens
tagtcaacgctgagttcttctgtaatttttcatgtagttcaatgattgctctcaattggtcgttgtcaacttcccatggcccatatcacgttcctcatcttcaaggctctcttccttgcaaa

SEQ ID NO: 228191 - DNA, 122 bp, Homo sapiens
agcgccccgattccgggccgcggctcccggcgccctcgctgccccgtcccgtcccgcgcccgtcgggccgccctcgccgcctcacccggcctcgcctctcagagcctctcccctccccgccg

SEQ ID NO: 228192 - DNA, 122 bp, Homo sapiens
ctgggaggcgatgagcgactgagcacaaagcctgttgttgacctaatggcagagccagatcgggttaaatcaatggcaaaagcgccatgggggaagttagacgtgaaggtcttcgacctcct

SEQ ID NO: 228193 - DNA, 122 bp, Homo sapiens
aatcccttcccagccagacataatacagccaaagaaaaggtcactcagttattagtgagccggcggagcccaggcagcgcttgtcaagaccacagagaagcagctcccttccgatttaagac

SEQ ID NO: 228194 - DNA, 122 bp, Homo sapiens
tggagatgtgtttatatcatagtgaaaagacagtttaagaggagcaaagaagaggaaagacgaagtttggattgatccaacaacctgttacatgtagtcagtacttttcccataggggactt

SEQ ID NO: 228195 - DNA, 122 bp, Homo sapiens
gaatttccctccgagttggataaataagcagcagagtccaacgtcaacgaaacaggagctcgctgggccgcacaaaagcggctttcagcagcggcggcgcctccgggcctgtcccgtggccg

SEQ ID NO: 228196 - DNA, 122 bp, Homo sapiens
ggcggcggcggcggctgcggtggccaagcaggcagatactgcctgacccgttcccgggagcgtgtctgggtttgggggcgggagacaggctgagccgcctgggcggcctggcctgtacgggg

SEQ ID NO: 228197 - DNA, 122 bp, Homo sapiens
ccagggcaggcggcgggtaggctcaccatgacttcggcgaagatgtccccggcgtactcgcgttctccctgcagccccagcgcgctcagcgcctcctccagccccggcggcctcgccaggcg

SEQ ID NO: 228198 - DNA, 122 bp, Homo sapiens
cttcttgtggccaacttcagagcctgtcaccaggaaaggtgagcctgagcctgggagtggcgggggctgggggtgctctgagaaccagaaagaacatgattcctagagtgtttactgcctga

SEQ ID NO: 228199 - DNA, 122 bp, Homo sapiens
ataattccttccaaacatcaagccttgggattcttggagcaagcagaaagccagtaacttcgctctgttagaggtggaggattttcctatggttccccccatttcctgatttgtatttttag

SEQ ID NO: 228200 - DNA, 122 bp, Homo sapiens
cagaagcccggcgcggcgaccgcccccccagcccctagggccggccaccggcagatccaacggtggcccctttaaggccggcgccggttgggttattgtaccccgcccttccaggagacggg

SEQ ID NO: 228201 - DNA, 122 bp, Homo sapiens
cggccacaaggcagggaggcatgacagtcggactttcccagggcgtcagaagagcaaacccgttaacacaggcagggaccccagcgtccagccccgagtctcgacagtctgccccggtgctg

SEQ ID NO: 228202 - DNA, 122 bp, Homo sapiens
cccaggctggagtgcagtggcgatcgaagttcactgcagcccggaccttctgggctccagcgattctcccacctcagcctcccaagtagctagaattgcaggtgcgtgccaccatacccagc

SEQ ID NO: 228203 - DNA, 122 bp, Homo sapiens
ctaagacaggaccacctcgttgaagctcgcgtgctgcagacgaggacacgcgcgcagacccggcatggctgcctctgacgtctcactcaggcttgtcatacttctgggcctcatgttcttgg

SEQ ID NO: 228204 - DNA, 122 bp, Homo sapiens
tcccaaatcctgggctcgagcgatcctcccgccttcccgagaagctgggactacaggcagcgcgcctggcttgttcatgtaatttgaaaatagttcaaatagaatgtttaaatgattgtgtt

SEQ ID NO: 228205 - DNA, 122 bp, Homo sapiens
atcagggaaagggaaaaggggagagggggcatggcttcactaatggaaatactccatagacgcaaatttcaccccccagaagacagttgtgcaagggcaaagctgcagccattcgaaattgc

SEQ ID NO: 228206 - DNA, 122 bp, Homo sapiens
aatctgtgaagttagccgagagaaaggacgagagagagagagagagagggagagagagaccgagagagaccgagacccaagttcaggcaagcctttattcaacctgccggctgctccattac

SEQ ID NO: 228207 - DNA, 122 bp, Homo sapiens
gccgaagcggggtcggctgcgcaagaggcggcaactttggcttatactgactcagcccagcgccccctttttatcccacataaaaatggagaaatggcctccgggaggaagatgtgaagcgg

SEQ ID NO: 228208 - DNA, 122 bp, Homo sapiens
tcaccccatacaccgatccccccacgcatggccctctttgtccccagcctttggcacgcccgacctcattctctgctctggagtagggcaggtcaggaaagcgaaatacagcgccggcaaac

SEQ ID NO: 228209 - DNA, 122 bp, Homo sapiens
ctttttcttgttctttctcttcctcgcctgcagcatcttgggcctcttcatcccacttttcgggctgagatttagtgacttctttagggaagaataatacacgcatggggaccagacattca

SEQ ID NO: 228210 - DNA, 122 bp, Homo sapiens
gcaggaacacaactgtacccactcatttatgttttgtctacagcagagttgagtagttaacggcagagactatgtcatctgcaatgcctaaactatttactatgaggtcctttacagaaatg

SEQ ID NO: 228211 - DNA, 122 bp, Homo sapiens
ggcactgtaaccagagaagctggctcagggacaagaccaagtgtctggacagtgatctggcgctctgagggggtgccctcgtccaccctgggagacccggtaggcagggggccgtcctcaca

SEQ ID NO: 228212 - DNA, 122 bp, Homo sapiens
gcctccacctccctccgggctcctggcccctgcgcttacgctaagcgtgtccgccccgcccgctctagctctgagagccactcgcccagtgcttccagcaccagcagaggggagtggcagga

SEQ ID NO: 228213 - DNA, 122 bp, Homo sapiens
tttttctttctttgtccctcctcttcctttttaataaaatgcatcagagcggagtgcagacgccacctccgatgtccttataaaacgtgtgcgcgggtgctgcgcatgcgtgtgtcgctggg

SEQ ID NO: 228214 - DNA, 122 bp, Homo sapiens
cgacctcccaggctcaagtgattctcccaccttggcctccaaaagtgttaggattacaggcgtgaaccactgcacccaaccttgtgaatcttctttagtggggtatgtgttcaagtcttttg

SEQ ID NO: 228215 - DNA, 122 bp, Homo sapiens
cggaggagttgagcagagaaagggcaggaatgtgggggctggaaagggtgaggaggcagccgatggagcaggggtgcatcggagttcatgggtacttcccaggagctcatttaaggcaggtg

SEQ ID NO: 228216 - DNA, 122 bp, Homo sapiens
cacaggaggctgcagtctccgggagcctctggggctctcccgggccaacagcaggtttggcgggtagggctccccgaagccccagccctcccggacctgccgtagagagctgggtgccgggg

SEQ ID NO: 228217 - DNA, 122 bp, Homo sapiens
ggtcaactttcagccacccctgcacacttgcaccccagccgagctccttccccatgctcccgcgtctcccactgtggtagactgcctttgcttgttccttggtgctgggctcctcaggaagt

SEQ ID NO: 228218 - DNA, 122 bp, Homo sapiens
cccagcccacacctcctcctgccttgctgtcacagcagtgacatttatttacccaaatgacgcttgctggccttgagtgccaaggagacagcagctgcttccgagtcagaggcccaaaacgg

SEQ ID NO: 228219 - DNA, 122 bp, Homo sapiens
cccgcccagcctgcaggcgcagcgcaaggagaagtcccggaacgcggcgcgctcgcggcgcgggaaggagaacctggagttcttcgagctggccaagcttctcccgctgcccggcgccatct

SEQ ID NO: 228220 - DNA, 122 bp, Homo sapiens
tgagccaccgtgcccggcccaggggatgagtttttaaatattagcttatgactttctggacgaaggcatcaaaaaagccagattgtctcttttagtctgtcattagagtaataaatctttta

SEQ ID NO: 228221 - DNA, 122 bp, Homo sapiens
ctgggtgacatgatgcaaaagggtaccctgaaaaccatctacagcgcccccaggtggaagcgcagacctgccgcaaggaatcatgaggagggcaggacctggctaagaattcctgctcttgg

SEQ ID NO: 228222 - DNA, 122 bp, Homo sapiens
catcagggatacagcagtgaataaagcaaatatgtgcatacaggtgtctcatagacaactcgcttgtgagtcagctcatttgtgagttgattcttttgaccccaggcaatgtaatgcaaaat

SEQ ID NO: 228223 - DNA, 122 bp, Homo sapiens
cctttctcgcaaacagcggtgccctctacgtgggggatcctggaggctgctgagcacgagcgccctccgcgacccgcccctgctcccgcctccactcttgcctcggggggagggtctcagtc

SEQ ID NO: 228224 - DNA, 122 bp, Homo sapiens
ccagggcgcgcccccgcacggctccccagcgctgctgctgctgaccacgctgctgggaaccgccagccccctggtgttctaggtgtcacctccagccacaccggacgggcctgtgccgtggg

SEQ ID NO: 228225 - DNA, 122 bp, Homo sapiens
ctggaagaggcgggactcgagttcagggggaacgcccacgtcccgggaggggacaggggccggagacaggggcgaagacaccttcgaaacgccgccccactgggccttccagggaggtagaa

SEQ ID NO: 228226 - DNA, 122 bp, Homo sapiens
tacccatagggcttgtgcctgctgaatagcctgtttggctgccaggaaggtggtttcagccgcatcatcccaattccaggcaagaggctgcgttgctgcttctaaatctgcaagagaatcag

SEQ ID NO: 228227 - DNA, 122 bp, Homo sapiens
ccagacggctgctcgagactcacaaggactccaggcgcttgagctgctgcagctgctgggcgtcgtgccgccgccgcttctgctcccgggcccgctgcagttcctgatccagcggctcccgc

SEQ ID NO: 228228 - DNA, 122 bp, Homo sapiens
gatgtcagtgttggaggggcctttagtggcccttggctgacctcttcacagggagaatgacgaaagctgagaagtgacatacctagttttaaaggaaacagaccaggctagggttcatgagg

SEQ ID NO: 228229 - DNA, 122 bp, Homo sapiens
tcccaagtgagcggggcggctgtcctcgaggactccgggctcacagccaacctgctggcacggctcgaggactccgggctcacagccaacctgctggcacggccgccctttcccgccctgcc

SEQ ID NO: 228230 - DNA, 122 bp, Homo sapiens
cccagcagtctctgactaggatccggctctgcctaggcgggaagcagaaggttcgggtcccggcgaccccgggcctgcgcctctggataccgctgggctgacatggcggtggctgaacaggg

SEQ ID NO: 228231 - DNA, 122 bp, Homo sapiens
tgtagtgcggccgtcattctcaagcctgacagcaggtgtcactgtagctaacaggagtcacggcccaggtctcagcaatgcagaggggcaaaataaaaatgcaaagaatagaacccttaatt

SEQ ID NO: 228232 - DNA, 122 bp, Homo sapiens
cgcaagggcgggagcgcaggggaggggcctgagaggcccaggggcggggccccgagggggcgggagggcggcagagtgatgcacaatctcaccaatcagaagtcgcctttcgggaaggaggt

SEQ ID NO: 228233 - DNA, 122 bp, Homo sapiens
acgttcccctaaacccacaagtcccggagaccctggggcattctgcgatttcggagtgaccggtggagcccccgcccgcgcgcctggctcccggggtctccccacacagcaggggctgcggg

SEQ ID NO: 228234 - DNA, 122 bp, Homo sapiens
agagttgaggaagtggtcgttgaaagtgggcgtgcgattcccgcagtaagagcgctcaggcggaggagaaagggctgagccccgccttggaagctgcggcggaggaagaggaactgcggggc

SEQ ID NO: 228235 - DNA, 122 bp, Homo sapiens
ccagccacctgcgcctcccaatgctcactgaatgcaccaggaaggtgcctgcctcaaggccgctgcaccagctgtgcctctgcttggaacgctcttcccccaacatcctcagagctccctcc

SEQ ID NO: 228236 - DNA, 122 bp, Homo sapiens
atcaaaatttaaaacaatcttcacaaaatgcaaaatagcggctaccctaaaatgtcctgtcggtacaacgcttcccctgcgagagtgaattaactcccctcctcccacctcctccagagcta

SEQ ID NO: 228237 - DNA, 122 bp, Homo sapiens
cagggctcctagcccttctgtctctgctcctggtgcgtaagggcggtgtgtggggctctgcgcctgaaaccgctctctcggaaggtgggaagatgcccacgtatccattcctctccgcgtac

SEQ ID NO: 228238 - DNA, 122 bp, Homo sapiens
cggtagccggcagccgcaggaggaaagctctggggcctccctggccctcccccactgacccgcttcttgtagtagatgcgccacttgtggtattcccgcatcaccacctcgatgcgccgctt

SEQ ID NO: 228239 - DNA, 122 bp, Homo sapiens
ttaagttgccggagagaattacttaaccctgacccgtgtattaggggcctgtattaatgccgcgacaggcgcctcttacggcagagaacaatttattaatgctgaaacaggctgcttttctc

SEQ ID NO: 228240 - DNA, 122 bp, Homo sapiens
tttcaccccgaaacttggctcccacagccccaggccgaactgtgtctggttctcagcccccgagcccgagttctacgccgcaaagagatggggccccattgtgcctagctggcctcctagca

SEQ ID NO: 228241 - DNA, 122 bp, Homo sapiens
ggtgcagaggtggtgctgaagggacagcacttttcactcagcagagagccccgagctcgccgccacactcccgctcaggaccgggagggggccgtttggaagattcccccgcgcgggatggt

SEQ ID NO: 228242 - DNA, 122 bp, Homo sapiens
tctggggcttctcgctgttgaggtgcagttggcacatgcgccccagctccttaaaggcctcgttgatgtcacggacccgcagccgctcccgggcgttattggccacccggcgctccttctcc

SEQ ID NO: 228243 - DNA, 122 bp, Homo sapiens
tcgcggcgccccctggcggtctgttcccgtcaacatttagattaagcgcagagccggttccgccagggaagtgcgcgtcccggtgcccccgcgtgatgagagcggatgacagattgcgggaa

SEQ ID NO: 228244 - DNA, 122 bp, Homo sapiens
aatcctcagattagcacatggcagtcctttaaaactggaattacaatttctccaagcacacggacatacctggtatggaaaaaggataattatctttacagaaaagctactaggatgatttg

SEQ ID NO: 228245 - DNA, 122 bp, Homo sapiens
tccccgccaacggcgctagccgcgatgccccgcctcactccccgcccccgggatgcagggcgcgtgctggtaatccgcggctcaagccccgcccccactgtccccattctccgctcacctct

SEQ ID NO: 228246 - DNA, 122 bp, Homo sapiens
tgtaccccagcctgggcgacaagacagagacttctctgggctgccagaggctccggaagccgggtgcctcaggccgtggcagttccgtcactctccaacgcctcccccacagacttcttttt

SEQ ID NO: 228247 - DNA, 122 bp, Homo sapiens
ggaaggcaggccgccggccccccagacttgtctcctagggcaccgtcccgcgggtgcccccgtggccgcccagttccggcgtccccccagcccagctctcagtggccatgcagaaagcccgg

SEQ ID NO: 228248 - DNA, 122 bp, Homo sapiens
tcggactaggtgatgggggtcctgccgcccctccggagttggagagggcggggggaggaccgctgagcctgccagctgcacctgtcttggtcctccgccctgttttagagccaggctctgtt

SEQ ID NO: 228249 - DNA, 122 bp, Homo sapiens
ggtgggggggccaaggaatgcggctccgtgtacgggagctggcgcgggggagagagacgccgactccccccaccgaccctctcgccccgcggagggatacggctcgtcacttccgccctccc

SEQ ID NO: 228250 - DNA, 122 bp, Homo sapiens
ctcctccacttgataactctgcaacctcattcattgactcatacatttattcaacaaaggcgtattcggtttgacaccaaggtactgtgctgggcattagttacagagaaatgctagatatg

SEQ ID NO: 228251 - DNA, 122 bp, Homo sapiens
tgaaaacaatgacaaaatattcaatgaggaaaaatgtttatccccatattgtggccagaacgttaagaaacttttacaggacgaagtctgcctggaagggtttgcttgggaaagtggtagtt

SEQ ID NO: 228252 - DNA, 122 bp, Homo sapiens
actaggaattgcttaggtgcacggtggcatttagcactagagaccactaacttttgacctcgaagagcacttaagatactaaattcattaaaaatttagtaataacactacaaatattctgt

SEQ ID NO: 228253 - DNA, 122 bp, Homo sapiens
aaaggactgcaaacaacacaaatgtcattaatttagggactggttgagtaagtgatgctacgtccacagtggagcactatgcagctgcaaaaggaaagaataagacctgtatatactcctgt

SEQ ID NO: 228254 - DNA, 122 bp, Homo sapiens
tcaaaaccttggtctctgaatccgcagtgatgggtctctagagcgaatacatggcagggccgccttcctccgtacagaaagggagaattgtgcttgtgtgttttaccaagcaggacagatgg

SEQ ID NO: 228255 - DNA, 122 bp, Homo sapiens
agaaactttaatcgtcacatcctttctgctcatttgcaggattcctatcatctgtctccacgtgataacactgaagagccttcacgttgatgcagtcccagggcctcaagtgcagagtctga

SEQ ID NO: 228256 - DNA, 122 bp, Homo sapiens
cggtgcctcactctgcagaccccagtcctccgggctaagcaggttgtcggtgaagaaacgcgtcgggtcagcaatctcgctgagcagcatcagctccgccatctttcccccccaccccccaa

SEQ ID NO: 228257 - DNA, 122 bp, Homo sapiens
aatttcactagaccttcctcaaagctacgcgaagcagctcagcaaggaaggcagtttgagcgagttacttccccagagagagaaggacaaacagcctcctcccccatgttgctgcaggtttt

SEQ ID NO: 228258 - DNA, 122 bp, Homo sapiens
cattagctgagtcaggcttcattatgttcttctcatacagacttggcagcggctgacgtgcgtgcgcagctcccctgccttcaaggtggacggcgtaggcttcctaaaacacgacacagaga

SEQ ID NO: 228259 - DNA, 122 bp, Homo sapiens
gcagagccccccgccctgtgaggttatctttcggataaaaaatgaggcagccgtctgcagcgcttagccccacgcgggcccacactgattgtgcagtcacgagactaggtgaaaagagtaat

SEQ ID NO: 228260 - DNA, 122 bp, Homo sapiens
taatcaaacttaaaaggcaacggtaaactgaggaagacatttgtactgtgtatgacaagacgcctagcagggcatggtgggctttggcaggtctggtctacacctgctcttctccaccggct

SEQ ID NO: 228261 - DNA, 122 bp, Homo sapiens
tttgaccatgttgttgtcactgttgtactgaaggaaaagatttttattcaagaagacctgcgcttcacaccagggctgtccaggtctggacaatgattttatagtgaagttgaagcaaagag

SEQ ID NO: 228262 - DNA, 122 bp, Homo sapiens
ctttgtcagtctctctttaaaaatgggcaggtgaatgagttcagcctagaagcagcagctcggtaagggaaatgaaaatatcagaagttatctaatcacagccatagccatgctgagcttca

SEQ ID NO: 228263 - DNA, 122 bp, Homo sapiens
gaccccagcctctggagtcggcctcggttcagattctggttctacccttctcctctgtggcgaaccaaccctccgagctctagtttactcgtgtgaaatggactagccaaaattgggatttt

SEQ ID NO: 228264 - DNA, 122 bp, Homo sapiens
ttgcgtcttaggcattagctggatcaaagcgcctccactcagccttccatgaagtggaaccgactgatgcccttccgaaggcaggttggtggctcaagggtactcaggacgtcttctctgaa

SEQ ID NO: 228265 - DNA, 122 bp, Homo sapiens
gtcagatggctggcgttggtgactcacttcctcccccttttggtagtttagctagacacccgtctgagtcagcttaaccaaagaacaaacaagcagatacagtgcctgagttctggggctcc

SEQ ID NO: 228266 - DNA, 122 bp, Homo sapiens
tgtgataacatatccacattaaacccataaactacattacacccataaacaggaaggacccggggtctacgccacgtcagacctgcccgcgcgtgatcgcaggccgagaacaaccttctact

SEQ ID NO: 228267 - DNA, 122 bp, Homo sapiens
gtaaaataacttactagctttagtccttcatggatatatgtctctcctactggactaacacgttttaaatcctccaagcctttactgattttgcctctgaaaataatattaaacaaaagaaa

SEQ ID NO: 228268 - DNA, 122 bp, Homo sapiens
cagagggctgaaaatgcctcccttggatcatgctacaattgccattttctttttttaacacgggtcccaaggagaggcttcagctcagttgtaaatgcacgcttttctcctttcataaatat

SEQ ID NO: 228269 - DNA, 122 bp, Homo sapiens
gctgtcaccatgtccgacaactttaatcttccagaagtgatggcttaatggatgggactccggaagaacaaggagggctcgctcttctccagcacatttcactttctcctcctcctcccccc

SEQ ID NO: 228270 - DNA, 122 bp, Homo sapiens
ggggacgccgctccgcgcagcccgccgccttcgtccgcatactaatgagggggcgccggccggccgccagcccggtaccccgcgcccccacccgcccccagcgccgctctcgcgcccattca

SEQ ID NO: 228271 - DNA, 122 bp, Homo sapiens
gacataacttaggctccgtctcgagctcctccagcgccgccgccccgggcgcgcgccaaccgggaaggccactcgctgcaaaaaacgttcgaattacccgccctgcgggaaaggaagcggaa

SEQ ID NO: 228272 - DNA, 122 bp, Homo sapiens
caggtccttgttaatattttcctcatgaaactttgagcatttaggcaaaaccaacacaatcgctttttccctccagataaataattagatctctgaggctgcttattatcagaagcccctta

SEQ ID NO: 228273 - DNA, 122 bp, Homo sapiens
cgtgatctgcccgcctaagcctcccaaattgctgggattacaggcatgagccactgcacccggcccctcagtggctatttaagagggcaaatgactccacccggagagtttttttttttatt

SEQ ID NO: 228274 - DNA, 122 bp, Homo sapiens
ggaccagtcaaagtaatatgcctgcgaccggcacatggacttttatttcttctccctccacgctccagagctgctcctgcggcgtggagagataaatattttaaatagcgacactttggcga

SEQ ID NO: 228275 - DNA, 122 bp, Homo sapiens
ggtcaagacctcacacactcgaccattttcactccatcacggacatttggaagtgaccggcgtttcacactgcagctgtgcggtgcgaaaacccctcagggctgcgccggggctcggggcct

SEQ ID NO: 228276 - DNA, 122 bp, Homo sapiens
ccagcgagcgagcccgaccccaggcgtccatggagcgtcgcctccgcccggtccctgccccgacccccgcctgcggcgcgctcctgccttgaccaggacttgggactttgcgaaaggatcgc

SEQ ID NO: 228277 - DNA, 122 bp, Homo sapiens
gagccccgcccctcccgtccccagcggtctgcgcaggcgcattttccgaccgggcccgcgcgctcccagctctcgggttggctgctcggttgctgcctgctcagtgcatcctttttgccatt

SEQ ID NO: 228278 - DNA, 122 bp, Homo sapiens
gcccaaagcggctcccgcgaccggggccaaaaagtgcacactacatttcccacaagtcctcgcgccgctcccttagaaagtacacgctacatttcccacaagccctcgcgccgctccctgag

SEQ ID NO: 228279 - DNA, 122 bp, Homo sapiens
gaggcagagcggggcgagcaggggcagtggctctgcggggctcggggcctccgtcagcaccgcggacagcgcccgggctctcgccccgggccggcccgcgggccctcctgggccactcacca

SEQ ID NO: 228280 - DNA, 122 bp, Homo sapiens
tttttcatgcctaactgcatgtgggacataatgccacgaagcaggcagcgaagggatgaccgtcctcatgatctgaggttatctgatgtggaagctgaggttctgacgcatgaagggtcctg

SEQ ID NO: 228281 - DNA, 122 bp, Homo sapiens
caactggggttggaatttcaatgcaggtagttgctgagcgggggccaatgagttgaaagccggagcaaggggacttgttttgttcctgcaccccgattttacttacattacccggggcctcg

SEQ ID NO: 228282 - DNA, 122 bp, Homo sapiens
tgctgtccgggcggggtccctcgaaactgacgctcaggagatcgcggaaagtcatctcaacgcgcggccgtcggtggccgggccggggcacagaacgagcggccggcagggaggggagcaca

SEQ ID NO: 228283 - DNA, 122 bp, Homo sapiens
agttaacagacaccgactgtatacacagcggtctgccggcacactgcaaaaaagccgatacgccttacaggctcaggaagttgactaacccagggaaaagccccatgccctcctctatgaaa

SEQ ID NO: 228284 - DNA, 122 bp, Homo sapiens
taccatagcacatccttcaaattaaactgcttttggtttacttttagcaagaaatgcaagcggttgcatttttttctgtttgtttcaatctctaatctttaagtcagaacctaattgtacag

SEQ ID NO: 228285 - DNA, 122 bp, Homo sapiens
ccacatagcgtaagggcaggctcaggtgctgggcgcactctgatgccagggccttccactcgttccggggcactatggggctgcagcaggccgggtcttctgtctcctgagccgctccgagt

SEQ ID NO: 228286 - DNA, 122 bp, Homo sapiens
ctcgctctgcccacagggatggtgaaccgcgaggtgctggaccaggtggagcggggctaccggatgccctgcccgccggagtgtcccgagtccctgcacgacctcatgtgccagtgctggcg

SEQ ID NO: 228287 - DNA, 122 bp, Homo sapiens
cccctttgtgaggagagcagaccctgcatcatcagcaaccagtgctccctccagcctccgcgcatttcagctggcgctgcagctgctgcacagagacccacagaggccaccctcggaaccag

SEQ ID NO: 228288 - DNA, 122 bp, Homo sapiens
tgtcgccaagcccattaggctacctgaactgtctcagaaagtgcgggtggctgcgtcgaacggtggtggctcagaggaagagattggggccggcagcgacctaggtacctcactctgggtgg

SEQ ID NO: 228289 - DNA, 122 bp, Homo sapiens
ttcctcacagaaacacacagagaaacaagagctgctggcttccgggttctcctgggctggcgcggtacgtcccggaatcgcaggcgcgcatcccttcccgcctgagggcctgcctggccgtg

SEQ ID NO: 228290 - DNA, 122 bp, Homo sapiens
ctggccttgtccatctctcagactcggcaatgattggcttccgcggcgccaatctccacccgcagtctccgcctcccgcacctgtggtccgggcctcacggtttcagcgccgcgaggcctca

SEQ ID NO: 228291 - DNA, 122 bp, Homo sapiens
ctgacagagcacatgaagacccatgctggagccctgcatgcctgtccccactgtggccgtcggttccgagtccatgcctgttttctccgccaccgggacctatgcaagggccagggctgggc

SEQ ID NO: 228292 - DNA, 122 bp, Homo sapiens
gctcataggcgagctcgatctcctcatcatctggacaggtggaagcgaattcttcccgggcgtaggcattgctcaagtaccgatgcactccccggaaggcctcggggatggtgaatccccgg

SEQ ID NO: 228293 - DNA, 122 bp, Homo sapiens
ggtttccaactccagtcttcgcagcattcccagaatgccatacaggtatagttctatctgcggcagatactaatccctcaaatgaagaacactgtgagttatgggaggtgtatttctttgtc

SEQ ID NO: 228294 - DNA, 122 bp, Homo sapiens
cagaggcaaaggtccggccgcgggcggggggagatgggagtatcccaggacctagggagccgacccagcgcgaccaccatgaggaagcgatccagaaaccgtaaaagcagagctctcgggag

SEQ ID NO: 228295 - DNA, 122 bp, Homo sapiens
ccgcctcctcggcgtcattggagcccaacagttagtgggcgctcacggtgtgctgagcggcgcgctaggcgtcgggagtggcatggcggactgcaggggccagctgcttggcggtcagggcg

SEQ ID NO: 228296 - DNA, 122 bp, Homo sapiens
aaaaggtgcaggccagagggaacccgaattccctgttgagtgcgactttctttctttttgcggtccggtttctggtcagtgtcctgaggacattatgccatgcagggcggttccgaattgcc

SEQ ID NO: 228297 - DNA, 122 bp, Homo sapiens
tagccacattgaaacaacctagtcccctgggtcttgcagacacctgccctgtggttttctcgtggtggggctgtccccttcatttgtgctctcagattcagtcaacgtgcaagagcctctgt

SEQ ID NO: 228298 - DNA, 122 bp, Homo sapiens
gagccatcggcctgggcgctcccagtgcgcacattcatggccaccccgttgaggtggtcacgccccggctccctcccagggctcttgactgtgatggcgcagtcggggccgccagagcccag

SEQ ID NO: 228299 - DNA, 122 bp, Homo sapiens
aagcctgttgcgttaacctgtggacctacgctgtggcccttctactcgccgttcttccaacgcagatgagcccaccctcgtgtttctgtgctgtcatgagacggacagtcttcccgtcacag

SEQ ID NO: 228300 - DNA, 122 bp, Homo sapiens
gtcagtgcacccatctcctcaccccaatcccacccagccctgactgcaccctccccacaccggtgcatgggacacacacattcccactgcacatgactgcacagagatggggcacatgaagg

SEQ ID NO: 228301 - DNA, 122 bp, Homo sapiens
tgctcgatggcctcgcggtagaagtcctcgcctaggctagaggggcggcgaacgggcgggcggctgtcagcaagggcaggcgcacagggtcgcccagcaccccttccccggctgccgggccg

SEQ ID NO: 228302 - DNA, 122 bp, Homo sapiens
actattatccaaattgcgcccggggaagagagacagagcgagagagagagaacttctaaacgactggaggaggccgcctaggaaaacacagggttcccaggccaggactataggaattagaa

SEQ ID NO: 228303 - DNA, 122 bp, Homo sapiens
gggagctagctttgaagtgcctcctggctacaaaggcttggcgctttgctcccaggcacccgggctgccctcttgagtcacctatgtagggccctggtctacgtggtgaacgtccctaacca

SEQ ID NO: 228304 - DNA, 122 bp, Homo sapiens
ggattctttgcctccatgcttccctatttcaaggagcagcgacgtttgctatttatctcccgctggccacgacggggcaccagagaaaaacacaggctccctacgcgctgaaggaggcttgg

SEQ ID NO: 228305 - DNA, 122 bp, Homo sapiens
ggctaaatgccccaattaaaagacattttaatgtctggcaaattcttctcagcaccacatcgcacttattccaaagttgaccacatagctggaagtaaagcactccttagcaaatgtaaaac

SEQ ID NO: 228306 - DNA, 122 bp, Homo sapiens
cgggcacttctgacactttcctctacttccaggcggacaaagccctttctggtgaaagcccggggctgccctcctgggaagagggaaggttccccgcgaaccccgctcacccagcctcctgc

SEQ ID NO: 228307 - DNA, 122 bp, Homo sapiens
cagattctcgccaagacccagagcgcgtttcagagtctggtcactccaggagtcgtcgggcgctgaaaagcgattttaaagatctggagtagaccgggcgcggtggcttacgcctgtaatcc

SEQ ID NO: 228308 - DNA, 122 bp, Homo sapiens
gaatagggagcttggaatgactcaaatggacagaacattttgcagtatttggatttctatcgctccacgatagttttgtctccttgattttcacgttagtagaagcatgcaataggttgtct

SEQ ID NO: 228309 - DNA, 122 bp, Homo sapiens
gttgcagccaccgtcgagacacacaactggtgtgtcagcagcgggcccccgtgccaggcacgctaactgtgcagtgctggagctctgccgccttgagatgctctgcaagccgcaccctgcgg

SEQ ID NO: 228310 - DNA, 122 bp, Homo sapiens
gctcaagctggcctgcggaggcgacggagacactaccgagaaccagatgttcgccgcccgcgtggtcatcctgctgctgccgtttgccgtcatcctggcctcctacggtgccgtggcccgag

SEQ ID NO: 228311 - DNA, 122 bp, Homo sapiens
agagtacgaaacggggcctcccttcccagctcgggtggaaacgcctccaccctgtcaccccgcccatagcaggtcttttatccgctggagccgcctggacagtcctcgcggggcacgcccga

SEQ ID NO: 228312 - DNA, 122 bp, Homo sapiens
ggtgctgatacctgtgtatttggccggggcagtgggactcagcgtgggtttcgtgctcttcggcctcgccctctacctgggctggcgccgggtccgcgacgagaaagaacggagccttcgag

SEQ ID NO: 228313 - DNA, 122 bp, Homo sapiens
ctccctgctcgtctgcctttgatctgcatggttaattttattttcctggatttgaagtttcgtctgggcttgtgctgacatacatttttgggaaggtagaagcatttggcacagaagtgctg

SEQ ID NO: 228314 - DNA, 122 bp, Homo sapiens
tggtttgggcatttctgcaaagcaggggacatgcgttgtcactccctgccccctccctgccgcctgcgtttcccagcctcagtgcgctcgcccttcctgctgggtctgagttcttttcccag

SEQ ID NO: 228315 - DNA, 122 bp, Homo sapiens
agggttggggtggggggcccagccggccggtggcaggcaggagtgaggtgggcagggcgccggttccctgccgcacagcagcatgcagcatgcatcaggttttacctgatctcactagccaa

SEQ ID NO: 228316 - DNA, 122 bp, Homo sapiens
ttggaaatttggagattcggaagtttgttcttggatggccagaaatcctccggaggcagacggtctggggctgaaaccgccacaggccggaaaggtgcgggcgtgaacgtcctgcgcgccga

SEQ ID NO: 228317 - DNA, 122 bp, Homo sapiens
tgctcaaccgcctcctggcttcaatcctgcctctaggcctggctggcgcggcggcgcgctcgggctcactgcagggtctgcgcatgctcgcctcctgacaaagcccactctgagagcattgc

SEQ ID NO: 228318 - DNA, 122 bp, Homo sapiens
ccactggaacctggcgggcgtctaggaggcaccggccgcttcccaccggccgcatccctgcgtctcgcgccccctccagacctgcctctgcctgcactggcccggtccgtgtccaggtggcg

SEQ ID NO: 228319 - DNA, 122 bp, Homo sapiens
ccacctgaaaccaaccccttgtcagcagggtgtttgctcctgggtggcgcctttaggagccgagggtgccgggctctgcggccgcatgtgctggtgcccgtgtctcaggctctgcgggttcc

SEQ ID NO: 228320 - DNA, 122 bp, Homo sapiens
caggttgtgggaccagtggctctgtataatctcttgatgaagtgagagctttccttcctgcggacacactccctcctgcccattttggtgactcagacatggccagaattgactcatgctta

SEQ ID NO: 228321 - DNA, 122 bp, Homo sapiens
aatgacaggctctttcccagaaatctcagccatgagattcaacttggttgctctcctaaacggagatcttaaccctagggccggtttgcaagtcggctgcagttagctgttatctaaggaat

SEQ ID NO: 228322 - DNA, 122 bp, Homo sapiens
ggccctcccccggcggcatggaggggccccgctcctgacggccgcgccgccgcctcggcccgtgctccacctcgcggcccctcccgcccgcccccgctcgcatgtctgcgccgccctagccg

SEQ ID NO: 228323 - DNA, 122 bp, Homo sapiens
tggattcagcagaagtgaggcaggaaaggcaggaagatgagaaaaggcgcgacatcaacacgcagagctcactgagccgccttgatgataaaaggcgggcacagggactacgtgggtggtgg

SEQ ID NO: 228324 - DNA, 122 bp, Homo sapiens
gctgctcagcgtctgtaacattaagcagcattggtctagtcccttcctccccatatggcccggcccgtcccctaggaaaacaggaagggcaagaggggtgctgggtggggctggctcacatc

SEQ ID NO: 228325 - DNA, 122 bp, Homo sapiens
ccagcccaatggagatggtctgcaggaatggccggatggcaggcgtgaactgtggagagacgcggctgcgtcacccaccgctcaagagagggatggggacagggcaggagcgaggcacaggg

SEQ ID NO: 228326 - DNA, 122 bp, Homo sapiens
ctgctgggccacctgcaggctgtggaccaggttgctcttctcccttcaggacaaggggagcgggagcagaggggatgctggggctgctctctccagggaaggtggctggctgctcctctagc

SEQ ID NO: 228327 - DNA, 122 bp, Homo sapiens
taagccaccgcgcccggcctgacagcttttatccagaaaactgtcgccagtaaaggttcccgtctcagtaaactgtaaacgacagtaggcccacagaaggttctaaggggagaggaagccag

SEQ ID NO: 228328 - DNA, 122 bp, Homo sapiens
cctgttcccctccctgttggcagctctgctctgctctgctccggcctgggcagttctgatcggttttcaaggacattctaagtgttcgccataaaccctgggcccaggcgggaaagggggga

SEQ ID NO: 228329 - DNA, 122 bp, Homo sapiens
cacacgtcctgtgctgcctcgggcagccgtggtgcagacacagacgttcatggcccgaggcgcccgaaagcagaaacgggcagtggtggccagcctcgcgggcgagccggtgggccccgggc

SEQ ID NO: 228330 - DNA, 122 bp, Homo sapiens
cttggatggagaatcgggtaaagattcctaaatcccagaggatgggaaccacagcaggcacgctgcttttttgataaaaatttcaaaatgatacaaataaagctaataccaaaaaaaaaaca

SEQ ID NO: 228331 - DNA, 122 bp, Homo sapiens
gaagtcttccactttccctgcttctacagctatcccaagtattcctacagtttgagatgacgagtccttttttaggtacagtgttcagtacacagcagtccccctttatctgtgagcggcga

SEQ ID NO: 228332 - DNA, 122 bp, Homo sapiens
cggcggccgcaagcctgccaggccgggtcgcaggacagccgccgccgccgccaccgccaccgccaccgccccccgaagctagatgacggagtcttgaaagactttcaccaaatatgggccgg

SEQ ID NO: 228333 - DNA, 122 bp, Homo sapiens
gaagaagaagacactcctggaggagtcggcagagcaggcagatcaaggagttcatcttctcggagctgctgtccaacctatactcgcgtcggaacctgcagacacttgtggaggagtcggca

SEQ ID NO: 228334 - DNA, 122 bp, Homo sapiens
tttcttgatccggcagcagactcatccaccttgtctcagagcagcagtggcagcagcagccgcgtgcctgaagccctctgtcgccttacccctggagcctcctttaacatagggccctccgg

SEQ ID NO: 228335 - DNA, 122 bp, Homo sapiens
ctcgagccagggaggccaaggctgcagcagttgaggcaaggtcaaactactgtactccaacgtggacaacagagcaaagatcctgttaaaaaaaagacatggaatctttgctggagcaatat

SEQ ID NO: 228336 - DNA, 122 bp, Homo sapiens
ccacacactgagcagccgcttcgaggtccccgcccccgttagctggtgactgcgaagggacggctactcacactgctttggtatccggagggcctcactgtccagcaccatcacctgatgca

SEQ ID NO: 228337 - DNA, 122 bp, Homo sapiens
ttgcgaggttaataggtctaaaattttacttttgtttgatgactagtggtttgaatttttcgctgcctgttatattgcttgtatactttgcctgtttgtgtcactgtccttttggattggag

SEQ ID NO: 228338 - DNA, 122 bp, Homo sapiens
taaagtaaaaaaatgaagaagcatggttaattcacttgtgctgattaaaacagatgtccacgtgcaacttctgtgtgtgagcctccccatgctgccatgccaccagatgctttcccttcacc

SEQ ID NO: 228339 - DNA, 122 bp, Homo sapiens
aggctgcgcgggggtttgagcggagcgagaacagctccttcccttgatcatgctgccctccggaggtcagtttaggtatcgccgctccctttcacgctgttttgtctcttcaccgtctgttc

SEQ ID NO: 228340 - DNA, 122 bp, Homo sapiens
tctctccccgcgcgtctgcaaagttgggggcgggaggcgcagccgagggtctgacggctgcggcggggcctggacggaagagggggcgagccccggggcgccgcacgtggacccccggcacg

SEQ ID NO: 228341 - DNA, 122 bp, Homo sapiens
ggtggcgggcgggccttaggctggccccgctggttgccatggataccgaccgctcccgcgcgtgcggagacgaccgctgccccgcccccggaagtgatgcacaaagtcccacccccccccac

SEQ ID NO: 228342 - DNA, 122 bp, Homo sapiens
tggccccgcggtccacgtgggccggccttctccccgccccgcacccctgctcaggcggcgcgcccccactgccggcctccaggcgcctctcccgagcgcctcgctgtggccaccactccgca

SEQ ID NO: 228343 - DNA, 122 bp, Homo sapiens
cttagagcagaagggagatctgaacgctgacctgagcttagagcagaagggagatctgaacgctgacctgagcttagagctgggagactgagaaaaatgagtaaactaaacccagagcccaa

SEQ ID NO: 228344 - DNA, 122 bp, Homo sapiens
ccaggccgcccaggatggtctcggactggccgtcgctgtacatgaaggccgtgtccagttcggtgtggccgcgctccagaaaggcgcgcacggccgcggcgctggcgggcgcgtccatgcgg

SEQ ID NO: 228345 - DNA, 122 bp, Homo sapiens
cagtcgttctcatgtggagtattcatcgttcagcgccaggaagtatcctgagctgaagggcgggttcttacagaggccatctgagctacagtgggaatgtcaggttggacacgaggctcact

SEQ ID NO: 228346 - DNA, 122 bp, Homo sapiens
caagcaatttgcccacctcagcctcccaaagtgctggggattagacatgagccactgtcacggcctaatcttgatatttgaaacacatgataggcgttcctcagtcttgctttcaaaggtac

SEQ ID NO: 228347 - DNA, 122 bp, Homo sapiens
ttctttgttactttttctaatgggaattgctccttaaaccccttctgtactttcattaatcgtaacttactgagcccttactaggcttcagatgcttccctaaactctgtagctgcatcctt

SEQ ID NO: 228348 - DNA, 122 bp, Homo sapiens
gttgtcggctcgcaggttcttcttcaggaactccacgcaatgggcctcgagcgctggcaccgcgtacttcttggcggtgtatagcgtggtcatcaccgtctccgggccaatctgcacctcgt

SEQ ID NO: 228349 - DNA, 122 bp, Homo sapiens
aaaggaggcagcgaagcagattaaaggaacttgtggcttgtggcctttttgtgcaagggccgcctggaaggggagaaaagtgtatgaaagccaccgtggcggttaatgagctgtgagatgag

SEQ ID NO: 228350 - DNA, 122 bp, Homo sapiens
tgccagtcggtcctgggtcctggcgtgccggccaggctggacccagcctcacccaggtcccggacgatctccttcaccatgaacctgagcattccccggctgtgctcggggtggaggaacga

SEQ ID NO: 228351 - DNA, 122 bp, Homo sapiens
tgctgttcctgcggccgaggccagaaacaatagtgggaggaagggcggagggtgcggaggcggcaccccagtgtgtcatctccgcgttcccagaccctgtctacccctgccctcaaacattc

SEQ ID NO: 228352 - DNA, 122 bp, Homo sapiens
tcttgtagccacaggacatctggtgtatctcatagcatacagctccacccatcagacttccggtggggaggggtgtgggtgcccagcatgaggaaatgctcactagttcttacgtttcactt

SEQ ID NO: 228353 - DNA, 122 bp, Homo sapiens
agatacagagtgaagaatgtcacagtaggaagtgcactggactaggggagtcaggagacccgggttcttgtgttggcaccatcactcatgagctacgaggtgacttcaggcaagtcctctct

SEQ ID NO: 228354 - DNA, 122 bp, Homo sapiens
ccagatctacttaataggaagaaaagaggccaagacaccagtgttcctcatgtctgataacgcagaggccaaggcctgtctgagctggagcgagagttcactaaacattacaacttgttcag

SEQ ID NO: 228355 - DNA, 122 bp, Homo sapiens
cttagtaggtccccgggccaagagctacgaagcccgaggagctggcagccccgcatcgcccgcgaccacccacggccgcaatagctccatagagcacagctcccgggggccgccatcttggt

SEQ ID NO: 228356 - DNA, 122 bp, Homo sapiens
tcacatttacatgaccgtaatttcttatcaattctacttttatttttgcttacagaaaaacggggggagaattaagccaaagaagtatatttatgaatcagcaaatgtggtgcctgattata

SEQ ID NO: 228357 - DNA, 122 bp, Homo sapiens
tcggggtacggcagcgtgtgtgtgtatgtgtgtttgtgtgtgtgtgtgtgtgtgtgaaatcgtgcaaatctacatgtcccagcccattctctgttgaaacagatcacagcaacgacaaacac

SEQ ID NO: 228358 - DNA, 122 bp, Homo sapiens
aagggacaggataggggcagcagcctagggtatgcagggaatcaaaagctgctacatagccgagagcatttcacaagaaacagcatgggaacactattgggtcaaggtcctcccgaacagct

SEQ ID NO: 228359 - DNA, 122 bp, Homo sapiens
tggcggcggtgacccctccaccggaagcgtgtgcatggaactctcctgcttttctacacacgaccctggctgggtggggagacagccatgagcctgcttcttgtggttttgaagccgtcctt

SEQ ID NO: 228360 - DNA, 122 bp, Homo sapiens
aagcgcggcgcagtgatgatgggggcccggggttggtctgacagcagcagctccgtggggcgccggttcccgcggccccgcccggtgccccacaccgcacctccgggacgtagcttcccctt

SEQ ID NO: 228361 - DNA, 122 bp, Homo sapiens
caatggtggcctgggccgcctggccatagagatcgacgacagcatagacgcccgggggcacgttccaggcagcagggccctgagtcatcccattgacaaagaagtggagagtcccgtcctcc

SEQ ID NO: 228362 - DNA, 122 bp, Homo sapiens
tccgcaccccggccccacccccagggcccctcctcggtccgggtcccaatcccctggcgccggatcccagctcggagccctttaagattaagccgcccccacccgccgagcagggggatggg

SEQ ID NO: 228363 - DNA, 122 bp, Homo sapiens
actgaataatgaagagcacaatgagctgagggaagtggacggcaccgctaagaagaatggcggcaccctctactacatggcgcccgagcacctgaatgacgtcaacgcaaagcccacagaga

SEQ ID NO: 228364 - DNA, 122 bp, Homo sapiens
ccctctaattgcgggctgcggtctgtcccagcaggcactcctggtgagttgcagtgaccccgggggggccagacaaaccctgggtaaacagggctgataggaggtgacagcctgctcttccc

SEQ ID NO: 228365 - DNA, 122 bp, Homo sapiens
aacaattacttcaactgccacagggaaatcatcatcatatcccaactcgtcttcctctttcgattcttctttcttttttagcaccatcgggtagaaatactgccattcctcaatcaacttac

SEQ ID NO: 228366 - DNA, 122 bp, Homo sapiens
tcctctgcatccatcaaacccccatcctatcttctctagtccatggataatagaaattagcgtgaacacacagaagctggtattgattgagtgctgcatcacttaaatgcttgaaggaatct

SEQ ID NO: 228367 - DNA, 122 bp, Homo sapiens
acgggggaggaggccgcggcaggggcgggcgcggtacctgcgggtcgatgtcgcccaccgcgtaatacttgacctccctgaacatctcctcaggaactttgggcgcctggtccgacatgatc

SEQ ID NO: 228368 - DNA, 122 bp, Homo sapiens
cccactcctcctcctccccccgccccccaacctcgcgctccctcccgcggcggtttgatgcgtgcagcttcttgacgcccagggcctgccacggcccaacgcccaacccggagccgcctgac

SEQ ID NO: 228369 - DNA, 122 bp, Homo sapiens
atgtagcataaggcgccattgccagcctgaccagtgtagtagggaactgggtcccacttccgcagcccccagccctgtcttctagagttagactgtacattgctaactaggcttcctttttt

SEQ ID NO: 228370 - DNA, 122 bp, Homo sapiens
tagcactgagaactgtttcagaccttaggtatgcaagtctattgggactccattgttgtccgtgatttaatgactttattcaagtgtgtattaactgtgttttctggttctgtatctgatac

SEQ ID NO: 228371 - DNA, 122 bp, Homo sapiens
attgcgaagtggcctgaggcagagtgtttttcagtcagggacgttgaaagctggagttgacggggttctttatcagatggtggatccagaactaaaccacatccccaggccaccagtggaat

SEQ ID NO: 228372 - DNA, 122 bp, Homo sapiens
ggaataaccaaatatctttgtttaaagtggtggcgtaaatggccagtcgctttgtggccacgctggatattagtagatgaggatcattctgcttcaattgggcgcctctcatccgacgagca

SEQ ID NO: 228373 - DNA, 122 bp, Homo sapiens
tcaccacagagaaggaacttttcagacgctcccttggccgcgcacccgggatcggaacagcgctgtcacttgcgacaaaatccctaggccagaggaagaagagcgcaggcctggcgaggcgg

SEQ ID NO: 228374 - DNA, 122 bp, Homo sapiens
ccaggcagaaggagaaaaccttccagaaaggatatgtttagtgttcagtctttgaagatacgagctgaccttgtcctggaatgccagtgtagcttcacatccacaagcatcttcagtggaaa

SEQ ID NO: 228375 - DNA, 122 bp, Homo sapiens
aagagcctaagattcaaagtcccagagccagcctaggtcagggatggagcccagcaaaggcggggccaatgtgtggatagggcacttggaggtctggtaaggcagcaaaacgaacgaagccg

SEQ ID NO: 228376 - DNA, 122 bp, Homo sapiens
tttgacatattaacgaagtaataacagcaacctacatttattgagagtttactatatgctcggcactacactaatcctttatccgggttatctcatttaatctttacactctctgaggtaga

SEQ ID NO: 228377 - DNA, 122 bp, Homo sapiens
gcggggcgcccttggccgcacacatcagtgagaactgctccccggggttgaccaccttctcgctgaaggacgagacgatgcggggcgtgccatctgcagggagcgagaagcccccttcaggg

SEQ ID NO: 228378 - DNA, 122 bp, Homo sapiens
ggccctggcttcgggcttcagggagctctggtgcagtctccgcctgtcagtgccggcagtcgtccgcggcgcccgccccggtcccgcactggtgcagccatgtcctcttccccgtgggagcc

SEQ ID NO: 228379 - DNA, 122 bp, Homo sapiens
gcaattcttcctctttgaggcacagacgacaaagtcagccttatacctgcctgcatgcaacgaccacattctttcaacactggccagctattggcatgtaaaacaccaaggttttctatttt

SEQ ID NO: 228380 - DNA, 122 bp, Homo sapiens
cctcgaccacctcacacttccatgcatcccaatccacgctttgataccaggataataggccgtgttgcagccttgggccaggattatctcagattaaagggtgctccctcgggggtcaggct

SEQ ID NO: 228381 - DNA, 122 bp, Homo sapiens
ttgactttccgatagctcttctggagacctttgaacttggtccgacactgttccagggtccggaggaagccatattccctgagccgctcagccacagccccatacacttggctgttcctatg

SEQ ID NO: 228382 - DNA, 122 bp, Homo sapiens
gaaaatgaaactgaagccgtggtcacgtgacaggacatgtagtatatagcaggctgccagcgactcctgctcttgcttctggatctgcagggcagtcccagcaggacccatggagtgtcctt

SEQ ID NO: 228383 - DNA, 122 bp, Homo sapiens
gagttgtgccccaagctcagggccagggtgcctggggccaggcctggggcaaagggcagacggcccaccctggagctgaagcgggcagggagggggtgccaaagccgggtcctcggtcagtg

SEQ ID NO: 228384 - DNA, 122 bp, Homo sapiens
tagcagagcccaagctcttaaccactgtattactttcctattgctactgtaacaaattaccgtaaatgtagtgccttaaagaaacacagtcctgttctcttacagttctgttaccagtgtag

SEQ ID NO: 228385 - DNA, 122 bp, Homo sapiens
agccgagggaggtgaaggctgaccggcgacgctgggatctgtgagatgccgggaaggacccggagcgtggtcctgccagcaccttgatttcggactctggcctccaggaccgtgtgaaaata

SEQ ID NO: 228386 - DNA, 122 bp, Homo sapiens
accagttcctgcaggcgcgcttccccttcttccgcggcgcctaccagggctggaagaactcggtgcgccacaatctctcgctcaacgagtgcttcatcaagctgcctaagggcctcgggcgg

SEQ ID NO: 228387 - DNA, 122 bp, Homo sapiens
gggaggttacctcttcaaatgaggaggccccccagtcctgttcctccaccagccccactacggaatgggagcgcattttagggtggttactctgaaacaaggagggcctaggaatctaagag

SEQ ID NO: 228388 - DNA, 122 bp, Homo sapiens
ctttggaacgggtcggctgcatgttgccggaaaaattaaaatttcttaacgctgtaataacgatggtcttacacctacacacaacaggaaaactgaaatgggaatcccagccagtcgcttcc

SEQ ID NO: 228389 - DNA, 122 bp, Homo sapiens
gttgtgaagaatgatcctgagtattgctcttggtgcctgtgagctcctgtgaatctcccccggaaagatgctggagtagggagcgggctgcagctggcaatttatttctccaaaagccatta

SEQ ID NO: 228390 - DNA, 122 bp, Homo sapiens
agaggcgtctcaggcggtgggccttaaacatttacattcttggggcttagctgactccttcgagcgtcgagtttctgggttgatggcacatccagggtgaaggaagaactccttacagagaa

SEQ ID NO: 228391 - DNA, 122 bp, Homo sapiens
tgtatcccttcatcagtggacgcgcgtttggaggctgccacctttgtcttccatgaacagcgcagccgtgaaccttctcgccgaattttttgtgcccctccaggagtcgctcgagatgtttc

SEQ ID NO: 228392 - DNA, 122 bp, Homo sapiens
ttaagagctgcaacactcaccgcgaaggtccgtagcttcactcctgagccagcgagaccacgaacccaccaaaaggaagaaactccggacacatcctaacatcagaaggaacaaactccgga

SEQ ID NO: 228393 - DNA, 122 bp, Homo sapiens
tcaggtaatgttagatatgcccacatgtacattgttagattgctaaggataccacactcacgtttaccaaatattgggtatcatgaataaatcctggtttgaaaccattatgatgccacagt

SEQ ID NO: 228394 - DNA, 122 bp, Homo sapiens
gacaaccagggagaaacctcaggagcaagaaacctcaggcagatcgcaggggaggcagcgcgagatcccagcctcaggccaggatttgcggagggttgatgaggcccctctcccaatcttca

SEQ ID NO: 228395 - DNA, 122 bp, Homo sapiens
ggataggacagtcaaggggaccctgagcgaaggggacagcatggtggagacccagggcagcgggtgcgtggggactggggagagaggactggtgtgggcacggtgcaggcagatcacggtgg

SEQ ID NO: 228396 - DNA, 122 bp, Homo sapiens
cacccaaatactgcgcttttccgacgggcttaaaaaacggcggaccacgagattataacccgcacctggctgggagggtcctacgcccacggagtctcgctgattgctagcacagcggtctg

SEQ ID NO: 228397 - DNA, 122 bp, Homo sapiens
tatattttctaactgaattctttctgtggaatgtatctgttcatatcctttagttacttgcgtgtatataagacttagttcttggagtacacagctgataggaaggaaggaaagtaactgaa

SEQ ID NO: 228398 - DNA, 122 bp, Homo sapiens
tgtaattaaaaaatgcagtgataagattcttgtacataatttactacactgacaactaaccgttcagtttatcttgccttcttttagtcagagaatatgtcacgagtttaatatttatttta

SEQ ID NO: 228399 - DNA, 122 bp, Homo sapiens
ggaggtattcttatctgagagcaatagaatatagttcaccaaagcagaaacctgggcaagcgtcaactaaatgttggtgggtccaggaagaaatccactgattcaggctaggtgcctgtcac

SEQ ID NO: 228400 - DNA, 122 bp, Homo sapiens
ttgacagcttgaggctccgccccgctttgccccgcccccccagctccggccgacgcccaccggaactacagcccccatgatgcagtgggagtccgagcctctgcgtcgtccgcttgggacgc

SEQ ID NO: 228401 - DNA, 122 bp, Homo sapiens
aggagtgggtgtgggtgggtctttcggggctcccggcgacccgcggtgccgacgcaacgccgacgtatggtgccaagcgaactttaaaaagctgcttcggacaaaccagagccaggatttcc

SEQ ID NO: 228402 - DNA, 122 bp, Homo sapiens
tgaaaagtttggtgctgagacaagatcaaacttgagtttggaacttaaaacagcaaacgtcgctgtagaaatgagactgcctcatagagttgttttaaagggaccaaagcccagtctgaaca

SEQ ID NO: 228403 - DNA, 122 bp, Homo sapiens
tcctggccagcgtgtgtggtgggcgggcttaggcgttcagccgtcctgatgggtgtgcggcggcatctccttgaggtttaagttgcgcttccccaatcgttgagaacgtagagtggcttctc

SEQ ID NO: 228404 - DNA, 122 bp, Homo sapiens
agttcctgtgttctttattctactctccgctgaagtccacacagtttaaattaaagttcccggatttttgtgggcgcctgccccgcccctcgtccccctgctgtgtccatatatcgaggcga

SEQ ID NO: 228405 - DNA, 122 bp, Homo sapiens
ggtgggccttacccaatcagtcgaaggacttcgccacagcgtgggtgggccttacccagtcgaaggccttcgccacagcatgggtgggccttacccaatcagtcgaaggacttcgccacagc

SEQ ID NO: 228406 - DNA, 122 bp, Homo sapiens
ggtatttggccaaggcctgcatcgggaataaagtccagagaatttctttctgcaggatgccgcctgctttggagggccccggggtgcgcacggcgtgtgggcgtgcggcctgaacccacagt

SEQ ID NO: 228407 - DNA, 122 bp, Homo sapiens
cccagtccgcagctcgtgttaaagccttccagaaaccccagtccccttccccggcttcggcgccgtctcttactcgacgaccttggctggatccccgtggtgcccatagacaagcgcccgga

SEQ ID NO: 228408 - DNA, 122 bp, Homo sapiens
ttctcgggttgcctcggggcgatttgcacttcacagccccgctggcgtctcctggcgtcccgaacttggggcctgtcactgaggcaagtcgatgttttcaggagtgttttgttttgttttgt

SEQ ID NO: 228409 - DNA, 122 bp, Homo sapiens
gcgtgtccctcccccgttgcgggccgctgattggcctcgttgattgggcggggctagtagcgggaccggcctctgcgcgcgggttattttcgccgcggattttcttttacttttcatctgcg

SEQ ID NO: 228410 - DNA, 122 bp, Homo sapiens
tgtcttccttaccttttctcccactcgaacaataagaaagctgtgtagaccacaccgccacggttggactcagggccgtaacaaaaaagagatttttatttgaatctcacttcacttgaaaa

SEQ ID NO: 228411 - DNA, 122 bp, Homo sapiens
ttaagatgaaagttcccagttctcccttgcccggaaagtctctggagcaagcgtggaaggcgagtgaagcggaaggtgagtgaagcgcgcgcagctcccagagggaagcgagaggcgaggat

SEQ ID NO: 228412 - DNA, 122 bp, Homo sapiens
ttttccgccggctccatgcatttccctgaggcaggatctttttgggggaagctggcatcccggcgctggcctcggcccccgactgggagttgggtggcgcttgattggaactccggcccgga

SEQ ID NO: 228413 - DNA, 122 bp, Homo sapiens
actatatattaactactagcacctgtcctacaaaaccttctattctaaaaggcatagaaacgttaaagagagacagtgcactaagtgtcctaataaaggtatatacaaaacgctatcgtaga

SEQ ID NO: 228414 - DNA, 122 bp, Homo sapiens
tgttccccacagcagtgacataggcagtcacgggcccaggttcagggatctgtggtgaggcgtgacccggggccccccggtcagtaaagagctaagcgcagggcccggtgtccatgaggggc

SEQ ID NO: 228415 - DNA, 122 bp, Homo sapiens
cactttcccattccacctcctccaaaagacttcactctcttgtgcaggatctggattttacgaaaaaaaaaaaaagaagaagaaaggaaggaaagaggaaagaaagaaagaaagaaagaaaa

SEQ ID NO: 228416 - DNA, 122 bp, Homo sapiens
atccacctccttgtcctccacaacccactcagcggctaacctggccaccaactaacttctcgccctcggatcctcgcgtttataaaaggtgcgagacgaccaagttctacaaggtggggcgg

SEQ ID NO: 228417 - DNA, 122 bp, Homo sapiens
cactggacacaggcagaatcaattaggaagctggactcagagggcgctggccgtgcagcccgcccggcaggaagagccagtgtgaggctccacagaagaggaagaagcgctgccccccacca

SEQ ID NO: 228418 - DNA, 122 bp, Homo sapiens
atctgtggcagttgtattttcatttgtgtatttaattgcttcatgcatatgcataatctccgggaacactatattgtgataactcactttgaatgtcaaaggactttttaaaagccctcagt

SEQ ID NO: 228419 - DNA, 122 bp, Homo sapiens
ccactagagggaacagaaggagccgctgaccacgtaagtgttggcgcgcatgcagcaccacggctacctcgcacgatgtggatggatgctttggagaagaatctggcattatcaagtgaaac

SEQ ID NO: 228420 - DNA, 122 bp, Homo sapiens
acgcagcgtcccggcccggctggcagacatccggcggcatcgccgctgaccctccccgcccgccccgtgcaggcggccacatcctcacctctaaatttagtttgcaggaaggagaacctggg

SEQ ID NO: 228421 - DNA, 122 bp, Homo sapiens
tggttcctgagccatagtaaactatgtgcttatctctggcaatgcggctgtgattgggggcggggagggtgaaagccaagcgagagagggtaaagcagaaggcaaggaatggtgtagagtca

SEQ ID NO: 228422 - DNA, 122 bp, Homo sapiens
accaggctagggccgccgcgcccctcctcaggtgttttgtgttcctgccaagtcaggcttcggccctgggggaactccttggttcgaggggtatatttccccatgtaaaattattccctaga

SEQ ID NO: 228423 - DNA, 122 bp, Homo sapiens
agtcttctctccagcctggcccagggtggtaaggactccatacaagaaacagctgagccccgggtgccttccctcctctgagcctcagtccccacacttgtgagtgagaggggctggagttt

SEQ ID NO: 228424 - DNA, 122 bp, Homo sapiens
atgcctggccttagcatgctggggccacagtcatgagagacggggaacgtcgcttagctccgctctctgtgaggcctggggtctgctacgggggagtggggcttcaggttcatgtcactaaa

SEQ ID NO: 228425 - DNA, 122 bp, Homo sapiens
taacttctttttcatgtagatttcaggctgggattagagactgaatcttgaattgcttatcgtctctagaccaagttgttcggggccagggattgattaattaattaaaatcaatgtaaatg

SEQ ID NO: 228426 - DNA, 122 bp, Homo sapiens
acggaacagatcccccttccccacacccgtgcggtcgggcgcccgccggccaaccctgaccggccccctgcagaacgcggcccgtgcccccggcccttctcgagtatccccacgcgtccggg

SEQ ID NO: 228427 - DNA, 122 bp, Homo sapiens
gtgccgcccaccccccgagtgccgcccacccccccgagtgccgcccacccccccgagtgccgcccaccccccgagtgccgtccaccccccgagtgctgtccacccacaacacggtgctgcct

SEQ ID NO: 228428 - DNA, 122 bp, Homo sapiens
agctcatgtctaggatgagtgaaccctggtatctagccctgtgcttctcatcaccggctccgactgctccctaagccaactccagtacaaagctggatgtgtctagtgttttttttcagagc

SEQ ID NO: 228429 - DNA, 122 bp, Homo sapiens
gacggcgagggccgcgcaaggcactctgaggccgaggccacccgcgcccggcgccgctcccgcagctactcgcccatccgcaagcggcgccgggactcgccaagcttcatggagccgcggcg

SEQ ID NO: 228430 - DNA, 122 bp, Homo sapiens
cctagtataagaatcgaggcccaggcagaaccaaactgcctgcttctaacaactccttttcgaaggaccagcttgtttttatatatttctttgtgatattgctcggaatctgtgtctccatt

SEQ ID NO: 228431 - DNA, 122 bp, Homo sapiens
gagcatctccgcccggccgccatcccatctaggaagtgaggagcgcctcttcccagccgccgtcacatctaggaagtgaggagcgtctctgccccgccgcccattgtctgagatgtggggag

SEQ ID NO: 228432 - DNA, 122 bp, Homo sapiens
cagaatcacagtcccagagtacactggggaaggctgcctgctcaccttctccgcagtcttcgccagcatacccatctttgcagacacagctgccatcgtgacactctcctcggccacggcag

SEQ ID NO: 228433 - DNA, 122 bp, Homo sapiens
caggacccagtccgtctgccccgagtcctccttccagaaaggaccggacttgctggctctcgggaccccccaccaccatcagagcatatctgggtggggtgagaagcctcccggtggctccc

SEQ ID NO: 228434 - DNA, 122 bp, Homo sapiens
cctgccaggcccaggggatggagacaggcaagagatcccccttttccctctgggagctcacggtgcaagggctgagcctgacacgaaagcaggcaatgacaatccagagaggagatgccagc

SEQ ID NO: 228435 - DNA, 122 bp, Homo sapiens
gcagtgatcaagccaaacactgaaaaacagatcaagtcctggtaggagggctgtagacatcgaggcttattctgggctctgtcctctcccttccctggccttacccgctctcctcagaccag

SEQ ID NO: 228436 - DNA, 122 bp, Homo sapiens
gagtgggcgcggctagggcggttttctttcgcgtcgaccaaacgtgggccaatggaaaaccggaagcgtcctgtgagtgatgtaatgacagcccaatggaagctgggggcgggcctcagaca

SEQ ID NO: 228437 - DNA, 122 bp, Homo sapiens
cctcctataaagcagtcaagtgagggaaagaggagttctcgctcctccgtgaatgctgcacgggagcctccagtcgggaacagctgaacaggtagctctgaaagaggaccttggtcataaac

SEQ ID NO: 228438 - DNA, 122 bp, Homo sapiens
gcagcgtggggagggggctcctacccggacgccccccaggggtcgcagaggtgggggctgcgccgcgcgggcccactcctcgggggtccagggtccgggggatgagccctccgcccgtgcac

SEQ ID NO: 228439 - DNA, 122 bp, Homo sapiens
ggagtcagtgagctggggctgaggcttccttattccctgcaggtgtctcctgtgatgctgcgtgctggagagaacccaaggtcagttacccttagagctcctcctacgatccagtccgcgtg

SEQ ID NO: 228440 - DNA, 122 bp, Homo sapiens
taatctcttcatcaccatggaagcttagggtctccagtgggggggtgtcagcagcagccccgctttccgattcggactccatgcggcgcaagcggcggatccacttctctgggcccaaacgc

SEQ ID NO: 228441 - DNA, 122 bp, Homo sapiens
aacccatggcccagcccctatctcaaagccaggcactccctcttatcagataagaaaccacgactcagagagaggaagctagctgttcaaagtcacagtcggtggttgggccaggaaacggg

SEQ ID NO: 228442 - DNA, 122 bp, Homo sapiens
gcgcggaatctcgcggctgtaccataaggtacgcagggaaggcccggaggggtaaagccccggcttcttgaaggcggcagaccccaaaccaaagggctaaggccttcgcaccctcgtctcct

SEQ ID NO: 228443 - DNA, 122 bp, Homo sapiens
atttttaaaggaagaatatgacatattcaatccagcagttaagattctccacaggtctcccgcgggcgtcagcaggggcggcggcgggtgggaaatggcggagtgtccagcctccatctttg

SEQ ID NO: 228444 - DNA, 122 bp, Homo sapiens
cttaagttaattagtttcatttaccatgaatgactccatattggtttggtctgttggacccggtacaggggtcttgtcccaatcaatggcctcctgcaaattttatttaacaggcagaaaag

SEQ ID NO: 228445 - DNA, 122 bp, Homo sapiens
cagtttgatctcagactgctgtgctagtaatcagcgagattccgtgggcgtaggaccctccgagccaggtgtgggatatagtctcgtggtgcgccattttttaagctggtctgaaaagcgca

SEQ ID NO: 228446 - DNA, 122 bp, Homo sapiens
ggaactgtgagggggctgttgcgcttggtcaggaaggagctcagtgctgtcgagtacacccgggtcaccaggttcaagtccaagcagctggcagcctaggccaggggagagcgagctgggtg

SEQ ID NO: 228447 - DNA, 122 bp, Homo sapiens
aggttatatatttttgttacatctcttttaattttggtttctacatgtttgttgttagtacggtatatagttatgtaattgatctttgtgtgttgatcttgtatcctgtgaccctgctaaac

SEQ ID NO: 228448 - DNA, 122 bp, Homo sapiens
cacccttctgagcgggatatgtgggcctggtgcgtctgggtccccgaatccctagacccccgcactctggttctggccgcccgctggcactaaggacccagggcccgtgctctccccgacct

SEQ ID NO: 228449 - DNA, 122 bp, Homo sapiens
gagtccaaggcagaaggatctctccagcccaagagttcaagggcagcctggttaacatagcgagaccctgtcactacaaaaaatttttaaaaattagctgggcatggtggcatgtgcctgca

SEQ ID NO: 228450 - DNA, 122 bp, Homo sapiens
aaatgaggaccaggcaaatgtaaaggaataaggttcgtcggcagccaacatcagcaactacgacatcaaggcagccagcctgcacaacctgaagaaaagatccattcgatgcagttctggcc

SEQ ID NO: 228451 - DNA, 122 bp, Homo sapiens
ggcgtggcagtggtgcgcgagagagcccgcttcttggctctaaggctgatttcaagcctccggttcagattacactttggaaagaagaccccggcgcgcactcccgcgtcgaatacaatgga

SEQ ID NO: 228452 - DNA, 122 bp, Homo sapiens
tagccgggggagggacggggcgccactgaggaccaatctgcttgggccggggcggggctgcggcgggtgggtgcagaggggccgcaccgcggacttcgcagccgggagagagcccggcgcgg

SEQ ID NO: 228453 - DNA, 122 bp, Homo sapiens
tagctttttgttttttgtttttgtttttgttttttgaaacaaagtctcactctgtcgccccggatggaatgcagtgatgtgatctcagctcacatcactgagtgtgtgtgtgtggtgtgtgc

SEQ ID NO: 228454 - DNA, 122 bp, Homo sapiens
gcactgctaggtgctgctgttcggtcccaggaaaataaagggagatggcagtccgcaaggcgaatgtgagaggagacctgtacggaagccatcgacaagagtttcacactacacgttttggg

SEQ ID NO: 228455 - DNA, 122 bp, Homo sapiens
taggcgtgagataccacgccctgccaaatagacaattttgaaagtagcaagatatccacacgtcacatttatgggaatctcagtaagaattctagcatattatcatcaaaaacaatgacgtc

SEQ ID NO: 228456 - DNA, 122 bp, Homo sapiens
agtaaagctactataaacatccatgtgcaggtgtttgtggaggtaagttttcaaatccttcgggtgaatacataaggggcccagtgatgactgagtgcaagcaatactttttacttacgtgg

SEQ ID NO: 228457 - DNA, 122 bp, Homo sapiens
ccaccctgctcccagctctgctcagcatgctggccgattgctgtctgggccactcaggcacgtgacagtgtcggggaaggagctgtgaactgccacagacagtgctccccgaggcccgacgg

SEQ ID NO: 228458 - DNA, 122 bp, Homo sapiens
atctctagggcttcaggtgtagtttcactggaaaggaggagcccacccaagaggtggggtcgacatgatgaaatccattgtcctggaggggcctgggaggcccaatggactttaacaacata

SEQ ID NO: 228459 - DNA, 122 bp, Homo sapiens
gacttgattgtctttcaagttggcgttaagagttttcaacaggtctccttccctgccagccgggaccccgggggtccctcggagcagggcgggtgggaccgctcggcctccttctctcgccc

SEQ ID NO: 228460 - DNA, 122 bp, Homo sapiens
tcccgagctgcagcggaaagcggcggggaaagggccactgcggcgggacccgacacccggcggtccgccccaccctctaccgcgtacacacctgcgtgggaccccccgcccggtccacacgg

SEQ ID NO: 228461 - DNA, 122 bp, Homo sapiens
cagcccagctcctggcagggattcgggccgcgctccccgtcttggactcctacctggccccggccctacctttggatccgcccccggaacctgctccggagctgcctttgttgcccgaggag

SEQ ID NO: 228462 - DNA, 122 bp, Homo sapiens
acgggggctgggctgggaaaatccctgccttccacaaaaaaattgccctcccggtctcaccgtattatgttagaggcataaagaaaagatctttttgagacggagtcttgctctgtcaccca

SEQ ID NO: 228463 - DNA, 122 bp, Homo sapiens
ttgaggtcttgctggtaggtgcacccccttcaagccagcccaaggagccatgatttgagtcggtcttgccagatgtgtctggagagaatttaactccaagatcatcccccgtgcactctgag

SEQ ID NO: 228464 - DNA, 122 bp, Homo sapiens
tggcacagccagcccacgggactgggaagacccatgttcccagctccctggcgacaacggcgacaaggccatgcacccggtgcttactggatgccagcccctgtgctaattgctctttatgt

SEQ ID NO: 228465 - DNA, 122 bp, Homo sapiens
gagcagaggctgtggaggaagacaagtctatcaccagaggctggaagtgaaggaggaagtcgagagcaagccaaaaccccagggtatcaaatgcttctcatttgagaagtctgcaagaaatc

SEQ ID NO: 228466 - DNA, 122 bp, Homo sapiens
cagccgcttcaaagtgttggaggccggcacgtgggacgaggagacggcggccgagagcgtcgtggaggagctgcagccctcgcaaggtaagcccgggtctccacccggccccagagtgtcac

SEQ ID NO: 228467 - DNA, 122 bp, Homo sapiens
aagaacccaccaaggggatgatccaattaggagccagttctgcagtcacaggaggccccacgcctctgaaaacagccctccctgctgctgctgctgcctccagccaggacatagtgcagcag

SEQ ID NO: 228468 - DNA, 122 bp, Homo sapiens
tacaaactaccattatatatacaagctttagattgtgaaataatgcacttcggctttctccggtgtacattacaattacaaaccctcaactcaacctcccccttcgttgaaaaaaaaaatcc

SEQ ID NO: 228469 - DNA, 122 bp, Homo sapiens
acacacatttagggaagaactcctttcggaaacagattggaaacggtgactgaaagtgatcgcgcaggctcctccgtggtcaggggctttccctgagaatttgttcagctgctaagggaagt

SEQ ID NO: 228470 - DNA, 122 bp, Homo sapiens
gcgcggcgcggtggcctcgcggtgcctaggctggggctgccggaccgtgaggctgtgagtcgcgcggacggagccggacaaaagcgggcggcggcggcaggatgaacagcatcaagaacgtg

SEQ ID NO: 228471 - DNA, 122 bp, Homo sapiens
caggatcctcttctgtcagccacagccgagcccaggctaagacactgttaacactagcttcgcctccacacttccagcacagggtttggcccccttcctcagactcagcagctggcaccact

SEQ ID NO: 228472 - DNA, 122 bp, Homo sapiens
ctgggtgaggtaatgagctcacctgatgtttctgaggctgagggaaaaaaaaggcgtctgcgttctctgacaaatctcgggctctggggcggggactgtgaaaccatagttcaaccggattt

SEQ ID NO: 228473 - DNA, 122 bp, Homo sapiens
cagtgctccatccaataaagcgggcaggaaggtggccccaggtcctaggtgctcctggatcgtgtagtctttaactgctgccccaagggacctcaaggaataggaattctctttgttaggag

SEQ ID NO: 228474 - DNA, 122 bp, Homo sapiens
agagctactcacctgtctccatagcgacagcagcggccataacaaacgaagacaccaaaacgccaccagcctgacagagcaaaagcccagagacgcgggcgaagttccggaaaccacggctc

SEQ ID NO: 228475 - DNA, 122 bp, Homo sapiens
agaggggacggcgcagccggatgcccgccagtggcaggtgtgcctgctggcctggcttcccgtcctgctgcacacccgggcctgcctcgcggcctgcgccccacctgcagcctgaacgcatc

SEQ ID NO: 228476 - DNA, 122 bp, Homo sapiens
aggatgacctggatgactgaaaagagaaaatccaaatagttttttccctctttgggtagtcgaccaagaagtaagctcagcatctgaattagctcaaagggaaaacagaccagtagaaatgg

SEQ ID NO: 228477 - DNA, 122 bp, Homo sapiens
ataagggacatacacttcttttttggcagttcaacatgattttccttcaggacctacctgcgtagaggggctgtctaattgcattatctcccctcctctggtacccagctcaggttggccaa

SEQ ID NO: 228478 - DNA, 122 bp, Homo sapiens
cttctgccgagggcacctccagggctggggtctcatcgtgttgtccccactttattccaacgtccaccccaggcctgggggagcccagggaggaccgagtttcctgggccccgcagggtgca

SEQ ID NO: 228479 - DNA, 122 bp, Homo sapiens
aaagaagggaggaaatcttacttttttgtatagccaagcgcatacaacccattacatacacgttttcaagataaacaataacgagtcctcaagtaagaggacttgtcacatatagtttatct

SEQ ID NO: 228480 - DNA, 122 bp, Homo sapiens
gcacggcctccaattgtgtctgaacatgcagcttcgggagaaccataccctgcaggccggcggtctcagagcccccaacagtagctgcccgctgggggttgtcgaggaaaagagtgaaaccc

SEQ ID NO: 228481 - DNA, 122 bp, Homo sapiens
tgacaaggatatattccatttgtttccacctaagccttagccttggcacagtttcaatatcgaaatggatcgctgcgtcccggcggtcccaggaaaaaggcaaaccaaaaaatagagacgtt

SEQ ID NO: 228482 - DNA, 122 bp, Homo sapiens
ttttcccacaacctctttgttccacagtcctgaactataggtgactccccacatgctccacgctctcacctctgtgccactgcacttaacattccactctgccaagaataacgtccctcctc

SEQ ID NO: 228483 - DNA, 122 bp, Homo sapiens
cactgctcgtgccgagtctgcacacggcgccctcggttgatccatggtgcgcagtgtccccgtgcctgcttgtcttctgagaaactgtgggagcctccccatggtgccttttcatcccggct

SEQ ID NO: 228484 - DNA, 122 bp, Homo sapiens
gttaatggtgccgaaataacaatgtgaacctgagactggcctgcatgaatacagggtgtgcgtgaatgaaactgcccacatgaactttatgtgctacgatttaactgcagccttgaacacac

SEQ ID NO: 228485 - DNA, 122 bp, Homo sapiens
ggagtccctcttttcgcgccttaagacaggtaggttctgacgatgaaaagcaattgaaaacgacccatttcaccctttttccagtccacgtgaactgctagatcttggctttgcaacattag

SEQ ID NO: 228486 - DNA, 122 bp, Homo sapiens
gattgcaggcgtgagccactgctcctggctaaagctttatgttaaatggagaattaaaaacgtatacaagaatggaatagtataatgaactgccatgcccctgtcacacagcttcaactgtc

SEQ ID NO: 228487 - DNA, 122 bp, Homo sapiens
agggactttcctgagtgggagggatttcgccggaacaaaaatgcctcagtttggaggtcgcgctcactgcgacggcaggctttgagtgtagcacttggtagttcttcctctgctctgcttcc

SEQ ID NO: 228488 - DNA, 122 bp, Homo sapiens
tggcccatgcctagtagtcacagggcaggcagactgccctgttttttcagggtgtggtgacggggagggccaagggtgccctgcatccatgatgggtcagggatttcaggagggatggtttc

SEQ ID NO: 228489 - DNA, 122 bp, Homo sapiens
cgcagcaggcgggcacggggcagctcatggcggcggcggctcggactcgggatcgggatccggctccggctctctggtctcccgctcggccccgccccctgccccgaccccggtcacgtgcg

SEQ ID NO: 228490 - DNA, 122 bp, Homo sapiens
tgctctgtgcaggcgctgccctgggcctgtagaccttacacagctcagcagggctcaggccggagagcccccaggccttctctgaacccccactccaaaagacccccagtcactgtccgggt

SEQ ID NO: 228491 - DNA, 122 bp, Homo sapiens
ccccttccttccttacctaattccttctttaaattccaggacctggaatttatcctgtctcgacacttcttgtccaacagtgagccccctgtcttcacccccctaatcccctgtcttcacat

SEQ ID NO: 228492 - DNA, 122 bp, Homo sapiens
attctctattttcccaggaatcatgacttgtcattgtataccaaatgcctaacatagggccggacactttaagcttgtaataaatatctttggactgatttgatgaagcttaacaaagatat

SEQ ID NO: 228493 - DNA, 122 bp, Homo sapiens
atggggccagcctgtccccccgcctcctccaacccttatctccccacgcgcttctgcttgcgtcaggggcccggaaagcacacgtgagcaagaatcgcttgtccagggaaggggccgactct

SEQ ID NO: 228494 - DNA, 122 bp, Homo sapiens
gaacactggtgctatttgactatattaaagaactatcttttaagtgtgagaatggtgtcgcggttgtgtgtatgttttttaagtcctcacttttcagggattcaaagtgaaacatttataga

SEQ ID NO: 228495 - DNA, 122 bp, Homo sapiens
agaccagcgtatggccggaccgctggccatcatccttaacctctgctccaggcgcgcgtgcgttcaacttcctgggaaccgcgctccacaccatgtgcacccagctggcgaggattaacgcc

SEQ ID NO: 228496 - DNA, 122 bp, Homo sapiens
acttatagcactcgcccgctttgggggcgtcccaggagccaaaggtcggcaaacagcgaccgggaaatgaaggcagaagtctggggtagaagaaaggactttggcttccttggctttagctt

SEQ ID NO: 228497 - DNA, 122 bp, Homo sapiens
ggtcacgagcctggcagctgtccgggaaagctgattctgagcatcatccaacagcaaggacgaagctgcagaaagagcagcccagcagcagaggaaactgaacccgaagcgagggccacaga

SEQ ID NO: 228498 - DNA, 122 bp, Homo sapiens
aggatcacccacttgtaaactctgccctacgtttagaggacatttttgcccttcaggaaccgtgttagtaattcgcaaaagcacaggggtgatttagggtcttgagctcagtggacagtatt

SEQ ID NO: 228499 - DNA, 122 bp, Homo sapiens
accccgcatccagtgcgcctgcgctggagctcccggaagttgccggacccggaacgcaggcggagcgcaagtctgtcagccagtcagtccgccagtccgccagcccagtacctctctctcct

SEQ ID NO: 228500 - DNA, 122 bp, Homo sapiens
agacttatgatctgaagatgtccttttgaaagtatcttccatggctacactaaaaagacccggtaacacttgtgcacggtgaagttgagattttctggaagaccaaagccggaactatttca

SEQ ID NO: 228501 - DNA, 122 bp, Homo sapiens
ctccaggattggagttgagctgcttctccccactaaattccagctgtgagtaaagtaggccgtctctgagccgaccagctgtcccattcccccaggtcccaaggcaccagcaccgccaccat

SEQ ID NO: 228502 - DNA, 122 bp, Homo sapiens
gacacgggtgttacatatcttcctgtgccccttctccctgtagggtgaagctctgggcctcggcttttggtggggagataaaatccattgctgctaagtactccggttcccagcttctgcaa

SEQ ID NO: 228503 - DNA, 122 bp, Homo sapiens
cattaaacactaattaggtttagaaagtctatcgagctcctgaggtctcgtcaaggcaggcgctggccctggggtgccctttgaaatgccagtgctgtcaccccaacccccggcggggctgc

SEQ ID NO: 228504 - DNA, 122 bp, Homo sapiens
ttactatttcagacaccccagacccacggtttcaggtcccacagcctgggtcaagtccatcgtggtgatggaagaattagtactgggcaaccaggctaatcaaaatctgagaagatatttat

SEQ ID NO: 228505 - DNA, 122 bp, Homo sapiens
caggctcccaagggaacacagcactggaactgtggagtctggagactcaggagaataaaccggtgcttggcgtctccagagtggaggctcagtagaacacggaattggggccagtgtggggt

SEQ ID NO: 228506 - DNA, 122 bp, Homo sapiens
tcagagctcaatttcagagctaaaaaaaaaaaaaacgatatgtggtaatacacctgtggacgttgccaatacaaaagagttgcagtattttggttttggatctagccatgtgtcaccataca

SEQ ID NO: 228507 - DNA, 122 bp, Homo sapiens
agacccctcaagaagatggggcttcgaggctgagggagctcggccccgaaaagacgcctgcgggagatggcacacctagctaggaccccatactgggcaggcgatccttccgagcatgagca

SEQ ID NO: 228508 - DNA, 122 bp, Homo sapiens
ccccaccgtgcgctccgccgctgcggtcccggatccgcgctccacgcccgcagcccgcggcgccaccagcccagcatgcaccaggtgcgtgcagcccccgcgccggccgaggatgcgagacg

SEQ ID NO: 228509 - DNA, 122 bp, Homo sapiens
acctgcccaatcatccagaaagaggtgtggagagggaaacgatcatgacacggacccccacgaggtttctccctgatggactgggaagtcttctttgttggagacattgagccagactaaga

SEQ ID NO: 228510 - DNA, 122 bp, Homo sapiens
ggaaagaaagggaaggcaaccgggcagcccaggccccgccccgccgctcccccacccgtgcgcttataaagcacaggaaccagagctggccactcagtggtttcttggtgacactggataga

SEQ ID NO: 228511 - DNA, 122 bp, Homo sapiens
acagctccagctaactctggaaccagtgttcctgaccactaggcacttacctctgcatcccgcagccttgtcgagccagttcacgcagctgggattgggcctcaggtttttctcttgagtct

SEQ ID NO: 228512 - DNA, 122 bp, Homo sapiens
cggcctgggcttcgcagcgctagctggcttggcttcactctggcgaccgggtctttgcggcgcagggaacccgccccctctgagcccgcctgagccttggccccgcccccagccatcccgcc

SEQ ID NO: 228513 - DNA, 122 bp, Homo sapiens
cgccggaacctgactgcgtcgtgggcatgcgcggtgtacgtagcggctcccgctcggcctcgtgactcccgcggagacctctcggctgtctccggtcgattccattcgtttcctgtgggggg

SEQ ID NO: 228514 - DNA, 122 bp, Homo sapiens
agaattctccagtccgtccccctagcgcccttgattgggcagggctccgcttcggattaacgtctctgattggacagttccctaggccccgcccctgcctgtcctgattggataattctctc

SEQ ID NO: 228515 - DNA, 122 bp, Homo sapiens
cttcaaccagcttgaatcactgaatatgcatttgagaaatcacattagattgaaaccctacgaatgcagtatatgtgggaaagcctttagtcataggtcgtccctgcttcaacatcacagta

SEQ ID NO: 228516 - DNA, 122 bp, Homo sapiens
ccccacttgctcgtgcactttacacacatgaggtgagcggaacaagggcctccctccgggcgggaggagccgcgggcgctgccgcagggcccgcaacccgcggcggcggcagcagaggcggc

SEQ ID NO: 228517 - DNA, 122 bp, Homo sapiens
acttcaacaggaacaatgacaacaacattactaggtgactcagcctaggcaggcctcaggcgtcccagctctcagtcacctgtctgatcactcacaccccttccagggcaacctgaggccaa

SEQ ID NO: 228518 - DNA, 122 bp, Homo sapiens
tgactgcacctctttcagaggacacaggactgggcttaaggaagggagggccagagcgcccgccttggtggatgtaggattcgctccttattagggcgtgagtgctacattctgaaaggatt

SEQ ID NO: 228519 - DNA, 122 bp, Homo sapiens
tgtttacccgataaggaaggtcagcattcaaagtcaagaagcgccatttatcttcccgtgcgctctacaaatagttccgtgagaaagatggccgggaactcgatcctgctggctgctgtctc

SEQ ID NO: 228520 - DNA, 122 bp, Homo sapiens
gtgaaaactgtatttgggttatgtgccatttctgaaggccatgatccccagggaatatctcgtgatgaccctcaagcccttgtcctgaatgaggaggaaaaggtcaggcacaaccttgtgat

SEQ ID NO: 228521 - DNA, 122 bp, Homo sapiens
ggcaacaggaaggtgagaaccttgttgcgcacgatgccacggtcctcctcctcccttagccgctgcctcacgcgagccgcctgctcctcctgttgcaccagggctccattcatctcgcagaa

SEQ ID NO: 228522 - DNA, 122 bp, Homo sapiens
tgacgcatgaacaggagcaaaatctctgctctcaacagtggaaaagtaaaaaacagcctacggctcattacatctggtcaaaccatgtggaggcagcagtttatcaaataagtcaacaaggt

SEQ ID NO: 228523 - DNA, 122 bp, Homo sapiens
gtggggctacagtgctggggggaacgctgctctgggccagctccccaaggtggccacccacggagcctccaatgcccagaccccctcccaggcctccagggggtttgagccggtgtgccacc

SEQ ID NO: 228524 - DNA, 122 bp, Homo sapiens
gagccttcttgctggtcgtgagtctctgcaaactccgaggcagtgcagggcatcacatggcgagggggctgagtgttgctctctctttctcttcttacagagccacaagccccactcccatg

SEQ ID NO: 228525 - DNA, 122 bp, Homo sapiens
cgggcggggcccgcgcgtcagccgcgggagccggccaatccagtggctctcctccgcggtcgcgtcataggccgaacaaccaaacagaaaagtttaataaacagcggacggaggggccggcg

SEQ ID NO: 228526 - DNA, 122 bp, Homo sapiens
gcacgcgaccccgggagcaatgcgcccgcgccccttctacacccgggagcaccgggcgcgcggtgccccggacccagccgccaccgccgccgacccttactcggtgcctccgccgctcggcg

SEQ ID NO: 228527 - DNA, 122 bp, Homo sapiens
aggggcctggctgcaggcacagaggccccgctggtggtcgacagccagggcgggggcagccggagcgggggcggccggggcgggggcggccggagccgggggggcggccgggggcctggcgc

SEQ ID NO: 228528 - DNA, 122 bp, Homo sapiens
cccgcccacacaggctgctcggccctttctccgagtgtgaggtgtgcttggggaggccggcggccgagtggccaggcccaaggccttaaagagaagtgggtctcttcggcttcccaggctgg

SEQ ID NO: 228529 - DNA, 122 bp, Homo sapiens
cgccgccggcgggcgggagggggcggggggcaagcccggccgggccgcggcggcgcccctcgcgcctcagtcgcacactccggggtcaccagactcaagcgccgccccctcactgcccggcc

SEQ ID NO: 228530 - DNA, 122 bp, Homo sapiens
actgatggcagctctgcgggtgacaagaacgggtcagaatcaggcagcctcgctggtcggcggggctgtccgcctgaccccacacggggacacgtgccttctggaaaggcatctgcatgccc

SEQ ID NO: 228531 - DNA, 122 bp, Homo sapiens
cggtctctcttcaaaatgtttgcaactgctgcgttagcatgagttggcacccactgttaacgtggttcatgactttctgtttaagctgtgccacctgttccctgagcatgttggccgtggac

SEQ ID NO: 228532 - DNA, 122 bp, Homo sapiens
cagcaggggggctagacaagccaattcatttcccatcgctgagtgggtcgggggaggcagcgccgaccttaatcacatggtgttaaaaaaaaaaaaataactaggggcacgtggcaggaagg

SEQ ID NO: 228533 - DNA, 122 bp, Homo sapiens
ttataggagagaaaacccaaaacccaattagatgaaacacgtcgatgtgatgaggaagcacgactggaaagctcacataagctctgccgtggcaacccacgatgccgcccccatacaaggga

SEQ ID NO: 228534 - DNA, 122 bp, Homo sapiens
gtgccccagctgggccgggaagctgagaaacaggtttcaggggagtttcctgtgtcagcccgtcaactccctcccctgccagggctgggcagaggctgatcccagcaggtccagtgatccta

SEQ ID NO: 228535 - DNA, 122 bp, Homo sapiens
aaaggctggccggacgttggctcggacgggaaaggcggttattttcgccgaagccgctcacgctaagggtgaagtaatgtagggccagaggtaacacggcttaggctgtgggcaaggcctcc

SEQ ID NO: 228536 - DNA, 122 bp, Homo sapiens
cgggtgcccttgtcttttctttgtcttgtgactgacctggatttctggaggaactgtcctcgtcttagaatgatctgttgcttttcttctgagattagaggtattagattctctcccaagag

SEQ ID NO: 228537 - DNA, 122 bp, Homo sapiens
acaaacaataagaagaaagttttccttgtccgccttcaccaggctcacaaacacttagctcgcgctccctctggctcttctcccgctcgctggggttaagccactctcttcctcagccctgc

SEQ ID NO: 228538 - DNA, 122 bp, Homo sapiens
ggagcgctagggtttgaggcctgctttctgctcgcgccagcagagcactacctgaggcagcgaggcgcagcgagcctagcctccccgcgccctgggcagtgtggccatggagaatcaggtgt

SEQ ID NO: 228539 - DNA, 122 bp, Homo sapiens
aggctatttataaaggcgggtgagatcagcggccggccaaggctataaattcgcaggccgcggccgggccccacaggagcagccgcccggggcaccggagctgcgggctgcgtggccgggat

SEQ ID NO: 228540 - DNA, 122 bp, Homo sapiens
gcagagccggcgccaggccctgggcccggaggccccggcccccgccaaacctgggccccacgccaaggagccccggcactaccgtaagtggccctgcatccgacgcggcactcaggcacttc

SEQ ID NO: 228541 - DNA, 122 bp, Homo sapiens
ttgctcctctccaaatccactctccctttcgcctccctagaggttgtcaggttcaagaagcggcccggagttgcaggaagggcgccggcgtcactggccccaagagctcggaacgcgcgcgc

SEQ ID NO: 228542 - DNA, 122 bp, Homo sapiens
caagcctgtactcccagcactttgagaggccgaggtgggtggatcacgaggtcagcagatcgagaccatccttgcgaacatggtgaaaccgcatctctacgaaaaattaagccaggcatggt

SEQ ID NO: 228543 - DNA, 122 bp, Homo sapiens
tcgcgggccgcaggaggaagccggagcgcagatacctcgattgcaactcctctgagtcgacgccggcctccccccgcggctcccagcgtccacacacaccctcggccccccagaccccagcc

SEQ ID NO: 228544 - DNA, 122 bp, Homo sapiens
ggcttcgagatgcttaaggttcgacctttgcccctgcatagcccctcaggctgagtgcagcgtagctttgcgtagcctgggatttgtcagcctgggatactcattcttctgctctccttctc

SEQ ID NO: 228545 - DNA, 122 bp, Homo sapiens
gccagcctccccgcccccacaaaggttgggaccttgagcccaaagcccccacctcctccccggagtccgttctgactcccaggctcccaaggcaaaaggaggaagtggggacccagcctggg

SEQ ID NO: 228546 - DNA, 122 bp, Homo sapiens
agccgacgagctcgtggtggaagccgcgcctttgccggaggcagttcccgaggcctggggcgccgggctccacgctcagcagctgccgataagtggtggcaaagccggagatctcgcgcacc

SEQ ID NO: 228547 - DNA, 122 bp, Homo sapiens
cagtggcagaagctcagctgacaaggactggggacggcggtgtccttgtcttgcctttgtcgcccccgcccctctcttccctggctggacttgcggagtccccgccgaagaacccgaggtgg

SEQ ID NO: 228548 - DNA, 122 bp, Homo sapiens
cctcaactccttctctccctctcccccttccccaccaggggcgttccacatacgttgtcccgacacagcagtaccctgtgcagccaggagccccaggcttctatccaggtgcaagccctaca

SEQ ID NO: 228549 - DNA, 122 bp, Homo sapiens
tgtgtgtggtgtgcagaaagcatttcttcagctccttcacctccgtcttctaggtgtcatcggcaaggaaggccgccaggctgccaggaacagcgactatgcaatcccaaagtttaagcatt

SEQ ID NO: 228550 - DNA, 122 bp, Homo sapiens
tctgttttgtaatgccatccagaaaaaatgaacagatagtgaggctttgtgaggaacctacgatggatatgtggctgcagccttctttggagggtttaagctgcactgaaggaggctgacct

SEQ ID NO: 228551 - DNA, 122 bp, Homo sapiens
aaagcttgggccattagcactatgtcatctgtgggctgaagacacagagagtccaggtcacgtgtcaggaaaggagctgtgtgcttgcaaaggacattattagttgtagctcaaaaaaatat

SEQ ID NO: 228552 - DNA, 122 bp, Homo sapiens
agattactccgaatcagtacataaagagctgcctcactcttaggtgtctttttatggtcacggacttctcaggagctcagaaataatcacatctggtttgattagcttcacatttccattta

SEQ ID NO: 228553 - DNA, 122 bp, Homo sapiens
gagctgatctcaaagaaatctccacatctaattcagaaccatcatctcaccagaacacaacggccttgctcctgcctgggtgctgtaccatgatggcaccacaatggtccaagtgaccacca

SEQ ID NO: 228554 - DNA, 122 bp, Homo sapiens
gcggcggtgatgcagcagcggccgggccgcggcccgcaggccgagatgcagctgaaggcgcgcccaccaaatcctgatccgcaggtcatgatcctcctggacgtttgggttgcagaggacag

SEQ ID NO: 228555 - DNA, 122 bp, Homo sapiens
cagtgtttttctcctgtcaattcgcgggcaaccagcggggtgttcgagaccctggtggggcgggctccctcacttccgggacccccggggaactcagcggtgcgggggggataacgactacc

SEQ ID NO: 228556 - DNA, 122 bp, Homo sapiens
gagcttggtctgtaacacagaagcagtgatgagcaaggtctcttgtgccctgaagcccagcgaggtgtccacacttcacccttggctgggctgtgtgccaggaaaccctcccggtccaaggt

SEQ ID NO: 228557 - DNA, 122 bp, Homo sapiens
gcttccccagccattgtgatgacatcatgtttcacttttccagcaagcctttctgactctcgctgacttcttaaatgatgatgtacccaaggtctgttttgacttttttctctctctccctc

SEQ ID NO: 228558 - DNA, 122 bp, Homo sapiens
tgtgctgtggccatgtagggttcgggtgctcgtgctgtggccgtgcagggttcgggtgctcgtgctgtggccgtgcagggctcgggtgctcgtggtgtggccgtgcagggctcgggtgctcg

SEQ ID NO: 228559 - DNA, 122 bp, Homo sapiens
gacttccccgagtgtcacgctcagctgtgcccagagcgtgaggctggcagcgcctttaatcgcctttgctttttttgcagggagagcgcgtctccgccagcgccgggctgtttttttttttt

SEQ ID NO: 228560 - DNA, 122 bp, Homo sapiens
gcccgcttgctggctgcccagctgctaggacagtttgcagagcagtggcgtgcggagcggcggcggaccacctccaggtggggacggtgggtgggcggggaaggaagcggaatacacctgag

SEQ ID NO: 228561 - DNA, 122 bp, Homo sapiens
tcagggaaagggaactcgcgtgggctgaggagaccggagtggacgggctggggaaggcaccgtgatgcccgcaaccccgtccctgaaggtggtccatgagctgcctgcctgtaccctctgtg

SEQ ID NO: 228562 - DNA, 122 bp, Homo sapiens
acttgactcccatcacaggctcattagtaaggacagaaatttaccccaaagtgaatcacacgtaagaagggctactcagcattcttggaggatgaatggtaaatgtcctcccagttgcctag

SEQ ID NO: 228563 - DNA, 122 bp, Homo sapiens
gcatttgtagtgtggtataatcacattttgaaaaatgtgcagtagataagtggggaaatacgcattctggttgcttcataaataatagtagttaaggatatctatcaatctcgtgtttttta

SEQ ID NO: 228564 - DNA, 122 bp, Homo sapiens
cagagagggggcacgcgcacctaggaccaccgtagcgcgtcatcagtccttcacctccagcgtccctgactttccgcatcatgttcccaagatgtgcttgggtagtacaaagtggggcgggg

SEQ ID NO: 228565 - DNA, 122 bp, Homo sapiens
cctcggtctctatgcgcctcggtctctgtgcgcctcggtcccgcctcaagcaccgggtggcgtctccgctgtagtgttctgagttcaagttgcctcggaagtcccagttggggatacgctct

SEQ ID NO: 228566 - DNA, 122 bp, Homo sapiens
aggcacgtggcaccgtcgccttgacaccgccatctcttttctttaaggcttcaggcagcgcgcacaggctctggcagccgtctcaggcaggactgggcaccaagcttgcagccgaaggcctt

SEQ ID NO: 228567 - DNA, 122 bp, Homo sapiens
gaacgcgccccagccccagggccacctgtctgctcccaacaaggaaggctgcactgacaccgggcatagcgactggggaggagccgctgcaaaaaaccatgacaacgatcatcacaataata

SEQ ID NO: 228568 - DNA, 122 bp, Homo sapiens
acttaagtccagctacacagaagccaagactggcctctctttgaactgacttgcagtctacgaagtattgacttggcagggtcccatggaaaaggctggaagccagacctcagaaaggcaga

SEQ ID NO: 228569 - DNA, 122 bp, Homo sapiens
agtcacctgggacatttcctgggaatgggggctctgatctggtccctgtgcccacagccccgatccccatcgagccgcagatctgccaggccacctgtgctgttatgaagctgtcctttgat

SEQ ID NO: 228570 - DNA, 122 bp, Homo sapiens
ggagtgccattgtctccctaggagaaagcagccttcaaggtcccagcacccccaaacccacgagctcacacaaaacaacgcgagccacaaatgcaagccacatctgtcatttaacaccttct

SEQ ID NO: 228571 - DNA, 122 bp, Homo sapiens
aaactgtattgtttgcatgaacggtttaggcacagtgaaccactgataccaggtagggagcggtgggaaccttcctgaattccaagttcccagacaccagccaaggagccgaccttggaagc

SEQ ID NO: 228572 - DNA, 122 bp, Homo sapiens
gcctgggttgtttcgctctgggctgcgcattcatttttagattccggcctcctccctccccgccatctcccgcttctattcttagaaagcaaactggggtgtgcttgggcttcgcagggaag

SEQ ID NO: 228573 - DNA, 122 bp, Homo sapiens
ccaagtcttactttcaaagcacacacttagtctcaactagggaatcaacagaagcagaagcgatttttttcccccttcctgacatctggcttgcgattggctgggagggggtcagctgactt

SEQ ID NO: 228574 - DNA, 122 bp, Homo sapiens
ctcagcaggggagccggcggaaggatgaagtcatgcagcatccggggctgaggagccaagcggggcctcctcccccgcgcctccgcctcccgggccgctgggcaggcggcggcggcggcggt

SEQ ID NO: 228575 - DNA, 122 bp, Homo sapiens
tgggatggaggaagaggagtgcacaagggtccttcctcaagacctttacgtcaagcaccccggagggcccctgcaggagctggggcagtacagcctggccccgacgcccgcaccgggcagat

SEQ ID NO: 228576 - DNA, 122 bp, Homo sapiens
tggcaagaattcacctctttggttgtcaaaaatgttttgttttacataggagaaaacaggcgtagtagttaatgactgacttccattctacctgaccagtttcatgaaggttgtgctgtgac

SEQ ID NO: 228577 - DNA, 122 bp, Homo sapiens
gcggcagtgcagagaccttggggcactggaaattagtaaggcggtgggttgaattcttctcgatgctaagcagtgcccttcagcagaaaacctcctgataggtccgttttagacttggtttc

SEQ ID NO: 228578 - DNA, 122 bp, Homo sapiens
cggagtcggcccactccagcaccagcctccgcccgtacaagtgggtgctgtgacacagggcgttgaaggctctctgcagagggacaagaaacgaaactgcacatcagctggatcagtgcggc

SEQ ID NO: 228579 - DNA, 122 bp, Homo sapiens
tatcgcggaagggtgcttttctgtgtgatctgttgcataatatccactggggagagagggcgatattactccccatttcgcggagggtgtacacacccatgtgaactagttcatcatatcca

SEQ ID NO: 228580 - DNA, 122 bp, Homo sapiens
ctgccgcacatctggcgggggccgcctgccgccccctcctccggcggaagtcccacctgccgtctaccccacccccagcactcacccgccgctcgtactgtgcgttgaggtcgtccgccatc

SEQ ID NO: 228581 - DNA, 122 bp, Homo sapiens
agccacatgcgggtattaagcccctgaaatatgactagataagctgtcagtgtaacatgccgatttccaagacttagttaaaaaaaaaaaaactaaactatctcaatgatttgtacagacca

SEQ ID NO: 228582 - DNA, 122 bp, Homo sapiens
aaaaaaatttagggaggtggaacttccggaaaggaccgactagctggggcggggatgcggcggtggtccccgtaagtggacaggtgcgccagtggtagccctgtcggctgctttcgacctac

SEQ ID NO: 228583 - DNA, 122 bp, Homo sapiens
ctccgggctctgaatcttactacccgcgggaccgctggactcctaatgagctcagggtgccgggtcggcgctgtccggttgccgccgctgctcgcggcctcctgggccttcccgacgtcgtg

SEQ ID NO: 228584 - DNA, 122 bp, Homo sapiens
gcaccgtgttccgaccctctgccctgggatccgagctagcgaccctctccgtcgcgcgcccggagtgctggcctcacctgtgggtcgcttttgggttctggcctcaggccctgaaactttca

SEQ ID NO: 228585 - DNA, 122 bp, Homo sapiens
cctaaatggtatctaggaaaatattctctctttaacttgtttattctggtcataaagattcgggacattactgagggctgggtaggggcactagttgacctctaggttctacgtcctgttct

SEQ ID NO: 228586 - DNA, 122 bp, Homo sapiens
caggtgtgcgtttggcgtgtgtggatcctcgcgccgcagcctcggcacaggacgggtgtgcgtttggtgtgtttgtgcacaaacacccgcctgtctcagccagctcacaaagagactcacac

SEQ ID NO: 228587 - DNA, 122 bp, Homo sapiens
ttttactgactgtccctgagtcattatttccttatttacaaaacagaaataactttgcaacgttgtaaagattagcaaaattgtataggaaaggcctaccacagtgcatagggcgtagtagg

SEQ ID NO: 228588 - DNA, 122 bp, Homo sapiens
cctgagaagaggagtgtgtggccggattgatgggccgggaactcgtcgccttccttcacccgtctctctcccccaaacttcacccacctccacattcaatctcaaaccaagaagccccgcct

SEQ ID NO: 228589 - DNA, 122 bp, Homo sapiens
agcgagcggccttttccacccccgcggtctcttgcgccctctggtggcctctcgcgagaacgacgctgaacttgttcaggtgggacgccaataaagatttcttattcaaaaaacaggaagtg

SEQ ID NO: 228590 - DNA, 122 bp, Homo sapiens
tcgcttggagcctgtaataatttggatttctcctcctgtgtgttgtttttcataattcttcgcgaaaggccaggcaagctgcacacatcaagcgaaacgcctgaggggcggccagcgcgagg

SEQ ID NO: 228591 - DNA, 122 bp, Homo sapiens
ggatgcgtcttcctcccgcccccgcagcgcccggggcaggagtggcatcggcgtccccggcgtccccgcatcgggcttctctggtcctttgtgaatcgggcctgagtcatccccggctcacg

SEQ ID NO: 228592 - DNA, 122 bp, Homo sapiens
tattaattccggtaactcgggttgtttggaatgtggatagagaaactaagcttaactatgcgcttccagcacctcgtatctggtacttctgttcaacagaaagccttgggaatggggagggc

SEQ ID NO: 228593 - DNA, 122 bp, Homo sapiens
gcggtattggtagtaagatcatcctctccgccttggaatattaaggacagtatcacaggccgatgtacacacccggccgtattaagaggaatattatcctctcccgccctgcatattaggaa

SEQ ID NO: 228594 - DNA, 122 bp, Homo sapiens
cccaggaatggggattggggcagccagcaatgagcagccccctgacactgggtggggtggcgctgggccggctagggcccctgacgggcttgggtgggaggagggcgggcagggctgggtgg

SEQ ID NO: 228595 - DNA, 122 bp, Homo sapiens
ttggttgaattatgcattcgacaaggatggaaattacacgttcaacaaagatgtgaagagcgtgcagcctggcaaggcatctctgtccttagcgtgcccacccccaatacgggaagggcagg

SEQ ID NO: 228596 - DNA, 122 bp, Homo sapiens
gtgaaataacctgaaaaggccgcaataccaactatatgacattccagaaaagccaaaccacggagacactataaagatcagtagtgagggtgtgggtaggatgagtgggtttcatgcggagg

SEQ ID NO: 228597 - DNA, 122 bp, Homo sapiens
ctgatggttgagcagtcaggggcccagagacgcaggaaacccaaaatccttggtccaccacggggctgtcctcagggtctggagagcaggccccatactccaggcccccatcctccaggccc

SEQ ID NO: 228598 - DNA, 122 bp, Homo sapiens
aagaaactacactgcggggacgagcgtaagagtgggcacgagcgacaaaaggtcgtgaagcgggtgggaaaccgagcactggaatcatggagccgaaggactctgggcgagcagaactggaa

SEQ ID NO: 228599 - DNA, 122 bp, Homo sapiens
aagaggagatttggacacacagagatactggggatttgtgtgcctagagggacgaccgcgcgaggacatagccagcagccgcgtctcaagacaaagaggcggcccctgagaaaccaccctgc

SEQ ID NO: 228600 - DNA, 122 bp, Homo sapiens
tgagcggtgctgaggtgcagctgcctcatccttcaccggcttcctctgtgcaggaggctgcgcgcaccccgggcgaggagcatctctcacccggacagcggggatccaaccgcactcagggc

SEQ ID NO: 228601 - DNA, 122 bp, Homo sapiens
ctccctcttcagctaagccgttagcgccgagcccgcccgggagcgggtcgccggccgcggcgggcgcccctgccagtgagcccctgtccgaagtgagccacggcattgactcggggctgccc

SEQ ID NO: 228602 - DNA, 122 bp, Homo sapiens
ctgctccctgccagcgcagcgccgcgggccagcgccattctggggctacgagccagccagcgtgcaggctggaggcagccctgcccccggctccacctgccccctccatgagcaagcgtgtg

SEQ ID NO: 228603 - DNA, 122 bp, Homo sapiens
ttccagaaattcacaacatatctacatatcaaaacagcacattggccaggcacggttgctcgcacctataatctcacccctttgggaggccaagacaaaagaactgcttgagcccaggagat

SEQ ID NO: 228604 - DNA, 122 bp, Homo sapiens
agcattgcaatccgggagggtgtttcagagtttcagttcgactgctccaaagcaatgtttcgggcctcagcttatcaacgggtggcggaggctctgcacctgctcagggggtaccttagagc

SEQ ID NO: 228605 - DNA, 122 bp, Homo sapiens
tggggccggtgcgtcttagctaagtgcccagcgctccggtgggggcggtaggggcggagccgcgctctccagggcctaaggacagtgacgtggcccctgcctcccaccttcaccgagcgtcc

SEQ ID NO: 228606 - DNA, 122 bp, Homo sapiens
ggctgggccctggggagcgggagggaaggagcgaaggagcgaaggagcaagcggagcggccgtcgcccaagccaagccgcgctgccaaccctcccgcccgcccgcgctcctgtccgccgtgt

SEQ ID NO: 228607 - DNA, 122 bp, Homo sapiens
agatgtagtttccggaggtttgagcaacggaagagccggggctaaacactaaaataaccgcgatttttagtttcagcgctaagaccaaaaaaaaaaaaaaaaaaaagtagcctcaactcttt

SEQ ID NO: 228608 - DNA, 122 bp, Homo sapiens
cggaagctcattagacatgcagaatctcaggctttaatccagaacttctgattcagaatccgcagtttaacaagatctcaggtgactctaaagacattaaagattgggaagtactgccctag

SEQ ID NO: 228609 - DNA, 122 bp, Homo sapiens
gagctggtgtccgtgggtggtggagtcaaaccggcactcccccgcagacctcaaccaggtcgctagccccgcaccagtgttctctgtcccttctccctggtcttaacggtatgggccgcgga

SEQ ID NO: 228610 - DNA, 122 bp, Homo sapiens
caccagtgaagacccaagacagcacaaaaggccagctagcagagaaacatgattgttcaccgtccatctctgggacaacctaggtccttcttgcctttctgtcctcctcagttgacagagtc

SEQ ID NO: 228611 - DNA, 122 bp, Homo sapiens
cgtgcaggcggtcatggtggctgcactactgttgggtgtgttccgacaccgccgcacgaccgctggcttctcccctaccctctcagggctgcaggtcgtggtgtgtaatggccgtggtttag

SEQ ID NO: 228612 - DNA, 122 bp, Homo sapiens
ccgccgcggcgcccgttatatgcgcccggcccctttcgaggctggcgaactcgcccaaaccgcgggccgccccctgccccccgctgggctgtaacctgaaccgcccgcccccggagcccgcc

SEQ ID NO: 228613 - DNA, 122 bp, Homo sapiens
cgccccgaggtgctcagggggcctgtccggtgcttgcagaactgctggccagcatgatggcgggcgtgaagtgccgcctggacagtagcctgccccccgtgcgacgcctgggcatgatcgtg

SEQ ID NO: 228614 - DNA, 122 bp, Homo sapiens
gggctgttttcccactgtcccttcttcgggcagtgtcgccgtccagcctggttgttgaagcgtccccgtggtcccccggggtccaggcccctttgtggaggcagctgctggcccccagccca

SEQ ID NO: 228615 - DNA, 122 bp, Homo sapiens
ataggaacccagatgttcgggtaacgctcacatttcatttaaccctccaatgacaaaagacgggcaaacagacggggcatcagggtgggcctcagcatcaaaaaactggagggagctggctg

SEQ ID NO: 228616 - DNA, 122 bp, Homo sapiens
gcagagagtggtcaggcacagcccctccgaggaggcgacgctcagctgagaccagggtgacgcaaaggtgtcggccggttaggcacctgtgaggaaggaggagccggcagagtgccaagtag

SEQ ID NO: 228617 - DNA, 122 bp, Homo sapiens
tggatgaggaaatcgaggtgcacagaggttaaatggaatgtccatgatcaagcagctagccggtggaaaggtagtggggacaaaaccttggactttagagtctaaaacctgaccttacaatt

SEQ ID NO: 228618 - DNA, 122 bp, Homo sapiens
ccgaccgccgggcgcgcgcggggcacgccggaagttgaagtctccgtccagctctcgcttcgcagaggcgctgactccagagacagacttcctggctgcaaactcccagctccgccacgagg

SEQ ID NO: 228619 - DNA, 122 bp, Homo sapiens
cggtgcccagtgcccgccgtcctcacctggccagcgggacgcgcccgggaaccccgcacgcgggcgggccgcctctttgttagcaagtttgcctttctgtgattcagagcacgcggagcgaa

SEQ ID NO: 228620 - DNA, 122 bp, Homo sapiens
cccttcccagcaaccttgggctggactcttgtgttgaactaatatggcttccatttgaaacgggacaagaatttggagccctgggtcttggatttaggcccatcttttcatgtctaactccc

SEQ ID NO: 228621 - DNA, 122 bp, Homo sapiens
gccactcatccaggaactagcagtttggagttagaagatctgagcttaaaatctcagattcggataaaacaccaccaccaggaaaggtgccaacatatcagtaggtgggaagggtgagagat

SEQ ID NO: 228622 - DNA, 122 bp, Homo sapiens
atgcaccaagaagatatgagcagtgagctgaagaatctttagggctgggaacaacagacccgaggggttgccactgagtatttacttgattgttaagtaactgaagggatgctgggaaaggc

SEQ ID NO: 228623 - DNA, 122 bp, Homo sapiens
gtgaaaggacagagaaataccaggagcagcaggagggactgaggccaaaagtttgtgaaccgagattacaacatccaacctcaggaagtcaagtcctctgtccccagcgctcccacccccat

SEQ ID NO: 228624 - DNA, 122 bp, Homo sapiens
ttggacgaccgcggagaagtggtccggagtgggcggcgttagggcggtgctttctggccacgtggtctggcggccgattgtgcttctgggctccgcggggctacctgccagtgattttgtgc

SEQ ID NO: 228625 - DNA, 122 bp, Homo sapiens
tgattgaatagattagacatcaacgcaatcaggctgttcacctagggactctttgctaggcggcggagaggtacgttacagttctctacgcaaaacgcatgcgcgaaagatccgggaagtgt

SEQ ID NO: 228626 - DNA, 122 bp, Homo sapiens
tgaaaccaaagcaacagtccgagcagctttcagaatgacagtctgcagaagtgagctgagcgtgtgcgcggtacggggctctcctgccttctgggctccaacgcagctctgtggctgaactg

SEQ ID NO: 228627 - DNA, 122 bp, Homo sapiens
gggctacgcggcgctggcggcggggtcaggcgcggcgtcccgcacaatgggcgcggcgcccgagcccctgacagcgccataaattggccgtgcaaagccgagcgctaggtggtcccccctgg

SEQ ID NO: 228628 - DNA, 122 bp, Homo sapiens
ccggagaccgagcgctgcgggggatgaccacgctgaccgcggctcctcatggggagaggccgccttgtcttgacctaatgtatgtacacatataaatacagtgctcgtccaaatgacattcc

SEQ ID NO: 228629 - DNA, 122 bp, Homo sapiens
cctcccaaaagattgaaggaaactgtcctccatgggcaggagggctggctgcgagagccccgggttccctttactgaagtcacggtcttggccaaagctgttgtttttgtgactctccggcc

SEQ ID NO: 228630 - DNA, 122 bp, Homo sapiens
catttgtacgttggtggagacgtgccttttttcctttgcacttaaggtggacagggtctgcgacgctcccttccaggacggtgtggggaagcggccgacgtccccagccggactcacgccct

SEQ ID NO: 228631 - DNA, 122 bp, Homo sapiens
cagctggagttccgggtcagctggagttccgggtgggcgtggtcttggcggccccacactcggaacagctggccagccctgctggcaccaggcaatgagggacttagcacccgggccagtgg

SEQ ID NO: 228632 - DNA, 122 bp, Homo sapiens
ctgactggaggcagaaagctgttgtcccgaactcccggcagtagccggttgagatcatggcgcagccagaagtctctactcggcagtcgcccatgcgtgcgcccttacctttccttctgaat

SEQ ID NO: 228633 - DNA, 122 bp, Homo sapiens
cagggagcctggccctgctagaaacttgattttggactccatcctcccataatttcaagccgcccagtttgtggtactctgttacagcagccacggaaaacaaaggcaggcagatagtagac

SEQ ID NO: 228634 - DNA, 122 bp, Homo sapiens
gcggagggatgcaggtgggccggaagatcccacgattccgatcgactgccaagcagcagccgctgccaggggctgcgtctgacatcctgacctcctggactgtaggactatataaagtacta

SEQ ID NO: 228635 - DNA, 122 bp, Homo sapiens
cgccgcagccacccaccctccggaccgcggcagctgctgacccgccatcgccatggcccgcgggaaagccaaggaggagggcagctggaagaaattcatctggaactcagagaagaaggagt

SEQ ID NO: 228636 - DNA, 122 bp, Homo sapiens
taatatctcagagatttttctttaaatacatcaagacagcttgctagataatgatcaaagcggatacatttattgtgtgggctattcctttgtataaaggactaataggaaaggccagagaa

SEQ ID NO: 228637 - DNA, 122 bp, Homo sapiens
aagcaaaggcccagagcaggttcaagcatggggtgggctcaagcccagatcaggaccacacggcccgcgcatcctctccgccacactccctccccagaggccgcgcgcgcccgcatgccccg

SEQ ID NO: 228638 - DNA, 122 bp, Homo sapiens
gtgggtgttgccatgtttctgggcttctgggccaggtcctgatggaatgctaaagtgatacgaccagacacaggtgagaagaaggctgcttctcctgtggtatgatttgagggcatccttag

SEQ ID NO: 228639 - DNA, 122 bp, Homo sapiens
tactgttaccctccctgccggttcacttattcaggattcattgagcttttactatgtgcccggacgtcctttgcaaatctgtctcactaatctttgcaagaaagaaacctctacaaagaggt

SEQ ID NO: 228640 - DNA, 122 bp, Homo sapiens
aaatcctgcagttacctgaagaggatcaaagacacaccctggctatggcaggtttctcctcgctgtctccaacttgagctccaactccttctcccctcccaggctgtctggactcctggact

SEQ ID NO: 228641 - DNA, 122 bp, Homo sapiens
tgcggggacggcgacggggcgaggtcagcgccggcagggcaatccccctgcacccacacgcggtccaggggtgcacccgggctccaagcccacttctagcacgtccctgccctgccacctgt

SEQ ID NO: 228642 - DNA, 122 bp, Homo sapiens
ggtttctccatgttgatcaggctggtctcgaactcccgacctcaggtgatccgcccgcctcggcctcccaaagggaagtttgatttttctatggtcaccaatggacacttgatctccatagc

SEQ ID NO: 228643 - DNA, 122 bp, Homo sapiens
atcactcactgcagtcttgatctcccgagttcaagcaaagaatcctcctgcctcagcctccggagtagctggaactacaggatgtgccaccacgaccacgctcagctaatttttaaaatttt

SEQ ID NO: 228644 - DNA, 122 bp, Homo sapiens
gagcaagaaacatggttacatacgacgtaatgcgcctgcgcacagtccgtcctgcgcctgcgcattcctgacagcacctcccggaccggacataacggtccccgcgcggctccccgaaccgg

SEQ ID NO: 228645 - DNA, 122 bp, Homo sapiens
ctcgcgggctgggacgcgggagcgcgagctggggcgcgggaacgcgagctggtggctgcccgcctcgctgggcaccagccactgccatcgggagaggagtgcctgtcagctgccgccaccca

SEQ ID NO: 228646 - DNA, 122 bp, Homo sapiens
tccttccttctctttgtatctctttccgtttaaacacgcgaacgaacgcgtgtccacacacgcatatcatttcgggccctatctggagctgtcattgacagaactcaaattgtgataggcaa

SEQ ID NO: 228647 - DNA, 122 bp, Homo sapiens
taaacccaggaaccttgctgggggcgtctcagagcctcctctgcatgcacgatcacctgtcggaaggaaagaggtctgggcttatcacatcacaactgggactaacccttcatctctcacag

SEQ ID NO: 228648 - DNA, 122 bp, Homo sapiens
ctaaactcctctaaggaatttttcaagtgagcaatgttgtcggcgctgccaaacttattccggatcaggttggcaaactctctggacttattgaaaacgaacacaggtggagtaagtgagac

SEQ ID NO: 228649 - DNA, 122 bp, Homo sapiens
tcaagtgtgtgttgctgcggcagccacggaggccaaggacctcacgggagtaaaagatgacgagactggcttcgggagaaacaccatccagaagagacctttcaaaaaacttctagagactc

SEQ ID NO: 228650 - DNA, 122 bp, Homo sapiens
gcttgaaagggaagttagactgtactcctggtttccttacatttctcagagcttaagtgacggggatcccagatctgtcttgattcgaggcctggatcctttcgaaggcgtaatgctgttct

SEQ ID NO: 228651 - DNA, 122 bp, Homo sapiens
ggcccaggcttggcgaccttgaccttttcccaccatcctcaacctccacccctgccgcgtcgcgctgagcacaggtcccccgggaatagtgcaccccaggaagtctctccctgagcagtctc

SEQ ID NO: 228652 - DNA, 122 bp, Homo sapiens
tgtccgaagatcacacagttataagtggtggatcctgtgaagccaagaagccttagctcccggctcatgctcttaaatcctaggatgtttttacttttcaacctagcatctcctttctctga

SEQ ID NO: 228653 - DNA, 122 bp, Homo sapiens
ctgacctccaggaagctgagcgtggtggatggaactctacgatctctttctctccaaggacggaaacctcatccaagcagtcccagaggaaacggataaaggtatttgaaagggagcgagcg

SEQ ID NO: 228654 - DNA, 122 bp, Homo sapiens
gcattgatccccaggactggcaagagttggagaagtctagtttccataaatctagaatagcggccacatgttgttaggtggtgggtttactctgggattggcctgcggttgccagggaggag

SEQ ID NO: 228655 - DNA, 122 bp, Homo sapiens
tggaggtgcttaaaaatgtgcattgcgtctggctttctttccatgtatacatttatttgacgctgtagtaaaatctcctccttcaggtacccatattcatgcaagcaaatgttagcaaactg

SEQ ID NO: 228656 - DNA, 122 bp, Homo sapiens
ggagtctgtgcggtttggaggaacgcgccaatgtctgcactcatgaggagcccccaagggcggttttaagagggtgaagcaggaccgggcgcagtgacttacgcctgtaatctaagtgcttt

SEQ ID NO: 228657 - DNA, 122 bp, Homo sapiens
ctgcagccgcaccgcctgttgtccagatgtggaacagggtgtgcaggctctgcagcaaggcgcgcggcagcccctcagtgctgggcgcgggcgcaggcacgggggtaggcacgcggccccgc

SEQ ID NO: 228658 - DNA, 122 bp, Homo sapiens
ccctcctggccagacactgggagactccaggagggtctagacaggggatggtctggctcccgggagcttcagcccggcctggatccagccctggagtctggcagcagcaagtccctgaggcc

SEQ ID NO: 228659 - DNA, 122 bp, Homo sapiens
caggtcatacaacctggaactccctgcccttttcctgaagaagcaaataacagcctcctgcgagaggcgccctccctgcacctgggggaaaggagggtccttatctctgaagacacagggac

SEQ ID NO: 228660 - DNA, 122 bp, Homo sapiens
agagaagagtgctcgcactcagggatgtgccccagagggcgtggggtccggttccggccacgaagaacagcctctgtgtgagttgcaggactgaggtcctctgcaatttctcagggaaatac

SEQ ID NO: 228661 - DNA, 122 bp, Homo sapiens
cccagcacctcggctgctgcccggcagcggcagcagctgcgtcggcggcccacacagcagcgagaggcgagaggaggctgcctcgaggatgaagtgcaaacccaaccagacacggacctacg

SEQ ID NO: 228662 - DNA, 122 bp, Homo sapiens
ctatttcctatcaatgggatcgtaaaatctatgaccttttgtgcctggcttctttcacttcgggtgaggcttttggagttcctcctcgttgtagcatgtcagtacttcattccttttcatgt

SEQ ID NO: 228663 - DNA, 122 bp, Homo sapiens
caaccaagagttgactgaagtgtgcatagaatatatttaactgaataactaagacctgaacgtaatccaaggactgcatgttgagaaatcactgcccctagggtgtgtccttgctaacatgt

SEQ ID NO: 228664 - DNA, 122 bp, Homo sapiens
tgtcctttcaaatctgccattacccattcccacagtggatgcttcaataccggttggtatcgtcagttatctatattttgtgccactgaaacattcattcaatccacacacctttattacat

SEQ ID NO: 228665 - DNA, 122 bp, Homo sapiens
ctctaaatgcaacccaagtgggtggtgatctaggaaggccccctctgccttgtcagagttcgtggttgcagggggtagggggcgggccgctgttcattgccgggacagcagcagcctcccgc

SEQ ID NO: 228666 - DNA, 122 bp, Homo sapiens
ccggccctacgctgttgacgtggggcgagggcctgtcctggagctgcggcgcggcaatggcgtaggcccctttcgagaatcaagccagcgctccacgtggcgggccagcccaccaggccccg

SEQ ID NO: 228667 - DNA, 122 bp, Homo sapiens
aattattgtcttcagggagttctctagaggctgcgggcgtgcactgctcaaatccacttgcgtgagaagctcatgaggagggtagttagctgacagtttccagctgcggcccctctggctct

SEQ ID NO: 228668 - DNA, 122 bp, Homo sapiens
ggtcgatcccccagagcttgaggtccgtcttggctttcacggtcgcagccctgggggtgccgtagatgagcgccagctccccgaagctgcctccctcgctgatgttggtcacccactctccg

SEQ ID NO: 228669 - DNA, 122 bp, Homo sapiens
tttgtatttcactactttcctgttgagcttggattccagcctcaaattccgcgatttggccggcatcctaatccccgagtgactcttgccaaccactctctgtggggcctgtgtgcttcctc

SEQ ID NO: 228670 - DNA, 122 bp, Homo sapiens
gaggagaaagtatctggagaagatttctagaactcagaactgtgcttagaggctggccagcgaccccttggtcagtgcctatcatgtgggccttccagtccgggcagcccgtgagggcatct

SEQ ID NO: 228671 - DNA, 122 bp, Homo sapiens
tatcgaatgatgttaaaattacatgaaagacatattctgtgtttaaacaaaatccccaagcgtctcctccctgcttctccacaaacaaaaattattttttgacattttctttaaggttttat

SEQ ID NO: 228672 - DNA, 122 bp, Homo sapiens
ttcattttgcagttgtagctgaaaatttgactatttgatacctttagacatgttccaatacgcaggagaataagtaggattatcctggctcctggtttgcctaggatggtcaaagtttatgc

SEQ ID NO: 228673 - DNA, 122 bp, Homo sapiens
atttcatcggatatacagcatattccatttaggatgtgtatttaatgcatttagtaatgacgataaagtgtttttagtatgcttttagtctcttgtaactggggagaagcagtgtttttttt

SEQ ID NO: 228674 - DNA, 122 bp, Homo sapiens
cggctcccagaaggtggggttagaaaacaagagcttgcgaggcggcgccctgtggtccctcgaggaaatagtagagagacaaagagggcctgctcctgggaagccctaaattcgaagccaat

SEQ ID NO: 228675 - DNA, 122 bp, Homo sapiens
aggctgcttaaggttgagggcaaacctcaaagactcggtaaacaatgtaggctttctcttcggcaattaaaaacttcctggtattgtccgggcacagtggctcacgcctgtaatcccagcac

SEQ ID NO: 228676 - DNA, 122 bp, Homo sapiens
gcaggcttgccctggcggcctcccaggttaacacactcccaggtggctgcaccccacaggcgagggctgctcagagtagatgctcaaccaagaggttgcccgtgcccccttccccagccgca

SEQ ID NO: 228677 - DNA, 122 bp, Homo sapiens
ctttcctgctctgagagggaccaggtccctcctccgtagcttttgtctctctattgcctgcgccgtgtcctggactgctcacgggagttctgcaggagacgccggaatatctggaagctgaa

SEQ ID NO: 228678 - DNA, 122 bp, Homo sapiens
cagcaaaggatctgtcgctggccaagcaggtccctggctaaggcactgctagggacagctcgcggcggttcgggggttaattctcggcagccctccgtcacccggtgccccacccccgccct

SEQ ID NO: 228679 - DNA, 122 bp, Homo sapiens
gtggcatgctcttatactcccagctacctgagaggctgaggtgggaggactgcttgagcccgggaggtcaaggctgagatcttgccactgcactgcagcctgggcaacagagtgagaccttg

SEQ ID NO: 228680 - DNA, 122 bp, Homo sapiens
agccctcaggtgtgtaggccgtggacagcttcagaaacagcacggactcgctcaacaccgcgttggcatctccctggtgtggtccccatagttcctccccacacagacgatattcttccccc

SEQ ID NO: 228681 - DNA, 122 bp, Homo sapiens
ccatcacaccctgcaacagctgcagagaaggcaagaggggaggagagggaggacgaaggccgggagagagacagagaatcaactgtaggtggaaacagaagcaaatggatagaacaaggtgc

SEQ ID NO: 228682 - DNA, 122 bp, Homo sapiens
cacagtgccttgacaggtgctacgtgctctttggcacaatttcatttctccttggtttctcgctctgatctggagaaggaaccgcatttagcgtcgtcctgattgttgtcaaatgcagacaa

SEQ ID NO: 228683 - DNA, 122 bp, Homo sapiens
gctgttcccagtgtttctccccctcccctttactcatcccctcgcccaactccgcagtggcgttcgcgccagccccttgagagacatctgagttcagccaatcaccgtgatcccctcgcacc

SEQ ID NO: 228684 - DNA, 122 bp, Homo sapiens
ccgccccgttccgtctagcagcacgtgataggctatccccgcccgggtcatgctattattcgcgtagataaaccaattcctggtcctgtgaaggcagctctccttttccattggggagcgac

SEQ ID NO: 228685 - DNA, 122 bp, Homo sapiens
gtccgctgccatcacaaatcaccacagggatgggaggctcttcttgcaggtattccaagacgatggacaccacgttagggcccccctccaccacgagacccacgaggggcacgccctgcccc

SEQ ID NO: 228686 - DNA, 122 bp, Homo sapiens
caggagttgaggtgggatgggaccgcagggaaaatactgggtgggatgacttaaacttcccggcaccagggggcgccagacactctattttacctaaaggagactggcttctaccgacagga

SEQ ID NO: 228687 - DNA, 122 bp, Homo sapiens
cccacaactcccacgcttgtctgacaggcctacctgggactcctggagctgtcagccgcccgggagaagcacgaggagttctgtgtccccatggtcatggttcccgctactgtgtccaacaa

SEQ ID NO: 228688 - DNA, 122 bp, Homo sapiens
gacaaaaggcaccctacttacatcaacaccctcttttaaatggcatatataactacagctcgagctgttaaactgtcctctacttggaagcctgtctaagacttaaatatcgtggccataaa

SEQ ID NO: 228689 - DNA, 122 bp, Homo sapiens
ccctggggattccagacctgccaggctggacactggttgcttagcaacgggcaggtgatccgtttccatggcagccgagggctccaattcctgtcttggggcagcggccagtgggacacact

SEQ ID NO: 228690 - DNA, 122 bp, Homo sapiens
catgaggcctgcagggcagaagtgaggcagagccagcttcctcatccgttagctattcgccggtggcaggtaggctcatggacacacgaattttccttcatggcattccaatgtccaggcac

SEQ ID NO: 228691 - DNA, 122 bp, Homo sapiens
aggacagtagatttggaggggggagaatgcctaccaaaacaatggttcacaaaggccacacgttatatgaaatgtccagaataggtaaaaccatagagacagaaagccgacttgtggttgtc

SEQ ID NO: 228692 - DNA, 122 bp, Homo sapiens
cacccgtgcccgccccgcctgccccgggaatggccagggccgggagcccggtgcccaagtcgccctcggggtggcagttcccgttaaccttagccacaaagtcaaaggtatttatttccccg

SEQ ID NO: 228693 - DNA, 122 bp, Homo sapiens
ggatagcccggccgatacgccaggcttggccatgcgaggtgagctgtcgcaggatgggctcggttacggccaggtgtgcaagcggacatgcgggtgggcgtgagggtgaacacacaggtgga

SEQ ID NO: 228694 - DNA, 122 bp, Homo sapiens
tcaactattttgcgggggtcatttgcccagatcacagcaggagtgagccaacccttgggccgccatcccgcagaactatgcgtgcatatttctgatgaaattcagatttctcagctagatct

SEQ ID NO: 228695 - DNA, 122 bp, Homo sapiens
gacctgttagatgtctcccaggtcttgagggggttgtatgcacggccatatctttgtcaccggttgcccggtgcgcatcaggacccatgtgctctcaggaagcccgcaggagtgataccagc

SEQ ID NO: 228696 - DNA, 122 bp, Homo sapiens
accatcttggctaacacggtgaatccccgtctctactaaacatacaaaaacaaaactagccgggcgtggtggcgggcgcctgtagtcccagctactccggaggctgaggcaggagaatggcg

SEQ ID NO: 228697 - DNA, 122 bp, Homo sapiens
agttctttcagctcatcataaacatgctaaaaagcttcagccgcggcctgagcccacccccgccctttacacacacaggcagcagctggggccactcgaccccacactctaatgtgcattgc

SEQ ID NO: 228698 - DNA, 122 bp, Homo sapiens
gcatcaagagtcctgggaggccggtggtaatcatgtaggcaccatggaaactgctatgtgcgtttgctgtccatgttgtacatggcagagatgttgtcctcagttatgctcctgtctgtgct

SEQ ID NO: 228699 - DNA, 122 bp, Homo sapiens
cagcctcagagggtgctgttgagccagatgtggaagtgttcctgtaggcaagagatgacccggctgagcagcccagtcaacaagtcccccagggaggtcactgggaggccgggagctatggc

SEQ ID NO: 228700 - DNA, 122 bp, Homo sapiens
tgagagaaacaccctaggaacagccgagcagcatgacagcgggagactggacgctgaccccgaggagccaccacaccaaccacagctgctcgtgcccagacaactgcatgtgacagaaggaa

SEQ ID NO: 228701 - DNA, 122 bp, Homo sapiens
agattcaaattatttcccatgaagctctaaggtctcatataactcagtggatgtagctcacgacttcttcttttgaccccagtattctaagacaaacaccacagccgaagctggaagtgaga

SEQ ID NO: 228702 - DNA, 122 bp, Homo sapiens
cctggggctgcactccgaaacactccactgtaccattcacaaaggcatgggcttccctggcgtcggctgtctacaccgtcgcctggaagctagatgccctgggcagcgaagggcaggtgggg

SEQ ID NO: 228703 - DNA, 122 bp, Homo sapiens
acactggttaatgtgttccttttcaaggttggcaatcaaagtttacacaatacatttcaccgagattttgctctttttgcaagtcagcagaaactggctttttaaagatgctttttttcatg

SEQ ID NO: 228704 - DNA, 122 bp, Homo sapiens
ggacctgggatgatagcagacacgtgggtgagggaaacagggccttgagttcccaggaaacggaggcctggggccctggaagagctgaaccatccacaggaaaactaaataaatgaaaagaa

SEQ ID NO: 228705 - DNA, 122 bp, Homo sapiens
aaaacttcaagggctctgggcatgttttcttcttccctcctgctgaaccctagcacttcccgggtggccctgcacagcttggcaactgtcagtcatgaaacccctttcaatggcattggcct

SEQ ID NO: 228706 - DNA, 122 bp, Homo sapiens
tgggagctcatccccgtacaggctaggaagcagtgcgcatagtcatcactccaggagaaccgcggctcgaccctgaccttccaaaactctcagcagccacagcacagtgagaaaaacaacag

SEQ ID NO: 228707 - DNA, 122 bp, Homo sapiens
gggctaagtgaatcaaagggagacagccccactcaccctgttctgccccagaggactgagcgatccccaccatctgggaagctgcctcaccaggaggtccagctggggctacaggactggct

SEQ ID NO: 228708 - DNA, 122 bp, Homo sapiens
tgcaggctccacaggcttcagctacctctttgccgaagaaggcggcttcttctcagcgcccgcccccgccccgtcctgcgcggctgtttccctcccaccttccagacggcccctcctctgtc

SEQ ID NO: 228709 - DNA, 122 bp, Homo sapiens
cgctctcaggctgctgctgaactgaaagagactgtccagtaggtggcgcgcgggcaccgccgagtacccggtccccatgcagagccagcccctgccagtgcacattctcagaacagagcccg

SEQ ID NO: 228710 - DNA, 122 bp, Homo sapiens
ctgaaaggtttcctgactccctcaacgtgggcgaggagctcttttcccctactcccgtcccgctgcctgtccctactcccgttgtagttctgatcacactgatgtcctgcgtgtctaccatt

SEQ ID NO: 228711 - DNA, 122 bp, Homo sapiens
gcagcctccccgaggggggagcccgaggaggaaggcgacaaatgtcacctgctccggccacgcgaggaacttctgaaaagttctcaggcaactgggtcaaaaggaaactcacccgcggacgc

SEQ ID NO: 228712 - DNA, 122 bp, Homo sapiens
ccatttctagccgtcaggagggcccatgaactaggaaactgaggcttgctgacatctcagcgacacctgggcaaaagcctactggaatccgggtcaggttctgtgggctgccatggctgaac

SEQ ID NO: 228713 - DNA, 122 bp, Homo sapiens
cagggccacaaatgactgcacctgggcttcgctggcccaggcaccacgcgactctaagcgcgcccaaagcgaccctctgcgcaaactacccccggggacgacgtcacccgtgaggtcccgcg

SEQ ID NO: 228714 - DNA, 122 bp, Homo sapiens
cgtgagctcttgcagaggagttgacacgcagaggggctgctgtccaataaacgaaagtgtcggggaaaaactttgcagggcgatctgcattactccaaagtgaacacactgcatgtctcagg

SEQ ID NO: 228715 - DNA, 122 bp, Homo sapiens
cctccctccttctccctttatccccccgcccccccccatgctctccctccgcgggaatcacgtgtcgccatcatactcattgggagtctctgcctcgcctgtcgccacgtttcaggagcaac

SEQ ID NO: 228716 - DNA, 122 bp, Homo sapiens
ccagacccaagtcagagggaaaaagaaacctctccgtctcctccacgcacagccaaactgcggtgaatgtgattcagtgcgctttctagcttccaaaagacatggcaaagcaggcacagaga

SEQ ID NO: 228717 - DNA, 122 bp, Homo sapiens
cccgtgccccgagcgtcacgcgtcacgcctagggtggcttctgcgcccaccttccttcctcggccatgcaggtccttctgagcggtctgcacatccacccttgtctgggggagagagctgcc

SEQ ID NO: 228718 - DNA, 122 bp, Homo sapiens
cctcttagattacattattcacttagctatctcctgtcaggaaaatggaaatgttggccacggtctgatcttggggcagaaccaaagggagaagttaagggatttcatgacggcatcaattc

SEQ ID NO: 228719 - DNA, 122 bp, Homo sapiens
attacacttatatttcttgaggacctagtgctgtgtcaagtactgtgttaagcacttccacgctttttttctttttttttttttttagatggagccttgctctgtcacccaggctggagtgc

SEQ ID NO: 228720 - DNA, 122 bp, Homo sapiens
ctccccaaaggccccctatgtctacagttgatcgtgactgatgtgaccgcgggcgggccacggagcctctgtctgagcctgtatttcatcagtttgatgtggagaaaacggctcgttggtag

SEQ ID NO: 228721 - DNA, 122 bp, Homo sapiens
tctcaaaaaaaaaaaagaaaaaaatctcaggctgcctgctcaaaggaccagaagccagtacggttataaaatctggaatttaaaaataattgttatattcagatgtgaatagctatatgtta

SEQ ID NO: 228722 - DNA, 122 bp, Homo sapiens
ccgatgtcccccctccagacgcccgcgttcctccgtccaggtgcccctgttcccactgctcgcagataggtccccgctggtgccctcgcggagacttggcgccttccactcgaatccactta

SEQ ID NO: 228723 - DNA, 122 bp, Homo sapiens
ttgtgatctctgaataaatctgagatgaagatgaagaatgtagccattctccagaacttgcgatttgcagaacattcttctacctgaccctgctatgttccttgggaatcacttaagacaga

SEQ ID NO: 228724 - DNA, 122 bp, Homo sapiens
caggagctccctgagagcctttgttcctccctaaggcagtgtgccacaaggccaaacatgcgggcacccgcgccaggccaccaggttaccgggggtttccagtctgaccctatcccagtgac

SEQ ID NO: 228725 - DNA, 122 bp, Homo sapiens
ttaagggatctttttccctgtgttactattctttacttgaattaatattattttgaaccccgagcagatttaaacaatggattatcggttcttctgttgtttatcgggagcagaaaatagag

SEQ ID NO: 228726 - DNA, 122 bp, Homo sapiens
agcctgggccttgtttttgctatttccacctaggcatctgccatgcagcagagttaggagcgtgtgggcggctgctgagactcacacaccacagtactggcatccttcaggggcagctggca

SEQ ID NO: 228727 - DNA, 122 bp, Homo sapiens
tgtttccttgtctaaagttgtctctccaccaggctgccacataggggcagggggcacctccgtgtgtctgtgctgcctggaacaggattgtcatgtagcagcagatgctcataaatcattgc

SEQ ID NO: 228728 - DNA, 122 bp, Homo sapiens
gggtgagggcaccatgctactccctgccctcctctttgggatggcgtgggccctggctgacgggtaagcagcccaccctggacccctctgacaagggtcctccttctgccgcatgcccaggg

SEQ ID NO: 228729 - DNA, 122 bp, Homo sapiens
tgtcgatggggtgaccctatgccccatgtttacacctgccgtcttagcacagttattgatcgtgtccattttcactcatgaaagtactccagtttggcaaacaagttaatggtcaccctcat

SEQ ID NO: 228730 - DNA, 122 bp, Homo sapiens
cggagctaagcggctcggattatcctgggcagaccagagacttgaccagctaaacacttccgtcggtccggggcgtggacggggccagatcagcctcctgctctcccgagtcagggccacgg

SEQ ID NO: 228731 - DNA, 122 bp, Homo sapiens
gacccgcggcggggcggcgtccccagctggttcgggctgtgacggggtggccagcagggacgcgccccaggtgggcagctgtggcagagcagcgacccgcggcggggcggcatccccagctg

SEQ ID NO: 228732 - DNA, 122 bp, Homo sapiens
ctgggcatccagagagctgattcttctgaggtttcagagggagaatgaagctcagctgggcggagagccttgctcagatgaggaagcaacagaaacaaactagaacccagctctcctgagtc

SEQ ID NO: 228733 - DNA, 122 bp, Homo sapiens
aatttacacccgctgggctgtttatatccccaggggcccacaaatacgcatctgaagatgcgcccggggccttcgcccctttccaggcttacttctcaacgcaagaagactctcacgtgttg

SEQ ID NO: 228734 - DNA, 122 bp, Homo sapiens
ggtggttctaccttcgctaaaatctaggctcttaggctccatgagggcaggaatttttgtcgtcttgttcacagttgtattctcaacgcctaaaacagcgcttgcaatagtatgtgctggat

SEQ ID NO: 228735 - DNA, 122 bp, Homo sapiens
tgtgcagactctgcacattagctttgctaatagtcctttaccacaggtgttgacatttcacgtggcttgaaatagcccccagcattgttctacatttggacagggctgacatacttaagcca

SEQ ID NO: 228736 - DNA, 122 bp, Homo sapiens
actcaggagatgtggttcctcctccgagcaaaaacccaaggcagagccaggttccaactgcgggacttgcctcatccccactcacagggaagtcacatcctgaagatgccacaaacagctgg

SEQ ID NO: 228737 - DNA, 122 bp, Homo sapiens
cccccacgcgcctctgtgaatgcgtgggctcgctggatttcccgcagggcttgctggccacgctctcccgtcagctgtgtgtcttccgttgcctcccggggacgtttgtagctgctgttcat

SEQ ID NO: 228738 - DNA, 122 bp, Homo sapiens
agggaatgtttaggccgtaggggtggaggacacaggaaacgtaacatttttccttaactgcgcctctcttcttaggccttaaaggggtccccgtgtctctccagtctagagcctaagttcaa

SEQ ID NO: 228739 - DNA, 122 bp, Homo sapiens
ccggctagatatggcgtcctctttgcttgcgggcgagcgattggtgcgtgctttgggccccggcggggagctggagccagagcggctaccccgaaagctgcgggccgagcttgaggccgcgc

SEQ ID NO: 228740 - DNA, 122 bp, Homo sapiens
gtcgcagcgggcagagccctcagtggggctggaaacgcagcgcagcgccgggtcccggtgcgtccccgaatccacccacccaggggtcccccatccgtgtccccgcaagctggcaatttacc

SEQ ID NO: 228741 - DNA, 122 bp, Homo sapiens
gacacacgcaaatctgcaattatcccagagcgctaaacacatcagaggaaacaaaacagacgcgccggcgaatcccagcctccgctgttttcaaaacaagcgcgaggggggtgccgcggggc

SEQ ID NO: 228742 - DNA, 122 bp, Homo sapiens
tgtgggtgcgccgatgtacctccaggtggttcttcctcttgaaggacttgccgcaggtctcgcaggtgaattcacggacacctgggggcggtggggaccgaggctgaggacggtgggctatg

SEQ ID NO: 228743 - DNA, 122 bp, Homo sapiens
ttaaagaaaatgtttcttggcaaagtgtgcatgtgtgcacacacagacacacatacacttcgaaaataattaacttaaaggttttctctcaagtcccttccaagtctaaaattctttaagtc

SEQ ID NO: 228744 - DNA, 122 bp, Homo sapiens
cctcccggactcaatccattctcccacctcagccttcagggtagctaagccacaggtgcgcgccaccacaccgggctaacttttaattttcgtagagtcagggtctcactctcttgcccagg

SEQ ID NO: 228745 - DNA, 122 bp, Homo sapiens
ctcgaaagggatgcaagctaaggaaatagcgaaccaactaggccccagcgaccagaccatcgcctgtgaaaagggtatcaggaacccatgtgacgggatgggtgcggagaagcgcagatgga

SEQ ID NO: 228746 - DNA, 122 bp, Homo sapiens
ttctattaattcctgtttgaagcacgaggccaggagacctaaccttgcagcgggcaccctcggttgagtagtgacaggaagtgaccgcaagggggcgctctgcccttgctctgcgcaggctg

SEQ ID NO: 228747 - DNA, 122 bp, Homo sapiens
gggaaccgaatgaccccctcctattccttatgtcagttgccttttgtctgtttctttcatcgtaagcaggaatctgtccggttcgcggctgcttcccaggcgcccagaccagcgaccagcac

SEQ ID NO: 228748 - DNA, 122 bp, Homo sapiens
aacccagtggctctctctgcagccggcatttagccctgcagctggctggggcttcagggccgcctgtctccaggctctgtgaaactggagaacttttaaagccagcgctgttttatgggtaa

SEQ ID NO: 228749 - DNA, 122 bp, Homo sapiens
ccgcgttgctcagcgatggagtttggggttcggcctccttcggctggactcgggcatttccgttcatggagatgacgcttcggcggccttgcaggtcacttccggcgactttcgcggggccg

SEQ ID NO: 228750 - DNA, 122 bp, Homo sapiens
cttcttatctgccataaaaaccaggcagtccgtgtaagggacgggtgaagcagtgaagaacgctggtcctaagcagtgttgaaacctctgattggttgtgtgtcctgagcaaattctttgac

SEQ ID NO: 228751 - DNA, 122 bp, Homo sapiens
atgtcaaaagtttcaatctctcgctcttgcctttccaataggttctttattctctcgctgcgttccttctgaagggcagccagctcctcttcaatctgaaagaagcacgatgcagttcttaa

SEQ ID NO: 228752 - DNA, 122 bp, Homo sapiens
ctgcggcaagaccttcggcttcatcgagaacctcatgtggcacaagctggtccaccaggccgcccccgagcgcctgctcccgcccgcacccggcggcctgcagcccccggacggctccagcg

SEQ ID NO: 228753 - DNA, 122 bp, Homo sapiens
taataagcttgtactgatttccaatatcacagaatgtatattccacgaagggcttcccgccgaatgcgcacactgaattaatcctatttggatgacagattttacacccatcactattggag

SEQ ID NO: 228754 - DNA, 122 bp, Homo sapiens
tttggatctggcttctctcactgaggagggtgtttattgtccccctgaattcagtgccaccgaggtcccctttatatgctgtggccttgggacggtcccaagccattgcaatgtccaagaaa

SEQ ID NO: 228755 - DNA, 122 bp, Homo sapiens
cgctaaaaatcgccttcaaaattgcttaaaaggcaaactttaacaatgcgatctaagagtcgtagtgactggccaaaaaaaaccgcaattttggggtctaattcgattgtgacgcagttgaa

SEQ ID NO: 228756 - DNA, 122 bp, Homo sapiens
gaggaggggcggctcaacccgcgccgccccggagggtcccggcctccggcaggacagccccgggcccgcgccaagggaagcccccaggcgcagacactcaccgccagccccggagggacgcc

SEQ ID NO: 228757 - DNA, 122 bp, Homo sapiens
cacgcagggctcccgccgccgccgccgccgcgccccctcccccagctctcccgcctccagcgggctcctcacctcagagcagcgcccaagagcccgagaggaatcggtgctgcgctgctggc

SEQ ID NO: 228758 - DNA, 122 bp, Homo sapiens
attttgcatactcacaaaccaattatcacacactccttattctgagcccacaaaaagccccgggcttagccatattgagaactttcctgccttgaggtagggggaccacccccatgtccctt

SEQ ID NO: 228759 - DNA, 122 bp, Homo sapiens
caccaatacagcgtgcacagccgctacaatgtgcaattgtgatctttgtgtaaacgcggtcggtctggggcccgcatgcttataaaaataaagcgtagggaagcacggggcggggcgggaac

SEQ ID NO: 228760 - DNA, 122 bp, Homo sapiens
aggatctggaagaaggacagggaattgctgtaaaaaataatcagacggtggttagcgtaacgtctgctcctgacaggctttcactgagcagcaaatccacacgctccttgcggcctcatggg

SEQ ID NO: 228761 - DNA, 122 bp, Homo sapiens
gcaagtagaactaaaaaacagtaaacaattctcgtcacaaagttataatgctgcattacacgccagtatttttcccttacacatatgtttgtgaggctgaaatattctctctcaataaattt

SEQ ID NO: 228762 - DNA, 122 bp, Homo sapiens
atccaatcagtggcgctggcgcgggaaccgcccaatcaggggcgcagccggagaggagggcgtggcttccgacattccgcggggtctttacctcttgctcccgccagagtttgggatcggtc

SEQ ID NO: 228763 - DNA, 122 bp, Homo sapiens
tttctcagtagtcatgccggaacagcctgtgccttcgtagtacctgtgtcaggggtcttacgaataatgccttgggagaagagatgttaatttgaattctggttccggctttcaagcaaaat

SEQ ID NO: 228764 - DNA, 122 bp, Homo sapiens
gctccagacccagtgtgagctggcctccatctcaggacacagctgtgagcaggccgagcccgggccttggccatagtgcctttcctgtcccttctcactgctgcgtcacagacgttctgcag

SEQ ID NO: 228765 - DNA, 122 bp, Homo sapiens
acagaactgaccctccgcagagagccctgggctcctccccaggcagaactgccactgacacgtgtgtttctacggtttcacgctgcagttgcattcgggaggccgcaagcctggctatcatg

SEQ ID NO: 228766 - DNA, 122 bp, Homo sapiens
ttccttttaaaatgacctaccccaggcatttgtttgggcacacttctgtcctggggtcatcgttcctaggtggcttcggacctgggacttttcctgtatctgcacattgtcgttttatacac

SEQ ID NO: 228767 - DNA, 122 bp, Homo sapiens
cacctgtgctcagctaggcatctcggcctctcattgtgaggctgtgaatggactctgcgccgtacctcttctccaattctgacctggggcagctagcttgggtgtgctcttcccagggctaa

SEQ ID NO: 228768 - DNA, 122 bp, Homo sapiens
cagagaccccgggtcctacccaggcccgggtctcgggaccacgtggaggagggattagcgcgtgctataatccgcagtcaccagcagagcagacagcctctcgcccagaacagggcacccgg

SEQ ID NO: 228769 - DNA, 122 bp, Homo sapiens
cccacccgtccgcaagccccgcccatgccccgcccgagcccggccgcggctagaactccccgctccccagctgggctcactgcgcgtcttccgggcaccccgtcctttcccactgcgccccc

SEQ ID NO: 228770 - DNA, 122 bp, Homo sapiens
tgcatcgaagcattccacttccccgaccacagtctttctttctctgctgtttcgcccaagcgctcccggtatccgtccgctgaagggtgacgttcattgactctggaagtcccctctcatct

SEQ ID NO: 228771 - DNA, 122 bp, Homo sapiens
acacacgcacacgcacacgcaggttacatgaatgggaggcggtagccaatcctacgaggccggcgagccgcgcggcgcactggcgctgggagcagggccgcactccggcgcgggggggcgcc

SEQ ID NO: 228772 - DNA, 122 bp, Homo sapiens
aaacggtctgcaatgttaagccttaaattggcttttggcggactccagccttttacccttcgtttggtagatgttttcacctcgctgtcattaagcagggtcaggaaatggaagggccgtga

SEQ ID NO: 228773 - DNA, 122 bp, Homo sapiens
ccgcctggccctgctggaaaaccacccagacttgtgtgtgggcattgggcgcaaggtccacgaggatgaggaccaccctgactgcccctgaccccccttctctctctccaggcatccgtggg

SEQ ID NO: 228774 - DNA, 122 bp, Homo sapiens
cgtaccaccacccaacactgcggtgggggtgcgggagccgtccgagcgcgtcctgcaccgcgaggagagccgggcctccctagctctcgcaagcccaggaacacagtccgagtcctacaact

SEQ ID NO: 228775 - DNA, 122 bp, Homo sapiens
gagcacagagctggcacaagtagaagcagctcagccgccctgtctgtctcctcgcggcctcgccagccttcgtctcccgccctgattctgggagaaccttcctcagtggtctggcagcaacc

SEQ ID NO: 228776 - DNA, 122 bp, Homo sapiens
gaggcccgagataacctctccaacgcaggctccgaaggcagcaatttagtggcggaacagcgtgttttcagggagcaggagacgtgtggactctgactttaactgttgcccagcgcctaatt

SEQ ID NO: 228777 - DNA, 122 bp, Homo sapiens
ggtctacagagggcagactcggtcggaggagggaagatccccagaagccaatttgggcttcgccccagaaaggtctttaccctcggggccagagctgctcagggaccagggacagagctccc

SEQ ID NO: 228778 - DNA, 122 bp, Homo sapiens
ggcggcatcctggggcggcaggtaccccgtccggtagcgcgaagccgagtcgtcagggcccgtccagtgccctggggccaggtcctgggctaagcaccttcctgtgacccgctcagaggaac

SEQ ID NO: 228779 - DNA, 122 bp, Homo sapiens
cggactgggcttcgccaatcccacaccagctccaaacatcagcctcctcaggctgcagcccgacattctggagggctgttgaccctttcgagttctggaaaaatccctaaatcttatgttca

SEQ ID NO: 228780 - DNA, 122 bp, Homo sapiens
acagagcggaggtgatatcggctcgaccccaaaagacagcctcaaaacactgagaggactcgccgcagacgccgagggacgccacggccccgcggctatcacgttccgccgggcgcctccat

SEQ ID NO: 228781 - DNA, 122 bp, Homo sapiens
gttgttgctgctgctgctgctgccgctcctgccggatgaatcggttctggtgcactggcccgatggcctccagaaggaccgcagactcatccgggtctggaggtccagcctctacagtccct

SEQ ID NO: 228782 - DNA, 122 bp, Homo sapiens
caaagtgactccattgcgggcacagccgtggggctgacgtgagaccccagcctggcaaagcgagcactcggaggcagtgggcagaaagggctcctctcggctctgcagccggaaaggagaca

SEQ ID NO: 228783 - DNA, 122 bp, Homo sapiens
gatgggccccgcgggacggaagcggagagcggaatgtccgctgggctccctcggatgccacgccccgcccaggcagcctgggggcgtctccctgacctggccccgcccaccggagcgaacgg

SEQ ID NO: 228784 - DNA, 122 bp, Homo sapiens
gccctggcagtgctctcgcggtggcctggctctctctctccggcctgaaggagagcaaagcgccccagctgcctagggccaccgctcctgacgaatccgccagccactgcacgacagatggt

SEQ ID NO: 228785 - DNA, 122 bp, Homo sapiens
cgtggctaagcccttccggaagtgacgtcggcttgggggcggtgctcggcggtggcggagcgcggcctgggctcgcgctgggctccgcgcgccccccgcccccctctatgaggcagaggccg

SEQ ID NO: 228786 - DNA, 122 bp, Homo sapiens
gcagccgtccccatgcccgggaagtgaaacacgtgcatttagaaaacgctacagagtatgcgacccttcgcttcccccaggccacacctcgctatgacagcaagaacgggaccctggtgtga

SEQ ID NO: 228787 - DNA, 122 bp, Homo sapiens
gtgattaggttacagcttgatttgtatacattttagggggacagaatttacaggcagaaacgtaaatcagtacacataagatgtgcattgattcagcctggaaaggcaaaatgtctcaaagc

SEQ ID NO: 228788 - DNA, 122 bp, Homo sapiens
aagccacgccccccgcaggccccgccccactctgttcagatctaggcccaactcaggctccgcacctcaaggctccgcccccagcaaggctccgccccaggcccggctccaccccgcacagg

SEQ ID NO: 228789 - DNA, 122 bp, Homo sapiens
aacaggagcgttctcttacagaagagtgtgtagcgcgctcatcaaattcaggaaggttggcgttggtgcagtgccgccccctcatctatggtccacagtcaggtcgccagttccccagtagc

SEQ ID NO: 228790 - DNA, 122 bp, Homo sapiens
tacaggtgcggccagtgcgggaagtccttcatcaagaactcctccctcactgtgcaccagcggatccacacgggcgagaagccctaccgatgcggcgagtgcgggaagaccttcagccgcaa

SEQ ID NO: 228791 - DNA, 122 bp, Homo sapiens
tcatctacttctcttctactactaccgttagattgcatgtctcacattccatttcgtccgcggggactggtaattttttccaaagcttctaaacaatcgcccgccaacttaaagaggagcct

SEQ ID NO: 228792 - DNA, 122 bp, Homo sapiens
gagagagtcaataaatgtatctttatttttgtgtccattttaaccaggtgaggaaaattccgtcaaaaaacccagacttttggagcgagaagatctcatgcagtcattctccaaaagaaagc

SEQ ID NO: 228793 - DNA, 122 bp, Homo sapiens
gtcagacctgacacccagtacaccggccgcaagcgcaagccccgcttctaagtcaccacgcggttctggaaaggcacttgcctctgcacttttctatattgttcagctgacaaagtagtatt

SEQ ID NO: 228794 - DNA, 122 bp, Homo sapiens
agggccagtggcagaggtgtgggatggagccttgaggaaggaaaaatggtaaagattctgcggccaataagctatgtaagttagaagtctcatggcaggcttgaggaagcgggaacagccgc

SEQ ID NO: 228795 - DNA, 122 bp, Homo sapiens
tccgagccaggtgcgggacataatcttgtggtgcgctgttttttaagcccgtaggaaaagcgcagtattcgggtgggagtgacctgattttccaggcgctgtccgtcacccctttctttgac

SEQ ID NO: 228796 - DNA, 122 bp, Homo sapiens
gggcgggcggcgagcgttgctgcagcaggccctgcggtgtggcgaggagctggttgcggccggcggtgccgtcggcccgggagcagacaccgtgcacctggtaggcctggcggagcgcgcgg

SEQ ID NO: 228797 - DNA, 122 bp, Homo sapiens
cctgtggagtcagaagctccggggaggggcgccccgcattttgagctctcggggtgctgccgatggagccgttcgaggagagcagagccaagtgcctgaggcttctcacccggtcccacccc

SEQ ID NO: 228798 - DNA, 122 bp, Homo sapiens
agcgatcctcttgcctctgcctctcaagtagctgggattacaggtgtgagccattgcacccgcccattgcctgtcatttgcatgcagatgctattctaacatgaaaccttttactcaaatat

SEQ ID NO: 228799 - DNA, 122 bp, Homo sapiens
tttgttttataaagtctgacaggaatgtgaagaacaaaaagatatatagttcttgtggaacgtgctggagcacacctgtagtaccagctacagcttgggtggcttagggaggaggctcattt

SEQ ID NO: 228800 - DNA, 122 bp, Homo sapiens
tcctcagatggctgctactctgagttgagtgccattttctccctctatgtcacctccactcgctctggcatgccaggaatgagactctagtgggacccacttttgtaccgtgaagaaggaaa

SEQ ID NO: 228801 - DNA, 122 bp, Homo sapiens
gaacatgaagaaagcatacgggaaaagcgtgtgtacacatgagcatgttcagtgggcacacgcaggagaggggaggatgcatgtgtgctgagcgtgagtgcacagagcagaggcaaggagca

SEQ ID NO: 228802 - DNA, 122 bp, Homo sapiens
ggcacacctgcgcgctcgccgggctgctgtgggtccgcccctccgctcctgcaccgacgccgcaccttcgcctcgagttctcctgtgatcccgtgtttcctggccggagtttcttaccgttc

SEQ ID NO: 228803 - DNA, 122 bp, Homo sapiens
gggcgcggggactgtgaggacccgaacggccgcagacgcgggcgggcccgcggggcgctccgctcggctctagactccgcaccggggcatggcccccgccccaagttctctctgcggccgcg

SEQ ID NO: 228804 - DNA, 122 bp, Homo sapiens
ggttgtctctacacaaatgtaaaagcctggcagcttccccaggagagtgcgggtatgggccgggccgggagagggctggctgttgcgaaatgcccagctcaaggattgaggtcacttgtact

SEQ ID NO: 228805 - DNA, 122 bp, Homo sapiens
ttacctcaacggagcgcaggtattggtcccacctctgcttttcctgtctttgaaaccaaccgatgcacctttcgggatttgtaactcctatgttagctagggctccaaccatggttgaacat

SEQ ID NO: 228806 - DNA, 122 bp, Homo sapiens
agaactcctgagagaggagccccgacttcagagtcccagctccaagcccagggccatgcccgtgtctgcctcagatcgccacctgcaacagccggaacgggaacccggcccccaagatcacg

SEQ ID NO: 228807 - DNA, 122 bp, Homo sapiens
cacacaaacagagctgaagaccaccctgggcacctccttggctggccgcatacctcctggcgggcagctgtggtgcattgtagttgcattgcatgttctggtggtacccatgcaatgtttcc

SEQ ID NO: 228808 - DNA, 122 bp, Homo sapiens
tgaaatatgttgtaggaaagaattcaggagcaaagaaaactgcaggtccaggagtttctacgagtacatgctcatgtaaaggggtttatggaagaaaagttaagacatttttaacaaacaga

SEQ ID NO: 228809 - DNA, 122 bp, Homo sapiens
ctcatctgtaaattagagatgcttgaatacatgactgctgtgagcaaacaaatagaaagtcgcctgtggagcataaggaactatgtgaggatcacaccgacactggaactgccctcaggcac

SEQ ID NO: 228810 - DNA, 122 bp, Homo sapiens
ctcgggggctgcctcgcgtttgttttagcccggcgccaggttttaggcagccaccagaggcggggcgtaagcgctaaagcaacaagacaatagaagcctacatcttgcccgagataattagc

SEQ ID NO: 228811 - DNA, 122 bp, Homo sapiens
tcaaaccacgagccctggagtctccataaaacccatcaactccactcctaggtgtctgcgcgcccaagagaaataaaaatgtttgtccacacaaaaatttacttgaggccgggtgcggtggc

SEQ ID NO: 228812 - DNA, 122 bp, Homo sapiens
aagcacccggctcgccgatcccgcctgcttcaggtagctggggtttgcccggtacgccagcggccctgagacgatgtgtgcccgcagcacgatcgtgtctgttggcatttctgggtgtggat

SEQ ID NO: 228813 - DNA, 122 bp, Homo sapiens
gaaccattcacccttgcatctggctgtgcaccttactcacacgtccctttcatatgtctgcgttggctgttgaagagctcctactgcaagtatgcaagtgtggggagaaaagaaagaaaatg

SEQ ID NO: 228814 - DNA, 122 bp, Homo sapiens
acactggaaaatggggatagtacccaatgggcggggtctttgcgttgtaatattaaatgtcgctctgattcagggcttctcaaaccagcaacatcagcatcacctggggactggctgaaaat

SEQ ID NO: 228815 - DNA, 122 bp, Homo sapiens
gtgagtcggaaatttgtacaaaaatccagtggaggagaaaaccctccaagaatccacctccgtgagtcaaattctaagagaaacgtgctcgcggcgtcttctagtgcaggcctgagcccggc

SEQ ID NO: 228816 - DNA, 122 bp, Homo sapiens
gttcccagacggggcagccaggcagaggtggcgctagacgtctaggtggcacttcctagacggggtggcggccgggcagaggctgcagtctcggcactttgggaggccaaggcaggcggctg

SEQ ID NO: 228817 - DNA, 122 bp, Homo sapiens
catgttctctctccctcacacacacactctctctctccctgacagggattcccaggacaccggtggggcctcttttaggccccttaagtgttaacagcaagaggcctggctgagaccaggcg

SEQ ID NO: 228818 - DNA, 122 bp, Homo sapiens
cctgggttggtgacttccctgtgcaatcaatggaagccagcgaggcagggtcacatgccccgtttagaggtgcagacttggagaaggaacgtgggcaagtcttcccaggaacaggtagggca

SEQ ID NO: 228819 - DNA, 122 bp, Homo sapiens
ttgtagtgttgttgtcatagctaagaaaccattgctgaacccagagtcggaaagatttaccgcggtgttttctaggagttttggttcttacatttacatatgtgatccagtgcgagctaatt

SEQ ID NO: 228820 - DNA, 122 bp, Homo sapiens
gccttacaggacttagtgctacatgagggcttagaaaggacagactggaagcgtgtacggcgggtggggattggcaaaggggtggaatctggatattagactattcagcctgaggttaagac

SEQ ID NO: 228821 - DNA, 122 bp, Homo sapiens
tgctgccgtggtcctggctgtgcctctgtccctgtgtctgtttccagggtgccccttacgcgtcagcccgtgagggcaagtttctgtctgccccttccccagcggtggcctagtgcttggaa

SEQ ID NO: 228822 - DNA, 122 bp, Homo sapiens
ttgcgggcttgagaggggaccctcggctgggagagagcctcgggaggacgaagaggaggacggtttggcggagaagccacccctggccctcgcggctccccctacctattccatcgctcccg

SEQ ID NO: 228823 - DNA, 122 bp, Homo sapiens
gcgaggagttcctgtaatctaggctgatctagagagagaagagcgcggcggcactgtacacgccctgcaccttgtacagcagctggttgaggtcccagctggttgaggtcccgcgacccccg

SEQ ID NO: 228824 - DNA, 122 bp, Homo sapiens
atcaaattgactttcatgtatccaagtatttgccttttgtataatgctacctaccatacacgttcttgtcagttttttatatacttgtgattcagtacttccaaaatatatgcagaatgact

SEQ ID NO: 228825 - DNA, 122 bp, Homo sapiens
cggaggctgaggtgagaggactgcttgagcctcggaattaaggctacactgggctagcatcgtgccactgcactccagctggagaaacagagcgagactctttctcaaaagaaaacagaaaa

SEQ ID NO: 228826 - DNA, 122 bp, Homo sapiens
agccgccgggagtgccagtcacccagtgctctgctctcctcccccccaacagtctgcacacgcagtttttatttgtgtacttttctcaaggctctaagctgttggcaggcattactcatgac

SEQ ID NO: 228827 - DNA, 122 bp, Homo sapiens
ctcactgttcacagcgtaaatccagacccatagtgagaggaagaggacccagggagagcacgattatcccccgcacacttcaaggggtgatggggtgggatctctgccaatttctcttattc

SEQ ID NO: 228828 - DNA, 122 bp, Homo sapiens
catgctcagagttccggggcacggtttccccgcccctttcaggcctagcaggaaacgaagcggctctttccgctatctgccgcttgtccaccggaagcgagttgcgacacggcaggttcccg

SEQ ID NO: 228829 - DNA, 122 bp, Homo sapiens
ttgttgtgaaggaaaacagttgcgggtgttagatggagggagatataaggccaaggaatgcgggattgtgctgatgtcaagaaaaacattttaaaaaagggggcagatttgtgtgggagggg

SEQ ID NO: 228830 - DNA, 122 bp, Homo sapiens
tcctcaggtttcaagcagtattataccaatgtccagatatacaagacttgacccttcttccgagtgtttgctatcaacattttctttcatttcccaactagaaactcctaggaaaaggacca

SEQ ID NO: 228831 - DNA, 122 bp, Homo sapiens
gaactaacacgcatccttagcatgttgtttataagtaataagctcgcataaacccgccagcgctgtggggctgtgtgctaccggcagcccgcactgaaccagctcctgtattctgctctcct

SEQ ID NO: 228832 - DNA, 122 bp, Homo sapiens
gtcgcgctcgagccccgtttccagcagcatcgcggccaccaggccgagtggcgcgagacgcgctcctcctaggtcagcgtcccctggagggttcggggctcccaagtcccgccgcgtcgtgc

SEQ ID NO: 228833 - DNA, 122 bp, Homo sapiens
gcggctcccagagcctagtgctgcagggggccgagccccggcctctcgtgcttagtgccgcggtggccgccgcctccccccgctacacttccgcaacggagctgcatggagcgggccgaccg

SEQ ID NO: 228834 - DNA, 122 bp, Homo sapiens
gggagatgccgttcccggcgcagcccgtgggtcgcccgccccttggacgcactggcgctgcgtcgggagctctttgtccgagacaaagcgatttagccccggccgctctggccggagtccct

SEQ ID NO: 228835 - DNA, 122 bp, Homo sapiens
aggcacagaatggaggcttggaatctcctttgctttagtctgaaactccgagttccagtgcggtgctcctcctttagcatagggtagtgagtgtattttccacattaaatttggggcacaga

SEQ ID NO: 228836 - DNA, 122 bp, Homo sapiens
cctcctggtgggcaggcagggctggccgaggactcctgggctcactgcttcctggctccccgggataccagctctgcccttgtatttataagaagaggaggatccaggaagtcccagggcag

SEQ ID NO: 228837 - DNA, 122 bp, Homo sapiens
tggtgctttctgggaggcataggagtttccatccttaactggtacccatcggagaacaggcgtatcccttagcccatgatcctgtctggatgctttatgtgaatgcaaggctccaactcttc

SEQ ID NO: 228838 - DNA, 122 bp, Homo sapiens
ctgcgctctgtggaggcctggggttctcttacccagaaacatcttcatctccctctgcagcgggagggcctgctggggaaagtcccgaatcctctggcccagctctggcgacacagccaccg

SEQ ID NO: 228839 - DNA, 122 bp, Homo sapiens
caagttcctgactggtgtggccgtggtgctgaccgaaaaataccgctgagccctgtgctgcgcaggccttggtctgtgcctgtcaataaacagaggcccgaaccatctgcccctgcctgtgt

SEQ ID NO: 228840 - DNA, 122 bp, Homo sapiens
aacacatgttaaagatttcatttgactcatatgatgagggaaccagacagatgttttcaccggtccaaaggaaaaatcaaacaagcacaaattatatgcagtaaaggaaggttgagatgaac

SEQ ID NO: 228841 - DNA, 122 bp, Homo sapiens
tggtgggtacacggaaccgaggtgagcctcccttgcgttgcggaggtgctagccttgtgccgtccgttcttgtccacgtctgtgcaggagaacatcacccggcccacttggttgctgtgaat

SEQ ID NO: 228842 - DNA, 122 bp, Homo sapiens
gggttttttacgttttaatttccaggtaagttgcatatgtcctgcgaaacggcggctcctcgccacacacgcgccgcgccggccgtgaccggggaatagcgagtggggagagtaatggccac

SEQ ID NO: 228843 - DNA, 122 bp, Homo sapiens
cgcgggtccggccctgaggcggcctggtgctgccccctgccgtccagcgggaatcgcaaccgatttcagagacgaaatctaagagtaactgtcagatgattaggagggttctcccagttcta

SEQ ID NO: 228844 - DNA, 122 bp, Homo sapiens
tggggtcccgcggggtgttttcttgaaggtgactcacccaacggtgtgttcgtgattgggcgcattttggcctaggttaccctccagttacaagtccttaggaaggcaccatggcagagccg

SEQ ID NO: 228845 - DNA, 122 bp, Homo sapiens
gggcgccgttagcgccgtggcatcgctgttttgttgttgggtcacgagtgcgcctctgcacgcaggcgccgccgccgcccgggagttgtgtgcagagctgacttttggagggccgagttgca

SEQ ID NO: 228846 - DNA, 122 bp, Homo sapiens
gcagggctctcaccaacatctctcacccccacccactccccctggctgcggcagtcccagcgggaacccgacttaaagggacagccgccctccagccagccaaggctgcaagcgggaaccgc

SEQ ID NO: 228847 - DNA, 122 bp, Homo sapiens
tgagcacagggtgctgttggagctgttccgtgaacctggtgactccagtagcagctcccacgctgaaatcagaaaatgaaatctatgcaattcctctgcgatttcctttagccactcccatg

SEQ ID NO: 228848 - DNA, 122 bp, Homo sapiens
ccagggggccgacccggacccggccgcctccccaggggccagaggacgcgcggctgcccgcgatgcccggaccaggcccccggccacccaacccctgccccgggaccccaggccccaggaga

SEQ ID NO: 228849 - DNA, 122 bp, Homo sapiens
tgttaaagccatagggttattcttctgtaagctctaggaaaacatgcaccccttggggcacgaggatctttgttcacaaagtgtatgccagacctccatagctctgccccctccctgcactg

SEQ ID NO: 228850 - DNA, 122 bp, Homo sapiens
gtagcgatagcagcggccgtggaggtggcgttggggactgttttctctcggaggccggagcggagccgcgtctgactgaggcgggcagcaagcggccccctcgctccctccctccctcctcc

SEQ ID NO: 228851 - DNA, 122 bp, Homo sapiens
aagacaaatagaaactgcctgcctggaaagggttaggcgttctccattcggtaccggagtcgtgcagcagagcttagtgtcatctgacacattctgcccctggtggaccagattcccaaaca

SEQ ID NO: 228852 - DNA, 122 bp, Homo sapiens
tctgttccattggtagggtgacatggccgggctcctggagcccccatcttgccggcctgccggatcgcggtgtctctgctaagactcgctgggtcttttgtcttcacttccactcgatgttg

SEQ ID NO: 228853 - DNA, 122 bp, Homo sapiens
ccctgtggtccccttcttctccacagtcatgaattgggaagaggcagtgggcacttgacccgtataaggaaaaagcaaaacatgaaggcaggattgccactccaggagttgggaaactgggt

SEQ ID NO: 228854 - DNA, 122 bp, Homo sapiens
acggcacctctgtcagatgaaagggctgggtctgcgtccagccaggcaatgaagatgagccgccaatattctaggaagaaaagcgggggtgggagtcaccaaaacaagtcttctgaaaactg

SEQ ID NO: 228855 - DNA, 122 bp, Homo sapiens
cggaaacgccgtcctttcagaatcagcgctggcccttccccaggtgatgagagaagagagcgaggaggaccaaagcggaagcggatagagccattcttttcggggcaaatggccacacaagc

SEQ ID NO: 228856 - DNA, 122 bp, Homo sapiens
gctcagggaaggaggcctgagggccgcgtgcagcgggcgggcagctgggtgggctgggggcggccgcgcggcgtcccggagcctcgggccgcccggagccggcgggcgggcggaggcggagg

SEQ ID NO: 228857 - DNA, 122 bp, Homo sapiens
cctgtcaaaggggagctacgaccttgacttccaggaaggtgtcggggtagatgcttgccccgctgccctcctgggaggaaagatccacaagtcatcgggattagcctgtcccagcttctttg

SEQ ID NO: 228858 - DNA, 122 bp, Homo sapiens
accttcctttgagggtcgtgttcctcggttaatatgtagatttcaccattcctgagtgcccgtaattcagggaaacgcagtaatttgataacaagaaaaggtcagcctccctcgctcgaccc

SEQ ID NO: 228859 - DNA, 122 bp, Homo sapiens
agctgcacggagctataggtgctctgaagtcagacagtgcagccaagccagtgccttcgccgtccccattgaggaaggagagcctcaacattatttttaaacatacagaaaagttgttttcc

SEQ ID NO: 228860 - DNA, 122 bp, Homo sapiens
ttgagctaagggccgggtgatggggagatcagcctggaccggattatccagtgggcctgacgtgaggtcagagggatctaggaggaatcggaaggagagaagatgatgtgatgatggcagta

SEQ ID NO: 228861 - DNA, 122 bp, Homo sapiens
tgcgtggcggggcgggtgggcacgcgggagcgggggtggcagcgggcaggtgggcacccccgccgacgccgtcccgtcccccaggccgcgacggagggttctggtacacgggcagccacggc

SEQ ID NO: 228862 - DNA, 122 bp, Homo sapiens
cgagagtcaccacaaggccaaaggcaaataatgtctccatagaatcactttccaatacaacggctcttttcagagccacctactatttctgcgggagagctgggccactggttaaacatttg

SEQ ID NO: 228863 - DNA, 122 bp, Homo sapiens
gggctccttctgctccagctcccaggactcgtgttctgtgatgccgtggtcttgtcttcccgccagcctccctaattagatggagattgagagctggggctgtattgcttgtctgggtgtgc

SEQ ID NO: 228864 - DNA, 122 bp, Homo sapiens
gaacatttaattccatattaatacaaggggtttgaactggacatcctaatgatgcaattacgtcatcacccagctgattccgggtggttggcaaactcatcgtgtctgtcctgagaggctcc

SEQ ID NO: 228865 - DNA, 122 bp, Homo sapiens
gtgcagggcgcacaccgcaatgagcccgtgtcccctccctccgcctctactcccgccccgcggcaccgcgtgtgcaggcagctcccacccacttcccgtcagcccgggccctgcaatctgca

SEQ ID NO: 228866 - DNA, 122 bp, Homo sapiens
aggagcttactgtgcgctcaactcttttcatgttatatgatctaatgtgagcatctatgccggtggatttcacatccccgtttcacggacgaggacacctccggtgacctgcagggaccccg

SEQ ID NO: 228867 - DNA, 122 bp, Homo sapiens
ctgagccctgctggttaatgatccaccactcccactgtttggccccagtccacaggcccccgctttagatgagcctcatcacgcaggtgctagggtctccactcacttcccaaagcgaccga

SEQ ID NO: 228868 - DNA, 122 bp, Homo sapiens
tagaaccgccggtcgcagtggtcacaggggtgcttcttctccttggcaccgcctgctacccggcgtgagtgggccttcaggtgctctagcagggcctgggtactctcaaaggtctgcaggca

SEQ ID NO: 228869 - DNA, 122 bp, Homo sapiens
tggggtggggagccgagccttctaaataaagctgttacagctgcgggtcctggggcagcccgaaggccagaaggggcgaccctgggacagaggccgcgacatccctcgggatccccactgag

SEQ ID NO: 228870 - DNA, 122 bp, Homo sapiens
agacatgaaggaccagaaggctgaagcaacctgcccaaagccactatgctggcgggtggccgagtttgggtttaatccaggcccgaacctcagttccctcaagataaagttggggtgattat

SEQ ID NO: 228871 - DNA, 122 bp, Homo sapiens
ggattagccagcgacctaatccgccaagctatgcaaaaggaggcctctgctgacccctggcggtcaccagccggagtctggctgcgcggtgacccaccacacgttgcccagccgtgtggctg

SEQ ID NO: 228872 - DNA, 122 bp, Homo sapiens
gccagagttggaactgaacaagccagcaaactggaaacaccagtgggcacagacaaaaatcgccctgacaaaagcctgctccccacagccaaagggccagcaaaagtcagcctagcaagaca

SEQ ID NO: 228873 - DNA, 122 bp, Homo sapiens
caagatcaagtaacagagaactggggagggagaaagttctcattgcaggcacaagtacaccgccactttgtgcaaggtaaagagggcttacacacactcagttttccacagagttctagtaa

SEQ ID NO: 228874 - DNA, 122 bp, Homo sapiens
gcccggagacccccgagctggggaggggaggggactcccccggactgcctcaggggggcccggccatggggccgccctgctcgctgcccccagcccccggaccccgctgagcccccggcccg

SEQ ID NO: 228875 - DNA, 122 bp, Homo sapiens
ccgggagcggcggggctgagactgtgcccgcgggcactgccatcccgtgcatggagagggcgcagagcccgggggtagggcgggccggggaacccgatcctccttcatccgcgcaaaggccc

SEQ ID NO: 228876 - DNA, 122 bp, Homo sapiens
cccgagatgatcttgctgcacctcaatctatagcatcctgtattcccatcctttgagttccgcttctccttctcccccggcccctagatggcccttccctgacctagaaagagggagacaga

SEQ ID NO: 228877 - DNA, 122 bp, Homo sapiens
gggtagggtgggagcaagatgtccaggttggaaaacagtggaggcatcttctgtgctgggcgaagtagggtgggccctaaatgggaagattggtcgcacagtagaactggaggcattagaag

SEQ ID NO: 228878 - DNA, 122 bp, Homo sapiens
ctgggggcttccagtatgggagaggcctccttgggaggctcccagcattttgtgttgtctcgccattcttctctacctgcctcaacgtccctctgagtccgtgcagcccgcccacgccaccc

SEQ ID NO: 228879 - DNA, 122 bp, Homo sapiens
aggtgcgggcaagcctggtgcggcatccgcacgtccctgtcccatcccccacgcagagcccgaccccaccctgccaggcccacctgtgtagctcatggtggcgggcaacacaacatccgacg

SEQ ID NO: 228880 - DNA, 122 bp, Homo sapiens
ggttaaggctcatttgctaaggctgaacattgagtttttgaagcattcaccaagcatgcacgcttgtgttagcgacttccatttcttctgctagacccacttggattctcattttccccata

SEQ ID NO: 228881 - DNA, 122 bp, Homo sapiens
tggcccagtagcacccctttttctccatgagctgctggtgggttcccccctcccggatagcgcctccttccagaaagaggatgtggtcagcctgctccaccaggctgaggtgctgggtgatg

SEQ ID NO: 228882 - DNA, 122 bp, Homo sapiens
agggtatatgagagggtgaagacaaacagtcctcggctttgcttaccaggagagagcagtcgtaggtcaaggctggctccaaccctgccctcacacctctaggggtctctctgcagccctgt

SEQ ID NO: 228883 - DNA, 122 bp, Homo sapiens
acgcgagttcgaggagcgccacatcccgggcgccgctttcttcgacatcgaccagtgcagcgaccgcacctcgccctacgaccacatgctgcccggggccgagcatttcgcggagtacgcag

SEQ ID NO: 228884 - DNA, 122 bp, Homo sapiens
agtgtgcagctcctgggcccggctcaggcccgtcgcggaggcgcggcgcaggggagcgctcgggtgggagtctcgctcctccaccagtttattgcgacgtagcatccaggcctaggcctccc

SEQ ID NO: 228885 - DNA, 122 bp, Homo sapiens
ggtgacccacctgcctcagcctcccaaagagctgggattacaggcgtgagccactgcgcccggctgtaaagtagtcttaaatgggggaatatccattactacaactgccacagcaggtgtat

SEQ ID NO: 228886 - DNA, 122 bp, Homo sapiens
ttggccaccaaggatgatagagatctcatctggtcatttgtgagctgcctaacgttatgccgttgccctgcagaggtgactcgctactacctgtattgcagccagagtggaagcagcccctt

SEQ ID NO: 228887 - DNA, 122 bp, Homo sapiens
agagaagtggttagaccttcagtgtgttttggaggtagcactgacaggccaattttaatacgtctaaagctgtgctgtccaatacaatagtcatagctactgtcgctatttatttacttatt

SEQ ID NO: 228888 - DNA, 122 bp, Homo sapiens
tacaatacgggaacattttccttatgttgagaagacctcagtagaattcatggaggatgtcgaatgcaggaatggggataatatagcaacaagctagtccatgcaggaacatttaaagagtt

SEQ ID NO: 228889 - DNA, 122 bp, Homo sapiens
cacctgtgttcccgtgagcctgtgcgttcccgtgaatccctgcattcccgtgaggacctgcgttctcaggagcctctgcgttctcgttagcccctgcattgccgtgaatctgagttcccatg

SEQ ID NO: 228890 - DNA, 122 bp, Homo sapiens
gccaccctggttttctgattgccgcaactgcggctccaggtgctgagtgcacagccactgcggcactgtccgcagctgcgcgccgggctcagacggcattatttacggtacagaatactcgc

SEQ ID NO: 228891 - DNA, 122 bp, Homo sapiens
gaggagcagaggcggaaggtcccggcggcggcgaggatgcgccccagggcgggagcgggacgctccactttaccctggctgcccgcaacgggccaggcctgccgtctctacctctctacctg

SEQ ID NO: 228892 - DNA, 122 bp, Homo sapiens
cgccgcctcccgcgctgctgcgccgccaggcaacccccccccccccaccccgccccgagacgcgctctctgcgccgcaccaagtccttggaaatttccacggcggcccgggaccgctatcct

SEQ ID NO: 228893 - DNA, 122 bp, Homo sapiens
accaggccaggctgcacgctggggctccttatatacccttcagagggtgttgtgggacctcgtctcctcccctaaagcaaagccaactccttctgccttcctgacaaacacagctgcctgca

SEQ ID NO: 228894 - DNA, 122 bp, Homo sapiens
tgttctgcagggcacgtggcgggggtgtgcgatccaggcccacacctgcatctatcaatccgggctcagttcaagcctgttgtcctgacttgggtctgtccagggaccttgccagccctctc

SEQ ID NO: 228895 - DNA, 122 bp, Homo sapiens
taatgccttttctcacctgtcatctcacattttcccttccctgaagatctagtgaacattcgacctccattacggagagtttcctatgtttcactgtgcaaatatatctgctattctccata

SEQ ID NO: 228896 - DNA, 122 bp, Homo sapiens
aacactcaactacttccaggggccatgtgaacagcataaatgagcaaagcaagggaaatgcgtgggtagaatacattcgacagtggtgaattctggtttcaaaatacactgcagttaaagga

SEQ ID NO: 228897 - DNA, 122 bp, Homo sapiens
cttcctttccatacagcaccggcaggcaccggtgtgaagggtcataaaaatggcgctggccgctcgtttgctaccccagttcctgcactctcggtcgctgccctgcggggccgtccgactcc

SEQ ID NO: 228898 - DNA, 122 bp, Homo sapiens
gttctttcctgcgtgccttctttcctgcgtgcgttctttcctgtgtgcctttcctgcatgcgttctttcctgcatgccttctttcctgcctgctttctttcctgcgtgcgttctttcctcat

SEQ ID NO: 228899 - DNA, 122 bp, Homo sapiens
aagagagcaagggcaagcgccgacccggagcaggaggagtccttcagagcttcacatctccgtggccacaactagagtcccaccactttgatctgccttttagataagtattttttaagaag

SEQ ID NO: 228900 - DNA, 122 bp, Homo sapiens
acacgttttcttattgccaaaaagggtggagggaaaggacaggaagtttttttaagtacacgcacacacacacaaagattgggactaagtttttctggactctcaagggttaaataataggt

SEQ ID NO: 228901 - DNA, 122 bp, Homo sapiens
actctgagaattcggtgcgagaaaatttggttagctggggtctggagcaggccaagcccccgcacaggagagccgctgtgagcggcgttatttgtctggacagcccatcacgctgaccttgc

SEQ ID NO: 228902 - DNA, 122 bp, Homo sapiens
gagttatggattttgaaaacagaaatggattttttttccttatggataagagaaacaatgcggtgatgactaataattagcatggcttccatgctgggacagtaacaggaactggtagagac

SEQ ID NO: 228903 - DNA, 122 bp, Homo sapiens
atgcccttgggcataggtgtatgctgattagcaggtttaatttgacacagataaagaacacgaagaatttgcccagaggcccattgaccccccctgctggctccatatctgaaggaaggatc

SEQ ID NO: 228904 - DNA, 122 bp, Homo sapiens
tgacgcttctttgggggcgggctggagttttctggccgtgaatggcagagcgctaatggccgcctccaatgtggcccaatcagaaagaaaggaaggctgggaactaagaagctattggttgg

SEQ ID NO: 228905 - DNA, 122 bp, Homo sapiens
caccccgctccagatcccagagcctccccgggcccaaaggaccccgccctaaaccgccggcgccggacccactacaaatcccagcaggcaccgcgcgcccgcaacatgccagcctacgctta

SEQ ID NO: 228906 - DNA, 122 bp, Homo sapiens
gaaaacaagaagaactcaggggctcacttaaaagcaagctcagtgtggggtctccaatgtcgtgcagggaagctgctagtcaaaacttgctaatttgaaatgggttcactgactccttcttc

SEQ ID NO: 228907 - DNA, 122 bp, Homo sapiens
cccctttctctcggccggtcccggtgatccctcccacccccggtccctccactcccacctcgggccgtcccggtcccgtcccaccccggagtgccctcaggacacccctcggacggcccctc

SEQ ID NO: 228908 - DNA, 122 bp, Homo sapiens
tggcaaaagcacctaaaccaagtgatcaaagttagtatcacaaatactagggcaaactgacgttgtgtgcctctcaatgtgatgttttaagaacagatcagcatttatgtagtattcctgcc

SEQ ID NO: 228909 - DNA, 122 bp, Homo sapiens
ccagcagatcctaccggctgcacctcggaaatagttttagcacttgtccctcggcctccccgctagtccggatcagcctgatccttgctgggtcgctcctcacaggtcccctgctcgtggac

SEQ ID NO: 228910 - DNA, 122 bp, Homo sapiens
cagccccaagaccctgagtgtgtgacgggtcccgccagccccgagaccctgagtgtgtgacggctcccgccagtcccgagaccccacgtgcatgtggccacatgtgtgacaggtcccgccag

SEQ ID NO: 228911 - DNA, 122 bp, Homo sapiens
tctgtgttttacaaatagaagctcagagcttctgtcgcccagtccttgcatgactcatggcggtggccacacgggtttcagggataacgggatgtttagaaaatcgctgcatatcggagttt

SEQ ID NO: 228912 - DNA, 122 bp, Homo sapiens
ccgggggcccctccttccctggcgggcagggccaggcccggctccgtgcctttcccattgcgtttgggcaaggtactgcctctgctgccgctgtggggaaccaagaaccacacccaacccag

SEQ ID NO: 228913 - DNA, 122 bp, Homo sapiens
atgaagatgactcctgccagccagcaggccagcccggcagagccagcccacagtagctcgcgcttggcaatgggcacacagcggcctggcagtacctccatcatcccttgggcagggtggga

SEQ ID NO: 228914 - DNA, 122 bp, Homo sapiens
caaggatttcttttttggggagctcggctcttcagacgcgagtctgccgatgctcccggccgaatagaccacttctttaatccggtgtctgaggagttttggctgcggctggtcctgctata

SEQ ID NO: 228915 - DNA, 122 bp, Homo sapiens
tacgccttgttgcgtcactccacgaacgacggcggctggccggcaacattattagccgaacgcgccctgaaatctgatacacagttgtgccggcattatctctaggatccaaagggtggtct

SEQ ID NO: 228916 - DNA, 122 bp, Homo sapiens
tgcctgctagaaatcatctacccgcgtgttcctttcccctttctggggcaaaagccactgcgggccatgtacccaaataaacctcttaatgcgtttgttaaaattagtttggacatctgagt

SEQ ID NO: 228917 - DNA, 122 bp, Homo sapiens
cgcccgagcctggggcctgcgctcgccggccggctccgcaagccgcgtcccagcgccccgcgactgcgtcaccggccccccgcacgtaaccacagctgcctccgcccgcctcgggcccgggc

SEQ ID NO: 228918 - DNA, 122 bp, Homo sapiens
cgcgccggggtccgggatccccagcgagccctcccgcgtcgcccgcgctgtgcccctcgccgcggtcgccgtttcctagaacagctgcacctgcagccttccaccctgtcccgtcctgcaca

SEQ ID NO: 228919 - DNA, 122 bp, Homo sapiens
gtttgtaccagattatgtacctaaatttgtatcaactccataagcattataaagactcttcgttgcttatattttccttttctcattgtttaatttgggggaataaaaggattcatttcaga

SEQ ID NO: 228920 - DNA, 122 bp, Homo sapiens
gcgcgcgggcgcgactcggcggcggcgtcttttgtgagttcagtgagtttattgcgggcccggcgctgggggctccgggaatggcgggggaggcgcgcgggagtggccgcggggagcttcgg

SEQ ID NO: 228921 - DNA, 122 bp, Homo sapiens
tcacaggaggggacatccaagctgaccacactggaggagcacagtgcttcccaggaccttcgtatcttcaaagaagtaaatgatatgagaaaatttcctggcatgtccctgagcaggaggtg

SEQ ID NO: 228922 - DNA, 122 bp, Homo sapiens
aaagggcagtgatcccggccatgtagcaatgagggtgaccgtccccctcacaccccacctcggcagccaagcgtgccagggtttatttttaccgggggctttattcttccattgagccccag

SEQ ID NO: 228923 - DNA, 122 bp, Homo sapiens
acctccgcctcatgggttcaagcaattctcctgcctcagcctcctgagtagctgggaccacgggtgcatgccagcatgcccagctaattttttggtagagacagagtttcactgtgttggcc

SEQ ID NO: 228924 - DNA, 122 bp, Homo sapiens
cgaggactgtggcattgtcaccttcacagcagacagagctgccaggccatgatgggctggcgacagcccggctgagcttcagtgaggtgccaccagcacccgtgcctccgaagaccgctcgg

SEQ ID NO: 228925 - DNA, 122 bp, Homo sapiens
cctccagttcccacagtaacaatcgaaagccacggttgccctggagacgcgggggcggggcgcgcggacggcgccggcgcggggcgggctgacgtcagggccgcgggggggcgggcggggcg

SEQ ID NO: 228926 - DNA, 122 bp, Homo sapiens
gaactgttggacactcccacaagaactgagtggccctctgggcagaggctgggccatcctcgtcacccttctcagtgtcaccttgcctggtacacagactccatccacctgtgggatggtgt

SEQ ID NO: 228927 - DNA, 122 bp, Homo sapiens
taagcaaggaccttagaatccactgttgtacagggctggcatatatacctgcactttgcacgttgtgaagctctgggtataaaagatgagtaaatcccataacaacatgttgggaagccaca

SEQ ID NO: 228928 - DNA, 122 bp, Homo sapiens
caccagcagccagtcaggaagccctgcgttcatgcttccagccattgtcggagtgtcagccgtcacaaggcacttccagccagtcgcaacggcgggtcgccagcgccgcagtagctcgcgcg

SEQ ID NO: 228929 - DNA, 122 bp, Homo sapiens
gtgcagaatgcccaggtgggcatgggcctcggtctccccagactgcagggagctgggttccgttccacggggaccagctgctgttcctggtgcccccaaaccacaggcagggaaactgcggc

SEQ ID NO: 228930 - DNA, 122 bp, Homo sapiens
gcaacggcagagaggttgaggcgctcacccaaagtctcactggaatagccgtttcccagacgggccccaagtagtgcagagctgaggcaagaggcggcctggatgccagagaccctttggtt

SEQ ID NO: 228931 - DNA, 122 bp, Homo sapiens
cactgcccaggagccagaccaggaatgcaaggtgacgcctcgtaagtgtcattgtgaaagcggagccagctccgtgccaatcccctgcctatttcccgttcttgcctgaagaatcccctccc

SEQ ID NO: 228932 - DNA, 122 bp, Homo sapiens
ctgcctgtcctgagttggagatctgaccgggaatctgagcctaacccaagtttcccatcccgcttccacgctctgaatcaggcttccgacctgacacaccacttcctccctctcccctcggc

SEQ ID NO: 228933 - DNA, 122 bp, Homo sapiens
ggtggcacctggtccagctggggcgctgggtgggcgactgcgtcctgagccctggggaagcgtggggagaaggctctgcagcgaggcagaggcgggaggccgaccacaggagggagaagggc

SEQ ID NO: 228934 - DNA, 122 bp, Homo sapiens
cctggtccccggggggggagtgatgccaggatcccgagccgacctccgccaggggaacgccggtcagtgcctgcaggtcagatcagtgctgtaaccctgtaacgaacagggtgtctctccca

SEQ ID NO: 228935 - DNA, 122 bp, Homo sapiens
ttctcctcggctgtggagccctggtggggggtctgcgcccggtcaccatgacgacgccggcgaatgcccagaatgccagcaaaacgtgggaactgagtctgtatgagctgcaccggaccccg

SEQ ID NO: 228936 - DNA, 122 bp, Homo sapiens
tgcatcatgacatcaagtttgaaaaatcaaatgaagtaaagggaaccaatagcatggatacgtgttcaatatttgaacaacgcactgggggcaggggaaatgtgtgcaagagccttattatg

SEQ ID NO: 228937 - DNA, 122 bp, Homo sapiens
aaacagctgttgtagggctgcctaaaggtccgaaagagacacccctcggcttggaaataacgaggaatcgtcgtgcactgaaacgtgaggagagactgcagggacccctggagctggagctt

SEQ ID NO: 228938 - DNA, 122 bp, Homo sapiens
tgacgcgaggcgctgggtccgggcgctgcggcggagcccagtgaaagtggtgtttccttccggagaggtggtggaacagaagcgcgctcctgggaagcagccccgcaaggcaccatctgagg

SEQ ID NO: 228939 - DNA, 122 bp, Homo sapiens
ccaggttcatcccgggaaggtagcaagacagcgccccctttgcccagctcagtgaagggccggggcagctgatgtggcctgcgcacagggtgaggcagcaagggtaagagcttccagaactc

SEQ ID NO: 228940 - DNA, 122 bp, Homo sapiens
caataaataccagcaactttcaaaatgctgatacagccgtccaccacatagaatgccctccgcaaaagaaagctcattactatcactcagtgatgtcatcaattacctcatagactgagcag

SEQ ID NO: 228941 - DNA, 122 bp, Homo sapiens
aaatgaacaatctcctgtcttcacagccaggtgcacccactggttctgaatctggattctcgaagcaaaatctgcatgaaaggctgactctatcattggcaagtgaaagttgtgcttcttta

SEQ ID NO: 228942 - DNA, 122 bp, Homo sapiens
ggggatatgaggccccccgcgcggccctgaaccccaccggattccccgggccggcccgaccgcccccacctagtccctggccccgcgagtgcaacccccgacactaacggcctttacgcgac

SEQ ID NO: 228943 - DNA, 122 bp, Homo sapiens
ggtttcgtgcaggctttagtataaggctggaaggatggaaatagctccctcatcaatttacgggacagtggttggtgaagccttaaaatgccaatgttccaggaacactgttatcggttcca

SEQ ID NO: 228944 - DNA, 122 bp, Homo sapiens
ggaggttcacctcggagacaactgcagtgtactgtgtcagattacaaactgggggcgagacggagggagggaggagggggagagggagagaaggagggagggaggagggggagagggagaga

SEQ ID NO: 228945 - DNA, 122 bp, Homo sapiens
gaatagccagattgcttcctctgtgacaccacacagagcccgtctgtgtggttgaggggccgctggtgaaggatgaggggcaccagcccccatgctgtgtgggtcactgtagacatggctct

SEQ ID NO: 228946 - DNA, 122 bp, Homo sapiens
tggggcatggcctggggccgggaatgggggagtgggtgcaggggcaggactctgcctgagcggaacagggctgggcaggttctgcccagaacacaaacactgtgaagcggctagaattccag

SEQ ID NO: 228947 - DNA, 122 bp, Homo sapiens
acatttctggggggctttctctctaagcccatgctcgcttcaggtgtcagtgttggcttgcgccccctgagcacacgcaggtctggacggggtcgcgggtctggacagggtcgtgggtctgg

SEQ ID NO: 228948 - DNA, 122 bp, Homo sapiens
gagtccaggccttgctggccgggacccccaggacaagggtggccgtgacatatgttctggcgccttcagtactagtgaaagaaacgagccggccgtgtcagctgggagatttcttgcggctg

SEQ ID NO: 228949 - DNA, 122 bp, Homo sapiens
gcatatcctggagctcagagtatctttcctgtgctgtgtccagtctaccaatgagcccagcgtagacattcctcacgtgttacagtttttgacctctggcatttctttctgattctttctca

SEQ ID NO: 228950 - DNA, 122 bp, Homo sapiens
gtttcagaattaaagcaatattgaaataaacctacacacatataaacaactagacaaaagcgtcaaggcaattcaactgagaaaaataaagtcttttcaaaagatgatttcagaacaattag

SEQ ID NO: 228951 - DNA, 122 bp, Homo sapiens
aagcgcagtcccacagtctcagatagttaatatttctctgaaaagattttccttagcagccggggttgtgacggtgctgggcctccgtctccttccctgttcccagcgggcagggaatgtta

SEQ ID NO: 228952 - DNA, 122 bp, Homo sapiens
tcccggcaggcttctcctacgctggctcggtggccatcagcggggccttggcgggcagcccggcctctctcacacctggagccgagccggccaccttggatgagtcctccagctctgggagc

SEQ ID NO: 228953 - DNA, 122 bp, Homo sapiens
gcctggggataagaacaaggtgggtctgggggtaagggggtcaggacttattttcttcttcgatttttcataggacaacagaatttgagacgggaatgccaatagctaagtttggggcagat

SEQ ID NO: 228954 - DNA, 122 bp, Homo sapiens
agaggagggggtggagtgcctggttttccagtcaggcggccggagggcagccctcaagaacggccctgaccgcccgcggggtgaggggccctttctgggcaggacccgccccttggtcccgc

SEQ ID NO: 228955 - DNA, 122 bp, Homo sapiens
cgaacatctgcttcatctccctgatatctgaacgtccaggtgcccctaatgtctcctacccgctgggtcctctctattcctcccaggacccaggcctctgacccacaagactcactgtcatt

SEQ ID NO: 228956 - DNA, 122 bp, Homo sapiens
acggaccacgggcgggctggcgggcgagcggcgagcgcgcggcgatccgagcccctagggcggatcccggctccaggcccgcgcgcgcctcaggccgtttccctatttaaggcctcgccgcc

SEQ ID NO: 228957 - DNA, 122 bp, Homo sapiens
agataaaatggtcttcctacctcgctgtgtctgtaactagaaggacaacaccgtaagtcacgtacctattcagcgggttctataggccactgtgagggtctgattagcttgactgtggaaga

SEQ ID NO: 228958 - DNA, 122 bp, Homo sapiens
ttaagtttttgctctgcttttctagctgtatggccctgggcaagttaccaaacttctccgcgcttgttatgtcttatttgtgaaatgtggctaatacagactcaaaaggttatactctatga

SEQ ID NO: 228959 - DNA, 122 bp, Homo sapiens
acggcacaggggccctgagaaatccaggcacttcctgcttcttcaggcctcagaggcagtcggcttcaggaactcctacctgagaactgatgaggccagacaaggcagcgggtgaggagggg

SEQ ID NO: 228960 - DNA, 122 bp, Homo sapiens
cagggaactcgggtcccagaccctggagtcgctgcagggaggccagggtgcttccacagccggttccggccggttcccacaagcccctcccccagtctccaggcgcccggccccgcacacgc

SEQ ID NO: 228961 - DNA, 122 bp, Homo sapiens
acgctctggaaagcacctgtggccccagaggtaagcacagagagactcctttcccgtcaccgggtcgtatgcaccaacctgctcggacaggggagagggtgggaaggcagagggtagaggag

SEQ ID NO: 228962 - DNA, 122 bp, Homo sapiens
cagctggagatggcttaaacttactcccgaagaagctcccttccatttctctcacactaacggacaataaggaggcctcgagctaggcaggccagggccgtacccgagctgctggcagggag

SEQ ID NO: 228963 - DNA, 122 bp, Homo sapiens
tgtggccggctgcccatcgggccggcgccagaattcctgggttgggggtggcaacgtgggcgggggcagtgggctttgtgggctgctcctacagttaccaccccccaaatcctgccttacag

SEQ ID NO: 228964 - DNA, 122 bp, Homo sapiens
gtcgcagtgcagacggcctttctacagagggatgggtgctgagccccggcccgtggaggacgccacatccatccccagggccccccacctgagccgcccacaggcttacgttgggcacgaag

SEQ ID NO: 228965 - DNA, 122 bp, Homo sapiens
tcctccgaggaaggcagggctatgagcggagccaaataatcacccgagggcaaggcgagccggagagagagcccggtcccaagacccgccgcgcatccgacgcctcctgaaggtctgggcgc

SEQ ID NO: 228966 - DNA, 122 bp, Homo sapiens
gaaccgaatgagttaaaaccgggccctatagccttcatccctggtgactctggctggcctcgttagcgcccgcgcagcacgcacagaaggacccttcgcgcaggatgtcccggagactcgtc

SEQ ID NO: 228967 - DNA, 122 bp, Homo sapiens
gggaaggagggtagggatgccgggggccactcctgcgtggtgcgagtgggaacgcgcgcgcgcgcctgggtgtgtgttgttagctgatatccatggcagctgcagtggcagggtgcgtgtgc

SEQ ID NO: 228968 - DNA, 122 bp, Homo sapiens
ccgcccacgcggagtctggatgcggcggcccctggggcacgcggcggcccctggggcacccggcgggagctgcatgctgcctagttgctgcttgcgttggccagacccacacagcccctgga

SEQ ID NO: 228969 - DNA, 122 bp, Homo sapiens
gggaagggaggctggagaagggacttggggcgctggtggggctggacggcgattggggggcgctcacccagacggcctccttgatgagccgggccaggcggcccagcagtcgtggcaggtgg

SEQ ID NO: 228970 - DNA, 122 bp, Homo sapiens
atgcctcagtataagtgaccagaagcaaaaatcctccaaaattaggggctaagacatgagcgtttgggatataatcatttacatttgacaaaggctgcacatagtgcctttctgtttctgtg

SEQ ID NO: 228971 - DNA, 122 bp, Homo sapiens
gcgcgcggctcggcatcggtgggattggtcggaggtaaaggattttcctgccacctaaggcggagaggaagggggatcgaaacgggggaggcgaagagtcaaaaaatgttgtgcctgggaca

SEQ ID NO: 228972 - DNA, 122 bp, Homo sapiens
ctgctcccacccagccctgcattccacacgtcagaagagttgtttaagggtcagacctgccgcatgtacttttcacaaagttggagccctaccttggccagcaggtgacaggtcccactgtc

SEQ ID NO: 228973 - DNA, 122 bp, Homo sapiens
cttttcccagcccttcacatctgcaggagactcagtcctgagaggccaggccgggatgggcgggggctaagaagggagggaggaaccaaggtttctcctccagcccagggagccaggggctg

SEQ ID NO: 228974 - DNA, 122 bp, Homo sapiens
cgtgcgtgtgtgtgcatgtgcgtgtgtgtgcgcgcgtgtgcgtgtgtgtgtgggcgtgcacgctctaacatgcaagaaaggactagaacggtagcccccgacacgatgagacaactgatggg

SEQ ID NO: 228975 - DNA, 122 bp, Homo sapiens
agggagcccctttcctgtagtttcaggtagaccacgggaaccacaggctggaggctgggccggagagccagcaccaaaccagggaacagctgggtgccctccctcagcagtggctgggccag

SEQ ID NO: 228976 - DNA, 122 bp, Homo sapiens
gctttgttttgtactctaccgtgtcctgttgaaaggggtcaacaagtgccggtgagtatccgctaacttccagactcttcctttcaaatatctttttggctaattttcctttgccggggatg

SEQ ID NO: 228977 - DNA, 122 bp, Homo sapiens
cacgaatggaagtttgggacgtgcctgggttgcccttaaggaggacacccccgcccccaccgccattatgcatatcgtgggagaggcgcgtacagggctgagacactcctcaggtcccagaa

SEQ ID NO: 228978 - DNA, 122 bp, Homo sapiens
ttccatttgtcccttgtcacccttgtctcctccccctaggccggagtcctgaaagtcgagcgagctccgggttttgaaaatgttggagggaaaagctcctcggagatgagcgtgaccccctg

SEQ ID NO: 228979 - DNA, 122 bp, Homo sapiens
taaaaatagagacaggggtctagatatattgcctaggttgatctcgaactcagcttcaagcgaccctcagccttccaaatcaccaggattacaggcatgagccaccacaacaccaagccagt

SEQ ID NO: 228980 - DNA, 122 bp, Homo sapiens
tctcttcttctctccaccatggggtggagtcctagaaatgccgtctactagctgggtacccgtggggaaagttacttagcttctcagggtctacttccttcttttgtggacaagggatcaat

SEQ ID NO: 228981 - DNA, 122 bp, Homo sapiens
gcctcgaaaaggagtgattcctcaaggggcatggtcttggcccaggtaactttgataatacgtggacaggggagtagggatgcccgctcaagttctcaaagcggaccccgcccctttccagc

SEQ ID NO: 228982 - DNA, 122 bp, Homo sapiens
tgggtgagtgcgagcggcgggtggggcctccgcgggcggaggcaccgggagcgggggcgacgcctgtcatcgctctaggcccagcgggaggacgcgccaacatccccgctgctgtgctgggc

SEQ ID NO: 228983 - DNA, 122 bp, Homo sapiens
ccgcgaggggagtagggggctgcgtgacgaggagcctccagcaccgcaacgcccaggaggcgccaggttaggccatctgcctggcctgttcagccgcttcccacacctgacaggtcagatgc

SEQ ID NO: 228984 - DNA, 122 bp, Homo sapiens
ggcagtgttgagctctcgtgttgaggctcctgaaagtaacatgatgatgactgcatgtggcggtgtccaggtgttctgtgactatggggcacccagacatagcaagactcgccacagcagtg

SEQ ID NO: 228985 - DNA, 122 bp, Homo sapiens
gcggggatgggacacgcagcttccgggtcaagcgctttttctttttcctcccggaaacaacggtgtcattctctagttccggatctaaggtgacccagttgcgaagtccagccttctcgtct

SEQ ID NO: 228986 - DNA, 122 bp, Homo sapiens
cccaaaaccccaaagcaagcatggaagagcagaccagctccagaggaaatgggaagatgacgtcccctcccagggtaagtggcaccacaggtaggaacagagggtgtgagaatttacactgg

SEQ ID NO: 228987 - DNA, 122 bp, Homo sapiens
ttttaaacatagatttctagagcattaaaaacaatcctcataggtttgttaaacctttagcggaagattacagcccatgtttttgtctttggtgaatagctgtttgtctcactttatttact

SEQ ID NO: 228988 - DNA, 122 bp, Homo sapiens
gcccgggaaggctgaatgcattccgcctctctcttctgatacctctttgttaaggtctcccgggaatccagcttcctttgtgcaggcagctgcgtttccagtgcgtggtgcaggaggcaggc

SEQ ID NO: 228989 - DNA, 122 bp, Homo sapiens
cagggctcgttcccaagtctctttccagaggccaggctttatgggagcatgggttaccagcgacgcaccctgtgagttttcctctatcgatatgcatggagcggttcgggagcggtggctca

SEQ ID NO: 228990 - DNA, 122 bp, Homo sapiens
ttgaggtggctaccgtaaatgcctgaaaaacagtcaccagctgggactctaccactgcctcgagaggggctatggacggtcgtatggaccttggactttggagatgggggattatgccacat

SEQ ID NO: 228991 - DNA, 122 bp, Homo sapiens
tttgtggaagcaggaaaggggtgtgggtagtgatgacagtcaagcacttattggaactcacgtatgtttcctagagagcccttcaatacagacagcagggtgccagggaaatacaagtccat

SEQ ID NO: 228992 - DNA, 122 bp, Homo sapiens
catttacaactgaaattttccagtttatctcatttataactaaaaggaaagtaaggttcccgctgcaaggtgttagctaaatgctctgccaggaatatttagaacaaccaaattattgtctg

SEQ ID NO: 228993 - DNA, 122 bp, Homo sapiens
ctacagagaaaaggagctactccaaagggcacacagggcccttccggatcaggccaccagcgtcttctccagccccagatcccagaactgctctaagagccttagctcattggccacgtctc

SEQ ID NO: 228994 - DNA, 122 bp, Homo sapiens
tggcagccaagtctacactacttcaaggtatgaccacactttaaagagtcatgatggaaacgactagattacgaaaccataaacagtaaacacagcacatccaccaggcggtggaagaaact

SEQ ID NO: 228995 - DNA, 122 bp, Homo sapiens
gtgtggattcccacgcccgccttggccaacgtcactgtactccttcgtgatgtcacgttccgagttggcgtccccacccaaaggaggctcttaattagtcctaattagtcctatgagcccca

SEQ ID NO: 228996 - DNA, 122 bp, Homo sapiens
tgtccgcggtctgtttggcccgaacggcggcggaggcgctgatcatggcgacattcatctcggtgcagctgaaaaagacctcagaggtggacctggccaagccgctggtgaagttcatccag

SEQ ID NO: 228997 - DNA, 122 bp, Homo sapiens
tctgcctgtgccggaccgagtgatctgtactataattaccctgtgaggggcgcacgctgccgtcctagagcgtcacagacaccagcccccgggcctgttggtactcgccggaggtccctgcg

SEQ ID NO: 228998 - DNA, 122 bp, Homo sapiens
ctcggcggtgcacccgccggggtcgcggattggaggtttccggttggaaaagccccttggcggctaactggggaggactggaagaaatctaggatggagccagcactgctggcccaacatgt

SEQ ID NO: 228999 - DNA, 122 bp, Homo sapiens
gtcccccggcccgtcttcccttctcctctctgtttgcccctcccccgcaggaagcgttcccggccgcgaggtctttgaagtgtcgttgaagcccccagggctgccttctcccctacgccacc

SEQ ID NO: 229000 - DNA, 122 bp, Homo sapiens
cacgctggtggagagcaaggcccctcatggggcccaaccactttagttcactgtcttgtccgccctgtagccctcacgagtccttttctccctgcaccatttctttctagaagatttacagt

SEQ ID NO: 229001 - DNA, 122 bp, Homo sapiens
gccatgcggggcgccgcacgctcccttcctgggcggcacgatgatcatcgcgctgggcggcgtcatcgtagcctcggtactggtcttcatcttcgtgctgctaatgcgctacaaggtgcacg

SEQ ID NO: 229002 - DNA, 122 bp, Homo sapiens
gttaagaggccagcggaggacgcgcgcggtctccttgggggagggtgcgggtgggccgggcgcgcatgcgcatgggcgccatcgcccgccggaagagcggcagcccaggcgctgctgctggc

SEQ ID NO: 229003 - DNA, 122 bp, Homo sapiens
ctaccctcaccgccccctttccttcccaaggcaatagtgtaggggacgcccagtaagttacggaaaaggcggagacagaggtttcgttcccgcccctccaattcagtctccaaaaaggtccg

SEQ ID NO: 229004 - DNA, 122 bp, Homo sapiens
aatgcccatgaaggcccgagcggggctggcgcggacaggggccgggtctcatgggttggccgctcctcccatacttggagctgggctgtccctcggcagcggggcagtgggcctgggtaggg

SEQ ID NO: 229005 - DNA, 122 bp, Homo sapiens
agcgatccgcccgcctcagcctcccaaagtgctgggactacaggcgtgagccactgcgcccggcctgatacctatatcttgaccaagctgctgtggaaacattgagttccccttgatagttt

SEQ ID NO: 229006 - DNA, 122 bp, Homo sapiens
acatcctttctagacactcgcttcctgtgaggtgctgtgctccacacccgggcatagtggcgagtaagggtgaggcctgctccggaagctcactcggggtggagggtagacgggtgagtatg

SEQ ID NO: 229007 - DNA, 122 bp, Homo sapiens
agcggcatcgcggcgaaggggacagcggctgacaggacacaacttggttacgaccggctgcggcagcggaagcgggaggagtcggcgaatacgcccggccgcctgcggcccggcttccggtc

SEQ ID NO: 229008 - DNA, 122 bp, Homo sapiens
tttctgagattggacaaggcaatgctttaccttcttatttcagttcttatattttaaacacgtgtccttttggctatcaatttcatgacacattttttgcatttttgtgctttttcctcatg

SEQ ID NO: 229009 - DNA, 122 bp, Homo sapiens
gctaaattctgcttgttccaagttcctgttctatttggcctctgactctattgggctccccgctccctagctgaagccgtttttttttttttttctttttctttttttgtcaggagggtgtt

SEQ ID NO: 229010 - DNA, 122 bp, Homo sapiens
ctccgggtcccctacttcgccccgccaggcccccacgaccctacttcccgcggccccggacgcctcctacctgcgagccgccctcccggaagctcccgccgccgcttccgctctgccggagc

SEQ ID NO: 229011 - DNA, 122 bp, Homo sapiens
tccatcagctacttcgccctctcttccactgctgcaacgctttttaaagcgacagtcacacgctgcaggattcggaagcggaaatggtctttgctcattggatgacaatctaaattcagatc

SEQ ID NO: 229012 - DNA, 122 bp, Homo sapiens
tttcccttcttagtaaagtatatagtgtcgtaacttagtgattggctcggtgctcctgctcggttcactggtaggaaaagacttcctttggtgactggtaaaaagcactagccttgtgtcca

SEQ ID NO: 229013 - DNA, 122 bp, Homo sapiens
ccccatgagtactgaccacaaggtcagggcatttgagagaaaatggagacaggattgtctcgttcacttattagtaggcatttgtcatataccaggtaaggaaataatcctcccattgtcaa

SEQ ID NO: 229014 - DNA, 122 bp, Homo sapiens
tatcaacaaaaatacccacttcaggaggtggttgtaaagattatacaagagactgcagagcgttaggcagcacctggcacaagacaaatgctcagtaaaagaccactgctgtcattaaggtc

SEQ ID NO: 229015 - DNA, 122 bp, Homo sapiens
ccctccacttcattttttgcttccagctcgcccttaacctctcttctagcccagttctagcggcatccaaatgcgctcagagggaggtgcgggggaggggcgcgcaccccagcctaatgccc

SEQ ID NO: 229016 - DNA, 122 bp, Homo sapiens
attagaaaaaggtgctccctttctcaaggatggatggagccccacaccaggagggcatcccgctgtcagacactcccattcacaacctaggtggcggctctgtggagcagcctctcattccc

SEQ ID NO: 229017 - DNA, 122 bp, Homo sapiens
cgctacacacgacgggcattccgcatccggccatagtcacaccaacagtcaaacaggaatcgtcccagagtgatgtcggctcactccatagttcgtaagtgttgctgtttttctcaccttct

SEQ ID NO: 229018 - DNA, 122 bp, Homo sapiens
acccaggttttgtaaggatattgacaaattagatgcttggcaattaaattagaatttcaccgtatctcctgccttaaaagaacagctttattcttgagggagcccacctaacaattttatgt

SEQ ID NO: 229019 - DNA, 122 bp, Homo sapiens
ccaccggggcctggctcttctccgggtcgtacaaccgcgtgcagctttggctggtcgggacgcgcggggaggcggagctggagctgcagctgcggcccgcgcggggcgaggtcagcgcgggg

SEQ ID NO: 229020 - DNA, 122 bp, Homo sapiens
ttgcttatatttaattttttagagacaaggtctcactctgtcacccaggctggagtgcaacggcacaattaaggctgcagcatcaaccttccaggctcaagggatcccccaaccttggcctc

SEQ ID NO: 229021 - DNA, 122 bp, Homo sapiens
ggctggggccggcggggcgggcttgggggcgtggccgggaggcgggcggggatgcatctgcgggcgcagcgcttggggcggagccgcagcgcgaggccgcgcatctgggtggcggcggggac

SEQ ID NO: 229022 - DNA, 122 bp, Homo sapiens
ataggaagaaagttctttgtaagctttaaagcgcagcacattagtcaggggacaatgcgccgctcacagttccactcgggcccacggcgcccgggctgaggattcccgtcccactgagcagt

SEQ ID NO: 229023 - DNA, 122 bp, Homo sapiens
ggggctgctctggatttgtgaggtccgttttaacttcccttgaaaagcgcatcatgtgggcgggggcaagcgcctggctgcgccggggggcaccacggtgctgcccatcacgggaaccgtcc

SEQ ID NO: 229024 - DNA, 122 bp, Homo sapiens
ccacgcacaatctcagtcctcgcaatacccacaaggtaggtgctaggatcacaccctttacggacgcggcacctgcgacagggatgcgcgaggagtcagggggcctcgccggatcgaaccta

SEQ ID NO: 229025 - DNA, 122 bp, Homo sapiens
cctgtttcttagaggtgtatcagtccatgtctttttgttttgtttttgtaagctcttcctcgctttgagacaggagtgctgcttctgcactctgctgcttttgctctttgctgagctgaaga

SEQ ID NO: 229026 - DNA, 122 bp, Homo sapiens
agtacgaggtgccagtcgaggacagtgtgagttcctttggtgtttggtttacctgggacccgtatcagcagcagattgcgggggaggcccttggctgtcctcggggagagtagagaagtgac

SEQ ID NO: 229027 - DNA, 122 bp, Homo sapiens
atgggcgggagtggcagaagagttgtgaaggctattggctagcaagggtggtgggcggggcgtagaccgagctacccagtttactggtcgatttcggatccagttttccagttatagccacg

SEQ ID NO: 229028 - DNA, 122 bp, Homo sapiens
ttggtagaagcaggctgaagttatttgttgggaggactctgaagccatgcccaggctccacgggaaagtcagctgtgattgactagaagagagctgcctgcacacaagaaaactatgcaaaa

SEQ ID NO: 229029 - DNA, 122 bp, Homo sapiens
ttgcaccccgctgcgggcccacgtggttggggccctgccctggcagggtcatcctgtgctcggaggccatctcgggcacaggcccaccccgccccacccctccagaacacggctcacgctta

SEQ ID NO: 229030 - DNA, 122 bp, Homo sapiens
gacccaccgctgccccttcactatccccccaccccgccgtccattcatttcacacaataacgggcccaaatggagtcagttcaagacctactatgggtagataagactgtctgccacttacc

SEQ ID NO: 229031 - DNA, 122 bp, Homo sapiens
tcaatagagtaattgcttcttttttacccttagaacacatctcagtaagaatggcagtcccgttaatttgtattctggtgtattcccagaactctttgtattcgtgcccaataatagttgtc

SEQ ID NO: 229032 - DNA, 122 bp, Homo sapiens
gtgggcattggggaaagaggaaggagggcaggacatggggataaagcggtttcttaactgcgcgtgcgcccctggcaaagctgactaaggcgcctgaagtgacgtcattgcctgcatcacaa

SEQ ID NO: 229033 - DNA, 122 bp, Homo sapiens
ttgttgtcttggtagagatggggtctcgctattttgctcacgcagatctcaaactcctgacgcccaggtacactcccatctcggcctcctaaaatggtgggatcacagacgtcagccaccga

SEQ ID NO: 229034 - DNA, 122 bp, Homo sapiens
tattatgatttaatttattactactgtgatgtggaaagtggtcgctatcgatttcattctcgagtagatttgcaaccttatcagacttatagcacgaaacaaaaacgaaaaattgagaaaag

SEQ ID NO: 229035 - DNA, 122 bp, Homo sapiens
gctctcgggccatcggacctcaggcaaccgtgctcggggtccacccaacacggggatggccgccagcccagcagatagagccttctgagacgaagcctgtccaggggcggtgggcatggcct

SEQ ID NO: 229036 - DNA, 122 bp, Homo sapiens
gaggtgggacttgggggggcttccagcactgaccatacctggccttcccacaacggtgaccggtaaccacgtcctgaggctgcacccagctggcagtggcctgtgtggacgggagcctcctg

SEQ ID NO: 229037 - DNA, 122 bp, Homo sapiens
agacatgggcgtctttgtccctagccttcccttttttctgaaacgtgaactgcgcgtacgcgtatctcctccagggatccgagcaactaattcacaaatggggaaactgaggcttaaagtaa

SEQ ID NO: 229038 - DNA, 122 bp, Homo sapiens
gaagagcaccagggcgggcacgccgatggccgccagcccgtacaggtagttccgggccggcgagcaggggcagtggaaggccaccacagagaacagctcctggctgcccaccgtgcccagtg

SEQ ID NO: 229039 - DNA, 122 bp, Homo sapiens
gggagcgggcgggcagatggctgtgtctgtaagcgggaggcgtgcccggttcatccaaggcgcaagatggcgctgctttttgcacgttctttgcgcttgtgccgctggggagccaaacgatt

SEQ ID NO: 229040 - DNA, 122 bp, Homo sapiens
ctctgagatccagccctcggtttcctgcaagccaaaaggatccgctaggttgggaaatgccgcctggtgcgattccagaaagggccatctctttaaggataacggacttggagggcctcttc

SEQ ID NO: 229041 - DNA, 122 bp, Homo sapiens
tcccctccactgcatcttgctgccggatcccatcagatccataaaaactgcctggcggaccggctccccagctccctcagagccagccacctagtgagcacagtgagtgggccaagggcaga

SEQ ID NO: 229042 - DNA, 122 bp, Homo sapiens
ctctttcctcatatctttcctcttcttcatttcccccttcttctccaaggaaggtgacttcgtggagacagcagggtttggaatgatacaaaccaaagtagtattccaacgctgccacgaac

SEQ ID NO: 229043 - DNA, 122 bp, Homo sapiens
gcttagaagcttcggccccctggttccagaattctgttgggtggtttgttacctctagcacgctccatgcccttcttgcccctttcctttcagacaaaacttgcagcacaaagaatgaattc

SEQ ID NO: 229044 - DNA, 122 bp, Homo sapiens
ctgtcacaattgttaacaccttctttgaccagcctttttacatttgacaattctcttcagcgcctctttcctgccagcaggaaggttttgctgccttggctttcgggagccccctagacagc

SEQ ID NO: 229045 - DNA, 122 bp, Homo sapiens
gctgcttagaaaaactgagtgtttccttagaaactggcttgcgggagctctgcgcgtccccgctgaacctgcctctggccgcgcctcgccatcacccccgccgccctaatggattctgaagc

SEQ ID NO: 229046 - DNA, 122 bp, Homo sapiens
cccttgccccaactcccatggccaccaggactccatctcaggaggtgttttttctcagcccggggctgccttccagcagcaagtccaagggagccatgacccgagtttcccggtcactgaca

SEQ ID NO: 229047 - DNA, 122 bp, Homo sapiens
gctaccaccccgcgcccccaacctcgtggcaatcccgtctcctttttcaggccctccctgcggcctcccagcccgctcccagctggcgatgaggggatccctcagtcctttcctcctcctcc

SEQ ID NO: 229048 - DNA, 122 bp, Homo sapiens
ttaataaaaaattctctctgggcaatgcatctaggtatattttggataaatatttgggggcgtcagaatcatcttcaaatgaaaatgtaagcatttcttgtcttggctcactggggatagca

SEQ ID NO: 229049 - DNA, 122 bp, Homo sapiens
gtagcaagagcccagcctcagactatgtttccttctgcctccgagtgcaatgccttcccccgagtctccaaggtaccaaaccggtcaggggcagctgagacagctctacttgtacgagtcct

SEQ ID NO: 229050 - DNA, 122 bp, Homo sapiens
ctgtgggagcctgcaggaaggggtgtaaatgcccggtaagtacgagctccaggacagagccgtacccactgggggccgctgcctggaaaacagccttcctggtgagacaagaggctctttag

SEQ ID NO: 229051 - DNA, 122 bp, Homo sapiens
taatattcagtctgaagtcgtttactgagcagcagaatgatgttacttctgtctgttgcccgtcccttcagaaatgtctgcttaacacagagcctggaggtggcagcaattagggagtgacg

SEQ ID NO: 229052 - DNA, 122 bp, Homo sapiens
ccacccccaaacggcaggagttcataggacccgcggccacgactgcccgcgagcgcctaccgtgggccacgccccccaacgacccagcagggcaagtgtaggcatctctggctgccagatga

SEQ ID NO: 229053 - DNA, 122 bp, Homo sapiens
caccaatgagaatcttcttctgctgggcctggggcggagccatgaggcgccttgagtgggcgtggtctgagcaatgggcgtgatccgggcgtccgagggaagttgattgactgtaaggtttg

SEQ ID NO: 229054 - DNA, 122 bp, Homo sapiens
gctcccattcagctcccccgaccccccttgttcccgggcgctcagtggcgcgagatgaggcgatggggccgacaaagatgccacactcatccctgccgacgtccggctcccagcccagggcc

SEQ ID NO: 229055 - DNA, 122 bp, Homo sapiens
gaatcaggaaaataaggagccggtaggagggagtggagatcctcctcgcggagagctcgccgcggcgcagggctcccagctccccgcagctgcctccccgaacactcaccctcccggttccg

SEQ ID NO: 229056 - DNA, 122 bp, Homo sapiens
tcaatagacgtccgatggagaaaatgggggatagatactatgcagagaccaatgctatgacgtttcctaagatgatgactcttcacagtccagaagcagaatgagctccaagtaagataaat

SEQ ID NO: 229057 - DNA, 122 bp, Homo sapiens
caccttcctgttttaaacgctgagccgaggcctgaaatgcccctgatgaccaccagagggcggatgagcatcaaataatcccttcagccagcctccttccaaaaccctcctcattcattcat

SEQ ID NO: 229058 - DNA, 122 bp, Homo sapiens
cgccgccagtgagaaccggggccggagccgggtgcggatttgctggggctgagtcgggggcgcgcgggccctgacctctgccctctgacctctcccctagcaggcgaccatggggaacgtgt

SEQ ID NO: 229059 - DNA, 122 bp, Homo sapiens
aaatacaaaaattagctgggcgtggtggtgcatgcttgtagtctcaactactctggaggccgaggcaggagaatcgcttgaacctgggaggcagaggttgcagtgagccgagatcgcaccac

SEQ ID NO: 229060 - DNA, 122 bp, Homo sapiens
ccccgagccgcccgccccttctcctccccaccccttcggcgcgcgccttcccgccccccgcgccgccccagccgcgagcgccctggacacccactccgcagccaggctccggagcccgcccc

SEQ ID NO: 229061 - DNA, 122 bp, Homo sapiens
actactctaggtcaggtccagggctgaggtcagcctgaagaggagagggctgccctgtggcgctgagctttggaatcaggaaacaggctccatgctccaagtggtacagagattgatcttct

SEQ ID NO: 229062 - DNA, 122 bp, Homo sapiens
gctctttctagagcttggctcccgctgaagcgcaacttccgcgcccaaaccttgcttttacgacgggcggtccgcgtccaaaggtctcttacaggcctgccctttcagctcctcgccctccc

SEQ ID NO: 229063 - DNA, 122 bp, Homo sapiens
tggctcccagccggtgatgggcgagcttctcttcaccggggcgcagttgcttctctctgacgtcgcctctgggccttctctcgcccctatgcccggctagcacagaactctgctgcagcggt

SEQ ID NO: 229064 - DNA, 122 bp, Homo sapiens
cattgtttacatatatgaaaagtgaggctcaaaatacactgaccagtccaagacaacgcgcgcccccacaaagcaccttccccgtccccatttatgcccaacccataaacccaaagtagagc

SEQ ID NO: 229065 - DNA, 122 bp, Homo sapiens
tcaggaatgtcacgttcatattgttatatcttcttgtttggggtggtgctgagtggaggacgtgtgaggaatggctgtattttgctgcctgtcactcttgccttcctgttttaaccagtctc

SEQ ID NO: 229066 - DNA, 122 bp, Homo sapiens
actctgtcgcccaaggccaagtgcctcatccgaagcattctgcgtcgggagccctcagagcggctgacctcgcaggaaattctggaccatccttggttttctacagattttagcgtctcgaa

SEQ ID NO: 229067 - DNA, 122 bp, Homo sapiens
ggcttgtgccgaattgtgtcttagaattgcatgacctccctgaacacaggtagacattttcgatgctaacagtaagaattaagaatagagggccaggcgcggtggctcacgcctgtaatctc

SEQ ID NO: 229068 - DNA, 122 bp, Homo sapiens
tacacaataaacttgtagaaatttttttttttttttttttgaggtggaatctcactctgtcgaccaggctggagtacaatggcagtgatcacggatcactacaacatcaccttcccggtctc

SEQ ID NO: 229069 - DNA, 122 bp, Homo sapiens
aggcggggaaggggcgaggcggggcggccgttgggcttgggccttttcgccacctgccgccggagctcaggtccctaaaacctcgaaggcgtccccgcttctcaggtcctcctcgcagcttg

SEQ ID NO: 229070 - DNA, 122 bp, Homo sapiens
tccatgggtgaagtcaccaacaggttcctggcagaaggaggcagagatccactccaagcccgtttttataactgtgaagatggatggtaagaatgtcacccaaatttctcagtgtttgggaa

SEQ ID NO: 229071 - DNA, 122 bp, Homo sapiens
ctcttgacctcgtgatccgcccaccttggcctcccaaagtgctgggatgacctcgtccggcgcagtcagctccatttttaaaagcctttgcagtgctatctgggtcagttccgtgtgtgcgc

SEQ ID NO: 229072 - DNA, 122 bp, Homo sapiens
ccgaccccgacgccgatcccggccccagagcgcctcctaggcgacccctggccccacccacgccggagccggcccgcgcccatccccacgccccaacccgcaccacgcaacatcgccctagc

SEQ ID NO: 229073 - DNA, 122 bp, Homo sapiens
tatgtcctcagcgattggccaggacggaggggtgcgtcctctaggcacctttctgaattccgttttccttgtacaaaattgagataacgggtattccaccggtgggtatccctgctcttttt

SEQ ID NO: 229074 - DNA, 122 bp, Homo sapiens
tttgctgcccggagaagtgtcccttcttcatctggcgatcaggcgtatttggggagattccggggactggctccagtggcagggatgatcagtttctgttccttttcagtggggatcacatt

SEQ ID NO: 229075 - DNA, 122 bp, Homo sapiens
tcctcaagcctatttaatagaatcacttcagaattaaacagaattattatacctttcacacgcaacataaacattatttgtatcccataaaaggcaaagagaagtgggctacatttattgaa

SEQ ID NO: 229076 - DNA, 122 bp, Homo sapiens
gcttcccgcgagactgaggaaacggaaacgttggagtagcctgcaccctctgatgtgcaccgttccctctccctgtccacgcccagctgaatggatttttagtatttactttgtcacgtgca

SEQ ID NO: 229077 - DNA, 122 bp, Homo sapiens
tccctcgagcatcacgggaagtgtagtctacgagggtgggggggggagggagccgccgaacgcctcctcacccagctccgaagccacgccccccatagcaacagttgcgaggaaaggaaagc

SEQ ID NO: 229078 - DNA, 122 bp, Homo sapiens
cacatttgtcttctttctgtctttaagactcagggaggctaaatcagtgtttgattgccccgccaacccttcctgaaacttcagaccctgggtaggggaagagaagggggcatgtggtatcc

SEQ ID NO: 229079 - DNA, 122 bp, Homo sapiens
tggagacttttgcccgggctgggaactgtggtcgtgaagtttatccccggctgtgccccgcgtggtggagggcgctcctctgggacgccggcagcctgcgcgggccgccggggcgacagtgc

SEQ ID NO: 229080 - DNA, 122 bp, Homo sapiens
acatttctgagtttctgaccaccatcggggtctccggcccgttgacagcgtccatgattgcggtcgcccggtgcttcgcccagccaaactttaaggtgggtctccacgtcgtcctatcacag

SEQ ID NO: 229081 - DNA, 122 bp, Homo sapiens
cagagacttggagacttgagggtcagacagatctttgtataaacctcggttctttcccttcggcagtaaaacctgggacagaaaactgctgactgccaagcctcaggacccttacttgaaaa

SEQ ID NO: 229082 - DNA, 122 bp, Homo sapiens
ctggacagttgcgaagtaaacatttacttttcaaagatgatgatcaaggaaacatctctacgaagggacccggatttaaggggagagctagctttcctggcaaggggctgtgattttgttct

SEQ ID NO: 229083 - DNA, 122 bp, Homo sapiens
agaaccacgtctatggggaacgcaagctgggcgccggcgaggggctgccccaggtgtgcccggcgcggatgccccagcagcccccgctccactacgccaagccctcgcccttcttcatggac

SEQ ID NO: 229084 - DNA, 122 bp, Homo sapiens
cagctcccaggaaggggagggtccagcggggctctgcttcgaagggtgtgccaccatatgcggaggacggcgaaggagctcctggcacggtgtcttgaggaggagaggaggtgcggtgggag

SEQ ID NO: 229085 - DNA, 122 bp, Homo sapiens
cctcccctctcaagaacaaggagagaagagtgggatgacttttcaacatttattgacaggcggcattgttccttagcaggctcctgatttttattggatggtggcattttcaagatgtggca

SEQ ID NO: 229086 - DNA, 122 bp, Homo sapiens
aaagttgagactgttgcatgctgggctatgtagttctcctggtacttaacgcgcgcgcgacggcaaggtctgaactctgttacccagaggccctagcaaccaggaggcggcccgcgctggtt

SEQ ID NO: 229087 - DNA, 122 bp, Homo sapiens
ttataggcgtgagccaccgcgcccggccttggctgttctttaatagaaggaacatgtccccgtgtggtaccattgttgatgtggacagacacacacactaacaaacaaggagtgagcccttc

SEQ ID NO: 229088 - DNA, 122 bp, Homo sapiens
cttgccttaaggtgctgtcgccccttcacctccctccttgtgccgggccctgctgctccacgggtttcgcctccacaatcaccgcttcccctgagcccgcgttggggaggtgcccggggcct

SEQ ID NO: 229089 - DNA, 122 bp, Homo sapiens
ccactcctggtcccttcatcctttcttttccttttctttgctcttttcccacatccaattcgggaagtgggagttggcaatactcaattatccaataggcagataaacatgcgcttaaggtc

SEQ ID NO: 229090 - DNA, 122 bp, Homo sapiens
gccctgcctgggcacccaggccatggctgcaggaggggctctatgggacacatgttggtccggcccactgggcagcgtcccctcccccacgaggccccgcctccccgggcacagctcagtgc

SEQ ID NO: 229091 - DNA, 122 bp, Homo sapiens
acaaaaataaaaccgcggaatctgccgtgctcggcgcccgagtttgagctacttaactctcgcatgcattttactgtcatatttctgtagagctgatggaaaatctgaaatgtttttgcaag

SEQ ID NO: 229092 - DNA, 122 bp, Homo sapiens
ggtgggggcgccggtccagcgcctccggccgcctcgacctcccccgggactcacccagcacgaagtagggcagctccgtgttctccaggtcgtccaccacgaccatttctcccgggaagtcg

SEQ ID NO: 229093 - DNA, 122 bp, Homo sapiens
aagtttcgtccaatcgtctgagcctgtcctcttattcccggttgtaactaaatactgttgcgagcgcagccgaagccctttgttggagatgtgtgagcgcagtctctacagagcgggctatg

SEQ ID NO: 229094 - DNA, 122 bp, Homo sapiens
tccggcgtgtattccccacccgcggagtatcccggtgtgcagcgatctcccgagagttggcgcagggccacttggctgcagagaacgtgtgcaccttcagtccgggaaacccgccccagccg

SEQ ID NO: 229095 - DNA, 122 bp, Homo sapiens
agttgtgccaacggtttctggccgtgatgctttcccttttcgtctctgggttggagggggcgggcgaggtttcagcgaagggtagtgctgttctgggggacttccgggtaaggtcccgcccg

SEQ ID NO: 229096 - DNA, 122 bp, Homo sapiens
tcgacctagtttccccccaaaagtctccggtgtgttattcccgatgtgggggggttgttacggggtggtcgccgggggttcgggagcgggggccgcgccttcaacggagctgcaatcctaac

SEQ ID NO: 229097 - DNA, 122 bp, Homo sapiens
agccgcacctctccctgcccaaccgggtacccacaaggcccctgctccaccggctccgctcgattcagctgggctgggctcctggcagctcagccgccagctcccgaggtgcagcacgctcg

SEQ ID NO: 229098 - DNA, 122 bp, Homo sapiens
agaagcagataagtgaaagcattgattaggttgatccttgaaaacaaacaaacaaacaagcgaagtggaagtgagctaggcggtcatgaggaaatcacagttttaccatttgaattgatatt

SEQ ID NO: 229099 - DNA, 122 bp, Homo sapiens
ccgcgcccggccaagtctccaacttgctcgaggtcactgaacttgcaattgaagaagctacgattcgaacccatgtctgtaggatcccagagccctcattgtcaaatacatactgaagtttc

SEQ ID NO: 229100 - DNA, 122 bp, Homo sapiens
gaaatcacattccctatcttacttttgggaccagtgggctgagccttgctaagtggagaacgctgtgtgacttaggaaaccaggtttggcttgtgagctgcaaactaccttgacatggcctc

SEQ ID NO: 229101 - DNA, 122 bp, Homo sapiens
gcccacagcaggaagtggaggggaaacctcagtgactggtccgagaccaacctggacttccgtgtaaggtacaatgcagataaaggggattactgtacttcaagtgggttctgaagcattct

SEQ ID NO: 229102 - DNA, 122 bp, Homo sapiens
gctggcccagccacagttagttgtgtacaccctgggtctccccgtggagatcatgactctcggaggccgggccctctaacttgtcaccttggtgtccctggagcctggcagggtttctgtag

SEQ ID NO: 229103 - DNA, 122 bp, Homo sapiens
cacgactcacggacatggccccagctaattggtagcccctgggttcaaccggaatcagcgcgtgagtccaagactgggagaaagaggctcatccgagactacaattcccagaatgcgcttca

SEQ ID NO: 229104 - DNA, 122 bp, Homo sapiens
gaagcggagggagcgctgcttccggagtccgccgggctgatttgcatagagtgtccgggccgccccgcccaggtcgtaaaccagtgccgacggccctgcggttgcgcgaggccatcctaggg

SEQ ID NO: 229105 - DNA, 122 bp, Homo sapiens
ggaaaacccatgaatatttcctgacgtaaaacccattgaaaagggggtgggggctggtgccgacgtgtgctaaagatcattgtcttccaactggcaggcctataatttggacaaaacaaggt

SEQ ID NO: 229106 - DNA, 122 bp, Homo sapiens
tggctccatgggtctccagggtttgaggagtaagagccactttcttttccctcttcaccccgcccctctcctgccccttcagccctgggcagggggactagaagtggggctgggcaggatcg

SEQ ID NO: 229107 - DNA, 122 bp, Homo sapiens
aacccatctgcttgctactttctctaccaaaatcacaaaattctaggtcttggctgggcgcggtggctcatgcctgtaatcccagcactttgggaggccgaggcaggcggatcacttgagat

SEQ ID NO: 229108 - DNA, 122 bp, Homo sapiens
cggattaacgaccctcgtcctaggggacaggtgtccatcctcactttcctgatagaagaccgcccccctagataagcgggcggcctccgtgcccatataaggccggcttgggctccacgccg

SEQ ID NO: 229109 - DNA, 122 bp, Homo sapiens
tggcgcgggtgtggcgtgggtgtgccatgtccatcataatgaagcaccatgtctgtagcgcgggtgtgccatgtccatcataaggaagcgccgtgtctgtagcgtgggtgtagcgtgtctgt

SEQ ID NO: 229110 - DNA, 122 bp, Homo sapiens
gtctctggcatctctcaggtctctccttgacatcaagagcagagcaaacatgctgaaggacgtggaccccatgtgaaccatagccttcctccctgtggctttggcctggtacagtccaaaat

SEQ ID NO: 229111 - DNA, 122 bp, Homo sapiens
tggaatcgaggctgtgtgtccgtcatcccagcccccggttggagcctgctctttgaactccgctgccttccttagcagcttctgtcctcttctgtgagtcagtcagcgagtgcttgggatcc

SEQ ID NO: 229112 - DNA, 122 bp, Homo sapiens
tcttccgcattcatcacctttcaaacggttcgtgtgagctgattcttcctggacgccaaacgagaactcaggtgccaagagggcaggggctaccaccctgactctccactgagctggttggc

SEQ ID NO: 229113 - DNA, 122 bp, Homo sapiens
gagggagagagagagaaagagaagagaggagagcgaggtggggtgggggtggggagggcgcgggagcagtggaggtttcgaatatcaatctatagatccttgtcacagcaaataaatttttt

SEQ ID NO: 229114 - DNA, 122 bp, Homo sapiens
gccccgagacaggcaggctgcggggtgggggtgctccaagtccgctggtcctctcttccccggaacgctccagatttccccacctgtcaaacgcgaggggctgggcctaggccgcctccacg

SEQ ID NO: 229115 - DNA, 122 bp, Homo sapiens
tggattcttgcccggggcgcacctcccagccacccctcgtcggcccctggagcgtcgcgccgcagccccagtcccagggaggccgcgtcctctgcctggtcctgggatcttgcagaccccat

SEQ ID NO: 229116 - DNA, 122 bp, Homo sapiens
tcagcccctttgtggatgcagacgctgtcacactcattaattagttaatctgcacagccccgcaggaggaagagtcatgttattatccccactgggactcagaaggaaactgaggccagagt

SEQ ID NO: 229117 - DNA, 122 bp, Homo sapiens
ccaactcccaatggtcaacctcccatgaagactgtcactctctaaaatcccagggacccgcggcaaacatcctgatttcctcctagtctcttctcttccagctctctctgaagaagacgctg

SEQ ID NO: 229118 - DNA, 122 bp, Homo sapiens
acccggcctcccagcagggctcagctgacaccacccaccagctgaccccgcagcttggcccgggatccccaggagcagggcaaccccaccagaggggtgggaaacttccggcagcaaatgac

SEQ ID NO: 229119 - DNA, 122 bp, Homo sapiens
gaggctgcttttctctcgcaagaagtgcaaaagcagcagacaagcttgcctgctcccagccggcacccgtaacccattggtgttttctcttcacagtgaaagaagccggaagagattttacc

SEQ ID NO: 229120 - DNA, 122 bp, Homo sapiens
cttcccaacctagcatggtgcagaacctcctttcctgcataatttataggataggaataacgagtctagaatgttttggggaaacacttctagaggaaggacaatggaaagaatggtctctt

SEQ ID NO: 229121 - DNA, 122 bp, Homo sapiens
caatgtcataaatttatatgagaccgaccctggccggacgcccccgctccgcccttcctgcgggtccgggagtcgatcccccaccgtgctccccaacccccgcaggccacccgggggcagag

SEQ ID NO: 229122 - DNA, 122 bp, Homo sapiens
gacaaatggagtatatgaaaaggtcctaggacattacatcaggtttctccagtaactcaacgttaacaaggtggagggaagagaaagtgctctcaattaagatctctaagaatcattacaac

SEQ ID NO: 229123 - DNA, 122 bp, Homo sapiens
cataaggacaatccgagtggtcctttttcccctcgtccctgccccctaccccacacatctcgttttccagtgcgacagcaagttcagcgtctccaagacttcgctctgctctcactccttga

SEQ ID NO: 229124 - DNA, 122 bp, Homo sapiens
agcaactcgggcccggtctgcacggcctgctcgcgggagaaggtcttgtagcgcagccgccgctcgcgctcgctctgctgctgctccagctgcttctccagcagccggttgcgccgctccag

SEQ ID NO: 229125 - DNA, 122 bp, Homo sapiens
cgttctccacgtcaacgtctacgtataggcacgtatgaggcctacacatgtacacacactcgttctgaacaccagcgtgtacacacagggagcctctcatggcagtgcacgggcatggtgga

SEQ ID NO: 229126 - DNA, 122 bp, Homo sapiens
ggctttcctgtgcgcggggtctccagcatctccacgaaggcagagttgggggtctggcagcgcgttctggactttgcccgccgccagtgcgattctccctcccggttccagtcgccgcggac

SEQ ID NO: 229127 - DNA, 122 bp, Homo sapiens
gtgtcctgacgaggccacccacgcggctgcagggctgttgggcatctcagagggcgagggcgccaaggggctgggctctagacgctgtcctggcaggcaggcgtggggagagttgggctggg

SEQ ID NO: 229128 - DNA, 122 bp, Homo sapiens
taacagtgccagaccatttcatgccctgcaggtgttgctgcttctgtcactgctgctgaccgctctgccttcctgcaccaatgggcaaagcaagagaaacttagggaaaagcaaaggtagag

SEQ ID NO: 229129 - DNA, 122 bp, Homo sapiens
tgcacaggcgcccgggctgtggatcgccaggaggcccgggctttggatcaccaggaggcccgggctgtggatcgccaggaggctgcagcctgatcccagcgtcactgctgcgacaggcacct

SEQ ID NO: 229130 - DNA, 122 bp, Homo sapiens
cttcacaggctcttttgtgcgcagctgccgggaaggtgcagcgtttgacaacaggagagccgtgtctttcaatgtggcaggccctggggaacgccgcctgccaggtaacctcccagtgacct

SEQ ID NO: 229131 - DNA, 122 bp, Homo sapiens
aaaaatgtattatcttactgaagataaatgaaagcactggtttttaaatatttttggtcacgggccctcttgaacagtctgatgatttctaaaatgttctctccagaaaactaaacctacac

SEQ ID NO: 229132 - DNA, 122 bp, Homo sapiens
tgctgaggtttgcgtagaccggcggctcgctgtgcaggctggcgctgaagccgccgctgccgctgccccctgccaccgaggctaccgcgggagccaccatgcctgccccgttgaccggctgc

SEQ ID NO: 229133 - DNA, 122 bp, Homo sapiens
ccggccgctcccccgcccatctgggccccgggccctgaaccccgtccacgccctgcgccccgcccctatatcccgggccctgagccccgcccacgcgccgcgccccaccccggtaccccggc

SEQ ID NO: 229134 - DNA, 122 bp, Homo sapiens
cccacatctaaggcttcactggggggctgcggctgaagctgggccaggccaggcgagccccggcacagcccaacccaccagtgaagtctgcgcaatcaaagccagcaattactgctctccgg

SEQ ID NO: 229135 - DNA, 122 bp, Homo sapiens
ctggccatcaagccctaggatcttgagtccagaaggaactacaagtaccgtgaggccaagcggttcagcgctagaggagaggaggaagaggacggcaacaggaaaaggggcgaaagaaagat

SEQ ID NO: 229136 - DNA, 122 bp, Homo sapiens
cctgccctctctccggactttccactcccccatcttattcccctctgaatcctcaccctgcgtcactggttctcagctgggggtggctttgcccccaaggggacattggacagtgtttggaa

SEQ ID NO: 229137 - DNA, 122 bp, Homo sapiens
aacctcttggctagctctgagtagattgagaaaggggtgggagaagcatcctccaacaaccgagcacttcctgtacattgaccaggtaggtaggcacgttgatcacaaacaccttgagggac

SEQ ID NO: 229138 - DNA, 122 bp, Homo sapiens
ctccctccatggaagaagggatgggcagaagagagtgtgggaggatgacagagagggagccgtcatcctggagcccaaagatttcaggcagtcactggttcttaactctggcacctgccaag

SEQ ID NO: 229139 - DNA, 122 bp, Homo sapiens
agggagtggggttgctatcagcctttgggaggcagagcctgcctcaggaggcgcctctgacgtcagtgttgctacatttagcatctcaggaaaatacatttgggtttgttttttggaagaac

SEQ ID NO: 229140 - DNA, 122 bp, Homo sapiens
cggcgacgcgagccaataggcgcaggcgctgcgagccaatgggaagggtgggaggggcgccgtggctaccctgcgagtgagaaccaatacaaaaggacatttcagggaaagtgggcgggact

SEQ ID NO: 229141 - DNA, 122 bp, Homo sapiens
ccagagcagctggagcacagagtgaatccacacagtgaacccacagggtgacagacaggtcgcacacgcccagcctaagtgaatgcatgtgaatgcaggggagggggtgggagaggaagtca

SEQ ID NO: 229142 - DNA, 122 bp, Homo sapiens
ggaatagggggcatgggttgaaaaactactttatcagtactgtactcagtacctgaatgacgagatccacaccccaaacttcagcatcacacaataaacccgcacatgtaccccctccgtca

SEQ ID NO: 229143 - DNA, 122 bp, Homo sapiens
tgaaaacaaaccaaccaccagcaggcggcctgggcttagggcaggcagcgccagggagcgcgcggccgcttcctggtgggtccagtgtccccggggtggagggcggggcgcagggcaaaggg

SEQ ID NO: 229144 - DNA, 122 bp, Homo sapiens
gggactgagtgtcctcctcggggactgcatgggccccgcaccgccgcctgccccgcgccacgacagcccagagcacggatgggcccagactgtcctacagccgtttcagcaggcgagggtct

SEQ ID NO: 229145 - DNA, 122 bp, Homo sapiens
tctgtatgcgaagcactgacgcggccgtgagcacctgcagggcttcaccctgcgccacaacgagcgaaccgctgtacaggaactctaccagctgtcgcactgtctgcgcgggcaccaccgga

SEQ ID NO: 229146 - DNA, 122 bp, Homo sapiens
cgtcgtccacccttcggagccccgctttcatgcgtgaaattcccagaagtcgcctgcgaccgcctccctgcttcaaacaccagagagggcccggggtcctggccggagacaggccgaacctc

SEQ ID NO: 229147 - DNA, 122 bp, Homo sapiens
tactgattcccggtaagcggtaggaacgtcctttttaaactctaggcatcgggaggtattcggagattgcggataccttcgctgagttctttgtaatccatcgtgcagaactatttcagtgg

SEQ ID NO: 229148 - DNA, 122 bp, Homo sapiens
ccagcacgtggccacatgtccttagctgttgggctttgaaagtgtcccttgggtgtcaggcgagtggagggccggagagacgctgcggcgctgcttagcgggtcctcccagagagtgtgtcc

SEQ ID NO: 229149 - DNA, 122 bp, Homo sapiens
acaaggagcaaaagaattccccaactaagccccgcctgaattccagacctacagaatccacgtgcatcagaaaagagttgttgttttgtgccactaagtatggatcctggtaggcaactcac

SEQ ID NO: 229150 - DNA, 122 bp, Homo sapiens
acccagggagaggaggcaaggatgagtggactccgcagccccaccaggcactgaacatgtcgacggggacagtccctctgataaaggcagatgggcggtcaaccggtggatgggcacaggga

SEQ ID NO: 229151 - DNA, 122 bp, Homo sapiens
taagaaaataactgtcgtttcttggataacaggctatttccaacttaccatcacttgtctcgtgtgtcagtcttcatcctaaccatgtggcagcatgcagatgacaagggttatcttgaatt

SEQ ID NO: 229152 - DNA, 122 bp, Homo sapiens
tcaccctgcacgttgcaggatttttcactgtgatttgagattgggcttcattcagtgggtcgtggtgattaatggtttcagaaggaagtgcagcaggaagagactttgcaggaatggaagag

SEQ ID NO: 229153 - DNA, 122 bp, Homo sapiens
cgagccccagcgacacccgaggggctacacagtatataaggtcaccgcccgggtgagtgccggtgtcgggctggggtagagcttggattgggacctgaggatctggggtggggaccctgatg

SEQ ID NO: 229154 - DNA, 122 bp, Homo sapiens
ctgaagcagcatgaggtatgtgggtgcttcagagacagtggaattgtcctccatcccccacgtatatatttaacaagccagtggacggacatgctttggtcatctttggggtgaaattggac

SEQ ID NO: 229155 - DNA, 122 bp, Homo sapiens
ccccaacacccgggtccccaaggctcttaccgaccagtaagcacagcacgtcgagcagcacgaagacccacctccgctgcatggtccccgcgacccccgacgccggtcccagcgcgtcccgt

SEQ ID NO: 229156 - DNA, 122 bp, Homo sapiens
catgattccaagcaacaggatcatccgatcaccttcaatggagggaagattgctgagaggcgcccttggtgacacttcatccaatcagatgtcgagttggaatgtgacgtagagccatgcga

SEQ ID NO: 229157 - DNA, 122 bp, Homo sapiens
acgcccgacgcgtcagtggaggcccaggaccaatccacagcgacctgcacgttcagagcccgccccaccctcccgccgactgccagccaatcaggcgcgagcctggccggggcagcccaaac

SEQ ID NO: 229158 - DNA, 122 bp, Homo sapiens
cccggtgaaaaacatgaaatgtgactatccggaaatggagtgtgatcacaggggcacgtacggctgagtcatccaaaacgctgactgtcgtgtagggctccgtggttttggtggttttctta

SEQ ID NO: 229159 - DNA, 122 bp, Homo sapiens
ggattacaacgaccgtgatgctccacggcgccgggagcttttgacggaaggtagcgtaggcgaggggcttcatgggactcgtattacaaaacccctcaccagggtgcgtcctggagaaaagg

SEQ ID NO: 229160 - DNA, 122 bp, Homo sapiens
tggctgacagctcaagttcccaggcagcctcagtaaactgagagatagagcagagtgattcgtcaagactaccttgtgactcagtcagatcccaaaatagaaatggggaaactctgtttcaa

SEQ ID NO: 229161 - DNA, 122 bp, Homo sapiens
ctgcctaatctgaataactgaatcaaggttctcccgaaggttcttttcccactcttgttgcggctgagaggtgtccttttctccaattgtattgactggtggcgtctccatatggatgctta

SEQ ID NO: 229162 - DNA, 122 bp, Homo sapiens
ggcctcaggaaacttacaatcatggcggaaggggaagggggagcccacaggttacatggccggaggagcaagagcgagaaaggggagttgccatgcactttaaaacaacccgatcttgcgag

SEQ ID NO: 229163 - DNA, 122 bp, Homo sapiens
gtcctccagtgtagttccacgttctccaaccgtcgctctggcgacccttcgatccgggttcgagccccaagtttgggtgctgcttgctgagactagcttggttgtggagatcccaatccagc

SEQ ID NO: 229164 - DNA, 122 bp, Homo sapiens
aaaacaggtgaggggggcgctacccctctttaatggaggcccacagtatgtgccaccgtccgcagaacaaatgcttctgatgagttctccatcagtcaaacgctgccatgcaaccagtgcac

SEQ ID NO: 229165 - DNA, 122 bp, Homo sapiens
tgaaatgaaattccacagggggattcgaaaggaaatgagaccgggactctccgtgcttctcggcccgccgcccttcctgtctcggggacacggtttctaaataaggttgggagggtgagagg

SEQ ID NO: 229166 - DNA, 122 bp, Homo sapiens
ctaaaagtggcttctggtcttcagaaggctttgttctccgcttttgattttttgacaccacgggtttcacaccccaccccaccccccagtctcacacaaaccactcaaactcgattgcgtct

SEQ ID NO: 229167 - DNA, 122 bp, Homo sapiens
cgtggcgctgagagtggactccctaggagcagatctgggctggggtctgggtctggtttacggaggtggagctactgagaagcccggagggaggggaagcagggcatcctgggctcagacag

SEQ ID NO: 229168 - DNA, 122 bp, Homo sapiens
tgagcccatggtatggagcttagacacaaggcgaagaactcacatggacagcacccagaccgggaggacagccacctcccacctttctcaagagggtttgggcaatcagcttcgcggggctg

SEQ ID NO: 229169 - DNA, 122 bp, Homo sapiens
gagaccacagcaaacaccctctcctgggccgtggtttttttgcttcaccaccctgaggtgcgtcctggggacaagcaaaaggctccttcccagcaacctggccagggcggtgggcaccctca

SEQ ID NO: 229170 - DNA, 122 bp, Homo sapiens
ctggggtcccgggtttgtgcccccggggcggctgggccccgcgggaggggacggccaacgcggaaatgggccctttattcacaataagtgccaaaatccaaactgaacacatctaaaaaaat

SEQ ID NO: 229171 - DNA, 122 bp, Homo sapiens
tatcctctggaggactcagcaaggactaccagtcaccagacaactttacgcgcacgtggtcgcaaggtgaacttgctattggttaatggcagtaaagcccgcccatcagcgctggtctgctc

SEQ ID NO: 229172 - DNA, 122 bp, Homo sapiens
gtctggggggattctgcggtgtgagaacttagggagaagctctctgaagacggacctgcccgtctggggacaggttggggggcctggggcttgcagtgttgcaggtgaactctagggcccta

SEQ ID NO: 229173 - DNA, 122 bp, Homo sapiens
ctcccgctcccgctgcggcgcccgctcagcgcgattgtctccgaccggagccgccgcaagcgccccctgcaggcggcgcgccacaccgctggccctccggcaccgccccctcccggccccgc

SEQ ID NO: 229174 - DNA, 122 bp, Homo sapiens
gacagccctcacaccacactcagcccctcactcacgcatacatcccaacaagtcacggagcgggaggacgccttttcacatagattcctcgcaggcacgcacatttcacacacaggcccaca

SEQ ID NO: 229175 - DNA, 122 bp, Homo sapiens
aatctggctgctgacttggcacacaacttcactgatggtctggccattggggcttcctttcgagggggccggggactagggatcctgaccacaatgactgtcctgctacatgaagtgcccca

SEQ ID NO: 229176 - DNA, 122 bp, Homo sapiens
gctaagcaactcacttcccttcctgggcctcactttccctaaagacacaaactcacacagcgattgagagggtgaaaccagcaaagagcctgcacaaatctcgcatgtcgtagatcaataaa

SEQ ID NO: 229177 - DNA, 122 bp, Homo sapiens
atattaccatggactatcatcaacttctttggctactggtatcctttccaggaagcacaccgctgcttttgctgtaatggtacccattttctgctgaagttgcctaggattgggctatgctt

SEQ ID NO: 229178 - DNA, 122 bp, Homo sapiens
gtagatctccgccctcaaacacgtccttttaacatcccgagtaaagagacgggaaggaagcgtgagaaactgtgagctttccagtgaaaattacaagtttggaacacacggctctgcccctg

SEQ ID NO: 229179 - DNA, 122 bp, Homo sapiens
cgggggtctgaagctgctgctgtgggcaaggggatcaggccctctgatggcctccatcaccgctcagaagtcactgggaggtttttcctgtctcgacggtcattcacatgggcagaacatga

SEQ ID NO: 229180 - DNA, 122 bp, Homo sapiens
cctctggaaactccccacaccccaccgtttccctaagatacccaaggaaactggccagctcgacctccctacactagggcagcagctgaaaccaaagaggggcccacttgcccactccagcg

SEQ ID NO: 229181 - DNA, 122 bp, Homo sapiens
ggccaccgcgggactgcgcactaactggccttgctctgcaggtggagcagattgtggaggcgtggaaatgccatgccctgcggagaggggatgaggcccggggcgccccgtgtcgccgccgg

SEQ ID NO: 229182 - DNA, 122 bp, Homo sapiens
ggtcctgaagcgctcaatccattttcctccatcgccagacccagggacgctgacactgcccgctgggacagtacctcccaaatctagcctcaatcctgcttacagcagaacgggtggggacc

SEQ ID NO: 229183 - DNA, 122 bp, Homo sapiens
aacatggtccccttcccacgtctccatttctttatgcctggctttgcccctctcaccagccgtggaagccagcagtatcgagctctcacagtgccggaactcacccagcaggtcttcgatgc

SEQ ID NO: 229184 - DNA, 122 bp, Homo sapiens
gcgctttagggcggagaaccaagtttgtgtgggtgcttcttcctgggggccctcgggctgcgccaggtgtgagaccggaatgccaatttggggaatctctcctgttctttcctttttaattt

SEQ ID NO: 229185 - DNA, 122 bp, Homo sapiens
gtcctaagcccttcttctcagagatgaggaaacccagcttcagagagttctggagcctggcgaaggctctgcagctggtgtactgggagcccaagcctgcaggtccagaccacggcccagcg

SEQ ID NO: 229186 - DNA, 122 bp, Homo sapiens
cataggggctttattggacgtctcaaagggaaactgtgcagaaagtccagcttggttcctcgcaccggaggaagggctcctgaagcacgtctccttggcagggtgcccgcgtttgcctgcca

SEQ ID NO: 229187 - DNA, 122 bp, Homo sapiens
tgcctcgccagggacgggacaaaccccgcagagggggccgtggggaaccctgaagggaaccgggcagggcgggagagacagatggcctgaatttcccaccgatcgccgagcggcacattggc

SEQ ID NO: 229188 - DNA, 122 bp, Homo sapiens
tgccctggagggacgctgccaggaacacgacccgcccctcggaaactccctcgctccccgcggactccccggcccctcgcgagcccacccggcccttcattccgtctcccgaacctgctcgg

SEQ ID NO: 229189 - DNA, 122 bp, Homo sapiens
tgtcgggcgcggcgggtggcggcggctcctcctcctcaggggcgggaggaggggactcggcggcccagagccgccccccggcaggaaaccagccgcggccccgcctcctctgcgcgtctgat

SEQ ID NO: 229190 - DNA, 122 bp, Homo sapiens
cttacgacacctagctatattcactgggaacgcaatctaacgtcaccaaggcccacctcccgggccctagaaatcgctctctgggaacaagctggggactttgattttgctagccctgcccc

SEQ ID NO: 229191 - DNA, 122 bp, Homo sapiens
ttgggatggagcgccgcgggcgcgcatgcgctgcccaaagttgccggatcccggatttttcgctcccagtctccgctctcgcccgctgtgattatggaattctccgcggccgggcgggcgag

SEQ ID NO: 229192 - DNA, 122 bp, Homo sapiens
gggaagtaaggatttcgtctagggttctctctaaagactgagatcttctggtgcaaaatgcgaagtcattctctgagcccatcccggatttactgagcgagcgaaggaagggtagagcttcc

SEQ ID NO: 229193 - DNA, 122 bp, Homo sapiens
gtgtgtgagtctgtgtctctatcacgctttactccaccgtgctggtccgtgtctctgtcacgttgtgtcccgccacgcggcgtccgcgtctctatcacgctgtgtcctgtggcgcgggtctc

SEQ ID NO: 229194 - DNA, 122 bp, Homo sapiens
aaggacccgctctgtttcaaagcgaggatgtgagtgacttcgtctgtgccgaggtctcttcgtctccaacctgccgggcacagggcacccacatgacacgctcaccccgtccctgggccgag

SEQ ID NO: 229195 - DNA, 122 bp, Homo sapiens
agcactaaggtaacacccagcatgacgcgtgtgcaccacggagtcactcggatcacgcgtcgaggaaagcactaaggtaacacccagcatgacgcgcatgcaccgcggagcattcggatcac

SEQ ID NO: 229196 - DNA, 122 bp, Homo sapiens
cggcctccccgggccaaaggcgtggccagggatccagatcaaacgccggtcttttggagacgccaggggcggcgcgcggccggtccctccttcgagccccccgcgctgggccctttcgaggg

SEQ ID NO: 229197 - DNA, 122 bp, Homo sapiens
gtcccaggggagaaggagaggcgtctgcagggggcagagaccgcagctacctgccgggtgcgccccccacccaggagcgctcgcttcgccccctttcctcccccgcccccacctccttattg

SEQ ID NO: 229198 - DNA, 122 bp, Homo sapiens
tcctccagggaatcagggccctccaggacccaagggcgccaaaggagaagtgggcccccccggaccaccaggtgagcaactctggacatcccaggcaggagagccatggcgtggccagcact

SEQ ID NO: 229199 - DNA, 122 bp, Homo sapiens
ggaccatgcaggaagtactgtcggaggcgtgttcctgactttactaccctgagccgcccacggctggggcagtccccgaggttccaccttaaggggcgggccggggcggggctccgctgccc

SEQ ID NO: 229200 - DNA, 122 bp, Homo sapiens
gtccccgaaaccttgtgtgtcgtcactgctgtgcgtcggcgggagcattttgcgagtgtccgggggccttcgtcacttccgcccccgcggcaaagcagggaggtcggaggactggagaggtg

SEQ ID NO: 229201 - DNA, 122 bp, Homo sapiens
taggatcccagagccctcattgtcaaatacatactgaagtttcccagttttcgggaaccccgcagtacaaggtgaccgaggacaataccagaaatgggagccccagaccccacgtagcggcg

SEQ ID NO: 229202 - DNA, 122 bp, Homo sapiens
tcccccgcccgcggcacccccccacccccaccatcaacagtatacacaaacacacacacacgcagggagcagggctctctgagcccgagactagacccacccccactccctttagggcaatg

SEQ ID NO: 229203 - DNA, 122 bp, Homo sapiens
cctgggcgggactggagactggggccccgcgcagtaagactctgaaggcaggatgcagcccgaccacccgcagccgcgagaaaagcagccctggggagtcggggcgggacctggattggaaa

SEQ ID NO: 229204 - DNA, 122 bp, Homo sapiens
ccagccgcccaggattcaggggctcctctgcgcgcgcgatgcctgcactcgagggcctcgcgggtggggcaggcccaccgaccactcacctcagctgggtcagaaccaagcggcctgctcta

SEQ ID NO: 229205 - DNA, 122 bp, Homo sapiens
cggggccttttgaggagggcaggccttcccctgggggcggggcctgttcctggggtggggcggggcgtccggcgcggggcgggcggaacactcacagtacagcgcgggcagagccattcacc

SEQ ID NO: 229206 - DNA, 122 bp, Homo sapiens
tgacagcttttatccagaaaactgtcgccagtaaaggttcccgtctcagtaaactgtaaacgacagtaggcccacagaaggttctaaggggagaggaagccagtgcaggaacagcaccgccc

SEQ ID NO: 229207 - DNA, 122 bp, Homo sapiens
gctaaagctgagagctttaacctggagctgccgcgagctgccagagcagaggatgaagcacggtcggatgaagatctgcagcctcaggatgaagatctgcagcctcaggatgaagatctgca

SEQ ID NO: 229208 - DNA, 122 bp, Homo sapiens
atccccggggaatgagcagcgggatagatcactggctgcagggcagggggcgctgtgagtcgccctggccgagctgtcggagaggagattacttagcagctggtagtgaaaggagacgcctg

SEQ ID NO: 229209 - DNA, 122 bp, Homo sapiens
cgcgctgcgctctggcgggagggcgcttctctcggctttttatagcttcatggcggaccacgttgagaacaacaacagcctggtccggggccagcgccaacttgtgcttcttggagcccctt

SEQ ID NO: 229210 - DNA, 122 bp, Homo sapiens
ccggctccggcgacggccaatcggagcgcacttccgtggctgactagcgcggtataaaggcgtgtggctcaggctgagcggctgggaccttgagagcggccaggccagcctcggagccagca

SEQ ID NO: 229211 - DNA, 122 bp, Homo sapiens
tcttctgaaaatccccgtttcctttcagggctttgtttccttaagtggtttctatactatcgaggcccattttcccctgagagtccccatttacgtatttttaaagaaggggctcagtagct

SEQ ID NO: 229212 - DNA, 122 bp, Homo sapiens
ctagctagaacttactagctatgtgaccttgggcaattgtggaaggcgggataatgcttccgcctcaggatgtccacatcctactccctggaacctgtgcgtttgttctcttgcttggcaga

SEQ ID NO: 229213 - DNA, 122 bp, Homo sapiens
ggcgacggcgtccaattcccaaataaatagaacaaactcctacttggaaaaggccttccccggggtcttcctgcgcccgcggtccagctcctctgcagacggccatcgtgggctctccgcag

SEQ ID NO: 229214 - DNA, 122 bp, Homo sapiens
actccgtcccaattcaggacccttcttgaactcactttttgtcagggcaaatccagtccccgtcactgactcggaaattcttggtcgacatcttgaacgccaccagcacagccacccgcagc

SEQ ID NO: 229215 - DNA, 122 bp, Homo sapiens
atgaagtctgatatatcaattaactcttcctgtcacaaaatatttctctgttgcatgcaacgctgtttgattgcattttacctacagtagaacttctttcaaaattggagtcagtcctctca

SEQ ID NO: 229216 - DNA, 122 bp, Homo sapiens
caccgaatcaaagtgacaagaaaacagcttaagcagaaaacagctaatacctaaaaatttcgaactactttctgtggttcactgtggcttggtcatgtgcacttgagatcaagtacacatgt

SEQ ID NO: 229217 - DNA, 122 bp, Homo sapiens
gcccctcagtctccggaagccccgcccggcagactgttcccaggatgcaacacgggctcgcgtctaaaagagctgtgctttgttggggctatctgggagtttccgccttccatgaagtgcgc

SEQ ID NO: 229218 - DNA, 122 bp, Homo sapiens
tcgggctctgcggtctggaggctggagagcggtgaggaccagggactgccctgtccatctcgggcgggtgccggcgtgggtggcggggcgcaggctgggaaagggagggcgcaagtaactgg

SEQ ID NO: 229219 - DNA, 122 bp, Homo sapiens
gtaagcatatatggtgggttggttgttaatactttgtcaaatgcatgccacttaactaatcgtgggaggtcactataattaccatttagatgtgagaggtatacggagggagaaagaagtca

SEQ ID NO: 229220 - DNA, 122 bp, Homo sapiens
tgcccatcccccggagaccccatagtggccttcccacccagttagcccagtggtgaggagcggaaaaccgagactcaaagcacaggctggcgggaagtgcgcggcgccgcgactccgggccg

SEQ ID NO: 229221 - DNA, 122 bp, Homo sapiens
cgcgtcgtgcgccgcggcccgggcgggcgctccccactctgcttctagccagcgagactccgagctctctgctcgttccgcgcccttcccggtgcgaagcccccatacaacgccccgcagag

SEQ ID NO: 229222 - DNA, 122 bp, Homo sapiens
ggcacaagtgtctgggatgtgcaacatagagggtgtagcttcctgggtggctggggacaccggaattccacccagggatggagagagaatcctgcctggggacagagagagaatcccattca

SEQ ID NO: 229223 - DNA, 122 bp, Homo sapiens
ctctgcagccgggcccagcggctcctgagactggggcggacctcacacctgaccccggagcggctaatcctgcccaaccgtcccacctgccacgtgccctcggggctggaacgcggcgcccc

SEQ ID NO: 229224 - DNA, 122 bp, Homo sapiens
aaaaacaaacagtagccttccccagttgcaggggcctaaaatatctcctaatctgaatttcgtctcaggacaggaaactattccataggcttcctcgcaggcttctgtgctggagtttgtcc

SEQ ID NO: 229225 - DNA, 122 bp, Homo sapiens
tgggccttccgaaggccttcagctgatggagagcttttaatttcacattttggcccccaccgcaggtgataaacaaaggtttccccgctgctctggctagggtcagttatccggcctccccg

SEQ ID NO: 229226 - DNA, 122 bp, Homo sapiens
tagtggaggaaaaatccacacatacccccatcccaatcccccagattttcttcaacatgccgcttctgttcttggaagagttaactgcctcgattctgcataagagtcccaaacactgagaa

SEQ ID NO: 229227 - DNA, 122 bp, Homo sapiens
caccattccagaaaggctggctttctgcaagcgtgcgggggcggtgagagtggagggtggcggggttgctcggggcccacccaagcataactgtctgaagggcacacctcacaacggaaggt

SEQ ID NO: 229228 - DNA, 122 bp, Homo sapiens
acctcggagggtggcgggacggtgattccacccacagccgcgatgaccgaggcccagcatcgcagcaagtggcagagaagccagagtccaactaccgcccctgaaacccaccgcacctgacc

SEQ ID NO: 229229 - DNA, 122 bp, Homo sapiens
gagtgggcacatccctggactgagagtgccttgaggaaaagggctgccctcctgtttctgcgattaaggatgcctatgaacggaatctgccgtatcagtggacatttttgtgtttaaaagga

SEQ ID NO: 229230 - DNA, 122 bp, Homo sapiens
gtcctccttttgccggcgaaagactggcaaggggggcgcaggcgcaaagaggtcgctacgcgcacgcgctgttgttttctcggctgtgcaccaggctgtcgtgcccgggcacgctctccctg

SEQ ID NO: 229231 - DNA, 122 bp, Homo sapiens
acaccacctgggaaggatcccagagtgcagtcccagcccaggccacccggggaagggagtcggtaaagtgggaccttgagtccccacggcccctccggctgcccctgctcagaggctgctcg

SEQ ID NO: 229232 - DNA, 122 bp, Homo sapiens
ttctgagggaagcaaaagaacgtgtgtgtggtggggctggaagctcagggcaagagtctgcgtgtgcggccggaaggctggcgagtctgagagccgcgcggtgcagaaagaaggcggcggct

SEQ ID NO: 229233 - DNA, 122 bp, Homo sapiens
tttttgggattttgtgtggatgtgtgtgtgtgtgtgtgtgtgtctttttctccctctactcgtcccaacagaaacacaatgaatggaaggatgagtcagtgtgcttctggaagtgtcttcac

SEQ ID NO: 229234 - DNA, 122 bp, Homo sapiens
gtccccgccatccctgccatcccgccccttcgcgtcctgggaaccagctcgcttccgagccgcacgcatcgagcctccaggcatgccccgctataagctggctttaatcctgaaagccatgc

SEQ ID NO: 229235 - DNA, 122 bp, Homo sapiens
ggtgactctcttagcgtggatggcacacaggttagtatcttccaacagacccaccaggtacgcttcgctagcctcctgcagcgcaccgacggctgcgctctgaaacctcaggtcagtgttga

SEQ ID NO: 229236 - DNA, 122 bp, Homo sapiens
atccttaagaccaacttaggttaagtccatgagagcagatactgttgacattcccttgttcgatcacatataatagattcaaattttttgcataatatctgctggtgaataatatagtgaac

SEQ ID NO: 229237 - DNA, 122 bp, Homo sapiens
gttagcatagcctcctgcccgcggagggaggcgggaagggcttaccccgtctcctgcatccgtgaggaagtataagtcagcctcccggagaactccccgcgttcgtttcctctcggacttcc

SEQ ID NO: 229238 - DNA, 122 bp, Homo sapiens
aacgccgcccttcagggaatgggccttcatagatgtctgttttccgaagacaccttggagcgggtggatgggaaagacctgcctttcacctgacagacattctcgactgcccctgccggtgt

SEQ ID NO: 229239 - DNA, 122 bp, Homo sapiens
ctgaggccgggaggtgggagaggcgggtcctgcagccccgagagccccccgcggctgcagcggcagctgtcacctcctggcctcgccccacagcacacctgagcctcctgggcagccccgag

SEQ ID NO: 229240 - DNA, 122 bp, Homo sapiens
ggggctggtagaggggcctggggctagcgcgcacccgcgagggtggaaggtctggagatccgggatggggaactgggtccttcgttttaaaaggtgcctctctacacggagggaggggagca

SEQ ID NO: 229241 - DNA, 122 bp, Homo sapiens
agtgggactctcccctagcagggtctggtgttccgtaggctagagtgcccctctgctctgcgagtgctgggcgggaggggagttggtgagagctggagacccccaggaagggctggcagaag

SEQ ID NO: 229242 - DNA, 122 bp, Homo sapiens
aagagtataagggctgttgccgctgtggcgtgcaaacatgatggctagcccaggactgtacgatcaagctgtttggataaataggctaatggttgcaggcctggtccctgagtaagaatatc

SEQ ID NO: 229243 - DNA, 122 bp, Homo sapiens
cgaggttatcagggggacacgtggggaagtgatggcaccggcgaggttatcagggggacacgtggggaagtgatggcacccggcgaggttatcagggggacacgtgggggaagtgatggcac

SEQ ID NO: 229244 - DNA, 122 bp, Homo sapiens
gggaggaagcagggttaatcctggccagaccccaggctggagggctgcagctcctggaaacgacccccggagagatggacgacccacgtctccacacgtgggtgctgcacccccacccctcc

SEQ ID NO: 229245 - DNA, 122 bp, Homo sapiens
caaaattagtttcgtttcaaaacctttctttcaggaagaggttgtggttgattacttctgcgacaggtagatgcaaggttgagcaatcatctcttaacagaagtggtcacactagaataatt

SEQ ID NO: 229246 - DNA, 122 bp, Homo sapiens
caaccgcagttgtccaccgagatccaaaccccgcatggtcctacctgaggcttcaagtcacgcttcttcactcagccaaaggtctgtgcacgcgtcgttctggcccccagattctgctcctt

SEQ ID NO: 229247 - DNA, 122 bp, Homo sapiens
ccgccggggaacctggggactgaggctggtcattaactgtggagtgtctcctttcctccccgcagcggtgcagaggggcaggatgccgccgacccagccgacccacgggcagttcgcgctga

SEQ ID NO: 229248 - DNA, 122 bp, Homo sapiens
aaaataaaatccaagcctgcagtatgtaacttgattccctttccagcaaggggaatggcccgttgattctcatggaaaaatatggtcacactgtccgtgaacttgactctacatgaacctct

SEQ ID NO: 229249 - DNA, 122 bp, Homo sapiens
gttgaaaaattaaattgacaggctggattctgcaaagatctttggacatttaagtatcttcgaccggcgcgaaaagaggcggcctgaccttggaagtgggacggggtcctgcagcgggtcct

SEQ ID NO: 229250 - DNA, 122 bp, Homo sapiens
gggcgggtggggagacgcggggcccaggtgggacgccttggaacagcacccgcgtctgcgcggggagcgaggccgagccctctatttagaagcaatttgaaaaccttttcatttattccttt

SEQ ID NO: 229251 - DNA, 122 bp, Homo sapiens
tacggcacctgttgactctgcactttgagaaatcaattcctctttagcgtcagggctgggcgtttcggcatcacctcctaggacactgctcacagtatgtgctgccaaaaggcaacagcaat

SEQ ID NO: 229252 - DNA, 122 bp, Homo sapiens
cttcatgggcatgagacccaagcagccacacgaggctctgaacccagaagagcatatgctcggtttaatggtctgtcatcttagaattgttaataaagtttttatcccgcattttcattttg

SEQ ID NO: 229253 - DNA, 122 bp, Homo sapiens
aggttcactaaacccgtctggggtttctacacacgacctgaaggcatctccgccctttggcggcagatagaggaatagaaacgactgaggagacatgaagcagggaggaaaagctggatgag

SEQ ID NO: 229254 - DNA, 122 bp, Homo sapiens
atacagcacactgatggtcttgactctttaaccaatttgccagtctgtgtcttttaactacggcatttagcccatttgatttaaggttaatatgatgtgtgaatttgatcttgtcattagga

SEQ ID NO: 229255 - DNA, 122 bp, Homo sapiens
acgcgcccggggagggccagcaacaagccgcggcccgggcgcgacagcggcggtccgcgccgagccgttccagccgccggcctactgtagccgctgcgccaggacatttttttttaaagctc

SEQ ID NO: 229256 - DNA, 122 bp, Homo sapiens
aaagtgacttctaccctgtcacaggggtgaggaaaatgggtccccaggctgtgaaggcctcgtccctccccacggccatgggaaccggactgaggttccttacttggctggacacagtttga

SEQ ID NO: 229257 - DNA, 122 bp, Homo sapiens
ctctgtctgcgtcagagtttcccaagctaacctggagcacagaacacttctgagataatgcgtggtatgttggtgttgatacacgcagtatactcatgctctcagagaccggtttgataaat

SEQ ID NO: 229258 - DNA, 122 bp, Homo sapiens
cccgctgccgcagacggagggtgcggagcgccagagccgcgactaccaagacatctgaaacgctcacccgggggcgggggcggagggggcgggggacgaaatctcccgctgtccagggagcc

SEQ ID NO: 229259 - DNA, 122 bp, Homo sapiens
tacttcgctacttactgcactacttcgcagcatcacaactatgatggaaatccttacttacgttaaatatctggtttctaggtcacctccctgacggggacggtagggaccgtcttctcgtt

SEQ ID NO: 229260 - DNA, 122 bp, Homo sapiens
tttataaattataggtcaaacagcaaacacaggtcaccatgtttgctacataacactcaacggttttcccttgtgtatataattactgacattcctaccagcattctatgagtttgtttgct

SEQ ID NO: 229261 - DNA, 122 bp, Homo sapiens
cccctgccccatacacactgataatttttcaccgtctttcttcttccatttagctgttaacggctacatgtatggcaaccagccaggcttaaacatgtgtaaaagggatagagtttcctggc

SEQ ID NO: 229262 - DNA, 122 bp, Homo sapiens
aacgctgtccgctcagagcgttgaaagggcgggggcttagagattgtccaatcagggcgccgcttcctgagctccgaggccccgagggcgggacgtttcgtcctccctgccgcgcgtgccct

SEQ ID NO: 229263 - DNA, 122 bp, Homo sapiens
gatcggaccatcctggctaacatggtgaagccccgtctctactaaaaattcaaaaatgagcggaccaagatggcacacgcctgtagtcccaggtcccagctactcgggagcctgaggcagga

SEQ ID NO: 229264 - DNA, 122 bp, Homo sapiens
ccagaggtaattctccaaagtgaaagaaagagacacaattatcaaattactaaaatggaacggcataatttgtagagctccagggcactttggagatgggtcctgaggacgcccagaaaccg

SEQ ID NO: 229265 - DNA, 122 bp, Homo sapiens
aaatacgtagataaatacgggaccgtcgtgaatttgagtgtcacctttgtggagcagccacggtaatctctgtcattccaattttttttatgtgcactaccaaagcaagaacttgtgtagga

SEQ ID NO: 229266 - DNA, 122 bp, Homo sapiens
ctcatgaagtgctcggcacgactcaccctcccccatggaaccacaggtgcccgcaggcagcggggacagcccccggcccaactccagtacagcccagcacatgggaactggaacccagagca

SEQ ID NO: 229267 - DNA, 122 bp, Homo sapiens
gtgtgctgtccgccagagccatgacagagaggtggccgggccgggacagtggcaggaagccgcgctgcactcaggagctgcaaccgccttccccggagccccggaacccggacgctcgctca

SEQ ID NO: 229268 - DNA, 122 bp, Homo sapiens
tctcgctggcttcagaaatgaaactgcagactctccagacaagtgttacaactgctaaggcgacgcttctggagttgttcgttcctctcggtgggctcgtggcttcgctggcttcagaagtg

SEQ ID NO: 229269 - DNA, 122 bp, Homo sapiens
ttctcctgagcagcctcatcagaaagaagctgcttcccgaggcctctctgctcatcaccacgagacctgtggccctggagaaactgcagcacttgctggaccatcctcggcatgtggagatc

SEQ ID NO: 229270 - DNA, 122 bp, Homo sapiens
gcagaccagcctgtatgtgtctgaagtctagcaacgacattcaccaacaaggcgggacagcggttccacctaccttactgcaggagaggaaggggctttcagtataggaaagccagaactca

SEQ ID NO: 229271 - DNA, 122 bp, Homo sapiens
agtagtaactgaggtgtggtgattagcgaaaggtcactcctgccgtgccaccttccgtgccgatttccctacctaacacggggccagggaaggcagcgagcgcaataaatcagaacacaggt

SEQ ID NO: 229272 - DNA, 122 bp, Homo sapiens
cctccgagggcctccaagggtgcatgtgagccacagtcaccaccacagtgcgccgacgaccgccacagaaacagccacggcaccgcgaggaccgtcctgcaccacaatcaggacacagcgat

SEQ ID NO: 229273 - DNA, 122 bp, Homo sapiens
tggacatggtggcaggcgcctgtagtcccagctacttgggaggctgaggaaggagaatggcgtaaacccaggaggcagagcttccagtgagccgagatggcaccactgcactccagcctggg

SEQ ID NO: 229274 - DNA, 122 bp, Homo sapiens
ccttgactccctgagcacttgtgtgtttctacaagaagcttcaggactgaggcaagagcacgctgggaccaagctgagcctctatggacggcgcatgacggagccgtttcactccatgtttg

SEQ ID NO: 229275 - DNA, 122 bp, Homo sapiens
tctgagattttgggcacattcaaatctatatcctgggaccctgtaaaggtccatgacatccgttggaactttgaaaagttcctggtggggcctgatggaatccctgtcatgcgctggtccca

SEQ ID NO: 229276 - DNA, 122 bp, Homo sapiens
tgcccttcttggaatgcaccaaacataaaagcattttttttcaagctttactttcactttcgagagtgccgtctatttgccacacacttccctgatgaaatgtctggatttggactaaagaa

SEQ ID NO: 229277 - DNA, 122 bp, Homo sapiens
tcccccccggaagccatagggtgggtgttggggagggccagtgtatccatgaggcagcatcggtggaggaggtccacacataccatggaggcataggacgtgagtgacccatgggagatcca

SEQ ID NO: 229278 - DNA, 122 bp, Homo sapiens
taaaatggacatcatgtatcagacaggaaaaagccagtaagacggaagaactcacaccctcgggatcccaagacaagatacttccatgggatggatgtaatgaacagtgttaaaagatttct

SEQ ID NO: 229279 - DNA, 122 bp, Homo sapiens
gctccgcgaaggcgtgcagatgggctggatgtaataattctccaacttgacccccttggccgccagcctgtccagcgtaggggtctcgatatctgaaccatggtagcccacgtcgtggtagc

SEQ ID NO: 229280 - DNA, 122 bp, Homo sapiens
gcactaagcctctaacaaggatgaactactagaaatttccagaaggcgttatgctgttctcgacataagctgttccccagagcctggaaaactctagctctttctctgccggatttccgggg

SEQ ID NO: 229281 - DNA, 122 bp, Homo sapiens
cagggccaaggtaggagccgctggcagcacccctccccccacccctggccagcagcggggcgctcacacatgtttatgtgcctcaaggacaaactccactgtcctcagctattgctgctata

SEQ ID NO: 229282 - DNA, 122 bp, Homo sapiens
tccatttcagttcatggtcatgtcatggctctatgacaacacctcattgagcctgcggcccgcggtggtgggagaggtgggcgtcccgagaaacccgccttttcctgccgagtcagttacat

SEQ ID NO: 229283 - DNA, 122 bp, Homo sapiens
gggctcacttgtgggtctgacaattcgcccagggaaacgagaagagacgaagcgagggcgcgagctagtgtcgcctgagacgaggaagaggacagctgcagaactaatttggattacattcc

SEQ ID NO: 229284 - DNA, 122 bp, Homo sapiens
gcttccatgccccaggctttggtgcattgtttctctacccatccctacctctcttatccccgatgtttggctcaaacgagtgtctccttggctttggccacagcagagtgcctcctactggc

SEQ ID NO: 229285 - DNA, 122 bp, Homo sapiens
ccgggggcagggccaggtggtcaaaggtgcacacagtccccacggctccctcctgacggtcgggctctgcctcggtgcacaggctcctgcaggcaggcaaggctccaggccaggctctccaa

SEQ ID NO: 229286 - DNA, 122 bp, Homo sapiens
tgttgatgccccgctggcgcatcacctctgccagcgttgccccgtccacgggcaggaccgcgtgctccatgcagtccttcacctgcgggctgcagcagctcaggcccccacccagctcctct

SEQ ID NO: 229287 - DNA, 122 bp, Homo sapiens
gactgggaaacggggcaccaggctgggctttagaaatcgctggagaagcctgggtgcggccgcagcccgcgcggcctaggacggaagcgacgccccgccccgctccgcgccccgggcagccg

SEQ ID NO: 229288 - DNA, 122 bp, Homo sapiens
ccccgaagggagcatttggagagagagaagcaggaccccgggaggcgtcaatgtccttgccgtggcaccatcatgtctttgctccatggagaagagatgaaaacgggagcctctttgctgca

SEQ ID NO: 229289 - DNA, 122 bp, Homo sapiens
taaccgactgaactgagggcgtgaccaaacgacaagaaccggaggagaggacccggagaacggagcagcatcccgccgcccgcctccaggaaagcccgaggcactgtagcaggagggtctgg

SEQ ID NO: 229290 - DNA, 122 bp, Homo sapiens
ctttcttttttttttttgagacggagttctgttcttgtcacccaggctggagtgccatggcgcgatcttggctcactgcaacctccgcctcctgggtccaagctattctcctgcctcagcct

SEQ ID NO: 229291 - DNA, 122 bp, Homo sapiens
gtaccagggcctggagctgggctcccacgactcctcccatcagacggagtgctgggcctccggacatggagctgtgccacttgccacctacatctgagagcctgcctacatgctcctgcgcg

SEQ ID NO: 229292 - DNA, 122 bp, Homo sapiens
caaatggactacccatgtatattcaatttctcctatttattaaaattaataaaaatgggacgtgttgtatgagaccctttactgtcaccatttcttaggctatatccataatggaatgaaga

SEQ ID NO: 229293 - DNA, 122 bp, Homo sapiens
agagtcacctgcagctcttttcaaactgtcgctccacagctgggcctcaggcatcaatgtcgaaagctctccgggtgattccagcttgcagccagggccgttccagcaactccaaggctggc

SEQ ID NO: 229294 - DNA, 122 bp, Homo sapiens
gtgtagccgccggaggtgcggtgctcagttcttggaaggggcccggatgtactgaggatgcgttacagtttcactcgaggaggcagtagtggaaaggagcagtttttggggtttgatgccat

SEQ ID NO: 229295 - DNA, 122 bp, Homo sapiens
cctcctgcgggcacctggcagaagcgcccagtgaagtccgggggacacaggcactggtttcgcgaggagcactggccgccattcatgcaggggagagggcacaccactggggagaagagtgg

SEQ ID NO: 229296 - DNA, 122 bp, Homo sapiens
tttccacaccagtaaatcaccaataacatggctccaaatgtctccctttgggtgcagtttcggcaagctagaaacactctaatcactttgaaggagatgacataaaatgaagcaggctgtta

SEQ ID NO: 229297 - DNA, 122 bp, Homo sapiens
attgatcttctaggaaaagtgttgaaactcacttgttctgacctccttttatgggtctgccgtacttccacttacctcacctctgtggttcttaaactttgggagttatatagccctttgtg

SEQ ID NO: 229298 - DNA, 122 bp, Homo sapiens
ctctctgccctggtgactgtctcgtggacagcctgtgcattctctcaagccctagagagacgccctcatgggtgggacaccagcttgtccacttgagcccagccacctcacacagctctctc

SEQ ID NO: 229299 - DNA, 122 bp, Homo sapiens
ctcctggctcgcccgggtccccgcttcctcacccgcaggtcccaatagctcccggcgccccggctcggttcggcttggcaccaaaatgtccgcggcctccacctctcgctctcccggtgcgt

SEQ ID NO: 229300 - DNA, 122 bp, Homo sapiens
gatttttaggttgcttgacacccagacaagaccctgatcacagttcagacgggtcatttgcgttcaccgtggtagtagaaggaactctttaaggggacccctgtcccagattggtctggctg

SEQ ID NO: 229301 - DNA, 122 bp, Homo sapiens
ggttaagacctcggtgtgttgccactttcggcctcagcccctcgtgtgtgtaattacagccgttcccagagagaaggaaatccccgggcttcggccttaactagccccggcgttacactacc

SEQ ID NO: 229302 - DNA, 122 bp, Homo sapiens
atggcctaaggctggcgggcctttgattggccccggctttgcccttgccacgcccctctgcgctgggattggcttagtgctgggattcccacccacccacagcccgccatggcgtctcagct

SEQ ID NO: 229303 - DNA, 122 bp, Homo sapiens
tcttttttttttttttgagatggtgtctggttctgttacctgggctggagtccagtggcacgatctcaggtcattgcaacttcagcctcctgggttcaagcaattctccggcctcagcctcc

SEQ ID NO: 229304 - DNA, 122 bp, Homo sapiens
tgcggtgatggaggaagggcgcaaggtttgtaaagagtctccagcggtggcaggaggaggcgtcacgtgagcgggaaggtgaagatgctgagtcagctcctggctgccccatgggtaccgca

SEQ ID NO: 229305 - DNA, 122 bp, Homo sapiens
aatcatgactcactgcagccttgaattcttgggctcaagcgatcctccccgctcattttccggagtagctgggaccacgggcataagcaactgcacctgcctacaaccaaattttaatcacc

SEQ ID NO: 229306 - DNA, 122 bp, Homo sapiens
cttcgagtgacccgggtgccgaggagcgggaagagttgctggggtaagggtctgcggcgacgcccggcgccctgtgccgtgtccacgggtgcatagtccttgagctgcatggagggtggaga

SEQ ID NO: 229307 - DNA, 122 bp, Homo sapiens
gggaggtcagcaggcggccgagcagcagggacagaccctcagcctcatctcatcttggcccgggacctgcaaccctcagccttcaaaaccacaccaaagccaagcggcccccagggcctgca

SEQ ID NO: 229308 - DNA, 122 bp, Homo sapiens
gcgcatatgatatgggtatcatttgttgtgaaagacactaacccatgatgtttttgtttacgtatatctgtaaatgtatcaattctgtagttggttaatttttagttacgaaaaaatgaacc

SEQ ID NO: 229309 - DNA, 122 bp, Homo sapiens
ccctatgtcctctagttctcagtcttgagaccagcacccagctggctacatcagaattgccggtggtgatgttttagaagattccaaattcctggactccatccccggaggttcatccccta

SEQ ID NO: 229310 - DNA, 122 bp, Homo sapiens
ggacctggaaggcccttaaagaacaaggaaatccctaaagtattttatttaagagcaagacgctcctaacttgagcactggagaaagacattctaggtctggacgagagttcaactccttcc

SEQ ID NO: 229311 - DNA, 122 bp, Homo sapiens
gacagcaggagctgccgagctccgagtgctgggccagcttgccttgggcttctgcagcagcgccctccgggttcccctcctctcctccgactccactggcttttcaccactgtcaggtcttc

SEQ ID NO: 229312 - DNA, 122 bp, Homo sapiens
aaatggaagttgagagccttccggtgggagaatttctgataaaacatcctaggttttggtcgagcctcctgcaggcctgtgctctaggaagcagggcagacctggaggagtgtgaggtgaag

SEQ ID NO: 229313 - DNA, 122 bp, Homo sapiens
cactgttccgatgtgggcggggccacagactcggccggatgtgggtggggccacaagcttcggtttacttcgtagatagttgggtacaagtgacgctaggatgataggcggagtcaacaggt

SEQ ID NO: 229314 - DNA, 122 bp, Homo sapiens
cagcaaagctgctgtagctagactgcctttctagattcctccttgctatgcagggcatctcggaaaaaaaggcaactgtcctagtcaggggcttatagataaaacccccatctccctgggac

SEQ ID NO: 229315 - DNA, 122 bp, Homo sapiens
ccacagaaaaacctgcaagcaatttttcaagacagttttatttgtaataggcactccccccgcccaaaaaaagaaggaaccaaaatgtatgataggtgaatgctgaatgattaaacaaactg

SEQ ID NO: 229316 - DNA, 122 bp, Homo sapiens
ggactttgggcatccagtttcagggactgagccgggttgggtcggggggcagcatggcatcggacgtggtgccgtctgtgcctctcctgcctgcggtacagccggcgcaggtgtttccgaac

SEQ ID NO: 229317 - DNA, 122 bp, Homo sapiens
gaggcgggagccccgaatgcggttctcgcttgctgcgtggcggtaaaggaccgcaggtgtcgtaaaagggccgcagtggcagcgtcctggccgacggctagtagcccattttggataccgtc

SEQ ID NO: 229318 - DNA, 122 bp, Homo sapiens
aggctggtttctggaaatccattctgactctgtgacagcggggatggatgtgaccttgcccgtggttagaaaacaaatttactgagtaagtatctaaaatgataatgtaggctgtgtgcagt

SEQ ID NO: 229319 - DNA, 122 bp, Homo sapiens
aacaaacaaacaaacttaaagctaacaatcaataggtgacatctgggaaaactgtgaccccgcagtattcaccctatgaggaaccgggggagagacccgtgcactaggggtaaattgcttat

SEQ ID NO: 229320 - DNA, 122 bp, Homo sapiens
tgttttcttctttgtgctgttgggtgtgttgtgacccttcagacttcttcagctccactccgctgatagaggctgtgccttctcagggcgtgctcttgaaatgcaacctgctggagaaagac

SEQ ID NO: 229321 - DNA, 122 bp, Homo sapiens
cgcagccaatggccaggcgaggaggctgttttaaacggcagagcccgctggccaatcaggcggctctcgtggaggcagctagcgcgaggctggggagcgctgagccgcgcgtcgtgccctgc

SEQ ID NO: 229322 - DNA, 122 bp, Homo sapiens
gaggcccctccacggggccaaactgggtgcgcttggggatgcgccgcttggagaacaccccgcccagaaacctgtctatgtagagcaccagggggaggctcgccctggcccgggtgagcacc

SEQ ID NO: 229323 - DNA, 122 bp, Homo sapiens
tcctggaagagacgcctccgtgttagaggccgtcagagcacgggctttgaacaaaacttccggaacgtatgtgagtggctgtgatgctgcaggaccgtcggaagacaaataacttctctatc

SEQ ID NO: 229324 - DNA, 122 bp, Homo sapiens
gtcagctccctcctccactcaacctcctgggtgtggaaatgcacagacacctggagcctccgtgggcaccacgcagttttgggtcgagggctctgctccaagcaccccgggcataaaggcgg

SEQ ID NO: 229325 - DNA, 122 bp, Homo sapiens
ctcctggtctcaagcaatctgcctgccagcctcagcctcccaaagtgctaggattacaggcgtgagttactgcaccaggccagggggataccattttgattaaggaatccaactttggtgga

SEQ ID NO: 229326 - DNA, 122 bp, Homo sapiens
cctgctgtggtctggcagccccctctccaccctcctctctctcatttcctgcctcccacacgtatgccctgggcacctcatcagggctgccctaggggagggccctccttggcacagcccct

SEQ ID NO: 229327 - DNA, 122 bp, Homo sapiens
tgcttgctttcaaatcacccttatttgacttaaatggccccaaagcacaagtctcgatgccgacaactcagttatgcgaaagagaggccgtgaagtgcttccttgaagtgcaaaggtgaacg

SEQ ID NO: 229328 - DNA, 122 bp, Homo sapiens
ggggcgcgctactcccaccctggtgcgtcactggaacctcacacatccgcgcgcacgtggcgtatgcccccatgtggcatgttcatttgcacaccccactgctcctgattcaagtatataac

SEQ ID NO: 229329 - DNA, 122 bp, Homo sapiens
cagactgctgggctggcaatcagcgagactccgtgggcataggaccctccgagccaggtgcgggatataatctcgtgttgcgcgttttttaagcctgtcagaaaagcgcagtatttgggtgg

SEQ ID NO: 229330 - DNA, 122 bp, Homo sapiens
cgcagagctccagtttgactcagcagctccactccgaggtatacaccccagggaaatgaacgtacgccttcacacacaaatctgtacatgaacgttcacagcagctttgttcatagttgctg

SEQ ID NO: 229331 - DNA, 122 bp, Homo sapiens
gcgctgggctcctgcgcggcctggcgggcaaaggctgggtggatgtggacagggggcagtcgccgcttcttgaaagcgccgctcagtagccgctccgcgtactgggggtcaatgcgccagaa

SEQ ID NO: 229332 - DNA, 122 bp, Homo sapiens
tccctccctcaccctttttgtttgtgttgttcttgtcttggggatgcaaagtgctgttaacgtgagcttccccagccacagggacaggatctgtctagatggggccaccagaggcagctgct

SEQ ID NO: 229333 - DNA, 122 bp, Homo sapiens
aatgtaagctcctcagctcagcttcctttcctgatgtgccagggctgccctggaggagggcgactccaaccaaagagacaggtaagtggttctgacagggtgccgggctagctctgcctcca

SEQ ID NO: 229334 - DNA, 122 bp, Homo sapiens
gcctcaagccatcctggattccttgccagtccatgcatatgcccacacatgctttcacctcggggactttttcttctgctaagatgcttgctttctccaggtatcaatagggtccacttcct

SEQ ID NO: 229335 - DNA, 122 bp, Homo sapiens
gctgtgtggccacgggtgaccgggggtggccacagcgcaggttgcccatgctgggccccacggctcctgttggtcatctgggttaccaggatgtccctcaggagacactggctctcttactg

SEQ ID NO: 229336 - DNA, 122 bp, Homo sapiens
ctgatagccagatcattgtggtcccattttacagataaggaagcaccttaccagcctaggcgtctagtaggcgcagaggccaggaaggaggtgccccagccgaccccgcctccagggctggc

SEQ ID NO: 229337 - DNA, 122 bp, Homo sapiens
cctgctgttggcctgacatgaaagtttggggtttggctgagaagcaaagcttccatgccgcgctgtaccacctccatccctatcctctcctgagcccgctgcaataacatctttcccaagca

SEQ ID NO: 229338 - DNA, 122 bp, Homo sapiens
aaagaaagctgttggggaggcatgtgagtggctccggttacagttcctaggcagggcagacgcttcagggtagggtagtgccaagtcaatagacaattgcttcaggttacctaggaggcata

SEQ ID NO: 229339 - DNA, 122 bp, Homo sapiens
tcctgcggaagacacagccgcagccgagtccgtatcctcgcccagcggtcaacgcagcgccgttcccaccattgtacagagaggtttgtgcttggtgaagccctactgcaggggatttctga

SEQ ID NO: 229340 - DNA, 122 bp, Homo sapiens
ttatcaacgaccagcgccgggctgccttggagggcttcctggcagccctgcaggcagatccgcctcaggtgcggggaccgtgggggcagagagcagagggtgagaagggtcagggcgggctt

SEQ ID NO: 229341 - DNA, 122 bp, Homo sapiens
cgagcctctccctcttcagacaccagttgcgaatctgggcttccaggacttcggtctggccgggttcaagttggggttcccagcacccctttgggttcaattaatttgctggagcagctcac

SEQ ID NO: 229342 - DNA, 122 bp, Homo sapiens
ctggcggccccgccccgccccgcccggctgctccatggcgctgtgcgaggccgcgggctgcgggagtgccctgctctggcctcgcttgttgctcttcggggactccatcacccaggtacggc

SEQ ID NO: 229343 - DNA, 122 bp, Homo sapiens
aaggtgaagcctgagttgtggtgatgaatccgggaggcctctgctgggatcttgtcagggcgctagagctgcctttgctccaaggcgaggcgccggcggcagggcagggccgggcccctgga

SEQ ID NO: 229344 - DNA, 122 bp, Homo sapiens
cagcctcctcactccggaaatgcatgtttccttgatgcaggaggtggccttgcctggacgcgggcacccagccaactgccatggtgttccctgcacttgggtgtggaccatcttcttcttct

SEQ ID NO: 229345 - DNA, 122 bp, Homo sapiens
aacaatggaaaggttggagaacccatcacatgccagacacagggctaagtgtgcagataccgatttgtgtttacttttgctctgtagaagaatcaggaggatgaggtctatttggtttttac

SEQ ID NO: 229346 - DNA, 122 bp, Homo sapiens
attccctccagagatggaaaagacatgatgatggtgtctgagctcacagcagcaagcaggcgtgtgtgctcagcagccacgtggctcatctgctgggagcttgctaaatacgatgttctaca

SEQ ID NO: 229347 - DNA, 122 bp, Homo sapiens
tttcacaaagacaatttgggtgaacaaggaatttctgtacacacaaatacaggcaatattcgcattccagtgtgtgtatgtagaaatataaagcccatagccctgcaggtgccagctctatg

SEQ ID NO: 229348 - DNA, 122 bp, Homo sapiens
ctcctggtttctgcagcggcccccaccctttttattgaaaactcagttcaaatgcagaatcggaatcctctctccggcctcctgatcggtcggccgcacaaaagcggccctggagatgatct

SEQ ID NO: 229349 - DNA, 122 bp, Homo sapiens
atcaaggtgtcagcaggaccacgccccctctgagacactgggtagagctgttacttctggcggtgacctcagttctgggtgttcttggcttgcagtggcatcactccagtctcctctctgtc

SEQ ID NO: 229350 - DNA, 122 bp, Homo sapiens
ggcccgggtcgtcgcggcctcaggacgcagcccattccgcctggcacgactactgggccgcgtcttgtcagtctatcagcttctgagcccaggaatgggggtgggggaaggacggtgcgact

SEQ ID NO: 229351 - DNA, 122 bp, Homo sapiens
tcagccccactgcagcccccgctgcggggcgtccggagaacgcgccatctgcggcgtgagcggccgcctctcaccaccagggggcgcgctccgcctgggcccagattccaccccttgactgt

SEQ ID NO: 229352 - DNA, 122 bp, Homo sapiens
ggaaccactactgagtccagcgccattcccagcattatgcaggtgaggacactgaggtcccggggatgaagcggcttgtccatggtcaccctggcaaaggctaggactggaactggaacaca

SEQ ID NO: 229353 - DNA, 122 bp, Homo sapiens
ctgactttggcgataggtcttggtcgcgagggttgcagatggagccttggcttagaaggtcgaatccgggcccgtttccccccgcccccgctgcccatggcttctcttttcacctccaggtt

SEQ ID NO: 229354 - DNA, 122 bp, Homo sapiens
tcaccgcgagggtccgcggcttcattcttaaagtcagtgagactaagaacccaccacttccggacacactagctcccagagcttccaagatggcagagggccccttgcaagatggtggcaac

SEQ ID NO: 229355 - DNA, 122 bp, Homo sapiens
tcctactccctctccccttcccccagtctcctccctccgctccggagactgctcgctgggcggcggggccggagtcgtcgcagccacctcattgcacaacccggcttcccaactgtttacac

SEQ ID NO: 229356 - DNA, 122 bp, Homo sapiens
tccccatgccctgcccgccgcgctggcgtctctcccagcccgctgcagtcccctcgttcacgtcagcttcccaagggcctggattttgttttgttcagtgcagggggacccagcacacagta

SEQ ID NO: 229357 - DNA, 122 bp, Homo sapiens
ttaggaagttgcagctggtttagctttcctgcgcgcccaggagacggagaaggaaaactacgactcccagagtgcttagagagaacacgcgcgtcgtggcctcaaaacttgctcccttagtc

SEQ ID NO: 229358 - DNA, 122 bp, Homo sapiens
gagccaggtgcgggatataatcttgtggtgtgccattttttaagcccatcggaaaagcgccgtattcgggtgggagtgacccgattttccaggtgccatctgtcacccttttctttgactca

SEQ ID NO: 229359 - DNA, 122 bp, Homo sapiens
cacacttgatccaaagcccttcctctgagctctcagctccacgtcacaacctcgtgaccacgtgcctctcactgtcatgtgcttagatatgtgtgtgtgtgtccacctcaccacacactgtg

SEQ ID NO: 229360 - DNA, 122 bp, Homo sapiens
acagctgcctctgcaatgcttgtaggacccacacacagtggggcacggaggggcagaggccgcagcccctttgccatgaatccaaagaacctggagtgattctgcagagacgttcgaaccag

SEQ ID NO: 229361 - DNA, 122 bp, Homo sapiens
atgaatccgatccgacactctaggaagagcatgaaccttccaatccaaccaatgtttgtgcgaggccaggttccccgccgcggtggccacacaagccagccctgtcctcgggacgcaaggta

SEQ ID NO: 229362 - DNA, 122 bp, Homo sapiens
tcgccagcccccgctcggggggcccgctccgcccacccgcccgcgcggggccccgcgctgcgcagccgcggcgccatgcccccgcccctctacggccccgccaatcagcgcgctgggagggg

SEQ ID NO: 229363 - DNA, 122 bp, Homo sapiens
gtgggggccggccgggggccgctgagatgaaagcgcggccgcaggccagagtagggggtgcgccgggcccccacccgggacaccctcttcccaggccgaaacctgagccgccctctaacccg

SEQ ID NO: 229364 - DNA, 122 bp, Homo sapiens
ggcgtcaccctcgtgaccactttctgatatttcctattcccgtgtgctgcagcccaaagtcgcgttccccggaggtgcgaatcgctgttggaacctcggcgccgacgccggcagcaggttaa

SEQ ID NO: 229365 - DNA, 122 bp, Homo sapiens
ccgcctcgcgggagcgggccccgggaggaggggccgccggagaggccgggcgagcgcgggcggccctcacctcgccgctcctcccgggccgccatccctcggcgccccgcccggaaccggcg

SEQ ID NO: 229366 - DNA, 122 bp, Homo sapiens
cgtgatccgcccgcctcagcctcccaaagtgctgggattacaggagtgagccactgcccccggccctcattaatggagaaattaaagcatcatttagcggtcatcattaaagcggccgggcg

SEQ ID NO: 229367 - DNA, 122 bp, Homo sapiens
cccaagctcgccccagactggggcctgtgtggacgcggcccccagcagtgttcctgtgtccgtggtttggaggctctgttcgctgagcctcagcacgacctcaacctgatctgggagtctga

SEQ ID NO: 229368 - DNA, 122 bp, Homo sapiens
tgtgatccaaataaatttgggatatcttctatgtaatataataatgtactttgcgaagaacgtatagaacactaataatttctacttaaaggaagagtataattagattggaagcacttctt

SEQ ID NO: 229369 - DNA, 122 bp, Homo sapiens
ttcttgcacatgggaagtttaaggctcccctggagacagcagtttagtccagtcaaaacccgagtcaaacccaaaatgtgtgcccacctgccttgcctccctattctttatctcacagacag

SEQ ID NO: 229370 - DNA, 122 bp, Homo sapiens
gacctcccccctcccaactatcctccccctgccctgaatgccctcatattccagcctccccgaccccaggttggccccaggacatatttactgacctttggcccagatcattttctaaaatt

SEQ ID NO: 229371 - DNA, 122 bp, Homo sapiens
ggagagttcccttgatcccttatgggactcgcgaaggggttggctcatttacttggccgccgtgctccatgccttacaggagcgagcacacaagcaaacgggtgtgggaacgcgcacaaagg

SEQ ID NO: 229372 - DNA, 122 bp, Homo sapiens
ctgaaaacactgagaaagcgaaaagtcacccagaatcccccggggcagacacttcctccccgcccccaggctgcacccccacccaagctgggaagagacaaccaacagtgtccactgatctt

SEQ ID NO: 229373 - DNA, 122 bp, Homo sapiens
aggccacccagagtggaggtgggaaacggcattacgcccctttcccttttcctggtcccgcggtgctacctcgtgtgccacccttaaagcgtagtccccgccgagaccgcccccgcctgagt

SEQ ID NO: 229374 - DNA, 122 bp, Homo sapiens
gacgctcctcacctcccagacggggtggcagtggggcagagacattcttaagttcccagacggagtcacggccgggcagaggtgctcttcacatctcagacggggcggcggggcagaggtgc

SEQ ID NO: 229375 - DNA, 122 bp, Homo sapiens
cctccctgtccctccttcacacacccagccccggggagtttcggtttctcagtgctgggtcggaggcagcccaggaggaaaggcgacggcacagctcccgttttctcaatgaaggcagaaag

SEQ ID NO: 229376 - DNA, 122 bp, Homo sapiens
ggaatgtaagccgaatgggttggtcaggtatacatactcaacaagttacaggaggcgttgcgaatatacatgcatgtttattcggacacgtgtgctggataaacatgcatgttacatatgac

SEQ ID NO: 229377 - DNA, 122 bp, Homo sapiens
gtgggtggagcaggaggggccggagtattgggaagaggagacacggaacaccaaggcccacgcacagactgacagaatgaacctgcagaccctgcgcggctactacaaccagagcgaggcca

SEQ ID NO: 229378 - DNA, 122 bp, Homo sapiens
cctggcgccacataccagtgactgcagcgactgtagctcctgtgatgcgatggctagccccgtactcttgcaaagcactccatttcttcaacatcttccaaactcctgacgtttatagtgtc

SEQ ID NO: 229379 - DNA, 122 bp, Homo sapiens
ctccagggaattgtgctgagtggaaacaaacaaacaaatcccaaaaggtcacataccatacgatccatttctattacattcctgaaatgacaaaattcccaaaacagaaaacagatttgtag

SEQ ID NO: 229380 - DNA, 122 bp, Homo sapiens
gctggcgcaaacagaagtgcagcggtggcggcggctggttgcgggccggcggcgggctggcggagatggaggtaactcaggtcgggcccactgcctcccatcaagccttccgcgccgcgatt

SEQ ID NO: 229381 - DNA, 122 bp, Homo sapiens
ccctgcaggccccaacgcttcatcgcagcgcccactttttccacctgacccggcgaacaccgggcgggccgctggagtttatcagctccaggacaaatctgcctctgaccaccacgtttgct

SEQ ID NO: 229382 - DNA, 122 bp, Homo sapiens
ccgagtcagggagcaggtctcccacgagtaatggtgggagaagccgggcctacatgcccccgcggagccgcagccgggacgacctctatgaccaagacgactcgagggacttcccacgctcc

SEQ ID NO: 229383 - DNA, 122 bp, Homo sapiens
cacagattaaagttttcaattgtaagaaattttggtgttgggagatcacagagttagggtcgacggaggccttaggaataagagtttgcaatatcagaaccccatgacttcactcactttat

SEQ ID NO: 229384 - DNA, 122 bp, Homo sapiens
gttttccgcacccttcccccactgggttttgtctttctttacgtccttctgcctattgctcgccaggccctaccccctcgcgacagaacttctttgttgactttgaaacttcgcgaaaaata

SEQ ID NO: 229385 - DNA, 122 bp, Homo sapiens
gtctgggtgtggggacgcaagaaggatcccctaggggcagctgctggccttggtgcctgtcgtgtcttcgctggagccgggcgtgcaggtggcggaccctcctcgcctcctgggctgtgaag

SEQ ID NO: 229386 - DNA, 122 bp, Homo sapiens
taaggagatcggcagccagctggatgagagagctgctggtgtgccgcgttcctcactggccgtacgggctccacagcccagcgggtagagcgagggaggcgggcctgcaatacccccaaagg

SEQ ID NO: 229387 - DNA, 122 bp, Homo sapiens
gcccagagccagagggatggtggtagtcacggggcgggagccagacagccgtcgtcaggacggtgccatgtccagctctgacgccgaagacgactttctggagccggccacgccgacggcca

SEQ ID NO: 229388 - DNA, 122 bp, Homo sapiens
cgtgttcatcaggggagcgcagctaattagcatccgggctcagattggctggggcggggacgaaatcagagggggacccatccttgctccagctatctcagtccttggagaggaaaagaaaa

SEQ ID NO: 229389 - DNA, 122 bp, Homo sapiens
tttactaccaaccatgttttctgcaagagtttctctagaatccctcaaatcaccaaagaacgccccagaacactttgctggggctgaaaggaagcagtcaatagcagtggaagtactggcac

SEQ ID NO: 229390 - DNA, 122 bp, Homo sapiens
cgcagggcgatccaaacgaaggtggacttctccaacagcccaggagtgggtctgtgaccccgccgcccaaggccgggaatcttacactggttctgcggattgggaattaggaagtaggcgtt

SEQ ID NO: 229391 - DNA, 122 bp, Homo sapiens
tttatgcactgtaggaactaattgcttacataaaaatgagtacgttctggaaactagggccgaaatagggtaaggagtttattccagtgaggaagggtcactagcaagcaagcctgagaaaa

SEQ ID NO: 229392 - DNA, 122 bp, Homo sapiens
tgcaggcggtgcggctgccagcctgagattgttccggctctcgttacctgtgcgccctcgcgttacatggtgctcataaatcccgcggcagattaactgggaaaccaagaaaatgcctctat

SEQ ID NO: 229393 - DNA, 122 bp, Homo sapiens
aggtccactgtgaagtgactaattctcccttaaaattaacgggccgctcctggggagagccgtggactgcaccttgtcagacacccccggcgctggtgcgcgtgcacatttggctctcagaa

SEQ ID NO: 229394 - DNA, 122 bp, Homo sapiens
tttcctgggcttccgtgagaaacgaatttatacaaataagatttcacaccacagctgccgcggccactgccctccccgcgcagagctctagagatgttttctctttttcttttctttctggc

SEQ ID NO: 229395 - DNA, 122 bp, Homo sapiens
cgggcctgctgagctctgtgccctacctgccactcctggagggcaggctgccactgtgctcgcggggcctcgctgcagggtgggctcaccaggggcagcttctgcggtgtgtgtccatcacc

SEQ ID NO: 229396 - DNA, 122 bp, Homo sapiens
catgcccgagcctccccccactgccgtgggctcctgtgtggcccgagcctccccgacgagcgccgctccctggtccgcagcgcccgatcccatcgactgcccaagggctgaggagtgtgggt

SEQ ID NO: 229397 - DNA, 122 bp, Homo sapiens
gtaaacaagcaaacaaaaacacatacacaaaccggtcactgtcagactgtctgtgagaagcgctccacaggacacagctggagaatgtgtcacaaaggaactcagaggggggcggtcaggga

SEQ ID NO: 229398 - DNA, 122 bp, Homo sapiens
agtgtgatgtgagcatctgcgtaaaaaggcgacatatggagcatgcccagtgtgggagtgcgtcctcctccctccgcctcccccctccccctcgagatctccaaagataaggcttgaacttt

SEQ ID NO: 229399 - DNA, 122 bp, Homo sapiens
cgagatcgcgccaatgcactccagcctgggcaacaagagagaaactccatctcaaaaaaacgtataaaatgaaaacaatgagagagttacattgtcagtggttcttaactgaagtggacttt

SEQ ID NO: 229400 - DNA, 122 bp, Homo sapiens
ctttaggcaatatatgaactccccaagttcttcccttttaagaagccttggcactcactacggattaatttctctaaggaaattcataatggcagatgaaataggggttccttttcaagaac

SEQ ID NO: 229401 - DNA, 122 bp, Homo sapiens
gctcccttagtgccaggtcccagaagcagcagccgatctggtttccgcactggccgactgcgaccggaggagaggaaggaaagagaataggacattaagcaggaaacatggccgctggattc

SEQ ID NO: 229402 - DNA, 122 bp, Homo sapiens
ctatatccattcactggcacagtggctagcacatcatagatagaccaaacatttattaaacggaattaatacaggaccttaattgaatgaaatggcaccctttcccgctttttttcaatcaa

SEQ ID NO: 229403 - DNA, 122 bp, Homo sapiens
cagcctcagggattgaagcatgctggcgggagcttataaataaaaggccatcatctgggccggtgggacagttttcatgagaatggtgcctcagctgtgctggggggccacagataaattga

SEQ ID NO: 229404 - DNA, 122 bp, Homo sapiens
ctgtgtgacagagcccagctgggcagtccaagaccttgccatgtattccttggctcttcacgagtcaacttgtgtgggtgggctgggcgtggtggctcatgcctgtaatctcagcagtttgg

SEQ ID NO: 229405 - DNA, 122 bp, Homo sapiens
ttgacccctgaccccattgcacctgtctccacaggagccgaggaggtgctgctgctggcccggcggacggacctacggaggatctcgctggacacgccggacttcaccgacatcgtgctgca

SEQ ID NO: 229406 - DNA, 122 bp, Homo sapiens
ctgacaagtagctgtgaagtcccaagataaactatggttgaaaattgtttatcaaactctcgtgttcggcttgcctgttatcactaaagacattaaagaatactatagaaattgacctatgt

SEQ ID NO: 229407 - DNA, 122 bp, Homo sapiens
aagaaagcaatcccttaacccagtttcaaagtttgtaaaacacacttgtgggatccttagcgcccccctgtttctgctgcacttaaagcccaatgaaataaaaaatgtgcactatcactcta

SEQ ID NO: 229408 - DNA, 122 bp, Homo sapiens
aaccgctccgggggcagctgagcaacctgcctgcttcacagacctgtatctcttaaaaggcgccagctggtacttttaaaatctttgaatttggtgcctaaatccgcgcggtccaatgagac

SEQ ID NO: 229409 - DNA, 122 bp, Homo sapiens
gcgtggatccgttggacaaagggatgattcatgcctccggttggacagatccagatgcctcgagatttcatcatgctactcagaacaacatgcaattaaaaactttccaactgttcatttct

SEQ ID NO: 229410 - DNA, 122 bp, Homo sapiens
taagtgtttttaatccagttgaatttccctttggactcagctccctgctgaaactgtctgcggaccagaattccaggctcagaattaagtcaagagggaaagacagcagaaacaaataacag

SEQ ID NO: 229411 - DNA, 122 bp, Homo sapiens
tcctatatgacaggtattatttctgctatcattgtacgtgtgcatttagcccacacattgcggtgggtgttcctaagatacttggagtacttttcagcaacacagtttacacttaatgcttg

SEQ ID NO: 229412 - DNA, 122 bp, Homo sapiens
gtattttaggctttgcttgccagatgatctctcaactagttaaccatgctattgtagcctcgaagcagccagagacaatatgtaaacaagagcatggctgtgtttcaataaaactttattta

SEQ ID NO: 229413 - DNA, 122 bp, Homo sapiens
cacacacactacttctataacaaggggagcgcagacacaaaacacacagatttcccaaaccgtgtgtcccagtcaagcactgtgggctgcagtgagatgaggacacaggagcaccttgggtt

SEQ ID NO: 229414 - DNA, 122 bp, Homo sapiens
gtccggatattgagaaggtcagaaaatgctgtctagctccttcaggtgcaacccgccgaacgtgctggggctgaatagacgctcctgatcttggggttgcggatcctcagcggaggagtcct

SEQ ID NO: 229415 - DNA, 122 bp, Homo sapiens
cggaagcagtcgggggctggaagtcttccgacctgagtggaggctgctttcccaagggtccggaagcaaagggacccttgctgtgaggggtttgtagcgaaggcaggcattgagtgggagcc

SEQ ID NO: 229416 - DNA, 122 bp, Homo sapiens
ccggggcggcaggtagggaggtgagcccgcgtctcctccgcagagctggagctggagctccgctcagaggcccaggctcagtgggctcctcccccgggtcggggcaaccccccgccggggcc

SEQ ID NO: 229417 - DNA, 122 bp, Homo sapiens
atttctcccctcaccagccaggcacaggcaccaatgggaggtgcctgggctccacaggcccgtcggggccagagggtcgccggtagcgtcaaccaagtgcacgacagcccacgggtggctag

SEQ ID NO: 229418 - DNA, 122 bp, Homo sapiens
ctcaggctcacaatgttggtcttattgcccacctgtgcaggagcttctcgcagactgtctcgaagtcctcccactctagaatgttacataagcgctttaatttttttttttttttttttgag

SEQ ID NO: 229419 - DNA, 122 bp, Homo sapiens
agcgctatgggagactggggtctatttcacccctgcagtctccaccataagagatggctacgcccaggggggccgttcataggcctacccccaggcgcgcattctctttctcagggatgttt

SEQ ID NO: 229420 - DNA, 122 bp, Homo sapiens
gtggtccgcatcacaggctgcgttattgagtgagccagtctccagatgccaggcgcatgacgagtccacggagcgggacctccctccccacgcatcccgggctcccggggcggggccgccgg

SEQ ID NO: 229421 - DNA, 122 bp, Homo sapiens
gcaggcttccagctgcgcggcggagcgacgtcaccctgtgccagtggtggctcgcggcggcgccccgccctcccgaggttagctccccagccaaagagggggcgcgcttgcgcggtgggtgg

SEQ ID NO: 229422 - DNA, 122 bp, Homo sapiens
tccccagagcccacaaggaggcgtcatggtggcagcaactccaaccagcagcgacagatgcgaccacagcaactgcagatggaggagaggctgcagctgaaacagcaataactgcttcagca

SEQ ID NO: 229423 - DNA, 122 bp, Homo sapiens
cgccaaggctgctctggcggttgctgcagtaacctcggccacaacaaacgctggagaagacgcagcattccgtttggaacctgaatccctaacgggcaaccggagcgtaccactgcggagcc

SEQ ID NO: 229424 - DNA, 122 bp, Homo sapiens
tgctccagcagctcaaagaccaggtagaacttgagggcgtcatggaagaactcaaggaagcggatgacgtgggcctcttcagggtctaggcctcgcatgcagtgcagcagcttcagctcgtt

SEQ ID NO: 229425 - DNA, 122 bp, Homo sapiens
ggtgtgggcctgacgtcatcacgcagcctcttcctttccccgcccccttctcttggcgaacgaggcgtcagtttaacacctccgtgaatccggaagtatgctgtcaaaacaaccaaaccacg

SEQ ID NO: 229426 - DNA, 122 bp, Homo sapiens
ccctctgccacttcctcgggatctcatgatcatcccatagcctctcagtccccaggaatccgaactgaacttgcaaatgtcaaaggtgcctgctattaatactataaagaatcctttggcca

SEQ ID NO: 229427 - DNA, 122 bp, Homo sapiens
gcttactgtaggtcttttataagggacattacaatctacatttcttagtaggtgaaaccccgcataacaaaattctgtttattctaggttcagagaaaagctcatcatcccttgagcaactc

SEQ ID NO: 229428 - DNA, 122 bp, Homo sapiens
cgggccgcctccaacttgcgctgggtgatctgagccgcggtgtccgcggcggtccaggagcgcaggtcctcgttcagggcgatgtaatccttgccgtcgtaggcggactggtcatacccgcg

SEQ ID NO: 229429 - DNA, 122 bp, Homo sapiens
aatggggcatctgtgtgaggggtacaaggttcgtgggtgacggtgaccgttgcctggggccgaggggaatggggcgtctgtgtgaggggtacggggtttgtgggtgacggtgaccattgcct

SEQ ID NO: 229430 - DNA, 122 bp, Homo sapiens
actcatttcaggccccagcacagacgaaaacaagccattctgtttgcccagtttacattgcgggtctccaagaagtggaatgttcaccaatgattttaagaaaacagggcctggcgcggtgg

SEQ ID NO: 229431 - DNA, 122 bp, Homo sapiens
acatggactttcctcatctgccacgtattggccacagtcaagtagccggttcccttttctcgtgcataaagtggagttattcataattacttcacagaattaagattcaatgcagatgaaag

SEQ ID NO: 229432 - DNA, 122 bp, Homo sapiens
ttgcacttttattcacccccaaattctgtgtattgcaagtaagtctcaaattttgagaagcgagcaccatcccattggcatcgtgactaccaaccaccacatcactcagctgctttgctttc

SEQ ID NO: 229433 - DNA, 122 bp, Homo sapiens
gttcccatggccagccctgcgagttctggctacgcctttggccaggtgctcatgggaccccgggacacagccgggagtgaggctgaggctgtggtggaggctccaggcctgagagggggtcc

SEQ ID NO: 229434 - DNA, 122 bp, Homo sapiens
accctcttaagccatggttgagcgcgcactccccatcttacgacaggcacccttgtgcagcggtctctagaactcactcactttgcatagctcagggtctgtgctgcttcagcaccatctcc

SEQ ID NO: 229435 - DNA, 122 bp, Homo sapiens
gggtgggggccagctgtctcggctggttttggggacggcacagcggtgtcactgacgggtcggctggtgcctctgccgccccgccacctcctgcccaacttacgtgtcacccacggcccggc

SEQ ID NO: 229436 - DNA, 122 bp, Homo sapiens
ggaaaccccttcaccacgcacctcaaaaccaccaggccgccacttcgccgcccgcctcaccggcaccattgcagccaactaactgcgtcatcgacatggggttttcttttcttttttttttt

SEQ ID NO: 229437 - DNA, 122 bp, Homo sapiens
aaaacaactgcccttcagttgtctcaaccttccaaccatattgctatttccatatccatacgtgataatatttggacctctggagggaaaatgcaacaggcagagtaagctggtaggaactt

SEQ ID NO: 229438 - DNA, 122 bp, Homo sapiens
catcccagccccgccccaccccaccccaagaggttctgatgaattggtctgggcgagggccgcctgggccaaccggctttttcagggtcccgggtgatgctaatgtgcccgccgttgctgaa

SEQ ID NO: 229439 - DNA, 122 bp, Homo sapiens
tgagaattgaactaagggctccccagcaaacacagcgatttacatggggcctagagagagcgagcactgccgggggcggcggcgaagggcagcagtggtgggacgggcggggtagggggagt

SEQ ID NO: 229440 - DNA, 122 bp, Homo sapiens
gtcccattctggatccttattccagctcctttccctctgcgaatcgcacttggtgggtcgcggggccctcagtaattagggatcacggatcagccaagaaaaatacaggttttcttaagcct

SEQ ID NO: 229441 - DNA, 122 bp, Homo sapiens
tgaagaaggtgagagaggtgagattcataaaggaaaagagaaaacgtgaggtctaagaatcgggagcaggaagatttttttaaaaggtaaaggaaggaagcccccaacctacagaggatacc

SEQ ID NO: 229442 - DNA, 122 bp, Homo sapiens
tcagggcagttagtgaactccatctggccaattagaagtcagaacagtaggcggaacaagcgaagctgatgtggcgtctgtcagtccaggctctagggacagaaccttcccaaggcgggggg

SEQ ID NO: 229443 - DNA, 122 bp, Homo sapiens
cctcaaaagcatggatcaatttggcctctgaagggatccccagggtctgtctctatgtgccgaaccacttgcgctctccagccagtacactacagtataaacaaaggaataccagggcacat

SEQ ID NO: 229444 - DNA, 122 bp, Homo sapiens
atcatgttccagtaattttcatttgagtgagaaggcgagcgccggacagcggcagggactcgccacccgcagccgtggagccgggccatgagcgcctgtgcggcgctgggtcgctgtccagc

SEQ ID NO: 229445 - DNA, 122 bp, Homo sapiens
tcaaagacatacttgatgaaggctgggtggtagatcaggatctgcggggatgggaagacacggcccttagtgagttctggggggcaaaggacatggagcgcctgtcagatgtacatactgtt

SEQ ID NO: 229446 - DNA, 122 bp, Homo sapiens
ttaatgtttaaatggctaaacaacttatcttcctagtgtcgtgagtatgttttgatagcacgtgagtataatttgaagggagtgaagttttaagaatatacttatgtgactagtgaattact

SEQ ID NO: 229447 - DNA, 122 bp, Homo sapiens
gagaagtgtgcgccttgcatgctgggatgtgtagtcctggccgcagtgcttgctgggacccggctttgtcttctgggactcgcgagagaggctgggtagggttttgtctggcgcttttgcgc

SEQ ID NO: 229448 - DNA, 122 bp, Homo sapiens
tgaacaatgaggagagctcattgagcatgatggagagccccaagatcaaaacttgttttacgtttgcattactggtaagaaatataagtatgttgtgaatacaaacaagtgagggaatgaat

SEQ ID NO: 229449 - DNA, 122 bp, Homo sapiens
aatgatggagttcccggtcggtcctccagtgctgaatgtttaatttcctatgaaaggctgcgagctagaggaggaagcaggaacacccagcgccgttcccgcccatcctcccgctccgcccc

SEQ ID NO: 229450 - DNA, 122 bp, Homo sapiens
cagggaaagcaagaccggggacagtgggcaagggggcgccagacagattagagggttccgcgcaagttcattcatcagcatgaagcacagggacgcggccgcacagagagcacgggacacag

SEQ ID NO: 229451 - DNA, 122 bp, Homo sapiens
taaagatcatcttatgtggatatttcagcgactgtcattgggaggaaaatcagcccttgccgcctgcactccggttacttaacacatgggcgctgatttatcatgggttgtcatttgctaat

SEQ ID NO: 229452 - DNA, 122 bp, Homo sapiens
tgtaaacctctgatggtttccccttactgtctgcctcttagacacagcgttgagtgagtacgaacacgcttcacaacttcccgggagaggcacctaaacccagcaggtccacaaccaaactc

SEQ ID NO: 229453 - DNA, 122 bp, Homo sapiens
caacttcccgggcgagggacgtttctgcacttgccctcggcttctgaactttgtactttgcgagtgtactttgtactttggtcctgtgtccctgcagccctgtgactacacgcgcacacgca

SEQ ID NO: 229454 - DNA, 122 bp, Homo sapiens
tccctgcccagtctctccagttgggcgttccgagaccacctatgtagggtattcggctagcgctcaattaaaccgaaacaccgtcgcagcgaccacaggtgcagaccaccaagtccacaccg

SEQ ID NO: 229455 - DNA, 122 bp, Homo sapiens
gcccttagccagcacctgtggccacatacacgtgtgccctcgggagtagaaatgccctcccgtcttgtcccacagcactaggcagggatgccacccacattcatcccccgcagccaggccgt

SEQ ID NO: 229456 - DNA, 122 bp, Homo sapiens
gcccctctgcccggccgcccagtctgggaagtgaggagagcctcttcccggccgtcatcccgtctaagaagtgaggagcgtctctgccctgctgcccatcgtctgagatgtggggagcacct

SEQ ID NO: 229457 - DNA, 122 bp, Homo sapiens
tgcttgggccaggctttttctcaagtgaaattctccctgtccttcacaagtaaattcctgcgtatgagccacctcctctgcaaagaatctctgattacccagtcagtgacacctccttcctc

SEQ ID NO: 229458 - DNA, 122 bp, Homo sapiens
gagcgagcgacaggggctcctctgcggcatcgtgggtggcccagatgacccagaggtgtgcgcgcagacggccccccagctgactgttctcccctgctctgactgccctgtttgtgtagttt

SEQ ID NO: 229459 - DNA, 122 bp, Homo sapiens
gccgcccccttgtaacccaccacagagccgctccaacaggtctctgatgtgcattgtctgcgtatgccttctctaggtgaggatggggagaagcagctaagaaatgccccctagctggctag

SEQ ID NO: 229460 - DNA, 122 bp, Homo sapiens
agaacagctcagggccagcttcctttttccgattaggtcgggtggagctggcagggcgggcgggcgagctgcagccagcgagacccgagtaccgcccccttggcccgcagcagggcaccccc

SEQ ID NO: 229461 - DNA, 122 bp, Homo sapiens
acacatttccacgttaggcaaagaggatactcatcccaagaaaactttggcctatcctttcgttagcgacatcctatagtaacctcaccgcccttacccatctaccggaccggcccacttcc

SEQ ID NO: 229462 - DNA, 122 bp, Homo sapiens
aaggaggggcttctgcccgagcccaggccttccttggggtgtgctccagtagcaggtgcgcgtgccacctgtgccgtgggttggaggggtggaacgtgtacgtcctggctgcccccgagctc

SEQ ID NO: 229463 - DNA, 122 bp, Homo sapiens
gcacataatttaaccttgttttaatgtttgtgaaagttaatttctttagggtagtaggcacgcaatggaatattcttggtttatggaaatctggaacttcttaggacattgttgggcatcag

SEQ ID NO: 229464 - DNA, 122 bp, Homo sapiens
aataaaggcgggacgtgggggtatgatttgctgaatggtaccaaagttgattttttgcaccgtgcacagtgatcgagctgagcaaattattttttttttaattataagcagcggtaagaaca

SEQ ID NO: 229465 - DNA, 122 bp, Homo sapiens
caaggtgatgttcccgtagcgctcctcattgtagaggacgacggccgaggcgttcctccgcgccgccaccagcaccttgtccttgaaggtgcagcccccacgagccaccagggcgacccagg

SEQ ID NO: 229466 - DNA, 122 bp, Homo sapiens
agatgttcaccggaactctcctgctgttgagcagggcatccgtgggtggccctgtctcatcggaaacgccctggctgtcaatcggcagcagacccacatgtgtgcatgtttggctgacgtta

SEQ ID NO: 229467 - DNA, 122 bp, Homo sapiens
atctttaatgtagtgtgagaagcttattaaagggaaatgcttctctgtccctggagccctcgcacaagccttgcggggagctgcctgcagaacggggtcgcctagccccacgcttctaaact

SEQ ID NO: 229468 - DNA, 122 bp, Homo sapiens
ctaggaatattgtttgcaaggcacaaggtgtcttttggtagtgagcgcgctctgcgcatgcgcaggtccattcgggaattactgcccagcagccgactaagttgcattccttgaatcttcgc

SEQ ID NO: 229469 - DNA, 122 bp, Homo sapiens
ggcgatccccgaaggcgagctgaaatacggctggagcgttcccaggctacagtttgtagccgacgattgtggaagactaggagccggagaggtggcccaccctcagggagcgcttgtgctcg

SEQ ID NO: 229470 - DNA, 122 bp, Homo sapiens
ccaggcacagcagtaaaactttaggtacattgcaaacaggatggtggttctaaacacaaccgtccgcgtgtctgtgaggcgccgccgcgtacctggtgcgagtgggagctgaggctgctgcg

SEQ ID NO: 229471 - DNA, 122 bp, Homo sapiens
tctgcgcgctcttatcagtcctgaaaagaacccctggcagccaggagcaggtattcctatcgtccttttcctccctccctcgcctccaccctgttggttttttagattgggctttggaacca

SEQ ID NO: 229472 - DNA, 122 bp, Homo sapiens
gcccactcctttaggatgcctgtgtgtgctctcccgaaggctcagcacacatgcgcctaccgctgtcgtttcctgcctggggagggtgttgacacaggagagccagggcatcatgcagctgt

SEQ ID NO: 229473 - DNA, 122 bp, Homo sapiens
ccacacggccgcagtcccaatcaattcaatgacaattgttagggacgtcctcgtcccgcccggcccgcggaccccggcccttcctccttgacaggctggggtccagccccgagacattccta

SEQ ID NO: 229474 - DNA, 122 bp, Homo sapiens
gcccaaaccaaccaatcaagagacgtgttattgccgccgaggtggaactatggcaacgggcgaccaatcagaaggcgcgttgttgccgcggagccccctgccccggcagggggatgtggcga

SEQ ID NO: 229475 - DNA, 122 bp, Homo sapiens
gtgaatggtgagagtggatgtagacgtttcaggtatcctatccacctcaaatttgcctgacggaatgccggattcctttctgacagtgccgtcatatgaaatggacaccaggaactgtatga

SEQ ID NO: 229476 - DNA, 122 bp, Homo sapiens
gggctgcaggcatagagcaggccagcaccaggcagagccctggggacggcaggcctcctccgacaggcgggggaatcaactgttctcatcagagcaccctgatggaaggcaggacactccgg

SEQ ID NO: 229477 - DNA, 122 bp, Homo sapiens
ccttgaaacgtcggttaaccgcgtagggcgacccctagggattccactctttgaaatccccgtaagccccccgccaggtggccctgctcccgtcacgcccccgagggtctccctgtccctga

SEQ ID NO: 229478 - DNA, 122 bp, Homo sapiens
cagccctccccagagccagggcccctcagacccccgggtgtcaaaggtcccggggggcaccgtgtcctcagtggcagtcggagcccagtgctggacatcatggaggccccggtgccctcacc

SEQ ID NO: 229479 - DNA, 122 bp, Homo sapiens
cgacggtttcggtaccgagagacggctgtgggggaggctcctgcgggagaaatggccaaacgggagccgtgttggggggcgcccgggaggcagttggggggcgcctgggggggccctcgtgg

SEQ ID NO: 229480 - DNA, 122 bp, Homo sapiens
tttttctttatgcatagtataacgactcatttattaagtacccactttcataaataaaatcggcattttttgtcccgcttaatgttccttttcagcttcacaaagaaaccagtaaataaaac

SEQ ID NO: 229481 - DNA, 122 bp, Homo sapiens
caactcgtttctctagggtcacttccggattcaaccagtctccaggaagtgacgtaagcccgcctctctgcccggaagaggcggttgggaggcggagcccggcgcgttaacccttctgctgc

SEQ ID NO: 229482 - DNA, 122 bp, Homo sapiens
tttattcagggctttgccccgccctgttgcccaatagacaccccttccctccccactccccgcggccaggtctacttgttccttgaggatccaggctccgaaaagccctgaggcaggacagg

SEQ ID NO: 229483 - DNA, 122 bp, Homo sapiens
tgtgacatggatctgggtggggcaggctgctctgcttccaggtaaggactgtgccacccacgcagccaaagaccaccttgggaataccagtacctgggcaagagatagcccctgcaaggccc

SEQ ID NO: 229484 - DNA, 122 bp, Homo sapiens
cggctatgctatacgggatggcctactgcatggctatgctatacgggatggcctactgcgcggctacgctatactggatggcctactgcgcgtctacgctatacgggatggcctactgctcc

SEQ ID NO: 229485 - DNA, 122 bp, Homo sapiens
taatcagcgtggagcaggtgaatcagctgttgcattccccgggaagaacgcgggctcggccggcctgtgctggactctggcgcccccaaatggtcacgtgggtttattacacatcggaagta

SEQ ID NO: 229486 - DNA, 122 bp, Homo sapiens
aaaagtaccttaataagaaccgaaagttgtgtgaatcaccacagtacctgattttaacttcgtatcactgaaaaaggcactgaagagacaggaaagacagtcttgaaatgctgatgccaccc

SEQ ID NO: 229487 - DNA, 122 bp, Homo sapiens
gggcggtgggtggggcggggctggcgggaaatttcggttttggcgcgctccctgcggcgacgctcatcgtgcgctctcctcttcccccggtggtctcctcgctcgccttctggctctgccat

SEQ ID NO: 229488 - DNA, 122 bp, Homo sapiens
tggggcaggcgccatgatggctgtgcctgggtgctggccagtgtggccccaagaagaggccgggagccagagctgcatgccctctgtcagcaccagcctcctaaaaacactctcgactttct

SEQ ID NO: 229489 - DNA, 122 bp, Homo sapiens
caaccgcatgagcacgacctgggccctgccgccctccctgtattgcgaccaccccatccccgcacccccacccctaggatagcgtgcctcaccaagaccgtttcgccagccaccccatcaag

SEQ ID NO: 229490 - DNA, 122 bp, Homo sapiens
aaaagcacatggtcacccccaggtgtggggagcgcaccggctgtcccttccccccacccccggcccagctccagccaagtgtcctatagccctcacttacagtcctgcttacagtaaagcaa

SEQ ID NO: 229491 - DNA, 122 bp, Homo sapiens
gggatgcgggtctgcctgtccctgggatgcgggcgggcgggcagggcgaggcctggagcccgcggggcgcagggggctggaccgcgcgctgtgatttttctgtttagcagcggggcctcgcc

SEQ ID NO: 229492 - DNA, 122 bp, Homo sapiens
tactaggcatgcaatgattaaaacactctcacctcaaagagctccgccatgaatgagagccgtttaagaaaacagaattacgatgaataataatttgaagccaaaagttaaaatatcttatt

SEQ ID NO: 229493 - DNA, 122 bp, Homo sapiens
tgttacccaccccgtcctcctagggtgcccttgagccgcaaaactgctgtccacgtggaccgggggtgacatcgcacgtccatctgccaggacccctgcgtccaaattccgagacatggcga

SEQ ID NO: 229494 - DNA, 122 bp, Homo sapiens
gcggggtgcgcgggacgggaaagcggtgggtgggtggcggggctaggggagatccgctcccggtcccctagatgtctcaaactttgcctgagcagtcgaagggacaactagacagtcataga

SEQ ID NO: 229495 - DNA, 122 bp, Homo sapiens
acagcagacagcagacagcagacagcaaggcacatgcgcaataatggacatgcccagcaacggacatgcatagggatgcagcttgtgttacgtaggctgaggttttcttgcctctgttgact

SEQ ID NO: 229496 - DNA, 122 bp, Homo sapiens
gaaattccgcttccagggccaagctttcttttctgatactgtttgtccctcgcgaggcaccgttgggtcgcgcagtaggcgtgactaggggcgggaagtggggcgggagcagggccgcggag

SEQ ID NO: 229497 - DNA, 122 bp, Homo sapiens
cgacgcgcacaccaaggagatcgacctggtcaaccgcgaccctaaacacctcaacgatgacgtggtcaaggtaagccaaggcgaccaacagggaagggctgggacagctctcctctggcagt

SEQ ID NO: 229498 - DNA, 122 bp, Homo sapiens
gcccacctgcgccgccgccgcgacgcgcctctgcctggggttgccggggcgagggctgctcgctctctcttaacaggggcagccggcggagcactatacggccactgttctccgagacacaa

SEQ ID NO: 229499 - DNA, 122 bp, Homo sapiens
gagggaggcagtgcaggggtcactaggttgtcagagaaccctgaggcccaactggggacccgtgaggtgaaagaattgtcccagagggaagagaagggctgccagggccgcctctcccctcc

SEQ ID NO: 229500 - DNA, 122 bp, Homo sapiens
tttatctttgatggagaaatccgaggcctgccagcatccccaccagtagatttctttggacgaagtaaaatccttctgtggattcagctttaccgcctttcctcatctgctggtgtcttcct

SEQ ID NO: 229501 - DNA, 122 bp, Homo sapiens
tgcgtctccccttccgcggctcggagaggaaggcaggagagcccccaaatattcccctcccgccctctagggaaactgaagctgaaagaaccagcgaaagaaaaaaaagtctcggagtgggg

SEQ ID NO: 229502 - DNA, 122 bp, Homo sapiens
tcctaaggcgctctcatcctccacacctcgctgggggaccggcgatctcctccaaagggtcgccccaaaccccggccgcgccacccccagctccaggggaccagcagctggcagctccgctc

SEQ ID NO: 229503 - DNA, 122 bp, Homo sapiens
ctcttgtgccttgaaagagccacttgccttggctgcacctcggtccttagccctccgtggcgccagagttggttgcctcagtagcgcgtgcccacccggcccaaagctgttctgcagctggt

SEQ ID NO: 229504 - DNA, 122 bp, Homo sapiens
tcagagcctccagtctggggacctttccgagactgtaaaggcggggccgcagtttggctccgcctgagaggggagggccgggggcggaggacccacttgaaggctgcggaagccgccagcgg

SEQ ID NO: 229505 - DNA, 122 bp, Homo sapiens
aacagtaaaaaaaagaatcctttgttccaaaaaaagtgttcttaaaaatgcgttgtaggccgggcgcagtggctcacgcctgtaatcccagcactttgggaggccgagatgggtggatcacg

SEQ ID NO: 229506 - DNA, 122 bp, Homo sapiens
tttccgctactcacagtaattctactggtggagacagcattcgtttcgtcactctgagcccgtggtgtgtgccgtgtgggattgggctaacacatcaccatggatattctaacgctatcctc

SEQ ID NO: 229507 - DNA, 122 bp, Homo sapiens
tttttcagaataaagccttactcagattccttcaatgatattttcttttgacttccacttcggaaggtcttagattcaaatcatgactttccctctatgtgtccacaggcaaatgactaaat

SEQ ID NO: 229508 - DNA, 122 bp, Homo sapiens
cccagaaaactccaactttacctcctaaattggtcggtttgtcgatgagcgaggccacaacgatgagtctactaattgactttccaagtctggcagcacgatcctgaaacaggagctccagg

SEQ ID NO: 229509 - DNA, 122 bp, Homo sapiens
ttaggctgcccgtccactctgctcatcaggcagcccccaatcccccagggctttttcccccggttctcttggcgaggccagccccagggtagggatgaactgcaaggctcagggaagcagcc

SEQ ID NO: 229510 - DNA, 122 bp, Homo sapiens
cccactgccctgtccaattttttaccagattttgcatgtcagtcataatgtatcacctcccgactgcgatcagccgctctccacttcccgcaccttcacttttcaaagattcccaggtgatg

SEQ ID NO: 229511 - DNA, 122 bp, Homo sapiens
attgtacacggtatagttaggaggtgatgatgaccacagtggggtctttaaaacagtgcacggcccgcctaggggacagagccggccctcccaacacttccccgctacagaggcgttctgtg

SEQ ID NO: 229512 - DNA, 122 bp, Homo sapiens
tcatcacttccaaacagttcttacctaagacatgcctcatccttggtaatcacactttcacgatcctatttcttttttctgtttgtttgtttgttttgttttttaaacggagtctcactctg

SEQ ID NO: 229513 - DNA, 122 bp, Homo sapiens
gaggattccatacaacctaagtggtgacatcagcacaggctcattactaatctcatgtcacgaggtttcaggcctggctgagaactctgtgagctctgtgatgttgagcttcaggcacatag

SEQ ID NO: 229514 - DNA, 122 bp, Homo sapiens
gccaggtcccccatagaaggcagattaataatacccatctccaggagccgggcccagagacgacggggcggggccaggaaggggcggggccttgggagggtgctgtttcccgccaaaggaac

SEQ ID NO: 229515 - DNA, 122 bp, Homo sapiens
ctgatgcagtgatagacatccagggcacccaccctctgcgccttggaaagcctgcagcaccgtcgctaagagcaagtggtctggcaagttgccaagcaatccgtcgtcttcctttctactta

SEQ ID NO: 229516 - DNA, 122 bp, Homo sapiens
caaggtcacacacgatttgtccaatcagaaggcactttcccttgggccatgttgggttcacgagtgggtttggaaggaggcgtgtacttggaaggagggctcctgaatgaggagtggccctg

SEQ ID NO: 229517 - DNA, 122 bp, Homo sapiens
ctgtgagacctcagggaacacagggccacgctcacttctggagagcaaatggcccacggccgcccctgaatgccaggggagcctcccttcttctgccacggagtcagggccccggcagccga

SEQ ID NO: 229518 - DNA, 122 bp, Homo sapiens
agggaaatgggtgaattgaaatgagacataagggagatggcaagagagtgaaaagaagcgcgttctaaagggggaaaggagaaagggaaaggaaaggagaaaggcatctctaaagggaaagg

SEQ ID NO: 229519 - DNA, 122 bp, Homo sapiens
cccggcatccctgttgggcgtcagcctgagagtccctactgtgcgtcagaatccaccttgcgtgctgtgcgtatctgtgaacctggagcggttacttattttgacagatatcactttgggtc

SEQ ID NO: 229520 - DNA, 122 bp, Homo sapiens
attgcttccctttcttttcccattcccccttaagacgaaccaggaagtaaccgcaagaatcgggccaccttaacagtagagtaatggtttggcctcgcgccaagtcccacctctgttccagc

SEQ ID NO: 229521 - DNA, 122 bp, Homo sapiens
gcccagggaagtcttggattctctcgccatcttcaatgtcggagcccagacggggcaaggcgaggaggagcccggggcgaagacgccacccacattcctccttcccgcaggcttcttctcct

SEQ ID NO: 229522 - DNA, 122 bp, Homo sapiens
tatgggtttctttcttcttcgcttcaggagatccagagggcacctgcctgcaggatgggccggctccttattttcctgggctgagccgtttggagggagggtgggcacagctgggcctgctg

SEQ ID NO: 229523 - DNA, 122 bp, Homo sapiens
atatttcacccataaatacttccctgtgcatcagagcccatgctttcgactcttgtaggacggacacatcctttctgggagggaggatggaataaaataaagcatactgagagcttagcata

SEQ ID NO: 229524 - DNA, 122 bp, Homo sapiens
tttccattcttttcttcaacgaaaactgcgtgacaatattgaaccaggatgtcatccgagcgccacacggtcccttcctgggttctctccccaaaggcagaggctgctcctgagccttgggc

SEQ ID NO: 229525 - DNA, 122 bp, Homo sapiens
actcccgagaagaccatgcaagccatgcagaagaagctggaggacttccgggattaccgccggaagcacaagccacccaaggtgcaggagaaatgccagctggagatcaacttcaacacgct

SEQ ID NO: 229526 - DNA, 122 bp, Homo sapiens
caaattacttcagttttaataaacacacaaacatgtatgtactttactataaacctgtaacgtgaagctacatgtgttttaataactatcatgggagcagaggtaacccagctggtggaaga

SEQ ID NO: 229527 - DNA, 122 bp, Homo sapiens
cacctgggctttgaactgaagtctgtctcctcaatttcctctcttagccactatgctaaacggcattgataaattagagatgggcaggtgaggggtgttggaggacaggggactatttcaag

SEQ ID NO: 229528 - DNA, 122 bp, Homo sapiens
agccagagacaccctaagccccagctaagaggtcgagaagcagccattttgcttgtagtccggaaggactgcaaatcccggcatccctcgcggcagcggccctctacacacaacaaatcccg

SEQ ID NO: 229529 - DNA, 122 bp, Homo sapiens
ggcccgcccccagcctcgcccccggcccagtcccgggcttgccacgttcccctcccagtccgctgcccctgcggtcagtaagtcaggcctcccaaggtcaagtctctccgcctcctcctggc

SEQ ID NO: 229530 - DNA, 122 bp, Homo sapiens
cagttcttgatcattcatgtgaaaacgagccatctccacgtctcccaaacgtcttcaaaccgtttcctaagtcttgtaaggccgcctgtgggttcctattacaaactctgaaataaaatact

SEQ ID NO: 229531 - DNA, 122 bp, Homo sapiens
tgtgagttggtgtctttgcaaccaaaggaatattcagctgagatgtttgattttactattcgatgtgatctcacttctccatgtaagcagcttccaacaaaatcacttactggagaaaagag

SEQ ID NO: 229532 - DNA, 122 bp, Homo sapiens
atgactaggagaatggataaataaaatgtgaaggatgtaaacagtgactacacgtacagccgctacctttggcaacatggctggatattaacaacagtgatgggggtggcgggagggaatgt

SEQ ID NO: 229533 - DNA, 122 bp, Homo sapiens
agactctggagcaactgtgcagctggaaaaaatttataaactgaaaaagataagtgatgacggaaagtggaagcgaagtacagaaactgccggactggttacatctttgcatttgccttatt

SEQ ID NO: 229534 - DNA, 122 bp, Homo sapiens
ggtgggggttgaacggggagagagagagcgccagagagttggcagggaaactcagagaaccgttcccaaggtagcggggccccaggagccctctccgcccgcgaacactgttagggttcccg

SEQ ID NO: 229535 - DNA, 122 bp, Homo sapiens
aaggggtgacagacggcacctggaaaatcgggtcactcccaccggaatactgcgcttttccgacaggcttaaaaaccggcgcacgacgagattatatcccacacctggcttggagggtccta

SEQ ID NO: 229536 - DNA, 122 bp, Homo sapiens
acactggcagaactcaggggtcagatcctctgccctggagcattcagatttgtgcctctacgttatggaaaccaggggcccgtccgggtgcaacgtggcatccacaaaatggcaggtccccg

SEQ ID NO: 229537 - DNA, 122 bp, Homo sapiens
ccagcggtggcgacccagctccacaggcgtgtggcaaatgcaggcaggcctgggctggctcgggtgggctgaaggcgaaggcagtgaaaagacgtggctctgccccttttattgacgtgata

SEQ ID NO: 229538 - DNA, 122 bp, Homo sapiens
cccacggccacctcagagccagagagcccagggtggagctctgggccacctgtgccctcccgccccgggcctcagtccctgcctatcccagtagctggggaccacgctcagtagaaccttgg

SEQ ID NO: 229539 - DNA, 122 bp, Homo sapiens
ccagtggcatgattggtgctgtgtcttatacctcctccccactgccctctgcaagacccacggcagggctaattccctctgaggcaccagttcccagtgagggccaggccaagggcttagcg

SEQ ID NO: 229540 - DNA, 122 bp, Homo sapiens
ccgaaggggaggcgccgggggcacttgcataacgcgccctgactcaccggagcccgggcacgggcagggtccctgtgggccggcctcacctccaggacagcctcgggcacagtggagcggcc

SEQ ID NO: 229541 - DNA, 122 bp, Homo sapiens
aaccgtggacaggaggggggtaccagagaaaccgtggacggggggggttaccagagaaaccgtggacagaacgggccaccagagaaaccgtggacaggagggggctaccagagaaaccgtgg

SEQ ID NO: 229542 - DNA, 122 bp, Homo sapiens
gatgagttccagcttttacctaacacagggttctctcgtcgtcccccaacccctccagctcggcttctttgtgtccagggttgtagatttttggatagaggtgtttctgattctagtgagtc

SEQ ID NO: 229543 - DNA, 122 bp, Homo sapiens
gagaaaaaattcatagttgccagtggttaaggaagtgatgggggtgggaaggaggtgaaccgaccataaaagggcaagataagggatacttggagtgacaaaaatactgtcttgactgtaat

SEQ ID NO: 229544 - DNA, 122 bp, Homo sapiens
cagaaagacctaaagacatcgtgccggtttgttggagagagggttgcgggacagggggagcgggccttacgcaacagaaaaggtgggcacagcgcgctcaaaatgacccagtgaggagttgg

SEQ ID NO: 229545 - DNA, 122 bp, Homo sapiens
aacaatgtagcatgcttttagagttagggatattttcttttggaaggatttcaagtctggcgtatttgcattgattgtggttatggcgcatttaacttttccaaaccagcttttttgtaccg

SEQ ID NO: 229546 - DNA, 122 bp, Homo sapiens
ggaggcggacaccgcttcgccccggcaacagcctgagttctgcggtgattggttaagagacgccgtcactcgcggcataccgaccaaccttgggacagacaggcgccgtggggacagtggtt

SEQ ID NO: 229547 - DNA, 122 bp, Homo sapiens
tcatgtcacactgattaggggtgcggaggggttgtgggctggatggtgcctgtccttatccgtggagacacttggggatggagcctcctgccacctgcagctgaagtcccaatggtccagca

SEQ ID NO: 229548 - DNA, 122 bp, Homo sapiens
aggagagaggaccgcgagagggaccgggtcgcttttttgttcgtggagatccccgctttccgccaaaccccatccttccgatctccccaggctaaaactccggggccggtccccttgtcctt

SEQ ID NO: 229549 - DNA, 122 bp, Homo sapiens
actgtggcgttcctcgtcctcgcttgtcgcggggctgtgggtcattgtggggccacggggcgacgggggacggcagcatcacaggcggctgcaggggccaagggcggccatcagactaggag

SEQ ID NO: 229550 - DNA, 122 bp, Homo sapiens
ggtgatccatccacctcggcctcccagagagctgggattacaggcgtgagacaccgtgcccggcaaaaatattttaaaataagtcagaggtgcaggtttaatccaaatcccccatcagcctc

SEQ ID NO: 229551 - DNA, 122 bp, Homo sapiens
ttgaacaagttgtagttcaatttataccagattatggaacactagagatttacagtgatgcgttcttttatttagatggaataggagaacccatagagttgaagctgtttgtctgaaggttt

SEQ ID NO: 229552 - DNA, 122 bp, Homo sapiens
tgcggaaaggattctgcaggctgaaggctaggcgcctcgccactctaggactacaattcccgagaggccttgcgacggaagccatctttgttccccaccaggctaagcgattttccggaggg

SEQ ID NO: 229553 - DNA, 122 bp, Homo sapiens
gcgaggctcggatttaaaggtcccgcggcctcgggccccgccccgccccggggcctcgagcgccaggccggcccggcgaaccccgcccaaggccaacaaggagccttgtccgcgcattccag

SEQ ID NO: 229554 - DNA, 122 bp, Homo sapiens
ccctctcgcgccacaaacaggaagtgacgtacaaagagccagagacgaactctgagagagcgagagcgcaagagcagggcagagaaggaggcgggctcacagcagggcgcctgcgcacatta

SEQ ID NO: 229555 - DNA, 122 bp, Homo sapiens
gtgcgacgtgggaaagagtccagggccggcggggtgctatgaggcgaggacttcctgagccgaggaccgggtgggttgtgagttgcgaccagcctcgctgacggaccctactacctctttca

SEQ ID NO: 229556 - DNA, 122 bp, Homo sapiens
gttggattgcaggcgctgagcacagtgcaggtgctgggatggggctaagctgaaagtttccgccctctggctgctgcggggccgacagcctgagttatgcgccgcggcggcttttggtcatg

SEQ ID NO: 229557 - DNA, 122 bp, Homo sapiens
acagtctgcttatgcaactgtctccctcgtcactctgtgagctgctggaggacaggagcccgctctcctgcattcctggattcttggcacagggcacatttgaccaatgcttgtttctgcct

SEQ ID NO: 229558 - DNA, 122 bp, Homo sapiens
gtgtttagctcttgagtctgtgggttgatgtagtggttcttctggtctagaacagcttcacgtgtgcacctgtgttcagctattggtcatctgtaggttggctgtgctttctcacatatcta

SEQ ID NO: 229559 - DNA, 122 bp, Homo sapiens
tctttcatttaggtattctgtctgtctcctttgatgtcgcacagcagagttgagtagtagcgacagacaccatctggcccaccaagtctaaaatatttaataactggccctgcactgagact

SEQ ID NO: 229560 - DNA, 122 bp, Homo sapiens
tatacacagatatgccccctcggcagtggcagcaatatgtaagatgccccggcaggaggacggggggcttcacatggccttgtgccacctgtcccaactttccctgccccctgtgtagcctg

SEQ ID NO: 229561 - DNA, 122 bp, Homo sapiens
tcatgtggttctagaacagctgttttgctgatctgcctcatctctagacttggaacctgtcgtactgcctaacagaccagcttacggtgttcataaacaaaacacccggcataatgcctggc

SEQ ID NO: 229562 - DNA, 122 bp, Homo sapiens
caaaacactgcagcatcttggcagctctgaattgggaagggatgaaggaggctgtgcctccgggttgcacgaagagtccgagtcatttctcagaaggttttgataggtgggccttagaggag

SEQ ID NO: 229563 - DNA, 122 bp, Homo sapiens
tctacaaaaactcaaaaaattagctgggctttgtgggcacatgctgtggtcccagttactcggtaggctgaggcaggaggaacacttgcgtttaggaggttgaggctgcagtgagacatgat

SEQ ID NO: 229564 - DNA, 122 bp, Homo sapiens
aatagggtggccagaaaacacctctctgaagaagcagcatttgagctgagacctgaagaacgaggagtcagtgatgcagagaacctcaggagatgccttccaatctgagaaaagagtaagtg

SEQ ID NO: 229565 - DNA, 122 bp, Homo sapiens
aatgggcccagtcactgctcctgtggagtcgctgtcagcctggcagtgtttctgtgcagccgtttctccaggcatgagacagagctggtggtgtccgtgcacaggtgcacacgcatgcacac

SEQ ID NO: 229566 - DNA, 122 bp, Homo sapiens
cccacactcactgggacacctttctctcctgctgctccagggggaccctgcgggcctgggcgccctggcggaccaatgggtccccctgatcctgctgcacctcgttccccaggggagccctg

SEQ ID NO: 229567 - DNA, 122 bp, Homo sapiens
ccctacttggccgggaaggtggggttgagatcacggactcacgcacccaactgccaaggacgctgcacgtgccagccttcacgaaactctccccagggcccgtagctgcagcacacgcctcc

SEQ ID NO: 229568 - DNA, 122 bp, Homo sapiens
aactccgtctcaaaaaaaaaaaaaaaaaaaaaaaagtctccctcctagagtaaaatgaggcgacccagtctgagagtgtgggtacggggacttcccgcagcctctcccaggcagcaagggaa

SEQ ID NO: 229569 - DNA, 122 bp, Homo sapiens
gccacggggactagagggcgagaacatgctggccaaagtactgtccgggacgctgagcagcgtcgagtgcttggtcacataaacctggccgcctacgttcagctccactacttcagggaagg

SEQ ID NO: 229570 - DNA, 122 bp, Homo sapiens
agccttgtatatcattttggaacctggaagcagttgtttctacctattgccttgggacctcggcctaaactgagaccaaatctcatttacggatctgtacaactagatggaaatggtgtata

SEQ ID NO: 229571 - DNA, 122 bp, Homo sapiens
aggccgtgttccccttcccctccccggttgtagatttcagctgttgctgccagacctgaccggttccggaggtggccgcgccccactcactgtcgcctgctttccacaggggacaagggcct

SEQ ID NO: 229572 - DNA, 122 bp, Homo sapiens
cctgtttgcggctgcttgttcgcattccagcttcccttgtgcccgcagtcaggctctacacgtgcgccagcctccgagcgcacgtccccgagtgacccgtgcgcggtgtgcagggacctcag

SEQ ID NO: 229573 - DNA, 122 bp, Homo sapiens
agctacagttgtccataggtatcctcatttttcagatgaagaaactgaatctcagccgggcgtgttggctcacacctgtaattccagcactttgggaggctgaggtggaaggatcacttgat

SEQ ID NO: 229574 - DNA, 122 bp, Homo sapiens
tcggcgccccagccggcaagtgagcgcccagcggagcgcaagggcggggcccgcgcgggccggagacgcccgttcgctgtcggccaaccagcgcctgtctctgaacagccaatgaacacgcg

SEQ ID NO: 229575 - DNA, 122 bp, Homo sapiens
caagtcacggccacctgcccttcagctggccccagggtgggggtccctgatcccagcccccggccctgcccagcccccagctctgcctggcacccggatctgcccagcttggagcttctgcc

SEQ ID NO: 229576 - DNA, 122 bp, Homo sapiens
cccgggcagcgcggctgcacttacttgtgtcacaactgcggcgacggggggctgaggaaccggttcttccaaaagcaaaccgaaaatgggtaacagagaggccggggcagcgctaagagggg

SEQ ID NO: 229577 - DNA, 122 bp, Homo sapiens
gacacatagggattacaggtcaagatgagatttgggtggggacacagagccaaaccatatcgcaagggaaaagctaagagacaaaggaaggccactgactaatgggcgttcttcaccatcct

SEQ ID NO: 229578 - DNA, 122 bp, Homo sapiens
gtttcataatgataagaaaaaagtaatttgctgatctaggtgagtgctttatcctctgtgcgtgtgtaacctgaagagggtaaattactttttcctggtaccacttggtatccatgaggagg

SEQ ID NO: 229579 - DNA, 122 bp, Homo sapiens
ccatgcatacactgtgcaagtttgggttcagaactgcatggtgatggggccatttacacccggtaattcagacaatcactctcaggccattcccacaggccttgcctgttcagcctttgtca

SEQ ID NO: 229580 - DNA, 122 bp, Homo sapiens
tgctggacgtcagaagtacagtgaaagatgcaaccacgcaagtatacggtaggtttctgccgttctctgttctctggagtgcctccggagagcttctccgtctcaggcccctttgaccccat

SEQ ID NO: 229581 - DNA, 122 bp, Homo sapiens
gagaattattgtaggtagacagctggtgatttctgcctaactaagaaaaggagataggaacgtattagctgctgactttcttttagcagtggttttccaccttggctgcatattagaatcag

SEQ ID NO: 229582 - DNA, 122 bp, Homo sapiens
ccattccctgagatatgtctcagttcccaaggagccactgtacacatccatccttgtacacggacaccaggtgctcagagacagacacaggcacatctgcacgccccccacttgctccccgg

SEQ ID NO: 229583 - DNA, 122 bp, Homo sapiens
tgagctagagcgagggcccaggcccggcggaggggctgggtgggacccgggtctggaagccgacacacctgcattcaggtctccacccactcttgttccttctgcgctggggaagttgaggc

SEQ ID NO: 229584 - DNA, 122 bp, Homo sapiens
ccaacccagtctccctctcgccgacttccctcgtccctccgccctcccggccgccgatgacgctactgatttcagccaatcatgaggcaagaaagtagtcacgctcacgtaagcaaccaatc

SEQ ID NO: 229585 - DNA, 122 bp, Homo sapiens
gacgcttttttccttatatttaacattttgagataaaggctaaatgagtgtatttgtgtgcgtatacaagtacaatcaatgtgactgtgacaactgcaaatgcaaagctgataaacatgtgt

SEQ ID NO: 229586 - DNA, 122 bp, Homo sapiens
ccttccgccccagtcactgggcctggctttgtgcgccgggcctttctttctctgccggaccgtggaaaaggcggcgtcagcgccggctttgtctggccccgccgcgccgctgttctcagggc

SEQ ID NO: 229587 - DNA, 122 bp, Homo sapiens
cagacgctcctgggggctcggctactggggtcctaaggaggcgagctggccccctcattccgccccgcaggccgtgcctctcctgtcttgaggccgcttttgcctccccacacctcttaccc

SEQ ID NO: 229588 - DNA, 122 bp, Homo sapiens
ccgcctgagttcacattctggcctgcactgccagatctccctccagcctctcaccagctccgtcatcctctgatctgccccagaggcacatctctaagaacactaatgccatcactcaaaaa

SEQ ID NO: 229589 - DNA, 122 bp, Homo sapiens
acactaacagtatctactctgtaacgttgtaaggaataaaatgaacggatgcacaaggagcgcttagattatgcactcgggtattagctggagctttcattgtgtacccagctgcctgggag

SEQ ID NO: 229590 - DNA, 122 bp, Homo sapiens
agggtcctcaggtgcttcaagtgcatgacgcacacctgtctttcagatgctcctagacagcgacaactcccgtggttacctggacaacccgccacgcagccgcagcgacaggcactgacgct

SEQ ID NO: 229591 - DNA, 122 bp, Homo sapiens
gagagctactcttccctggagctgcagaggacaacttgttccacccacgctgccctgccccgatctcacagagttatgaccgcctcgttgcagtccgttcctaagttagcttctcctttgct

SEQ ID NO: 229592 - DNA, 122 bp, Homo sapiens
ccgtccttccgtgtttggcttttcccgctgagcccctgcctcaggtccaccccgtgacagcgtgggtccggatcccccaccgtatgagaagatcgcactttgcttatccacgctgatgcttt

SEQ ID NO: 229593 - DNA, 122 bp, Homo sapiens
atcaccccaccccaccagcaggacatggtacatcggtccaatggccggtaagaaaggtaccgcagccattggtggggtatgcacatgcccagaatcatggagcgaggcctctggatgcctat

SEQ ID NO: 229594 - DNA, 122 bp, Homo sapiens
gcactttcaaatctaccactagcagccgccatacttgttgccatcgtaaagctaagaagccgcaagaaaattctagtttacgacggtcgtaatttaacaaacaaaccgggacttccggaccc

SEQ ID NO: 229595 - DNA, 122 bp, Homo sapiens
actgaggcatgaagaggaagagagttggccatgtgcctgcctggcttgtgccggggtgggcgggatggcagggctgactgggctggttgccagcagactaattaatgagctttaatgagctg

SEQ ID NO: 229596 - DNA, 122 bp, Homo sapiens
ccgggggtccgcgcgcggcgtgttggaggggggtgacccccaggagctggtgctggaaagcgaagaggccagggctgagtccgaacacttccaccctgcgctgccttccgcagtttccagac

SEQ ID NO: 229597 - DNA, 122 bp, Homo sapiens
gcatgacgtccacacagctccttggtgctgtagcccgtgccagcatctctttcattttctcggctgtcgagtgtccactgtctggacgggcacgttttgttcacccactcatgtgctgatgg

SEQ ID NO: 229598 - DNA, 122 bp, Homo sapiens
actgcctagggctgggttagtgccagggtgcccctgtaagctaaatgccacccgcacccgcgggggaaggcgaggggtcaggcgctcacacagggaaaggctctagggtcgtaaaggtgggt

SEQ ID NO: 229599 - DNA, 122 bp, Homo sapiens
actcagtgacaaacagctactctgggaaggtgatctctacggccaccggccacagggctccgtccctgagctcctcacgccgcagtagctaaagcacccttagctgcaaggaaaacacaggt

SEQ ID NO: 229600 - DNA, 122 bp, Homo sapiens
ttagtagccatctgacattctccttccctgggaacccaactggtagcacatggaaaactgcgtgtgtgtgtgtgtgtgtgtgtgtatgtatgtgtgtgtgtgtgtgtgtttaaagagtgtgc

SEQ ID NO: 229601 - DNA, 122 bp, Homo sapiens
tctttatccaagctcacaattttggttatcaaagaagcctagtaatcttacacagactatcgaaagtgagatggggccagacattcttgagagagagcacctggccccatttgatgctatta

SEQ ID NO: 229602 - DNA, 122 bp, Homo sapiens
ccacaaagaccaagaattaagagtggccgtgttccatgacccaccttatctgagctgcatcgtgctctttctgtgtgcttatggtgaggttgcagcatcctctcatatttccttggcttctt

SEQ ID NO: 229603 - DNA, 122 bp, Homo sapiens
ttaattaattaatttaatcaaaattaacgtacaggagcggtgaaaaagaagaggcaagaccggcccccagaccgaccaaagcccacgtgccgccacaccccacgcccagcgcgccgacgtcc

SEQ ID NO: 229604 - DNA, 122 bp, Homo sapiens
acccgccctacctgtctctcctgggccctctgagggatcttcctccggcctctctggtggcgctggacccagccactcaactcgtcagcaagcctggggaaatggaggagctcaggacctcc

SEQ ID NO: 229605 - DNA, 122 bp, Homo sapiens
tcttaggcaacgtcctatagtgcaggccggtcgctctcagactgtctcctcttcaatattcggaagagactgtgggtgaagctgcagtacagaaccacaacacccctatttaacgtaaaaac

SEQ ID NO: 229606 - DNA, 122 bp, Homo sapiens
tatcttattagtactgtccttctagaaaaccctaactaggatgggtgagtgcggggcgggcgtggggaaggaccgggctcccctcgcatatggttggagagaggtgaaacgcgcccaggcgg

SEQ ID NO: 229607 - DNA, 122 bp, Homo sapiens
aaaaaacaacaacaaaaaaaaaacagtgcccgctcggtttttcctgaaacgcgcagccctcgcctgtagccaggagaaaactccgcgagccaggaaaacacaaactcggccaggaaacagcc

SEQ ID NO: 229608 - DNA, 122 bp, Homo sapiens
agtttatctgaacaaacagcaattcatgaattaggaagcatcaaaccaaaagaagtctcgcgcttctatgcttaaagcattagacacaagtattcacagggtgagtgaaggagtaaaacaaa

SEQ ID NO: 229609 - DNA, 122 bp, Homo sapiens
ccggggcctctcttgcctgaagtcctgccatgaagatgaatctctgcctgtacccagttccgtcagggtcctgctaaggggtgagcagaggacaccacaccgaggggccacccattgtctcc

SEQ ID NO: 229610 - DNA, 122 bp, Homo sapiens
gggcttcccacacaccatcgagtggggtttcagaccccacgcagcaactggggagacaagcgggcttgggccggggaacagcggggcagaggagcccatctggagctgggggcagggtggcc

SEQ ID NO: 229611 - DNA, 122 bp, Homo sapiens
tacttgggaggctgaggtgggtagactgcttgagtctcggaggtagaggctgctgtgaaccgtaattacaccactccactccatcagtaataagtattgggccaggcacggtggctcacgcc

SEQ ID NO: 229612 - DNA, 122 bp, Homo sapiens
gtcatgttcatggaacttgacgagtgataagcctctttatttgtccagtgcttggatacacgaatcgatgcaatgaaagagacctcgcctgtgaagagctaagaaatgagtgtgggcagaat

SEQ ID NO: 229613 - DNA, 122 bp, Homo sapiens
ggtgatagtctaaagcaaccataaaattagatatttttcacagtcagcatgagttgttctcgaaagagagttgcctgtgatgttagcattatatggtgcaggaacctcaggtgattataaat

SEQ ID NO: 229614 - DNA, 122 bp, Homo sapiens
gacccgcagacagcttgagctcagcgagtgccagtgcgatctccggccttatagacgtctcgccccgaacatcccgtgctcggggcgtggcagcaccggggcctcaaccgtgcagggtgtgg

SEQ ID NO: 229615 - DNA, 122 bp, Homo sapiens
ccctgctgcacagcatgccctccgcccagggcggcagcgcggcagaggaggaggacggcgcggaggaggagtccaccctcaaggactcctcggagaaggatgggctcagcgaggtggacacg

SEQ ID NO: 229616 - DNA, 122 bp, Homo sapiens
cagcacttctgggccagggctttgggacgggacgcgagctgaccacctgttccttctttccgcagggtcgcggagcctcgccggccgccatgtggagctgcagctggttcaacggcacaggg

SEQ ID NO: 229617 - DNA, 122 bp, Homo sapiens
actgcctcaattttcttagaatggtccacctattgacacttgtgtctcccttttgctttccgttcaactgctccttcatatttgtttttgcttttttctctttttacttatgctgatttctg

SEQ ID NO: 229618 - DNA, 122 bp, Homo sapiens
aaggttctggaaggagcattttcccaggaagggtctgtttctggggtggtggctttcagtcgtgtctgtgcgtccccgggaggtgcactttgcgctgctggcttgctttactctgagagtgg

SEQ ID NO: 229619 - DNA, 122 bp, Homo sapiens
tacctgttaagggctagaaccgaggaggcacctccgggttggtacccacaagaagggcgtcgggcaccccaatctgaacagacacagaactgagccgaagcaagggtgggagatggcagcgc

SEQ ID NO: 229620 - DNA, 122 bp, Homo sapiens
cggctctgctgtgtgtccggggccaaagacacgcaggggcggtcgtgccagccaggctctcgggctcttgggcgctcgccacactctggcggccaaacaatgcccacctctgagtagagctg

SEQ ID NO: 229621 - DNA, 122 bp, Homo sapiens
cctcctcacccgatgagcacttactcacaggtgtttcaaaactcgactcagaagtctcctcgagtgtagaagcttcctcaactcctccccaagcaaaactaactgttctaaatccccataac

SEQ ID NO: 229622 - DNA, 122 bp, Homo sapiens
acgctgcccgcagttcccccgccaccggcagaatccgcacttactgcacccacagggcgacggtgacgaagcttcgagcagcgccgaacagccccagccccagctcccgcgcgtgtcgctcg

SEQ ID NO: 229623 - DNA, 122 bp, Homo sapiens
atagtatttttattagttctctggtgagactaatttttattttaatcttcctctaatattcggcagtagaaatttgagtttcagattatggctcagatcacatcattgagtaatctttttaa

SEQ ID NO: 229624 - DNA, 122 bp, Homo sapiens
cctgtaaatcattaaagcctgttccacataaagctgactagtcaatccaaccgaaactagcgtgcctggacgggtcggttggccctgcagagcccggcgctttgctctgctccgtcagctgt

SEQ ID NO: 229625 - DNA, 122 bp, Homo sapiens
aaacttgggaaaggggcccccacacgcacttctcctgcaccctggctagatttcccggcacgggccagccagggcagccagcctgacctgctccaggaaagcctgaggcccggaggtccctg

SEQ ID NO: 229626 - DNA, 122 bp, Homo sapiens
tcgaggatgatgttcttttcaataatgccactgcctcactccggctgacctctgtcagttcgaccccatccacattcaacaaaatgtcacctgatggccagagaagcagaagctatctttag

SEQ ID NO: 229627 - DNA, 122 bp, Homo sapiens
cactagcgactcgggcctctcaaaaccagcctttaggcatttaaaaagtgatacggttcacgccggtcttcgccaccagatcccaattctttcctgagagcagtgctgaagtgacaataggc

SEQ ID NO: 229628 - DNA, 122 bp, Homo sapiens
ctgagctgaaagagcctcctccgatggccctcttggaaagcctctctgttgtgttgatggcgctagccgggatctggcagggccttcttttctcatttgtttgtactttattgactgtcttc

SEQ ID NO: 229629 - DNA, 122 bp, Homo sapiens
aagaacatcacttttaaccttgctttggcgaagggagtcggaaagctgagtctctatggacgggggggtgatcttgctttcagtgttccctcagcttttgtggatttaaaaccattctgctc

SEQ ID NO: 229630 - DNA, 122 bp, Homo sapiens
ttgataggtagtgaggcactcaccaggcggactgcgggttcccactccctgggagctccccggaagctccaagaaccgcctgggtccccaggcccgaacacagtcagcacttgctcccagcc

SEQ ID NO: 229631 - DNA, 122 bp, Homo sapiens
atttcttaaccccttcatgttcagcgttaaaattagccatagtaaaaaacaacgaacccgcggcaaaactctgcaatccagacgacgagaaaggcttgatccttgtgtccggttaaaaatgc

SEQ ID NO: 229632 - DNA, 122 bp, Homo sapiens
ctttccaccaacgttttataattatgttgctccttgtataacaccagttaagacctcatccgagagatttttttttttaaatttcaacttgtgtcgcagttcgagttgctgggctccgctag

SEQ ID NO: 229633 - DNA, 122 bp, Homo sapiens
tcctgttagagctgggaacacaaataaccccaagatatgacccaactgagaaatgagacacgagagtcagcaggtctcaggactagagaacatatcatagatctggggccaaggggacctcc

SEQ ID NO: 229634 - DNA, 122 bp, Homo sapiens
tggggccagcggcaccggccggccgctccaagtgaaggacctgccgagcccatgcccacccggaacttgcgctggcccacgagtgcactgcacagccccagttcccacccgtgcctctccct

SEQ ID NO: 229635 - DNA, 122 bp, Homo sapiens
tttattttctgcaaaagttaccaaggctcacagatgcctttgggtttccccaaggtcacccggttaattattgacatagcaactcccctcgcaaaacaaagaatcaaaatgatttcccacgt

SEQ ID NO: 229636 - DNA, 122 bp, Homo sapiens
tcgggggcgtggctcaggtgtcagggctgcgctgttccacagccccctggggcagcctggcgggaccagaactcagacacgcctgggcacaaatcagcctcttgggagagctgctttgcccg

SEQ ID NO: 229637 - DNA, 122 bp, Homo sapiens
cacagccgagcccaggaagtgcgtcccctccgtggtcgtgggcgtcgtgggcatgggccacgtgcctggcatcgagaagaactggagcaccgacctcaacatccaggagatcatgacgtgag

SEQ ID NO: 229638 - DNA, 122 bp, Homo sapiens
cagctgttttgccctggctcattgctgaggcctttgctgggggctatggaggttgagcttcgaggtgcaaacatcccttgtacactaccacgaccccctgaaaaataatttctcttccaaga

SEQ ID NO: 229639 - DNA, 122 bp, Homo sapiens
gcacacatagaagaaaaattaaaaatgaagccaaactccaacagggcttccatttaccatcgaagtgagaagagattatagagaaaaaccatttgtgattctcaatccttttaactttgtgt

SEQ ID NO: 229640 - DNA, 122 bp, Homo sapiens
gctagaacagggtaggggcccaaggcaggatgtggccatggtgctgtagagtccccccggcgactcagagcagtgttcccgttccaggttctcccagcagttggggacagctctgccttagg

SEQ ID NO: 229641 - DNA, 122 bp, Homo sapiens
gccggtccaactgctccaggtaagctgggagggccgcaggaaaggcgcagtagggcctggcgggaggcttacttaactgggcaggggcttcctgagtatcagctgtgcccaaacctcggggt

SEQ ID NO: 229642 - DNA, 122 bp, Homo sapiens
gtttctggcttgcaggggcagcaggccctgccggcctgtgttctccatcggacaagaatgcggaacagccctaatcccgtaagaggagctgctcacaatgccctggcccggtcaccccggca

SEQ ID NO: 229643 - DNA, 122 bp, Homo sapiens
tgtgggcacgattacttcatgaccactgaatctaaaacagcacagcttggtaagacacagcggtcggatcccacctactgcaacacctctaagaggcgaccctcacaaaccagccatgctta

SEQ ID NO: 229644 - DNA, 122 bp, Homo sapiens
aaggcttgaaagttacagaatgagatagaaagtgtgtgagaaacagaagaacagggaaagcggagaagacacttccttggggagaaacgccgcagcctcggccagccccgccactgcccagg

SEQ ID NO: 229645 - DNA, 122 bp, Homo sapiens
aggagcagcatgccaccacttccctcctccacatttactttcagatctggccacggctttcggctttctggtaggtgtccatgatctgccagtacgtgctgatccctgtgcgctgtggcccc

SEQ ID NO: 229646 - DNA, 122 bp, Homo sapiens
gttgatcccaaggagcaaagagagtgtgtgtgtgtgtgtgtgtgtgtgtgtatctagactcgtgtctagatttgtgtgactgtgtctcgactctgtgtgtgtgtttagactccatatcatca

SEQ ID NO: 229647 - DNA, 122 bp, Homo sapiens
ttacctgagaaggcgggaaggtgcggccgcggggtgagcggcggactgacccagctccagcgcctctgcagaggcttgcaatggcgtctctcgggctctgattggtcaggcctccacacgtg

SEQ ID NO: 229648 - DNA, 122 bp, Homo sapiens
cgacttttggggagactcaccccaaccaacaccgtccgggcaggcctgaggctgggatgccgtgctgcttcccccggactccgcctggggtttgccccgacacccaagcacctccatggagg

SEQ ID NO: 229649 - DNA, 122 bp, Homo sapiens
gagtgaatgcgcaaataagggttttcaaggcgtcagtgggaaagagggaggggaaggcaacgctgaggacgggaggacagggcggtggcatccctctagcgagagagagccagagccctcgg

SEQ ID NO: 229650 - DNA, 122 bp, Homo sapiens
ggcgcctcctcaccagcttcggcttcagctggtcctcactgtcgctgtgccccagccggccgtagcggcctttgccccatgtgtagaggtccccggctgctgtgacacaggcgctgtgggct

SEQ ID NO: 229651 - DNA, 122 bp, Homo sapiens
tctgggagttcaagattgtgcagtaattggttaggactctgagcgccgctgttcaccaatcggggagagaaaagcggagatcctgctcgccttgcacgcgcctgaagcacaaagcagatagc

SEQ ID NO: 229652 - DNA, 122 bp, Homo sapiens
ctcccgccgcgctgcctcccaggcttgcgagcttgggtctttaacgtgctgcacccaagacgggcttccctttttcactggttatttccaagcctccaggctcccaccgaagggcggctttc

SEQ ID NO: 229653 - DNA, 122 bp, Homo sapiens
aaagtctttaatgtaagcacagaattcaatcacctcatgtgtgagaggttggatctgagacgtcttttgagtctggtcatagtgaaggatgcaaggtggcaattgtagtcacaacaatttcc

SEQ ID NO: 229654 - DNA, 122 bp, Homo sapiens
cccggcggaggggaggggcggagctgtcagctccggccaatgggcgctcgggcgtggatccggcagccaatggcagtcggggcggagctggcgcgcggccttataagcccccccgcgagcgc

SEQ ID NO: 229655 - DNA, 122 bp, Homo sapiens
cctgccccaggcaccctgggcgctctgccctaccggcggcgcctctcactgctcacggaacgttctggaagtttgggaaaccctgagcggtctctgaggacctggtgagcaggtgggtttgc

SEQ ID NO: 229656 - DNA, 122 bp, Homo sapiens
aagaacacttacaactccataataagaccaagaactcaatcttaaaatagacatacgattcggacagacattttaccaaagaagttaaacgactggctaagaaacacctgaaaagctgttca

SEQ ID NO: 229657 - DNA, 122 bp, Homo sapiens
ggccaatgttttaagtgccattctgaaggcaatggtagaattgagaatgtggtgatagaacgaggtgccactactgaaatgagagatttttctggagttttggagaagattagcactgtgaa

SEQ ID NO: 229658 - DNA, 122 bp, Homo sapiens
gcatcttgggagcaggcgagggtcccccgatttccggggctgagttcccggctagacttgcgctgcagcctaggggagaaaacctctctccctaacgctgcgctgcagtcttctctaccttc

SEQ ID NO: 229659 - DNA, 122 bp, Homo sapiens
acgtggatttcgcctgcctggcatgtcttccggcagctacatctttccctgcccttagttcgtttgattcaagtgggcttgtctcatctcccaggtccaagtgtgggcgcctgacctaggca

SEQ ID NO: 229660 - DNA, 122 bp, Homo sapiens
gcctcgacttccatcggctagctcgcccagaaccgctccatgagtgctgaaaactgcaatcggctcagagagcgctctccggagaaggggaaggagaaggaggaggtgggtgcgtgggggtt

SEQ ID NO: 229661 - DNA, 122 bp, Homo sapiens
atgggattttgctctcatgtaacttctgagaacatgagctgcagccacctgtataaaaaccgcaggctgaaaccctccggagcagtccaacggttactttgaaagactctcccaggttgtga

SEQ ID NO: 229662 - DNA, 122 bp, Homo sapiens
acagccactgtgtctgccatgtcattaaccaggctcctgtgaggacaacagcctgggcctcggcgtcaatcatcgataagaagcctctacagcacccctgccccctaatttatacagaaacc

SEQ ID NO: 229663 - DNA, 122 bp, Homo sapiens
gtgctgtaccagggccctcttgccaagacagccagcttataggagcctgcatgtgaggcccggacgtcctacagagcagcagttagaggtctggccttctggataggcactgccctgccctg

SEQ ID NO: 229664 - DNA, 122 bp, Homo sapiens
catagatggtcccatgttatgagaaagatgtaaagatgagatagattcagctccttttctcgagaagattataccatataaggaagtaatttgctgaatggtctctcagttagcctgactag

SEQ ID NO: 229665 - DNA, 122 bp, Homo sapiens
ggtgctctggcgacattgtttgcactgtttatacaaccagacagcgttttagactaaattcgtgtccaaactaacacgcacgggaacaggctccagctgcagctcctgggtccatcaggcca

SEQ ID NO: 229666 - DNA, 122 bp, Homo sapiens
ctggacccctggccagagcccatgctgagcccctgctgttctctgcaggctgtgggtgagcgtggaggatgctcagatgcacaccgtcaccatctggctcacagtgcgccctgatatgacag

SEQ ID NO: 229667 - DNA, 122 bp, Homo sapiens
aaaatattggaagagtggcaggtttgggaggatgagacaatcaactgtttggttgagccacgttaggtttgaaatgtctacgggactcccgtggggagaggttatatcagactggagcacca

SEQ ID NO: 229668 - DNA, 122 bp, Homo sapiens
cctggttactcttcaaattcctccttactatattgtcccttcagatttgtaaatctttaccgtgacatcgtattttacacactgaacctttgtaccgctgttcctctcctgatgaacttccc

SEQ ID NO: 229669 - DNA, 122 bp, Homo sapiens
cttttccaagcgcactcacattattcatgcaaagttaatccccgccgcgtcacggccgcccgcccgaggatgtgcgccttccttggccaagccccgcagtctccaccctcctccgccccctc

SEQ ID NO: 229670 - DNA, 122 bp, Homo sapiens
gcccctgagttccacagtcgcgaagctcgagtgctttcggagccccgggagcgccagaggcgctgccttttgtccggtgcctgagaagccatggagaaaggcagaggggaccacagggagaa

SEQ ID NO: 229671 - DNA, 122 bp, Homo sapiens
aagatcccaaagcaaggaaagaaagaaaaagcgagggggcgggggcgctgcagaatccagcgtcctcccaagtcctcctgtgggaagacagcagcgctgctactggtggagaggggctgcga

SEQ ID NO: 229672 - DNA, 122 bp, Homo sapiens
cactcctcccttccgcccaggtgagacttgctgttgttccgtgggctgaaacaggccatgcgcctggctgtcgggtgctccgggcggcaccagcaaatgaccacaaaccgggggccgaaagc

SEQ ID NO: 229673 - DNA, 122 bp, Homo sapiens
caggtctggtcagtgccacatagcaaatcacaccggctctactccttttccatagaggcacggccagcccccatggaaaccaagtctttctctgcctggcagcctcagcctgagcctccact

SEQ ID NO: 229674 - DNA, 122 bp, Homo sapiens
catgtggggggcacgcgcctgtgtaagtgccttatcgccctcacgctgcaaacagtgctgcgaagtcggcaccagtattgttctcattttgcaggagaggaaactgaggttcataaagatta

SEQ ID NO: 229675 - DNA, 122 bp, Homo sapiens
taaggtgatccacctgcctcggcctctctaaagtgcagggattgcaggcgtgggccaccgcgcctggcctagccaatttaattcttgcaataatcttatggcataggtgcctctttttatcc

SEQ ID NO: 229676 - DNA, 122 bp, Homo sapiens
aaccgcccgggctgggggtgctgctgcgcggtgagacttccgcgggcggcgggcggagagcgggatttgactgcgaaagccaagggggcggggaaggggaagccccggccctcgggggcgcg

SEQ ID NO: 229677 - DNA, 122 bp, Homo sapiens
atgaatgaagactttgcccacattttcactatgtatcccagattttctagaaggtatttccgaatataattgcaaaagcaaacatatagtagtggttctgattgcagaaattttagagtagc

SEQ ID NO: 229678 - DNA, 122 bp, Homo sapiens
ccacttctgcagattagagactttgttgcacccaaattcaagtgtacatataggcacaggcgcctgcaagcatgcatgcacacacacagtcatacacaggcagagatggacatgcacaggca

SEQ ID NO: 229679 - DNA, 122 bp, Homo sapiens
aaactgcccaagaagacaatgcccccagcccaccctggtggctgctccacacgtccgaagcgtgcacgagaaggtcaaggcaggaacttcagccgggtctcgccatgatggaacatggaaag

SEQ ID NO: 229680 - DNA, 122 bp, Homo sapiens
ctgctctccccacctgatactacctttagatggtgtgtctgtgtcttcggctctcaacagcgaagccgccatcctcatgttctctcctccctctgccatcctgacacttctttttgaataca

SEQ ID NO: 229681 - DNA, 122 bp, Homo sapiens
ccacgtgtcttccctgttcctgttcattgtccttgctgtcctcagcttcctttcttcaaacgtaagctgcatgtgagcagggagtgtgtttgtcttgttcaccactcagtcttcaaaggcct

SEQ ID NO: 229682 - DNA, 122 bp, Homo sapiens
ctccaagactccatttctacagggattccataaaatgggcataagaattttcactgtgctcgtatggactggattaggccatcatgtgcattaacacacttggctgtgagcactaggtgcag

SEQ ID NO: 229683 - DNA, 122 bp, Homo sapiens
ctctgatttctccccagttagtaaagcattcaggctgctcggtggaggtgggaagacaggcgctgagagttgtctgacacaattgtcttagcagcaggagacgctgatgggatgtcgggagt

SEQ ID NO: 229684 - DNA, 122 bp, Homo sapiens
cgccgctggagccgcagggcgctgcttttcgctgactctgccaaacacgccattagggcccgcctgggagggcgctaccctaatgaagcggctctaagtcacctttgaaaggaaatccccgg

SEQ ID NO: 229685 - DNA, 122 bp, Homo sapiens
ttctgtttttttttttaaatcctattttttttctaccctattttttttctaatgaaaagccggaagttgcttggtgagacctgaggaatgagtcagtgactgttaaagccacctctggtgtt

SEQ ID NO: 229686 - DNA, 122 bp, Homo sapiens
caccacactgtggccacatgccaaagggcctgccctttgcatgtgagctctcagcacagccggcatctccgtgctctatgtcgtgcccttgtgtcctggcgtcttgtcccgcttggctgcca

SEQ ID NO: 229687 - DNA, 122 bp, Homo sapiens
cctctccaaagacagtttgggctccacagcatggtaactggcttctaagattaaaagtctcgaaaggcaggaaatataagcaaccaattttttatagcctagacttggaaactggcatagta

SEQ ID NO: 229688 - DNA, 122 bp, Homo sapiens
caccgcgctggagtaccctgcacataaggtccgctcatgggcttctcagtacggactcgccggcgggaacaattaattgagcaaagcgcccctttctgggctggagcaaggttcgcggctgc

SEQ ID NO: 229689 - DNA, 122 bp, Homo sapiens
tgtatactaaggaatctctttgtaatccatttgaccaagcagcaggatccaatatgagaccgctcttggtgctcctccaaatgggtgcaaaaccactagagcattttgattcacaatgtggg

SEQ ID NO: 229690 - DNA, 122 bp, Homo sapiens
aatggcccgtgcagggggaccagggtgccagggatgggggcattcgcgggagggggacgccgcctgcctgccctgaagtgcactcaccctcctaccagggagccccgattaccagcagcagg

SEQ ID NO: 229691 - DNA, 122 bp, Homo sapiens
gtgtgcacggggccaggggaggcggaacctgccttcctcgccccctcctttctcgctcagcgctcaatgtgtatgtagagctatgtataccgctccacaccctttcgtgcccgcgcgctgaa

SEQ ID NO: 229692 - DNA, 122 bp, Homo sapiens
gggaggggtggagcctccaagtcctgtctcaatttagatctctcactctgctgttaggcgcgcccatttcagattactaaactcgaattaagagggaaaaaaaatcagggaggaggtggcaa

SEQ ID NO: 229693 - DNA, 122 bp, Homo sapiens
cgccagtgtagacccgggctgcatcctgagtcctgttccaactctatgctagcccaaactcgcccacatgatcggcccaggctgtcccccacggggtctcccggtgcccggacctcaggcac

SEQ ID NO: 229694 - DNA, 122 bp, Homo sapiens
cactcaattcacctaatttaattcgagcagctcactcattcgctcacttatcgcagaccccgcctcgggactgggcctccctgattcgctggggccgagtgacgtcctcagatcgcgaccct

SEQ ID NO: 229695 - DNA, 122 bp, Homo sapiens
cttaagcggctcagtggggtaggacggatggtcgctgtccctcccgccggtgctgaagtccgccgcaccccatggatggagggaggggccgcccctcggggcggggagagggccccaagaga

SEQ ID NO: 229696 - DNA, 122 bp, Homo sapiens
ctgctggtcttcctctgcttcttcactgccaacagccacctgccacctgaggagaagctccgagatgacaggagcctgagaagcaactcctctgtgaacctactggatgtcccttctgtctc

SEQ ID NO: 229697 - DNA, 122 bp, Homo sapiens
aatgggacgcgcaccgtggcaggctccctctggcggccgtgtggagaacaggctgcagggcgccgcggaagaggccaccccgtgaggagcccagagcgctgggccccgggcagggagcgtgg

SEQ ID NO: 229698 - DNA, 122 bp, Homo sapiens
cccacacccttggtattttccctctgccagccgcaggtgttgcgagtgaggacccctgtccggtcttggagatgcgcggggccctcggagccttggcctgggaggcgctcccgggggcgggg

SEQ ID NO: 229699 - DNA, 122 bp, Homo sapiens
tttagttaggcaaaatgtgagaacagtgtggccatttgcaagttttaatggtaatcaacccgggtttggggttgctcctatagagtgaagtacctccggaggtggcaggaaatgcaggtatt

SEQ ID NO: 229700 - DNA, 122 bp, Homo sapiens
ctcaatgtcgtccaactttttgtatccttgcttgggtttatcaaagataagttgaaggagcgtgtgttctgtgtacctttgcaaccagttataaataaacgcaaattgaaataaaaaagaca

SEQ ID NO: 229701 - DNA, 122 bp, Homo sapiens
gaataatgctggcccttctcactgccccttttgaggtgacagaaaggatttcagaggagccgtatcttggctgtccagggaacaggctgttagtattggtggtaagtgaatgggtccatcat

SEQ ID NO: 229702 - DNA, 122 bp, Homo sapiens
tccctgcatttctatgaaagccgtgtggctcacagtgtgtctcctttccctgcatttctacgaaagcccgcgtggctcacagtgtgtctcctttccctgcatttctacgaaagcccgcgtgg

SEQ ID NO: 229703 - DNA, 122 bp, Homo sapiens
aaaggctgttgtccttattgccactcttcccacccagcgcccacctgttccctgccccctcgacgtccctctggcttggtcacccatgtgtgttagaggctgggccccagttctctggggat

SEQ ID NO: 229704 - DNA, 122 bp, Homo sapiens
tcgctccgtaaggcaagagaacccactaggggatgagcccgaactagggatgtgacagagcgcgagacccagcctaaagagagcccggagccagcgtgggaggccgctgccgtcgcgcgcct

SEQ ID NO: 229705 - DNA, 122 bp, Homo sapiens
ggctatggaggcaggcatgttagcaagcagctgtgtgctgtgtttacctgtctgcctctacgctgtctcctggttctcaagccaccaatgaatactgaggtttctgggattcttgcttttcc

SEQ ID NO: 229706 - DNA, 122 bp, Homo sapiens
cagcagccccactacaaaggagcagctctgctccatctatgttccagcaaaggcagccttcgcaacactccttccaagcctgggaggcccaggcggccagaggcatgctggcctctgcctgg

SEQ ID NO: 229707 - DNA, 122 bp, Homo sapiens
tgttgttcacccatctataacttggccccaaagtgtgaggaacatatgaattttcttaggcggtcctgagttgaaatatctaaaaattatatttgcattctattgccatattatagactggt

SEQ ID NO: 229708 - DNA, 122 bp, Homo sapiens
ggcattgtagaaagtcgatgtgtctggagcttggaggggagaaacaagaagaggtaaagtcgtgttcattgttgcaaccccagtgcttgggtggagtagggggctctataaatgtttgtgtc

SEQ ID NO: 229709 - DNA, 122 bp, Homo sapiens
tcacgtctcagcttcattgtctattctcttctacttcctgtcctcccacaggctgcctgccgacactacggccactgtcgaggacatgctgccttctgtcaccaccgtcaccactaactctg

SEQ ID NO: 229710 - DNA, 122 bp, Homo sapiens
tgccagcacttcaagtactttcccgaactgggggcaggaaggaggaagacaatgggacaacgaaacagtaatgaacccaaatgggataaaagtggaagagagaaggacaacagagatgggga

SEQ ID NO: 229711 - DNA, 122 bp, Homo sapiens
gaggatgtcaagtgactggaattggtgtgggactgtgttttgcaggaaccagctgttgcacgtgcccttgaggcagcaccaggtgagctgctgtgactggctgctgaagatcatctgcgggg

SEQ ID NO: 229712 - DNA, 122 bp, Homo sapiens
ccgccctgcgctctaaatcctggctctggaaatccaccagaatcaaatgctggctccctgcgggcccgcgtcggagcggctcacgccattggaatctttttatgacctttgatgtgtttaaa

SEQ ID NO: 229713 - DNA, 122 bp, Homo sapiens
tccggcgtgagtcctcatggccgttgctgtcgctggaggaggtctggctcataaggtgctcgtgggacccgttgctgcccagactcccgtagccactggagccgctgtgggggacgggctgg

SEQ ID NO: 229714 - DNA, 122 bp, Homo sapiens
attgatgttgatattggaattgctggctcggtgttatgcaggcgctgtatcttccgcaggcggtagccacggtcggactgagcccctggcaggctaaggcctggatcccggttctcccctca

SEQ ID NO: 229715 - DNA, 122 bp, Homo sapiens
tcatgctgcatccgggctgaggtgaggtcagataggctctctgggtttcctggagacccgcgttgagcggtgctgctccggagtggaagccgggagtttagcaccacgactctggcgctgcc

SEQ ID NO: 229716 - DNA, 122 bp, Homo sapiens
gcccaggaagcccctgcctctccctgccaggaccccagctgggccctgggctcctcacctcggggtagccccaattgcttgcacttggctccccctgcctggactggtgccccgcccttgga

SEQ ID NO: 229717 - DNA, 122 bp, Homo sapiens
tcagaagatttcgaagtcctgagcgcttagccgtgcaggaacaatggtgagtctttagcccgatcgggagcggcaatggacgcctcgctggatcaggagtgaataatttttttatttaaaaa

SEQ ID NO: 229718 - DNA, 122 bp, Homo sapiens
aacccactggaacaggagcgattcagcatggtgtccctgctggtcaactctccccgcgtgcgtgtcctttcggaggagggtcagcccctggccgtgcagatcagcgcacactggagctctgc

SEQ ID NO: 229719 - DNA, 122 bp, Homo sapiens
aaaagtattttgctaagctagctttaatactcagggcaaatacaatctcaatggttcccacgttacactggcgtactatgttcttaaaaggtgatgggtaggggttggggtgggtagaagga

SEQ ID NO: 229720 - DNA, 122 bp, Homo sapiens
aatgacaggtccatggagcactgcaggttgtagtcatattttattctccaggtgggctatcggctgcccttcacttccctgaggcaaggaggaggaaaatctggcatttggagagtcagagg

SEQ ID NO: 229721 - DNA, 122 bp, Homo sapiens
cgccagtctgcggtgttcaggcccaaagcctgcagcctgttcagtccagggcaccgcaggcgccagaactctggcgggcgggcgggcgggcggcgagaagggctgtctagggcgcacgcctc

SEQ ID NO: 229722 - DNA, 122 bp, Homo sapiens
ctccagagcacttatgtctcagtaacgtttgtttgtccaaagcagcatacgatccagccccgctgcccacccttacctgggaaacggggctcctctcatagacccacagtgctccccctagc

SEQ ID NO: 229723 - DNA, 122 bp, Homo sapiens
aaccactgggctgcgcccctgcggaagcagacaagggacaggtgggcatacgcttgtctacgcctgtgcacctgagtgtgtggaaggggtgatggcacgtgtgtgcccgcgtgcctacaggg

SEQ ID NO: 229724 - DNA, 122 bp, Homo sapiens
cgggcggggagttgcagccacagcgtgtccgcaggttcgagcccagggctaaagtaccagcgtggaaacttacctgggaccacaagttggtgctgaaagtcagtatttttttctctttattt

SEQ ID NO: 229725 - DNA, 122 bp, Homo sapiens
aacacggcggcgcgtttccatggcagcatggacgttgcaggccctcccctttagtagagccggagaatgacggtatccttgaaccgaagggaccttgagagggcgtgaaataccttcccctg

SEQ ID NO: 229726 - DNA, 122 bp, Homo sapiens
acctcactcagtgaagaaaatcgcagatgcaaactatatgaaataccactttttacctatcggttgccccaaatccaaaagttgaaccacatattctatgggaggagctgtgaagaaataag

SEQ ID NO: 229727 - DNA, 122 bp, Homo sapiens
tgctcacctcccacatggggtcacggcagggcagaggcgttcctcacatcccagacggggcggcagggcagagatgctccccacatctcagacaatgggcggctgggcagagacgctcctca

SEQ ID NO: 229728 - DNA, 122 bp, Homo sapiens
ctcggcgcagactttctcgccggcggacgtgggctctggtgcagtcacactgtggcagctcggaggcgcccgccctacgctgcttctccaggtcctgagagtcgtggggtcctgaagactgg

SEQ ID NO: 229729 - DNA, 122 bp, Homo sapiens
tatttttatgctgtgctttcaaaaaggtcaaaaaagcttacctctgtcagtgtactgggacgctcaggaagccccttctccgcctcggcctcagcgtgcagacatatgccctgggagcccac

SEQ ID NO: 229730 - DNA, 122 bp, Homo sapiens
ggacagatgagaaaactgaggtccgcatgacggagcgacttgcccagggtcaggcacctgcgtaggcacctggacacatatgcgtgtgcacgcacgcaaggccgcgcacgctgggctctggc

SEQ ID NO: 229731 - DNA, 122 bp, Homo sapiens
agaaagagaatagaagtcttagagaaaagggactctttggactgagtgcaaacaccctatcgggggtttaaattgatacccaagaatacatgaaaaatttaacactgtatcactagtgctta

SEQ ID NO: 229732 - DNA, 122 bp, Homo sapiens
agatgacagcccctaagcatctgaattgaaagcacaccatgctacagaggtcctgccgcccgcctgcctcttactctgaccccctgaaatctagagagctctctgagttccacagcatgtct

SEQ ID NO: 229733 - DNA, 122 bp, Homo sapiens
aaggtgagttacaattgtgatcctcaaataaaatagctcctagaacttcacatttttcagcgtcttattgtcattgataatcttcagtggtttcagatgttcaggcctctccctcctatgga

SEQ ID NO: 229734 - DNA, 122 bp, Homo sapiens
tcggggtgacaggtctcagtgagaactgcgctagctgcagtgccgcaccgcccttataggcggggggggggcggggcccgcgttccccgctcgcccactagaggctgggcggcccgcaggcc

SEQ ID NO: 229735 - DNA, 122 bp, Homo sapiens
gtttttcttttccctatgcttgtcagtgtcacagacgtgaagtcatcctccccaagccaccgtcctcaccacagaaccatctttctgttggagtctcagcttccagtctcggctccactggt

SEQ ID NO: 229736 - DNA, 122 bp, Homo sapiens
tcttgtcgcgggccgggttgccagccagctccaggatctcggcggtcaggtgctccagcacggccgccaggtacacctgcgctctggccccgacacgctcggcatagatgcctttgcggagc

SEQ ID NO: 229737 - DNA, 122 bp, Homo sapiens
gcacatggcctgggtccccaggctgtgattttcagtgcacacttggagagggtgcctcggcgggtacctaccacatccatgggcaggctatgtgactaccaggtttgcaacagtgcatagct

SEQ ID NO: 229738 - DNA, 122 bp, Homo sapiens
gacaaacctgcccataagccaaccaagccactataagctctctccaaagtagtggaggcccgcaagccaaagagcatgtgatacaccccaaggttagtgaagcagccatgcacccttactca

SEQ ID NO: 229739 - DNA, 122 bp, Homo sapiens
gctgtgtttgggcattgttaccttggaactttcatcttaattacagaagctcttagcaaccgttgcttagtaacaaacacatttgaaatagatttgttgactgattatgagatgctctgaaa

SEQ ID NO: 229740 - DNA, 122 bp, Homo sapiens
ggggcaggggacgggggcggggagcagggtgagggctccagcatggcaggctgcaggttccgagccctgcccccttgccccgcggggaggtggctgaggcccagcgaaaattcgagcgcggc

SEQ ID NO: 229741 - DNA, 122 bp, Homo sapiens
cccggggctggccgtggtatgtgaccctgggctggccgtggtatgtgaccctgggatggtcgtggtgggtgaccctgggctggtgaatgatatgtggcctctgcttccagtttgtcaggctg

SEQ ID NO: 229742 - DNA, 122 bp, Homo sapiens
ccttgtgcaaaaccgacagaaatccaaacccacctggagcagatgctcctcttctacaaacgccgaggctgcaatgagagcgcatgcgcctttcccaggactcattcacgtgactggaagtg

SEQ ID NO: 229743 - DNA, 122 bp, Homo sapiens
gctgcggcgggcagcaaacgcgcactcgaaagtgcgaaggaggccgggctcagaggctggcgcggtcctaagtacccggccggctccttctctctaccacacccccggcctctcactggctg

SEQ ID NO: 229744 - DNA, 122 bp, Homo sapiens
cctgggcacgctctgagctctggtccgcgctgggcactgtgcaccgagaatctgcggtaacgtgtgaaaaggaacacaaacttttgtattacaggatggcagcagtgtagaaaccttttcca

SEQ ID NO: 229745 - DNA, 122 bp, Homo sapiens
gagagtggctgctttcatagctccgcttgcgaaactcctgcccggcctttgacaccgccacggctttcagtaatctggaaaatccctagtttccaaaaatagtcttagggcgaggacttgac

SEQ ID NO: 229746 - DNA, 122 bp, Homo sapiens
cagaggcttcctgaagcccactgactccgcgggagggggttgcagagggacgggggcgggcgacagggggaggagtgtgcaaattgacatttttggctgcctgtggcagaggagcagccgtc

SEQ ID NO: 229747 - DNA, 122 bp, Homo sapiens
ctgaccacttctctgcctgcccagcatcatgaagggccttgcagctgccctccttgtcctcgtctgcaccatggccctctgctcctgtgcacaaggtgagtctgtcatccatgtgctttgat

SEQ ID NO: 229748 - DNA, 122 bp, Homo sapiens
aaaaaaaacaacctatagagctagagctgaagtcgagattcacgaatccacctacgcggtcggcgtacatctctcgcaagccccagaggcctggacatcggtaaacctacgcaaagtcgctt

SEQ ID NO: 229749 - DNA, 122 bp, Homo sapiens
ggcgcaggggcggggcggagaggtgcgcggcttgggaagcccaggggaccctgctgtttgcgggtggtcggtagtgagtccggagccggacaggacctcccagaggcatttcctaagtttga

SEQ ID NO: 229750 - DNA, 122 bp, Homo sapiens
cttctcatgccggcattccatgaatcagagtgcgattatgagagctgagactcacctcgccgtggtctcgagagctggacggcaggcaggcccctcccagtgccctcctctgttcccagctc

SEQ ID NO: 229751 - DNA, 122 bp, Homo sapiens
ccctggaacaagtctgccggcagccaataaaaggtcagtgccctaaagaggtactgggagcggcagcagatacaagatcagtgccctaaagaggtactgggatatcaggtcagtgccctaga

SEQ ID NO: 229752 - DNA, 122 bp, Homo sapiens
ctgacagtacgaccctcgtttctaggggacttcgcccgtcttggtctccttccaggctcgcgtttgtaaccagactccaaattttactaaatggggttgaattgggtttgagagcacatctt

SEQ ID NO: 229753 - DNA, 122 bp, Homo sapiens
aaatacattctcattatttatgagaatattttaaagtatataaatatggattcctggaatcgaagccttctagataaatactgtgtagaatatggtgtgggtgtcattggattccacaaaac

SEQ ID NO: 229754 - DNA, 122 bp, Homo sapiens
ttcagaaacatttgtccatgtagttttgcctttgaatggttgggtcaatgaagagaaaaacgagtgaaaacagggaatcatgacactttgtttttttacgtgtaaatattcgcaaaacgccc

SEQ ID NO: 229755 - DNA, 122 bp, Homo sapiens
aggtagagggaaatggttaggggttaagactggaggctgccacctgccaggaaaacccaccggacccttcctgtgcagaacacttcctcaccactttcagtcctggccagttgcaaaatggg

SEQ ID NO: 229756 - DNA, 122 bp, Homo sapiens
ctaaaaactgttgaccccgacgtgatttgaacacgcaaccttctgatctggagtcagacgcgctaccgttgcgccacgaggtctccgggacacctacgttttatttacctgtcaatctgatt

SEQ ID NO: 229757 - DNA, 122 bp, Homo sapiens
gagcccccaacccggtcatccttctgctggtcgcgggcaccgggaccccgaaggagctgccgcctgagactaagctctgcccggcagcaggtgctgactgcactgacagtgagagacccatg

SEQ ID NO: 229758 - DNA, 122 bp, Homo sapiens
tatcttgccttttcccttctcccatgcatgtctaggacacagcgcctcaccaggctttggcgctggagagcttctgtacctgctgagggacactcctaccaggaagagtggccccacagtca

SEQ ID NO: 229759 - DNA, 122 bp, Homo sapiens
ttggttgtggctcttcctgtcgttctcctcctcaccccctgcctgtcgcgcctgtccctccgcccgcccgtcttagcatggcaaggcactgacctgatgcataatcacgtcttggctgatga

SEQ ID NO: 229760 - DNA, 122 bp, Homo sapiens
cggccaatcagctgggaaaatcgccgaggtttgagctaacctcggagcgtccacaccaaccgggaggggacatgtgggccgggccaagttaatagtgccatggaaggaaatttaccgcggtt

SEQ ID NO: 229761 - DNA, 122 bp, Homo sapiens
tgttgccaaggagctaaactgtaagaatcctctgtatttctaccttccaaaggatttgtccgcagctgctctgtaagccacatctgagtccttacggaaggctgaatgggaactccacctac

SEQ ID NO: 229762 - DNA, 122 bp, Homo sapiens
gggacgccggcctcgccactgacgtagcaccagggcccgcgcgggtcctcgtccgggtttcggcagtaactgtgattgccggcccctaagagaggagagaaggaaatgtgtgccggggctgg

SEQ ID NO: 229763 - DNA, 122 bp, Homo sapiens
ttcatcccgatttcctaggcctggtattttgggaattaggaaaagagctggctctatgtccgtcccgatttcctaggcctgttttgggaattagaaacagagctggctctatgtccgtcccg

SEQ ID NO: 229764 - DNA, 122 bp, Homo sapiens
attacaccaacagagccttatgtcctctgtcattcaaatggttcaaacaatggagaaccccggcaggaaataagaggaatagagaaaaattgagttacagttatttattttacttgtttcat

SEQ ID NO: 229765 - DNA, 122 bp, Homo sapiens
ctctaggcatgtgatgcattgcaggatcaatggcatattgaaaacatcataaagataacgcgtgtgcatcttctccagacaccccttcttgctaatccgcagaacacaagacggagtgtgtt

SEQ ID NO: 229766 - DNA, 122 bp, Homo sapiens
ttcgtgcaggtgctgtgctgccgcctgtcgctgcagcacgccaaccacgagaagcgcctgcgcgtacatgcgcactccaccaccgacagcgcccgctttgtgcagcgcccgttgctcttcgc

SEQ ID NO: 229767 - DNA, 122 bp, Homo sapiens
tgaaaaaacagagcaattttcgtaatcattttacaaaagaggaaattagcttagagaaaacgggtagtagcagatgaggagagcctggtttctctaattcccaggttagtattaatattttt

SEQ ID NO: 229768 - DNA, 122 bp, Homo sapiens
ctgagtgctttttttcttccaatgcattgcgcacttataatttagaacaagtgaccaaaacgcttaagagcccatcacgcaaattgttatctgctggaaatctacgccctaggctgtggaca

SEQ ID NO: 229769 - DNA, 122 bp, Homo sapiens
aaatcttcactccaatctcagagtatgtcagggtcttaaagagttgagaccaggaaatgacgttagggacagctagccagacctgtgaatttcagagatgaagacagagtagctattctaga

SEQ ID NO: 229770 - DNA, 122 bp, Homo sapiens
ggaccaggactgggcacagccagcagagccggggactgcagtgctttggcaaggtgcttccgcaggctggtagggaagcaggcagccactggccaagactctgttctgaatctacctcctct

SEQ ID NO: 229771 - DNA, 122 bp, Homo sapiens
tggctctgatcagcaaatgaggaaacgtgaaaatgtcctcgcacatagtagatgctcattcgataacagcatctagcacttccaggggagctttctaggtggcaggcagtgttctaaacatg

SEQ ID NO: 229772 - DNA, 122 bp, Homo sapiens
ttggtggtacatcaggccagtctctggaagcccggaattgaggatgcaagcatgttcatgcgcgtggtgtaggatcgacggggaaggaaatcgctggagaccttccgctccctcctccacct

SEQ ID NO: 229773 - DNA, 122 bp, Homo sapiens
gcagctgcccctgcaaatgtcagcgccagcccagtcaaaagagcttgaaacctaccaagccggaggactgtgctgtgcctctctcgcccacattttccccaagcactctcaggaacctggca

SEQ ID NO: 229774 - DNA, 122 bp, Homo sapiens
tggtggccccctgagggctgtcctctggtcttggcctactccaaatgcccacccatccttcggcaggtcaggatgttccctggctttttctgggcctgtctctgcaggaatacggtgactct

SEQ ID NO: 229775 - DNA, 122 bp, Homo sapiens
cctggtctgctgcactgagctgcggtgagcctatctgggtcccactggatgcatgggttgcggggcagtggagggtgatgccctgggttgggtcgatgatgagaaccttatattgtcctgaa

SEQ ID NO: 229776 - DNA, 122 bp, Homo sapiens
ctgaaggtggcccggagggacctgtggttttcagaggcccggccattcccgagggtgtgacggtcagacctccaatccatcccaaacccaagcaaacacagctggcccaggcctgcagtgtg

SEQ ID NO: 229777 - DNA, 122 bp, Homo sapiens
actccagatgccgccgccaccggtctagccgcctcctgcctcaacccgggtttctacccccgccctcccggtcctggctcaaactctcgtcacctgatcctcggcgaaagctcctatcgcga

SEQ ID NO: 229778 - DNA, 122 bp, Homo sapiens
gggcagataacgagttcaggagttcaagaccagcctggccaacatagtgaaaccccatctcggctaaaaataccaaaaattagcctggcttggtggtgggagcctgtaatcccagttacttg

SEQ ID NO: 229779 - DNA, 122 bp, Homo sapiens
cccccgcccgccccgtgccgtggacatctgggcccactcatcgcccctccaggcccccggcgccccaccccctagagtgctctgtgtatgcggatgatttagaattgtcatttctctttact

SEQ ID NO: 229780 - DNA, 122 bp, Homo sapiens
gcccggagggcggggtggaggggcggggcctccgagttaataaaggaagatgggcggagccggcccccagccattggctagctgggggagtgatgtcacccatatgacaccctgataactag

SEQ ID NO: 229781 - DNA, 122 bp, Homo sapiens
aacagccacacaattacagtaacaggtggtcagtttcaaaacaaatttcaaggtctgactcgcctggcacctgctctagaaccacagacagcagtttgacactgtctgggtccaagttaggt

SEQ ID NO: 229782 - DNA, 122 bp, Homo sapiens
ggcaggcgggcaggcgggcaagacagacggcagacgggcggggcaggcgggcaagacacacggcagatgggcggggcaggcgggcaggctgcgggccacagggacacacacagaggccacca

SEQ ID NO: 229783 - DNA, 122 bp, Homo sapiens
tagagggtgtcgaaagcagaggttcgccgattagccgggtgtggggaggtgcgctgggggcggtgcttcccaagtcctgctatggcggaggccttcggtcgcctaagccttctcttgcgggc

SEQ ID NO: 229784 - DNA, 122 bp, Homo sapiens
accgaagggagaggctatgattggaggatcaggttagtccaccactctgctcctcctgcgcggtgagggggtggtacacgcgccctacctcggagtgtgtggcgccatgatgcagggaagat

SEQ ID NO: 229785 - DNA, 122 bp, Homo sapiens
aaagggcttgtggcaagtgtgtgtctctggctccaattcagccacagtgacagctgaaaccggaaaatgaatggcattaagtccagtcagaaggctttaaaggtttaaattctcctcatttc

SEQ ID NO: 229786 - DNA, 122 bp, Homo sapiens
ctgggaaatgggcaggtgcccgcagcaagtccgtgctgccgatcggccgtgagaagtaaccgtccctcacaacgatggggccgggatgcagctgtgtcaccacaggctccccatctcggggc

SEQ ID NO: 229787 - DNA, 122 bp, Homo sapiens
tggaggacaggagagaagcatttcttctcctactgtattccttcagcatcttcacttctgcggggacctagtttgcccccacctgatgcaacccagaaaatggactgactgcgagtgccttg

SEQ ID NO: 229788 - DNA, 122 bp, Homo sapiens
tccatcgctctccacccctccacacgcctatttcttgttctctccttttctagggggcagcgctggagtccccgcccagaaccctgcgggagcccggggcgggatgtccgggggcggacccc

SEQ ID NO: 229789 - DNA, 122 bp, Homo sapiens
tctcttactttttggcttttattacctcttctttcaagatttgtcaagcttccttttgtccgcttgccacttgtttgcaaagccatacacacaaatacataaaattaaatgttttatataaa

SEQ ID NO: 229790 - DNA, 122 bp, Homo sapiens
ccaaaacttatgctaaatatactttccagtatgaacgcacaggagagtcccatcagcaggcggcattggagtctaggagctcagctgtgtgtccatcaacacacaaattcgtaaaaaacaca

SEQ ID NO: 229791 - DNA, 122 bp, Homo sapiens
tgcagtgtttttatgaattaataacaggcactttggagggctagcgggggaggcaggaaacgcaatctatggaagcttaatgagcgccgtggggagcagctacctccgcctccaaccctgcg

SEQ ID NO: 229792 - DNA, 122 bp, Homo sapiens
ccagggactgcacaggatggagaaggatcatggggaggcttggaggtggggtgggaactacggggatgatactcccagctgggccggctctaccccgtaggcctccacatagccaggattcc

SEQ ID NO: 229793 - DNA, 122 bp, Homo sapiens
tggaaatgcactccctatagacaccacgtggggtttcagagctcgttttctccctgaacacgtccctaattacacccgcgttccgccttcatctccacggcattgcgatgggcccacagatg

SEQ ID NO: 229794 - DNA, 122 bp, Homo sapiens
cgcgcgggacgggggctcgccttcgctgtgggccacggccagggtgtccgtggaggtggccgacgtgaatgacaacgcgcctgcgttcgcgcagcccgagtacacagtattcgtgaaggaga

SEQ ID NO: 229795 - DNA, 122 bp, Homo sapiens
ctgtgactcaggcttctactaccaggctcatccgaggacggaggctgtcgttatacaacgcgcaagtgtggtctctgtcacagatgtggctgtcgcagagagtgctgcctcctctcccgttt

SEQ ID NO: 229796 - DNA, 122 bp, Homo sapiens
agctagaatcctggactcatgaaaatgtctttaaatgttcttcgtactgtttctaccacacggtttgttgttctatattcagtacaggaatcattattctctcatttacatttagtttattt

SEQ ID NO: 229797 - DNA, 122 bp, Homo sapiens
tgacggcgtggagcaactgaaactttgtgccttgctgctgggaatgtaaaatggcacagccgtgaaggaaaacagcgtgtgggttcctcaaaaagttgaaactaggacttccatccaatcca

SEQ ID NO: 229798 - DNA, 122 bp, Homo sapiens
tcgctcctccccagggcccagtgcggactcgcctccgtgaaggtgagcggtgggtgggggcgtcccccgggtggcgggcctgtgtccgtcgcgtgcgactctacacgacccggccctcgccg

SEQ ID NO: 229799 - DNA, 122 bp, Homo sapiens
cggagtgaggcgtgccattggttaagcagagaggcagggccggggccggggcctgagcggcggggccaccgaagggagtagggtctctggacgccggttagggacggcgggcgcgggacggc

SEQ ID NO: 229800 - DNA, 122 bp, Homo sapiens
ggcctcactataggagttcagtaaaggcccagcttgctggctcactgattaattgaagggcgggggtgtggggcttgctgtgcacaactaaagttcacttggatgcccccctcactgcccaa

SEQ ID NO: 229801 - DNA, 122 bp, Homo sapiens
cactgaacagatctcacagctgttacgagtttctgagcttccgtgggtcccgtgcatttacgactgtgacgacttagactcaggacgtgcacgtgatgccgtactgggctttttccattcag

SEQ ID NO: 229802 - DNA, 122 bp, Homo sapiens
tccctaggggccaggttcttgcaaagggggaaggggcctgtagagcttcagggacgctgccgcaccgccccagtttaccccgggggtgagttgagttccccaccctcaggcgggagattatc

SEQ ID NO: 229803 - DNA, 122 bp, Homo sapiens
gccttccagttccagcctctcgttgatagccttgtaatgacaacacgcgccaccagggggcgaccaacgtctcgcaccaggaagacggggctgtagggaggggcgtggcaaaatgagaggca

SEQ ID NO: 229804 - DNA, 122 bp, Homo sapiens
actgactagtaccaaccagacctaataaagctcagcattctttttcatctcttggctccccgcccttttctcacagtggcattgccaaaccttttctactctttcttaagaatttgtgctgg

SEQ ID NO: 229805 - DNA, 122 bp, Homo sapiens
cgggatgtaatctcctggtgcgccattttttaagcctgtcagaaaagcgcagtattcgggcgggagtgacccgattttccaggtgccgtctgtcacccctttctttgactaggaaagggaac

SEQ ID NO: 229806 - DNA, 122 bp, Homo sapiens
gttgttggaccagtgattttagcggcaatggagtaacctggaaaacgcaaattcatgtgtcgtcacctcccaccccaagggcagggccacagcctcgtgcattgggagtagcagccaaatcc

SEQ ID NO: 229807 - DNA, 122 bp, Homo sapiens
acgcctcctgcaacaccgccctctccctaccggagcgaggaggcaggaaaagcctagagacgcctggtcccatccgcctacccagtccccagccggcctgaagggaggaagaggaaggaacc

SEQ ID NO: 229808 - DNA, 122 bp, Homo sapiens
tggtgctggggaggaggtggggggtgccagctggaggtgggcggggctcctgcctctccccgcccccagggccaccgcccactgtgccgcgcatcgattggtcgcgggcccattagctgggg

SEQ ID NO: 229809 - DNA, 122 bp, Homo sapiens
ttccgcccttaccgcggccagacatcttgaaaccacagctgttaaatctgtaacgcaatacgtctggcagagccacgcagcacttttataatagcatgacggacctgtttgaaaacctcatg

SEQ ID NO: 229810 - DNA, 122 bp, Homo sapiens
gcatcacacgtttaaccaggttccagaggtcactcagatctcaccagtttgtgcataattcgtttctctttttctcttcctcttccttctatttctatttccttttctccttttccttcttt

SEQ ID NO: 229811 - DNA, 122 bp, Homo sapiens
cggtccctggcaggaaatgtcaatagagtccagcccattaaccacagacaagcaatttaacgtctctgtgtttctgtttcctcacctataaagtggggatactaatatctacttcactgggt

SEQ ID NO: 229812 - DNA, 122 bp, Homo sapiens
agcatccttgtttgctactcggcgagacagttacaacaaaccgggaagcgatcaggtacgcgagctggtcacgactcacagtcccagagctcgccgactccgaacgcccccaggtggcccaa

SEQ ID NO: 229813 - DNA, 122 bp, Homo sapiens
cgtgttaacgtgaacttcgcagaaaaaggtcagtttcaaaacctgtgaacttcccagctgcgcacttttttcatcttagttttttaaataagtatacctcttctttctgctttgccttctta

SEQ ID NO: 229814 - DNA, 122 bp, Homo sapiens
ggcacatgtgagctcttttacgagctacgtccttcaagttagacaagaagaaaccaaggccgagagagagaagaaacttgaccaggttcccacagcttgaatgtggtggcgctgcctggctg

SEQ ID NO: 229815 - DNA, 122 bp, Homo sapiens
gttaaccccgccagggaacggccaatatggaggaaagtggagtcccgagaagcttgggatcgatatgtctcccaaggcagtcactgtctcctggggaaacgggagaaaattcatcccaaacc

SEQ ID NO: 229816 - DNA, 122 bp, Homo sapiens
ggaggtgacatacgcggtcctgcgccctcgcctcagacctctcgggcgagcgcggcgcagcgcaggtaatggctcctggccttcccggccccgcctcgcccctgaccctcacccaaaggcca

SEQ ID NO: 229817 - DNA, 122 bp, Homo sapiens
ctccgatctgctgttcatcatcagcgaactggacaaatcttataatcgctccatccgcctcgtgcagcacatgctgaagatccggcagaagagttccgacccctatgtgttctggaatgagc

SEQ ID NO: 229818 - DNA, 122 bp, Homo sapiens
ccccgggattattctgaggttcagtagagtttaagggaagtggaggaaccgccaaggggtcggctaaggttttggaaacatccttggtgagaaagacggcccgggttgttcttcaggccggg

SEQ ID NO: 229819 - DNA, 122 bp, Homo sapiens
attacaggcatgatccacagcgcccagccaataacacagtcttgatttttatggagcttacgctctgatggaggaagacagctgaaaaacatgcaaaaaaaaaaaaaaaaaaaaaaaacacg

SEQ ID NO: 229820 - DNA, 122 bp, Homo sapiens
gaagaaaaccttaagagccggccgaagtctgccctggctggatggctgtgggtgtgcgcacgctgctcggggaattttggaagccgcggatggtctcccggcaaagttggaggcacatcgtg

SEQ ID NO: 229821 - DNA, 122 bp, Homo sapiens
aacgttaggcttggttttaaccttccagttgtctgaaactaattgggcattattaacctacgtttcaacaattattcaaagctcgagagatttattgcacacttcactttaaacgcccctga

SEQ ID NO: 229822 - DNA, 122 bp, Homo sapiens
aggcagcagttctccaagtgtgctttgagaaggcctccgttgcctggaatgcatggcccccggcgcacctgcacctgctgtcttagacacctgcggtggccgcacatcttcgtgatgctggc

SEQ ID NO: 229823 - DNA, 122 bp, Homo sapiens
tttacatcttccccgtccaaggcttggcgtatagtagatgctcaacaaatatttgttgaacgaatggctaaagatgctgtcgtcttagactgttttgccaacttgaaattcttgaaaatcat

SEQ ID NO: 229824 - DNA, 122 bp, Homo sapiens
tggtgtttcagtggagccggggagctcttgcttcagtgggggcggcgacagcaaagaagccgccttgggctctccttcggttgtctctgtaggtcctggacgggaagggtcgggcctcgtcg

SEQ ID NO: 229825 - DNA, 122 bp, Homo sapiens
ctactcccggcctccggctccaggcccttcccggatccccgcccccggattcccaggggacggggaagggagcgcccgccccgatatctccgccccccagcccctaacccctcagggttgag

SEQ ID NO: 229826 - DNA, 122 bp, Homo sapiens
gcaaacaaatgtgccaggcactctgctaggcactaggagtttaaaaatgagtcactgtagcgaacagcagcatcatgtggcagaaatgccaaggtcttgggttggcaatgggggttattaca

SEQ ID NO: 229827 - DNA, 122 bp, Homo sapiens
ccctccaggggaactgccgagtcccgccggggacagcggagagcctgcggattgtgaagccgaggaaggctcggcttggttttcctacccgctcctcagttctggttgatcggaacttaagt

SEQ ID NO: 229828 - DNA, 122 bp, Homo sapiens
gggctgcggggcgcgggggcgggtcggggcggccttttattgacgcggttgagaaagcctcggctgggagctgggcggcggcgagcaccggaacctcagaccgcgaccttgccgctacctct

SEQ ID NO: 229829 - DNA, 122 bp, Homo sapiens
gatgaacacttcgaaagataccacaggaaaacttacctctgcctctttaatagggtaaatcgactcttaaaaatgtctgcaatgctttccacaaattttgactatattggggattactgtaa

SEQ ID NO: 229830 - DNA, 122 bp, Homo sapiens
caaacccaggggtaggggtggtctcgggtaaccatccccagggcggcggcgagggaactgcgcgggttcagagtcctcagcagccaccactgacgccccgacgcccccggctccccgcgcac

SEQ ID NO: 229831 - DNA, 122 bp, Homo sapiens
aggccgtgtgcacacggggcaagcccactctgttgtgctccagcgcggtggggagctggtcgtactcgcagcagaggagacagagggtgtgctctggggaagctccacccaaaacagacctc

SEQ ID NO: 229832 - DNA, 122 bp, Homo sapiens
tttgggggctaaaggccggaaaataaccgaggtggtagttggccgctgcccttgtaggcccggggtaaagggcctggctgaccggttaaagatgcttggagctggggtcggggctccaccac

SEQ ID NO: 229833 - DNA, 122 bp, Homo sapiens
tcaagggcctagagcgacagatgtttcccagcagggggttctgaggctgtgcgcccagatcgcgagagaggcaagtggggtgacgaggtcgtgcactgagggtggacgtagaggccaggagt

SEQ ID NO: 229834 - DNA, 122 bp, Homo sapiens
tgtggccttgaagtgccgggagtgagcggggccaggcggggttgtgaatgggacgcgcaccgtggcaggctccctctggcggccgtgtggagaacaggctgcagggcgccgcggaagaggcc

SEQ ID NO: 229835 - DNA, 122 bp, Homo sapiens
ttcaagaatgaagctgcggaccctcgtggtgagtgttatagttcttaaagatggtgtgtccggattttgtttgttcagatgttcagatgcgtccacagttttttccttccggtgggttcatg

SEQ ID NO: 229836 - DNA, 122 bp, Homo sapiens
aagagaaaaggatggtagacccgtggggtgggctctgaggagtggaaacaacttcacattcgagacacagacggtatttgccagaacacaagctttggagcaagattttactctgtcctgtt

SEQ ID NO: 229837 - DNA, 122 bp, Homo sapiens
tccttctgtcctaccagcttgggcgaggcaggctcgggattcagggggccgcagcggaggcggcgccggccagggactctgcagggaccggggtgccccggagggagtggtgctggtggagg

SEQ ID NO: 229838 - DNA, 122 bp, Homo sapiens
ggcgggcccgggggggtggggcccagtctcaggggcgtgtccaggtcggggcagggaagccgcatcacgacgcgcggctgcttgtgtggggcggggtacagggcgtgtccacgcggccgagc

SEQ ID NO: 229839 - DNA, 122 bp, Homo sapiens
tgagtccctttatattcctaaggatccatgccccctttcccgctaaagttccacttccagcgcagccttcttttcctccccctgtgtcatgacctgaaagtccggaacagagagaaggtggg

SEQ ID NO: 229840 - DNA, 122 bp, Homo sapiens
gcgggcggcgcgtgggtcaggtgccctggccgcgagcgcaggggcgcggggttaggccggcgtggggaacaaaggcacgagtgagaggcgggagggtcccgccgccaatctcagcagacagc

SEQ ID NO: 229841 - DNA, 122 bp, Homo sapiens
ctgcctgccctagaccagccctcgattctcgtcccacagtgatttgcagggtgtaagcggcgaagaccctgcaatccagcgttgcttcgaacattgcaatgaaaacggttgagttgctgatg

SEQ ID NO: 229842 - DNA, 122 bp, Homo sapiens
tttgcatattttaatccaaatatggcaaagggcagggctaaagaagggagtgtccataaacggggctcagaacttgtaacagaaaattaaaatatactccactcaagggaattctgtacttt

SEQ ID NO: 229843 - DNA, 122 bp, Homo sapiens
accccctgggagaggatctttggggacgaatagaaactatggtgctcgggcccctcaccccgcagcgcactcacaggcattggtgaggatgggccccagccccaacgtgggagaatccatgg

SEQ ID NO: 229844 - DNA, 122 bp, Homo sapiens
gaaaaaagtcaaatacacagacaaagaataaaatggcagctgctacgtgtggggagtggacgggaagagggaaatcaaagggtacaaagttgcagatatataggataaataatttagagatc

SEQ ID NO: 229845 - DNA, 122 bp, Homo sapiens
gggctgggacgggcagggcagggcaggcgccggcggggaggcgcggcggccggagccccgcggggaagtctttccaggtcccgactcggctctctctgcaaaacggggcgaacctcggcgcg

SEQ ID NO: 229846 - DNA, 122 bp, Homo sapiens
gaggggcaaccaacaagctgtttcagaaggcatggggcagctcagcaaccataagttatgcgtgggctttgctctcgggagagaggtttcctgcagccgaaggactcacagctaatctgggt

SEQ ID NO: 229847 - DNA, 122 bp, Homo sapiens
cggcggggccagcgcagttgaggtctggggagcccggctggcatctgctccgggctgcggcgcgggccccgcggagcccaggaggcggcgggtgcttccggccaagggccctggcggccgcc

SEQ ID NO: 229848 - DNA, 122 bp, Homo sapiens
ctgtaccacggccctcttgcggacagccccggggacgtcgttgggacatcgctgggaccccgggctctgcagccacaaccatgtttggccggaagcgcagtgtctcctttgggggcttcgga

SEQ ID NO: 229849 - DNA, 122 bp, Homo sapiens
accgtgcaatactttggtccggggttggagcggccgagggtcggtacagccttttaggagcgcagccccggggtcggcggcaccgcgtcagaggagagcggaatggccagcccgctgcggaa

SEQ ID NO: 229850 - DNA, 122 bp, Homo sapiens
gtctgacccgcctccttcccaggccttttgttcctgtcccggaaagccggcgtcctgccgcgcgatgcccctgctcggacttcttcccaggagggcctgggcttcgctgctcagccagctcc

SEQ ID NO: 229851 - DNA, 122 bp, Homo sapiens
gattgggcttgagatggtaaagtggccccagaaccagatcttctatctaagggaggagagcggggcaagggaatgagtgatccctaccctgactcagagcacatttggacctggccctcggc

SEQ ID NO: 229852 - DNA, 122 bp, Homo sapiens
cctgtgacttcagcccaagatacttcatgggctgagccggtcagtgtagattcctggctgcggccaggtcctatgctccctgctccctgttgctctgggagccctggggtgggagggagggc

SEQ ID NO: 229853 - DNA, 122 bp, Homo sapiens
ggagcgcagccagttattcatggcacaccgggacagactctcgatccaggttctgcaaaacgagcaccaccaagcccttaatgcagggtccccagccccggggccaggcaccaggaaggctg

SEQ ID NO: 229854 - DNA, 122 bp, Homo sapiens
tgcccaggctggtctcgaaactcctggtctcccaaattgttgggattacaggtgtgccaccgtgcccagctgagaaagaggtttaatcatagggccacctcatgaggagataggagagaact

SEQ ID NO: 229855 - DNA, 122 bp, Homo sapiens
ctttcaccctaaatcagacttaaaaagaaatgtaagagttagtccattgtttccattttacggattagaaaaccaagaccaccgagaatgagcctcagttgtttagtcacggagcacagagc

SEQ ID NO: 229856 - DNA, 122 bp, Homo sapiens
ggcggcctcggtgggaagctgctcggtgcctaagggcccctttccagggcatctggtggacgtgagcggcaccgggaccctttcccagagctaccagtacgaggtgtgtctgacgggaggtt

SEQ ID NO: 229857 - DNA, 122 bp, Homo sapiens
ccaggacgccctctcagggctgcggctttcctggaggaagccgcggtttgctgaggccgccgccgccaccttcaagcggcggaaccgcttcctgcgcccggggccggagccgagcgccgcgc

SEQ ID NO: 229858 - DNA, 122 bp, Homo sapiens
gcttcaagagcctatggagctgcaggtctcagataataataaaaccaacaagagaagccacgagccttaccaggcaccaggcccggtgttaggcagtcctgaattcctcacaaaaactcgaa

SEQ ID NO: 229859 - DNA, 122 bp, Homo sapiens
gccgctgcgcggagccggcggtttttctgtcacagcacttgtacggagtttctcggcggccgaacgtctctttttttctcagagacgacggtttcttggtgacagtaccgttggttgcgccg

SEQ ID NO: 229860 - DNA, 122 bp, Homo sapiens
acggcggtggtggatggatagtaagcgccgacacctgtggagagctcgccgtgtgtcaggcgcggtccagtggcccgaggtctagtgctccgtttaatccttgcaacagcccattttacaga

SEQ ID NO: 229861 - DNA, 122 bp, Homo sapiens
ccgtgcccaccgggtagaccggcacgtaagcagtgcaaggctgcagctgcagggggtatccgggcgctacgtagccccccagcggcagcgtgcccacagtccccgcgtgcgtgggcaccacg

SEQ ID NO: 229862 - DNA, 122 bp, Homo sapiens
tgtatattcattcactcattcattttcaacataagtattgaatgtctgctctgggccaggcgtgggctaggcatgagagaatcccagagaaattacagtctgggagctaggtgccaggtagc

SEQ ID NO: 229863 - DNA, 122 bp, Homo sapiens
agctatgtagagatttcctgagacttaagagctttttctaagactgcctctaactagctgcgtgttcctgggcagggaaccttattattcttacccaaatactgaaggatctgggccaggta

SEQ ID NO: 229864 - DNA, 122 bp, Homo sapiens
agtcccccggccagtggcccgggaaccaaacggcccttggaatacgaagcgggtccacggcgcgtccgaattgtcgggcatagaccggacatccccttggatggccgagaatgcggacgggc

SEQ ID NO: 229865 - DNA, 122 bp, Homo sapiens
tacataggtacacatgtgccatgctgatttgctgcaccaatcaacccatcacctgcatagcgtatttctcctaatgctatcactcccctagctccccactccccaacaggccccggtgtgtg

SEQ ID NO: 229866 - DNA, 122 bp, Homo sapiens
gtgctttcccatcaaaacagatgatgaaggacccttggaagctgacccatggcatccccccgccactgggttctagctctgtcgcccaatctggagtccagtggcgcaatcttggctcactg

SEQ ID NO: 229867 - DNA, 122 bp, Homo sapiens
aacaacccactttggagggttctctgagagatagatacaccccatatcctgggcccagctcgtgcacacagctggaggtccagagacccagtcccctctgctccgtcagccaagttccaaga

SEQ ID NO: 229868 - DNA, 122 bp, Homo sapiens
tctggggcggggcttggcgtggttctccgacgactgaactacaactcccagcaggctgtgcgggaaggggcgggctggctcgggtcctcctgcgagctgcggccggcgcctaacgtgcagac

SEQ ID NO: 229869 - DNA, 122 bp, Homo sapiens
ccccggcctctgcccccgggacagttttgttcgctcctttgctttatggaggtgaaaccgcgcgatgaggcccctttcgagtctggctgcttttgcttagccctgcgcttgtgagatccctc

SEQ ID NO: 229870 - DNA, 122 bp, Homo sapiens
aacccgcggcgtgttgctatgtgctgagccgaggggataggtgcgggggcgcgtccatcacggggtagcccccggcccggacccggagggatgcggagtggcggccgcggcggtggcggaga

SEQ ID NO: 229871 - DNA, 122 bp, Homo sapiens
agcaattttctccaacagtgctctgaagttccgatgtaaaagcctagaagactgataccacgtctgtgagcagatgctgaaagcagaaggcgggagagcgcagttcgcagcacgtgatgggc

SEQ ID NO: 229872 - DNA, 122 bp, Homo sapiens
ttttcggtttgttttgcacctagtcatagaattctggaggtgagatccctgggtgggtcacgtttgggatgatcttggatttgtccctgttgttcagtttgatggtttctgatgtagtaggg

SEQ ID NO: 229873 - DNA, 122 bp, Homo sapiens
ccgccgggcgagggtcccgcagcccgccgctcacccacagccgcaccgcggatccagctccggtccttgttcccggggcggctaccgacaacccctatttccgggtccagccgcttctggcg

SEQ ID NO: 229874 - DNA, 122 bp, Homo sapiens
gggttcccctgggaccgagcacgtggggattctcctgccctgcacccaggctgcttcctccgcccagaatctgcgcgtgggctggttccccactgtgcgtttactcagctgtgatgaccaca

SEQ ID NO: 229875 - DNA, 122 bp, Homo sapiens
ggtcatctacacggctgtcttcacgccctactcagccgccttcctgctcagcgatcaggacgaatcacggcgtggggcctgcagctatacctgcagtcccctcactgtggtggatctcatcg

SEQ ID NO: 229876 - DNA, 122 bp, Homo sapiens
ggaatcgtgcctgctctccggttcctttaagaggcgtcggctccacccctctcagagtcgcggtctgacgcgagatgacagcaacgagttcggtatgtctatgcaaataagcgccctcttgt

SEQ ID NO: 229877 - DNA, 122 bp, Homo sapiens
acaaaagcagcaaaaagtacacccaaggcatttaaaaaacaaattgcgtgcttgcatactcggcatcccctctccctcgcctctctctgcttctttggtgggctcacgaccacctgtcgcat

SEQ ID NO: 229878 - DNA, 122 bp, Homo sapiens
caagatagatgaggaaaaggcagacagtgaactgctaagatggaatgttcgtgccttatccgagaaatgtccaagtctgcataaccaggagagacagaggatgttctgagatgtctccctgc

SEQ ID NO: 229879 - DNA, 122 bp, Homo sapiens
atctttgggtcttttctcttagattggtcagatgcccccagagaagaagtcattctctaccgaagggaagaaacatacccatgggcaccagggaaggaaggatggagcctcatgctcagtac

SEQ ID NO: 229880 - DNA, 122 bp, Homo sapiens
gaagcagggtttgttactgtctattgcaaccgggagcctgtagtcatcacctcaaagttgcgagggctccatgcagtcccaatgctcttcaccagcgctccagcactgcccgttttcgtgaa

SEQ ID NO: 229881 - DNA, 122 bp, Homo sapiens
cctgtgtgcaaacacagaaagactctgatgcctcctcaaccacagtttagctttcccctgcgctcacaagaggtttgcagggtgcacttatttcggcatgaggttgattggatggcttttgt

SEQ ID NO: 229882 - DNA, 122 bp, Homo sapiens
ggcttgggggcccggagcacccccggtggccacctccggcctgccccggagctttgcgcgcgccgttcgggccttcgccagcaccaaacaagggtgaaaccagttttgtttgggtaacactg

SEQ ID NO: 229883 - DNA, 122 bp, Homo sapiens
aagaagcacctgtctatataacatccgatcatcttgtgtaaccacatttataatcaagttcgacctaaatatttaaatttcttgcatattagatctttttttcccctagactgcatatgaat

SEQ ID NO: 229884 - DNA, 122 bp, Homo sapiens
atatgcttgccctcatggctcattctgtttggttaataagatattgttgatacagtggaacgatgtcatgttttgtggaatgtccagaaggtccacgtccagtggtgtgctgcatgcagcta

SEQ ID NO: 229885 - DNA, 122 bp, Homo sapiens
atcgcaggcggcgacacacagcggccccgcctggcgtgaccgagactctccatcacggcccgcaccattggctcaattcgaactctgctcgttctgattggaaagtggcctcgcaggctatt

SEQ ID NO: 229886 - DNA, 122 bp, Homo sapiens
aaaataaaataaaataaaataaaaaatgggcaaaactgcattttaggtggtctgcgggggcgccatcaaagtgaggaggaggcaagaactgctgccactgctgcttatttttttatttttat

SEQ ID NO: 229887 - DNA, 122 bp, Homo sapiens
ttggcttctaagatgcagccctgaccggctgactcaaaggaagttggctggcaggttctgcgatccctggagatgggcagggctggggtcagactccggtgacagcagcagtggacacaatc

SEQ ID NO: 229888 - DNA, 122 bp, Homo sapiens
cactgtgtacgcaccagcgagatctttgtttcttgagacatttccttccactcaaggaagcgccatagagacaggctgtcagctgggtacagagaaacacacaggatcttctctgtctccta

SEQ ID NO: 229889 - DNA, 122 bp, Homo sapiens
aagtgggcatcagttgggccctggggtttggtctcggaggcctgcggggcagtggtcccccggctcttgctgccctgcggttcagttcctcctgctgcagcgcctgtgtgccccgtgggtcg

SEQ ID NO: 229890 - DNA, 122 bp, Homo sapiens
aatcaggccgacgaggcttaccctttgcagactgtgccaataagcagtcgaggcttgttgcgatctgcagaaatctacagaattctctgtttccgagaaggcttgttgctagcatatgacat

SEQ ID NO: 229891 - DNA, 122 bp, Homo sapiens
acccgggccccagtgaccgttaggccgtggccctcaccgagcttttcttcccagcagggtcgtggccagaacgccggccgggaccatctgcacaggcgctcgacagctccaagacgctgcgg

SEQ ID NO: 229892 - DNA, 122 bp, Homo sapiens
ggcgtcttggagttctggcttgaaacccagttgaggccctcagcctcgtgcctgccgccccggcccatccatgtttccacggtggcagaggtgattctggaaccacaggcagaacagcgttt

SEQ ID NO: 229893 - DNA, 122 bp, Homo sapiens
acctcgccccgggcgccgtcggcacctctcttctccacgccctgcgccgtggactaagcacgcaccagctgatatgtccataacaagtcacaagaccatcagtgcaaatcaggccacagccc

SEQ ID NO: 229894 - DNA, 122 bp, Homo sapiens
ctgcttccttctgaaaacctcattcccttatgtcagttgtcaacaagcccttgtctagtgcgggcagactgttttccatcaagcagtcccagccaggctaacaataaaatggttggcagtga

SEQ ID NO: 229895 - DNA, 122 bp, Homo sapiens
cttatctctcctctcttctcctatacagtgctgtttccgaactgtacattggcttacactcgggctgaggtttgggaaataggcgccattttgaatatgtgtggaggaagaaaagtgtgtct

SEQ ID NO: 229896 - DNA, 122 bp, Homo sapiens
ttgttacacccattttacacacaagtatgtatgtatgagggacctcttaggtccctcatacgccaattcagagggcagggtttcgggacaagaggcacacagcaaattgtacaagtcctgga

SEQ ID NO: 229897 - DNA, 122 bp, Homo sapiens
ggcgcaaaaggggccgcccccgtgccgggaacagactttgaagtgggtttttagcgcgcacgtgtgagagccgggccagggccggagcggggacccgctgggaggaaagaggaggctccggc

SEQ ID NO: 229898 - DNA, 122 bp, Homo sapiens
cgcccaaggcgggtcgcgaagaggagcagcctcctccgccagcagggctggggtgcggggcgcgcggggaacccggccgcggccccctagagcacggccagcagtgtgagttcagctccagc

SEQ ID NO: 229899 - DNA, 122 bp, Homo sapiens
cgtctcgctcggatttattaaacacaatgccttcaagatgccagggacgcggcgcctcgccgggcctccctctcagtctccctctggactggctccgacggcgcccgccagcaggcggccga

SEQ ID NO: 229900 - DNA, 122 bp, Homo sapiens
caccacagacataaatgtgcaatacaggcctgacactacggccacaagcaagtcaaagaacgtgccaaaagttcagaggaagaagcctcggcttcgcctttcgggagaccagtccagctttc

SEQ ID NO: 229901 - DNA, 122 bp, Homo sapiens
gaaagggccaggcgtattgagcggtcaggggagcgcgcacgcagaacgtcagccagtaagcgccgttcctccgggagatgtggaggaggggggcggcgtggaggaagagggggaagttggcg

SEQ ID NO: 229902 - DNA, 122 bp, Homo sapiens
caagaacctggacaccttctaccggtaacaatgggggtgtggcttgcttctttggtgctccgctgctcaaacctctagggggagcatgcagacgggcaggttgtggggcacgtgggctccga

SEQ ID NO: 229903 - DNA, 122 bp, Homo sapiens
gttcagtgacagaagcagaaggagggaagaagggaggagggtccctttcacagaggctcacgaggatgctttatgtgtgccatgcagtccatgttcaggatgtctgcttcttagctctctac

SEQ ID NO: 229904 - DNA, 122 bp, Homo sapiens
ctacatgtagccgctgcgcgccaacggatacaaccttgcccctagtttcagcatgaccaacgagaagcagaaactctccaaacaaggatgccaagggtgcgttttcagacaaacagtgagag

SEQ ID NO: 229905 - DNA, 122 bp, Homo sapiens
cactggatcctccctacaatcaggggagctgacagagaggtcctcaggagagctcacctgcgctgcagtgggaactgactgaagctcagagccagccagacatttaaactctctccctatcg

SEQ ID NO: 229906 - DNA, 122 bp, Homo sapiens
gtggctgctttgtccactagcatgccttaaatcagtatttgatgactaaatgaatgacagcgagagagcaagtaagcagaggagcaggaatcaacacagtccatacttccccacgttgccag

SEQ ID NO: 229907 - DNA, 122 bp, Homo sapiens
gaggcggacttcagagaagcgggtcttgaaccccagctgcaggcaggacgggattatctgcgcagggtagacccccagattcctgccagagcaaaggagcaactgctactccaggctttgcc

SEQ ID NO: 229908 - DNA, 122 bp, Homo sapiens
ggctctcctctcctcatctctaatactttagaggatgggttaaggtatgctgccttctatcgccaaacctagttggggagtctcagggaacccctgcaacagcttggaaatgtgctccctgc

SEQ ID NO: 229909 - DNA, 122 bp, Homo sapiens
cttgcccggctgcagagcagagatgtgcagccctctggtcagctggtccaggctggtccccgccggtccccttccagtccagccaccaagagtccacttgtcccgggcttccacctggctga

SEQ ID NO: 229910 - DNA, 122 bp, Homo sapiens
ctgccagttctagggtcggggtggggtcaggctaggtccctattcctagggctttagcaccgctcactcacaagaccccttttcccaggaggacgtatgggtttttcctgtcgctccagctt

SEQ ID NO: 229911 - DNA, 122 bp, Homo sapiens
cccggacattctgtccgctccgagccccatgcaccgcggacattctgtccgattctgaggcggcctcaagtcaggacccttctgggcccagacaccccaagccagatccactatacccgccg

SEQ ID NO: 229912 - DNA, 122 bp, Homo sapiens
ccggcgtgacgtcgagggggcctggactgggggtgctgggggatggctttgggggcgccccggccactcctcggcttcatctgcaattataacaatattaaaatagccatttgaaaagtgct

SEQ ID NO: 229913 - DNA, 122 bp, Homo sapiens
cgattaaacaaagggagtgggtggagacttgacatgcacaatcctaggcgcccaactgcacgttgtgagtgtgtgagtcgtgagtgggggtgggtgagatcccgggctgcaggcacatgtcg

SEQ ID NO: 229914 - DNA, 122 bp, Homo sapiens
actgctgctaaggtgggagtgattctgaagccttctgccaccctagctacctctgcaggtcgtgaggggtcttgggctatttcagtatcatgcactttactatcctggcatacaaaggctgg

SEQ ID NO: 229915 - DNA, 122 bp, Homo sapiens
aaacgagaggaaaagaccatcacagaaagctggaaatctccggagaggccagcgagaacccgcgctccccacggattccatcattccttccgaaggcgcctctgcggtgtctcagccgtgcc

SEQ ID NO: 229916 - DNA, 122 bp, Homo sapiens
gcaagggctgcaggcggcccaggctaaacgtgcagtgagtcccgctctcagaggtatctgcgccccgcctgcctccgccccgccccttgttctggtttgtccagtcccacagagtcccacag

SEQ ID NO: 229917 - DNA, 122 bp, Homo sapiens
caaaactaacgcaagggtggagagaaagaccacaccccacgggagcgcggagccaactcgcgggagaaaaatcctattggcattgaggaggtagggagccagcccctgggcgcggcctgcag

SEQ ID NO: 229918 - DNA, 122 bp, Homo sapiens
catccgaggcacacaatcaattagctgaagcaaagccccggactggccctcggagcggcccgcagcgggactctgcgggcaccggctagcgggcgaggtgaggagtgcgggcgcggggccgc

SEQ ID NO: 229919 - DNA, 122 bp, Homo sapiens
gcacgctcacacccaagccccgccttccaccctgaggaggcaggtgggcagcctgtaaggcgccattccccagcacccgcagcgggcactgtggctgcacgccgccctcggaaagcaaggct

SEQ ID NO: 229920 - DNA, 122 bp, Homo sapiens
acgccaactgggttcccttgttttaaaaaggggccagagagcactgcacgcttgacaggacgggggatgatccagctgtgttccacttgctgtgtcatcttttctaaggttctgctgacttt

SEQ ID NO: 229921 - DNA, 122 bp, Homo sapiens
ggcagggcaggggcgggggcggcggccagggcagagggtgcgcgtggacatcgacacccacgcacctcacaagggtggggtgcatgttgcaccactgtgtgctgggcccttgctgggagcgg

SEQ ID NO: 229922 - DNA, 122 bp, Homo sapiens
gaagcagcctgaggctgtcaccagatgcccagtcttgaatcttacagctcatagcagagccgtgagctaaataaaccttttttcttcataaattgcccagcctcaagtattcttttatagca

SEQ ID NO: 229923 - DNA, 122 bp, Homo sapiens
cctcgttcttctcgtcccgcccgccggtgatgtagagccggttgttgcagggcgcgataccgcagctggcccgctcgtggctgagctgggtcaccaggcaccagctgtcttccagcgggctg

SEQ ID NO: 229924 - DNA, 122 bp, Homo sapiens
gccggatcctcgtgttctctgccggagtgaaaaccagcttgttctgtccaagcctggaaccggcccaggcttccaggaggaggccatgcttgcctgcccttggccaaggggagccaaccgcc

SEQ ID NO: 229925 - DNA, 122 bp, Homo sapiens
gcccggttacgcctgctccgtacccgacggatgcgctcggtgtccggtagcagcagctcccgtaggagctgctctagcccggctgactccatggcagcaactgagccgccgctactgggccg

SEQ ID NO: 229926 - DNA, 122 bp, Homo sapiens
aaaaaaaaaaagaagaggcttggaagccacattgttttttgtcacttataactagagtttcgtccatcaaaagcccattctgcactgatttcagtgataggggtctgatgctggcttggaag

SEQ ID NO: 229927 - DNA, 122 bp, Homo sapiens
cgcgggctggggctggagccggggcggggaggggagggcgggccgggcaggacccgggtccgcaggccgcctccagccccggccccggccccggcctcgacccccactgggaggcgcgcccg

SEQ ID NO: 229928 - DNA, 122 bp, Homo sapiens
acccatcttcaaaggcagaggacggaaaagtgccaagatggatggacatatggctgtcgccgcactcccgtgtccaagcgccaaggccgaatgaccacttaggtcaggagatttttcccctc

SEQ ID NO: 229929 - DNA, 122 bp, Homo sapiens
gggtctcagtaacggagggcaggtgccagtctcgcgccctagttcgttcctctgctacaacgccaagttcgaggccacagtgccttctggaagagttgttgtgctgcttgggagcactgcac

SEQ ID NO: 229930 - DNA, 122 bp, Homo sapiens
tcatgcccgctgcttcattcagtctaacatgtcaagtagcctcttgaaaacgcctcttcacggaggttgcagtaagccgagatcgcgccaatgcactccatcttgggtgacagagtgagact

SEQ ID NO: 229931 - DNA, 122 bp, Homo sapiens
cggaatcccagcatccgaagcagcgacatggtgggggcagaaaccagccccagcaccgcacgctgttcacagagcaacatcggtgaggaagcgtgagttcacgtgagttcactgcttcttcc

SEQ ID NO: 229932 - DNA, 122 bp, Homo sapiens
acctctggtgatccacccgcctcggcctcccaaagtgctgggatgacaggcgtgagccaccgcgcctggccggatcttattgtttttaataccttcaggatctctagtgatgtttctttttt

SEQ ID NO: 229933 - DNA, 122 bp, Homo sapiens
tgaaactggcacggtttctaaagactccttccccgcagttgtggcgcttccaagaaaacacgagtacggatcaggctctggatgagtgtccggccaccgagaatcagccacttcccaccctc

SEQ ID NO: 229934 - DNA, 122 bp, Homo sapiens
gtgaaacagtctccgccccgtggggcttacattcaggcggggaatactgtcaataaacagcggtaatggagaaactacagcagggcgaagggaatggacccgagacgttggtagctacttga

SEQ ID NO: 229935 - DNA, 122 bp, Homo sapiens
gcctgactccaggtttaaagccccatggcaccaaacaaaagaggcaggtgccagcagccccggggccgcccgcacgcaacgcccccgggtcgggccaggctggccagggcagggcggccgcc

SEQ ID NO: 229936 - DNA, 122 bp, Homo sapiens
aatagaagtttgcaggtaacacagcagagcctctcactctatattaatgtcttctctctccgtggcaaatgttcttattactacatctgtctgagatctcctgtcttaggaattaatggttc

SEQ ID NO: 229937 - DNA, 122 bp, Homo sapiens
caccacacgggatctgcactcggagggccccacacagacccaccccacgggacctgcactcggagggctccacacagacccaccacacgggatctgaactcggagggctccacacagacaga

SEQ ID NO: 229938 - DNA, 122 bp, Homo sapiens
cctgcctctctgagggagcagagggctgggggatgggtcatattcaggtcagaacagcagcggctggctgacttctagtgatgacctcagtgcttggcataaacactcaggcatttcctgag

SEQ ID NO: 229939 - DNA, 122 bp, Homo sapiens
cggggcggagctgggtccgaggccggcgggggcgcctccatcccacgccctcctcccccgcgcgcccgcccgctctcgggtgactccgcaacctgtcgctcaggttcctcctctcccggccc

SEQ ID NO: 229940 - DNA, 122 bp, Homo sapiens
tgtaaagctcaaaatcctctactgttatgaaccactgaagactacaggaaaatcccaagtcggggcaactgcttttgtccaaatggccagaaaggatacagaggtgctgctagagtccctgt

SEQ ID NO: 229941 - DNA, 122 bp, Homo sapiens
ggcggtgggagcgggggctgggacgcagaagcctcccctggccgatttgcggtggggtgtcggggtcggggaaccggctgccggcctgaacgcgcggccggtggggaggagggggaggtgag

SEQ ID NO: 229942 - DNA, 122 bp, Homo sapiens
ttcaagacagcagaacaataggagtagcatgctaataaaatgcttgactgcgaaagggaacggcactgaaaagagctgtctctcacgaggtcctgggaggcagctctataaacacaaactac

SEQ ID NO: 229943 - DNA, 122 bp, Homo sapiens
ctgcggaggaggggcatggttgagggttagaattttggagagatgagcactgtggacccccgaattcttcatggaggatcttttgctggagaggaggccccacgcaggctggggaggggctg

SEQ ID NO: 229944 - DNA, 122 bp, Homo sapiens
gagtctagaggtgcctggctggggcctcctggctgagcacgcaccgcaagctccagccaccggcacagagaactcttccctaaaggaatctggccgagggcttgtctcccttttcccaagaa

SEQ ID NO: 229945 - DNA, 122 bp, Homo sapiens
gccagcagtccagaagccaagacagtggtgcacagcaacatggcaggaaccatttgttgccgatgactaactcactctagccacactgggacaaactataaaagcatttttcaggagaatgg

SEQ ID NO: 229946 - DNA, 122 bp, Homo sapiens
gggggccgggcggggcgtgggaggcgatgagatgggagaagtccagacgcgtccctccaacgagggcctctgcatggctggggatgccccagaccccgaggcctctggcaacgacctcacgc

SEQ ID NO: 229947 - DNA, 122 bp, Homo sapiens
ggcccgcatcggctccctacgtgggggacgtgcaggatgatgcggggtcgggggggatttcgctgcgtcgcccgccccctttccggcgcaggagggagcggccgccgcgtccccgctccccg

SEQ ID NO: 229948 - DNA, 122 bp, Homo sapiens
cccaggaccggtggtgccggcctgccctcccagtgcaggtcccgcggagcccgcgccaagcggaacccgtgctggcctgccagcaccatgcgcagcctcggttcccgcccacgcatctccct

SEQ ID NO: 229949 - DNA, 122 bp, Homo sapiens
cagattggtggaaggtctgccgctctcggccaatgggtgagcggcaagccaagcgaggggcgggccccttgctgttcaaagtgtggtctgtttaccagcaacattggtgctacctgggaagc

SEQ ID NO: 229950 - DNA, 122 bp, Homo sapiens
gcaagcctgatcccaggggctgacctctggacggtctcagggactgactagggatgcggccgcgggagggggcagccgagcggggagaggactgggggaggggcgcggggtgtgctcttggg

SEQ ID NO: 229951 - DNA, 122 bp, Homo sapiens
tcttgctgccacaaggtgtcagttttgaaaactgatcccccaacagcctgagctgagatgcggtttcattgttgactgttgaaattttttttttttttttgagacgaggtctccactctcgc

SEQ ID NO: 229952 - DNA, 122 bp, Homo sapiens
caagttgttacagaagctgcattccagagggtgccctggtctatttcctgagccgatcggcggctctctggcatccatggggagccctgcccaaaccatcatccaccaatggcaactctccc

SEQ ID NO: 229953 - DNA, 122 bp, Homo sapiens
taaaaagtctgtctgtcatgttcccactgtatccccaacaactggctcattcaatttgagcgcaagttacagtagacttggtaaataccttgtattagtccgttttcacactggtataaaga

SEQ ID NO: 229954 - DNA, 122 bp, Homo sapiens
ggctgcagggccttcattcaccgcacttaaaggtgtgccagcccctaggatttcccctgtcgtgtcttcctgggctcctgaagctggctgggcagtttctgtatttctctccttaaggcaca

SEQ ID NO: 229955 - DNA, 122 bp, Homo sapiens
ctctgggaacacgaatcatggggtggggtccgcgcaggccgggaccacctatgcgtgctgcgtcctgctgtcctggatgtaccacatccccctgaagatgaccgttgcctgctcaacctcat

SEQ ID NO: 229956 - DNA, 122 bp, Homo sapiens
gctggcgcggaatgtggtgatccgtcccggggcggggatgacttcatgcagccggagctccgcggcgggagcggaggctgctgctggcaggtggggcgcgggccggcgcgagctgaccgagc

SEQ ID NO: 229957 - DNA, 122 bp, Homo sapiens
agaccacggagggaacattttgtggaccctgggcttaccggcaggggtggaggtgtaatccggtcaaactcagctgattcgtagattttgtgagggtgcttatgctaagagtactctcaaag

SEQ ID NO: 229958 - DNA, 122 bp, Homo sapiens
gatgagagatccacagataattgtttcccaacactaacatttcattaggactttggcttacgagagaagtttgtcacagtcaaatcaaatatagaaacgaatctctaaatgtgaaatgtttt

SEQ ID NO: 229959 - DNA, 122 bp, Homo sapiens
ggcacagatcaagaggaggcctttcagctgggcgcggtgggtcacctgaggtcaggagttcgagaccagcctggccagcatggcgaaacaccatctctactagaaatacaaaatttagccgg

SEQ ID NO: 229960 - DNA, 122 bp, Homo sapiens
actacataagcagacaaaattgcaaagatctgccctgtgtcgagtatgacagccacgactcgtggctctccggtcggagggaatgacaaccagggccaggctcctgatggacagtctcagcc

SEQ ID NO: 229961 - DNA, 122 bp, Homo sapiens
tttcgtaattttgtaggattgtccggtgcccgctagaggtcgccaaacggagtccttttgcgctggttcttaagtggattcctagtgaaaaggcagacaactgaaaatgtgagtgctgtctt

SEQ ID NO: 229962 - DNA, 122 bp, Homo sapiens
agggcctcagtctgggtgtgaatgaacttggcctgacttctttgctgccgtcatatgaaccggaaggagacagcttagatagagcaagcctgctccttccagaagcacgagggtcctgtggc

SEQ ID NO: 229963 - DNA, 122 bp, Homo sapiens
attgggttcccgaagggcgatgggcatccacggctcatctttaagtgaagagtgcgctggcgggactgtgaggcttgaatgaggtgtgacacgcagctctaagcacggcacgcagtagtctc

SEQ ID NO: 229964 - DNA, 122 bp, Homo sapiens
aacagaaagatcctattttcattacacctagttgtgtgtttgtgtgtgtgcacgtgcacacgtgtaaagcatatgggtgtgcatcacactttatttgcaaagtaagtattctggaagcacat

SEQ ID NO: 229965 - DNA, 122 bp, Homo sapiens
cctcaaatggggaccctagagcctctgaaagtaccaaagacagagtgaatgctatggccacgactctagaatatgcttctcacataccaaccaagacaatcagcaccaaaagcaatgatctc

SEQ ID NO: 229966 - DNA, 122 bp, Homo sapiens
ttcccccctgcgcccccagcgtggtctaggggagcctggttgagtgggactgagtggccccgacggcctgcgctgaaactttgggaagagggcccgttccgctctctccatcgcttgccttg

SEQ ID NO: 229967 - DNA, 122 bp, Homo sapiens
cgagccttgtcgaagttctccttgactcggaagctgctcactcggcagtcgcgctccgcgcggccgctgcccagcgccgccaacagcaagagcgcccacacccacttcatcttgcccaggaa

SEQ ID NO: 229968 - DNA, 122 bp, Homo sapiens
ggaggatggagagaaagagaggcggggctggctggggaccgagtggctcagggataaatgcgcagcctgagagggggtgagctgacactgtcccagctgccacctagactcggagctccatc

SEQ ID NO: 229969 - DNA, 122 bp, Homo sapiens
cacctaggtgaatgtcatgatctatacataaatcacttgctagctcacaaggaattcggacggcatcactcaaaacaagaaatgccagggggtggagagaagcagcacaaggaatcccacgg

SEQ ID NO: 229970 - DNA, 122 bp, Homo sapiens
cttccgctaacttcccggcagcgcgccgctcagggtgggggccccgagggctggggccgtcggcttccccctggggatcccccgcttcagagaaagccaagcgttaggcgcagccaaagccg

SEQ ID NO: 229971 - DNA, 122 bp, Homo sapiens
agaggtctcatcactagaaatagccgaagaacctgcagcctcaaccagcgttaaggaggacgtgccgtttctagggagtcttagtcggggctcaccagcttcctgcattttctgaccggctc

SEQ ID NO: 229972 - DNA, 122 bp, Homo sapiens
ccttgctgaagaaggttaacacatagtaccatacctcctctgatgacttcagaaatgccacgtaagtttgcaggacttgcgatctatagtcaatgctttggccaaataggtttaattcttct

SEQ ID NO: 229973 - DNA, 122 bp, Homo sapiens
agggctggcagcaggggccacgtcctctctaggagacacccacagagccacatgtgcacgcgtgtggcagtctcactgcaccccagcaacgcgaaggcagaaaccggtgctggtggccacac

SEQ ID NO: 229974 - DNA, 122 bp, Homo sapiens
tctggagcccctcccttaactttcatgtctccgagatttctcatttcgaattctcaggctcgtctgacacatttccacttctttattcctactcagggtgtgattgcagtgtgtaagaaggg

SEQ ID NO: 229975 - DNA, 122 bp, Homo sapiens
ccgcaatgcggggagtaagagccagcccctctttccctccctggctcttaggacccacatcgcaaaggtgtgattcaccccccgcgatgcgaggagtacaagccagcccctcaccccccatg

SEQ ID NO: 229976 - DNA, 122 bp, Homo sapiens
ccagggatgctgcaaagcatcgcacagtgcacaggacagcctcccacaacctggtattatcggtccaacatgtcagcgatgttgaggttgaggaagtctatagcaagaaaggcagtaagaca

SEQ ID NO: 229977 - DNA, 122 bp, Homo sapiens
ggctgtgatagcgaccccccagaacaatcctgggacaatcctggttcccacagcactcaccgaaagtgttgactccaagctcaccagcaggaaccccaggagcagcagagccctcatggcat

SEQ ID NO: 229978 - DNA, 122 bp, Homo sapiens
cccacgtgcggcgaggagggcgcagtgaagttctgctgtgtgcaccccctgcagctcggccgggaagcgcccgctggaggaacggagagcgccgcttcagcgtcggccacgtgggccgggct

SEQ ID NO: 229979 - DNA, 122 bp, Homo sapiens
ggtcctgggctggggctgggggagcgaccggcacgggcgggccgggggtggagcctctggcgagctgttcacagcgggcttcccaggaggtgagaaagtcccgcccctagccgatggagggc

SEQ ID NO: 229980 - DNA, 122 bp, Homo sapiens
gcccggactgcggcgcggcagtggctccgggtccctactcgctgggggcggggcgcccgccggccactggctctgcgggccgctccccgagaaggtggtgcttaccttcccgaggaggggcc

SEQ ID NO: 229981 - DNA, 122 bp, Homo sapiens
ctgcctctagtctagaataactaacaggatagaactatcccatcatagagtcactgacaacgaagtcatgctaaactaagcaaattttctattttgatagggtgaccaagagtaagaacagg

SEQ ID NO: 229982 - DNA, 122 bp, Homo sapiens
agtgactggaggtgaggtgggccacttcagatttggtgatcagggaaaccctctttaaggcggtggcatttgagcacataactgagtgaaattgggaaatatagggaaatagcattcctggc

SEQ ID NO: 229983 - DNA, 122 bp, Homo sapiens
agcatttgctcagagcctacgcttggtccagaacatcaaactccaaaccctggggacaaacgacatgaaataaatgtattttaaaacatctatttaatgtattttaaaataatttgtaagtt

SEQ ID NO: 229984 - DNA, 122 bp, Homo sapiens
ctgggctgggggtagaagttaggggaatatgttcctcatgcttatttcatgcctaaggcccgaaggccagctacattttcatggtttatgagagtttcatgtaagatttgtcttgagcacaa

SEQ ID NO: 229985 - DNA, 122 bp, Homo sapiens
tgttccatggggctgtgcagtgcaatgcagaaggcggaaatcctgctgtgacgccaccctcgagaccttctgcagcctgagagggggtgatactcccacaccctttgatccttccagatggc

SEQ ID NO: 229986 - DNA, 122 bp, Homo sapiens
ccgccttcttgagggatgcaaggatttcccgcagtcctcttccagccaggaggccagggccggaggtcaaggagtcttaggcgattagagattgaggatccatgccctctgtctcagctgca

SEQ ID NO: 229987 - DNA, 122 bp, Homo sapiens
ccgcgctcagcctccaagggagctttaacaacgatatccacgctcaggtcccacagtcggcgcttctgacttaattctgaacaaaagcctgcagtggggcttgcacagtggtagttttcaaa

SEQ ID NO: 229988 - DNA, 122 bp, Homo sapiens
ttgagcacagcactttgtgactttgatgtaaacatcaaacacagccccctttcctgtcttcgcatccaggaaataggttagtttcagacaagcctgcttgccggagctcagcagacaccagg

SEQ ID NO: 229989 - DNA, 122 bp, Homo sapiens
gttctacttaattaaaaccgaagaggggggctgggggagataattagggaggtctccagccgctgcttaatgagccagtaattaaccagccggggaggggagctggcctctggccagactgg

SEQ ID NO: 229990 - DNA, 122 bp, Homo sapiens
cttctactggctaagccaaagtcattagtgattagaaagcctcacacaagagcctgtgaacgaatgccagacttttcttttcatttatgcttcttacattcctcctctgagctaagcgggcc

SEQ ID NO: 229991 - DNA, 122 bp, Homo sapiens
ttgtggaccgaaccacatggggctactggagcagggggaaagaagctggggacaggtagacggaactttccgcgtggagatctttggccaagagaatgagcctcagctctgttctgtgggct

SEQ ID NO: 229992 - DNA, 122 bp, Homo sapiens
cagtcctcgaccccccgcacctcgccccttccccaccccctcctccgcctcggtgcccggcgctgctccggaccactatgaccatgagatccgcggtgttcaaggcggccgcggcccctgcc

SEQ ID NO: 229993 - DNA, 122 bp, Homo sapiens
cccaggcctgcgggggccctgagaattcgcaacaagccccgggcagcagggctcggctggcgctgaggccccgcctggccatgcccattggcggaggctgccccgggggcggggtcagggcg

SEQ ID NO: 229994 - DNA, 122 bp, Homo sapiens
gtgagcacgtcctcagagggcagacccagcgaggcgtcgtggcagctgcggccgcggagacgccggctccgcctcttgcacacgccccctcgcctgaggccccgccccgcccgcgatgcccc

SEQ ID NO: 229995 - DNA, 122 bp, Homo sapiens
gatgtgctcaacccaggactgaaaacgaatctgccggtccacagcgacgccctctgatgccgcagagaaaggcccgggcctgccagacgtgtgtcacaactcaggccccgccaggaggaaag

SEQ ID NO: 229996 - DNA, 122 bp, Homo sapiens
actctggcagaagccagcagagcaagcagatagatgaggacattcagcaataatatggagcggtccatgtgtggagaagctgaggccacccgcccccggccttgtatgtaagccacctttca

SEQ ID NO: 229997 - DNA, 122 bp, Homo sapiens
tcatgtaaatgtgacgattcatgaagtggaaggctggccacaggcttactggtagacccccgagtacaaggcatttgaccctggttttgagtactcctcctccaggtggatggctgtggagc

SEQ ID NO: 229998 - DNA, 122 bp, Homo sapiens
cagccatgcgcgccgcctgctgagtccgggcgccgcacgctgagccctccgcccgcgagccgcgctcagctcgggggtgattagttgctttttgttgttttttaatttgggccgcggggagg

SEQ ID NO: 229999 - DNA, 122 bp, Homo sapiens
caacgtcccactgcgaggcctgatcaggctgcttgctcgcggggacgccaggacttgaaacgtcccgtgccacgaggcccatcgcgcccacaagtggcgcgggtcactggcacctccctagt

SEQ ID NO: 230000 - DNA, 122 bp, Homo sapiens
gcgcccactaagcgctgggctgggggcctccaacccggaacagaagccggccacaaccctcgctccctgtcgtcgcggccgttataggccgaaagcaaaatccaatcccgggccattgtggg

SEQ ID NO: 230001 - DNA, 122 bp, Homo sapiens
ttcatgatagcccaaacatgcaaacaatccaaatatccatcagctgatgaaaggccaaaccgatgtgttatatccatgcaatggaatcgttttttggacatgaaaaagaaggatgaacaggt

SEQ ID NO: 230002 - DNA, 122 bp, Homo sapiens
gccgcaggggctgcacgtctgtatcagatcaaccgaatggtttcccaagtgccccagcagcgtctagggtagagatagtgctttctgcgcaaacagccgttggagagtggcggtgcactacc

SEQ ID NO: 230003 - DNA, 122 bp, Homo sapiens
gggtgcagtgtttgtggctactcgttgatttcctttgcactgagttgttggtgaggctggcggcgggggggcagcagtttggtgacacgaagtgaactctcagcgggaaatcacagtgcatg

SEQ ID NO: 230004 - DNA, 122 bp, Homo sapiens
gcagagatcgacaggacggttctcctgtggagtcagtgccttgcttggcagaggaggcagcgcgggcaggccagccaaatgcttgggcgacagggaagcgtggagtctgcgggcttgcggcg

SEQ ID NO: 230005 - DNA, 122 bp, Homo sapiens
tgtcctcctggagcagggctggttctgaagcttggcggcagcccctacctgctgacccaccgcctccgggcgcacgggaagaggactgagagccctgaaaccccagcggggcaggagccagc

SEQ ID NO: 230006 - DNA, 122 bp, Homo sapiens
gtgtatacaagttgcttgattcacaagcttaagttgcagtagtactgctatgcagaaatacggaatatttaaaggtttaacatttgcctttcagcctactgggtaaaacacagagtctagaa

SEQ ID NO: 230007 - DNA, 122 bp, Homo sapiens
agggtgcggggatgcgggggtcgcagacgctccaacggtcaggggacacagcctggctgccgcctcctttcccccgcccctcctagacgccgctaccggaaaccgttaaccctttccttcgg

SEQ ID NO: 230008 - DNA, 122 bp, Homo sapiens
catcgacgccgccaacaacgttgtctacaagcaatacgaggacatggtggtggaggcctgcggctgcaggtagcgcgagggccggggagggggcagccacgcggccgaggatccccagctga

SEQ ID NO: 230009 - DNA, 122 bp, Homo sapiens
ttttaaaatttcatattttatttaaaaggaaaccagtgaattgaaaatgagactaaatatcgctatcttctttggagctctctttggtgctttgggggtgttactctttttggtggcttttg

SEQ ID NO: 230010 - DNA, 122 bp, Homo sapiens
gacctgcaaacatgacacccacagccttgcagcaggagggcctggcggggtcgtgggtggcgtggccccgtttctacacctggggaaactgaggcacagcccaaggtcatacagcaagtaca

SEQ ID NO: 230011 - DNA, 122 bp, Homo sapiens
ccgctcccagtctctccggcccgaattgtccgctccaggccccagacgctgaacacggaacgaaaaggcttccatcctggagacctggagacgagtgacgccagagcgacctcgtgcggttg

SEQ ID NO: 230012 - DNA, 122 bp, Homo sapiens
cctttacaaaagtgaacattgtgtgtatattctagacaaagaagctgaagttaatcaatccgtccttcactcacgaaagcaattacagcttactgaccacatagggtatgcctggtggtcta

SEQ ID NO: 230013 - DNA, 122 bp, Homo sapiens
aagtgcatagactgaaataacatagtttaacaaatattttagaagtgaactgtgtaatttcgatgggtgaaagaaatagaacatcagcatccaggaaacctcttttatttactctgtcccat

SEQ ID NO: 230014 - DNA, 122 bp, Homo sapiens
cagttggagccctggggtgtcttggccggccctcagactgtggagcacctgacgctcagccggtcctctggtcctgggggcccctgcttggactcatgcagaggtgaaggggagggagaagg

SEQ ID NO: 230015 - DNA, 122 bp, Homo sapiens
acttccaaaattggtgttttgttgagcgccgttgccgtggaggacacttttatcagggcacggatggctgtgcgcccgctttcccttagttctcccctcaggatcccgtttcctgagcgctt

SEQ ID NO: 230016 - DNA, 122 bp, Homo sapiens
agttgggggtcagagaccgagtccgagccggcggctggagctggggacgtagacctaggccgagccggagcgaagagaaatcccgccgaacgcgagacaccgccgccgcagcttccactggc

SEQ ID NO: 230017 - DNA, 122 bp, Homo sapiens
gtttcaggtgggcatggacatgggtgtaggtgtgggcgggtcaaccccaggcagaaccagcgtcctcccctccacatcctggcccgccttctctcctgtagttcctcctcccaactccagag

SEQ ID NO: 230018 - DNA, 122 bp, Homo sapiens
tcatggggaactctgagcacaaatggcaccacagttaggcctccttaaagcaagggagcccgtcttttgtaccctccttctacatgtcagttattggccagggcagctgagagttaccagcc

SEQ ID NO: 230019 - DNA, 122 bp, Homo sapiens
ggagaggacacacacggcaccctgccttctcctcatcagcatctccgcgagtgcagcagccgaggacagagaaggactcggaaacctctgccctcagccgcacaccccggagtgaaggtccc

SEQ ID NO: 230020 - DNA, 122 bp, Homo sapiens
gcttagctgctctcaatagtatcattttccagatagcccaaagcaccaaagtaaggacagcgggccattttcccaagatctttcttccagcttttccctgccatgccaacagcattcttcat

SEQ ID NO: 230021 - DNA, 122 bp, Homo sapiens
gcgctcggccccagcccctgttcccgcctcagagccgcagcgagcgggttcctccggcaccgcccaaaggctggcctaggaggttccagcccccagcgccagcccacactcaccggctgcag

SEQ ID NO: 230022 - DNA, 122 bp, Homo sapiens
tgggatgagtggccgaggcgtctggggacgtcctggagcctgcagcccttggccgtgtcacgccatgtgctcatgtgaccgaggacgcttccgaggatgtggaagccaccagtcgtcctggg

SEQ ID NO: 230023 - DNA, 122 bp, Homo sapiens
gcttatgagaaagcctgaaactcctcaagcacccagggccagataaagatctgcctcctacgctgggggcggcacacacacacacacacacacacacacacacacacacacacacagacaca

SEQ ID NO: 230024 - DNA, 122 bp, Homo sapiens
cgagggcgcgaaaagggcggatacggattcgaatagtggagggcgggccggcggcttctgcgcaggcgctttccgaacgagggaggggatggtggggagcggagagaaagtggggctcggta

SEQ ID NO: 230025 - DNA, 122 bp, Homo sapiens
tttattctgcactcactataggctgggagctacactagggcctggggacatgaagacaggcgacacggtccctgggctcaagatgccagacagatgtgcaaacaagtgaaatctgatgtgat

SEQ ID NO: 230026 - DNA, 122 bp, Homo sapiens
caggcgagggaaccgagacccagagagggcaggggactttggcaaactcacacagcccaccgcaggcaactggaactgaaacccaggactccgtctcttgccagtgaaagttatgttaggaa

SEQ ID NO: 230027 - DNA, 122 bp, Homo sapiens
gatgggttggaaaggattcagcatatagatcagaagtgtttaaaaaaaaaaaaaaggccacgctcaaaaccccagactagttttcctcaccagattctgatgggacgatgtctcagtagcac

SEQ ID NO: 230028 - DNA, 122 bp, Homo sapiens
acaggtcccttcccagcctccagagcaagccaatcagggacacgctctcgtggcccagttcggaaacaatgcttggtgggaacctgcaatcttggctgccggaaccttcggggaggattaac

SEQ ID NO: 230029 - DNA, 122 bp, Homo sapiens
gtggatcacagagctcagagacacacttacttatgtttaccggtttattataaaggatatcgcaaaggatacagatgaagagatgcacatagagcaaggaatgagggaaggggaaggagtgc

SEQ ID NO: 230030 - DNA, 122 bp, Homo sapiens
gaaaactgctggaagcagagtagatttggggaagaaatttcttgggttgcatttttcaaccgttaaagttgttcaaccatgaggccaagaaagcaattgaatgtattcaactaaaaagagag

SEQ ID NO: 230031 - DNA, 122 bp, Homo sapiens
aaattaacgcaacggttgcggctcaggccccaagacagcgagatcccgggaaagctggttcggcgggtcggtcacaccttcctcttctttttagtgttcgttcctggaagaatcatggaaga

SEQ ID NO: 230032 - DNA, 122 bp, Homo sapiens
catccggctccccactgacagccctcaggaagcgagcagcagggccagaggctcatctgccgagtagagctgctggggctcggggactcagggcacacaggcggaggagggcggggcgctga

SEQ ID NO: 230033 - DNA, 122 bp, Homo sapiens
ggcgccacgctgagctctgaagcctcggtcagaagggctcctcttttggtagaacacaaacgccttccaccagggagggtcctcgaactccacccaagaactgcagggaaaccaggtatgac

SEQ ID NO: 230034 - DNA, 122 bp, Homo sapiens
gaattccatcccggccaaagcagggacccgggggagcctctggtcgcacccgagacagttcgttaaatactcagtgcacgtgctggggatggaagtgctgacccactgctcaggtacgcgcg

SEQ ID NO: 230035 - DNA, 122 bp, Homo sapiens
agctgactccgatctcctgtgtgtgcagaagtcaggaagcctgggtacaaggcttcttcccggtccgggatgactcggtgttaccgccgccctctgttaggccagaggcctttgacctgcct

SEQ ID NO: 230036 - DNA, 122 bp, Homo sapiens
aagaccgccccttccaaattgccttctcctcttgatggcacatccaagcactagcaaattcggaatcatttttgacttatcgtttccttttaccctttttaatcataggtacaatcttttgc

SEQ ID NO: 230037 - DNA, 122 bp, Homo sapiens
gcggtaatgattgcagatcgtgtcaactaaaatctgtttggatttctgtaaattggagtccgacaagcctgcagttccgtcgccaacctgataactctcacccccctgtcttttgtttttcc

SEQ ID NO: 230038 - DNA, 122 bp, Homo sapiens
ctctgtccaaacctacttgctaggctttctttcccatgtctactctatagctggaaaggtcgtggaggacacattttaggccaaccctctcggtttacaatccagagaggggagaccctcag

SEQ ID NO: 230039 - DNA, 122 bp, Homo sapiens
cggacgcatgcgcaatgaacctgagggcagggcggagtcgcagcagttgtctgacgcagtcgccgtaggacgcagccccgtacgctggagcgcagcggagacaggcgcgggcgcactggccg

SEQ ID NO: 230040 - DNA, 122 bp, Homo sapiens
gggatcagggagttccctttcctggtcaaggaaaggggtgacagatggcacctagaaaatcgggccactcccacccaaatactgcgcttttccgaaggccttaggaaacggcgcaccaggag

SEQ ID NO: 230041 - DNA, 122 bp, Homo sapiens
ttttccatttccacactctagagtctaatacatttaaattagctttcattttgcgtaatacggtgtttggcaatctcttttatgtaatctggtaaattggtaagaaaattcagtgtggctct

SEQ ID NO: 230042 - DNA, 122 bp, Homo sapiens
ccagggagcctgggcgcccggggctccgccgcgaccccatcgggtagaccacagaagctccgggacccttccggcacctctggacagcccaggatgctgttggccaccctcctcctcctcct

SEQ ID NO: 230043 - DNA, 122 bp, Homo sapiens
agacaggttcagtgtatgtgcctatccgtgtggctctgtctgtgcctccgctagtgtccccgcggctgccgtccgccctcccgcgccccgccaggtgagcgcagcccccacccccagtcacg

SEQ ID NO: 230044 - DNA, 122 bp, Homo sapiens
atgactttgatttataaagagaagactgagggcggggatactgattcagaaatcctgtagcgtgtaataaaagaagaggaaatggcatggaatcactgcctcctgtgatttgaaggccattg

SEQ ID NO: 230045 - DNA, 122 bp, Homo sapiens
ttgaaagagttattgtcggtagataggaatgtctgggttaagataatgggttgtgcagaccgaggtttcatcatgcagatgaagcctccaggcagcagactgcagagagaatggatgggaga

SEQ ID NO: 230046 - DNA, 122 bp, Homo sapiens
agccagatgatgcaagtcccatagccaacccaaaagcaggagcaaaaaaaagtctttcagcgcaggtattgtatttgaatccatcttatgaaaggtggtctcctcaagtttgagctatggta

SEQ ID NO: 230047 - DNA, 122 bp, Homo sapiens
ctcctgaggaatgagactttttactcttctgagtaattctgagccgcctccatttggtgccgctcatctttctgttttgggtaactcagagccctacaccctttgaaactgagtccaagtcc

SEQ ID NO: 230048 - DNA, 122 bp, Homo sapiens
aaagaagaatggactgaatctctgagccctgtgtctctcccccatttaggtttgtggccacgcattcctcaactgctcaggccccgaagcattcaggtcattcttgacccttccctttcttg

SEQ ID NO: 230049 - DNA, 122 bp, Homo sapiens
tcggctgctcagagtggtaggcaggatgtagaccagggcgggcgcagccctggcgcatagcgcgaccctttcgtctctcagctgagctgcggaggaagggggcttggcagctcagctcacgg

SEQ ID NO: 230050 - DNA, 122 bp, Homo sapiens
gtgtcccacagacgtgagcggctactccagctccctgcgggaggccctggtccccctggtcgccgaccacaagtgcagcagccctgaggtctacggcgccgacatcagccccaacatgctct

SEQ ID NO: 230051 - DNA, 122 bp, Homo sapiens
cagcctggacaagatgaggagacccccccatctacaaaaaatttaaaaattagggttggccgggtgtggtggctcacgcctgtaatcccagcaccttggaaggctgaggcggtggatcacct

SEQ ID NO: 230052 - DNA, 122 bp, Homo sapiens
acccactgtacaaaggatccaaccctgcagctccgctcctggaggactgaccaagacctgcggcggtgactgcccccgcccagccccacggcgctgacctggaactgccctgatgatgagaa

SEQ ID NO: 230053 - DNA, 122 bp, Homo sapiens
ggcaaggcgtgaggcacgcggctcgtcccccggcaagtccccccggcaaggcatgaggcacgcggctcgccccccgggcaatgcgtgagacacacgctccagcctcctccgtgttcgggcct

SEQ ID NO: 230054 - DNA, 122 bp, Homo sapiens
taaaccaggagatacggcacaggcataagcccaaacctggggcgggcgactgttgctgcccggagcccaggtgggaggggcccagagtccaggtgggaggggcccagagtccaggtgggagg

SEQ ID NO: 230055 - DNA, 122 bp, Homo sapiens
ttagataataaatatctgtgatatttgtaatggtgtgccactgttcatctctttccaactcggcattcactgaaatcacactgggaacttcatcagctgttgtgagaatatttacatcatgg

SEQ ID NO: 230056 - DNA, 122 bp, Homo sapiens
ggcccatgtgacggaaaccaccagacacactgtgtggagacacatgccaatgattcacctcgttcccgaactaaaacttctgcgctttaggaaaaaagcaagcgttccaatctgcgaggccc

SEQ ID NO: 230057 - DNA, 122 bp, Homo sapiens
ttctggtacccaaagagcttaaagtccccttcgaaacgggcatacaggcgtcggatgtctcgtttgctgatgcccaggaaatagtgctccaccttggttctgttatacacggtaatgcccgg

SEQ ID NO: 230058 - DNA, 122 bp, Homo sapiens
ttgcatcatcttgcaaatggtgctcccaaggagaaacaaagacatgactaagccttgttacgaagtccccagccccagttggcctctgggatatttttggctttctctggggttccccaact

SEQ ID NO: 230059 - DNA, 122 bp, Homo sapiens
ctcttccttggttttgtctaacccagcactgtccaatctgaatgtaagccagtacaaacacgtatataattttaaattttctttttcctttttttttttttttgtttttttcagagacggga

SEQ ID NO: 230060 - DNA, 122 bp, Homo sapiens
ataaagggctgctggctttgctgctgctgcccacagatgacagccatggaaatgcccttacgctgtgggctcaggggctctgtagcctttgtatttgccattcggtcactcacggatggaga

SEQ ID NO: 230061 - DNA, 122 bp, Homo sapiens
cgaggtggagacacgggcagcgctcaggtcccggcccaggaaactcagtggcttttatcccgtttccttcaaccccagatgtgagccctctggccaacctacctaacccacctgcccccagt

SEQ ID NO: 230062 - DNA, 122 bp, Homo sapiens
tgccctaccgtgggaatatggctgaagatcttgactaggggacttatgaacccatgcagccgtgcccaaatcctaccaaactgaccttactttcttgaagacggaattgtagtatggtcgag

SEQ ID NO: 230063 - DNA, 122 bp, Homo sapiens
cggccctgccgcttccccgtcggcgctgctgctccgccgtcctcacggctgcagctcgtgcgatgagggcaacgcagcttcttcgcgctgcctcgactgccaggagcacctgtgcgacaact

SEQ ID NO: 230064 - DNA, 122 bp, Homo sapiens
gcgcctcgcgttagaatcactagctaggcagccttactgcgcgccggaagtttgggccaccgtgcggcccgccctttccggccagactgaacgcggccccatctgtcggcttaggaactggg

SEQ ID NO: 230065 - DNA, 122 bp, Homo sapiens
gagaagaggtcgcgggcaggagggatggcgcgtggagagaggatgagggcgcgtggagggcggatgagggaaggcccttgagcctccggcagagcccttcctgcactcacagctacaactgc

SEQ ID NO: 230066 - DNA, 122 bp, Homo sapiens
gcctttgtcagggcgcccgcaggcccggccgccgcgctgccgtctcgcaccccatccgcgcgcccccgccccttggctcggtccatctgtttgagcttcacaatcctccagcggccgggggc

SEQ ID NO: 230067 - DNA, 122 bp, Homo sapiens
ctctgcagggtgaggcccaacatctcgccacattaaccctgcgaactcagccccagtaaacgaggctgggagccattaatgcctaatgatgttgcattgtcttccaataacaaaccatctca

SEQ ID NO: 230068 - DNA, 122 bp, Homo sapiens
ctcgtagctgccctgagcctcgccttcctcatctgtcagatgagaatgatcttccctgtgcggcacctctgaagtgtgaatgtggtggcgtggtcaggatatccttgcctgtcagaaccact

SEQ ID NO: 230069 - DNA, 122 bp, Homo sapiens
tcttacccagagacttgagcatttaaggatgccttcctagtccaagaatttaactattttcgggctccacttgcatattttaagaacattaacttttttcggtcttgcctggttgtttgcag

SEQ ID NO: 230070 - DNA, 122 bp, Homo sapiens
taacagctgcactgacttttcatacttcctgcttgaggaagctgctactgtctctgaacacggcggtacctgccttttctaggggcacaccttgaagatcacatcggccagtttcgatagtt

SEQ ID NO: 230071 - DNA, 122 bp, Homo sapiens
aattaacataaagcctctgagcccaagcttcctcaagtgtacaatgaggatactggagtccggaatctctgagtgcttctctgtgatggacagaacaatgccccgacaaagatgctcatgcc

SEQ ID NO: 230072 - DNA, 122 bp, Homo sapiens
ccactttctcacagcgccacaccgttccttacgcacagcaggaatgcaatcagtatttgtcgatggttccccaaactaacaggagtggctgcactacgcacacttaggtgatacgtacactt

SEQ ID NO: 230073 - DNA, 122 bp, Homo sapiens
ggagtggtggttgggttgatccacagcccagtgtcttgaagatggacccagagtgttaaacggcataagggcatgcatatatatttcacttagtgcctaatagaatcttgacacatgcggct

SEQ ID NO: 230074 - DNA, 122 bp, Homo sapiens
ctgtgcgacagagtgagactccgtctcaaaaaaaaaaaaaagttttgaaaaagttttatacgattgaatgaactaaaaagaaaatctaggccaggtgcggtggctcatgcctgtaatcttag

SEQ ID NO: 230075 - DNA, 122 bp, Homo sapiens
ggcaggagggaaggggggggccgagtgagacccgaaccccggaggtgccaccttctcgaccgggcagacctgggtgcccgtttctcacagctgcactcaggctgccggccaggtgcacaggc

SEQ ID NO: 230076 - DNA, 122 bp, Homo sapiens
aggatgaggcttgggaatgttttgaacccaggaggcggaagttgtaatgagtcgaggtatcgcccctgcactccaacctgagcgaaagagagacgctgtctcaaataaataaataaataaaa

SEQ ID NO: 230077 - DNA, 122 bp, Homo sapiens
attcagaatttaaatctgggccagattaagtctttgtttcattcaaagatattaattaagcgaacttggccgggcactgaaggtaggcaaaggagaagaatgtggctcctgcagccctggag

SEQ ID NO: 230078 - DNA, 122 bp, Homo sapiens
gcgttcgagacggctccaggtcagagggagatgctggacagaaagtggagagggtagggccgccctatggggtttgagggccatttgcttccggggagatcatcgtctctggcctggggtct

SEQ ID NO: 230079 - DNA, 122 bp, Homo sapiens
gaatttcacataccattaaggtaattaaagttttatcttcagttcccttttagactatggcgacatacctggagttcatccagcagaatgaagaacgggatggtgtgcgttttagttggaac

SEQ ID NO: 230080 - DNA, 122 bp, Homo sapiens
gtcggtctgcgggaggcgggttatggcggcggcggcagtgagagctgtgaatgaattctccgggtggacgagggaagaagaaaggctccggcggcgccagcaacccggtgcctcccaggcct

SEQ ID NO: 230081 - DNA, 122 bp, Homo sapiens
cacatttttgcacagctacaagtttctcactgtacctagcatgctgagtgtatttagtggcgtgaacttgaggctggaagggtggggcgaggctggagcctaacggcctgttttacagagga

SEQ ID NO: 230082 - DNA, 122 bp, Homo sapiens
tgtgtgcagcggggctgggacgggccaggctcgacctgtgctgtgattttccacccagaacgtcgcaaatgtttcccaccatgtggaacgtctgttggggaaatggtgttccagagtgtgca

SEQ ID NO: 230083 - DNA, 122 bp, Homo sapiens
gagtgggcgccgccgccaccgcccccgccgccgtcgtctcggtagcagccttcgccacgccggggtcttcaggtgagcaggccttgctctggtccaaggactccccattcccgacgccgact

SEQ ID NO: 230084 - DNA, 122 bp, Homo sapiens
cacttttgacattgtgtatcacaaccaactggcaaaaactagtaaatcacgggctcctgacgtggcagctctggctaaaatgcaggtggacgtcctaggtgcccagggagttcgggctcact

SEQ ID NO: 230085 - DNA, 122 bp, Homo sapiens
ggccctagcgcattgtaagcagttgggggtcatttcctcgaggccctactcgctagccagcgcccccggggccagccctggctgctgctgggagccgggtcgtaaggggcagcgagatgttt

SEQ ID NO: 230086 - DNA, 122 bp, Homo sapiens
ttagcgaatagctggatggcccggaatctgccatgcctctccagtcaggagctggggccacgccatgggaccatagaggcaaacaacttccgtagagcaaacaaaaagacgatgtcatctgt

SEQ ID NO: 230087 - DNA, 122 bp, Homo sapiens
gacctgggagtctgcagagaatctgttcaccgcaaagggaggatccatctgaccacagagcgtggattctggactgtgagtttgagggatggaagccgcctctctgccagcacggtgccgct

SEQ ID NO: 230088 - DNA, 122 bp, Homo sapiens
cccgcgctcgtgcccgggctccgggggcgcgcccgcgctcgggcacccacccaactggcacgcgcgggagctggacgtcatcccctcgttaacattcatagccttcctccgagcacgtgggc

SEQ ID NO: 230089 - DNA, 122 bp, Homo sapiens
ttattattatcaccctagatttgcaaatctagaccacacaagcagaagtaagagtgccaacggggtgtggaccagtgtggttacaatagggcttgttgatgtctgtttcagcaaggagggag

SEQ ID NO: 230090 - DNA, 122 bp, Homo sapiens
ggcacccagtgacggggatccgaaggaagtcagctactgtaaggcaggggaacagacaggcgggtagccctgcgcacatgcacaaccagtgacctggaagcagattatagcccaaaaccttt

SEQ ID NO: 230091 - DNA, 122 bp, Homo sapiens
ctgctgtgcctcattgccgagtgtgagaatgcaactaagtgaaagcaaatagaccttgtccgaaaaggcccaaaatagactctgcttgttatcatattaactttgcattttaactgtgaccc

SEQ ID NO: 230092 - DNA, 122 bp, Homo sapiens
ccatcacgtctgcactttgccaccaagtacgccccacactgggatgaagcctgctggatccgcgggtgaggccccccgagggccttcagcaaaccccgcccgcgccttcgggaacacctgcc

SEQ ID NO: 230093 - DNA, 122 bp, Homo sapiens
cctcccagcttcgggcaggactgaaatctatccggttaactagtgaattcccagactctccgtctgcgtggcagggacatttaaacccccagcaccgtgattggctccagctgcaggggtgt

SEQ ID NO: 230094 - DNA, 122 bp, Homo sapiens
tgtgtttgtgtacttcacccatgtctccaggtgagctgtttctcctctcaggggcctccgcgcggcgctccctcctctgccacgctcctcagacacccgcaggccaccctgtacgtcacact

SEQ ID NO: 230095 - DNA, 122 bp, Homo sapiens
gggtgactgacggcacctggaaagtcgggtcactcccacctgaatactgcgcttttccgacgggcttaaaaaacggcacaccacgagattatatcccgcacgtggctcggagggtcctatgc

SEQ ID NO: 230096 - DNA, 122 bp, Homo sapiens
ccccagaaacacatgaaggggattttctccagtgtttctgattaaccctgttacataacccgctcgcattccaaatccaccgtctcagggtctaaatatactctttgcagccaaaagctccc

SEQ ID NO: 230097 - DNA, 122 bp, Homo sapiens
tatttattttactaaaaagaacaaaaacaacagactgctgtcctttagacaataggatcacgtcatctgagccctctgtgccccaggtgacaagcccagccccaagttctctttcctcagcc

SEQ ID NO: 230098 - DNA, 122 bp, Homo sapiens
gccctccgcgggtggtggagtcacttcctgccccgctttgatggctccatgactgcgacccgcatcgaccaagatgtggaaagtatggccaccatctgcgggatcctggggcgcgaccccct

SEQ ID NO: 230099 - DNA, 122 bp, Homo sapiens
gaaatgttaatatttttatgacttttttacttctcagattcctttcttgtctgttagaaacgtatgtcaaacgaggatacagtgtctggaactattggttctaagatataagtggaatgagc

SEQ ID NO: 230100 - DNA, 122 bp, Homo sapiens
tgccccggcacttccgagtgctgccgatgccgtcaaacaggagccaggaataaaaataaccgcctggcaagaaagcaaggcccgccccaccccacccagctggtctctatatttaacgcctc

SEQ ID NO: 230101 - DNA, 122 bp, Homo sapiens
tatgaagagtttacatacttaaacatggaattgctttaagtgtttggcattcaccgttcccgtacattacagcagcttctttcagcaaacacctggaacttgctattgagtaggtggagtac

SEQ ID NO: 230102 - DNA, 122 bp, Homo sapiens
ttttggtcttttatttatttatttatttgcaagggggagctggggtgagttggggaggggcgtcgggggccatcatctaaagttaagacgctgggacggaaaacctgtctcactgttccatc

SEQ ID NO: 230103 - DNA, 122 bp, Homo sapiens
acctggatctgcacggctctgtgacctgagaaggcagctagctgaggcagcgtctgtgaccgccttcctggaccctccacaccctagcggctctgtcacgtgacactcaagtggccgccatt

SEQ ID NO: 230104 - DNA, 122 bp, Homo sapiens
atgtgttcctagtataatgagggagtggtccagatcagagccccttggcagagagtcactcgggctcaggcagtaccgccctaattattgtaatgtgtgctccagttccttttcagataagc

SEQ ID NO: 230105 - DNA, 122 bp, Homo sapiens
gacacaggctcaccttcctgagcccaggccactgggaccaagctgatactcagaaacagccgggcgggttgggtggagatgcatctatatggcgtgcgcacacgcacccctctcctgggcat

SEQ ID NO: 230106 - DNA, 122 bp, Homo sapiens
ccgcggggtggggccgggggggggtccgggggcgccccaggctttaaaggcggtggagggcgtcgcctgccagcgccccggcccggcgcgcgccccccagggcgcccgggcggcgggggcac

SEQ ID NO: 230107 - DNA, 122 bp, Homo sapiens
cctccgcctgctgccaacaggtcagagggcacgcggagtccgcgccgccgcactagcccccgaggccgcctgcgccattttgaataaggtcaccacccggagttcgctgggagaaaaacttg

SEQ ID NO: 230108 - DNA, 122 bp, Homo sapiens
agaggtcagcttcccagtgttggcgggcacggaagcaacggctgtgtccactcctgggggcgccctccttgggcctccttccgcatgaaccccatctgtccggcttcctcctggcgcgcctg

SEQ ID NO: 230109 - DNA, 122 bp, Homo sapiens
ttggccttgggattgaggggggcctcggtgagcagggtggggtgctcctcgggagccacgcgaagctcgttgtagaaggtgtggtgccagatcttctccatgtcatcccagttggtgatgat

SEQ ID NO: 230110 - DNA, 122 bp, Homo sapiens
cctgggcactccggcaacccagaaggagcttgtgccccgatcaagcccagcaggtgctggcgggccgtgccgagtgcagggcccactgagcccgtgcccacccggaacccgcgagcgccgag

SEQ ID NO: 230111 - DNA, 122 bp, Homo sapiens
gccttgaccttcgctctgtccatatgatcaaattacttcctgaacctagaccgttgggcgcgtcatccgcgggactgactgcctcccgccggcttcctgaggccggaccgcagcggggacgc

SEQ ID NO: 230112 - DNA, 122 bp, Homo sapiens
agaccgagataactaagatccgggttgcagtttttatgtttcgcagtttctggtcctaagcgtctgaataattggattgaaaggggagccttgttcaggttattatcattctatctgtacct

SEQ ID NO: 230113 - DNA, 122 bp, Homo sapiens
gaagcagagtagaatagtgaaaggcattctaggcagaaagctcagaggcataaaatagcacgctgcattgagcaattcaacactgtatatccaaagtgcaaggggatgagtcagatgaggta

SEQ ID NO: 230114 - DNA, 122 bp, Homo sapiens
ttcatgcagtttctcaccttgctgggcgatgtggtgcggctcaaaggctttgagagttaccgggcccagctagacaccaaaagtgaggcccaggggcaggaggggtgggagcagatctgtgc

SEQ ID NO: 230115 - DNA, 122 bp, Homo sapiens
agggcttggtcgatacatttgaactccattttagagactggaagggaagaagggggcgtccgggcccctgccagcaccttccaccttggggccttgtcaatgaacactgcgttagcacctac

SEQ ID NO: 230116 - DNA, 122 bp, Homo sapiens
gcgcaccccgaggccgcttccggcttcggctctgcaggagaggccagaatcgggggaggacgccttgggcggggcgtgggtgagagaacctgggggaggtgaagaactaggaggttgcactg

SEQ ID NO: 230117 - DNA, 122 bp, Homo sapiens
acgtgcagttggtgcccagtaaaagatgcctgcaggctagtgctctcccttgcccatcaccgactctgctttagaaagatgcatcttcctgtcaaatcccagttactaggtgttgaagagtt

SEQ ID NO: 230118 - DNA, 122 bp, Homo sapiens
cgttagagaaaacagcgatgctcaaaggcaacctccttcctgacattgcctggtaggacgcgacgtggtgtttgcccgcgcggaatgcggacgcaaggctgctcctaggtctcggggacgcg

SEQ ID NO: 230119 - DNA, 122 bp, Homo sapiens
tgcacctcttggggggttcgcagagctgtgctaggggagctgcagggccgtcggagcgcgcggggacggcggcggcggcgctacctggaggcgcggtggcgggcaggtgcccgaactgcacg

SEQ ID NO: 230120 - DNA, 122 bp, Homo sapiens
ggcccagagaggccagggcagggcacagcaaagcaagacaagtaggcagctttccagaggcgagcagccatgggactgtcatctgcaaagcatcccatcccaacaaggccacggacaacaca

SEQ ID NO: 230121 - DNA, 122 bp, Homo sapiens
gggcatgacaaccagtgaaacagcagtcgctgtcatttatttaacgtggactatgtcctccgcatttacttacctgccaaaggggatgaccttgccaattcgccttttataggtgagaagac

SEQ ID NO: 230122 - DNA, 122 bp, Homo sapiens
ttcccggcgaggctctctgagcccaggcctctgcagctcaccgggcaagtacggtttctccgctgccctgtccataggcgccacgccgaccccaaatcatttgcacccagcacctctgtttg

SEQ ID NO: 230123 - DNA, 122 bp, Homo sapiens
caccactattgtggaggacatcacccaccacatcacagactggactctatgaaaaaccgccggggaaactgcctgcagatcttcataccagcagcatctgtgcttccatcctgaaagagtgg

SEQ ID NO: 230124 - DNA, 122 bp, Homo sapiens
cgctcctcaagttcttggacaattaaaggtgggggttcctgaatgcccgttcaccagccacgtgggccctgacctgaaagccaggcctggccttggtcgggggaagccctgtcaccctaccc

SEQ ID NO: 230125 - DNA, 122 bp, Homo sapiens
gttggagagtggcactctctcttgccccggtttggaggcgcgtgtcctgagaagggaagtcggtcaagtatttttcaccctgttgagctgactgtggcctggactttagcgttcaggctgga

SEQ ID NO: 230126 - DNA, 122 bp, Homo sapiens
ccgagtccgcaggagggaccactgtgcccgggcaggctggccaggcgccctcgctcagtccgcggaaaccctagctcagaaagacccattagagagaaggagaaggcgatctcagggcttgg

SEQ ID NO: 230127 - DNA, 122 bp, Homo sapiens
cgggcccggcaggtgcgcgcggggaggcaggcgccgggcgaggttgtctgggccctggtccgagggctgttcccgaccccgcctcggcccccaccctcagccggccgacttgcggagaggcc

SEQ ID NO: 230128 - DNA, 122 bp, Homo sapiens
cagaggtactgcgtgaggtactcagaggtactgtgtgaacactgtgtgattcctctgatacgggggaccagaacagtcgcttcttagaggtagcaagtagttggtggttgccgggggcgggg

SEQ ID NO: 230129 - DNA, 122 bp, Homo sapiens
ggagcccccttcttctcagcctctaaccagccacccggggagctgagtccttccccccggcgcccaggctgctgcgcggagctcagacacacgtccatagccggctgtcccaaagacagctg

SEQ ID NO: 230130 - DNA, 122 bp, Homo sapiens
ataagtgacatataaacaatgggtacacatagatgtcaggactttgagcccaagctaagccgtcacatcccctgtgacccacacgtatacattcagatggcctgaagcaagtgaagaatcat

SEQ ID NO: 230131 - DNA, 122 bp, Homo sapiens
ctattattatacccattttacagaggcaatcatcaagacttaaagggtgaatctgtccttcgttcaacaaatgtttaggtgtttccaagtatgttccagtttaggggaccagctaattgagg

SEQ ID NO: 230132 - DNA, 122 bp, Homo sapiens
cccccactttagttgcgtgttccagcctctccgccccgcccctccccgccctgaaacggacgtgctttttagaggagtccactgggcttggagtcagtggcaataaccaggggcaataacca

SEQ ID NO: 230133 - DNA, 122 bp, Homo sapiens
gaggaggagaagacggcaggcggcggggagggggagcgggcgcggcggccccgccccactcgcttccccgggccggccctggccccggcccagccccgcacccgttcagtgccgggcgcccg

SEQ ID NO: 230134 - DNA, 122 bp, Homo sapiens
acctcatgggaccagaccccttgggaccacatggcacaatgggacctctgttgtacattccggttgggggatgagcgttgctatttaattactaatattattgaatgccttagaggaggccg

SEQ ID NO: 230135 - DNA, 122 bp, Homo sapiens
gtcgtgggcaccacggcgggcacgctgtggtttgtcagctgggccgagggcaccagcacacgtctcatcagtggccacaggagcaaggtgagggacttccagcctgggcagaggcggggcag

SEQ ID NO: 230136 - DNA, 122 bp, Homo sapiens
gaggggccgcgccgtcgctcagcgacccggcctccccgccgccgaccccgccggaaacctcggtcctcacggtgcttcccggtctgctgctcccccgaccccaggcccacggcacggcgtcc

SEQ ID NO: 230137 - DNA, 122 bp, Homo sapiens
ctgggaagctcatcttgcgaagctgagggagctcagggcaaaggccaggctagcgcggaccggaaggggccgaggctgcacgggcctctgccagaacgctcaggacatcccggcctgggttt

SEQ ID NO: 230138 - DNA, 122 bp, Homo sapiens
catcgtgggcatcgttgctggccttgttgtccttggagctgtggtcactggagctgtggtcgctgctgtgatgtggaggaagaagagctcaggtaggaaggggtgaggagtggagtctgagt

SEQ ID NO: 230139 - DNA, 122 bp, Homo sapiens
cccccagacacacacctgcattgcaggaaggggctgtctctgggattttcttatctgtcccggaaagcttctttccaaaaacaatgcaattgcctttcttctccttcctgaaatctcattac

SEQ ID NO: 230140 - DNA, 122 bp, Homo sapiens
tgcggcttccgcgcggatcccattcctgcttgctttgaggctgctggtgagcggcgcctgcgcaggggaagttgtgtgcccgagttgcttacttgtgttttattgatcttctagactgctct

SEQ ID NO: 230141 - DNA, 122 bp, Homo sapiens
gtccccgtttccggcccaggcgaggctcccggcctcagggccacccgcctgggccgcgctcgcacaacttcggcctgaggccccgggagccgccagtcctcagtgcctccggcaggacaaag

SEQ ID NO: 230142 - DNA, 122 bp, Homo sapiens
gctaatgtctcatttcatgcatagaatctaaaatataaactttacctaccagatctctcacgtttcttctgattaatatattctccaattccaaaatccagtttcagcagaactgacttaat

SEQ ID NO: 230143 - DNA, 122 bp, Homo sapiens
cctccggccacggcccctcctgctttaattaccagcatctagggcagccggcacgccaggcggcttcgcactaattaaagtgggggctttacaggatggcgccgtccccccaggcccgggag

SEQ ID NO: 230144 - DNA, 122 bp, Homo sapiens
gagcattcggcaatacctccgtgtgccagtgcagctgagttctcggtaaacacaatattccgaggtgatactgagctctgcgtcctcagattaaatgtatctccttcttagatttgctcgtg

SEQ ID NO: 230145 - DNA, 122 bp, Homo sapiens
ttcttcggtagctgttttccagtccacagcaccactgctgaaccgagcgttactgagtagcgttctttgccttcacccctcccttcctctaccacttgtccactctcgaggtttaactaaga

SEQ ID NO: 230146 - DNA, 122 bp, Homo sapiens
aataatagtacacttcttgagagtttactatgcagcaggcacaaggcacaatgctaggctcgatgtcatcatcttacatggtaattccaaaacccctctgaggaagtttatcagttaaaaat

SEQ ID NO: 230147 - DNA, 122 bp, Homo sapiens
tgtccctgagaacaaaataacttcggccagggcatgggtcacatggacaggattaacatacggagtaggaggatattctcaaaaatcgaaaccttataaatatctacgtccaatggcagaaa

SEQ ID NO: 230148 - DNA, 122 bp, Homo sapiens
acacaaggagattctatcaatacaaataatttttttttttaattagccgggcatggcagacgccatactaaaagccaaaatggctgccccgaggaagcgcgcaccgcgtagctagtgaaggt

SEQ ID NO: 230149 - DNA, 122 bp, Homo sapiens
acctcgggctacgggggcctcttggaacctgcgttttcaaacttttgcagggtttctgtgcgctggaagggatgggggtggggggcgggttgcccaggcctgtgccacctgtaaggtaggta

SEQ ID NO: 230150 - DNA, 122 bp, Homo sapiens
tttttgtatttttggtagagatggggtttcaccatgttgcccaggctggtctccaatgcccgaggtcaggcgctttgccccgccttggcctccaaagtgttgagattacaggtgtgagccac

SEQ ID NO: 230151 - DNA, 122 bp, Homo sapiens
gaggtggctggttgctctttgagccagcttggccttgctcggcatgcacaagcctcagtgcgactactgtgccacaaatggagccacagagaggaaatgagcagcaggctcagcagcagggt

SEQ ID NO: 230152 - DNA, 122 bp, Homo sapiens
tatcacagcaagtttacccttatgcgtgctggctgcattagcacatccctgcagttattccgtccttggcatccttaattcctgtaggggctgtctcattagctgcagtcactgtctttctg

SEQ ID NO: 230153 - DNA, 122 bp, Homo sapiens
tgacagtctagctggctgcaaggcaggtcctcttctatcttactgggcactgctaaactgcgaagtcggggcgacacggcagcaactttaaaatcaaaccgcatccccaagggctcggcgtg

SEQ ID NO: 230154 - DNA, 122 bp, Homo sapiens
tcaagtgcataagtcttaagcttatgcacatgtcctaacttacaagccccttaagggctgcgaccgtgtgttacctttgttccggttcccaaccagggcctctgtgggtagtcaatagacat

SEQ ID NO: 230155 - DNA, 122 bp, Homo sapiens
gatggattttgtttgaatgaggaacctcagaattaaacgtttgctcccccttagggctttcgtgtgggaagatgtcctattatttaggggtcgcctcttgacttcatcaattccctctcatg

SEQ ID NO: 230156 - DNA, 122 bp, Homo sapiens
gctgaaccctcccagctccccagccgcctggcaagaccccgcgtattgataggcttccaccgcccgccgggccccgcctcctactgctccattgggtccttctgcaggctctgccacgcccc

SEQ ID NO: 230157 - DNA, 122 bp, Homo sapiens
gcccgcacccggggccccctggctctgaagagcggggctcaggggcccggcggcccgcggcggggctgctgcatttggcctgcctctcgcccggcccgcgtcatcctcacccccgctgactg

SEQ ID NO: 230158 - DNA, 122 bp, Homo sapiens
gcggcgcccggttccccccctccgcctgctgccaacaggtcagagggcacgcggagtccgcgccgccgcactagcccccgaggccgcctgcgccattttgaataaggtcaccacccggagtt

SEQ ID NO: 230159 - DNA, 122 bp, Homo sapiens
gagaattcaggagaggaatggctggggcaaagcccgaggcaggggcaggaggcaggagcacgtctcagtgcagtgagaaagaaccctgtgatctcgtgggaaagttttaagtgtgaggggtg

SEQ ID NO: 230160 - DNA, 122 bp, Homo sapiens
gctgccgcttgctcaggccggacagcgtcaagcacacggtgttggccgtcagcggcggctcgccaggcaacttcaggcccagaatctcattgcttagagccctgggaaccaagaaggcgtct

SEQ ID NO: 230161 - DNA, 122 bp, Homo sapiens
aaaggcttgcaggaaaccgaactgggcggagattcggcaatcaggcaacaggtgccaaggcgctgcgcagggacctggccgggtcctgccttgtcgtttcagctattggaacctttgaggac

SEQ ID NO: 230162 - DNA, 122 bp, Homo sapiens
tggccagccactaacctcctgtgtgcccaggttcctaacaggccacagactgctacaggtcggaggcccaggggacccctgctttagagaaaatatgctaaagcaaataaatatgtatgtta

SEQ ID NO: 230163 - DNA, 122 bp, Homo sapiens
cagcctaagtttggagggctgcgggtccggaagggcagcgcccaagtctccaggagcccgcgcggcctggaaagaggggaccggggagaggcaggcggcgcaggccggggcccgagggcgcc

SEQ ID NO: 230164 - DNA, 122 bp, Homo sapiens
tgctgtaggaagcccacgcttgggaaataacattcccacagaaggtctgagaggctctgacgggccaaggttgtaaacccccatgatttgactccacgggcagttaaagtgtgttcccaccc

SEQ ID NO: 230165 - DNA, 122 bp, Homo sapiens
tctcaggccagtttcctatctcctgctttccttctacattcaatttgagcatcgtgcttgcgggttctgtggtagatacaaaaggaactgagtatgggttctttctacacagagtttgcagt

SEQ ID NO: 230166 - DNA, 122 bp, Homo sapiens
tgtatcgccccatgtggaggatttttcctctttgtctaccctttcttaccccgggtagcccggggaggtgggggtgagagcattgttctgtaacatttatttaacaataattgttaacattt

SEQ ID NO: 230167 - DNA, 122 bp, Homo sapiens
gcgggttactgtccatctcctgtgctggatcccattggcacaggttggaagaataaattgcggaagtgccactcccctcctgcgtatcaacaacgctttgtgggcaataatgaagaacacgt

SEQ ID NO: 230168 - DNA, 122 bp, Homo sapiens
cttccagggcgagactgaccagcccaggagcctggcgtccgatattccggccactggggccgacagaaggcacctcaccctggatcctggccatggcctgcggctgtggaatgaggtgcctc

SEQ ID NO: 230169 - DNA, 122 bp, Homo sapiens
gggcggagggaacacccagcagcgggcctacggaggcgtgtctccttcgtctgggcatcccggactcagtcctggcacatagtgggcatcagtgttcatggtaatgacatcaggtacagcga

SEQ ID NO: 230170 - DNA, 122 bp, Homo sapiens
acccacgcgcctcagcccgcggctgacgcaccttcgaaaagttgcgctccgaccttctcacgacctacattcttcccgggcactcctgagtttgagccgggcctggaggacctgggccaaga

SEQ ID NO: 230171 - DNA, 122 bp, Homo sapiens
gcaggtcgttattccagcctctaagcgctttacagcgccagatggctcgcgcacgcgctgcgtcttagtataggtccttgttaatagttagaagtgctgttctcattgatataggaaaataa

SEQ ID NO: 230172 - DNA, 122 bp, Homo sapiens
catgctcccttcccattagctgaataaatcataaagtcggctcagaccacccaaggagtgcgaccagcaagccacaggcgatgcctacagccggttatttcttttcagaatctacaggggga

SEQ ID NO: 230173 - DNA, 122 bp, Homo sapiens
tctgaaattggaggatgctaatgggcaagaatcaagagaaaggtaattcagagacgacaacgaagtgggaaagaaattacagggtcaaagcgaaagaaaaccaagctgcttgggtaggaagg

SEQ ID NO: 230174 - DNA, 122 bp, Homo sapiens
caacctaaattcctgagtcttaaattgcagggactgacctttggagctcctgcctgttaccgtcctctctggacgcttttattgtaccagggcgatccccagcccaactgtaccattcgagt

SEQ ID NO: 230175 - DNA, 122 bp, Homo sapiens
gcttatcggtctgcggcgagccggagaagggggcggggcagcaagccgcaggtccctccccgctccgctccccaactcaggccaaaacgcgttccggaggctttgaacccctcgaccgtgca

SEQ ID NO: 230176 - DNA, 122 bp, Homo sapiens
ctttagcgcttcctgagcaaagtttgaacgcctctcgagtccagttggcttatgcgcatgcgtttctctggtgcaggttctcaccaaatccagaagcggcgggcatttgaaatgatgtaagc

SEQ ID NO: 230177 - DNA, 122 bp, Homo sapiens
gcagttgctggtggggagcggtgcctggcgggtgtcgtgtgtgagcagctgtgcgcagagcggggtggcggggtgggtgtgggtggtccagccccacgcccagagccccctgtccctgctgg

SEQ ID NO: 230178 - DNA, 122 bp, Homo sapiens
cagcaggagctctgttcccttcacctccagcttggtttgagggatactgatgaaggaaaccgggggtttcccgtcctgcgcggagagcctcggcgcccaaaatcgaaaggccgggagttgtt

SEQ ID NO: 230179 - DNA, 122 bp, Homo sapiens
tggaaatttaacgttaagtaaaggccttccccagtaaaatgtggctgaccaccatgacaccgtggccccattactgtccccatctaaatctcggaattctcaggcctagtaatcatataccc

SEQ ID NO: 230180 - DNA, 122 bp, Homo sapiens
atacggggggaacctggagatgtggggctcagccttcaagggagagaagatgctacacctcggggatttcagccaatcagtagagagcaaatggcgagtatctcctgtagccgaaagcccca

SEQ ID NO: 230181 - DNA, 122 bp, Homo sapiens
ctgagtagggcgggcgaggaggcagccaaggcggagctgatggctgcgccgagggcggggcggggtgcaggctggagccttcgggcatggcgggctttggggggcattcgctgggggaggag

SEQ ID NO: 230182 - DNA, 122 bp, Homo sapiens
ttaagtataaaccacctgcttctgacagtagagtttattacagttaataccagacactgccgcactgtctatctcagctcagtgtctggccatattctttttttttttttgaaatggagtct

SEQ ID NO: 230183 - DNA, 122 bp, Homo sapiens
ttgatgacgttgtcccgcatgtcttcatcctcgtccgagctcaggtggctcttgtggtggcgcctgagggtgaggatcagcagcaccagcactgcgagggggacagagggggcaactgaggg

SEQ ID NO: 230184 - DNA, 122 bp, Homo sapiens
ccaggtcttcaagccatacaattccatattcaagatgattctttctagattgggggctaacggtaatggttataaagtattttgttaatgactcagcaaatatctattacatctccttcatt

SEQ ID NO: 230185 - DNA, 122 bp, Homo sapiens
ggtctgctgtttttgcccgtggccttaactcatcaggggagggtttctgcagcagaatctcgggctcagggttggcggttaacgagggagcagcggggtcttggggagggggctcgacaccc

SEQ ID NO: 230186 - DNA, 122 bp, Homo sapiens
gccccgactttctctgctgtcaggccgggaaaaagtgtccgaacgcctcgtggactgcagcgggggaaatgtcccttaaaagtgcgacgaagtggggaagaaggtgagtggggactgttgtc

SEQ ID NO: 230187 - DNA, 122 bp, Homo sapiens
gttctaagcgtcttacacatattaaattatttaatcctcacaacaactttatgaagtgagcgcaattatgagcccattttatggagcaggaagttgaggcagggttttaggtagcttttctg

SEQ ID NO: 230188 - DNA, 122 bp, Homo sapiens
cctcactgtcattgcagcaggcaggacagcagacggtcacagcagcagcacaagggatggcgctggccagaagtttcaggagatttggtatctaggcctggatctgccaaaaaatcgctggg

SEQ ID NO: 230189 - DNA, 122 bp, Homo sapiens
cctgtcgccttgcaagggacggtgtggggcttgccgatcttgctccttcagtagcctctgcgcacggggacaatggagagcttggccaggatgatggccccacggatggcggtggccacctc

SEQ ID NO: 230190 - DNA, 122 bp, Homo sapiens
cgtgagccgtgtccagctgccagggccgggtggtcctgtgcaggccgtgggtgcggtgtgcgctgtggctgatggctgagtggcagcgctgctcttacataatcagtttctctcctcctttc

SEQ ID NO: 230191 - DNA, 122 bp, Homo sapiens
tggaggctgcaggctgcacgcagccatctgggatggggaggtgaagccttgtgccaaggacggcaggccagcagagggcagatcctggccctgaccccctcgggaagtggtctcagtcctgg

SEQ ID NO: 230192 - DNA, 122 bp, Homo sapiens
gctcatgaaagctgtgggaagcgacggtgggcttcctttgtctaagcatgttaatttttacgcacctggtgtatcacgtgcaggattgatgttgcgttcacgggaaacctgacctcctttaa

SEQ ID NO: 230193 - DNA, 122 bp, Homo sapiens
gcgcgcgtcgaattaacgccttccaaccgtttctttaatttaaacgtaacgggccacttgcgcatcggggcgcgcggaggtggacccagtcgacctcccctgcagcgcgggcggcgcccagg

SEQ ID NO: 230194 - DNA, 122 bp, Homo sapiens
cgccgcctctggcggggatgctgctgccgctgccattcctcgcagaatggcaggtcccggcggctccggaggcaactgtcctcagggggccccagctgactgagcaggtctgctaggtctgg

SEQ ID NO: 230195 - DNA, 122 bp, Homo sapiens
cctgaagggggaacggcacagcatgcaggtgctctgcccacaacaagccagaccccttcccgtctcagccctggccttgcccaccccgttagacaagttggtgggtatcctcctggggatag

SEQ ID NO: 230196 - DNA, 122 bp, Homo sapiens
cgatgaggtgcaggtgcagggcgttctcaaccaggtactcggagttgcgccgctgcaggtcggcgtgcgccaggaagtcgccggcctcctcgctgctctggtggaagctgtaggcgtggcgg

SEQ ID NO: 230197 - DNA, 122 bp, Homo sapiens
caagggaaaagatgtctttcgggtagtctccttgggcgtgatctgtactattctcagactcgccttccttagaaagaggtggctgtggagtataatccagaatcttgtcatttaaatctaag

SEQ ID NO: 230198 - DNA, 122 bp, Homo sapiens
cacctggctcccgctgctccgcaggtgcggtgaaggctaatgtcgaatttctgcagcaatcggagcagcccttactccagttacattaacaccaatctcggtctcccactagggctttataa

SEQ ID NO: 230199 - DNA, 122 bp, Homo sapiens
ttcggtggggaaggggaagtgtcaggagtcccctgctgccacccgccgctcacagagcagcgcgcggcccccacgaaaccgtcgccgccgccgctaccacccctgccaccgaccgccgcttc

SEQ ID NO: 230200 - DNA, 122 bp, Homo sapiens
ggtttctggctgaacttgttgggcactgggcgatcctagtgggggttctgctcgctggagcgagaggaccctctggggcgtgggaccggcggtggcctggacgtcagcagaggaggaaagtc

SEQ ID NO: 230201 - DNA, 122 bp, Homo sapiens
gagacaaggagaaacgaaaatgtccaacgtattggagacctgcccccttacacacatgcacgcacgctcacacacacacaaccagatggtccggatgttggttgagttttgctctcctcact

SEQ ID NO: 230202 - DNA, 122 bp, Homo sapiens
cggtgctcacaagggggacattcatcctcaggctggtggcaggggacagcccccatcgcccgcagagcgcactgtgcaaacatgagcctcatgtctattaagattggctttttcagccctca

SEQ ID NO: 230203 - DNA, 122 bp, Homo sapiens
atagatgggaaacaaaagcccagggagaagcagggtctgagctggaactccttcctttcccggggcttagtcacaagaaggcttcatgcgtatgcagtactttagtgtcgtctggccttctc

SEQ ID NO: 230204 - DNA, 122 bp, Homo sapiens
tggggagggagtcgggggatttggggttgaggacatggccaggctcaggtcctgggaccccgaccccctccccaaccccaggactcagctggagttggaggctgggcataggcagctctggg

SEQ ID NO: 230205 - DNA, 122 bp, Homo sapiens
gactccttcgcgggagtgcagtcaagcacggctccccagtgcgagcacgactcggctgtccgtaattcctgccttgtgaggctctgtcaggcgcagcgattagacggctgcctgcttaatga

SEQ ID NO: 230206 - DNA, 122 bp, Homo sapiens
cgtgtctttacacatgaagccagaggagtctttctcccctataattaaaccctcccggtgcgcttccttaactggatgtcattctgtgtgcgttgactatgaaggggactgtgctttgctct

SEQ ID NO: 230207 - DNA, 122 bp, Homo sapiens
cacctgcgtctggaggctggagcacatcaaaacctgcagggtgggtgatggcccaaaaggcgacgtcccggcccccctgcagtcttcgtgcctctcacacgcgccagtgcccacacttatca

SEQ ID NO: 230208 - DNA, 122 bp, Homo sapiens
acgcatcttctgttccacaccgaggggacagaaaggagaaaagtgacaaagaacgcggggcggggggaattaaaacaaaatgcgctcgactaaaaaatctctcatatcctgcatattccaga

SEQ ID NO: 230209 - DNA, 122 bp, Homo sapiens
ggcgcgccttcagcttcccctcggcttctcggaactagctctctgcattcggagccaaggcgatgagggtgtctgctttgggacgcaaacttccagtagtggtggaagtctgggaagggtca

SEQ ID NO: 230210 - DNA, 122 bp, Homo sapiens
tacagatgagggaactgaggatcagagaggtcaagtgacgtgccctggtcacagggctaacgagtggcaaggcttgaagtgacagcaggcagccggatgtctgtgacactgggcagacgggc

SEQ ID NO: 230211 - DNA, 122 bp, Homo sapiens
gcatttctcaaaacagggaaatagcagcggtgttgactctacatgctaagtttgtttagacggggtggaactgtccacccacacaatttggactgatgtgccgagaattaaatacctctgct

SEQ ID NO: 230212 - DNA, 122 bp, Homo sapiens
ccaatccctccgacatccctgcgccggggcccttccctagcgctccgggaaagcgttcgccgcaggcctgttaggggcccaccaataccgtaacaccgttcccgtcctcttcctcggcaccg

SEQ ID NO: 230213 - DNA, 122 bp, Homo sapiens
acattttaatctggagacgattacagtccattcttggaagggataaaggagattagcattcgtgaggtcagctctgacagtgtccctttgtgcctgcgttcctgacctcgatcaacttctcc

SEQ ID NO: 230214 - DNA, 122 bp, Homo sapiens
ttcccccgtaaagttgcatttcctctcaagccagaatcttcaaaccagtataaatcaattcgtatttcctgccatcaattaactgttacaattttcgttacaactactcattaaggaatcta

SEQ ID NO: 230215 - DNA, 122 bp, Homo sapiens
gtagagcacagcaggcctgtttcccttttaggtcccctcccccaatgcagagggacttcccgccaaagctcttccggttttcagtctggtccgcagaggttacccataaaagaaagctgcca

SEQ ID NO: 230216 - DNA, 122 bp, Homo sapiens
gttttggctcttcagagccctctaccaataaggcacctgcaatagtagataatttgctaccgcagccttagagagcagttcttagaggtctgctggtgcttctcttgacaaagcacactttt

SEQ ID NO: 230217 - DNA, 122 bp, Homo sapiens
ataaagcagtaatactaattaatactgaacgctcactgtggactaggcgtgtttacgcatcgccccttctcatctctgccccgacctcagtgtcattgctagtctcatccccgctttacaga

SEQ ID NO: 230218 - DNA, 122 bp, Homo sapiens
atgacttctcaccttcactaacactctcccaacatcccatccttcagtctgtttcctactcgttcccaatcaacatttctaaagaagagtatacagcctgctgggaaagctctgctttttcc

SEQ ID NO: 230219 - DNA, 122 bp, Homo sapiens
tacacggtcggggcgggcctagtaggcgcttcaggcttaggggcggaacagcgcgggccgcgcgggcgtaggcggggtatctggaggaggcgcagggaacctggagagggtccagccctcag

SEQ ID NO: 230220 - DNA, 122 bp, Homo sapiens
tggctgcataaagagcaagagggactgtggcagggaagtgccacgcagatgcagagagcacgagagtgaggcctggagaaccaggaggggcttccttgagaagtggtgtttgagccactgaa

SEQ ID NO: 230221 - DNA, 122 bp, Homo sapiens
ctaccgtgccacgatttgcgcagagctgaagtagtccctgaccatcgaagaggtggcccccgccccgtcgggcctcacgaggacctgtggcagattccagaaaaggtctccctacaagaagc

SEQ ID NO: 230222 - DNA, 122 bp, Homo sapiens
ggatgttagagccattacccccaaggcgaggctggtgatgaaatatgaggagtgggaagccggtggggctcagggcttgttttctaggctgcttcttttagaaactgctctcatgtgtttac

SEQ ID NO: 230223 - DNA, 122 bp, Homo sapiens
ggaggaggaggcctccaggggcgcggagctctggggatgggcgtcgggccggcagtggtgcggctcactccgtccctgcccacctgcgacgggatcccccgaccggcacgggccacgccgag

SEQ ID NO: 230224 - DNA, 122 bp, Homo sapiens
gactgctactttcctcatttttaggttgccggcccccttttgtggacctacaatcagccccgcagacacccatttattttcctccatcaatgtttgggccgaggcctccctggagaatcccc

SEQ ID NO: 230225 - DNA, 122 bp, Homo sapiens
tactgagaatctcagagctctaactgcatatggggtaagatgaattcaatgcctttgcatcgctagagaaggctcattaaaatgggagtctaaatgtggtatgtgtcctaaagggtaaactt

SEQ ID NO: 230226 - DNA, 122 bp, Homo sapiens
cggagtctttcctgaaggagggcggggaggagtaagtggcgacagtttatctgaagctggcgctgggttcattaagagacctggtgcagtttatctgcttcttgtccacggagtcagctgct

SEQ ID NO: 230227 - DNA, 122 bp, Homo sapiens
agcctgggtttccccaggcttgagcccccagccactcacagcgatagcttgtgaagcagacgagcaggaggtggaaggcgagggaagtcccaagggctgcactgccgcaggtcaagctgagg

SEQ ID NO: 230228 - DNA, 122 bp, Homo sapiens
gctggtcttaggggtacagttaaaggcaggatgacagctattctcctgctcatctcagagcgctgccgccccctcatgccggtcgcgcaaagaacacagcttttaaaaaacacgtgccttct

SEQ ID NO: 230229 - DNA, 122 bp, Homo sapiens
taaacatacttctaggagatgtctccttttatttatacaaacatacacaccgaactggaacgtaatttgaagttgggaggtggaaaactaaaggtcaaaaagggaagaaagcaaaaacgtcc

SEQ ID NO: 230230 - DNA, 122 bp, Homo sapiens
aggtgccgatttattttgctcagaaggcagagggtgtttgctgagtgtgacaaagctgagcggatcaagttgatgcaggtggaggctaggtcagctttttttacacaaagggcattagcaag

SEQ ID NO: 230231 - DNA, 122 bp, Homo sapiens
gcatgataattgagtaatggagaggccgacaaatagctacaaacctatcaaagcacatgacggccaggagaagacattctgtggaacccaaggccaggaaaatgaaaagctgggccacacag

SEQ ID NO: 230232 - DNA, 122 bp, Homo sapiens
tttattgtgctgaatttgatctctccagaaaaatagtggcgtctgtgcagacaggcagtgcgacttgagggagtgtgaggaccccacggagtcagacacagaggggcaagaacagctcttgc

SEQ ID NO: 230233 - DNA, 122 bp, Homo sapiens
ccaccgtgagagggagtgcgcaggtgagtgggtgcaggagccacagcaagcccttttgggcgcctgcaggagctaactccgttcaggcccctcagcagcatccaagcaggatgcatgcaact

SEQ ID NO: 230234 - DNA, 122 bp, Homo sapiens
aggcgggacaaggcttgcttgcgtcctccgtagattggcaggtcactgggacggccagcgcgtgcgcactggcctgtcagcggccggtggaccatggaggccgcaaggcccttcgcccggga

SEQ ID NO: 230235 - DNA, 122 bp, Homo sapiens
gaggaggggcgaggcggcgcggggagccctgggtcccgctcccggatccggggccccgcgcgcacaccagcccagagacagcctcgcagacactcgtaggcgcgcacgcgcaccctctcccc

SEQ ID NO: 230236 - DNA, 122 bp, Homo sapiens
aattgaagaactataaaacaatataggccgggcgtggtggctcacgtatgtaattttcagcgctttgggaggccgaagcgggaggatccctcgaagccaggagttggaggatcccatgttgc

SEQ ID NO: 230237 - DNA, 122 bp, Homo sapiens
atacacataacacattctgttctcaaataactcataatttaattgatgaaatatgaaatacgtgaaaagttactggttacagtatgtgtggcagaagtcagatgagggagatatcatttctg

SEQ ID NO: 230238 - DNA, 122 bp, Homo sapiens
cttacatttatttctcttcatgacaagtgtaaactgttaaggttaagtgggtggggcaaccggaagtaattactaaggccagtggcatttttgtggtttaataaaggcagaagctaattatt

SEQ ID NO: 230239 - DNA, 122 bp, Homo sapiens
cccttccacacacccttccctgccggcccgcccctgccctccccctcttaccgcgcaccccgctgagtctgctctgccttgacctgcgacagtgcccagtgacccaataacctccttcctgc

SEQ ID NO: 230240 - DNA, 122 bp, Homo sapiens
tttaaatctataggtatgatccatcccatgacccctttttaaaaagacatagatttgaatcgatgttgctgttttaacaggaaaaactactctggctgactgtcttatatctagcaatggaa

SEQ ID NO: 230241 - DNA, 122 bp, Homo sapiens
ccccacagacacacgcttgccctctcgtctcccttgcacccattggactcgacgccgcagcgtgtgcaaagaggcccagactgagtctctgtatgggattctcctgcggggttgggagagac

SEQ ID NO: 230242 - DNA, 122 bp, Homo sapiens
ctggagatcgcgcttcccccaaatctttgtgagcgttgcggaagcacgcggggtccgggtcgctgagcgctgcaagacaggggagggagccgggcgggagagggaggggcggcgccggggcg

SEQ ID NO: 230243 - DNA, 122 bp, Homo sapiens
attctgcgtagctggaatcccacagtgtccggcctttggtgcctggtggctcacgtggcacggagggttcttaaagctcatcgtgccgtagcctgcgccagcctcctcccctcttactgtcg

SEQ ID NO: 230244 - DNA, 122 bp, Homo sapiens
ctcattccgcagatactgggtgagtgcctgctgtgagccgagtgctgtgctaggagctggcggtcagggaggagcaggaacgatggatagaatgaatgagcgcgtggaggactcggccttgt

SEQ ID NO: 230245 - DNA, 122 bp, Homo sapiens
tcgtctacacagcaattgcacacaactcctttgaggttgttgtttttcatccatggccttcggttcacgatgcccatcacgcccccagtccaggaggattcattagacaatgtctgtgaagg

SEQ ID NO: 230246 - DNA, 122 bp, Homo sapiens
ccatgcgcctgcagtgctccgcgcgctcttgacgtccggagcccctggagtaggcgcttccggccattcatactgcagtcggtcagtgttcggttgaaggattctgtgtgctgtcggaccca

SEQ ID NO: 230247 - DNA, 122 bp, Homo sapiens
tagtgacactccaccggggttagttatttcgagtttacatgtcacctgcagctggcaaggcgaccggaaactattttgatagctgatttctgcaacacacccgtcagctgttcatatcggca

SEQ ID NO: 230248 - DNA, 122 bp, Homo sapiens
actacaaatcccataaagtgttgcacgtctagggcctttggggaacgaggtcggccccagcgcaggcgcggtggcgcgagttggactgtgaagaaacatggcggccgcgacgttgacttcga

SEQ ID NO: 230249 - DNA, 122 bp, Homo sapiens
cccacagtcacagcacatgggaaatccccggggtcccattgtggaggcctgaccggctgccgcaaagcccagccccttggcagggagcccagaagccgctgctcaaacccaggactgccagg

SEQ ID NO: 230250 - DNA, 122 bp, Homo sapiens
gggccttttggggcgccttttaccccagagctcagaaagctccgggcagcggggtggtggcgggatggccagtagccagggcccacctggcggcccgccgggatgtggaggcccactgggtt

SEQ ID NO: 230251 - DNA, 122 bp, Homo sapiens
atattccttaaactctgcttctcagctgtgatgcaaactcactggatgtgcagtgtccaccgggtcccctctgtatcctctcaatggaatttttggggggcaaagggaatggattctaatgt

SEQ ID NO: 230252 - DNA, 122 bp, Homo sapiens
tttgatattgccctgaggattaaatgcaataatgcatgtacaggaacttctgacagcacccggcacatacaagttcagcacctattactactgttattaatgttattattcactatgtaagc

SEQ ID NO: 230253 - DNA, 122 bp, Homo sapiens
gcagcaacccctaaactgtctccctcctcctttaaaaacattaggttaaaaaaccaagaacgtgtaagaaaggaaaagcaaacaaaaaatcttcccaatcccaatttccagataattcctat

SEQ ID NO: 230254 - DNA, 122 bp, Homo sapiens
ttacaggcgtgaaccaccgcgcccggccctgaactctattttgaatttcctcaaggtatacggaataaggtcaggagaaaaagaataaggatctgatgcattcagatttaactaactctccc

SEQ ID NO: 230255 - DNA, 122 bp, Homo sapiens
caggaactttaaaggatcagaaagagaaaacaggttgcatgaaaggaagagaaagaaaaccgaatgcccgcttttcgagagcactgcaaaattagccccgggacccggctgcacaaaagtgc

SEQ ID NO: 230256 - DNA, 122 bp, Homo sapiens
ctggcgggaaaacctggctgggagtgccggcggctgagagctgcggggcagcccctgtcacgtagcccttctaggttcctgtgtatggcggattccctccagtttctcccgctggcgggctg

SEQ ID NO: 230257 - DNA, 122 bp, Homo sapiens
gcagtatcagaaacagacacaaggtggagctccagtactgtagtttactacagcacgagacgccacaagtaaagcagacaaagacacaccagagggagcagacagatggacagaggcaaacc

SEQ ID NO: 230258 - DNA, 122 bp, Homo sapiens
tgctatggagtgcatgcatgcctgtgtgtgtgtgtgtgcgtgtgtgtgtagggaggcatgcggggatggctatgtctggtgcctaaaaccgcagcactgatgtccagaatgattaatacaag

SEQ ID NO: 230259 - DNA, 122 bp, Homo sapiens
ctttcaggcccttcagttcaaactcagtgagatgggtccatttggcagagacctccgtggcgggagagccggtgggggtcttggggtagtctacggccaatgtggtggacttcacactttcc

SEQ ID NO: 230260 - DNA, 122 bp, Homo sapiens
tgggcacctgttcctcccgcgacctttgtgcccacgtctctccctccagtacctactgcacggccccccacgtccgcctcctgccattgccagcaggtgccttgcgcgggtacctggctgcg

SEQ ID NO: 230261 - DNA, 122 bp, Homo sapiens
ggagctgttcatcgaacagaaggttagaggctagggaggaggtgtcttattaaaacaactcggctcagggagaattcctatggtggatgtaatttgggttggcaggatattggagtggggaa

SEQ ID NO: 230262 - DNA, 122 bp, Homo sapiens
tggaagtgtcgtgttcccagccaggctgggagtggtcgctggcgaggcctggcgtgggcccgcggtgtctgtcagggtgccctgggccagccccgctgattcgatttagagctaacgagagt

SEQ ID NO: 230263 - DNA, 122 bp, Homo sapiens
tctcccctaaggagccctcttttcctgcccactttccagaacgtgtatgtaaatataaaccgcatcatgtcggtggccaatcgtctggtggagtctggccactatgcctcgcagcagatcag

SEQ ID NO: 230264 - DNA, 122 bp, Homo sapiens
cctggtcaccatgcgtcctgcacagttaccatccgtgcccacatgctgccccggggtcgccgtgtccagatgtggctgggtcttggtgtccccgctgcgctcgtccctcctgccaccaccgt

SEQ ID NO: 230265 - DNA, 122 bp, Homo sapiens
gcagacaggggcagaaaccgggaatgatgggaaaatgcgacacaagaagaggttctgagacgaggccagctatgccaacagcctgctatggaggaattctgtgcatgagaactaaaggggca

SEQ ID NO: 230266 - DNA, 122 bp, Homo sapiens
acttacttttaaaagttccctgaggtgacagcccagcacttttgttggcattcccctcctcgatggtgagggatctgaggaacgtttggcaacacttttagaaaagtggctttctactttca

SEQ ID NO: 230267 - DNA, 122 bp, Homo sapiens
ttagcaccaggcgcgaaccagacagctgtggcctgcctggtagaaacgaccctgcgataacgcagttgctagtacagctctcggcggaggagccagggccgggtctccaggccgggaggggg

SEQ ID NO: 230268 - DNA, 122 bp, Homo sapiens
ggggccgcctgggaaccccgcgtcccgcctggacacaccgatgacctgcagaggccacaccgtgggccacctcagctggccactggcacagccttgccctctggggccccgttctcgcacac

SEQ ID NO: 230269 - DNA, 122 bp, Homo sapiens
ccttctcctgggccctgctaaacttcttctgcacctgcttggcgaagaggccggccgcgccgcctgccttgccctctgccatcctgccaactccctgggggccgccgccctggccccgcgcc

SEQ ID NO: 230270 - DNA, 122 bp, Homo sapiens
gagggttcggccggacgctctagaatcccggaggaccgggatctctgtggttggccgtgacgggcaccctctaccggggatgacacattcccagagctcctgggaccaagcaaatggcggac

SEQ ID NO: 230271 - DNA, 122 bp, Homo sapiens
gtgtttccggcgtcggcggccgcggccggggacggtgtgagagcggtaagatggcggcggcggcggtggtggagttccagagagcccagtctctactcagcaccgaccgggaggcctccatc

SEQ ID NO: 230272 - DNA, 122 bp, Homo sapiens
cccgcccaggcgtgcagctcaccgcgtaggacatgacgaggttgatcatgccctccttgtcgtccccctgcctcccgctcaggctgtaccacttgtcctccaccttgccctgcctcagggac

SEQ ID NO: 230273 - DNA, 122 bp, Homo sapiens
gcccagccctgcgccccgcaccatccgcattgagtggctcaagtccaagagcaccaaagccgctaccaagttcatgctcaaagagaaacctcccaatgagaactgtaacaacaacagcccag

SEQ ID NO: 230274 - DNA, 122 bp, Homo sapiens
tatgtacttttgctgcttttaaatttttttaagtaattgaatgtatcattttctctcttacggcatttgggtattgctttataaaatttcctgtgctacagaatgtatgaggatttaatgaa

SEQ ID NO: 230275 - DNA, 122 bp, Homo sapiens
gtcggggagaggatccccaggggctgggtgtctgcagggctccccgtaactcagaggggccggcggccgccgcccgaagcctgagcttttctcagcagatggagaattcatttttaaccccc

SEQ ID NO: 230276 - DNA, 122 bp, Homo sapiens
ggccatcctctggatttgtgggcctgagagtgtgtgtgggtgtgggtgcgcgcgtgcgcgcgcgtgcttttgagaaggcatatgctgggtgtgtctgtctgtgcctatatctttgtttgggt

SEQ ID NO: 230277 - DNA, 122 bp, Homo sapiens
ttgtgtttggggaaactggggcacagcaagattcgttaacttgtccaatgtaagtgacagcgctggcttaagagagaatcaaaagatacaaacctgagctaacagaggaaatgggatgagca

SEQ ID NO: 230278 - DNA, 122 bp, Homo sapiens
gtatcttgtccaaaggaattaggggtgcgagggaggcaagaataacacaacactctcagccgggcccccaccaaccagagacaaccagtgttcacatttttagtacaattcttccagatttt

SEQ ID NO: 230279 - DNA, 122 bp, Homo sapiens
tagtgagggaaacaagagaggggaatgttatgaatacctgaagttacacagtccttctctcgcaaaggcagaggcgtgctgagtgcagtgtaagttcaggaaacctgttcctacatgtagtc

SEQ ID NO: 230280 - DNA, 122 bp, Homo sapiens
gcaaagagcaggagcaggtgtgtgagtgccggctggtttccatggtcactgagttgtagccgggacagagcgagctggctcttaggactcagggaatctgtagcctgggttatctttcccag

SEQ ID NO: 230281 - DNA, 122 bp, Homo sapiens
agctagacttacctccccctcctgggaagtaatgcgcgacaagaatttaaactcttaaaacgattagcagcaaaggtctcatgtgcttttttttaattatcattttttaatcgaggtataat

SEQ ID NO: 230282 - DNA, 122 bp, Homo sapiens
acaaaatcctgattgtgaatcctgcaaaccagcagcaacttatagaaggcagcagccacacggaggaaacaggaaagaaggacaggggattatttttttaaatctgatgcaacttgcattgt

SEQ ID NO: 230283 - DNA, 122 bp, Homo sapiens
ttgtgtcttcaccacttactatttgaaaccttgagcaagttacttaacttttctatgcctcgtttacttcatctgtaaacggaaataataagagcacttattaatagtgctcgcataatagt

SEQ ID NO: 230284 - DNA, 122 bp, Homo sapiens
cggattcgttagttaatggcagcatcatctaccaatcggttgtcagaagcgggattctgccgcccaatagcggtgcgccagtgggtaggtctagcagtggcgcagcaatagagcgctccgga

SEQ ID NO: 230285 - DNA, 122 bp, Homo sapiens
atgtcatccttcaaatattcacagcaacagcatgtttctatccgcatgacagtccacacccggcagggttttctcaggccatccagggctccctcctttggtgacactctcctgggcctctc

SEQ ID NO: 230286 - DNA, 122 bp, Homo sapiens
agagtttttgactggcacaaaaggtttaaagaaggacgggaagatgttcgagatgatgcccgaagtgggcgtccagtcacccaccgaacagatgacaatatccagaaggtcaaggacttggt

SEQ ID NO: 230287 - DNA, 122 bp, Homo sapiens
tcctacaccttcctctacctgaacctttacaggagagtgcagccatcgtaatgcatttaccgtagtgaagaagacagctgggacagaggaagctgtattatggctgtatcccctgccaccag

SEQ ID NO: 230288 - DNA, 122 bp, Homo sapiens
aaactcatggaagacagcagacaaagcagccccagggataggggagattccagagaggcccgtgaccaggccacagggatgctggggctgtaaaccaaaagccactggactctgtaaaccca

SEQ ID NO: 230289 - DNA, 122 bp, Homo sapiens
agaattgacaagaaaagaacagacaccgttgcagaccaaggcatgcctgattgcacgagtcggatccctgggacgcagcttccactcctgttctaactatttgtgattgaaaaaaggaaacg

SEQ ID NO: 230290 - DNA, 122 bp, Homo sapiens
ccagcgccctgcgtccgacacccctgcccggcctgcctctcggcctggccgccgcctccgcgatcgcagcggttttactgccccggatgcctctaggacgcagccagaaccgtagctcagtc

SEQ ID NO: 230291 - DNA, 122 bp, Homo sapiens
ggacagccggctgggtcattgcgcccgcctcgctcggacaccgcgaggactgagggggggcgatcagactgacctggcgcaggatctgcagccggctgttccctgggagttcctctgggttc

SEQ ID NO: 230292 - DNA, 122 bp, Homo sapiens
ggccagctgccggtgtgggcctgatggtggggtttggggccccagcaaatgtttccttaacgtgggaccttcagaaggctctttcaggctgggcgcggtggctcacgcctgtaattccagca

SEQ ID NO: 230293 - DNA, 122 bp, Homo sapiens
gttaaaaaagcaagaggcacccccctccagatgtgccctccttggcacctgggctgtaggcggcgtctctagctctggcctaggagcctcttagcgggaattgctcctgacccatctctggg

SEQ ID NO: 230294 - DNA, 122 bp, Homo sapiens
tcatggctaatggctcagaaagttcttttcaaggttgtagaattcaaatgttatccatgacgggatatgaaatccttacgatgtgctttgctttttttgtacatcaaagcattaagcatggg

SEQ ID NO: 230295 - DNA, 122 bp, Homo sapiens
ccgcccccggcccgtctcgcgcttccattggcccgccgcggcccccgccgctgtttgtctcggcttccccgccacccattggcccgctcgggtcctcccaggaagtttgaaaaaaaaaaaaa

SEQ ID NO: 230296 - DNA, 122 bp, Homo sapiens
atacatgtggcaacacaggtaaacttcacagacataaaagttgaatgaaagaagccaggccgaagttccatttatgcagagttcaggaacaggcaagactaattgacaataatagaagttgg

SEQ ID NO: 230297 - DNA, 122 bp, Homo sapiens
ggaagggaagggcagggaaggggcgcgcacagcctggcacctgctgtgcaccaggggagacgcgcggcgctccaggtggagtcggcggcggccgagctgcgcggggctgtgcggggctggat

SEQ ID NO: 230298 - DNA, 122 bp, Homo sapiens
ggatctctagacttcagcgcagggcacctctgctttcggtttctgtctggctctacgtgccgtgggggattgagaggcatctctggccaggccaagggcaacccggatcccggatctgggta

SEQ ID NO: 230299 - DNA, 122 bp, Homo sapiens
gtccccgcacgtccagagtctaaaggagtggcgggggcagtatctgaacagcccgtgcaccgcctcccgcggcccttttcccctccctcgcggcctgggcctgacttggcaggtggccacga

SEQ ID NO: 230300 - DNA, 122 bp, Homo sapiens
ttggcacaggactgaggatcctctcctccagaaaagccccctcgaggaaataaattagtgcggttctctttgacccccaaagacaagacaagcacttatttttattttcagaagacaaaaga

SEQ ID NO: 230301 - DNA, 122 bp, Homo sapiens
gtttgtccgggcggggtctatgcccctccctctcgggggcaccgccatgctgtcgttactcggccctcccccgccatgggtcgcaggtgggtgctcagcacctcccagatcacagctgtgct

SEQ ID NO: 230302 - DNA, 122 bp, Homo sapiens
ggggcatccatggcacaactttgggaagctgactgggcttcctcatctttaagaaagcagcgggctgggctgctcccagcagctctggctctgcttccgttcattctctctgggtctgcctt

SEQ ID NO: 230303 - DNA, 122 bp, Homo sapiens
gctgcttctggaccttccagggcccatgcagggtgagggaaagggtagaggtcttttcaccgagctgctgctggttgcagttctttctggtgcacattggctaatgccagttggtgtgtttt

SEQ ID NO: 230304 - DNA, 122 bp, Homo sapiens
acattctagagaaatggaatattggcaaagagcttaaaaattaaacaaaggaattcatggcgttgacaggagaaggtgcctctgagctttcgtttccttcagccggctctttctctttctta

SEQ ID NO: 230305 - DNA, 122 bp, Homo sapiens
gctgttaccacggtgaggtctcagctcctgcctcttccttgtctgtcgctctgaagaacgcggcaaaattggcctagtagcccctctgccttctgaatcaatggtgcaagaaaaaaaatgtt

SEQ ID NO: 230306 - DNA, 122 bp, Homo sapiens
ctcaagccgcgcaggcgcccagggcaggcaggtagcggccacagaagagccaaaagctcccgggttggctggtaaggacaccacctccagctttagccctctggggccagccagggtagccg

SEQ ID NO: 230307 - DNA, 122 bp, Homo sapiens
agggaatgagtaggtgaacaaacgagtgagtttttcgcctcactccctggcactcggcaccgagggctccgacaggctggtggccagggctgaccagccagagtttcatctaaaagcctcga

SEQ ID NO: 230308 - DNA, 122 bp, Homo sapiens
gtagtgaacgtggaggtgtgcgcagcggagtcagaggggctagatccccagcatttcccacggggtcccacctagcgcgtggatgggagcaacttcatcactccaccgagggcagggaaaga

SEQ ID NO: 230309 - DNA, 122 bp, Homo sapiens
cgcccgccaagggatgggcagccagagcctgtcgactgcggctgcgcaggtatgctggggcggggcttcaggtcaccccgcccatccccagcctacgcgaccattgaacagctgccgcccaa

SEQ ID NO: 230310 - DNA, 122 bp, Homo sapiens
catggtgctcgtgggccagtgtgtgttctaggtgggcgtgggctcggcctgcacttagcgcggctggcggtgcttgctgggcctgatcagagactgggtcccgtgcgtggaatgccattccc

SEQ ID NO: 230311 - DNA, 122 bp, Homo sapiens
agaatgatatgagatgtttcatgtaaggcctttactcagtacagttctagagtaaacctgcggtgattcattgtgtgttttgtgggcacacctgccttaacttcctctccagagaatccact

SEQ ID NO: 230312 - DNA, 122 bp, Homo sapiens
ccaccacgtccacactgccacgtcccctcgccccgtccccactgccacgtcccctcgccccgtccccactgccacgtcccctcgcacagtccccgatgccacgtcacctcgccccatccccc

SEQ ID NO: 230313 - DNA, 122 bp, Homo sapiens
tgagagtcgggagtgggagcgaggctattcatactcccgccaggcgggcgggaagaggggcgggacccaggccttaaccccttagaggtcagagagtggcagcagcctctgttcctgcttcc

SEQ ID NO: 230314 - DNA, 122 bp, Homo sapiens
ctctatacttgcgcccacagctaatacattctgtctatgcaagcccaggtaattggcaaacgtatatttattatatctaacatacattatatataattataaaaaacatatgaccttatcac

SEQ ID NO: 230315 - DNA, 122 bp, Homo sapiens
ggaatggagatctgtgagttgtggcagaaaggcctccacctcccactgaggcgtgacgggcggggaaagcaggtggcattgtgctgcctgagccaccgtgcgtggccccgtcgcccgggagc

SEQ ID NO: 230316 - DNA, 122 bp, Homo sapiens
gaggtggcattttttttcctccggggggggtccccgaggtggcctctggtgagggggaggcggtggtctgaggtctccgtcttctaagtcacctggaagtgctccccactcacttctagccc

SEQ ID NO: 230317 - DNA, 122 bp, Homo sapiens
gcacatgccggggccagggcaggctgccagctggtgagcacgaataggtggctggtggagcgcatgcagtgggaagggcagatggctccattttgatttgttagcaggccacttcctcggaa

SEQ ID NO: 230318 - DNA, 122 bp, Homo sapiens
gcgtccgcttgcttttctcaatagccaatgtaaactgaggtggacgtcagtatctgtgtccgcttgctttactcaatagccgacgtaaactgaggtggacgtcagtgtccgcgtccgcttgc

SEQ ID NO: 230319 - DNA, 122 bp, Homo sapiens
agagaccttcaccatagcgttcgctcaactccagaaccttccgacctccgctagttcctgcgggcctttgcccgcttcccggtgcaccctccccgggagacacctcagacccccgacagcct

SEQ ID NO: 230320 - DNA, 122 bp, Homo sapiens
ggtttgccttcgggggcccaggggaccctgagaagtctggccgtgcccgggcggtgagcgcggaggcggcccgccctgtgtccccgcggggcggagccgggttcggggccgcgctctgggcc

SEQ ID NO: 230321 - DNA, 122 bp, Homo sapiens
gggatggacctaatggctgcaaggcctgcgtcctaacgggcttgcagaactgccagcgcccggccctgcttctgtgtcatctctctgcctattcggggcgctcccaagtgcgggctagtgcg

SEQ ID NO: 230322 - DNA, 122 bp, Homo sapiens
tcttgtgtttatcatttttatgcacattatacctgacgggggcctgacatgtggagcagtcgcttcataaatggagttaaaagaatgctttgttctccccatctatgcccccattatgccca

SEQ ID NO: 230323 - DNA, 122 bp, Homo sapiens
cagtcttggatgagaaagtctgggtctcatagttgctggtggtggaggtgatgatctcatcgccatgcttgttgacagtgcgagtctgtgttgccgtcagctgcgattgttccttggtctgc

SEQ ID NO: 230324 - DNA, 122 bp, Homo sapiens
cacaagacatgcttcattctgggacaggtgaaagtgttgtaaagactgatgccggggtatcggctggaacaccactcagaaggtacaaagcttcctgaaggtctagtggggattatgttttg

SEQ ID NO: 230325 - DNA, 122 bp, Homo sapiens
cgcccaagcctccatgaagggacgctcgtacaaagtgaagtctgggtacaaatggccagacgggaaacgcgccgcgctcgctccgctgcactcacagcggcggcaggaagcctttttctcac

SEQ ID NO: 230326 - DNA, 122 bp, Homo sapiens
cctgtttcgagaagccagcttgcctgttttgcagttcttcactgcacacctagtgccttgcgccccaagagctgcgggccagccccttcgtagcagatggctacattcccccgactctggga

SEQ ID NO: 230327 - DNA, 122 bp, Homo sapiens
ataagataaaaagaggagaatcaagaaaagggtaaaaagaggtttcagggctacatgtcccggagctgcctgggaaaatcactgttcatagataagggcatggagaaaaataacaacaatgt

SEQ ID NO: 230328 - DNA, 122 bp, Homo sapiens
gttactgggttgcaagagccctttgattgttggagaggcccgataatgctgtcaagagctcggtggactgagcggcggccgagacgcaccagatctgcactaagtgtagctgacagcaaacg

SEQ ID NO: 230329 - DNA, 122 bp, Homo sapiens
gaccaggtcacccctgcccccactgtggcttctctattgttcttatcaaatgcagactcccgggatctcagcttcaaagacctcctctagttttctcagctttcatttcctctgtaaccagt

SEQ ID NO: 230330 - DNA, 122 bp, Homo sapiens
ggaagtagggcggaggcataggaatgaccgcgagagtggctgctttcatagctccgcttgcgaaactcctgcccggcctttgacaccgccacggctttcagtaatctggaaaatccctagtt

SEQ ID NO: 230331 - DNA, 122 bp, Homo sapiens
cgcggggccaggagcgcggcaccacccccgtaccgccggccgctctttgtgtctggaggccgcgacgcaacactcctcccggcctcgaggcaccgccccctcggtgtcccggcgcagtgggc

SEQ ID NO: 230332 - DNA, 122 bp, Homo sapiens
tctcgtaagcgtgggtgtgagacccattggggctgaatcagagaacatgtccttaacaaccgagctatgggtaactacaaaatctgtcactcagagaattcctaaaacatgcagaaactcca

SEQ ID NO: 230333 - DNA, 122 bp, Homo sapiens
cactttgcaagctgtggggggtgctgtctccccattgagagtccctggagatttgccccacgggttggggaatgacagcatgacccccacctacacaaggcagagacccttgttctcctgga

SEQ ID NO: 230334 - DNA, 122 bp, Homo sapiens
tcaaactcctgacctcaggtgatctgtccttcttgcctcccaaagtgctgggattacaggcgtgagccactgccccggcttggtttgttttttgagacatggtctcactctgtcgcacagga

SEQ ID NO: 230335 - DNA, 122 bp, Homo sapiens
gcacgtgcgtggagtggctccacagatacctggagaacgggaaggagatgctgcagcgcgcgggtaccaggggcagtggggcgcctccctgatctcctgtagacctctcagcctggcctagc

SEQ ID NO: 230336 - DNA, 122 bp, Homo sapiens
tagccgcaagccaatcaccgtgcgggcctagaatgagtgacggggaggcggtgcgggcgtcggaagggaatctccgggcggggtagtgcaggcgccgggtttcccgcggtccgagctggcgc

SEQ ID NO: 230337 - DNA, 122 bp, Homo sapiens
cttcgagtcccgctggctgtgcctgcccgggccctgaggcctcactgctaaggcagtgaccgcctactctgtggaggtcctttgtcaccctgccctggttaaaggcagcctgagggagggcg

SEQ ID NO: 230338 - DNA, 122 bp, Homo sapiens
aggtacctttgacaggagcgtgaccctgctggaggtgtgcgggagctggcctgagggcttcgggctgcggcacatgtcctccatggagcacacggaggagggcctccgggagcgacttgccg

SEQ ID NO: 230339 - DNA, 122 bp, Homo sapiens
tgcgcccacctcaacgccctccactttccttggggttagcactgcctgtgcttgtttccgcgttagccccaccccagcctacctccctccctgaaggacattcggctcggagcagccacctc

SEQ ID NO: 230340 - DNA, 122 bp, Homo sapiens
ggtggtgggagagatggtgagggtggaagctgccttgctctggagcgctctgagtgacggcgcgccgactggacacatactgtaaggaaagagaagaacgtcagtgcggggatgaggcccac

SEQ ID NO: 230341 - DNA, 122 bp, Homo sapiens
tggccacggctgcagcaggcaggggcagggcagagccctgagggcacatgtgccctgagccgccagcctggatgggtgaggagggccaacagaggcaggcaaaaccccacacctgagagaca

SEQ ID NO: 230342 - DNA, 122 bp, Homo sapiens
acgccggcgcctagaaagttgtgatgccccgggcattcagggtagcgcggtggggaagcccgcgcctctcggctcagactcaggccggccgtctcggggggcgcggcccagaccaccgacgc

SEQ ID NO: 230343 - DNA, 122 bp, Homo sapiens
agccacccctcctggggcgcccccggctaccgtgtgcctccgcagtgtcacagggcatcgcggaggcatctttttagtggaaagatccccacgctgaactctgcccctggcatctggccgag

SEQ ID NO: 230344 - DNA, 122 bp, Homo sapiens
tgggcctggagcgggagcgcgaggccgttttcctcttaggaccattcattgtgttaggaccgcggaacaaggaaggaccggttggggccatgtgaataatttagtagggtctggaatcctgc

SEQ ID NO: 230345 - DNA, 122 bp, Homo sapiens
gcgcgactcacggcctgggtgagcagccaggcctggcgccgccgttgccatagttacagacgcagccctgcgagggggcgggctctggccgcacgtcattcccggcgcgacgctcctccgcg

SEQ ID NO: 230346 - DNA, 122 bp, Homo sapiens
ctgcaaggatccgcccctctattccccagataaattcctagtgtccaccaaattcctcagcgctcgctcaccctcctctacggccacgactctgggagtggggaaacagagagccggttcct

SEQ ID NO: 230347 - DNA, 122 bp, Homo sapiens
tgactccgggccattagggagcctccggagcaccttgatcctcagacgggcctgatgaaacgagcatctgattcagcaggcctgggttcgggcccgagaacctgcgtctcccgcgagttccc

SEQ ID NO: 230348 - DNA, 122 bp, Homo sapiens
ttgaataagacaatttcctactcactttttacacctaaacgtaaggtttactcactaagacgtcagaccattgacacttctctcgaagaaggagaccgcgtcccctgcgctctcagagccgc

SEQ ID NO: 230349 - DNA, 122 bp, Homo sapiens
cccgagacacttggccatggcacctgcctcccgccattggccttccgtcctccttcggagcgaagctccacccagcccacctggacaggagctggcctgtctggcactctgagcacccaggg

SEQ ID NO: 230350 - DNA, 122 bp, Homo sapiens
tggccggctgtcctaggcttttaatttaactttatgttttacttattacacggttactgtcgtttgtgtgacacaggtccaacccatcccccaaggtcctgggttagaagtgggttaaaaag

SEQ ID NO: 230351 - DNA, 122 bp, Homo sapiens
cggcggccccacgcggtgtccactgcacagtcacgcgacattgcagctgtgccatggtgacggcaagactgtgacacacggcggccgcatgcggtctccactgcacagtcacgtgacattgc

SEQ ID NO: 230352 - DNA, 122 bp, Homo sapiens
catgcgaaaaggcaaagggcccactgagctgttaacacttaagtcatctgtggacagcagcgttaaaagagcactgaagcctctggggcttcaggagtggcaggcaatcctgcctggatgct

SEQ ID NO: 230353 - DNA, 122 bp, Homo sapiens
gccaggaaagccggcggacacgtaagccacgcccactctgggcccaacgcagtctctccgcggaggctctgaacccagccagggagaggcaggagggagtcccgccccttgccctccatatc

SEQ ID NO: 230354 - DNA, 122 bp, Homo sapiens
cgaatccgatttccccgaaaccgtagagacacagcttggactcggcaaaggccggggccccgacccctgcgcgcgcactggcactctccaaagttgcctcgccttcctgtggccctcccggg

SEQ ID NO: 230355 - DNA, 122 bp, Homo sapiens
ggaagccagcaaccaaaaccgaccaagtaatccagtccctcatagcactggtgaatgacccgcagcccgagcacccgcttcgggctgacctagctgaagaatactctaacgaccgtaaaaaa

SEQ ID NO: 230356 - DNA, 122 bp, Homo sapiens
cctctgcccgggggctttatggagcaggtaggctgcaggcgacatgtaatgctgtttcctcggggagacgcaccagggggccgccctgacgctggctcctgcgcgtgccccgcaggccatcg

SEQ ID NO: 230357 - DNA, 122 bp, Homo sapiens
atccctaggacaaatctgatgttaactgaattaagtggattagtattaaattaactggcccgataattacaggaaggcattataagtccctagggagcccaaggagggtgaagcctcatgcc

SEQ ID NO: 230358 - DNA, 122 bp, Homo sapiens
gggcaataactcctgccccacccgctggctttctgggtctcatgtggtgaggagcaaacacgacactctctgaggaaacgcggtgagaagcaagagccctttgtgagtcagaggtggtggct

SEQ ID NO: 230359 - DNA, 122 bp, Homo sapiens
tgtccatggtcacacgggaactgggggctgattttttctgtgcagtttgggaagggtctgcgtctttgtccactgcagctgccactccagggctgtgccacaggcgaagggatccagcattt

SEQ ID NO: 230360 - DNA, 122 bp, Homo sapiens
acgcggcgactaacagccttcactccaagagatctgcttccgggtttgcaagaaactgcccgcgcagtaggcaaaggggcgggttgcggtggggaaaggccaggcgttgggagggactgaga

SEQ ID NO: 230361 - DNA, 122 bp, Homo sapiens
tggcagcgcctcgaagtggaagcgctcggcccagaagagctggcctgggccggcccgaggcgccgtgcgtgccagcagcgcgccatccagccacagctcggcgcgcacgccgggtgcccccg

SEQ ID NO: 230362 - DNA, 122 bp, Homo sapiens
ccatatgctgttgggcatgactgcccacaggcctggtgggcgtttgtgaagggctggagtcgggggtagggggagcttatggctgctgggcacaggcgtggcagggctgtgtgcctggcttc

SEQ ID NO: 230363 - DNA, 122 bp, Homo sapiens
gtgacccgatttccagggtcagcagcagagggcctggccagcttcggaaataccaccaagcggtggactgtggcaccaggcagagctggggtggaggactgtgctaaataataatggtagct

SEQ ID NO: 230364 - DNA, 122 bp, Homo sapiens
ccgagtctggccaagcttcatcctcctgaaaccactcgtacttggactaacttggaggtccgcagtgaggaagagggggtgggatggtgaatcacctagtaatgtctgactcagggtaacgg

SEQ ID NO: 230365 - DNA, 122 bp, Homo sapiens
ttcattggacaccacagagcttacatgtttgtggtgatgtgggtgtgaacatacgattatcgacagtgcataatgcttgatgaaaataatagatgctgatgttattgttttatgtatttaat

SEQ ID NO: 230366 - DNA, 122 bp, Homo sapiens
ctgtcaacctccacaggctctacgctcagagcagccccggaggagcccggctccttgcagcgcagtagatgccagaccccgagcaggtttaaaaaagaaagccaaggccgggtgtggtggct

SEQ ID NO: 230367 - DNA, 122 bp, Homo sapiens
cttcctctggcgccttcggctcctccccctgcgcctcacacgctcattgtgaagcgacagcggccgccggcttctaaggcggtttgagaccttaagaccctaaatccttggcgcgcgtgagc

SEQ ID NO: 230368 - DNA, 122 bp, Homo sapiens
ggctctgagaggagccacgcagacagctgggcagccgtgccaagaacaacaggaagctcgcggccccacccctgctcgctgcagccctggcctggagacccagggttatttgctttgaaggg

SEQ ID NO: 230369 - DNA, 122 bp, Homo sapiens
gcatattgagaataagacggccttctgacctttcagggtctagcgttgtaaagcatctcacggttgctgccaaaccagccatgaactgggcggggttttcatgtttactttgggtagtttct

SEQ ID NO: 230370 - DNA, 122 bp, Homo sapiens
ccattcaaagcaaagccaagttacatcttatagcacccagtgaattatgatatggggctgcggtttatttgctctggcgacaatatggcttacttgccgtggaatatcccggtatttcagaa

SEQ ID NO: 230371 - DNA, 122 bp, Homo sapiens
aaaaagaaaaaaaaaaaaaagaaagaaaaatagaggtactgttacaatcagaatgttggtcgaaatatggacagtaagaccattccaatgaagtctcagatggaaatgaggaacagagtatt

SEQ ID NO: 230372 - DNA, 122 bp, Homo sapiens
cctcccgccgccctctccaggggatgctgatgaatgaacacacctgagatgcctccatcccgccgctcgctccctccgccttcctctggctgctgcagaggtgcccctcctcggtagtttca

SEQ ID NO: 230373 - DNA, 122 bp, Homo sapiens
tgcacccagccttgttgctcatataaagcccgtttcgtggactctcttcacatggacgcacgtgacatgaggtcaaggaagagccaaaggttccaggacaatcagtacctggaatgatttgc

SEQ ID NO: 230374 - DNA, 122 bp, Homo sapiens
atcgcagggtgggtctcagttctccattttgttaatatccaagttgatatttcccttttgcgacagtaacaacaacatgcaaaccaaaaactgaaacagcttcagttctgtgccctcaggat

SEQ ID NO: 230375 - DNA, 122 bp, Homo sapiens
ttccacacaatagctgacatagagacccaaatgaacaagcaagtaggatggcataaattacgctgaagtcactcaaactattccaaaacactacagcagcacagcagcacaaaatatgtctt

SEQ ID NO: 230376 - DNA, 122 bp, Homo sapiens
aagtgcctctggcctgggttgtggaaggagcttttggctaagcatcaggctattcctctgcgctctctcctgctggccccaactcaccttctctgttacctctgcatcaggaactcttgaag

SEQ ID NO: 230377 - DNA, 122 bp, Homo sapiens
ttttccaatcaacaaactgaactatctcagagctcaagcggaaggccggactacaagtcccggcatgctccgcagggtccccgggcgcccggccaccgtcgtaggtgcgggccgcatgaatg

SEQ ID NO: 230378 - DNA, 122 bp, Homo sapiens
cctggggaaactcggggtgtcagggatgctcgacctctcagaggacgggatggatgcagacgaggaggacgaaaacagcgacgactcggacgaggacctgcgggccttcaacctgcatagcc

SEQ ID NO: 230379 - DNA, 122 bp, Homo sapiens
gactttggaatgggaactatgaagttaatctgcatcctatttgagccattttcttggattcggatgttggcaaagcagaaaaaagtgaggaggggggagagtgaggtaaaggaattggaagc

SEQ ID NO: 230380 - DNA, 122 bp, Homo sapiens
accttcccatctcaccttctcggaggactttgcctttttgtctccagtatggagagggtgcggacagagaccggccgcccgaggcctgagagccggatggggcctctcctcatgcccctccc

SEQ ID NO: 230381 - DNA, 122 bp, Homo sapiens
tccccacctccggcacgcaccgcgctcgccctcccgcggcggagtcggcccccggggacgcgggtcctcgggctccagagcctctcaccctgacgccttcgggccgcccccgcagcgccccc

SEQ ID NO: 230382 - DNA, 122 bp, Homo sapiens
gcaagccgcgtggcagggaccgtgtgcggcgtggaggctactgggaattgtagtcctgcgcggcagcggggtaggtgggaaaagagatgtggcctttcctgcactgccggtttctctggccc

SEQ ID NO: 230383 - DNA, 122 bp, Homo sapiens
cccccgcggagcgagtgcgggtcaccgggtcactgggtcattgtctccgcgcccgaaccccgagcaccccgtggaatcccccacgtcatcatcagaaccatcaatgagatgcaaacatgaaa

SEQ ID NO: 230384 - DNA, 122 bp, Homo sapiens
cctgaggggtctccccgctccgagggaaggggagagggaggcgagggcgtgcgggcatcgcgatggcggggacattttccacaacgtgattgttgaaggctccccccatcccccctccctta

SEQ ID NO: 230385 - DNA, 122 bp, Homo sapiens
cccctccggggcagccccctcctcatttcccgaaggcgagaggagggctgggccggaagacggggccacctccgaagcgctttcggccagaccggcctcacccttcccgcaggctcctcctc

SEQ ID NO: 230386 - DNA, 122 bp, Homo sapiens
aacctaatttgctgctctctagggagaatgcattcaaccacaagcttcccaaggtgcttccgttcctggtacaaaaagctgaaaatgtcatcgcatttgcaaatgaacagaaacctcccact

SEQ ID NO: 230387 - DNA, 122 bp, Homo sapiens
agtgcttactgacatggaggaggaggggaaggaggagaaagaatctggaggctgacttttcgagagagtgtggatctctgtgttggccacttctgccctgtagctgcaggggaacgtggcaa

SEQ ID NO: 230388 - DNA, 122 bp, Homo sapiens
ttttgcaggctgacatccgcttgaattgcccatttttttctatctctgagtcgtgagtcgcgagttaggcctggaggtgccattaccccatcagtaggcgcctttccaccttctgagatgga

SEQ ID NO: 230389 - DNA, 122 bp, Homo sapiens
gtgccttcccctgtcatagcctgctgcggctacgaagctggtcctatcagccttatgcaacgtcctcagtctgatttccccaacactcgccttggagcacacagaccatgctagggatctat

SEQ ID NO: 230390 - DNA, 122 bp, Homo sapiens
ctcgggtctgcagagggtcgggggcgttgacgtgtccttcgtgaaaggggacagtgtccgcgcttgtgcttccctggtggtgctcagcttccctgagctcgaggtaacctgggaggacgccg

SEQ ID NO: 230391 - DNA, 122 bp, Homo sapiens
tacagtttaacctaacagtggcttaaaatagtcacgcggcctagccacactatcttaccacgtggtacagcttctacggcggaaattttacattcttaataattgaattacaaaagcatttc

SEQ ID NO: 230392 - DNA, 122 bp, Homo sapiens
cagaaactgccttgtctattgctctttccccagcgacttggaatggtgcctagcacattacgggtgttcaataaacatctgtagattcagttaacaaacactgggcacccactaggcctaca

SEQ ID NO: 230393 - DNA, 122 bp, Homo sapiens
attacctaccagttaggaagttgtgtaaattcaatgacagccatcttacagaggagcttgcggacacacaaggaagctgatgcatagtcaacatttaacaagtgttatttacagtacttcct

SEQ ID NO: 230394 - DNA, 122 bp, Homo sapiens
cccaaccgcctaggcgacggcggcgacacagagcttggcgctgggagcaatggttgcccccgccccgctccgctcccggccccctccctccaccccccgcctcggctcctccccctcggcct

SEQ ID NO: 230395 - DNA, 122 bp, Homo sapiens
tgtgtgggcacttgcccagtgcgcaggtagtccaggatgggtctgaaataggtgctggggcggtcgatgaagaagcggccctccgcgtccgtggaggccttggctaagctagagaacatctc

SEQ ID NO: 230396 - DNA, 122 bp, Homo sapiens
ctgacctgtgtgcttgtgtggcccaggcactaagagcctcaggttcacagggcatgccctcgtgctagtgctgctagagagggggtagaccatgttacacaggaagcatcacggtgttgtgc

SEQ ID NO: 230397 - DNA, 122 bp, Homo sapiens
taccatgctgagctgggactgcagctcaatctccaggttctgcatggtgcgccggagctccgagatctcgctcttgccgctctgcaccagctcgctgttggtggccacctcgcggttcagct

SEQ ID NO: 230398 - DNA, 122 bp, Homo sapiens
ggtgggctgctgtggacatcaggcctgtccccagaaagacctccctgaggacaggagccacgctgcccttccccgacagagcccacgggggcaaaggctgccggtgctggacgcggagttca

SEQ ID NO: 230399 - DNA, 122 bp, Homo sapiens
ctgtaaggggtggagggcaagggcgcctcagcgaggtgctgaaagtggaggctccatcagcgctgtgacctcaaaggttggagagactgggacagaccctgagccctgacgcaccctggaaa

SEQ ID NO: 230400 - DNA, 122 bp, Homo sapiens
ccgccgtgcgccaccctgagggctcccgcgattgcatcttcttgagcacagttaccaatgcgttcagcttcgtttcttactcggatggagacatcgcggagggaagcgaggggacagggatg

SEQ ID NO: 230401 - DNA, 122 bp, Homo sapiens
tgtgcagagacgggtgcgtgtggacacgcgtgtgtgcagagacgggtgcgcatggctccacgcatgtgcagagacgggtgtgcgtgactccacacgtgtttgcagagacgggtgcatgtgaa

SEQ ID NO: 230402 - DNA, 122 bp, Homo sapiens
acggaggcgcctggctgtctggggcccgcagcctttggcacagccgcgctagacaaacagcgcgccgcccccgccctgcccctccgcccccagctgcagccgggcctgggaaccggcgggcg

SEQ ID NO: 230403 - DNA, 122 bp, Homo sapiens
tcctcatctgtaaaataaggataagaatagacttgacttccacttcaacgagaagtgaaacgagatatcctaccactgcgctttgcacataaaggctctataaatgtcagctgtcatcataa

SEQ ID NO: 230404 - DNA, 122 bp, Homo sapiens
gggctggcagatccggggcgtcacttctctcccagggccccggagggaggcggaagaaggcgcaggtgcgaaggatgaaaaaccaaaaccaaatccaaatgaaagtcagtgatgtttgaaag

SEQ ID NO: 230405 - DNA, 122 bp, Homo sapiens
gcccgctcccccgcctgctccccgcccgcgagagccgcgcacgcgcactcggccccgccccgcaaccgctgctgttgacgcggcgccctccccagtcgcaggctccagacccggggcccgcc

SEQ ID NO: 230406 - DNA, 122 bp, Homo sapiens
ggcagacctggagacgcccccggcctcttgggagctcctgagggtccaggtcgggtggggcgcgccttgcggcaagttcccttcttccagccaccgtcctgaggagcagaaggcgcggggac

SEQ ID NO: 230407 - DNA, 122 bp, Homo sapiens
taaaagatgccatctgcttggagcagaataggctgtgacacgcaggagcccccagggaaacggccatggcaatggtgggtgttaacgagcaggcataagggactgctcccagcggtgcttcc

SEQ ID NO: 230408 - DNA, 122 bp, Homo sapiens
gcccctcccgccacagaaccccagaaaaactgtcccacaacccccagtgaatgaccaaatcgaaaacccccaaacttgtatgccaaagccctcctaatcccgattctgctggcccctaggac

SEQ ID NO: 230409 - DNA, 122 bp, Homo sapiens
cgcccccggacgcccacgccgcgccggacgccacggccaggtgacacctggtgtccgccgcgagcccgcttggattccccgcccgcagctcgaaccccgcaccacgggccgacagcgccccg

SEQ ID NO: 230410 - DNA, 122 bp, Homo sapiens
cttgcagagccctggcagtgcctcttggaacggctgtgctgtggcctgcttagtgtcacccgcgatgcggctcagctgtttggtttggtttggacattgcatcgccttaactgcagttctga

SEQ ID NO: 230411 - DNA, 122 bp, Homo sapiens
tcacgtcgtcggtgggggcgaatgctcacggaatcgtgactgggcatctgcgctggcctccgcctagactgcgccccacgcgggtccccagagcccccggcggcgcttccccagcgccctcc

SEQ ID NO: 230412 - DNA, 122 bp, Homo sapiens
gccgccgcagcctaggtcacgtgagtacccacgcgcgcgtcttgccagcggattcatcaccggcctgctcagactaggttctgcccactctgaccttctaaatggtacgtgggaggacgtcc

SEQ ID NO: 230413 - DNA, 122 bp, Homo sapiens
cccaccactgttctccagttaactacttatcagcttaccctgtgcacaaggtaatgaagacggtcatacagccagtgagttgcagggatcgcaggaaccccacgaccaccaggtggacattc

SEQ ID NO: 230414 - DNA, 122 bp, Homo sapiens
gttacaactagtgttgcaacaggggactattcaattttgatgaatgtaagctgggtactccgggcagatggtaagtttgcatccatcagagataaggcccaaagtgtctactaaatcagaaa

SEQ ID NO: 230415 - DNA, 122 bp, Homo sapiens
agctgcagacaccccagcccaggaaaactgctcgcggctgagtcgctgagcctctcaaaccgcctgcttcccccaaacagagccacggcccagccggctcgctcatggcttttccacattgt

SEQ ID NO: 230416 - DNA, 122 bp, Homo sapiens
ggaggctgaggcaggagaatcacttgaacctgggaggtggagattgcagtgagctgagatcgcaccactgcgctccaacctgagcaacagagtgagactttatgggaaaaaaaagtgaaatc

SEQ ID NO: 230417 - DNA, 122 bp, Homo sapiens
gcacccgtccagatgcgccaggacctcggcaagctcactcttgtactttaggtccttctccgcttgtgcaatggccccagctgcccactcacttggcctctccctgctcccccgcccccagc

SEQ ID NO: 230418 - DNA, 122 bp, Homo sapiens
gcgctgagagtggccagggagccgtgggcctccatcgtccctgtggttgggactgaggaccggcctggaggctccattcacaccatcgcagggcaggctgggggtcagatgcggatgaagcg

SEQ ID NO: 230419 - DNA, 122 bp, Homo sapiens
caagtttccaaggaaaaagcgcagcctccgtgggtcgtgatttctgtggcttctataatgcgtgtgtgcctctcccagccgtcacacatggcgtctcaagtgccccagcccacccatgggac

SEQ ID NO: 230420 - DNA, 122 bp, Homo sapiens
taggccgagtggccgctgcccgcgaggccgctcccggatgggccgcgctccgcactccctcgcctaaggtggtgcagccctcgttggttccccgcctgctcccggttcgctcgctctccgtg

SEQ ID NO: 230421 - DNA, 122 bp, Homo sapiens
atatttttgtaaatactgtttactgtaaatacaatttactgaaatctcaagtttggaaatcggtcacaaatactgctcagtagactcattatagttacagaacaaagtttaaatattacaaa

SEQ ID NO: 230422 - DNA, 122 bp, Homo sapiens
actatgcctttcctccctgagagtttcgctacatttcccaggatgctttgccaatagcgacgctattagtcgtcatcgacggaagtgcacctgactgagcggaagtaggagctctcagaggc

SEQ ID NO: 230423 - DNA, 122 bp, Homo sapiens
tgagggccagaagagttggggaggcacgagggcgtccagcgctgccctcactcaagatggcggccagagcctcgcgcttggtcgcgtggggcggtgcgtgagtgcttagctcacaggctccg

SEQ ID NO: 230424 - DNA, 122 bp, Homo sapiens
tggaagggattactactgttaatacaatacttcatagaagccgtttatgaaaatcaatgacggtcaagacctagaaccataagcaaaagatagctttctagtgtcaccttgtggctaaccat

SEQ ID NO: 230425 - DNA, 122 bp, Homo sapiens
caattctgtttttgttgggggggtgggttattttgtgtgaatttcttttcgaggctagggcggaggagacagtgcttgggcctttcataccagtgataatgtcatccctccctttttgccac

SEQ ID NO: 230426 - DNA, 122 bp, Homo sapiens
gccaatccctcactgattacctgattaaaaagtgatttattccaagggacacagggctctcgaaacaatcaaggaagtggaattctgccagttacacactctttgggtgaccagtatccaga

SEQ ID NO: 230427 - DNA, 122 bp, Homo sapiens
cgggaccccagcgtcccccaccgccctaacccgcgctcaggacctccggacacagccccacgctgacctccacactcaggagtctgccgccccagtgaccctcacactccagaccctgcccc

SEQ ID NO: 230428 - DNA, 122 bp, Homo sapiens
cagcctccaaaggaggcctgtcaattcacacgcccaccggcagtgcacagagcaggtgcacggaaaacacgttaagctgagcaaacaaagtgacaggaaaagctaagagtcttaagccggca

SEQ ID NO: 230429 - DNA, 122 bp, Homo sapiens
ggtcccggcctcttcatgtgcttccaacgccggcggcttggacacacctgggagcagccacggcccattcacgaagcactttggtgaaggtcaccaactgcagggacagagcgggtattgtc

SEQ ID NO: 230430 - DNA, 122 bp, Homo sapiens
gcccgcgcacgcagagaggcggtgacgcactttacggcggcagcgtaagtgcgtgacgctcgtcagtggcttcagttcacacgtggcgccagcggaggcaggttgatgtgtttgtgcttcct

SEQ ID NO: 230431 - DNA, 122 bp, Homo sapiens
gctctagaaagaagaaacgtcaaggtgggtggagacagtggtctgggcccaccaccctcccggctgaacagcctgtcatgctatttccaaagagaactcgccaggaggggagatgactgcag

SEQ ID NO: 230432 - DNA, 122 bp, Homo sapiens
gtctggagacctaggcggagaagtaaactccctagagctgaatatgcagtcctaagagggcggagataaccaaaagagaggcgggctctaacagccaccgccctggcaagcctccggaaggc

SEQ ID NO: 230433 - DNA, 122 bp, Homo sapiens
ttgctgagcaagcctctcagcagacacactttgaaacctgagcgaacacacaagaatcatcgatgctggcatcccctggtcctcaaaacactggtttctcctgccctatcttgtcatccatt

SEQ ID NO: 230434 - DNA, 122 bp, Homo sapiens
gcaccctgcgtcgcccgtaggccccagtagccggaggccgaccggcctcccactacccctcgccctagccaagccgtccccaccccaaatccccgggaaggaagatgagggagacgggcccg

SEQ ID NO: 230435 - DNA, 122 bp, Homo sapiens
cccagaggctcaccggaagtgccggacccgagacccggagggggggtgcccgggacaaagcgtcggctgcaaaagagaaaaggccaggcgaagacgctaggctctaaaacaccctcagtaga

SEQ ID NO: 230436 - DNA, 122 bp, Homo sapiens
caggtaagagccgaactgccattcttggagggtctggctcagggaacaattcctaggggacgttatctttaagggatcaaattctgagacaggctgcgggggctcctgccctaaggcagtgt

SEQ ID NO: 230437 - DNA, 122 bp, Homo sapiens
cgctcgggccaaaacaaaaacaaaaagttcagcgcggcagtgggagcagattgggcgagacggttcacggctgcccattggagaaaagggaaaacagagtcccccaatcgcgagcggcgggg

SEQ ID NO: 230438 - DNA, 122 bp, Homo sapiens
aaacaacaattattagatagcttaaaacacagaattgaagttacttaagtaaaaatgatacgtatttgaggaaaaagggttgaaaaagtatatgaactctgatggctacttctattcttatg

SEQ ID NO: 230439 - DNA, 122 bp, Homo sapiens
gagtcttaggggcctggggagctggcgctgaagcttcttgccaggttggctggtgacacccggtgtggctgggccccgcggcagcggagggacctgcccgccttgtgggtttctcggccaga

SEQ ID NO: 230440 - DNA, 122 bp, Homo sapiens
tggaaacaaagtgagtgtcatcaggacagaatgcaacgttcagcacccaggaggcatggccgctcagcgtgccagccaaattggcatgttgtctgaaatgggaaagtttcaaacaaaattga

SEQ ID NO: 230441 - DNA, 122 bp, Homo sapiens
ccgggccgcggctggtggctgttgaaggagttggtcctgctgggcactgggcagtcaggccggaaggccacgtgcgcgcgcggcggcgcctccaggcccggcttctgcagggagtcccggcg

SEQ ID NO: 230442 - DNA, 122 bp, Homo sapiens
tgctcttgcactgtggggccattatgaagtcagataatggttactggaacataagcacttcgataccatgacagtgaatctgacaactgagacggctgcagaccatggggcagggagcatat

SEQ ID NO: 230443 - DNA, 122 bp, Homo sapiens
gggatgagcatccccgtggcgttctgtgtaatgggaataatggccctgacctcacagtgccgtggcagcaagttgaaaagctagcacatcaagctctcagtgaagggttgctttcctttcct

SEQ ID NO: 230444 - DNA, 122 bp, Homo sapiens
ggcaggagtgcacggatggtgagcacccccaccccaccccaggacagatgtgagtcacgtcgtatgtgtttgctgattgcagatacgggacgtgcaggaaacactgatgccccaggtcctga

SEQ ID NO: 230445 - DNA, 122 bp, Homo sapiens
agtctacagaatacgataaaatacacatttctatggtgtaaagctggcctctttgaatctcgaagaccagttcggcaacaacagcaaagtgtaaagtgtgttgttataagaatacatgaaat

SEQ ID NO: 230446 - DNA, 122 bp, Homo sapiens
cgaagacaggttggaccccatcccacccccagaagctggtctttactcccacttccttctcggtctccacctccagggtccagttttaagttttggccactcctgatccctccccaccacca

SEQ ID NO: 230447 - DNA, 122 bp, Homo sapiens
acaccccacgcgccctggcccagaaccggcgctaggctcgggcagggatcacctcgaggccggggctaccccaattttagggcctgaagttacctgttgctttcagggactccgagccctgt

SEQ ID NO: 230448 - DNA, 122 bp, Homo sapiens
aaggacaggctaaagctggttcaggcgagttcacaaagtgaaatgactgcccattagtcccggccagcagcagaacagggaaaaacaatcctccgggagcgagagcacacggggtcctactg

SEQ ID NO: 230449 - DNA, 122 bp, Homo sapiens
cgccgtaacctgcaacagcccatgagcacagaagcattgtgctaggaccttggcaggggacgagagaacgaccatgaagccaacaaaacatctgggcctgggccacttccaaggctctgtac

SEQ ID NO: 230450 - DNA, 122 bp, Homo sapiens
caggtttgctctccccccacccccagaatatctctttttcccatagcatttcccagttcacgcattttaatcaattgcgtaactgaatgagaaaaaaggtcaaatccaacttccatcctctt

SEQ ID NO: 230451 - DNA, 122 bp, Homo sapiens
ccaggggctccccggggacctgacgagggtcaacactttcccacgaccctctgccatccccggtgtgcccttggggagaagtgtggtggtcccacaggcccccctgccaaaacctcatgctt

SEQ ID NO: 230452 - DNA, 122 bp, Homo sapiens
tgttgcgagtgactcttgacgtctgtctttcagagacactatggacagcgtgaagcagagcgcggccctgtgcttgctgcgcctgtacaggacgtcccccgatcttgtccccatgggcgact

SEQ ID NO: 230453 - DNA, 122 bp, Homo sapiens
tgtggcccttcccagagtcatggtgagaggtcacagtcaaaaggcaagcatacagggaggcgtgcacaaatcgggggccacgattacaacagtctaccccaacagctaatttcagaagagag

SEQ ID NO: 230454 - DNA, 122 bp, Homo sapiens
tggagctgtggggcctcagaggacagctgcgagaactgctctggttgaggtccggaggggcgcatccctcggtctgggcactgggactgctctgcccgtggcctgaattttaccactcaatg

SEQ ID NO: 230455 - DNA, 122 bp, Homo sapiens
ttttttttttctttttgagaaggagtcttactctgtcacccaggctggagtgcagtggcgcgatctcggctcactacaacctctgccgcctgcctggattcaagcgattctcctgcctcaac

SEQ ID NO: 230456 - DNA, 122 bp, Homo sapiens
gcaaagagcttgagccgaaaggaaagccttttcctttgcagcgccttatgggggaagccacgctctgtctgttcggaacagatgtcggccctcggaggggtttctctgccaggaggcggccc

SEQ ID NO: 230457 - DNA, 122 bp, Homo sapiens
cacccagcacaatttgaaacccaacattgatttgtgtgattatttgattaatgtctccctcgcctccaagacagacctcacctaattgagctgaacatctttcccggcctctggcacttaat

SEQ ID NO: 230458 - DNA, 122 bp, Homo sapiens
aaaaaggaggatttttccaaccccactgggagccccgcctctgcctctccacccgttccgcgctgaccctccaggcagcgcccctggttcgtctgcgctgtcctttccacctgacaaaagct

SEQ ID NO: 230459 - DNA, 122 bp, Homo sapiens
tcttgtcagacgcccgtaaaggaagctgactctcactgggttccaggaattacgtggttacgtccataacagcccatctgacaagtggcaaatacccgtggaaaaccaattaactgtgctcc

SEQ ID NO: 230460 - DNA, 122 bp, Homo sapiens
gccaacatggtgaaaccctgtgttcccaaaacacaaaaatcagcctggcatggtggtgtacgcctgtcatcccagctacttgggaggctgaggcaggagaatcacttgaacccaggaggcag

SEQ ID NO: 230461 - DNA, 122 bp, Homo sapiens
tggtcccacctctgcaacgcagataaagacagaggatccagatctggcctacccagaggccgtctagttgaaatggcaaccccaaagaaaaccaaacctgcgcccgaagcaacagtgaccat

SEQ ID NO: 230462 - DNA, 122 bp, Homo sapiens
agtcatatatcccatatacagaagatatgagtatgtgtaatatctgtagtatgtgtaatacgtgctccacaatgcctgctggatctagtgatagtgttacaaataaacaaagaacaactgaa

SEQ ID NO: 230463 - DNA, 122 bp, Homo sapiens
attcatcaaaccataattcacatagttataaactgttcctgaaactcaaaacaaatatttcggttcactataaagcacttgcaccccccccaccccaacagattttaattttcatgtgtatt

SEQ ID NO: 230464 - DNA, 122 bp, Homo sapiens
agctcctcagtgtctcccccatgggatttggggcatgggatttgcatcactgcaaatctgcggatgctcctgctgctggctgcactatgcaaaataaaatcctttgttttttactcaggagt

SEQ ID NO: 230465 - DNA, 122 bp, Homo sapiens
tcgtggcagccacaaaaatgcacttttcaaatctcccactgtgggtaatgtgactgacatcgcagctactgccttctgaaagcacctctgaattcataccaagaccatgatttccaaggctg

SEQ ID NO: 230466 - DNA, 122 bp, Homo sapiens
aagacatacaggcaaagacaggaggaaagtggggctgggttttccagacttgccaactcacgatctgttcaactcccagctccaccagcagacacgcagcatcactgtgtgtggttgcaggg

SEQ ID NO: 230467 - DNA, 122 bp, Homo sapiens
ggagagaacttgcttctggacccgggtgggtgccggctcggctctccttgtcttccagagcggtggcccggaagcacagtcctcccagacgccagcgccagaagctcggatcgcggctgcac

SEQ ID NO: 230468 - DNA, 122 bp, Homo sapiens
tggccacctgctttcatattctgaagtcagagtgttccagacagaagaaatagcaagtgccgagaagctggcatcagaaaaacagaggggagatttgtgtggctgcagccgagggagaccag

SEQ ID NO: 230469 - DNA, 122 bp, Homo sapiens
acagagcgccccagcgggatcctacacacagagcgccccagcgggatcctacacacagagcgcctcagcgggatcctacacacagagcgccccagcgggatccgacacacagaccgcctcag

SEQ ID NO: 230470 - DNA, 122 bp, Homo sapiens
ggctggtttcggaggattaagctcagtgtaatttcatccttcccaggtgtgagacacttgcgtgtgcagtaatatgattctgtactgtcagggaaaagagtgtgtctttgtcagcagtgttt

SEQ ID NO: 230471 - DNA, 122 bp, Homo sapiens
gacctaagactggggtagctctgtgataggcgctgcttgcccgtgggaaagcagatgaaccgaatggaagcttaaaacaggctttcagcagggctttccacgcactcagcctctcgcccgcc

SEQ ID NO: 230472 - DNA, 122 bp, Homo sapiens
cgcgaaggacgcgcacattgcagggcgcaagcgtgcccgggacgctgctggaggcgccgtcgctccgcggcggaggcgacccagtttcccagctctcgtcctcgccacttcctctgcatggg

SEQ ID NO: 230473 - DNA, 122 bp, Homo sapiens
tctgttttgtgactttggggaagacatttaaattattcaagtgcatttttttaaataatgcgaggatgttaatagaccctgtttattattggggcttaaattatataaatgttggttaaatg

SEQ ID NO: 230474 - DNA, 122 bp, Homo sapiens
agggatttgcccaccttggtctcccaaagtgctaggattacgggcgtaagccaccatactcggacttgtattgctttttaaatatggtatattggtttcctagggttgctgtaacgaagtag

SEQ ID NO: 230475 - DNA, 122 bp, Homo sapiens
ggagtacttggtagatggtagcttttatcatcaggattgtacatttcataattgcacaatcggggtcacatccctctctctaaatgctacactagtttactctgccaccagcaatatctagc

SEQ ID NO: 230476 - DNA, 122 bp, Homo sapiens
tgctctcgacctccgcccctgcggtgggggaagttcctggggcggtggctgggaccaggccgggttttaggcgggcgcagatttccgggctaactttcctcgccgtctcagcgcgggaaggg

SEQ ID NO: 230477 - DNA, 122 bp, Homo sapiens
tcacacaagctgtagtctctcggcaggacggtccttgcctcctcgatcgcccttcgtccacgtcctgaggtcgtggtcttcctactcgagctggacccctggtctccgaaggtgagatgcag

SEQ ID NO: 230478 - DNA, 122 bp, Homo sapiens
gtggtggataatttaaagccaatttgaaagttcatcctttcccccaaaggcaaaaacaggcgttccttttcttaaaagagaattttaaatagaattgggtctctggtgtcctgcctaaagcc

SEQ ID NO: 230479 - DNA, 122 bp, Homo sapiens
ttgattatggctcccccctggcacatctacatgttttgtaactatgtcacacagggagatcggctttgttgaatttcctgtaacttggatagagaggagaaaaaacaggaaagggccctctg

SEQ ID NO: 230480 - DNA, 122 bp, Homo sapiens
ggaaagtgcgcgcgcgcgcgcgcgtgtgtgtgagtgtgtgtgcgtgtgtgtgtgtgtatgcgcacgcatgtgtgtctagaatcaatacggcccagacagcccttcacaaaggggctccaggc

SEQ ID NO: 230481 - DNA, 122 bp, Homo sapiens
ggctgcggcctctggggatgggccagctgctgtgtctcctgctggggtggcggtggacctcgggagcttctctcacatgccaagcacgggcacaggatggcctcttggaagaggatgggccg

SEQ ID NO: 230482 - DNA, 122 bp, Homo sapiens
cgtgagtcatgacagggcgtcccgcgcgggcacccgacgtcccggagcacgggacgtccccggcgctttcccaggccttgcctctcggttccgaccgcagtgccttccccgcgatccttcac

SEQ ID NO: 230483 - DNA, 122 bp, Homo sapiens
tgaagtaatccccagtataaacaacacagaactagccagacctgttcctctgcccctcatcgaggccatcccagttactcagcgaataccaaattccaaataccgggaacctgaagctgcct

SEQ ID NO: 230484 - DNA, 122 bp, Homo sapiens
ctattttttgttggctgggtgttctcgccagtgattgggtcccggcaaggcgtgccggtgcgctcggctgcggctgctccgtcgacctttgcaggaccgggcggtgcagggctcactcggct

SEQ ID NO: 230485 - DNA, 122 bp, Homo sapiens
cgggctccacgaggatttccatgcagatcccgcactggcactcggacagcgaggggatggcgtctttgggtagagccatttcaatatgttagtaaagccgactaaacaacgacacctgcacg

SEQ ID NO: 230486 - DNA, 122 bp, Homo sapiens
cactagtcaaataaaagagatagccactgctaaaattcatcaatagaaggatctccacaccgtgaatgtagtttcttcttttatacgtacaggcgatttcaaataagtaaaccatgtactct

SEQ ID NO: 230487 - DNA, 122 bp, Homo sapiens
ggcacacctgggcgagggccctgcatctagaagaaggtgttgggcctcttggtggtgaagcgtggcttgtgctgacggcgcaggacctggtggggcagcgggaacttgaccttagagtcgtg

SEQ ID NO: 230488 - DNA, 122 bp, Homo sapiens
aggaaagtgaacagaagtctcggtgtacaaccacgccccgggttgacatctttccttccacgaagacactgggtacaagccttgatgtagctgttaattgccctcctgtttcctagaaagct

SEQ ID NO: 230489 - DNA, 122 bp, Homo sapiens
gaaaaagaaatacccagtgaagggagtgattagcgcaggggctccaagcactgtgatagccgctaggggagacacttgtgattgaatcacatcacctcagggggccagtttttttttgtttg

SEQ ID NO: 230490 - DNA, 122 bp, Homo sapiens
atcacttgaatcacttctggtttctagatgcaaaagcagtccctgaaaggaatttccaggcgctggctcacaggctgcgtgtaaacgcccggtcacgcctcccgcgtggaggatggagacga

SEQ ID NO: 230491 - DNA, 122 bp, Homo sapiens
aaagaactgcccaggggaaggtgaagaaggtaactgtcaacccttcaaaaagtgaaatggcgttagtaagatgaaggccagcccataagagatgccagccaagatggaataatgcgcagatt

SEQ ID NO: 230492 - DNA, 122 bp, Homo sapiens
gatatggaactcatagctccctcaactccttctctccctctcccccttccccaccaggggcgttccacatacgttgtcccgacacagcagtaccctgtgcagccaggagccccaggcttcta

SEQ ID NO: 230493 - DNA, 122 bp, Homo sapiens
tcaggacttactcatcaatatgtgctctggaggcacagagctatgccttcatattgttcacgtttggggcggaataaacctctgttttatgttaaccaaacgatgtaaggttaccagagatt

SEQ ID NO: 230494 - DNA, 122 bp, Homo sapiens
cgatgcagcctatcagatgctacaatactagcaacggatggagcacgcggctcagcgtggcgtgcttctcacacgtgcccaatggctctggctgaccctgccctctctggctgtccacctct

SEQ ID NO: 230495 - DNA, 122 bp, Homo sapiens
cgcccctggagcgccgcatccggtagcgagagttcaacttcctgactaggagccaatcagcggggccgcctcgctgtctacgacagagggtggggcagacgctccgtttccggtggcagggt

SEQ ID NO: 230496 - DNA, 122 bp, Homo sapiens
ccagaccggagcaaagcttcctagttctgctttgcgcagcccccacgcggtgtgtggccgcgattgtcttttacaccactttctcccggtgtcgtgagccggccttggagggttagttgctc

SEQ ID NO: 230497 - DNA, 122 bp, Homo sapiens
ttgtgtatgtttgtgaatgtattgggatgtcaccgtgtgtacttatgtcacgtgtgtgcacgcatcagtgtgtgcatgtgtgagtgttcattgagtgtggcactgacagccaacccctctcc

SEQ ID NO: 230498 - DNA, 122 bp, Homo sapiens
tccagtccttaagcagagtcagttctccacccgccttaggtatatggattgtaacagctacgaatgtggaactcagtagattggatgcagtcttgtggccaatgccctaagacctcaggaaa

SEQ ID NO: 230499 - DNA, 122 bp, Homo sapiens
cgagtcgacataatagctgctaagcgtcccagaaatggacattctcagacattatccgggcgcttgcagggggaagggaagcgctcgcgcggcggcgcccaagcagggagaggtggcacccg

SEQ ID NO: 230500 - DNA, 122 bp, Homo sapiens
tggtggttggaggccccgcgcgaaaacctttaggtgttgaaggacctggactggccgccacgccacactagcctattacaggagcagccacaggctccgggagactagaacccgcctgcagt

SEQ ID NO: 230501 - DNA, 122 bp, Homo sapiens
ccaactttcgtgctccaggtctggccaaatccccgccccaggggtaggagatcctgaatgcgcgcgtactagccattggggcaggggagtcaaccaagttcgtggtgggggtcggggtgggt

SEQ ID NO: 230502 - DNA, 122 bp, Homo sapiens
cgtcccagccccaggcagccactcctctgctctctatcactctggaattgctttgatgaacgctgggtggggtgtcacctgcatcccagcctgctcctccacccagaggccctacatctcgc

SEQ ID NO: 230503 - DNA, 122 bp, Homo sapiens
tgggactttgttacaactgcccccgcagactaacaaactatgaggtccaacactgctcaacgtgtctgacatgcagtcactgtctgtacctctgttattttagcttcagcaatacaggatac

SEQ ID NO: 230504 - DNA, 122 bp, Homo sapiens
cgccagtcccgccccgccccgccccgccccgccccccgccgctcgtccccgccgcggccgcgccgcctgcagcagcaccagctgctcctccccggcggccgccccccgcgggtccctccctg

SEQ ID NO: 230505 - DNA, 122 bp, Homo sapiens
accttgtgatccgcccgcctcggcctcccaaagtgttgggattacaggcgtgagccatcgcgcctggccccacagcatctattttagcagccaccgcaagggctgggtgaccctggtgtagc

SEQ ID NO: 230506 - DNA, 122 bp, Homo sapiens
ttctttctgtcatggggattttgaactgtaaatacaagtgaggggaatggtggcgaaggtcgcggaccacaggcctgtcaccgaagcagtcgctgccgtcttcatctgcactttgccacagt

SEQ ID NO: 230507 - DNA, 122 bp, Homo sapiens
aaaaagaccctcgtcttggggtagttctcttttgaagtcctagagtccgtcacacacaaacgccttcttcccggtaagtccattgtaaacaacggaatggactttagggaaaggaaaggaaa

SEQ ID NO: 230508 - DNA, 122 bp, Homo sapiens
ttccaatgaaattccctcaggaaatttttttaaaaccattgtgtataaaatttcctattgcgatgagaatccatggtaattaggcatttggtcaaaatctgcacaagacagaacaattggag

SEQ ID NO: 230509 - DNA, 122 bp, Homo sapiens
acctagcctgtctccttactgctgctatcacaatccctgtgtccatcaacagggcattctcggtgcactttcaacagcttcatggcatttcctgtctctgtgcctttgacatgttgttctgc

SEQ ID NO: 230510 - DNA, 122 bp, Homo sapiens
tgtgaggcccaaggctccccaccaggccttaagtccccagagaggttccagagggttcagcgcccagacagaaaaagctcgaaacttcctatacaagccagagctctggagaggaacagacc

SEQ ID NO: 230511 - DNA, 122 bp, Homo sapiens
ccgccgcgcccgcggccaaccagtctctcagctagcgacgcccgcccctccgctagccatcgcctcgcccctcttgtcaacctagagggctcccggagctgcagctggaggcggaaccgggg

SEQ ID NO: 230512 - DNA, 122 bp, Homo sapiens
aggggtccggcagtcgcagccagcatgacggaggccctgaggccaaggccacaggcctggcgccgggcaccacattggggtgggaggtgtctggttccccccagaaggcgagtgggttataa

SEQ ID NO: 230513 - DNA, 122 bp, Homo sapiens
tcataagcccacacctacggtctgagttctgaactctcagcaggtgggaactgggaactgcgggttggctagcaggggggccagctgtgtcaatttggtttttaggaagggtattcttttaa

SEQ ID NO: 230514 - DNA, 122 bp, Homo sapiens
ccgtgacaccgatgatgctgtcttcactgggggaggaagaacatggccatcaacagtgcgcggccccacctgttcatgccaaagcctcatgcagttccacagcaagatttgccatactgacc

SEQ ID NO: 230515 - DNA, 122 bp, Homo sapiens
aagccctttatttcaagattacgtatggatggggagtgtttgaacaaacagactttaaaacgttgccgcccaagctgtcggagataaatcaggtgagtataatgtacaaattaatagagaga

SEQ ID NO: 230516 - DNA, 122 bp, Homo sapiens
ttgctgcatgctgagaggaccacggcacaatcctgcccaaaagtatacatgtatcccccgcggctactttaaatgtacttttgcagtagtcaagaacatgtgcctggtttgccgatctcttt

SEQ ID NO: 230517 - DNA, 122 bp, Homo sapiens
cggccgaggccggtcctcatgcgcgcttctcgaagcttcctgaaacaccttgcggagttccgtgtgtatagaactcagcaccgcccagcccctgggcagctcaactttctgcagccccatcc

SEQ ID NO: 230518 - DNA, 122 bp, Homo sapiens
caccagccctgttccgctgccccctgttcaccccacggctccccttccagtcccatcccacgctgaggggctccaggctccctgcagcactctgttttgagcccagcacaccccaggaagga

SEQ ID NO: 230519 - DNA, 122 bp, Homo sapiens
agtctgaggtctcggaaaatcttttctacatatacacccggccctcactttctggacgcacgcagcaaactctcaaaataaaaccaccaaaaaggagaagggggggcgtcgcccaccgctcc

SEQ ID NO: 230520 - DNA, 122 bp, Homo sapiens
agcacctagtgattttaacataaacatttccacagcattttcaagttctgcgaaaaagcccggtgatagatcagcctcgcggtgtgcagcgccggcagctccgcacttcggacacctggggg

SEQ ID NO: 230521 - DNA, 122 bp, Homo sapiens
acttcgctcctgccctgtgcccatccccagccccacgctgtgctctccacccttcccctccgtggccacagcagccaatgatggccaaggcaagcttatccagctctggaagctgccagtcc

SEQ ID NO: 230522 - DNA, 122 bp, Homo sapiens
attcgtgttcgtgtgtgtgtgtggacacattttccttttcggttgctctgtcctttggttcgtgctcgcctcgctttttccacactcctgctctctggctctctgtgtctctcgctctttcg

SEQ ID NO: 230523 - DNA, 122 bp, Homo sapiens
gccttcagtaacaactgtacagccgacataggcggaggaacacagacccttctcacacagcgggataaaaaggtgaatttggagctgacaggaaaatatatcttgtgacatatttgtctggc

SEQ ID NO: 230524 - DNA, 122 bp, Homo sapiens
caagcagagtcctcccccggacttttcctctggagttaattgggaagattttctctacttcggagattactttgaaggatgtgagcctgaggcatttggaggctagccatcttgcctttgta

SEQ ID NO: 230525 - DNA, 122 bp, Homo sapiens
cctttttctctccttctcaaccaggctgcaacattgaaagatggactgtactgggaggggcggagggagaggaaaaagggaaagcgatatgttcaaccaagccttctgattctgcctctaga

SEQ ID NO: 230526 - DNA, 122 bp, Homo sapiens
caccgctgccgcacaccccctttgcctttagcattttcctcctctcctctaattgcgtggcgtccccagatggtaggcggggtgtcggagctgggggtgcgtagtcccgggcctaaggctag

SEQ ID NO: 230527 - DNA, 122 bp, Homo sapiens
tcccgcacatctggctcatgctgagcaccaagatgcctgtcgtgtttgaccgaaaggcgtcggcggctcaccaggactgggcccggctgcgctggttcgtcaccatccagccagccacatcg

SEQ ID NO: 230528 - DNA, 122 bp, Homo sapiens
gtcgaagtaaccaatctcagtgcacctaggggaagtaatcgcaatgggagtaaccaatgacgccatgaagcttctcgtgcgtgcttgaccctgcctctccagctgcgacacagatggcgcgc

SEQ ID NO: 230529 - DNA, 122 bp, Homo sapiens
agggagccccaaaattgaaggccatgtcgcgaaagcaggagaccaagtaggttactcctgcgacgcgcagcgcgctccccttctcagtccggccgggaaaccgccagtcagatcaccgagtt

SEQ ID NO: 230530 - DNA, 122 bp, Homo sapiens
ttatgaaataaagtctacattaagagtatgtggggagcaggagaggagggaacaaaatgccgaagacagagacaagagagcaaacggaattaagtgcttttcgatatagttggaaagcagag

SEQ ID NO: 230531 - DNA, 122 bp, Homo sapiens
tttttttttaagatttgatctgaatatgataccggttgctaaatcacacggcggctggggcgggactgtcaaatggtccagaaaaggaagatacacattcccacagaagttaaacttttgag

SEQ ID NO: 230532 - DNA, 122 bp, Homo sapiens
cgcagcagccttcgaagccgtggctgcctttcatctgctgcgttttattactattatcgccgttccggaaaagtcatggaagacagcccgctgccagacctcagagacatcgagctgaagct

SEQ ID NO: 230533 - DNA, 122 bp, Homo sapiens
tgctggaggacccggcgcaccctccgcagctgctggcccgggtgctaagcccctcactgccggggtccactctgagtgcggggcccgccaagcccacctcatccggaactctatctagctgg

SEQ ID NO: 230534 - DNA, 122 bp, Homo sapiens
gcctgcctgcccggcgccacgcaagagaaggtgccaggggacgcagagcgactagaggcgcgcggtcccggccagcaccgtctctggcgttgtagctgcggccgtggcggaggactacggcg

SEQ ID NO: 230535 - DNA, 122 bp, Homo sapiens
aacagccctgggcattggcctctgattccccgtcacccagagggaagacccttttggggccgaggcgctcaccttcagccagtccccgtagtggacgtagcccccgatgtaggcggcgtagg

SEQ ID NO: 230536 - DNA, 122 bp, Homo sapiens
accccgtcctggcgcacctgcccaggcagtctggggtcgtggggccagttcatgggcagccgccgccgcacttccgaaaggggacgccagaggtcgccggcgcctagcgggagcatcggctt

SEQ ID NO: 230537 - DNA, 122 bp, Homo sapiens
ggttaagtccggctggaggggcagcaggcatccctgggctgtcgcgcctcccagcgcccccgatggagcaggtggcaaggctgcaaaaagaatttaaggctctaggaaagaggtggtgcagc

SEQ ID NO: 230538 - DNA, 122 bp, Homo sapiens
taaatattaaaatctacctgtaaaaaaccgtaagctcctcatccagtccctgaaatgctgcgttcgtttcaatttagaatcgagattgtttgtccttctagagcacctgtagggaaaaaccg

SEQ ID NO: 230539 - DNA, 122 bp, Homo sapiens
gcgggagataacctgtccctgctgctccgcacctcctcgcccggcggcgccttccggacccgcacctcctcgccgctgtcgggctcgtcctgctgctgctgctgctgctcgtcgcgccgggg

SEQ ID NO: 230540 - DNA, 122 bp, Homo sapiens
ccaggaagatgggaagagcacacaggcccaggagatttcaggaatcaccaggggtggatgcgctgatgaaatccaggcccggtgtggggccgggggtgcccaggggccctggaagaggaccc

SEQ ID NO: 230541 - DNA, 122 bp, Homo sapiens
tttcctttgcattcacaacttggctaactgtgtgcaagaggccaagcttttggcccatcacggcttttgacgtgcctacctcattaagcttaatcatttctagcttttgatataaagagaga

SEQ ID NO: 230542 - DNA, 122 bp, Homo sapiens
tggcgatccaggagcaccagtacaggtcggtgacggcgatgaggtacaggtccagcaggccgccctgcgccagcagcagcaccacggacagcgcctggtagccccagcggcacctgggactg

SEQ ID NO: 230543 - DNA, 122 bp, Homo sapiens
cactgtgctgggacatgcaagaggtatgtaccataaactctttagtcctgctaatgtcctcgacagaggacataaaacctcctaagaaaagctttgtctctttccagccaaggttaactatt

SEQ ID NO: 230544 - DNA, 122 bp, Homo sapiens
ccctgcgaggctcctggcacaaagctggacagtcgccatgacaagtaagggcaagtaatccgcctgccggaggaagcaaaggaaatggagttggggaggagggtgcagagtcaggattctcg

SEQ ID NO: 230545 - DNA, 122 bp, Homo sapiens
actttttgcaatgaagttgttagaccacctctggaagtgacagcaggagccacacatccacgtttattaagtgagttagagcaggagtccccaacccctggatctaggttgcacgctcctta

SEQ ID NO: 230546 - DNA, 122 bp, Homo sapiens
aaaccacaattggatccttattcctccagcccaggaatgcgaaggacgggacggtttaaccgccttctgcattttcctgcaaagagagccggcttgttatttcggttgtctgggctcccttc

SEQ ID NO: 230547 - DNA, 122 bp, Homo sapiens
ttaatagaaaatatcacattgtaaacaaatccattgatccatgagcttaaaacagaatgacggcacaatcacatagaaaagctaaagacaaaacactggtaccaaacatagcccttaggcct

SEQ ID NO: 230548 - DNA, 122 bp, Homo sapiens
agaatgaggtcattacaagaagagtttgactatttctaataatcattaaaaaacacccgccgcccttggattctcactcggggtggggagcgaagagctttgcaggacccatcaaggaaagc

SEQ ID NO: 230549 - DNA, 122 bp, Homo sapiens
ctccgccgatcctcagcctccccggctgcactctcacctttctctctgggtccttggtctcgccactgtgcaggtgtcggctcaggacagacctgcgccagtgtgagcatctggacctaggg

SEQ ID NO: 230550 - DNA, 122 bp, Homo sapiens
tgaaaggagcctcaacagatgcccactggctctggcaaggtcagatgaacaaaaaccattcgtgctgggatcaagtctctaattgtgggcaaaatgacagggatcacaggaggcttgcttct

SEQ ID NO: 230551 - DNA, 122 bp, Homo sapiens
gaaatccccaccttctatccctgtctcgtggtgcggtcccctgtgacggcctcagacctgcggggaacccaggactttgccgcctaccacggtctcagccttattctcgagcctctgggcgc

SEQ ID NO: 230552 - DNA, 122 bp, Homo sapiens
cactggtgcccaggcgtggggggtcgtcttctgccagaacagggagcacttcctcccctccgggctcatggcggtcgcttcgggccttcagcccccctcttctagagagtcccacaggggct

SEQ ID NO: 230553 - DNA, 122 bp, Homo sapiens
gtaacccgaaagccatagactcgtggggaaggagcggctctcgctggcgtctaagacttccggcctccaacctcctggttggttaatatgagagatagattaaagaggaagaatacagaatc

SEQ ID NO: 230554 - DNA, 122 bp, Homo sapiens
gcaggcgctggggcaggataataaagcctttgagagccggtgggttccgagggggccgtgcgcctctgaagttgcttctgacacggctttccggcctcctctgcttcctgcctggccccggg

SEQ ID NO: 230555 - DNA, 122 bp, Homo sapiens
tggtgctggctctccaggcttttatttgccagcattttggagccacgccctcttggagatcggctttcaaaccagcctcccctgcctgaagcctcagagcgatcccacctgggggatcttgc

SEQ ID NO: 230556 - DNA, 122 bp, Homo sapiens
ggctcccaaattcctgggagaccctctcccagggcctcctgatgcagctaccatactgagcgatccgtcgataacgcccttggcccaccgatcagtttaccttattagagagaaaagcactc

SEQ ID NO: 230557 - DNA, 122 bp, Homo sapiens
tctagccacttggtgcggcaggtgtcctgcaggccggctcgagattcccgagctcgccctcgtggtgttccaggaacacggtactttgcgctagcctggcctgtcctgagagactgcgggag

SEQ ID NO: 230558 - DNA, 122 bp, Homo sapiens
aaaacaaaacaaaacaaaaaatttttgtaaagacccctctcgctcataccaccagggccgcgcagggcgagagatctccacctcccctgggaggcaagacccacaccctcccaggtgcgcga

SEQ ID NO: 230559 - DNA, 122 bp, Homo sapiens
aggagagcttccagcctctctagaatcactactgcgcacttcctggacagcagtctccgtcgcaagaagcggagggaaaaaaaaaagcaacaagcagggatagaaccagcgttggccgccgc

SEQ ID NO: 230560 - DNA, 122 bp, Homo sapiens
acctaggctggggccaagccgcagagcggagttggcatttccagattggggctcgggccgcgcctcctccgggaccctccccttggaccgagccgatcgccgcggggcagttcgggccggct

SEQ ID NO: 230561 - DNA, 122 bp, Homo sapiens
gatgtggctttcggcgcatcaaatgttcaccaacttctctggtttcccaagcaacacagtcgttttagaatggtttcaacaattggcttcttcctggccattggcctcttaatgttggtgat

SEQ ID NO: 230562 - DNA, 122 bp, Homo sapiens
gcttagggtgtatctaagcatatggcagcagcactaagaaatatcgtccctgttctacatcgtcattgccctaggcaacagatgacatcccacacttccatgtctgctcccaattcttgcta

SEQ ID NO: 230563 - DNA, 122 bp, Homo sapiens
caaggtgacatgtgagactggagggatcatttgaaaaccaggggaagggcacgccaaacacgccaaggccctgaggcagccacaggctcggtatcttcaagaagcagaaggcaggctcgtga

SEQ ID NO: 230564 - DNA, 122 bp, Homo sapiens
gcagggtgccttcctgctttgtccggtgcactgagcacagacgctgctcctgttcaccctcgagcgcctaactaataagtcctaagctcaaatcacagaagtccagggtgctgccatttctt

SEQ ID NO: 230565 - DNA, 122 bp, Homo sapiens
gtggtaaaagccacacatggtggctcacacctgtagtcccagcactttgggaggccaaggcgagaggatcacttgagttagagaccagtctgggcaacatagcaaaaccctgtctctacaaa

SEQ ID NO: 230566 - DNA, 122 bp, Homo sapiens
atgcccatttagaggcctatgaaatgattgcgggaaatgctttagcagtgaggtgtcccacggatctaaggaaacagcgtggactttccagccatgttccactttggccactggtgtttttc

SEQ ID NO: 230567 - DNA, 122 bp, Homo sapiens
cacggcgcgtctgaggatgcgtagtaaggataacgggcccggaagccggaagttcaaagccggcctccagccagagtgacggcctgcgcggactcccgccttagtgggcggagttgtgccgc

SEQ ID NO: 230568 - DNA, 122 bp, Homo sapiens
gcgtgtggggtccccttccttccatgctgtgctgcgtgagttcctgctgtcttgtctaatcgtctccttcagtcccggcctaagcaggtaggagctcggggctgtgttccccgcgcctcctc

SEQ ID NO: 230569 - DNA, 122 bp, Homo sapiens
ggaaaaggaggtcggcgaagggaccccgaggcagggagtgccgagagcggactggggacccgaagcaggagactgcgcggagccgcccgccgagccgaggcgggatggaggcagccgcgggg

SEQ ID NO: 230570 - DNA, 122 bp, Homo sapiens
caagaagccaggcaaatctagcatgcaaactaggatcattttcgggcgttggggcccccccgcttgaaatctggtttccatgttcacaaaacgcagcccgactggtggaactcgcgactcca

SEQ ID NO: 230571 - DNA, 122 bp, Homo sapiens
gggcccaggcgcaataggaaactggttaggttgggctttgatccacacattctcctgcatcgaatcccccttttctccccaatctcttctaaagaaagactgaaaactcgctccaagaaaag

SEQ ID NO: 230572 - DNA, 122 bp, Homo sapiens
gatggttggttgtgggatttctactttgccttttcctccttatgccgccttagtgaggggcgggagctctggcggcagccccggggtggggagacgagctccggagtcggaagagctgggtt

SEQ ID NO: 230573 - DNA, 122 bp, Homo sapiens
tgttcactgaacgcaatgttcactttctccccgcatccctgggtgctgggaccagggctgcgtgctccctgaacgcgatgttcatttcctccccgcatccccgggtgcggggaccagggctg

SEQ ID NO: 230574 - DNA, 122 bp, Homo sapiens
ctccggtggccctgggcgccgtgactaaggctcctgtcagcgtctgcgtggagcccacggcgtcccagcccctgcggtcccccgtggggaccctggtgaccaaagtggctccggtcagcgcc

SEQ ID NO: 230575 - DNA, 122 bp, Homo sapiens
ttccctgactggaggttctttttgccgggttcctgagtcccctgttctgctgcctggctgcgagcccccagccagcgagcggcaccgtgcggctcggctggcctcccggcgggtgatggatg

SEQ ID NO: 230576 - DNA, 122 bp, Homo sapiens
ctggccgggggatcggggggccggaagagttttcgcctctccccagctctgaaagcgccgcgctgtctcgtcaactgggtgccggaccccgactggcctagaaaggtctttcaggcagcggt

SEQ ID NO: 230577 - DNA, 122 bp, Homo sapiens
cggaaacacaccctttccttaggcgtcctgcgtcccccgattcctgctccctggttgccgcgtccttggctggcgtcagaaaaatggctacaaactttctagtaggtgagaagatctggttc

SEQ ID NO: 230578 - DNA, 122 bp, Homo sapiens
gcgcactgggcgtcaataactttaaaaaggggggaaaatatcagttcccgagtctccatgcgtttcgtgttgaagaagaaaagaagcggggaagagaaagaaaaagtatgtggtgttggaag

SEQ ID NO: 230579 - DNA, 122 bp, Homo sapiens
cctgtttagtaacgctgcatgtgcaacagataacaggtagttcacgtgcacagacgtgtgcgaacatctatgatgtaaccgagcggggctgtgcagagcaactgttacaggctgaactgtgt

SEQ ID NO: 230580 - DNA, 122 bp, Homo sapiens
gtaccaccaatgctaacagttccaaaggctcccacaaatgaagtcaaatttacggaaaaacgggtctcatcagctgttggttgagttaaaacttctgtaaggcaatttggcactacttatca

SEQ ID NO: 230581 - DNA, 122 bp, Homo sapiens
gtgtgttggggaccctgcctttggaagcgcccgaggtagctgcttggcagctgggggccgcggaccgcgccgggcttgggggaggacggggctggaggctgggttggatgctttagaccctc

SEQ ID NO: 230582 - DNA, 122 bp, Homo sapiens
caagatgaacttttttgtggtttgtaagggttcggtatgtgatgaaggccttctcacactcgtcacacttaaagggcttctccccagggtgtacacttttatgatttataaggctcgagaga

SEQ ID NO: 230583 - DNA, 122 bp, Homo sapiens
acaccagctttccatagatttcataaacagctcccacagtttcataaggtctaatccctacgataaaatcctacattctatcactcccaggggctctgttctttgaccaagccctaaccatt

SEQ ID NO: 230584 - DNA, 122 bp, Homo sapiens
tttagacttagtgggttagtagttctgaagtgcttgggagagaattgggagcacctcaaacgtgacaggaatgttcctgtgttgtgtatcttgtgggaatggggtgctaaggaggactgagg

SEQ ID NO: 230585 - DNA, 122 bp, Homo sapiens
tctagttagcagtgccagattgtaagctgggactctagaactttcttttgtggctggatccggctggatgggccactttcttctctgcatgggccctgtcctagaaccacatcctcacctga

SEQ ID NO: 230586 - DNA, 122 bp, Homo sapiens
tttatgcaataaaaagaaatgaaatactgatacatgcttcaacacagatgaaccttgaaacgatgatgctatgtgaaagaagctagtcactaaaggccacatgctgttcaatttcatttaga

SEQ ID NO: 230587 - DNA, 122 bp, Homo sapiens
ccacggcaatctggggtcgctttgtaaggagctccgacctccgggcagtgcagggatactcgacggcgcgcgatgtcccggcggctccgcgagcctggcgcgctgagagccccagcagtccg

SEQ ID NO: 230588 - DNA, 122 bp, Homo sapiens
ctcctaccccaagagacgtttcctaaaagagtctcctgcacatttcacccctttggagcccgtgctccagctcactgccaaggaagcctcagaatcagtgccacagagaccttctatccttc

SEQ ID NO: 230589 - DNA, 122 bp, Homo sapiens
gccccagccgcagccgcagccgcccggctcgtctgccaccaccccgggcggcggcagcggcggctcgctcagcgccatgccgccgcccagccccgactcagagaacggcttctaccccgggc

SEQ ID NO: 230590 - DNA, 122 bp, Homo sapiens
ttcccgggtcttcggagcatcgcgagtgacagtggggttctccggggagggcgcggggagcggaggaaggttggctgggggaccggaggcgaagggggttcctcaaggccgagactgtctga

SEQ ID NO: 230591 - DNA, 122 bp, Homo sapiens
tataaccctaataatataatcctctgatctctggccactgttgccattcctaaaaatatccgtaggggaagctggatggcttgtgagggattccagggatccaaagtgattcgaaaaactaa

SEQ ID NO: 230592 - DNA, 122 bp, Homo sapiens
cagtacctacatcaagacttcaattatagggcttttgaaaccatcaagtattcagaacaacgaaaatcaggaatttgaacagccagatatgtggggttccgtttatacccatagttgcttaa

SEQ ID NO: 230593 - DNA, 122 bp, Homo sapiens
gcgctgggcagcgttcctggagcctcctaatagcagatattcatgactattaatattacacgaatacttaataagggaagaatgcctggaaatcgagcgtgaagcggagaggcaactcgcgc

SEQ ID NO: 230594 - DNA, 122 bp, Homo sapiens
ttcgtacattgtcttggtctttccccaggattacggggcgctgaaagacatcgtgatcaacgcaaacccggcctcccctcccctctccctgcttgtgctgcacaggctgctctgtgagcact

SEQ ID NO: 230595 - DNA, 122 bp, Homo sapiens
cgtccgcggctccggggcccccacccccactcccccaagctgggtcgtgaccccgagtcccgcagtggggggaccaagccagcctggcaggcggccccagtaccatcccaggcccgcccggg

SEQ ID NO: 230596 - DNA, 122 bp, Homo sapiens
ttaaaatctgtggcctcttgtgtctggcgtctttgacttagcacaatgtttttcaaggtccgtccgtgtcgcggcgtgtatcgttgcttccctcctttttatcgccgaataatgttccattg

SEQ ID NO: 230597 - DNA, 122 bp, Homo sapiens
acctggtgagggaccaggcacctccgtgccgctcgccgccactgagggcctgagcacctccgtgcaggccactcctgatgagggaccgagcacctccgtgccgcccaccgccactgagggcc

SEQ ID NO: 230598 - DNA, 122 bp, Homo sapiens
tcagactgactgacgtggaacttccgggagccgattctcgcgatagtcagaggccagggccggagcgcctgcgcaaactgcgcgcagggccgtcgtttcccaagccccgccccagtttccta

SEQ ID NO: 230599 - DNA, 122 bp, Homo sapiens
ccatttctgccgaatcacagaagttcaagagcggtcagctgatgctacgctgtgcggtcacgtgacaacgggggcgaagcgcaggcgcaaggagcaagcgcagattgtgggcggctgtgtca

SEQ ID NO: 230600 - DNA, 122 bp, Homo sapiens
tcatcagccagcgaaatggtggcaaggggacaagggttccctggttcagtatagggagcacggcagtggagaggtcgtgccccccaaactcaggacgagatgcccccgattttcacaagagc

SEQ ID NO: 230601 - DNA, 122 bp, Homo sapiens
tttgttcccagtgtctctggttccctattggtttatggccaatgactaatgctttacccacgagtcattaaacccattctgcacttttctggttccctaatcttcttggaattcatccttgt

SEQ ID NO: 230602 - DNA, 122 bp, Homo sapiens
actcgcaatccctcgccttcactcctcatagttaatgagacaccccctcggaggagagaacgcaatgtcagggccccagttctcacagcgccctgggctctttgaatgagagacatcaaaga

SEQ ID NO: 230603 - DNA, 122 bp, Homo sapiens
ggccccaagtgactgacaatctggtgtaacgaaaatttccaatgtaaactcattttccctcggtttcagcaattttaaatctatatatagagatatctttgtcagcattgcatcgttagctt

SEQ ID NO: 230604 - DNA, 122 bp, Homo sapiens
gccaacacagaagctgcacgtaccactgtggctcatgactttctagtcagaatccagttacgtggccactcctagcaggaatctgggaaatgctgtcattagctggataaccatgcacccag

SEQ ID NO: 230605 - DNA, 122 bp, Homo sapiens
tattccgtgttcgcttgtacaggaggatttacatggctgtataaagatggctaggggcgccgcgctcttctggggcgctcacggtgacaggctggggttaaaactggctgccccaggagaag

SEQ ID NO: 230606 - DNA, 122 bp, Homo sapiens
tcagaacctctctgtggggtctgcatgcacaaggggaggagcccctgttgggtggggtggcgaattcagttattttgtatgagcatgaatttgttaaataatcattcttctttctgacccat

SEQ ID NO: 230607 - DNA, 122 bp, Homo sapiens
ttgatgaagaactgacaggagtgcctgggagctccttagcacacacatcctgggctctcccggacctgcgagtctcctgggagctcctcagcacacagatcctgtgagtcaggcccagggcc

SEQ ID NO: 230608 - DNA, 122 bp, Homo sapiens
gtggggggtgtgctggtggctgccttactggtcttcactgtggccttgctggttcggggccggggggccggaaatggccgcctccccctcaagctcagccacgtccagtcccagaccaatgg

SEQ ID NO: 230609 - DNA, 122 bp, Homo sapiens
ttctcggtcggcttccgcccactccatcgcgttcatccgtaggcgtcaaacctgctcctgcgcctgcgcggagtctgcagcggtttaaaccgttcaggttcgcattctactgtttctctcct

SEQ ID NO: 230610 - DNA, 122 bp, Homo sapiens
aatatttcactcatactagcagccactgagctatgactaacccactctccccagcatcgtcgctggctccagatggcaagaaatacattccctttattcttgcctgaaaagcaattctgatt

SEQ ID NO: 230611 - DNA, 122 bp, Homo sapiens
ccaggggccacccaagctcagggccccgatatgatcgccaggctcctggcttgtggtatgcggtgctgcctgcccagccccacccaccaccggatggctaggctatctcactaggacaaacc

SEQ ID NO: 230612 - DNA, 122 bp, Homo sapiens
accaacccgcccgccgcctctccagggtcaagcgaaactgggtcgcaggaagaaaaataacgaagagattgtagattaagaaaaggcaacaaaaacactaccaggccgctaggaggaccgcc

SEQ ID NO: 230613 - DNA, 122 bp, Homo sapiens
gctcacccattgtctcattgccagtggtgtccaagggcccccgttgggacccacggctctcgtccctctgctccgtgtgtctcatgccagcagcacgtcgccatccgtcaccagaattagtc

SEQ ID NO: 230614 - DNA, 122 bp, Homo sapiens
attaagtcataaagctcacaagtgagatctcctttgactcaatgtctctcattcagggtacgctgatccaaagggtggactgccatggccttgggcagttccacccctgtggctttgcaggg

SEQ ID NO: 230615 - DNA, 122 bp, Homo sapiens
aagccttatgacgaaatgataggccttgccatacccttgaaatgaaactgagctccctaccggcctaaagccgctgttcctgagcttcatgtaaacaaggagggcggtaaacaccagaggaa

SEQ ID NO: 230616 - DNA, 122 bp, Homo sapiens
tctcagactcccacaccacgcagctctctaaaggtgctttagggctgaagtgcctcgccgcgttttttttcttttttctttcctctataaattaagtaaccctcgaatgacggcgcgcagga

SEQ ID NO: 230617 - DNA, 122 bp, Homo sapiens
atctccagctctctttttgaggtcatgctcctagagtagggagtatttcttatgagtcttcgaaccttcatattgctgacaataaacattgagtggaagaataacattagttttagtaggct

SEQ ID NO: 230618 - DNA, 122 bp, Homo sapiens
gccaaggaaaaatgagagcaattatcaattttaaagtaaaatacatagatcattctgtgccgtggaggtatgtaattggagtagttaaagactgtatttaggaatattgcaccaatatcagg

SEQ ID NO: 230619 - DNA, 122 bp, Homo sapiens
cacgcacctatgtccgcaaaaagcaggatccattcactttagagaagtgccctcaacaggcgcggaggaagacgtgccctcaacaggtgcggagaaaacttctctttcctgcttaaagtaga

SEQ ID NO: 230620 - DNA, 122 bp, Homo sapiens
atctttctaagtgtagatagtattgattgaatttttattgtggcatacgtaatctttagtcggaatgtattgataaataaaacgtgaaaagagatgtgcttttggagctacatttggtaggg

SEQ ID NO: 230621 - DNA, 122 bp, Homo sapiens
cgcccccgccatcctcccccggcccgcggtcgtcccgcactcaccaggagcacggagccgcgcaccacctcagacacgctctgccgcagctcggccgccgtgcccggcttactcagcgcccg

SEQ ID NO: 230622 - DNA, 122 bp, Homo sapiens
agtgactgaaataatgaaaattctgatcaggctcctgcttgcttgcacattttaaccactcgctttttgcccaatattctccttgtttccacaatataattataaactgctgaggtactgct

SEQ ID NO: 230623 - DNA, 122 bp, Homo sapiens
tcctctcttcgtttctaaccattttgcagtgcgaagagagagacccaggcgcaggccaggcggcgcgtgtcgctcggtctgaattgcaccgtaatcgccaaaaccttggcctaatttgcagc

SEQ ID NO: 230624 - DNA, 122 bp, Homo sapiens
aacagcggaccccgcccaagtcattactaatgtagcaatcgtctgcataaacccaggccacggttcctattggctgagtcctctgagggtgacgtcatcgggacgtactaagactagggttg

SEQ ID NO: 230625 - DNA, 122 bp, Homo sapiens
acctggcctctaacagtggccaagataaggtgtgggccaaagaccaggcctacatacatccggccttgctggcctcagagcaagaagagacctcagaacaccccaaggctgccaactgcttc

SEQ ID NO: 230626 - DNA, 122 bp, Homo sapiens
ggtcaagctcaccctgacgtcagggccttgttgctccctttacatgaactttcttccccacgaggcaatacaggactctctcccacccttgcttcaggtagctgcttgaatttcaccttctg

SEQ ID NO: 230627 - DNA, 122 bp, Homo sapiens
gtcccacagtcttcatgtaaatgaggcacccagagagagcctatgcgagcgtggcaggggcgtggccttccacctcccgagcatcgctctgattcattgttaaaataaagaggccatgaccc

SEQ ID NO: 230628 - DNA, 122 bp, Homo sapiens
aactcctgggtgcaagcgatcctcttgcctcaacctctcccaaactgctgagattacaggcgtgagccactgtgcctggctcaaatcatgcttaaaagagtgattttagagcttggcatctg

SEQ ID NO: 230629 - DNA, 122 bp, Homo sapiens
tcacagtgctgtgcattcagcagcggaagcgcattcatggtgtgcgttcagtggcagaagcgcattcacggtgttgtgcattcagtggcggaagcgcattcacagtgttgtgtattcagtgg

SEQ ID NO: 230630 - DNA, 122 bp, Homo sapiens
agagagctgcttggaccgtggctgtgcgcaccgaggcggtgatgcggcgccactgcaggacgctgcgccaggtgtgcgtccctgagtgcacccagagccagacctcccttaacccccacagg

SEQ ID NO: 230631 - DNA, 122 bp, Homo sapiens
gcggtcgcgcctgcctcggtggccgcgcggggtaggtggctgcggggaccggaaggatggcgaggaagtcggaaagggtttcctgagatgagagattacttccgtccgggctgcggcctctc

SEQ ID NO: 230632 - DNA, 122 bp, Homo sapiens
ttagggcgcgggggctttgacccgggcgttcacatggcgagggcttggcgtgggcatgaacgggtggctcctttgctggcggggaccgtgacccgttgggacgtgggcccgcgaggaatcga

SEQ ID NO: 230633 - DNA, 122 bp, Homo sapiens
agtcgatggtcagcttgcctgcgggtgctcttccgcggtgtcttctcccgccaacgagttcgtcaggatgtccagccgcttgtgtctgccacctagggtctggggggtttttataggcacag

SEQ ID NO: 230634 - DNA, 122 bp, Homo sapiens
gtcatgtcatatcagatctgggctctgtttccactgctgctactcaacctctctaagcctcggtttccttagttgtaaacaaaaataacagttgaccccgactaccacaggggttaggggtg

SEQ ID NO: 230635 - DNA, 122 bp, Homo sapiens
gcccgtggtccgactgctcttgggtcggtccccagccgtcgcgacacacacgcacaaaatcgagaataaaaaccgaatcacacatagcaggatggcgcaaaaaagaaatgcgtttgagttac

SEQ ID NO: 230636 - DNA, 122 bp, Homo sapiens
tgccgcggggcgagggcgggggtgggctcccaggggtcccggtgggcgggcgcgctagggcgagggcggggacggccgggcgggcgcgccaggtaagggcccagatttgctggtgaggggtg

SEQ ID NO: 230637 - DNA, 122 bp, Homo sapiens
gcgcggagagggaactgggcgcggtgaggcagttctgcggctcaggagagatccgaggcccgggaccaggcaaagaaggtgagggaggcaaaggcgcttccctacactcttttgttgttaat

SEQ ID NO: 230638 - DNA, 122 bp, Homo sapiens
ccctgccacccctccctgctggaccctctccaggagctgcggggccaccccttgcttgcccgttatattcacccgcagcaatggcgatggcccgggcctccaccttgtctcccatcttgcgg

SEQ ID NO: 230639 - DNA, 122 bp, Homo sapiens
tgacccagccgtctgacccctgtccagggacaggtgggtgcggggtgtgagcagagaggacggaggcaggtgtggctgtgggcagggtggcttctctaaggtcccccgtggtagtgggggat

SEQ ID NO: 230640 - DNA, 122 bp, Homo sapiens
gttcacgccattctcccgtctcagcttctgagtagctgggactacaggcgccggccaccacgcccggctaattttatttttgtatttttagaacagacgggttttcaccgtgttagccgtgt

SEQ ID NO: 230641 - DNA, 122 bp, Homo sapiens
tcggcattctgggattggtagttttagtccagattgtgacgtcaatttcggggtggcgcgcggtggtgcaaggatgcagttagagcactgaaatcttagaaaggaggcaacaaaacaaaaca

SEQ ID NO: 230642 - DNA, 122 bp, Homo sapiens
gtctctccacgcgctgccgcctagcaaaggagcatctttaggtcggtagtgaggtgcggccgggacgctgcaactcgctccgggacttgtaaacctggcaggtgttcgaggagcgccactgg

SEQ ID NO: 230643 - DNA, 122 bp, Homo sapiens
ggtgtcgtggttggcaggaagtgccacattcagggatattgacttctggctctttctccacgtgactatgagatgaagcaatttctgaagagggttaagataaaaaccttagatgtcatcca

SEQ ID NO: 230644 - DNA, 122 bp, Homo sapiens
cagggaaacacaggctcaggggaagaggtgtgtcctactctgccactcaaggccactgaccgttcctgtcccaggcttcagagcagagtccaacaaagaaatagcaccacccaggtgcacac

SEQ ID NO: 230645 - DNA, 122 bp, Homo sapiens
cccactttcagtcatttccaagactgggatgtgacctcagaaaaaggtccagatagaaggcggctctaacagtcagagagtatggatatttgctggggtaagaggtcttattgccagcagcc

SEQ ID NO: 230646 - DNA, 122 bp, Homo sapiens
tggccgcaaagctgccccggaagccttggggctcctctgtatagaagaactggtggggcccggcggggtgatgaagggcagactgcggcgctcagcgtagtcacggggcccaggcaggggct

SEQ ID NO: 230647 - DNA, 122 bp, Homo sapiens
ggagagactgagccactgggccaaggcggcctccgacccagcacacgccgctctctggcccggaccctggacatctcaagaggctcatagggacccccggcagactcgagccgcccctctgg

SEQ ID NO: 230648 - DNA, 122 bp, Homo sapiens
tggcgtccttgcccaagggcgggagcgtcagtgctcggcgctgctccgagtcagaggtggcgcgggacgcccctggttctccgacgccttcgaaagaacagcagctcgcgacctgcggggca

SEQ ID NO: 230649 - DNA, 122 bp, Homo sapiens
gcctttttctaaacagacggtaaatgcaaaacctcccccagagcagctctgaaggcagcgcgtttctcttcctccgtggtgggaggaggctgggctttgagggcgggaagccctggtcgagg

SEQ ID NO: 230650 - DNA, 122 bp, Homo sapiens
aggcaccaagttgctaaagtagcttgcctaatgccacacagccggggagcaaagagtcaacgcaaaccccatccctgtgcactctctgctgcccgggactggggccatgccctgagtaccag

SEQ ID NO: 230651 - DNA, 122 bp, Homo sapiens
gggacgccagagcatctctggagtcgggcagcaccaggaaacgggaaggagctaagtttgcgtcattgaggagctcagccaacatttgacacagattccaggtcccacccactattccaggc

SEQ ID NO: 230652 - DNA, 122 bp, Homo sapiens
agaactgctgtcccctcaagaacacacgtcccctacgtgggaggccgcgaccagcgactccgcccacttctcccagccggctgttacgtaactgcaacgacagccagtcagacgcggcagcg

SEQ ID NO: 230653 - DNA, 122 bp, Homo sapiens
gcagagttataattcccactgaatggatgcggaaactgaaggaaggcaggacaacacagtcggccaagatggtaagcagagcccgccatcaccacccagggatcagggcttcccaagcactg

SEQ ID NO: 230654 - DNA, 122 bp, Homo sapiens
gcctctccttcgtgaccccggagtgggcaagtgacgagggcacggccagaaacgcattggcgtcaaggaaaccacgacccatcttcctggaaggaaacttggggacacttatgaagagaaga

SEQ ID NO: 230655 - DNA, 122 bp, Homo sapiens
gcctacaaaattcacatgaaacgctgacgttggagttactgtacttatcagtcaggtttccgtgaaatttgtcaaaccggccagagcgctggtgtcttgacaattccttacgggaaagcccc

SEQ ID NO: 230656 - DNA, 122 bp, Homo sapiens
ggctggctgctccgagtgcggggccgccaagctcacgcccacccggaactctaagtggcccgcaagcgccgtgcgcagccccagttccagccggtgcgtctccctccacacctccccgcaag

SEQ ID NO: 230657 - DNA, 122 bp, Homo sapiens
gggcgcgcgggccgggagggggacgctttctggcgcggaccgtgagcggaggctggcgagcgccgccgccggtggagaccgacgcttggccagagccagcccgcggcgcccgggcctggccg

SEQ ID NO: 230658 - DNA, 122 bp, Homo sapiens
catcatgaagctgaatggccaccagttggagaaccatgccctgaaggtctcctacatccccgatgagcagatagcacagggacctgagaatgggcgccgagggggctttggctctcggggtc

SEQ ID NO: 230659 - DNA, 122 bp, Homo sapiens
agcctaccagttggatttcgcagcgggcgagggccaccacctgcagcacatcagcgaccacgagatgccctaagatttagctttggagtcaaacccttctgaccatccaagggcaagcacaa

SEQ ID NO: 230660 - DNA, 122 bp, Homo sapiens
acagcacgcaattcaactttcttggtacctgggactcgtagttcagaaggcgcagtagcacgaccttgcgaaaaagcaccggagtcgggaacacgcgcttctcatttttttctttttccttt

SEQ ID NO: 230661 - DNA, 122 bp, Homo sapiens
ggagcagtcaagcagtcatatttataacaaggccaccacaggaatcccactgctccaggccggaagggatcctgggggcaactcctcccacccccagcccgcctccctgtgcttgagtcctc

SEQ ID NO: 230662 - DNA, 122 bp, Homo sapiens
tgcctcaattttaccttggggacaaatgagtacaatactaatacttacacttcacagagccggtataagggtcaaatgataggccatgtagaaaacagccatggtaaatagttactaacatt

SEQ ID NO: 230663 - DNA, 122 bp, Homo sapiens
cggggttcgtgcggacccggcagggcccgggcgccgccgccgcggcagggagcacacacgcgctcgcgcaagcagctaaatccatcaaagccccgcgcccggctccgcgccggggctccgcg

SEQ ID NO: 230664 - DNA, 122 bp, Homo sapiens
agaaccaaagaagtcttccacttctcacaagccgagaaggtgtacatcatgtaggccccacgtcgtgaagcgcacgcctcggggacgggctgcagtgggcggggaggccacgccttcctcct

SEQ ID NO: 230665 - DNA, 122 bp, Homo sapiens
agcttcctcccggtcatcctcagggcagctgtagcatgactgtcacctcatcagcgaggccgtgcctgggtcccgagtgagggcgctccctgactgatgcggtgcctgccccttgctctgac

SEQ ID NO: 230666 - DNA, 122 bp, Homo sapiens
ttgattgggtttactgtgctaacttgcactgggctcctgccatgccttgggggagcttgccggagccggctctcctggggctgacctggtagtccccgccgcccgccagcgtcaggtccttc

SEQ ID NO: 230667 - DNA, 122 bp, Homo sapiens
gttgacgtccaggatgatgctgcagcggaagggagggtcgaaggagtgggtaagcgcagacgccctcggcctggctctccagcctcctgcgctcacaaccagccgtgcccgtgcctgcccgc

SEQ ID NO: 230668 - DNA, 122 bp, Homo sapiens
ggccgccggccagctccccccacggccccctgctcaggggcagcgagaaggcgggggcttcgcgccacgtgcgccccactcctcgggaaaccagccctgatctgccaccaaagggcagcccg

SEQ ID NO: 230669 - DNA, 122 bp, Homo sapiens
gtaggggagcatcccgcgcgcgtgttcctgcatgtggctgcctcttcttcccacccccctcgcgacctgtcttttgcgaagccgccgcggctgcttgcgctgcggccaggaagagagtcggg

SEQ ID NO: 230670 - DNA, 122 bp, Homo sapiens
ccgagcgctgtgagaggaacccacgaaaaggtgactggacgccttggagggcgcagttcccgctaggagctcggccccgcccccgcccccagggccagctctcgggaggggcaccagctcgg

SEQ ID NO: 230671 - DNA, 122 bp, Homo sapiens
cgacggcggccctcacctcgcagactgggtccagctcaggccccgtgacggtcaccccctcggccccaggtaccaccacctgccagccccggtgtcagtggacagagtggtttgatgaggac

SEQ ID NO: 230672 - DNA, 122 bp, Homo sapiens
cggcgcacgtcactacggatgagaaggtcctgggcgcctgtggagtgacctcgtccagaccgccgcagacccgatcggcaagttcttggaggtgcaggaaggttctccaaggagtaggacca

SEQ ID NO: 230673 - DNA, 122 bp, Homo sapiens
agcatggctgagacatggacctgggagacagaaggctctcaagggaggaggaagcagccgcgattccagggcaggccggctctgcgggtctccatgggaacctgctttacctcaaaagtcgt

SEQ ID NO: 230674 - DNA, 122 bp, Homo sapiens
gtccttccatcggaagggctcatgcaccaatgacggtgtggccctcctgtcctagcttaccgtcgggtggtaaaggtaagaaatcccggtgcctgggctgagaccctgcccacttctgccgt

SEQ ID NO: 230675 - DNA, 122 bp, Homo sapiens
gtagccgggaacggctgggaaggtctccacagggaccaccacatgggcaaggctggtgtccgcgccgagggatcggcgatcccaggtccggggaaactccgcgagcgacgcgctcgcccgcg

SEQ ID NO: 230676 - DNA, 122 bp, Homo sapiens
ttaaaaaaaaaaaaggtcacattcacagaataccgaggagacggaggcagctctgcaacccgtccactgagacgcggacacgctccccacagccccggccccaggcccgcgccccttccccc

SEQ ID NO: 230677 - DNA, 122 bp, Homo sapiens
tcttgagccacagtcactggattgactttgctgtcaaaactactgacagggagcagcccccgggccgctggctggtgggcccccaatgacacccatgccagagaggtggggatcctgcctaa

SEQ ID NO: 230678 - DNA, 122 bp, Homo sapiens
gagatggatcattgacctttgtctataggaggctcttttaaaccctactgtgtatatctccgttttttttttttttttctgataaacttaccagtgtaatttttttttgagatggagtctct

SEQ ID NO: 230679 - DNA, 122 bp, Homo sapiens
taccagtcaactctgagaagactaaaggtcaagggacaatgaaaatgtgacccttaccaacgacagaaactcccaggaagccacaattaactcaagaccaccaggatatttggggaagttta

SEQ ID NO: 230680 - DNA, 122 bp, Homo sapiens
tcgcttctcagcgccgtccttttccttcttggaggccaagggctggctggacctccagctcgactggctcttcttcccttctgcacggagcaggtgggagagaagagcggtggctgcgctgc

SEQ ID NO: 230681 - DNA, 122 bp, Homo sapiens
ttcactggggtggaatgggatggcagcggagcaggggacagcctaggctaaaaggccgcccgggggcagcccctccaggtaacccgtcccgcggcccgccagcatggagcaccaggcctggc

SEQ ID NO: 230682 - DNA, 122 bp, Homo sapiens
ttggctacgtcgaaaaggcaaaagtaaagaaagcgaaggcgaagggcagctcaatgggaacgattcagggggtcttcccggctcccagcacccccaagaagatggctgccggtaaatctcgc

SEQ ID NO: 230683 - DNA, 122 bp, Homo sapiens
ttgacagccaggggtgtttaatgagcatctccgactccatctctccggcgtgcccagccccggccccgctgtgcctcccgcgggcacccccaccggaaagttcggaaccaactacaggtccc

SEQ ID NO: 230684 - DNA, 122 bp, Homo sapiens
ttttagaagaaaactcgccttgatgttcattggggttcaaaataatcaagttctgcagaacgaagctgggctgtggctggggtcctgaggcctccgcggggctctcaccccgtgcaggcagg

SEQ ID NO: 230685 - DNA, 122 bp, Homo sapiens
gatcggggactccgtgccaccctactccaggcccggggctggctgcccgcccacacgagccgagtctcgagagctcttccagaagagaatcccaaaccccaggcaaacccgaggcgaggcgt

SEQ ID NO: 230686 - DNA, 122 bp, Homo sapiens
tctcttcatattaggtatggctcccataccctgtctttggctccagtcatatttaaaccccgcacctaccctcatcatgtaattttagttcatgcatttgtcactactattcccgttttact

SEQ ID NO: 230687 - DNA, 122 bp, Homo sapiens
tcggcaccaccggccagggcgggagtgaggaagtggtgggacacacctcagccaggaagacgtggctgttcccgggcacttgagaggttctttctaatgtttgcaattgtgggggctcagaa

SEQ ID NO: 230688 - DNA, 122 bp, Homo sapiens
gccccggatcgccggtcagcctggaattccctccccacagtcctccggctcatccgtgtccgcccctcccgcaggtcaacgtggagcacatgacggagaagatgaagacagacattcagagg

SEQ ID NO: 230689 - DNA, 122 bp, Homo sapiens
gggtttttaaaatgaggattaggatcccctcctccaaacctcctgccctgaattgctttgcgtattgcagattgagagaagtcctttctccctctttggccaatggaagcctgtgacaagtc

SEQ ID NO: 230690 - DNA, 122 bp, Homo sapiens
gaggccgtcgtgcaatgagactattcgcatggcattgtcaacgcggcggcgcgcgcgtctcggccctccgcggcttgccagactgtcctgcaaaccacctcacccgtctctttggcgcagga

SEQ ID NO: 230691 - DNA, 122 bp, Homo sapiens
cggtagttaggtctgctcattctcacccctgcaattccgctttcagctggaggccttaggcgagtcagctgcccaaacgtgggatcggggctcctgctccagcggccctacagggatttcgg

SEQ ID NO: 230692 - DNA, 122 bp, Homo sapiens
agccgctccggcacttccggcaggccagggcacttccgggaccggggaactgtgggatcacggcggactgagactggcggcgttcctgtcacgtcaggtgtctcccgggcaacgcagtatcc

SEQ ID NO: 230693 - DNA, 122 bp, Homo sapiens
cagctctgccccacccatgcaagggtggggagctctttggattacatgatctctaggattcgtgggtactttctccagaacaggggcagttctcaagaggcgtgtggccacttaggcaggta

SEQ ID NO: 230694 - DNA, 122 bp, Homo sapiens
cgagcccaagagcgcccacacgtctcccgagaagaagaaggtgagcatggccgaggccaccgggcaccctccctggcttagtctcaggacagctcagctgcagagcatgctgggagtgagac

SEQ ID NO: 230695 - DNA, 122 bp, Homo sapiens
caccttttgaccatactttcttgactccaggagaaggtacagattcagagacaaaaaatccggtctgactttaagaatctccagtgtttcctacatgaggaagagaagtcttatctctggag

SEQ ID NO: 230696 - DNA, 122 bp, Homo sapiens
gccaatacaaagaaagaaacatgattcattgcatgagtcacagcacctgtaagttaggaacgaaccagcttcttgggaaaaccattacaattgctggcattgaaacttaagaaatatctctt

SEQ ID NO: 230697 - DNA, 122 bp, Homo sapiens
aaacaaacttcaaaccttgagctttaaaactagaagtcgtctaagctcagtgctattctacggctcagcatctgcctggctgagatatcattacacatcgggcggctgaaatcctctgcttt

SEQ ID NO: 230698 - DNA, 122 bp, Homo sapiens
cgttgcagcttgaaaggttgatccacgttaggagtggtgtatttctattgatcccatctccggtgttgacaaacgccagcgcctaggctttgcagtccggggctgcagtttgcagtagagct

SEQ ID NO: 230699 - DNA, 122 bp, Homo sapiens
acttttgctcctcaggggccggttccgaatgaaggaaagggaagagatgtggcaaaaaatcgaggagctggcccggcttaatccccaggtgaggttttcctgccactgttgtgaactgaggg

SEQ ID NO: 230700 - DNA, 122 bp, Homo sapiens
ggagctgggtgacagcgtgcacaggcccaagcatgggatccacccagttcctgggaactacgtccctctgcgtttctgcccaacaagcttcccttcatgaagcccatgaaactgaactcatg

SEQ ID NO: 230701 - DNA, 122 bp, Homo sapiens
agtccccttccagatggggaggttagactggggctagccagactgctccacatagacttccgattcgaattagaaatgaaaagaggagaggaaagggaaaaggaagaaagcctacaagcatg

SEQ ID NO: 230702 - DNA, 122 bp, Homo sapiens
ctttctgccaatgccaggatgttaccaacacttcttagcctgagtccctttcctctaccccgaaggctccttgactcctacagaagtctgcctctttccctaggtgtttaagttactattat

SEQ ID NO: 230703 - DNA, 122 bp, Homo sapiens
tggatgtgttacctcttccaaaaaaaatcgaaatctgctctgaagcaagagctgaaatgacgcaggttagactcccagccccgcgctcacctgagggctcgcttcagcccgtctgtcaccgc

SEQ ID NO: 230704 - DNA, 122 bp, Homo sapiens
gggcacagtggcctccctgtgtgaggaacttgcttcccactcaccaaaagacaaacccttcgcccatccctggccgcgcacccggccggtcacccgcgctgccacccacaccaccctcctgt

SEQ ID NO: 230705 - DNA, 122 bp, Homo sapiens
ctttgagctcgaccatcctaaaaacaaacctatactaagaaatgagctggggttggactgcgatacaaggagccctcacatttgccagtggaactgtaaatcggtacaacctttctggagag

SEQ ID NO: 230706 - DNA, 122 bp, Homo sapiens
cctgacgcacgcagtgacccgaacaaagcccgtgggaatcatggggcgttcctggagggtcgcctagacgacccagcccaaccccacccacagtgcctggcaacctagaccagtcagggacg

SEQ ID NO: 230707 - DNA, 122 bp, Homo sapiens
tgagcccagggaggcaggggagctgggggcccagggtctgtgcctgcccatccgggaggacggttgcgggaccctctgctccccagcccaagcctgcttccccttccggaatcctcaggctt

SEQ ID NO: 230708 - DNA, 122 bp, Homo sapiens
tgggctccgcgtgaaggtgggggtgccttcggcgacgccacagaggcggaccttcgacgacgtcacagtggcggtacagtgcctggagcagggctgtcttctccttggagtgcagcctggta

SEQ ID NO: 230709 - DNA, 122 bp, Homo sapiens
tcccttcctgggccccagaacacctccggtgccaaacttgtgggtgggaacaggaactcgcgtgccagccaggtgtgcatgactagctctgggcaagtctgttctagtaattcaaggtacca

SEQ ID NO: 230710 - DNA, 122 bp, Homo sapiens
tgcggcccacccctccctttccggtcccccaatccacagccgcaagtttccccaacactgcgttacgctacgccacgcccccggaggttcctaaccctgcgtgaggctctttcacctgcctc

SEQ ID NO: 230711 - DNA, 122 bp, Homo sapiens
ggtttctgccctcagggttgttacgggacagaaatggtttcatcagaaacaagccctcctcgcacactcacagtttgcaggactccgaactgggcccgcgagatctccacctgcgcaaaacg

SEQ ID NO: 230712 - DNA, 122 bp, Homo sapiens
catggggtctgggtgggctgctggggtgggcatgtgaccgcattccctccgccagggtgacggggtcagcgatgagcctgggatccaaggcgagccatgagcatcttgcctgggacttaatg

SEQ ID NO: 230713 - DNA, 122 bp, Homo sapiens
tccagcctgcatgtctgtctaaaaatgtagcatccgaagctaaactcggtactccatgctcgtagcttgatcaggagagactggcacatcaatccccagacccctggaagggatgtcccctc

SEQ ID NO: 230714 - DNA, 122 bp, Homo sapiens
tttgatatgggttacaacattagtattggtggaaatccttttaagacccagctgaaactacgaacatctttattggacatcagcatttaaagcaggaattttgagaaattagcacataactt

SEQ ID NO: 230715 - DNA, 122 bp, Homo sapiens
gagaaaatgagaggtagaatggactctaagttaaaccctgggggacagtgtcactctggccgctggcctggctgggaaaggcgatgagaccctgagcaggttaaaacccgtgtcctgaaggt

SEQ ID NO: 230716 - DNA, 122 bp, Homo sapiens
ggcccatctgctctgttatcgatgctcctgttgccggcttccccttccttggcctggttgcgtccaccgggaggccctcccggatgcctcctgcctgggagtggcggttgtgagtacagtaa

SEQ ID NO: 230717 - DNA, 122 bp, Homo sapiens
gtactaagcatgggctgtggtgttttgcaccaagttgaattacttcttgacacattgccacgtggtggtgcacaactcagagatgactgtcactgtcagcctggcctgtcacagaatgctca

SEQ ID NO: 230718 - DNA, 122 bp, Homo sapiens
taaaaggggttttgaggtgaagagcgcccgaggcttcgatgacagctcggaccgggtcttcgactccaggggcgggggcgacccgggagccttccattgtgcgcgccccttcctctccccgc

SEQ ID NO: 230719 - DNA, 122 bp, Homo sapiens
tatctccttcccaaccaagcctttaagtgactgggttaccaccagctgctctacaccccacggagtcactctactcatcaaactctttcttcaatcccgacattttggtgacagggttatag

SEQ ID NO: 230720 - DNA, 122 bp, Homo sapiens
ccaactaggtaaacacagaggaggttccacatggacttatctgggtggctgttttgaaaacgagaaacagtcaagagtccctggccccacagacccacctccccaactcagcactgtctgtc

SEQ ID NO: 230721 - DNA, 122 bp, Homo sapiens
gccagcaaccccgtgagaaggacttggacccactggtgagcagagcctccccgactttctcgtgtggcgacagctgcctcctttcgggagtgagacccggacatgctctcacaagagcggtg

SEQ ID NO: 230722 - DNA, 122 bp, Homo sapiens
actggaggtgagttcgcagccggaacgttgcaggcacttgtttcctcagtggatgcctttcggcgcgccgccgcccggcgccgcgggactgggagaccgggtagggacgggagagtcggcat

SEQ ID NO: 230723 - DNA, 122 bp, Homo sapiens
ggaggaacagatgcccttctttaattggttctcagttaacttctcagaggctctggagaacgggacagtggctttctagcctctgaatgttccaaataaaattttttggtcttggcccctgt

SEQ ID NO: 230724 - DNA, 122 bp, Homo sapiens
atgcctgggctcagccttctctggaggcttcttcactttgtggggatcctctaggtgtgtcggccacatgattccccttcactgattcatccagcaaattcattcccctccactgattcatc

SEQ ID NO: 230725 - DNA, 122 bp, Homo sapiens
gcagagactggcacagtttggttgggcgtgaccggggcaataagtacggacgtagtggggcgtggatctgccaggtgggggcgtggcctccattgaggggcgtggccctggtatgtggggcg

SEQ ID NO: 230726 - DNA, 122 bp, Homo sapiens
agctccaccaagtttttattgaggtatctttacataggcatgattgattgaatcattggccgcttgactgatctcaatctctaggatcccttcctggggctgataccactagtttcaaagct

SEQ ID NO: 230727 - DNA, 122 bp, Homo sapiens
agaaggagccagagctaatggccttattaggtgctgagcagggcaagccgtgggacctaacgttagacttacagaatcctggaccatcagagctcaggccctggcaattaatcaactagaat

SEQ ID NO: 230728 - DNA, 122 bp, Homo sapiens
cagtgcgcgccctgcctcccatcttcccggctcgccgctcctgagcgcggcagagaggggcggtaaactgaggctgcaagggggcaggatcactctgctagtctctgcctctgatagcctgg

SEQ ID NO: 230729 - DNA, 122 bp, Homo sapiens
tcttaaacaccaacaaacacgacaacaacaaaactgttcccattatctagacatacctgccgctggatttcatacaggcatctcaaacctaaaagttcccaaaatcaacacctaatctcttt

SEQ ID NO: 230730 - DNA, 122 bp, Homo sapiens
ttcccacttctcttctatattattactatttaaaaactctattgaatcacaatagaaatacggaaaagtacatacaataagcagattttcataagctgaaatccacctgggcaagcagccat

SEQ ID NO: 230731 - DNA, 122 bp, Homo sapiens
tgctaggaatacactggtaaacaaaacaaagcccttgttgtcacggagctaacagtctagcgaggctacatcagatcattctgctccctggttaaaacctcttcaatagccaaaaatgaaaa

SEQ ID NO: 230732 - DNA, 122 bp, Homo sapiens
cacccggaccaccagactccgggatccctccaagaagtggccgaagggaggtaaagcgcacgaactccactccggtgccaaaggccaggatgaaagaggcgagggcagcagggatcaggagc

SEQ ID NO: 230733 - DNA, 122 bp, Homo sapiens
ctattgtctcattctcttgctccttgggtgtctgtagctaccccttccatgggagttcctcgttaatggtgatcacattaccctaatgcatatctcttctaccagttacaactctaacttac

SEQ ID NO: 230734 - DNA, 122 bp, Homo sapiens
tcttcatttcagtccctgatacataagacagaacagtcctccaaacacctggccacaggccgagcttttcacgaggtacacgccacgcatatgtatagcctctccagctttccatgaggtac

SEQ ID NO: 230735 - DNA, 122 bp, Homo sapiens
ttgacaaggactccgtcgtcccggatgatagtgctcaggttaatgccagtgggagggcggcgcccaatagtaacttcctttggaggttgtagtaccgcccccagagccaattttccacttcc

SEQ ID NO: 230736 - DNA, 122 bp, Homo sapiens
ggccccaccctccgtgcgctcgttggctggcgagggagacgagcctgggcgccttgggcacgcccattggctccgacggccgtccttcagggcgccccctcggtggggtggccgaagagctg

SEQ ID NO: 230737 - DNA, 122 bp, Homo sapiens
cccccgtgctgggctcacccatctgacatcaacatgaaggtaggagcctgatggtgtctccgacgtgtcctgctggcattgggcaatcctgtttgaagattccggatctagacactggggtg

SEQ ID NO: 230738 - DNA, 122 bp, Homo sapiens
tttttacctgacttttcggatgacatgcctgcggtctcgctgggacagggtccctgcagccggagtgggggtcctcggccggtgctggagtctgggtgctggatggcgcagccggcagcagc

SEQ ID NO: 230739 - DNA, 122 bp, Homo sapiens
gggtagttgatttcttcttcacaaaatgggccctcctctgccccttggagggtggtcatccgacttgctggcccagaaagtcctttttttccaccttctttgtctaaatgaatcttcttgga

SEQ ID NO: 230740 - DNA, 122 bp, Homo sapiens
aaaaaaaaaaaaaaaaaagttaaactgtggtggggaaagttgttggcgacaatacagacccgcatggatacaggcagcggggagcatgagttctggagccaaaattgctgagttcaaatcct

SEQ ID NO: 230741 - DNA, 122 bp, Homo sapiens
tttggagcctgtgtctgtcctcctagtgtgttggggtcgaccagagcgattggcagggaccgtcagagacagaggtttaagcaggaagagagacactttcttctgaaagtagagccactgac

SEQ ID NO: 230742 - DNA, 122 bp, Homo sapiens
gtagaaacagttttgggaagtctgccattctactatcatccagctttttactcaagtgtacgaattaatttcccacctggaaatcaatgtatgattagattaaaaatagaacaaacacacaa

SEQ ID NO: 230743 - DNA, 122 bp, Homo sapiens
aaacctcctcttcctcgtcgtcgtcgtcctcttcttcctcgctgttgttactgctggtgccgccgccgccacctccgcctccaccgccgcctccaccgccgccgctgttgtcgctgtcgctg

SEQ ID NO: 230744 - DNA, 122 bp, Homo sapiens
ctcacctgggggacagcggggagcggccgcagctccggtgtccgcggcgagggcgcagggcgagtcagcgagcgactccagcagcctcgagccccgctccgcccagagtcagacgggaggag

SEQ ID NO: 230745 - DNA, 122 bp, Homo sapiens
cggcgcggattggcggcgcgcgtctcccacttcccctcggaggaaaggctcagctcccagcgcgcccctcccgtctccgcagcaaaaaagtttgagtcgccgctgccgggttgccagcggag

SEQ ID NO: 230746 - DNA, 122 bp, Homo sapiens
cagcagcgccaatgcggagcacccagcagtgtcaaggcagcagctctggcacgcgggaggcgcatgcagcgcgggagggaccacgcctactgccaaaagcagctccctgctgggagcccagg

SEQ ID NO: 230747 - DNA, 122 bp, Homo sapiens
tttgtcaaaaaacatacagttaacatttcaatgaatgtaaattttaccttaaaaactatacgaataaatgcaaatttaaaatctgctagctaacacctagttgagtactcagtgtctatggg

SEQ ID NO: 230748 - DNA, 122 bp, Homo sapiens
gccgcatccaggaaaaacaggcgctttggggctggttagaacaaacaaagccccaattcccgagccctgttgaggctcggacagagaggtttgcgcacaacctgcgcttctgcgcaatcagc

SEQ ID NO: 230749 - DNA, 122 bp, Homo sapiens
ctagtggaaactaccgctaatcccgcctccctggccatagctgagaagctggagctgccccgggttcgaatcccagatccaccactttctcgctgtggaactttgagccaggtgttcaatct

SEQ ID NO: 230750 - DNA, 122 bp, Homo sapiens
gacgctccccaggtcccagcaggcgccaccagcgtcccaaacgccagcgcactccgcccgcgcctcccagagagcctggtgaaacagggaggttttcctggccgctatcctggcggggcgcc

SEQ ID NO: 230751 - DNA, 122 bp, Homo sapiens
gggtcggggggcgtgtctacactcagggtgcaggagccaggagccgggagctggagcaggcgaccaatccaatcacgtttactcccagtcgtccccggcgggggcagctcctgcacgccctc

SEQ ID NO: 230752 - DNA, 122 bp, Homo sapiens
agagcacagcactggaaggaagtggggggctgcaggctttcctgggaccccggctgggggcgtgtaggaggacagctccacctcaccgatctggcctcctggccgggggtcctccccaggac

SEQ ID NO: 230753 - DNA, 122 bp, Homo sapiens
catgagctatttgtagacagaaggaaaaacagtgaactaaatggcttaggcttagttccacgtgcaggctggatgcagaggactgtcatcctcaatacaggctgcaaaatgatgccaagggt

SEQ ID NO: 230754 - DNA, 122 bp, Homo sapiens
gttattgataaggacatttcatacctaacaagggccaggtgacatttcctcgtggctgcccgtagggatgtgggctcagatgtgaaccgaatggagagaaagagacgattgtgaagggaaag

SEQ ID NO: 230755 - DNA, 122 bp, Homo sapiens
ccgtccgctgacttccgcaatcaaaaggcaatttcctcgtctcccggcaaaggaacaatgcgccggcgagggagggagccccgaggagccaacgcctgagcctgccaaggggcccgatgtgg

SEQ ID NO: 230756 - DNA, 122 bp, Homo sapiens
gataattttatcttacctatagcagtttgcacaacagtagcgttttatttcagatattaccgttgcataaagtatgcagtggagcacagttatattgtatatatgttaattatatttaaatt

SEQ ID NO: 230757 - DNA, 122 bp, Homo sapiens
accctatttctccccacatcatgaatccaggttggcctcaatcatccaagggccactgatcggaaacctcagccaaccccaagatagaggagcccagaagtacctctctcctcatctaaccc

SEQ ID NO: 230758 - DNA, 122 bp, Homo sapiens
ttgcaggatgggggcagtggagcttgacaacattgcaggctgctgtgtggataaacagctcgtaatgtgccatttaaatgggaagcattgggatgaagtgttcctggggcttgaagtgaccc

SEQ ID NO: 230759 - DNA, 122 bp, Homo sapiens
gccttgggaggcttctctgaggagattactcctgagcgacaggaagtgctggaggaagtgcgttccaggcagaggggcagtaggtgcaaaggccctgaggcacaagcctcccttagctggga

SEQ ID NO: 230760 - DNA, 122 bp, Homo sapiens
ggggcggaccctgcgaatagaccgcccccgtataccccgcgctgtctgtgcgcgccggaccgccaaaccgagattagcaaggaccaggaccttaatataaacccagctccccattttcccgg

SEQ ID NO: 230761 - DNA, 122 bp, Homo sapiens
ggcattaaacatatacaccaccaccgtttaagttttaaagtgctcagcatagaacagatacgtagaaggaatagagtgaatttatgcttctaaagtgattaagtttcctcaagactagagac

SEQ ID NO: 230762 - DNA, 122 bp, Homo sapiens
cgaactcactccagctcccgtttaattccatagcatcaggatttccctgcttcccagctgcgcacagagctggaaccagtgagcagagctcagcagtgaggctttggattaattgttgcagt

SEQ ID NO: 230763 - DNA, 122 bp, Homo sapiens
gctcaggacccaggggagttgtagttctctaatccaaagaaatcattatttggcaacgtacggttttcagggggatataccccgcgactgcgttcctgtaggatgtgagacaaagagaataa

SEQ ID NO: 230764 - DNA, 122 bp, Homo sapiens
acactagctctggagctaggacgagttcataacgaacttcagacatacactttcatcacacgaaaacacttcctgggcgctgctccggtggaaagccacagactccactccgagggcaacct

SEQ ID NO: 230765 - DNA, 122 bp, Homo sapiens
tggaagggctagaattacacagagtgctggcaaggatacgcggctgccggagcatgacgccgcgcccctgcctgaagaacagcgactccttccaggcgaaacaatgtcctgctctgggactc

SEQ ID NO: 230766 - DNA, 122 bp, Homo sapiens
atgaaagcaaaggggaagttactgatgggttctttggtggaggtgacctgaggagggttgcgttttaaaaagaaagctttggccttgggagggaaaagagctggagagaggccagaggggtg

SEQ ID NO: 230767 - DNA, 122 bp, Homo sapiens
ggaggggcttggttgggtccagctcagtctatgcggcaggtggggagagacagggagaggcggtcccatcaccatgcaggaccatgccctgggcccccttccaggagctggcggcactgagg

SEQ ID NO: 230768 - DNA, 122 bp, Homo sapiens
agaagctgtaactgccagagcctgagaatcgccccttctcaggacatggcgtactccctgcgctcgcctgcacactgcagggtcagctgactgccgtccctccacttacaacagcgggacgg

SEQ ID NO: 230769 - DNA, 122 bp, Homo sapiens
agagcaaatgtcccagagaaaagccacctgacccactcccgtgacccctgaatagagtcacgtgacctggtttccctgttctgggtcccgcagcttcctgagctgacctgcgggcaaactct

SEQ ID NO: 230770 - DNA, 122 bp, Homo sapiens
cagaaaacaaagatgtaaataggcatggaagaaggctattcttggttcttgttttctgtccgccaccattggcaagactatctactatgcgtaggcatgggaaccagttaaagaaagtgtcg

SEQ ID NO: 230771 - DNA, 122 bp, Homo sapiens
cccggcccgccccggccccgcctatgtccccgccaccgcggaccgcacctctcggcccgtcggatcctccgaccccaccggacacccggccgctgtcaccccgcttctgtctcgccctgggt

SEQ ID NO: 230772 - DNA, 122 bp, Homo sapiens
tttgtgggctctgatacctgtgctacactaagtatgatgttggcaaatcacttaatctctcgaagccacagtatccttatctgttaaatggtgctcaccctcttaaagatgctaggaggggt

SEQ ID NO: 230773 - DNA, 122 bp, Homo sapiens
tcctgagaggcagacggcaccatcagggccaaggcaccggggctgtcccagatcctcctgcgaatgtggtgggaattacgactgctccgcaaagtgagcccagacgcacacattgcataaaa

SEQ ID NO: 230774 - DNA, 122 bp, Homo sapiens
ggccagacccggaccggaaccttggcgcggtgacgctagtttccggcgggctacttagagcgccgaacagctctgggccaaaggaccatgagagggccggagccgggtccccaaccgacgat

SEQ ID NO: 230775 - DNA, 122 bp, Homo sapiens
tctcagcttgcggggctggtgagttaacacctggtaactctttggcgagttgcgcctgtccgcttccgccagtgaccagggcagttctcacgtgcaaatgaaaggtactaacccttttgatt

SEQ ID NO: 230776 - DNA, 122 bp, Homo sapiens
aaaactgagtggtacatttccaggagggaatgagtagtcatcagcgttaaaagcagctgacgagttgggtaaggtaaggacaggaaaatgtccactgaatttggcaaatgtgagggtacttt

SEQ ID NO: 230777 - DNA, 122 bp, Homo sapiens
gcggggtggaggcaaaaagccgcggcggcgggtggcaaaaagctgcggcgggtaaaaggccgcgggggcaggggggaaaagccacggcggggaaaaagccgcggcggcggggtgcgaaaagc

SEQ ID NO: 230778 - DNA, 122 bp, Homo sapiens
ctcaatatcttatcagtaggtacattcctggacgtgctttgagtcagtttacactagttacgccttaagggaggggggtgaaagggggctgcaagtgaagaaactaaaatggagtctgtccg

SEQ ID NO: 230779 - DNA, 122 bp, Homo sapiens
cctcgaaactcacctttgagtcgcatcgagtcccagccccgccccggccccgcccctccccgccccgccccgccaagactccagccctggatccgccccgggcctcggcccagccccagttc

SEQ ID NO: 230780 - DNA, 122 bp, Homo sapiens
gcaaaggacgcaaaagcccacaagacaaggtaaagtagaagaaaggagcaggggcagtgtcgtatgggccagcactggtttaattcactggctgttccttcctgtgagggctttccgctagg

SEQ ID NO: 230781 - DNA, 122 bp, Homo sapiens
ccatgaatacatttggaataatatataaataggatggctccttattctcaactcatacagcgtggacgatctatatcaattatttcaaaaataccctgcaatagataaataattatcaacta

SEQ ID NO: 230782 - DNA, 122 bp, Homo sapiens
ctgacctttctaccacataatcctgacagctgacctctgaccattgtccccaggtgactccgcagctaccatcccaactctcaccctgacccactgccctgggactggcccagccctgtcag

SEQ ID NO: 230783 - DNA, 122 bp, Homo sapiens
atgaaaaacatgcgaaaccaagagaatacttacaacaaattagcgaaatagaaagacatacgaataaataaataggcagataggtatgaacagacagatgtacagaaaaagttcctagaagg

SEQ ID NO: 230784 - DNA, 122 bp, Homo sapiens
accttgaagcgtttcttgatggtgattcggtgtcgagagtatttgtcatctggggagaaccgagcaggatgggctgagcaggtctgttgtcccatcgggtcaaatttctgctccaggaacac

SEQ ID NO: 230785 - DNA, 122 bp, Homo sapiens
gagtcctcgagggttcaggggcgcctcctgccccacctcccgggccttattcggagaagtcggtggcaattaccttctgtggtgtattttaagagagaatttttaggttataacagcggtat

SEQ ID NO: 230786 - DNA, 122 bp, Homo sapiens
ggatcgacctaagataggactccgatcaacacctttcccttcagatgctccgcggctgcccgcgccgtcccagcccctcggcatggcgcaaggctagcacagtttagtgccaggacttggcc

SEQ ID NO: 230787 - DNA, 122 bp, Homo sapiens
agaggccccaggcagggatatttcctccctcccttcctaattcagtaaatttcatgggcacgctattagaagtcctggattcaggagcgacaggatgaagacctcactgccaagaaggcctt

SEQ ID NO: 230788 - DNA, 122 bp, Homo sapiens
aattaaaattgtaaatgccgtccataaccaccactgagagtacctacataacaagggaaacgaagttttcaagtgaggaggagggaaggtaggaagtttcgggaggttgagagtggaagcct

SEQ ID NO: 230789 - DNA, 122 bp, Homo sapiens
caaatgtagaatccttaaaggcattttgcactgtaatttattttaactgattcatatcaccgcactgccaggacttctaaagaccctgctgcaagttcagtgccatccatatgcttctgaga

SEQ ID NO: 230790 - DNA, 122 bp, Homo sapiens
attggcatcagaagtggggctcagtcttttgggtctgggtcctcaacctgtgcaatctcacgctgtctctaggtgtagctggtgtcagaattggtttgaattagagggcagccagttggtag

SEQ ID NO: 230791 - DNA, 122 bp, Homo sapiens
ctcacgtccttctctgcacctgattccctttgcttgctcctgaactccggaaggctagaacgaatttatccaaagatggaagaaagctcagcacctggaagctcccccaaagggtactggcc

SEQ ID NO: 230792 - DNA, 122 bp, Homo sapiens
agagggcgggcagagcgtcagcccctagaaaactacatttcccagaatgccatacgcaggcgggagagggcatgaacagagccttggcgcgatgctccttgggaggtgtagtttccacgcgt

SEQ ID NO: 230793 - DNA, 122 bp, Homo sapiens
tgttcagatctaggcccaactcaggctccgcacctcaaggctccgcccccagcaaggctccgccccaggcccggctccaccccgcacaggccccaccccgagtcaggctccgccccgcccag

SEQ ID NO: 230794 - DNA, 122 bp, Homo sapiens
actaggccagggtgggcgctccagcggccggaccagcagagcaatccgaaacccagcccacgtgggttcccagaccaccaactccggccgtgagacttccgggttgtgttatcgcgagaact

SEQ ID NO: 230795 - DNA, 122 bp, Homo sapiens
ccggctatgcggcccaacccgtcggcccggcctgcccagctcctctcctcaggaaggaagcgcccagagccgactcctccgtgacctagccctgaaccccgagaccccagggcagacccctc

SEQ ID NO: 230796 - DNA, 122 bp, Homo sapiens
ggcgtcagggtcaacacagcaaccagctaggcttcaactttgggctctgaagggccccaccggcatcatggctgatgcggaccgatgcgccggaggaggtggacaaggaagaggctggtctg

SEQ ID NO: 230797 - DNA, 122 bp, Homo sapiens
tgccgacggcccgccactgccggctgcacagacctgccgcgccgcccgggttatctgtcacggcacactgcctgtcgccctccgcccagttgccccacgacagtgtcccctccgcgcgcccg

SEQ ID NO: 230798 - DNA, 122 bp, Homo sapiens
acgctaggccacgccctctccctggctcaggctgcgctccccgccttctttgctaagccacgcccctctcggagttcctccaggatcccggcgtcccagccccgcccggtcttggcgcggcc

SEQ ID NO: 230799 - DNA, 122 bp, Homo sapiens
gccaccttcccagaatggcctgtggttgggaggctgggttctgcagctgcagcactgcctcgctccccatccagctctgctgctttctttcgatggaaacatgaacatctctaagcctggac

SEQ ID NO: 230800 - DNA, 122 bp, Homo sapiens
ctaaagtagaattactacccaccctctgccatggaccccagcataaagctttttgtggggcgtgcatgacctgactctgtactggcgttaggcttcaggagatctgtggaatagagtttgac

SEQ ID NO: 230801 - DNA, 122 bp, Homo sapiens
gcgcatgccacgagtcacgggaatgaggtggaggcagtcgccactcagagtccatgggcccgcggcccgactgtgcttgtagtagtggtgtctcacccctcattccacccgtaccagcaggg

SEQ ID NO: 230802 - DNA, 122 bp, Homo sapiens
acgcgaggcccctcgccccaggcgcggggcggcgatgctggtctaggcggctcgcgggctcgctctttggacacacatttaccgcataccgactctctgcagggcaccctgagggtgacggt

SEQ ID NO: 230803 - DNA, 122 bp, Homo sapiens
gtgtacacacacacacacacacacacaccacaggcaagctcaggcagggtccttcacagacgtctgcagtcactctggaggtgacccaagcacctgggcccttagacagtaacaccactcac

SEQ ID NO: 230804 - DNA, 122 bp, Homo sapiens
gcccttccctcatcaccctcaccctcgttctttctcggtttcccgcttccctctacgcggcggagaccaccaccttaccgctcgcacttaagatctcagacccacgccggaggccggctcgc

SEQ ID NO: 230805 - DNA, 122 bp, Homo sapiens
cataaactcccctgttggtctatgcgtctgtacaaacgcggcataagttgacacatggtccgctgcataaagacagtagagaaaaacacgacaaaatgtcagtttgaatatgcaagtggtca

SEQ ID NO: 230806 - DNA, 122 bp, Homo sapiens
gctgtggcaagagcagctcagactgtaagaggtcacagctgtgcacctggcagacggccccgacacactgatccttgcagccttctgagacatcagctgcgggtgggctggggggtcagctg

SEQ ID NO: 230807 - DNA, 122 bp, Homo sapiens
atcactgcagactcctcccggtggcaattgcctgtatctgaggattttacatctgtctttcgtcactgtcggtactgccacaaaaacactctcataaaaagggaggcagaactgcatcaggc

SEQ ID NO: 230808 - DNA, 122 bp, Homo sapiens
gaccctggggcagaccttctgcttttgtcccctgcccctccccgcgccccggggattccacgcagccagagaacccgcaacaactccgctcatcttggcgtcagaacgcggccggagaccct

SEQ ID NO: 230809 - DNA, 122 bp, Homo sapiens
aggtgtggattctggagctagaatgccgggattcagggcctggctctcccacttactaggcgtgtgagattgagcaacttagtccccacaggctttggtttctgatctgtaaagtgggacta

SEQ ID NO: 230810 - DNA, 122 bp, Homo sapiens
aacttgtgatatttctgtttttttaaagtaatatatgtctctgaaatctttgtcattttgcggaaaccttgtcatagcagggatgtttactatcactatgttacattggattttcaagatat

SEQ ID NO: 230811 - DNA, 122 bp, Homo sapiens
ggtgttccccattcggcagccagactccttgaaataccctttcagtaatcattcaaccaacgcttccatgtctctactctgtcgtaacaaaggctgtgggcagcactttgaccctaatacca

SEQ ID NO: 230812 - DNA, 122 bp, Homo sapiens
tttgcgggcattgttgttactctttgtggttaaacacaggcatggagtcagattcgctcccgcaagcaagaaactttctggactagtgaggtggcctctctgccttagttcctcactggtaa

SEQ ID NO: 230813 - DNA, 122 bp, Homo sapiens
catcccggggtcacccacatttgggtgaacttgaacgagtgcccgaccaggtaacgttgccggacctcccacaagagggcactttcttttctcccattttgtcctcattctttccagccagg

SEQ ID NO: 230814 - DNA, 122 bp, Homo sapiens
caaggttcaaagcactgtattttaacataggtttccagaagtcagatgagcccttcccttcgactgccactcttactagaaggttattaattttaccctctagtaaatatgtcagcatgagg

SEQ ID NO: 230815 - DNA, 122 bp, Homo sapiens
cttcaagttctaagaaaggtaagctttccttccctgggtggagtgtttgccaggcaggggcgcaggagcatttgtgtatttatccatcccagggctcggcaacttgacagtctccgctgcct

SEQ ID NO: 230816 - DNA, 122 bp, Homo sapiens
gcacttacaggctgctcttaccttgtagcctctatccggctgtggaggtcacgtctgggccgggtgatgtactccatggcaaactgtctgctcctgatgaaggtacgtgggtggccaagcag

SEQ ID NO: 230817 - DNA, 122 bp, Homo sapiens
caacctcttcttttcttaggcactttgcattcagcgttcaaacatgccgacttcctcctgcggaaacaccaaacgaaagggaacttctcccacctcagcctccgtccagtaacaaccgggct

SEQ ID NO: 230818 - DNA, 122 bp, Homo sapiens
gcatccatcctggtcccagagcccagggttcctagcctcctttgacaggcagagctgatgcgggctgtgtgggcacaggaggcgcagcccaattttataagcacaaagtattatgattgcat

SEQ ID NO: 230819 - DNA, 122 bp, Homo sapiens
tcccagccggccttgaccttcccccgcgcttaagcggctcagtggggtaggacggatggtcgctgtccctcccgccggtgctgaagtccgccgcaccccatggatggagggaggggccgccc

SEQ ID NO: 230820 - DNA, 122 bp, Homo sapiens
actcgctcaccgtctacctggtggtggcgttggcttcggtgtcttcgctcttcctcttctcggtgctcctgttcgtggcggtgcggctgtgcagaaggagcagggcggcctcggtgggtcgc

SEQ ID NO: 230821 - DNA, 122 bp, Homo sapiens
gtttcgagaggaaagacgtgaaactagtatttactgagaacatactatgaaccgggcattcgagctaggtcgctgcgtttatggctgaatgttcacaacactcgagaaattatttgcctagc

SEQ ID NO: 230822 - DNA, 122 bp, Homo sapiens
cccgtctctgggggtgtgtgcaatccggcgctgcgctgtcagcagggcaagggctggggccggggccaagaccaccaagccaggcccaggcccgcccgcctcccgcggccgccacggccaag

SEQ ID NO: 230823 - DNA, 122 bp, Homo sapiens
tgctagaggggatggcagagagcagcttgtccagctcctctccatgacccggttaacacacgagtaaacaggcctagagcttgtctgctgtttgacctcttttaagacccggctgtgctgca

SEQ ID NO: 230824 - DNA, 122 bp, Homo sapiens
gatgtagatttcattttctttcctaactgcagaacagcaaagatagcatgcctgagccagcgaaatccgctcccgccccgaagaagggctccaagaaggccgtgaccaaggcgcagaagaag

SEQ ID NO: 230825 - DNA, 122 bp, Homo sapiens
ctaaaccacactttgtggacacagtctcccgggttgtttctggtggttctgttaagcgcacgccatcccggcgagcatcccggtgagcatcccggagcctgcgctctgcgcacccggctttc

SEQ ID NO: 230826 - DNA, 122 bp, Homo sapiens
ccacgaccgcccacagtgaggcggctgtagcccgcttccgcccttacagacaccccaggacgcgaccgagacaggtatgacgtcactggaggtcgccattttgcattctctagcaaactttt

SEQ ID NO: 230827 - DNA, 122 bp, Homo sapiens
aaagagaaaaagaaaaagaaaaaaaagaaatccggtatgtattttacatatacagcatgccgccattcagaccggccacatttcagtgctcagtagacacatgtggctggtggctcctgtat

SEQ ID NO: 230828 - DNA, 122 bp, Homo sapiens
tcctggtcctcacaggactatgtgtacacccatatgctttcctaaaaaactacacgtgaacgatgacacaaatgtgccttcaaatcacttctccaaggccagcatctgcacagctcccctca

SEQ ID NO: 230829 - DNA, 122 bp, Homo sapiens
caggggagggctggctctcctgcctggaaggctctgagctttcccagcggggacagtgaccggatactgacccagagcctctccctgcggcagccagactgggcagggtaggacccaggatc

SEQ ID NO: 230830 - DNA, 122 bp, Homo sapiens
cctgcttttgatgactctgagtcctagtcttcatgtggcctctgtttgggatgtcagtttcgttgttctccataggaccaaattatgctcatttttcaggacaccatccaaacattgttttc

SEQ ID NO: 230831 - DNA, 122 bp, Homo sapiens
cgagtcagagggtatggcaggatgcacacaccttcctgattgtgaccttgatggccaggccggctagctgccccacacagtgagacctccgtgggggtgtgccagggccaagaagggcctga

SEQ ID NO: 230832 - DNA, 122 bp, Homo sapiens
agtttgtttttatttttcagggctctagagactgagacaggtgaaggtactgaagatcagcgatgcaaactcattagggaggagatggtctgaactgagttggagacatagtctagtttaat

SEQ ID NO: 230833 - DNA, 122 bp, Homo sapiens
atgggcttctaccctagcagaccgagcgctggaggccgctccacgcgcgagctcgaaccacggagggctctcagctcggacaagcgtcgctgtctaagagctccaagctccacggaactttg

SEQ ID NO: 230834 - DNA, 122 bp, Homo sapiens
acttcgtgatctgcccaccttagcctcccaaagtgctgggattacaggcatgagccaccgcgcccggccttcagtggacacggtttttaagcagctactgcttcctaaggaatctctcactg

SEQ ID NO: 230835 - DNA, 122 bp, Homo sapiens
ccaggctagagtgcaacggtatggtcttggctcgctgaaacctttgcctcctggttcaagcgattctcctacctcaacctcccaagtagctaagatttcagacataagccaccatgcccagc

SEQ ID NO: 230836 - DNA, 122 bp, Homo sapiens
ggcttcccggatccgggaactccctcgccgcaccccacccccagcagccgggccctgacgcggagtgggagaccgaagcccccagtattgctgggcatcttcgccctcacctgttggctctt

SEQ ID NO: 230837 - DNA, 122 bp, Homo sapiens
cccacggcccttgaggctcttggtgatgatgacatatgtctgtttctttctagttgaccacgttgttcctgagcctgggacaagcctgctcgctgcctttgaccagtggagggaatgggccg

SEQ ID NO: 230838 - DNA, 122 bp, Homo sapiens
agcgggagataaggacgatgtgttcaagggtcttgaatgatcaggctagaaaagtgagaacgtggttctataagtaaaagcagagcagtgcttgaaactcgtattttatgtattgcacctag

SEQ ID NO: 230839 - DNA, 122 bp, Homo sapiens
cgttccgcagcctttatgagcctggctcctgttaataattgtctcccgattgtctcccggcgtccaccggcgtccaccctgcattctccgtgaaggtgacttctgctttgtaaagctcagaa

SEQ ID NO: 230840 - DNA, 122 bp, Homo sapiens
caagagcacagaggtggtggggtgggtgcgcagtgtttccagcaccggcctggccaccatcgcaggggggcatctccggctcggacagccatatcccccccgggcgggcacagagctgggta

SEQ ID NO: 230841 - DNA, 122 bp, Homo sapiens
aacaaacaaaatcactaaagataaggagacagatatggagagagtcacacaactagagggcgcctaaccagtggcaagaactcttctttggcagagttatgagagcttcagctgacgtcaaa

SEQ ID NO: 230842 - DNA, 122 bp, Homo sapiens
tcccctgcaccctgcttctcggcctggccgtggtgctgctgaaagcgcggctggtccccgcggccgccagagcggaactcagccgctccgacctcagcctcatccaacagcagcagcagcag

SEQ ID NO: 230843 - DNA, 122 bp, Homo sapiens
tttatcgcgcagccgcagtggagtccaagacgggcaaggctggctgcagctcaagtgcctcgtagcacggaagcgtgtgcgcgccggtctttcagtacttccagccggggagttctgcgcag

SEQ ID NO: 230844 - DNA, 122 bp, Homo sapiens
agttcaaggccagtttgggcaaccaagcgagactctctctctctttatttttatgctccccgccccgccccgccccccaagacagtattgctctgtcgcccaggctggagtgcagtggtgcg

SEQ ID NO: 230845 - DNA, 122 bp, Homo sapiens
tttaagagcagctttgtgaaaaacaaccccagtgcgcaggcgcaggccgcggctgctgtccgccctccctgcgcgccccctcccgcgccgcgccgcgccgcgctcgctcccttgcccgctcg

SEQ ID NO: 230846 - DNA, 122 bp, Homo sapiens
ccctgcccttgtcttctggccacgccatggtgtgtggctggctctgcccttggcttcctccgagctgtgccgcagccacagtttttggttgttttcgtttttttcatcatcctgatgatcca

SEQ ID NO: 230847 - DNA, 122 bp, Homo sapiens
caagtcagatagaagtgggagcagccctgcagggaatgcactcaattgcctaatagttctcgtcaccttgtgtttcagtagccctatgactaacgctctcttctgactcaatgttttcttac

SEQ ID NO: 230848 - DNA, 122 bp, Homo sapiens
ccatggacaccccggctctggcgtggttcccctccttccctttccctcctgccctgaggtcgccccctagtggctccctgtcccggcaattggcaattaccagcgtggttgggggagagggt

SEQ ID NO: 230849 - DNA, 122 bp, Homo sapiens
cgccgcgggcaaggggcccctcgccggccttctggagcaggaacccggccgaaaacgccgcggaaagactctaaaacaacaataatgataaagaataaggaattgctgttacttcctcactt

SEQ ID NO: 230850 - DNA, 122 bp, Homo sapiens
tacgcggcctcaatgccattggcgggatccgagcgcgtttctgagccggatgctgagctccgcgccttacacacgcgattccctttaatgcccccggggatcccggcggatccgtgctgccc

SEQ ID NO: 230851 - DNA, 122 bp, Homo sapiens
ggtaagtgtggccccggagcccgggggagagggcggtgacccgggacaaaggggatcccccggggcaaggaagatacagtggcggtggaaccctcctgttacctacccgtgttccatactct

SEQ ID NO: 230852 - DNA, 122 bp, Homo sapiens
gagggctgttcattcaggaggaccttggagctggttttatccttagggcaatggggagcccggaaaggcttgcaagcaaatgacacatttgtgctgaactggggcctcatcagaaaaggggg

SEQ ID NO: 230853 - DNA, 122 bp, Homo sapiens
tgctggaggagctggccaggaacggtgagtggacacctgctcctctgtcctgcgggttttcgccctgtttcagagctttggaaccgacaggtttccctcttcactgtggcagaagtacctct

SEQ ID NO: 230854 - DNA, 122 bp, Homo sapiens
tgcattgaaaatgcattacttttgcacattgatattaactgttgtccaacaaataagtatcggagtacgtgagaatattcccagcccagtgatgatttggttctgaggctgatgtgagaaag

SEQ ID NO: 230855 - DNA, 122 bp, Homo sapiens
atgggttttagaaagagcactgaaccaggagtcagaattcctgggttttaaggccagcatcgcactagaggcaaaatgatcttgggcaaattgtttaatctttcttggttttgtttctgtaa

SEQ ID NO: 230856 - DNA, 122 bp, Homo sapiens
ttgtgattctgctgtgcaactggagtaaccagcaaccagtaatatcttgatttcaaattgcgtgggagacttggtgtccctgaaccaaatgattggatttggagctagagaatgcagaaaca

SEQ ID NO: 230857 - DNA, 122 bp, Homo sapiens
ggcaaggcagaggtggtatttatagtcctgcaagcagctgaatggagataatttaggttccgttggcttttctggctgaaagctccagttccaatagatagggaatcccctgaatcaattat

SEQ ID NO: 230858 - DNA, 122 bp, Homo sapiens
cacccctgtgtgcgtggccgctgacctcgggactaagactaagagccagtgcctttctgtcgagcagtcaaccatctttatgctttctcagacttccagcagcctgagtttctgatggaaca

SEQ ID NO: 230859 - DNA, 122 bp, Homo sapiens
tctgcctccccattgcccttttctcactcagatagggacactgaggtccagaggaaaggtcgcctgtgcaagtcacagatctgggagggcaccctggacctatcatgctaccaggacaactg

SEQ ID NO: 230860 - DNA, 122 bp, Homo sapiens
aactattagttgttaatagttcttaatatgaaatttcaatttacccccaaatttaggcctcggaaacatcacagacatatgtaacggggcattggtatttaaattgggattacatctttgac

SEQ ID NO: 230861 - DNA, 122 bp, Homo sapiens
tactgtacacgtggctggcagagaagaggcgatgaagccgccatcttgaacatgtctagtcggtagttccctgtggcatttacccgtgcaagctcccagcttgtttgtgtctgcagctccac

SEQ ID NO: 230862 - DNA, 122 bp, Homo sapiens
ccggcgctcactggttattcgcctgacggtgaatgatggttaggactggaaaccaggtctcgatgcccacgttcgctctcctcgggcagcagaaaccttgttctgatttattcctcgcagtg

SEQ ID NO: 230863 - DNA, 122 bp, Homo sapiens
ctgagaaggtgcgcccggagccgggctgcttggttccagtgttgggccacatactgcttgcgtgctaggtcgcccctccgggtggctcagcctcttcccctctctcacaatccctgaatccc

SEQ ID NO: 230864 - DNA, 122 bp, Homo sapiens
aatatggataattattccaggaattttgctgaaaatgagggcaacgagaatggaggtgagcgcaggagatttttcaacgggtttgtttgctcatgggaatgcagcagggaaaaactgattgt

SEQ ID NO: 230865 - DNA, 122 bp, Homo sapiens
agccctcatcaggcgagtgccccgcgtccccctgattgccgtgcgcttccaatcgccttgcgttcggtggcctcatattcccctgtgcgcctctagtaccgtaccccgctcccttcagcccc

SEQ ID NO: 230866 - DNA, 122 bp, Homo sapiens
caaacgaaaaagggcgagagaaggtcgcattttgcctgccggagctaggggcgcgcttgccggttccaacgagttttcggtgtcggaaaacttgtctttgctcacattctcggattcccgcg

SEQ ID NO: 230867 - DNA, 122 bp, Homo sapiens
cctgggccaacctcttctgggcctctagctcccctcccccactttggctggattcaggtgcgcacctcaggctagccaccagttcacacctggttctaagcaggttccaacactgctgcagc

SEQ ID NO: 230868 - DNA, 122 bp, Homo sapiens
aagctggcctctgcagccctgtgtcactcatcagaaacaattcctacaatgaagaactatcggccaggcacggtggctcacgcctgtaatcccagcactttgggaggcagaggtgggcggat

SEQ ID NO: 230869 - DNA, 122 bp, Homo sapiens
tgaaataacaacctgctttcctaagaacaatccccttcctcccctgggggacagccaggccgtgccaggagccaacaaaggcctggcctcaagcaggtgcacagggtgccatgtgtcccatg

SEQ ID NO: 230870 - DNA, 122 bp, Homo sapiens
taaggtctggctctgtcacccagtctagagtgcagttgtgccatctctctcagctcactgcgacttctacctcccacctaagcctgctgaattagtgtctacaggcatgcaccaccacacct

SEQ ID NO: 230871 - DNA, 122 bp, Homo sapiens
acgcttgctcccagcgtggggacctgcctctcgcgctccagccgcgggtgctggagtgtgcgttgaaggaagcagcagagggagtggtaacagggccccctattcatcgcagggacaaagcc

SEQ ID NO: 230872 - DNA, 122 bp, Homo sapiens
ggagttaacacttagaaccacctaaagatctttttcctctgagttaagggaaagtgaaaacggtgagaagccattccttgccatttctgggagacaagacccatgattcagtaataacttct

SEQ ID NO: 230873 - DNA, 122 bp, Homo sapiens
tgtccacaccgtccgtggagcctcactggctgctgcacggtggcattgccacacgtcggacgcggcttctgacgccacagggctgtgcgctgaggctctgcctttctaacaagcccccaggc

SEQ ID NO: 230874 - DNA, 122 bp, Homo sapiens
cccgccaccagcagtcccctctgggagaaggccaggtgccctgctccatggggcagggtccgagtgctcagaggctggtacgtccctcgcaagtcaaagatcttcagctggtggtctaggcc

SEQ ID NO: 230875 - DNA, 122 bp, Homo sapiens
cgcgccactcatccaggcccagctcgccgaggccgtgcacccgcgccgggctctgatctccgcagccatgcctgactgggtggccttaacgccaggttctccctcagagagcaggaatgcgg

SEQ ID NO: 230876 - DNA, 122 bp, Homo sapiens
aggcacgcagtcgacggccatcacagatggccacttcccacctcctgggcatgcagtcgacggccatcacagccggtcacctcccacctcccgggcacgcagtcgacggccatcgccgacgg

SEQ ID NO: 230877 - DNA, 122 bp, Homo sapiens
ggggaggagcaaagcctagcaggacccttctagcaggtggaagaatggggaggggagctccggcccccctggggccccgcccccttaccagctgagctgcgccccctggtggatgagaaggc

SEQ ID NO: 230878 - DNA, 122 bp, Homo sapiens
aggttcctggaaaatgagtatagttttgcattcgggagtttaaatctgatcctttttggtcgtcatgtattgtcacttcagaacttccaagtgcagaaaaagctgaagttttttgcctacgt

SEQ ID NO: 230879 - DNA, 122 bp, Homo sapiens
gccctgccactcgcagtcctgacgggcaggggctgcggaccgcccggccttggacccatccggagccacaggttggaggagataagtagctgtccccgtgctcatcgccctgtggagcagat

SEQ ID NO: 230880 - DNA, 122 bp, Homo sapiens
ccagttcctgggctgcgttggagttttgaggtgtaactcaggcgggttctcagctccacccgccgccggcttagattccggtttcccaagtctactcagtcctttcactgctcacccgccaa

SEQ ID NO: 230881 - DNA, 122 bp, Homo sapiens
attgtcgggggtcggcagggcggaggccgccccccagcggcgggagccgggagctgcgcgcgcacaaagactgcggcccccgccccccgccgacctcttcgcggtcacccacctccaacatc

SEQ ID NO: 230882 - DNA, 122 bp, Homo sapiens
aagggaacatcacactagcaacctcctcagaatatctgatgcatttatttcattgaacttcgtcacatttcataaagatttttctccactcccccacatacctgtcaaggactttgaacctg

SEQ ID NO: 230883 - DNA, 122 bp, Homo sapiens
actcttcaatcacttcccatttgattcagaattaaaccaaattccctacatgggctgccccgctacttgaaagaggtgagatcaataggtcctcaaaccctaaatggaattatctgtggcag

SEQ ID NO: 230884 - DNA, 122 bp, Homo sapiens
ttactttttcaaagaggaaaacttttttaatgaaaaaaaaaacatggagacacatggtggcgctacaggataagacgaaaacagtacataggctggcacggtgagcttcgctattcaggaga

SEQ ID NO: 230885 - DNA, 122 bp, Homo sapiens
cggggagggcagcgagactccagcagctccagcctccaggattctcagctccctcccgggcgagacctcggacgttcactgcgagcagccgctccgcccgccaccgcctccatctcctcctc

SEQ ID NO: 230886 - DNA, 122 bp, Homo sapiens
tgagcaactagggggaagccaggagacttcgtttccagagaaccctgaacagccttctgccggtcacagatgagacagggatgaggaaatgccgctacagaccctctgatctgtccaccctc

SEQ ID NO: 230887 - DNA, 122 bp, Homo sapiens
accctcccgaccctcccgagttcgcccaacttactactctgcatgctggtgcctagtctgcgccccgcttgtcacgagcccccagaaaacttgcagtggcggcggcggcggcggcccctcgg

SEQ ID NO: 230888 - DNA, 122 bp, Homo sapiens
tctttcataaagtaggcattcgacaagtttaccaaacacatagacctatatattctacttcggtcatatctaagtatattttattactctgagtagaccattaaacacacacacacacacac

SEQ ID NO: 230889 - DNA, 122 bp, Homo sapiens
ccgggagctacttagcgctccggttcggtacctcgtggagaagacgggggaggggagcagcgagatttccttgcggagcaatattcctagggtacagacctcgtagcccgggcccgcgactc

SEQ ID NO: 230890 - DNA, 122 bp, Homo sapiens
ccggctgggaggagtaaacacgagccggggcagggaaagaactttgcacaccgtggggtccggggctcctctgtgatgccaccaaggtttgcaggctcagcggcagcgctgaggtatttgtt

SEQ ID NO: 230891 - DNA, 122 bp, Homo sapiens
gagacctgcgtaggagcggtagggtctcataaaggagggagtcccatccttcccccgctccggtgatttctatagctagagggctgatttactgcagaaacctccgtagcgccctcctcctg

SEQ ID NO: 230892 - DNA, 122 bp, Homo sapiens
gattcccgccctcctgtagctatgggacggaccacctgacttagatgccttggaggcatccggccctggggtctttgctgctggtgtctgcgggcagggtcaggactgccactactactgcc

SEQ ID NO: 230893 - DNA, 122 bp, Homo sapiens
gcacagacagcattgtgtttaaatccctgatctacacatcagctactggctatatgcccacggcaaatgtaatggaacctctccaagccttgctttcctcatttggcaactggacacaatta

SEQ ID NO: 230894 - DNA, 122 bp, Homo sapiens
ggagccgcagtggggctgagtgtgaggcaggctggctgaccactgtttccatggaccctgcgtccaaggccagccctgccttccagcggctttgccatctaggacgggtgccaggtggggta

SEQ ID NO: 230895 - DNA, 122 bp, Homo sapiens
gggcggggccgcaagcatttcctggatggggcggagccgagcggatttccgggatccgggcggagccgcaggaggaggcgggtggttcctgctaaagaagccagttttcttgaaaaaaagaa

SEQ ID NO: 230896 - DNA, 122 bp, Homo sapiens
tccaccagcggggactgcgtgctgctgagtggcaggaggtacaggcccgtctcggggtcacgcacacagcgctccagaagctgcaggtacgtgaggttctcgtgcgtgttggggtcgaagaa

SEQ ID NO: 230897 - DNA, 122 bp, Homo sapiens
ttttaaaaaaagagagactcacattggtttaaagcctgagaggaaggtgccagaagaaaacgacacaatgaagacaaaagtgtgagttgaataaaataaacagcaaggtcaaggaacaagtt

SEQ ID NO: 230898 - DNA, 122 bp, Homo sapiens
ttcatttccattggtccgtgtgcggaccttgcgttttcagcaatgcgtacgtaacaacaccgactcttgacttgattggccggttctgaagccatattaggaccaatgaaaaactcgttctt

SEQ ID NO: 230899 - DNA, 122 bp, Homo sapiens
tgagcatgtcagtattctagtccagtatttgccagtttccaagtaaaagcttttgtgttacgtgtttctgcggtgccggactccctgaggttgggctgggctctgtacattgggagggggta

SEQ ID NO: 230900 - DNA, 122 bp, Homo sapiens
tgaggcggctacacgagcctcggcgccagcctgcttcgagtcccgctggctgtgcctgcccgggccctgaggcctcactgctaaggcagtgaccgcctactctgtggaggtcctttgtcacc

SEQ ID NO: 230901 - DNA, 122 bp, Homo sapiens
gaagtcccagccagaaagtaaaggacgtttagttccatgtattgttttcttttttacatgcggggcaacacacctggacagtgtcgatggcttgctccaagccacacggccgcatagggaca

SEQ ID NO: 230902 - DNA, 122 bp, Homo sapiens
agctgccaagagaaggctgtgggcctggcctcctcaacagcaacttggcacagactccctcgtgaaactgttagatggggttggttggcagcactgtgtaattaaataggcttttgtggatt

SEQ ID NO: 230903 - DNA, 122 bp, Homo sapiens
gaacagatttttgtctcactctgcatagagaacagcacttgggataggaatcaggataagcggacttggaaatggccaaacagaagacagcagaactctctggtgctcctggaaagtttctg

SEQ ID NO: 230904 - DNA, 122 bp, Homo sapiens
cggatgaacaccagcccttcccgaggccccacgtcttctggcagagcttgcgagccgggccgccccacgacagcagccagccaggccgcctaggacctgccgccaggtgttcggtggcgtcc

SEQ ID NO: 230905 - DNA, 122 bp, Homo sapiens
ctcctttcttaatagggcagtctgagtagtccgtttacaacttgagttggatcatttcatcgctctgctgaaaactctccagtggttcatacttaaaataaaacctgaagtccttaccgagg

SEQ ID NO: 230906 - DNA, 122 bp, Homo sapiens
tggggtacttgcgaggcctcagaatgggccgcagtggcaggtggtgtgggttataggcggcggcggcggcggctgctgctgctgctgagctgctaccaggcagccggggtccctcgctgcct

SEQ ID NO: 230907 - DNA, 122 bp, Homo sapiens
ctgcagccctgtagcagccagtctcaggcctgccccgcccatcctagtgtgccttctctgcggtgcttagcgcctcctcctacagcgcctcctcagagcgcgcctcccctgcagcgcgcctt

SEQ ID NO: 230908 - DNA, 122 bp, Homo sapiens
aaagacaccatcagggcctctgcggtgcccctctcctcctatggaggatacaaaatcttccgccttggttcctacagtgttctagtgtgtttgttctttccttcctcagcagtaacttgcaa

SEQ ID NO: 230909 - DNA, 122 bp, Homo sapiens
tgtgggtcagagcctgggcatggctttactagatcctctgttttaagattactctgaaagcggcaatcaatatctcagctggggctgcagttgcatctcaaggctcagttagggaagggttc

SEQ ID NO: 230910 - DNA, 122 bp, Homo sapiens
aaccagaacactaggatcctgccagggtgtagatactgtaaccaacaagaggccaacctccgtcctttctgcggagggcgccgaagcgtcaagtaccccgcagcatctctcggctggagagc

SEQ ID NO: 230911 - DNA, 122 bp, Homo sapiens
cagtcgcgaagccacgcccctttcccaagtacctccgcgctaactcctcccccctggccccgcctctcaccctggattgcctaaggccccgcccaccaggcgtggccccgctctgggagggc

SEQ ID NO: 230912 - DNA, 122 bp, Homo sapiens
gggctttattaagcaactgcccacgtggaagaaaagcaataatgaagcaaggcgtcgtatcgattcccccagctgtaatggaattccgtcaaggagcaaagcgaggcgttttcagaaactct

SEQ ID NO: 230913 - DNA, 122 bp, Homo sapiens
cttacaggatggggagcgcgcaggcaggtgaaggagcccaagtgggcgtgtgttacagtgcgccattttagctttgccatccgcggacggcttgagtgttaaccagctcggtggaccgtttg

SEQ ID NO: 230914 - DNA, 122 bp, Homo sapiens
agtgagtttgtcgaggtgggtcttcaggtagaaagaactccagaaaagtcagaagcagaccgcgactggaagtgggaggtgggagtaggggcccatggttttcttttcgccccccccaggaa

SEQ ID NO: 230915 - DNA, 122 bp, Homo sapiens
ccaaagtccagcccttgtgcccccggctgcgtctgccctgtccacagtcagcccccaacgcggccccaggaccagcccgcagctcctcacacatgacgagtcactaggacacggctgggctc

SEQ ID NO: 230916 - DNA, 122 bp, Homo sapiens
gatggagagggcagggcggagagccacctgggatgagcgagggtcatggtggaccacagacgctcttcttatacgggcaaatgtttaatacttcccgaggtcgcctctctgccatcaaacga

SEQ ID NO: 230917 - DNA, 122 bp, Homo sapiens
ttgcgttctggagtttactgaggctttcccagtgcggattccacgctacaggtcttagggcgcccctccctccgggcgtggcagcccggggcgtggctcctggcacagatccggagcagttg

SEQ ID NO: 230918 - DNA, 122 bp, Homo sapiens
cacagccactgccatagagcagctccccatgaataccagctaatgccctcctgcccagaccgcccagcttgtaagctgggtgcaaggaccaccccacaaggggtcgcccaggcgggaggagt

SEQ ID NO: 230919 - DNA, 122 bp, Homo sapiens
cccttctcttctgagtgcacgagttccgctgggcagggtgcagtcgtgttgcatttaggacgtggcatgcctgctgtgcggaagtggttcccagtgggggtcttggttggctttcctttgca

SEQ ID NO: 230920 - DNA, 122 bp, Homo sapiens
tcagaaatagtcaactgaaaactctcttggctattggtggctggaactttggcactgctccgtaagttctttttggtgatgacttcctaggttgattttactctaaggtgttgggaccacca

SEQ ID NO: 230921 - DNA, 122 bp, Homo sapiens
gaaatccacacaatcgcgcccttctctttaaagggagggagaagaggggccgcggccgcgcgccccgccatcagctgcgcgcacagagggagagttcactccggggacaagggcggcgcgac

SEQ ID NO: 230922 - DNA, 122 bp, Homo sapiens
aaaaaaaacccacggcccattcctacagcagctaaactacagcagttaaaagcactaggtcggccgggcgcggtggctcatgcctgtaatcccagcactttgggaggccgaggcgggcggat

SEQ ID NO: 230923 - DNA, 122 bp, Homo sapiens
gtttgcttatcccttcatcagctgatgagcatttgtgctgttttcactttttggctattacgaaaatgttgctacgagcatccatgatattcgcccatttaaaaaagtgtttttcaccatta

SEQ ID NO: 230924 - DNA, 122 bp, Homo sapiens
ttatgaactgagtgttatttgaaaaatcatcttgggccacataaaatgtatagcttacaccgtttcttctagtactctttacaccaattagttttgtatattagtaatctgagactcaggga

SEQ ID NO: 230925 - DNA, 122 bp, Homo sapiens
gagatagggaaggcagtccctgcccacaaacagcttctagtcaatcagaaatgaacaaaacgtttccataggcttcacctggctacagtgagagtcaagttgtctgtgcagcctttgattct

SEQ ID NO: 230926 - DNA, 122 bp, Homo sapiens
agtagagccgcgtcttccagcggatcttgccgcactttcctcagttgcgaagggcacggccgctggggacacaacctaatgaacaaccggagctcttcagagatgcctttagcaactcagct

SEQ ID NO: 230927 - DNA, 122 bp, Homo sapiens
atcttcatctcaacctcattggtgctttcctctgagcagccttttctgaccttccaagaccgagttggatgctctggttctgtgttctcatcgctgcctatgcttctcccctcccatcactt

SEQ ID NO: 230928 - DNA, 122 bp, Homo sapiens
ccctgcaccctgcgcctcggggtgggcgttccaggactccccgaacccttggggccgccccgctctgggctgcctgtgccccacccgcctcactggttgatctcacccacttgagatgccct

SEQ ID NO: 230929 - DNA, 122 bp, Homo sapiens
tagcagggactactaaagaaagctgtactttcatcccctcgggacacttgtaatcgtaatcgggcttttaaaatcgtaacgtaggcagggacgtcgaaataactgccttccaaggcccctta

SEQ ID NO: 230930 - DNA, 122 bp, Homo sapiens
ttcacccagcctgagaccctgtgtccctaggctgccttacagggccagatcacacacccacgagtccgtgggtcccagagcagtgaccctgacaactctgaagaactgggggaggcccagcg

SEQ ID NO: 230931 - DNA, 122 bp, Homo sapiens
accagcggtgactaatatgacacggatgatacggcatgaccagcggtgactaatatgacacggatgatacggcatgaccagcagtgactaatatgacacggatgatacagcatgaccagtgg

SEQ ID NO: 230932 - DNA, 122 bp, Homo sapiens
ccagaccacgggaaactccaaaggacaaacagtctagtttcaataaataagttgccagaacgagagagagagagagagagagagagagagattgagacagagcctgtaggctaaaacagatt

SEQ ID NO: 230933 - DNA, 122 bp, Homo sapiens
gactgtaccacacctcctaggagccctcagcgtactgaattagagttctctataagtctccggcgctagactgcgaactgcctgagagcatcccttctgcagccgcggggcataagcggcaa

SEQ ID NO: 230934 - DNA, 122 bp, Homo sapiens
tggctttctatgctgtcacacacggcacgcagggatttatttgggtcagtctggactccgcgcacttgagtctgaagcccttcccagaggaatgccaccctgagggtgtctgggtacacaga

SEQ ID NO: 230935 - DNA, 122 bp, Homo sapiens
ggagcctggctgctgagtcagcacaaagagaggtggcctcctgccagcacgcagaggcagcgcattgtctgtttgggggatgctagtggccctcgtcaagtcagagaatcacagaagaacaa

SEQ ID NO: 230936 - DNA, 122 bp, Homo sapiens
gacatcctcccagggttcccaggccaggagctggttaataacacagatttccctcccctccgtgcagcctcctgctctcccatttagtgggtcctgggtggggcctgggaatctgtattttt

SEQ ID NO: 230937 - DNA, 122 bp, Homo sapiens
aggagcgactggtgggttgggccgggcggggcggccttggcgccctaaactcggtccctgcgccctaccaacccagtccaagtccttcgcctcgccaagtacggccgccgcgtcgatcccgg

SEQ ID NO: 230938 - DNA, 122 bp, Homo sapiens
tgggcaagtgagaccccatctctacaaaaaattttaaaattagcaaggcatagtggcactcgcccgtaatcccagctactcaggaggctgaagtgggaggatcatttgagtccagggggtca

SEQ ID NO: 230939 - DNA, 122 bp, Homo sapiens
agacaagctgttgggtgccatgttccttatatttggagcaggtggttctgattcctcttccggggaatattctgggattggtttcagcaactgacttgggtatggttctgattcatcaacct

SEQ ID NO: 230940 - DNA, 122 bp, Homo sapiens
ggatacagttcccttaaattagatatatgtgtatcatatactaaagtgggtgagtttaagcgtccattggaggaaccaactgatacccaggcatgtaaatggatgtgtttaagagtaatgac

SEQ ID NO: 230941 - DNA, 122 bp, Homo sapiens
cgttaaactgacaccatcacttccgggttatccccacggctgccccctccttagcaaccgcgtggggttgctaagcggaagtgccttcaaagcaacccacccccatttcttctgggactacc

SEQ ID NO: 230942 - DNA, 122 bp, Homo sapiens
gtgtttctaaacgggagagctggttgttgagtggtgttcctaggcatctctgcagaattccgacaatgacaagcagtgatccaagcctggtcagacagtgcattacttgctttagctaggaa

SEQ ID NO: 230943 - DNA, 122 bp, Homo sapiens
ttttgccagagcgccagggacacactcagttcaccttctagcagggaagacccaaagatgcgcgcccctggcagccagggcgtcggaccaggcaattcctactgtccagcatcacctcctcc

SEQ ID NO: 230944 - DNA, 122 bp, Homo sapiens
aagcgcggaaggaaaagccgggtaacccaagtaacttggaagacagtttccgctgccgtgcgagtcttcctgtttgtttttatccaaggtctggcagaattcgcccccaaggagaaagcgcc

SEQ ID NO: 230945 - DNA, 122 bp, Homo sapiens
ctgattgacacactcatcacctcccatagttaccgttgttacccatttttttaaaaaaaacgagaacactttagaggtactctcaaaagattgttttgtaaagttgtttttaaaggttggga

SEQ ID NO: 230946 - DNA, 122 bp, Homo sapiens
actgcgcacgcgcagtgtttaacggccggtcaggaacccaacaattagtcccttctcgtccgagaggaaactctgtgagaagatgggaccgtgagcactctctttaacaaggacatttcctt

SEQ ID NO: 230947 - DNA, 122 bp, Homo sapiens
gctaaaaaggacgatatcggaagggaagaatggcggagtcgtctcgcaggatggcgcacgcgtcaaagaaatggccctgattgcgtggtctttcggtgcccactgttttggccaaagcgtcc

SEQ ID NO: 230948 - DNA, 122 bp, Homo sapiens
cttggaaggtgcatgttctttgctcaaccatctgtgcacacaattagaagccactatcagcggtgttatctttaaatgtaaaacacacgacatggataaaatgtgcacaaatacatttctgc

SEQ ID NO: 230949 - DNA, 122 bp, Homo sapiens
agttttctccgatatggtgtgccagagtgctctgtgaagaatccttttccatccctaccacgtgtctgggtgaagggagaggagggggtggcaagctgccagtacactagcaggcactcctg

SEQ ID NO: 230950 - DNA, 122 bp, Homo sapiens
ggtttgcctggaagagtcatgggcctgtcaccctgactggggttttggctgtttttgctccgtattttgggttttcagttatcctgggtttctttgtgtagttcttgtttcagctgttgttt

SEQ ID NO: 230951 - DNA, 122 bp, Homo sapiens
cttccggtgcactcctgcgcgtgtgcacctctctctgtgtgcgtgttcgcgcatgcgcgccgccgctgcactgccctcgcttcctgtgcgtcctcaggtcaccgcttgctctagttcccagg

SEQ ID NO: 230952 - DNA, 122 bp, Homo sapiens
cttttaaataaattgcccctcaacaacagttttaaagatcagtttaaacattctaactttcgagagagagctttgggtcatagatttcctaccttgaagcttctgctgtaacaagtaagtcg

SEQ ID NO: 230953 - DNA, 122 bp, Homo sapiens
tcacttgaaaaggccaaagtttcatatctgcttgtacaacaggatcattaaatttcctgccgatcagacgtttagcatcaaaaacagtgttctggggattcattgctacctggttcttggcc

SEQ ID NO: 230954 - DNA, 122 bp, Homo sapiens
gaagcgtattaaacgtcacccctcctctcccaagcccctgccaaagatcactgacaagctcgcatagcaaatgaacaaggagggaaagcaccgcgctcgcacggctttgtccgtgctacaaa

SEQ ID NO: 230955 - DNA, 122 bp, Homo sapiens
ctccctggggaccccagcacctgcctctcctccgcattgaacccggacccttcccgggaccgcaacccccagctgactttctcactggcaccctcagtgatgcctccttctcaacatcaccc

SEQ ID NO: 230956 - DNA, 122 bp, Homo sapiens
tctcaacacttagcttccatttcaggccttacacagctggcacgagaggtaaagtctcatcgaatgtcagggttggaagggcgcctagagacagtcaaactagtggatggggaaactgaggt

SEQ ID NO: 230957 - DNA, 122 bp, Homo sapiens
aattcgctaatgagggctttgcagggattgttttcattctcagccccagctgtgggagtgcgggtgggggtgtggccgagccccggcaggaagccccgcccagacggtgttcagggaacccg

SEQ ID NO: 230958 - DNA, 122 bp, Homo sapiens
ggacccggcaggtgagcagggaccctagatggatgctctcctgcctctccactccctcagcgtgtgtggacgctacccgggggcagctagtcgcggcggcgtctctgtggctccgaggtccc

SEQ ID NO: 230959 - DNA, 122 bp, Homo sapiens
ctcgatctcctgaccccgtgatctgcctgcctcggcctcccaaagtgctgggattacaggcgtgagccaccgcaccccgccgagattcattcttaagtgcaccaaattttgagaaatattga

SEQ ID NO: 230960 - DNA, 122 bp, Homo sapiens
caaatcctgagaaaggaagggctcaaggccttctacaacggcattgtcccccacctgggccgggtctgcctggatgtgaccacagtgtttatcctctgccatgaggtaggaaagctgctcaa

SEQ ID NO: 230961 - DNA, 122 bp, Homo sapiens
acttcttgggcgtcaggctcagcagctacaggattcggggtccgtcgtcgtcctccgggccggcttgctcagcactagcccaggggtgggctctggctccggctccttggggcactgccaca

SEQ ID NO: 230962 - DNA, 122 bp, Homo sapiens
tctgcacagtggggctgtatttgcctttgtttctcttcctgaagagcgagttcatggtggcgctcggggtgcgggcggcggcggctggcgggccgggcgcgcaccgaggggcgggcgggagc

SEQ ID NO: 230963 - DNA, 122 bp, Homo sapiens
gatctgagcgggattgatggggctgtgagctgtggtggatggggctgcagacacaccacccgcaggctcgcggctccatggcctcctgatccgcagtgtcatctctccctgcagggtggacc

SEQ ID NO: 230964 - DNA, 122 bp, Homo sapiens
tgctttgaagcctcagtttgtcgtgtgtgcaggcgaggacccgggcaggtgggtgagtcccgcttgggcgctgcctgggtgtgctctgctccagcatgcgtcggtcgagagtgagtgagaat

SEQ ID NO: 230965 - DNA, 122 bp, Homo sapiens
tccagaccctggaggaactgcgccctcgtccagcataactgaggtgccaggacacaggaccgacatcgcaccctccacttgggtcaaagctttatcactgcaggcgagtgtgcgggcgcccg

SEQ ID NO: 230966 - DNA, 122 bp, Homo sapiens
ttcatggcatttgtgcgctttaaagtatagaagctgctccagggcttccgcagccccggccgtcctggagatactcgttccctggagtccgtagttgagaatttacagctcctggacagcca

SEQ ID NO: 230967 - DNA, 122 bp, Homo sapiens
acaggagttagagctgctggccccagggacaagggctaatcccttgcctcccccctcttccgggccgcctcattctagatcagtggagccatttccctagcaacagagcaggagattcagaa

SEQ ID NO: 230968 - DNA, 122 bp, Homo sapiens
tccctctccaaatcttccagcaaagtcaccacctcttctccactctcaggattatgctcccgcacccaagactggagctcctcaggcaggatggtcaggaactgctccagcaccaacaattc

SEQ ID NO: 230969 - DNA, 122 bp, Homo sapiens
cacgggtgagcaagccagcattgaaggaaatgccgtctaggcgtgagccgggagcagagacgccctctgtgcccagaaagcctgacaaccgcggctgattcctccaacagtgcatttaggcc

SEQ ID NO: 230970 - DNA, 122 bp, Homo sapiens
aggccgagctggcgccgcatccggggggccgcgtctggagtggagggaggccgaaggccccgcccctgccccgccccctcgtgcagaaggccgcgctagccggctcttcagcagcgagtgca

SEQ ID NO: 230971 - DNA, 122 bp, Homo sapiens
gacgtcacatcctctgggcggggccgcaaggaacccgcgcaaattgaaaggtcagcctttcgcgcgctgtgtaggcaagttacccgtgttctgcgttgccggccgtgggtgctctggccaca

SEQ ID NO: 230972 - DNA, 122 bp, Homo sapiens
ggtatacaacagatcattcttttttatggtattttcaaatacacacaaaagtagagcaaccgacaaaattaacccccgtatactcaactttaacatccccaaatccaaaggtccccagattt

SEQ ID NO: 230973 - DNA, 122 bp, Homo sapiens
gaaattaaatactgagggaaaagattatgttgcactgggttgaactttggaggccacaatcgtggtaatatgtaagacttttgcacccccaagaactgtttgcttcattcgggatgacattg

SEQ ID NO: 230974 - DNA, 122 bp, Homo sapiens
ggaataacacatcagcttcctcaggatcactaggcaacctaccttggtgtttcttcattgcgccaatcagaaatcaccaaggttgagtcccgccaatcggagctcacagggggaggctctcc

SEQ ID NO: 230975 - DNA, 122 bp, Homo sapiens
cgggatcctccttcttactgccttctttctcttcccctaggctgtgtataagatggcagacgtagcctgcaaatgccacggcgtctcggggtcctgcagcctcaagacctgctggctgcagc

SEQ ID NO: 230976 - DNA, 122 bp, Homo sapiens
cctgaaaaaggagctgccgagtgaccatgcggccagctgggtccataccttaaggaggaccggcctgtgctccacagacggcactttccgggagctccggctggtgaagggccgcagtccct

SEQ ID NO: 230977 - DNA, 122 bp, Homo sapiens
tgggaagtgaccttggtgcccgggaggggagcaccctgttgtgatgcaggcggggcagcgcggagccggcggcgctgatttcgcactctggccgctagagggcgctgcctttcagccaaagc

SEQ ID NO: 230978 - DNA, 122 bp, Homo sapiens
ttgctgagaatagtcttcattctgaaacacaaacactgggggtgaggccgacgcaaggcccgtttttccaccaaactacgccgcacagagctccactcctactggagactgccaggcggaag

SEQ ID NO: 230979 - DNA, 122 bp, Homo sapiens
ctggcaaaagaaggggacttccgaggtcgtttggtgaaggccttcagcagatctgtttcacgagcaaacttcagactccagctccatgggggcctattagccccaccctggtctgcctccct

SEQ ID NO: 230980 - DNA, 122 bp, Homo sapiens
acatcgcacgcatcaggcatcgtgtggagtgactcacacgttgaatcccggcggccatcacgtgacacagatgcagacaggttacccccaccacgcagacaaggaaactcgggtctaggagc

SEQ ID NO: 230981 - DNA, 122 bp, Homo sapiens
acgcagttctccagaaagactctaagtgcttggttcttcttttatttttcttcctctttccgcaaccctttgagttcccacttttattgcatttgcttgcatttgtttcaaggctgtgattc

SEQ ID NO: 230982 - DNA, 122 bp, Homo sapiens
aacttctctatagcatacatcaccccttcctctacataccccatttatctctggcccccacgtctgcttgggctgcaatcagttcttcaaccaggtcttccaccgccagcctggcagccagc

SEQ ID NO: 230983 - DNA, 122 bp, Homo sapiens
gcggagaggcactcggcgcgcccggaggcgagctgccaactgaaccaaaaatgccgctgccgggagttgctcgcctagctgcgcagcagagatgtccaaaccctccacgcgggaggcggcag

SEQ ID NO: 230984 - DNA, 122 bp, Homo sapiens
agggccgccaataacttgggtagagtttacaatgattttagtgctccccttctgtggttccgtcctttctgaaatgtcttccctccctttccagttgttctagcagttcttaactgcctcct

SEQ ID NO: 230985 - DNA, 122 bp, Homo sapiens
tgattccggttgtgcagacagccgatagcggattcttcgaggcgtctgtcctcttgcgaccgacacttccgctgagcaacggaagcggctttcaagatccgggcagaaactttactaattcg

SEQ ID NO: 230986 - DNA, 122 bp, Homo sapiens
atcctctctctccctctctccaacttgaaaccctctgcagctattgctctggccatgagccgggatggctcaagcgggggtgtcatctacctggtcactattacagctgccggtgtggacca

SEQ ID NO: 230987 - DNA, 122 bp, Homo sapiens
gcacttcaattcccacaggccagggtgtaaggtcagagaacagaccgggagccaggctgtcgggactcaggcttggattctgctacttcccggttgcaagccgtgggttactcaggcaagtt

SEQ ID NO: 230988 - DNA, 122 bp, Homo sapiens
gtcctgcgcctcagccgggtcaccgagagtgagtgccgcgcgggccgcgccctcccctcgcgccgtgccccggctcccggagccttcagcggacccggccacttgaccagcgcgggggtccc

SEQ ID NO: 230989 - DNA, 122 bp, Homo sapiens
tacctcttggctctgcacattggtgaagagaatttaccttcctaaggcctctcagctacacgactgtggacactcagcttccttctaaggtcgttgtgagaggtaaagaaaaggggttagtc

SEQ ID NO: 230990 - DNA, 122 bp, Homo sapiens
ggagggataatgggatcaggaggctcagaaaagggcaaagaatgggaaggggcatggaaacgggtcttgaaacagttaaaaagagaagataatcaccgtcagcgtcgaaatggagccagatc

SEQ ID NO: 230991 - DNA, 122 bp, Homo sapiens
gggcctggggtaaaaaggattgtttaagaagagtgacatcattgtgggaaacaaatgaggcggccagctgaagatgaactttggatatctgtgaggccctgaggaatctagcctgattaaag

SEQ ID NO: 230992 - DNA, 122 bp, Homo sapiens
gcagcaagatgagatggaggattttgatgatgaggcattcgtggatgacgccggctctgacgcagggacggaggagggatcagatctcttcagtgacgggcatgacccgttttacgaccgat

SEQ ID NO: 230993 - DNA, 122 bp, Homo sapiens
cgacagcaggaatggggtggggtaatctcctcaccaggctcccgtaggccatcaccagcacgacattcaccccggagagccagttactgccggacgccatggcctccctacctcgcgcagaa

SEQ ID NO: 230994 - DNA, 122 bp, Homo sapiens
cgggggggtccctgaccgctgccctggggacacctgctgtgctcacaggcagaagagcttcggacccagctgcgtctgctggaggatgcccgtgacgggctgcggcgggagctgctggaggc

SEQ ID NO: 230995 - DNA, 122 bp, Homo sapiens
cactttgtttttttacgtgtaaatattcgcaaaacgcccaaactggtaactttgggaacacgggttcacgcagaagaagggctgctgtctggggaggactgaaactcgggttcccgaagtcg

SEQ ID NO: 230996 - DNA, 122 bp, Homo sapiens
ctcttcccgaggaacacagtgggccatcctaggcaggggagccaccgagcccaccttctgcgagagcccaagaggtctcaccattgtacttggcaactcttcaaaatggatcctctgccaaa

SEQ ID NO: 230997 - DNA, 122 bp, Homo sapiens
attctctatcctctgcccaattctgctggcccattttctaggaaactcacagtaaccacccgaagacatttgcagacaattctactcttgcaccacaagataggttctcaaaaacaaaggaa

SEQ ID NO: 230998 - DNA, 122 bp, Homo sapiens
cccatcgagggcccctggggaccacaggtccccagcgggtagggcggaggcgtggccttgcgaaggtcagcggaggccacccagagctcacagcctcctgccagcgcgctctctgtttctct

SEQ ID NO: 230999 - DNA, 122 bp, Homo sapiens
tgagcgcgtggaaaatctgcttcgggcgcagatctcgagtagttggcctcccctcatttccgtctttcgcttctgcccgcgtggggccactttggtataggtgggaattaagccggggaggg

SEQ ID NO: 231000 - DNA, 122 bp, Homo sapiens
ctggcgcccgggacttcgcccggtgctagggcgtcagtctcccattcggaaggactgggccggggcactctattcaatcgcctttagtgaacatacttgaagctataggtgcagggatgaga

SEQ ID NO: 231001 - DNA, 122 bp, Homo sapiens
gtcaccagcatctagttgctaagtaatagtcacacggcaaaagtccccccgccaatcagacgctgctactttgggataaaagtatccactctgcacttttaagataaccaaagagtgtatta

SEQ ID NO: 231002 - DNA, 122 bp, Homo sapiens
tttatttgtccagtcagacagtctaaggcaacactcaaataaggctgcagagaccgcaatcggaacagtgacatttttagacagccataaggtgactcgagaacccagacaacgaatgcatc

SEQ ID NO: 231003 - DNA, 122 bp, Homo sapiens
ctttctccctaatctgcactatcctgatcttttcttcttttctgcccacagtacttgcaccgtttcacctggtcccacctcagcgagcacctcgcctttgagcgccaggtgcgcaggcagcg

SEQ ID NO: 231004 - DNA, 122 bp, Homo sapiens
aaggagagggaatggtgggaacctgggctgcgcctggcgctcaccagccagcatgagttccgggtgggcgcaggctcagcaggccccacccttggagtgaccagctggtgctgccggcccca

SEQ ID NO: 231005 - DNA, 122 bp, Homo sapiens
ggaagggtgagtggctggttccagggtgggccggtgccagctccggggtggactgaacagcggcggctgtccctgtgcatcctttgattactctcatgctgcatttactgtttacatttgtt

SEQ ID NO: 231006 - DNA, 122 bp, Homo sapiens
aatgcaagggctcagaagccgccagtccagcggctccacaggcccactccctccctcgcgcgggacccaggcgtcccggccccagcacccgcgctcctcccagcctctcgaggttctcgggc

SEQ ID NO: 231007 - DNA, 122 bp, Homo sapiens
cgaggcggaggcggggaaggagcctcccctccaggggtggatccagctttgccccgcccacgcctcgcttcctgattggctcatggtccctgacaaagaaaagcctacattaacgctcccgc

SEQ ID NO: 231008 - DNA, 122 bp, Homo sapiens
tggcgcctaccgtctggtgatggggtccaaggtgcttcactgactggaccaaaagtttaccgaacttctttttttcttatttgtggcaggcactgtgttatgcccagaagggggtgcttggg

SEQ ID NO: 231009 - DNA, 122 bp, Homo sapiens
gcatttattgtacactttattcatttcgctgttccaccagtacccaggtagaaagccttccgctcttgtgagaggctgaagctgctgaagtttgtttttggtttggcctatttaatgtgtgt

SEQ ID NO: 231010 - DNA, 122 bp, Homo sapiens
aatgagatcagtgtggctgagctggtgttgccaacaactgatcacccatcagaaggcgtccggtgactcacccccaattctgaacctcagtcttggcttgatgcctttaatagcggcaccag

SEQ ID NO: 231011 - DNA, 122 bp, Homo sapiens
tcacaggtaccaaaaatatttgatggcatttcccatctttctacttttcaccatttccaccgccatcctcctcattcgagtccacagtatttcttgcatagatactacagtagcctccaaat

SEQ ID NO: 231012 - DNA, 122 bp, Homo sapiens
cgccggggacagtcagggatgctcccaggcccttcgctcttgctttcagctagtcattgtcgagcgccgcccgtgacaggcgttttgccaagccctggagttactgaagtgaacaagtccct

SEQ ID NO: 231013 - DNA, 122 bp, Homo sapiens
gtgcgggctgcggaccctggcgggggctgggaggacaggcgtggggtcccagcagtgacgcgggttctagaggcacaggagcgggtaggagaggccggtggccctgggcccggagtctgcag

SEQ ID NO: 231014 - DNA, 122 bp, Homo sapiens
ctttggatacagccaacgcttttgtcttatagaaaaagaaactgagacacatagaggccacgtgagtttcccgagtccacccaactagttggtggtagttgatggcagcactgggaccaaac

SEQ ID NO: 231015 - DNA, 122 bp, Homo sapiens
acacagcagttttgctgaacaaagaaattcttcacttatgtacagcttagagaaccctggcgtttttatccagcctcttcctattaataacaatgatgtcaatttcacccctctccagctat

SEQ ID NO: 231016 - DNA, 122 bp, Homo sapiens
cttgctcagggaggccggaggcttaggatgaagccaatactgaggaaagcagaatcgcaacgttcaaagaaactgaggcctgggtgacaccacggaacctccggtccagccgcccctaatcc

SEQ ID NO: 231017 - DNA, 122 bp, Homo sapiens
caggcatacattgggcgctcagtcaatacctgtttcaagaaagcgtgcaattttctggtccgcaccggtgcaccactaggggtcgctcttcggggggggtggggggcactaatcaacaaccc

SEQ ID NO: 231018 - DNA, 122 bp, Homo sapiens
cgcctttttgatccggagcttgtttgatcccttactcttgccctgagagatccagtctcccgggcgatgcagccctgccccaagccctgccaggctgtgagagagactcagccccactctta

SEQ ID NO: 231019 - DNA, 122 bp, Homo sapiens
tctactttgttttaaattcaagatttctacttaaccacccttgaaaaacttctctttattcggggtaaatgtctctagctcttaacctcataatcatagatagtatcctctagacactttgt

SEQ ID NO: 231020 - DNA, 122 bp, Homo sapiens
gaggagggggtggggttcaagagagaacagggccctttcagaagcacaagattagaaaagcgtgatactcaatctccagctacggaaaactaaaatagagtagcccttaagttgaggtgggc

SEQ ID NO: 231021 - DNA, 122 bp, Homo sapiens
ggatgcaaggctggttcaacatatgtaaatcaataaatgtaatccatcacataaagagaacgaaagagaaaaacacataattatctccagatgagtcagcttggggaggcggaggcagcggc

SEQ ID NO: 231022 - DNA, 122 bp, Homo sapiens
aacacaaccacttctaaccttgctataaatggcatacagtctaattcttgctaaaaaacccgtccacagagggaccaaatcactgcagattcgccaagggctgaagcatcctttggctattc

SEQ ID NO: 231023 - DNA, 122 bp, Homo sapiens
ttgtcttacaaactgaagccagggtgctcctgcgtgtaccacatgtaccacacacacagacgtctgtgcctgacgcagagagacctgcaggtaagtgactggctgggagtgcgctgaagacc

SEQ ID NO: 231024 - DNA, 122 bp, Homo sapiens
ttgtctttgtggaatgcaagagaggattggccgggaagggtgaagtgctattctatggctcgacagaagttggctcacacatttgtcaaaactcagcaaatacacatgtaagatttgtacat

SEQ ID NO: 231025 - DNA, 122 bp, Homo sapiens
ttacgcccacccggaactcgtgctggcctgggagcatggcacgcagactcggttcccacccgtgcctctccctgcacgcctccccgcaagcagagggaaccagctccagcctcggccagccc

SEQ ID NO: 231026 - DNA, 122 bp, Homo sapiens
aggaaccgacggtgtgtgcctgcgcgtgcagaccctcctggccccgcaggtaaagtgtctcgtctaccccctctgccatcactgtacctcacgtggcctccaccacagcacgtcatgtctgc

SEQ ID NO: 231027 - DNA, 122 bp, Homo sapiens
gggctgggtggggagagcccccagtgcctatgcaaagcagtccttggcttccgggaacctcggaagggctgggccagcttggcccataggacaggccagggcccacgtggcacaagcagggc

SEQ ID NO: 231028 - DNA, 122 bp, Homo sapiens
cgtggtgggacaactggtggacttcgtgtacacaggccggctgaccatcacgcagggcaacgtggaggcgctgacacgcacggctgcgcgcctgcacttcccctcggtgcagaaggtctgcg

SEQ ID NO: 231029 - DNA, 122 bp, Homo sapiens
aattttcccagggagtgcatcaggcgtttctttccaaaacggaagtgtttcgtctttgaccggccaacaaatgacaaagaccttctagccaatattgagaaggtgtcagaaaagcaactgga

SEQ ID NO: 231030 - DNA, 122 bp, Homo sapiens
ccgcctagggctgcgggcgggacgagcaagcacagcggggttaattccaggcagcggggccggccccgcccgcgcgctcccgcccaggccgccattatctcgccgccagacgccatttcccc

SEQ ID NO: 231031 - DNA, 122 bp, Homo sapiens
ggcaggacgttaccagggagaccaggcacaccttgtttgttaccaacctatcaacaatgacggaaaccaatcaacgacagaagatgctccgcttcctcaaagaaacagccaatggaccctaa

SEQ ID NO: 231032 - DNA, 122 bp, Homo sapiens
aataaggagggaaggaatgtgcttataaagaggaagtgggacatcagaattggaaacactcgcagcagcaggccatagatttttcccagcacatgctttttgtcctggcagtagccttttac

SEQ ID NO: 231033 - DNA, 122 bp, Homo sapiens
tgcaatccttccggagggaggagctgcatctgccccattgagtcacgccatcatttatttcggtcagcctgattcacccgcgtttatttgacgcgtcgggttataagtcactccacttcatt

SEQ ID NO: 231034 - DNA, 122 bp, Homo sapiens
ggcacttccgtctgatggaaaaggtaaactaaaacagcagagagctggtgagaagggggccgtgggtcctggctccagccgcccatgcacagaggcagccgcttcccccaggtcttgcccgg

SEQ ID NO: 231035 - DNA, 122 bp, Homo sapiens
cccgcccccttcggcgttgtgctgggaacgctcagggctggcgccagtcgcctggtccctcgctcgccgcagcctagacggcggacgctccctgtcaaggcctaattcctgcaactcgccgg

SEQ ID NO: 231036 - DNA, 122 bp, Homo sapiens
aaaaggacaggagtgagccgtagcattactctagccaaacagagccaggaatctcgccaacgagaaagtgcaggattggcagcaaccgagagatcccgcatggacttttaggaaagattcta

SEQ ID NO: 231037 - DNA, 122 bp, Homo sapiens
gaccatctcagggtcgcacagctagtgagtaccagggcagagacttgaactcggtccgcccggccccagagcgagacccgccactacctccacgcaccctccctgcctgggtgatatggctg

SEQ ID NO: 231038 - DNA, 122 bp, Homo sapiens
tttccacagagataaacaaggtaactgtccaattactgctttattctctctacccttattcgttggccatgcctttacaaagaaagggcattactgtgtttcttgttactcttatgaaaaag

SEQ ID NO: 231039 - DNA, 122 bp, Homo sapiens
gtccacctccccaccaccaaggagctggccaagcggcagcacctgccgtccgtggagaaccggcccaagattgatgccttcctgccagcctggcagctctggaagtggttcggcaagcccac

SEQ ID NO: 231040 - DNA, 122 bp, Homo sapiens
gcgctcggcaagcaagctggaaattggcgggctgtggtgcctggtgcctgcgctgctcagcgggaggatgagtcaggtcccccttccccattgagcccctggaggcgggcggtggggggggg

SEQ ID NO: 231041 - DNA, 122 bp, Homo sapiens
ctgtggggcaacctcgaccccactgtggcggcgagatggcacgggacactacctgtgcaacgcctgcgggctctatcacaaaatgaacggacagaaccggcccctcattaagcccaagcgaa

SEQ ID NO: 231042 - DNA, 122 bp, Homo sapiens
ctacacttgatttagagcctacactagcaaattcaggctgaatggtagtagcgtgaattccgtgattatgaaaaacgtctttaatggttttagccacctccatgtatgatgttggatcttca

SEQ ID NO: 231043 - DNA, 122 bp, Homo sapiens
gaataggaggaggaagtcgagaacccacagccgccctgcccagcctggctcctcctcacccgcccaggctgctgtgctcctcacgggaggaaaacccgcctgcgtccagctacctccaggaa

SEQ ID NO: 231044 - DNA, 122 bp, Homo sapiens
gccacagttttaccacaaacacatttttctgctgtgataaagactgcacccctgcatcaacggaaaagcagtgtggctgcgtggcaagtgtgtgcctttgtgctcgataaggctgagttgaa

SEQ ID NO: 231045 - DNA, 122 bp, Homo sapiens
ctgccttttttccgagccgctgcgggagggggccaggacacgctcccttaggagagcgggcgggtcacaaggacctggacagaggcagaactgaggccagcagccagctccgccgctgagtc

SEQ ID NO: 231046 - DNA, 122 bp, Homo sapiens
ctggtcctcctggcatttgttggggtgcgaaggccaccgaggaacctgagggttggagggcgccgcttctggatgagccagggcagcgtaggcaaaatcccagagtgccaggaccagttggg

SEQ ID NO: 231047 - DNA, 122 bp, Homo sapiens
attttcttcaactgaacaacagtccacagttacaaatgccaaacaggaagggcacatctgcgaaaaacaagcctcttaagctggaagaatgaataatgatgatgtgtgggctgtgctttcta

SEQ ID NO: 231048 - DNA, 122 bp, Homo sapiens
gagcaagtctgtgataaatgtaggaaatgattgttcttgtttccctgcagtagcagctgacgcgtgggtccaccatgaactggagtatctttgagggactcctgagtggggtcaacaagtac

SEQ ID NO: 231049 - DNA, 122 bp, Homo sapiens
actttctcagcaccctgagaaaggccaaatcccatgctggcctcttgcccccgcccactgcgccccacgccccacctgctgtgtttgtgcaggggtggagggaacataatgagaggctgatg

SEQ ID NO: 231050 - DNA, 122 bp, Homo sapiens
caggatatatgcaaagtttcaaaacatctctactaaaatgtttagtaattaggccgggcacggtgactcacgcctgtaattccagcgctttaggaggccgaggcgggtggatcacctgaggt

SEQ ID NO: 231051 - DNA, 122 bp, Homo sapiens
ccagctaaactgtcagcactccaagtgagggagctcaccctttttcatcattctgagattcgagtttcttgcaaatgcctcgtcccacctgtggtgaactcatttaggatctggggggtggg

SEQ ID NO: 231052 - DNA, 122 bp, Homo sapiens
gagggccctgtgggaggagctggagaacctcgggcccttggagctgttcttgggggcaggcgggtgggctgcatgggacgatgaggggcctgccttcgggaatcctctgtctggggggcggg

SEQ ID NO: 231053 - DNA, 122 bp, Homo sapiens
gagggcggggcttgcctgcttggaggcggggtctggttggagttggtgaacgaatttgcccgctacagcggccctagatttttgttctgtttatttgcactatgtagccaatcctccagaat

SEQ ID NO: 231054 - DNA, 122 bp, Homo sapiens
taacactaataataatcccacaatggtcattgggaaatcctcccccaaagtgacaactgccgctaagaagggcaaaatccactaagaatgaaaattcccccaaatgagtccttctccgaggg

SEQ ID NO: 231055 - DNA, 122 bp, Homo sapiens
gggctcccacctcctggctcggccaactctggcagcttgttctgcacacatgacgtaacccggcattagatcaaactttctggcaccttgaacccactggggtgggtggagggatggagaag

SEQ ID NO: 231056 - DNA, 122 bp, Homo sapiens
aaaataaaagggatgttcagagtttaaactttagaagaataaggacagacttcctgaggacgctaaggaaaatgaagacacttctaaatagtgcccgttgtgaggcaatgcattatgctaag

SEQ ID NO: 231057 - DNA, 122 bp, Homo sapiens
gcacgccggcgtgggggatctgggggcggccccggagggcctggcaggggcctcggccgccgccctcaccgcgcacttgggctcggttcacccgcacgcctctttccaagcggcggccagat

SEQ ID NO: 231058 - DNA, 122 bp, Homo sapiens
gcagtgagatgagatcacaccattgcactccagcctggataacaagagtggaaacttcgtcgcaaacaaaaaaagaaagaaagaaagaaaagaagcagagttggactcagcgggaaaatagg

SEQ ID NO: 231059 - DNA, 122 bp, Homo sapiens
ttcaggttgccattacttagaaaggattaacagcttggtagtgactgtcttccttcagtccgattccgtagcacctctgaatgcagtggctgtctatgaagatagcagcacactctgaataa

SEQ ID NO: 231060 - DNA, 122 bp, Homo sapiens
gcaccatgagcggtgagtggcggccccgccgctgtcacctgccccggccgccccggctcccgccgctccagctgcacactccggcccctgcgtcctcgcgccccgctccctcgcagaccccc

SEQ ID NO: 231061 - DNA, 122 bp, Homo sapiens
ctacaggggtgtggaacgcgccaatggacgctgacaccttcatgcggtcgtttaacgctccgtgcacaataaccattttactcagttgtgtgatgctccatcgaaaataacccatttacacg

SEQ ID NO: 231062 - DNA, 122 bp, Homo sapiens
tggcgaaggggagtgcaaagtttgaaattcgaagtgggggcgcgttcgaggggttctgggcgagtctcaaaaaaggcagggtcaaagttaataatttgagggaaggctgcccccacgagggt

SEQ ID NO: 231063 - DNA, 122 bp, Homo sapiens
cctgtttaatccctttgacttcaaacttcaaactttatcatcctgcagtcctttcagatccggtattattcgatttatcgtagttcaatgttgagaagtactctaacaaaagccaacctcaa

SEQ ID NO: 231064 - DNA, 122 bp, Homo sapiens
ttgccctaaaaatgtcccccacttcaggaacctgaatattttacacagcaggagatacatcggaagtcctacagaatctcttgactttgggagatgcaactgcttttctattaggataacct

SEQ ID NO: 231065 - DNA, 122 bp, Homo sapiens
ggatgtgggggcgtggctaccacgccctagtagagcgggaaactacaactcccaggataacgcgggatttcagcagggccaaaagagtgattgagctctgactggcgacccgacccggcgga

SEQ ID NO: 231066 - DNA, 122 bp, Homo sapiens
aaagttacattttctacttgtaaaaattattactgtaatatttccgtaagctatcctgaacgtctatgtattttaataattttctctctgacatgagacaagttcattttattcttaaggat

SEQ ID NO: 231067 - DNA, 122 bp, Homo sapiens
ctacgatgagagcaagctggcgccctggcagcgacaggtcatcctgaagaagggggacatcgctaagtactagaggccgcagactcctgtccgcagcctcgcagctccgtggggccctccgc

SEQ ID NO: 231068 - DNA, 122 bp, Homo sapiens
gcgagttgcacagtccaattcgctgttgttagggcctcagtttcccaaaaggcacagggacggggggagggtggcggctcgatgggggagccgcctccagggggcccccccgccctgtgccc

SEQ ID NO: 231069 - DNA, 122 bp, Homo sapiens
ttggactagaagaatctcagcgaatccttctccagtactgacttcaaaggttctcagaatcgcggcgaaagcaccctacgcaaaatagcggaggtcggcgccaagaaaagcactgcaggttc

SEQ ID NO: 231070 - DNA, 122 bp, Homo sapiens
atttcagatttaatttgtccgaagatagcgtgctctcttcttactcatttgccatcattacgaggaaaacaaaccaccaccttggcttcaagatcctgggtagaggctcacggtcttttcaa

SEQ ID NO: 231071 - DNA, 122 bp, Homo sapiens
tcaataaaagaaatgtttcaaattggatgaaaaatggttctgtgattatggtttgtgggacgggttctgatgcttcatttatgttcttcatacggaattctgtctcatttccctagttctaa

SEQ ID NO: 231072 - DNA, 122 bp, Homo sapiens
cagagaagaagactttcagtagaaacagcagatatttaaaagccattcgattacgtctttcgcttgtttgtgtgtagaccctcttttcatatctttgtaagtgtggcacaggtgaactggat

SEQ ID NO: 231073 - DNA, 122 bp, Homo sapiens
cttcctgatagactgatctggcgggatcagcaggtcgcgatccactctcccttggtgtggcgccgtggtgccccccttcctcccgcctagccagctgtggtcttcaccgacccccttgcctt

SEQ ID NO: 231074 - DNA, 122 bp, Homo sapiens
gagcaggtgaacgcctccccgtggaccccaccggactgggtggggaactcacaactctgacgccccgtgactgcatcccctagctgggcagagacgcatttggctcgccaccagccacctcc

SEQ ID NO: 231075 - DNA, 122 bp, Homo sapiens
tcagcgtcaagagagtccctgagtgagaaggcccagataagcccaggccccccaggccagcggacaggcacaggcagggcctacagaggtgccaaggccccaggccagttgtgctaggagcc

SEQ ID NO: 231076 - DNA, 122 bp, Homo sapiens
ggtcggaggaaagtttctcgtggggtgggggcccagaggggatggcagggtgggctccgacgcctcctcgcctttaagcgggtggccccggctcttcctccgttacctggagcggggagggg

SEQ ID NO: 231077 - DNA, 122 bp, Homo sapiens
cctctgtcaatcaccacctcattcaggacctggaggggcgacagcattgcacactcagggcgggggatgccgcacggctcgcagacaccctccgtctcacccagccgggctctccggaaggt

SEQ ID NO: 231078 - DNA, 122 bp, Homo sapiens
gggcacgtggcctgttctccgtgactcactctgggctgacccctgcctgcagggtccggacgttcccacgggactcaccactggggcacgacacggtgcgtgcactcatgtactacgccctc

SEQ ID NO: 231079 - DNA, 122 bp, Homo sapiens
ccagggcagagagctcttccgagggctggggctggggctggggttggggttgggggctgccggcaaaggagcggagcgggagccctgggaggctgggagcggctggacgtgcaaagcagaag

SEQ ID NO: 231080 - DNA, 122 bp, Homo sapiens
tcaaggaggaaaggaggagtatggagttaaacttctgtgtgagggaacagtgcccaaccccgtgtcactcttgtccccctgtcccctgggggcaagacagctgagctgggctggggctgagt

SEQ ID NO: 231081 - DNA, 122 bp, Homo sapiens
cagcttcccaggcccaccctgaggccccgcaccgccagggaggtggaaggcacggagcagcgaagcccggccccggccccggccgcccgaccagctcacagaggaacacctgtgggggggcc

SEQ ID NO: 231082 - DNA, 122 bp, Homo sapiens
cagtggccaggtttgtgtatcttgccctgcctgtccagttgcacacactcaagcatgactcgttaacttaatttcctgccatatatctcggttcttctagaactggaatcttgtccttaatt

SEQ ID NO: 231083 - DNA, 122 bp, Homo sapiens
cgaggcgaagaggccacctatttacacggcccagtgtacaccccttcccaggactgcagacgcactccccgcccaccgcctttgccgcagcaagacaatcagcccactccgcctcccctctg

SEQ ID NO: 231084 - DNA, 122 bp, Homo sapiens
gctagcgatgcctccgggatcttccagaggaaggtgagacaggcaacaggatggagtaatcgcagcctctaaaaaacacatttcacagcagattaggaaaacagacgtggcaagaggtgggc

SEQ ID NO: 231085 - DNA, 122 bp, Homo sapiens
tcgccctgtccttgtgtgcaatctgactcccgcagccacgcccgagccccgtacaccgtgcgctggttacagctgagcagttccctcggaggagcagggagggcccttgccatggtcccggc

SEQ ID NO: 231086 - DNA, 122 bp, Homo sapiens
cggggcccgggaagccaggatccgaggggctacacgcacggaccctcacccagggaggagcgagaatgtgtagggtcaccggctttccatgattgctggggatctttggtgaggcgggcgta

SEQ ID NO: 231087 - DNA, 122 bp, Homo sapiens
cttaaaggcagtcattctatagcagttcccatttcttaggtgcttactatataccagaaacggtactaagaagtgctttatggacatttagcaaagtgaatcctcacaaccaccctacgaga

SEQ ID NO: 231088 - DNA, 122 bp, Homo sapiens
gtttactcatgattcacagcccctgtggctcctctgagttctggcatccccttcctgacacgggcttatccatgtcctcccatgctctgagacatgtagatatttttcctccatgtttagag

SEQ ID NO: 231089 - DNA, 122 bp, Homo sapiens
agggaattgaacttggtgtgtcagaaactcattattggtttgtatttcaggtaagcagagcgcctagaccaggggttggcagctttttcttacagacccagacaggtttttgggctacgtgg

SEQ ID NO: 231090 - DNA, 122 bp, Homo sapiens
gaccctccctctaacggtctccccgccgctggcctcaggcggccgccagactcccgtttccggccctcgcggtaccacagttcccagcatgcccttggcgggaattctttccggctggatga

SEQ ID NO: 231091 - DNA, 122 bp, Homo sapiens
tagggatgtcctttttaaacaacatgaaggtgcctttgtcacatgcattcaagtaaattacgggtggtgagcaagacatgcctcatttttatgatcacaagcgtgttgaagaattctgagaa

SEQ ID NO: 231092 - DNA, 122 bp, Homo sapiens
gaacttaacccaggtgcccctctcctggcagaagccattcacaagctcagctgagtgcagcgcctttcccccggcctccgcggcagcgccttttaccccggcctccgcggcagcgcctttcc

SEQ ID NO: 231093 - DNA, 122 bp, Homo sapiens
tgacagacccgcgccagcccagcccaggaggtggtctgacagacgcatccggtcgggtcgcgtaacagacagagtgctgctgggacactgtcctgactgcagcgaggggctgagatgtgcct

SEQ ID NO: 231094 - DNA, 122 bp, Homo sapiens
agtccccaatcgtccaagccgaataggctgcatgaagtatcactcaaaaacattcattaccgtcggtgtgttgagtggtaacgccagtgtgcgaattcattaatggaaatcacgggaccccg

SEQ ID NO: 231095 - DNA, 122 bp, Homo sapiens
atcctgctccatgtcaggaaaatatttataggtccccagtcatgggatctggaaacagagcggaggaaggagctcgggaatggtcttgctcaatccttcccggcctctgctcatcggaatca

SEQ ID NO: 231096 - DNA, 122 bp, Homo sapiens
gtaccagctcctcccttgtgcccaagtgaagccctgtggatggtggggactctgctttctcgtctgcgccctcccccgtgctcctggccttcctggaggattcagtgtcctcgggaagcatc

SEQ ID NO: 231097 - DNA, 122 bp, Homo sapiens
ccagggaaacacctcagatggccactggtgatatgagaggcagatgctcaataactagtccggatggagagttctggaactatgttgaggctcacactcactgctccacttcataaccgaga

SEQ ID NO: 231098 - DNA, 122 bp, Homo sapiens
ggaagcatgtgatgagttgtgtgatgaagatagagcccattgtgctgtctctccaggacacgttgtctataatgatacagatgggtatgccttgggctatgactttcactatgtttttgttc

SEQ ID NO: 231099 - DNA, 122 bp, Homo sapiens
ggtgccgcaaaataaccaattttaataaagactgcagagaagaaaaccaggttctgctggcggagtgcacaggctcccagccgagcgcccaacaaccaggttccgggcccaccctgccgcag

SEQ ID NO: 231100 - DNA, 122 bp, Homo sapiens
caagttcacttttgtttggtgggggcggggctgctctcagagtatgttcttacctagagccggggggccaggggcagaaggggaagggggcattggaaataatcccccgacgggcagcagga

SEQ ID NO: 231101 - DNA, 122 bp, Homo sapiens
ccccgcggcgtccgggcagcgccagcgctcagaccggccgagcgcaactccagcctggatcgtagtccccgctaaaacacctcctctggcgccttgagaccgaatttgagaatccaccaatc

SEQ ID NO: 231102 - DNA, 122 bp, Homo sapiens
gaggtcaggggtgggggcctcgccatggggtatgtataatgtagcccagggtcctggcaccgagtctcttcaggaatgcaagggatttggattagatggtgtcttagagatctaaattatcc

SEQ ID NO: 231103 - DNA, 122 bp, Homo sapiens
agaaaacctgcacaggccaaatatcaattactgtatcgtgcgtgactcgctgttccctctcgggtcgtctgcccttgtctgggcttcactttctcatctgtaaaaagacctgactggcctgc

SEQ ID NO: 231104 - DNA, 122 bp, Homo sapiens
gggaaatgtgggagtaatatagctcacaaggttgctgtgggggttaacaacaacaaaaagcgaaatatatgtgtaaatgaaaaaaagtcagttttaggcttaattatcactgagtaaacatt

SEQ ID NO: 231105 - DNA, 122 bp, Homo sapiens
gtgctttgtggctgctggaatcaaatggcgccatctctagaggggtaatcacagtcgtttcgggcatttgtgaaatagcgtgtagaaactgcttccgtacaaactcgaagtgatcagcctat

SEQ ID NO: 231106 - DNA, 122 bp, Homo sapiens
ggatattgcattataacttttgatggactttgattacatttgctacactaataaaggcttcgaagatactccttgaattcaattttgtggcttagatatacccttgaagtaaaatggcagcc

SEQ ID NO: 231107 - DNA, 122 bp, Homo sapiens
gaggggaagctcctgcagcctccttccagcctgggggctgcatcagtggggctggtgagccgcgaactgggacgagggaagaaccgaaccgaggccacccagtaattcccattgtatcccaa

SEQ ID NO: 231108 - DNA, 122 bp, Homo sapiens
cgcagcccgtccctctctcgcctgccctccctctcctgccccggcagtgcgcccacccgccgccacgggcagcctttcgacgcccaacctgcaaaccgcctgggggctgcccaggacgtcca

SEQ ID NO: 231109 - DNA, 122 bp, Homo sapiens
gaaccagaaggccggtatgctcatgtcgatgtgtctaagtcaaaggcatgaagttgaacacgtgcgcacatgaggctggatgttacagggcagggaagtaggggtccccaaggagcccctca

SEQ ID NO: 231110 - DNA, 122 bp, Homo sapiens
agaaggcacaagacatttgtcttgatccaaaacaaacaaaaatgtaatcctttcactaaacgtccctgttcactttaaaatggttcattctgtgtcaacttcacctcaatttattgtaaaag

SEQ ID NO: 231111 - DNA, 122 bp, Homo sapiens
ccccagcccacactacctgtggtggtgatgaaggcgtaggacttggaggtctgccccgcccgcaccccgtggacctccacgtggtaggtggtgccgggcctgaggtcgggcaggctgacggt

SEQ ID NO: 231112 - DNA, 122 bp, Homo sapiens
aagggtgtgagggcagagttaagaggcttcctcccaggctcctcctccctgtgccctgggcgtgacatctgcagcctggaaagaggatttttcaaaactcacctggaacattcctcctccct

SEQ ID NO: 231113 - DNA, 122 bp, Homo sapiens
agggggagcagggcagtgctctgctgggtgaggggcacccagctccagaggctaggtgggcgtcgctggtgggtggactcctgggcgctgcgcggagccgcgccggctgggttagcgcgggc

SEQ ID NO: 231114 - DNA, 122 bp, Homo sapiens
cctccctccctccctcctggggcttcccgccagctggcccggggccaggcctgccacagccgctgctgttgcagttgctgcagccactgcttaggctgctgctcctgggggccccaaacaga

SEQ ID NO: 231115 - DNA, 122 bp, Homo sapiens
ccagcttaatccgctgttggggctggaaaggggcgtgtctttgtagggacagaaggggtccgaggagttcccggcactttcccacccgctgtttggttttcctggagatgggcctggggctg

SEQ ID NO: 231116 - DNA, 122 bp, Homo sapiens
ttaaagcagcagcagagacgtgcagccgaactgaggcaggaccggggagagcgcagccaccgcacagtcacgcacagtcatcaggaggaatttcttagaggcttaaataatcatttcaacag

SEQ ID NO: 231117 - DNA, 122 bp, Homo sapiens
tgtcctcaggcagagacaagccatcgtatgccctcagcccatgggtcacctgtaagcaaacgagagctgattgagtcactctctccagctcccactgagccccacggtccttcccctcactt

SEQ ID NO: 231118 - DNA, 122 bp, Homo sapiens
ggtgggggaggagcttctgggtgatgtaaggccgggaatgggagtggcctctcctcgactcgctgctaggaagggggcgggactctcggtgaccagacgccggggagggggcaggcgttcat

SEQ ID NO: 231119 - DNA, 122 bp, Homo sapiens
tccttggtcgtcggtaacccaccacccaaccgaattaaaattcgcaaattgattcccacgcgttggtattaatgggttgttcctcttaaattgttgccaactttgctaatggattattattt

SEQ ID NO: 231120 - DNA, 122 bp, Homo sapiens
gagattagtgttgacctttaaatagtcccaccgaaagccatgttcagatatacaatgctacggtttctctagactcttatagagcaactatttgggaatttttaataatcaaattatgtacc

SEQ ID NO: 231121 - DNA, 122 bp, Homo sapiens
acaacaagggccaggctctgcaccgggggaccccctgccctgccagccggaccctcaggccgctcagagggccagtcccagcacctgcccctcgccagtggacacaggctgccggcagcatt

SEQ ID NO: 231122 - DNA, 122 bp, Homo sapiens
ataaaacttgaatcactgacctcacccataaccgttgaattgctttttggtggtggaagccgtgacccagaacagtgctgaggtgtcctttgtccttggtactggcattgtcagatagtgtt

SEQ ID NO: 231123 - DNA, 122 bp, Homo sapiens
gaacccgaggggagccgagagggagttcaaggagtccaggttttactgcagattctttggcgctagctcccagctgacaaatcaacatctcaatctgacaattagtggtcaagatgcggggt

SEQ ID NO: 231124 - DNA, 122 bp, Homo sapiens
agagccgtcatcgcaggctcctgcccagcctctggggtcgggtgagcaaggtgttctcttcggaagcgggaagggctgcgggtcggggacgtcccttggctgccacccctgattctgcatcc

SEQ ID NO: 231125 - DNA, 122 bp, Homo sapiens
tgcagcactcggcctggaggtaacctggttgggagcgaattcagaactggaaattccaggcggcccagagggacacccatccctctccgaggcgcgccgggatccggcgcccagctgcgggg

SEQ ID NO: 231126 - DNA, 122 bp, Homo sapiens
tgcaagagtctgaccctccccaaataactcctagggataatatcactattgtaaaatctacggatcagctgacaccacccaaatcgataaattggttcatctggtcttatggtccccgctac

SEQ ID NO: 231127 - DNA, 122 bp, Homo sapiens
ggccctaactcgaggctctggctcctcgcgccggcaagctgaggaagagacggtcccctgcgatttagatacaaacgcgcgcgtgcagggaaggccatcccagggcagacactgccacctcc

SEQ ID NO: 231128 - DNA, 122 bp, Homo sapiens
gtgacatctatacttgagtgttttatctaggaaccatttcgatttatcgactatgagacccgaaatcattgcaaaatgctcacttacctacaacgtaatggcaactcaattgtttaaaagtg

SEQ ID NO: 231129 - DNA, 122 bp, Homo sapiens
ccacactcacgttaccttctttataaaagtcgtcgggtcaaaactgcccagagaaggaagcgaacgaaaaacaggtttttagggggcttatactcacaaaattgtcttttttctcccacgag

SEQ ID NO: 231130 - DNA, 122 bp, Homo sapiens
ctgaatttggcaagggagcggaatttgacttctctggtgtaatgcagctttgccgtgtgacggtccaggaaaggggattaggtggaagaaaatatttcagtgaacactgatttttacctata

SEQ ID NO: 231131 - DNA, 122 bp, Homo sapiens
acgtggccctactagggggcacagccgagctgctctgccctctctccctctggcccgggacggtacccaaggaggtgaggtggctgcggtccccattcccgcagcgctcccaggctgttcac

SEQ ID NO: 231132 - DNA, 122 bp, Homo sapiens
tctacaggtgacaactgcagcttctccggcgaaagtcactcgctttcccattcttagccccgctcacaccttgcgctcacagtcatttccgccaggcctggaccagcggacgcgcgcgtggg

SEQ ID NO: 231133 - DNA, 122 bp, Homo sapiens
gctttttttttatgccttggcctcctaagggaacagttgtttcagctgtaggtaatacagcgggaccttagtctggccctgagtttggcgaagggctctttatgctcttggcattgctagta

SEQ ID NO: 231134 - DNA, 122 bp, Homo sapiens
aatctccttgcccagtgcgtatcaggttctaccccagggcggccaccacctgcacaccagcgtgcctaccagtgagtcatcgcttagggccctgaactgacctagaggcggggctggactcc

SEQ ID NO: 231135 - DNA, 122 bp, Homo sapiens
cggagacagacagagcaacccttcattccggtcacactcccagcactttgctgggtcagccgccgtgactcagtgttcgcgcccccgaccgggctggcacacgtgagtgtgcacacgcgcgc

SEQ ID NO: 231136 - DNA, 122 bp, Homo sapiens
aggagctgtgccagctgtgttcacataatgcatcctgctttcattcaccaacctcccttccgactacaaaactctgccattctctgatgcaggagatgggactcaagaccacaccgtgcact

SEQ ID NO: 231137 - DNA, 122 bp, Homo sapiens
gcccagcagcacattaataactccccaccacacgaccggtgcttggcttattacggggagcgcttttcccattatgcctggactctcctcccgggaggcatgaggcgttctgctcagagcct

SEQ ID NO: 231138 - DNA, 122 bp, Homo sapiens
agtcgccctcccaattacagcggctgcaacaataggcaggcgttggggcttttctggctgcgtggtaacgggtccgacccgaatgttgcgtttttggcgaagctgcgatcggggctcagcca

SEQ ID NO: 231139 - DNA, 122 bp, Homo sapiens
ggggagcgcgacgctccgccccggcgctagggtccctccctcctcccggctctccgcaggcgccctcccctcgccgggggccgcgagttgcatttggtaaaacccagccccggaatatatag

SEQ ID NO: 231140 - DNA, 122 bp, Homo sapiens
ctgagtcttaccccatacggagggagggaccccaaaatatagaaattctaaccaccctctcggctcagccccgacgaccctgggagccgtcaacttgcccccacagtcccggattcccagcc

SEQ ID NO: 231141 - DNA, 122 bp, Homo sapiens
agacttgggaacctggaagcactctggagaacctttccctgagacatggagctttggggccgaatgctgtgggccctcctgtctggcccagggaggaggggaagtacccggggctgggcctt

SEQ ID NO: 231142 - DNA, 122 bp, Homo sapiens
agattcacagtatcttctaagcagccggcgcagaatccacatgaccttctctggcattcgcgcattggctgtacccttccgcttacctatgccactgtgcctgccttccggcgggccaaggt

SEQ ID NO: 231143 - DNA, 122 bp, Homo sapiens
ggcgcaaggcgtccatcctggagccactcacccggccgcggccccgcgacctcgcctactcgcagctgtccccgcagtaccacagcctgagctactcctccagccccgagtacacctgccgg

SEQ ID NO: 231144 - DNA, 122 bp, Homo sapiens
acgtaactatacctgtcatcggaacccttaaatatatcactgtttgtattagtccattctcgtattgctatagagaaatacctgaggctcggtaatttataagaaaagaggtttatctggct

SEQ ID NO: 231145 - DNA, 122 bp, Homo sapiens
ggtgcagcgcccaaacctcgcgagatttgttggctgggccaagtaccacccaccaaatctcgcgatacctaggcgcctgagaggctctctaccggtgagggtttgcggggaagatggagtat

SEQ ID NO: 231146 - DNA, 122 bp, Homo sapiens
cgtgctcggacgccggaggagcaggactgagcagaggcggccggtcttcccgactccctgcggctgtgtccttagtgctgttaggaggccccccaatccccacgttgagctgtctagcatga

SEQ ID NO: 231147 - DNA, 122 bp, Homo sapiens
gtcacagcgcagtcttgtcagtctgtaatgtgtatactgcaggggtttcttgcgaagcggcggttaacttgagcagaccaggggcagtctagtgagtaggtgacgaataaattgagtcctag

SEQ ID NO: 231148 - DNA, 122 bp, Homo sapiens
cgtgaggaagaaccgctacaaagacgtgctgccttgtaagtcggggcttccgtagggagtcggtgcagccttgcacgccctgccacgtccaggcgtcagtgtgcactggagtcacccactgt

SEQ ID NO: 231149 - DNA, 122 bp, Homo sapiens
atgaagctttgacagtaagccatacatttacacaggcaggcattgtcaattttctgcagtcgccacactgagataacacaagagagctggatattttctttcttgtgcctttctttactaaa

SEQ ID NO: 231150 - DNA, 122 bp, Homo sapiens
ccgcctcggctgcaacgttgctgacaggctggcgtgtcccaagctctttcattctgttaccgctggggcaattccgaattcagcctgctgttcttctgcctggaggagtaccttacccctcc

SEQ ID NO: 231151 - DNA, 122 bp, Homo sapiens
tgattgattcagagatgcctggttacaaacatattgtatcatgggaaacacacacacatacgcaagcagggttacccagaaggaggatgattggacatctttgagaacaatgcctggtgcag

SEQ ID NO: 231152 - DNA, 122 bp, Homo sapiens
tactgaggccttggtagatgtacaaacagttgatcttggtctcctcctccgttgcctccccgggcccatgcctcagctgacctccacggcaggccagtgccttcggactgagctggctgtcg

SEQ ID NO: 231153 - DNA, 122 bp, Homo sapiens
gaaacttggcttggctgcagtgacaagttttgtacctacaggaagatcagcatttccttccgttcttcctctgccaatccatccctgactggtcttttgccctcttttgagtaagaaactcc

SEQ ID NO: 231154 - DNA, 122 bp, Homo sapiens
tgtattgtttccaagggaaaagcttgggggaggactcagttcacaaaatgcaaaactcaacgatcagattcacggacccagagcttttccatgtgtttatattgtaaatatttttgatttca

SEQ ID NO: 231155 - DNA, 122 bp, Homo sapiens
gggttcttcgggagttgtagttttctcggccttctgttgcgggggcggggcggatccttgcgtggtagcgggagagggtctagaggcctgaactcctgcgtctagggctggaggagctggcg

SEQ ID NO: 231156 - DNA, 122 bp, Homo sapiens
ggccttctccccgccccgcacccctgctcaggcggcgcgcccccactgccggcctccaggcgcctctcccgagcgcctcgctgtggccaccactccgcaggtgctgagcaaaaggtattctt

SEQ ID NO: 231157 - DNA, 122 bp, Homo sapiens
gagagaggaagcctgctcagtccttcctagggagtggctcctagggtctcctgcgggaatcgctgctctgaagatgccatcggaaggcacagtcactgggctgcagcagagtagagggagct

SEQ ID NO: 231158 - DNA, 122 bp, Homo sapiens
tggtttggctctgtgtccctactcaaatctcatcacacattgtgatccccataatctccacgtgttgagggagagacctggtgggaggtgattggatcatggaggaagtttcccccatgctg

SEQ ID NO: 231159 - DNA, 122 bp, Homo sapiens
aacagactcagcgcaaaaagaacagtggactctgctgcctgctcactgccacacttcccacgtcaggggtgcagacacaatactagacccaggtaaccgccgcgggagagacccaagttcac

SEQ ID NO: 231160 - DNA, 122 bp, Homo sapiens
acaataactaaaaagcggtctccatccctgaagccaagctgggagagtagccgaaggtcgcgcttcctggccgccaaaaccgaggtggaggaaacttggtagtcagcgagctacgccctctc

SEQ ID NO: 231161 - DNA, 122 bp, Homo sapiens
cgtgggaggcgcggagcgggggccacgggaatccccagtgcgggaatctagtgacttgggcgcggcctagctggcctgttcgctcagggctcctttctctctctgccaggtctgccatttta

SEQ ID NO: 231162 - DNA, 122 bp, Homo sapiens
gaaggtgagaaaagtaatctcaaactactgcttaagatctcacatttaccagtgctggggcgaataattgcttcctgttttcaattaataatttgaataaaaatgagatgtagtcaatttac

SEQ ID NO: 231163 - DNA, 122 bp, Homo sapiens
gaagcggggtatgtatgagtgcagaggcatgcacatcccgggcctgcctccagccgggtacgcggattcgggtgagctgtgtatttccacagcacctgaagcagcaggcgagggggacgggt

SEQ ID NO: 231164 - DNA, 122 bp, Homo sapiens
ccctagtttgaattgttttctcatcctacagagcaggtgggaggatgggggactgaaaagcgggattgatgaatcgcagaagccagactcttgggttctgtttcacttcatcctgggtaatg

SEQ ID NO: 231165 - DNA, 122 bp, Homo sapiens
gggcacggtgatcattgcaggggtcgtgtgcggcgtcgtctgcatcatgatggtggtggccgctgcctatggctgcatctacgcctccctcatggccaagtaccaccgggagctcaaaaagc

SEQ ID NO: 231166 - DNA, 122 bp, Homo sapiens
gccctttggtaccaatatgcccattttcctcagcatccttcaaaaagctagtgttgacctcggaagttggtaactgatgggagctttcacctaactgagttcagtagccaactttagctcat

SEQ ID NO: 231167 - DNA, 122 bp, Homo sapiens
caccagcggcccgcacactcacgcctcgctgtgctgtctgccctccatcacccgcaccagcggcccgcacactcacacctcgctgtgctgtctgcgctctgcagattcttcaagggttccgg

SEQ ID NO: 231168 - DNA, 122 bp, Homo sapiens
tgcccacagtccctaaagtgatccctctgaggaccgatctcagcccttgtccgtctccttcgtgacccatcgcgaggtgtgtgtgtcatttccatctgtctattgcttctttccctccttct

SEQ ID NO: 231169 - DNA, 122 bp, Homo sapiens
tcagttccagtgtcgttaacaagaatgggtgagtgcttagtgagattcgtatttccctttcgtggtgctgcttttagcagatattggcatgcagggtacaaccagcatgacgcagttattag

SEQ ID NO: 231170 - DNA, 122 bp, Homo sapiens
tttgggggcagtgagaccaacgggggcgccaacccctttgaggacgactccaagggagtgcgcgtgcgggcactctacgactatgacggccaggagcaggacgagctcagctttaaggccgg

SEQ ID NO: 231171 - DNA, 122 bp, Homo sapiens
aggaggatttaaccgcttcctccccggcgacctggcctatgaggcctctcgctgctcgcccggccctctgcccggagctggatgggactgcagaactggaactaagcacccgcgccgggctg

SEQ ID NO: 231172 - DNA, 122 bp, Homo sapiens
cccgccagagtacatgaaccacctgaccgtgcacaacagggaggtgctgtacgagctcatcgagaagcgaggcccggccacgcccctcatcaccgtgtccaatcaccagtcctgcatggacg

SEQ ID NO: 231173 - DNA, 122 bp, Homo sapiens
tcaccccccagcttctgtctctgctgctggactgtgctgtttgtaaggcatcccccaccccgagaagttctgctaagatccccaagaaggggacagatcctctctggcagagacactggcag

SEQ ID NO: 231174 - DNA, 122 bp, Homo sapiens
accccgctgagcagagcctgagcctgcaacctccagagacctggggaaagccacatactccgcttcccgcccccggcaagggcgtgtcagctacaaggggcgtgtcatctctaggccccgcc

SEQ ID NO: 231175 - DNA, 122 bp, Homo sapiens
ggggctggagaatgagggcttggtaggcgaaaggccccagggccagccctgctctgccctcgtctcttgccttcccgccaggtgggtcaggaaataggaacaggtggttagtcacggggctc

SEQ ID NO: 231176 - DNA, 122 bp, Homo sapiens
tctcgtaacatgccgggcctgtctgcagccacgctggcctctctgggtgggacttcctctcggagaggcagcggagacacctccatctccatcgacaccgaggcatccatcagggaaatcaa

SEQ ID NO: 231177 - DNA, 122 bp, Homo sapiens
cccgggcaacacagacagatcccagtctctacaaaaactatatttaaaaaattagctgggcgtggtggtgcgagcctgtaattccagctacttaaggtcagggaggtcgaggctgcagtgag

SEQ ID NO: 231178 - DNA, 122 bp, Homo sapiens
ccgccgttcttctgctgccaccgctgtcggcaccatgggcagtgagcagagctccgaggccgagagccgacccaacgatctgaactcctcaggtcggtgtcctaacctcccaccctcctcca

SEQ ID NO: 231179 - DNA, 122 bp, Homo sapiens
tagccctggccgtacgcctaagaatccctcctgctgcaagatggccggggccctttctcccgtcctttaaggggaattacagcagcacttctcaaatttgggtaacatgccaatcatcagga

SEQ ID NO: 231180 - DNA, 122 bp, Homo sapiens
accagggggtgatgccagacattgctcactttttccatgtagtcaatgtcagtcctgcagcgtcagctgggatgggggtaaggacatctgggaaccccctcttcctggtctccctccctctt

SEQ ID NO: 231181 - DNA, 122 bp, Homo sapiens
caaaccaatgggaggggagccgggtgagacaataccatttttaaaagacccggcagggcacgggggcggatcaagaggtcgggagttcgagaacagcctggccaatatggtgaaaccccgtc

SEQ ID NO: 231182 - DNA, 122 bp, Homo sapiens
ggtagctcacaatccaggctgaaggtccaaaaagatttccttgaagacacaatatctgctcgggaggctgaggcgcacacacacacacacacaaaacaatgtaatctctgaactgagtctaa

SEQ ID NO: 231183 - DNA, 122 bp, Homo sapiens
ttgtagaccctcttaagatcatgcttttcagatacttcaaagattccagaagatatgccccgggggtcctggaagccacaaggtaaacacaacacatccccctccttgactatcaattttac

SEQ ID NO: 231184 - DNA, 122 bp, Homo sapiens
tccgcgcttctaacccagctttttgccgaactttatactcttccaaccaattgacgtagtcggtggggctgtagtgtttcataagggaaggccacctacgaggagagaaacaccccctcagc

SEQ ID NO: 231185 - DNA, 122 bp, Homo sapiens
taagcgcccttagttaaatcatttagccgttctaagttgcagtcttccacgtcggcataacgaagataaaactatctgcttcatagggtccctgtgacgacaaaatgggtacggtgaaacgt

SEQ ID NO: 231186 - DNA, 122 bp, Homo sapiens
gccttaggagcagagcggaagtctcgcgagagtgactgctgcaggcagtggcggcgcgggcgcgcgcagagacggcctcgggcgcgcgcgcgcgcgcgcgcgctccccgcccccagccccgg

SEQ ID NO: 231187 - DNA, 122 bp, Homo sapiens
tctcgggcttctagttcactggctgtcagccttttgcgaggcctctcctgttcctctcatcgatggtagtttttgaccctcactactgtgtggccgttttgctttttatctacacataaaac

SEQ ID NO: 231188 - DNA, 122 bp, Homo sapiens
acctcattccggccacatcattctgtgtctctgcatccatttgaacacattattaagcaccgataataggtagcctgctgtggggtatacagcattgactcagatatagatcctgagctcac

SEQ ID NO: 231189 - DNA, 122 bp, Homo sapiens
tagaatcaattccttggtctcacagccatgtagacaagccctggtcatctcagcagccaccgcacaacacccctggtggaagacacgccctcctcccctctggtcacacaagagaacatctt

SEQ ID NO: 231190 - DNA, 122 bp, Homo sapiens
tcggaggtgcaccgtggagcagatcaacaagttcttcgaagccctggaggctctgctattcgaggtcacccagtgccgcccctctgctgccctgcccaggtgtcccccccaggtggtcaccg

SEQ ID NO: 231191 - DNA, 122 bp, Homo sapiens
acctgggagggcgcgtgtgactcgtctcccaggtcgtttgggctggagtaggcggaggaacgcaccgcgagcaccaacgtcccgcccctgtcttggcggtcctcaggtgttttgtggaagcc

SEQ ID NO: 231192 - DNA, 122 bp, Homo sapiens
gatggcctttatacaacgtggtctctaaactttagttccttcatatggaaaatggggtaacgaccacctttcacggctgttgtgggaactacatgagaccatgtgcagaagcttctgagcac

SEQ ID NO: 231193 - DNA, 122 bp, Homo sapiens
cgaagaaggaggaggaggaatgtagctcggggctcggcccccgtgctgggattccgagggcgggggacaggatgcgcgcgcggcgggtagcgtgccacacggcacgtcccggccgctgcagg

SEQ ID NO: 231194 - DNA, 122 bp, Homo sapiens
cggggggaggcagggaggccgacggggagggcctgggaggctgcacgcgcagcggggacccggctttgtcccgagcagtttccaggtaagagctgagaggaggggagggagggagaggagga

SEQ ID NO: 231195 - DNA, 122 bp, Homo sapiens
ttaacctttgtttccctgtaaaagttcgttttgaaaaattccagtcttgtcctaggctgccgcggtgcaaaggactatgctcactcccatggcaataatgctggcagacaactttgcagact

SEQ ID NO: 231196 - DNA, 122 bp, Homo sapiens
cagacatgctcatgtcggaattcagcgacaccctcttctccacactttcttcacaccagccggtggcctggcccaatccccgggaaataggtaacccaaaccagggccttgggctttgaaca

SEQ ID NO: 231197 - DNA, 122 bp, Homo sapiens
acgccggaaagtactactggaaaagcttccccaggctccgcgaagaaaagttccgaagcccggaagaacgcaagccagacgtggaggcggtgctacgagcttgcctccgcccccttcaggct

SEQ ID NO: 231198 - DNA, 122 bp, Homo sapiens
gtcctgccctagtccagttgtgctgctataacagaatgcctgagactagatgatttataacgagcagaaatgtattccttcacatttctggaagctggaaaatgcaagatcaaggtgctggc

SEQ ID NO: 231199 - DNA, 122 bp, Homo sapiens
ccggcggcagagcacaggtaacgccgggcccaaacggagttgggctccgcctggaggaggcggcagagcccgggccgcccggctccccgcaacctgccccgcgccgcgggccccgggaggcg

SEQ ID NO: 231200 - DNA, 122 bp, Homo sapiens
ctgtcgacggcgtctgttgggggtcaaaattgctgagaatgcgttaggcactgcaggctacgtacttgggagcacagtctctcccttagtttagggcggagctatcagtcctgagatgcgct

SEQ ID NO: 231201 - DNA, 122 bp, Homo sapiens
tcctgcgaaatacatgatgatgagctcgtgacgtagatgaagctggcaagacggcctcagcgctggtcttggaggactgtgctctgatgccaggaagcgattccgtcatgcttatctggaag

SEQ ID NO: 231202 - DNA, 122 bp, Homo sapiens
gactgcaggcccaccgggcccactgggagctgaaggacatggcgcacacagcagaagctccgggaggcacatgccggacgtggggagggcccagttcccatcactgttgggtgtgacagaga

SEQ ID NO: 231203 - DNA, 122 bp, Homo sapiens
ggatggatgatgaaggaaatgagggccaggccagcctctggttacagtttaggaaaaacacgaggcgcccttctctagttcaaaaggcagagagaggcagacccaggagctaggggggccgg

SEQ ID NO: 231204 - DNA, 122 bp, Homo sapiens
tccccagctgccaggggaaatcacaaggcaaaccggctcaaacacggaagcccagcgtggcgggaagtgccgcccctgctgggggagggggatgcaggctgggggagggggacacgggactc

SEQ ID NO: 231205 - DNA, 122 bp, Homo sapiens
cccctcccctcgtcagatgaccacccctgctttcacccactgccgtgaccagctgcccatcgctggactttcctgctccacaggctaatcactgagctgctcccacgctggatggggcggag

SEQ ID NO: 231206 - DNA, 122 bp, Homo sapiens
tggaaggtggatttcccctatcaggacaagctggtcggatacatcaccaactacagcaggcgcttctggcagggcagcacggaccaccgcggggtccccggcaaggtgaggcgccggtcagc

SEQ ID NO: 231207 - DNA, 122 bp, Homo sapiens
aattttcaacgcgtggtcctggacaaactgctatgttcaataaaagtgacaaggaagggacggccccaggtcctgcgtggcgacgaggaaaaatggaaattgtctccttattgttcatctct

SEQ ID NO: 231208 - DNA, 122 bp, Homo sapiens
tttaaggttttgaggaactttacttttgcagtttcctggagaactgagaaaattctttaccggctggatgtgggttggcctaagcacccagaatattttaccggaacaacattttgtgttgc

SEQ ID NO: 231209 - DNA, 122 bp, Homo sapiens
gctgagaggagtagaaggtaacaagattttggcaaagcataaaaaccatgaagaatcaagcgaaaagaagaaattcccaagatatgtagtttaaaatgtctataaagagataggtaagtgag

SEQ ID NO: 231210 - DNA, 122 bp, Homo sapiens
atggcctctgtgggtggccttcatggacaacgtggtctgcccactgagcaactccagaggcggagcaccccaggacagcgggtcctgatccaaacgcaccagtggtagaaaggcccgtggtt

SEQ ID NO: 231211 - DNA, 122 bp, Homo sapiens
agtaatgaagggagcctcagtgcatgcaataaacactcactaactgacatttctctacttcgctgcctaggtaaaatcactgaagaggaagaacaggaggtattagaaatgctttacatatt

SEQ ID NO: 231212 - DNA, 122 bp, Homo sapiens
cgtgggcccgaggggcagacagacaggagtgcttcctaagaattacatcacgctgcgcaacgctgcggctctcggactccctggtgcaaaggggggtggggtaggggctgtgtgtgtgtgtg

SEQ ID NO: 231213 - DNA, 122 bp, Homo sapiens
acctcaggtggtccgcccgcctcggcctccaaaagtgctggaattacaggtgtgagccaccgttctaggacatgtatttttgatagatacatacacctgccaggcaggattcacagtggttt

SEQ ID NO: 231214 - DNA, 122 bp, Homo sapiens
gaagttggccaccccatcccaaccttttattatgcggatgagttctgtacctggtcggcacgatgttgcctgcttttttactgcacctgtggcggaagaaaaaaataataataagaagaaga

SEQ ID NO: 231215 - DNA, 122 bp, Homo sapiens
agttcgttcagctgctccatcctggacgcggggatcgcaaactgtagacagaaaagacagcggaaccgggggtaacacagaaagcttagaaaagggaaaaaggcgcgagcctgcgcacctcg

SEQ ID NO: 231216 - DNA, 122 bp, Homo sapiens
cttcatatgttcacagttctctcccccagcacctgggatttgaacaggagactcccatttcgcagataactcccagtggcattgatggaaattacctgcataactaacccccctgctcaagc

SEQ ID NO: 231217 - DNA, 122 bp, Homo sapiens
gcgcctgcgcggtagcatcgcggagtcggtgctttagtacgccgctggcacctttactctcgccggccgcgcgaacccgtttgagctcggtatcctagtgcacacgccttgcaagcgacggc

SEQ ID NO: 231218 - DNA, 122 bp, Homo sapiens
gaagctgcagaccttcgcggtgagtgttacagcttttaaggcggggcgtctggagttgttcgttccttcccgtggtctctctggcttcaggagtgaagctacagaccttcacagagagtgtt

SEQ ID NO: 231219 - DNA, 122 bp, Homo sapiens
ggatatggcagggaaggggagtttccctctattcccttccccccagtaatcttcatcatgcggtgtccccagtcctgtgtaagacctttgcaaacacagcttcaagcccctctgttcatctt

SEQ ID NO: 231220 - DNA, 122 bp, Homo sapiens
attacaatgagaagtagaagtctcctcatttgacacctctccacccctactaatcctattcgcctagaagaaataactgtttcatttgtgttttatcttttggtggttacctccacatctca

SEQ ID NO: 231221 - DNA, 122 bp, Homo sapiens
tcgttgtcacaacaccatttgatatacttgtttttgagacagtctttttgcaaaatgtctcggtatttttgtcttgcataacattgttttagaatgcaattgggagctaattcctaatattt

SEQ ID NO: 231222 - DNA, 122 bp, Homo sapiens
taggaagtgggttctagtcctgggaggggctgccctccgcacttgccactccttccccctcgaggtgctctaaaccctgcttcctgtccctgcgccccacaaggaggctgtgcctaacggtc

SEQ ID NO: 231223 - DNA, 122 bp, Homo sapiens
agactaaatgaaatataaaatattcacgataagaggaaacaaaggatgctgcctccaggacggctactgtgcctgaggctgggctccttctcagtcatcccagggcctctccgtctggcccc

SEQ ID NO: 231224 - DNA, 122 bp, Homo sapiens
tcatttccctaaaatttagtgagccaggacttgaacaggtttgttagaaaaacactaatgcggtaactctattattgcctctaactttagggcgatgtggtagtcagaaaggaggggtggct

SEQ ID NO: 231225 - DNA, 122 bp, Homo sapiens
ctgtgtcagcgcctctgctggaaagcgacacaccttacgctacagcacattaaacagaagcgtgtgctcaggccccggccgagagagttcgtcatcagagtctcgggccccagcttcatccc

SEQ ID NO: 231226 - DNA, 122 bp, Homo sapiens
gccgcacgtcttcaggtcctcctgttcctgggaggcgggcgcggcaggactgggaggtggcggcagcgggcgaggactcgccgaggacggggctccggcccgggataaccaactctccttct

SEQ ID NO: 231227 - DNA, 122 bp, Homo sapiens
attatttttaaaaaaataaagttcgattatttcacctggcttgtcagtcacctatgcaggcgtctgagcccccgggtttccaggagccccccgtataaggaccccagggactcctctcccca

SEQ ID NO: 231228 - DNA, 122 bp, Homo sapiens
agggtaataatacctaagtgacaggttgtttcatggaattacaggcatgttaacacctaacgcaaagttaagtactcaataaaggctatatatcaggagggcttacccttaagacatgagcc

SEQ ID NO: 231229 - DNA, 122 bp, Homo sapiens
gggcgcatattacagggaggccaggcctcgtcttggtctgggaccatttccctgaggaaacgccatccgagatgagcctcttgcgaccacccccgacctaatctaccggtcggcgccctcgg

SEQ ID NO: 231230 - DNA, 122 bp, Homo sapiens
aagtggtgccttcagggcaaatgcacgcactacgtaatacaaagaggtctggtcagtttacgactctgaactgagaggcagattcaaattgaaacctctggtataatgggcctgaggccatt

SEQ ID NO: 231231 - DNA, 122 bp, Homo sapiens
ctcggagctgcagcctgcagcctcgactcgggctggctggctggctgagtgcggccggggcgctgcccggcagtgcggtgtccacgggactgacaggcaggcaggccgcgggctgggatccg

SEQ ID NO: 231232 - DNA, 122 bp, Homo sapiens
gcgtcccgacccgcagctccgcctgctcgccgcggcctccgtggagtccggggtcgcgcgcgctccaactctgaaatcttcgcgccacgcctcccacaagccccgtcccaccctcagccccg

SEQ ID NO: 231233 - DNA, 122 bp, Homo sapiens
ccccattggtccaagagccaaaggacggggtctgccccaagctgtgcctgcttccggagccgcaataagaacggtcaattgagatgcggctttcaggcatttgtttaggacatgcccatggc

SEQ ID NO: 231234 - DNA, 122 bp, Homo sapiens
catgctccactggggagttctgtgcagtctatttttaatgctatttaatgaaggagcgagcgcctcactcagcaataaaagaagcatgagggaagacagagcagtgcatggttatggatact

SEQ ID NO: 231235 - DNA, 122 bp, Homo sapiens
ccaacgcacacctcagccaggtgaccccgcctagggcagggtgggggtcttccctcagggcggccttgtccccagccctcccctggccatgctcctgagcccctgcaccaccacgtccaccc

SEQ ID NO: 231236 - DNA, 122 bp, Homo sapiens
tcaacaactgtccccacatttcctccctttacgatgtgcactcgctctttcttttctgaccgaccagaccgtctcctattacgggagttttcagatgctgcttagctaggagagttccttat

SEQ ID NO: 231237 - DNA, 122 bp, Homo sapiens
cggccgcccctgtggtgtgaggcgcgtgttcgggctcttgccgtccccgcacccgcaccgcggttactggcttgcggtccgccgttcgacaaccagcccttgggtccccgcccgccacggac

SEQ ID NO: 231238 - DNA, 122 bp, Homo sapiens
cccagcgttgctatttcctggctaaacgaccttgggctacaaacaaaaggctccaggcttcggtatcatcccgtggagagtgacggtgcctgcttcgcgcagtctgtctgagaatcaagtga

SEQ ID NO: 231239 - DNA, 122 bp, Homo sapiens
tttttctttttttgtaagaggataaaactaattcagggcacagcagtcttccaacattcacggaacacccaccaggcatcatgacttcctgctgagagagttataaatggcaatagggtgtc

SEQ ID NO: 231240 - DNA, 122 bp, Homo sapiens
tcatcctgtgctgcctctataagtttgtgattcacatgaggaaataatgtgactcaagttcgtattagtcagcatttattgatctgttgatacttaaagtacttcttgtaagaagtagaaaa

SEQ ID NO: 231241 - DNA, 122 bp, Homo sapiens
cctggccccgcggtccacgtgggccggccttctccccgccccgcacccctgctcaggcggcgcgcccccactgccggcctccaggcgcctctcccgagcgcctcgctgtggccaccactccg

SEQ ID NO: 231242 - DNA, 122 bp, Homo sapiens
aaccatgaagaagtaagtttgttttggacacattggctttgagagtccagggtagatgtacgaggctgaaactcaggcaataaaaattgaggggagaatacacagcatttaaaaaggtacag

SEQ ID NO: 231243 - DNA, 122 bp, Homo sapiens
tgccgttgagatgttactccaaaaagaaaagaaaggagaaaaggaagttacttcagaccacgtgatccattccgtgctggccccacagctccgcccctgtccacttccaaattagcccgcgt

SEQ ID NO: 231244 - DNA, 122 bp, Homo sapiens
tgcattcccccaaaaacgcagatgcccacctgctctctttagggaagccggagaggccgccgggaacaggcagtgacggcggtgatccagtggatcctccccagggcgtggctgacacaaac

SEQ ID NO: 231245 - DNA, 122 bp, Homo sapiens
tgtgcagcttgtgagatctgctctagaaaccgtggccgcggactggcgcggcctcctgggcgaagcacaaacaggaggctttgttccctgaatgtgagaatgagggagccgagctgggcgca

SEQ ID NO: 231246 - DNA, 122 bp, Homo sapiens
taggggcatttgggacggcagaggcctcaccctgaaagtggtggtttccacagctggacacgtccacaggacctcagaggggagggtcagagctgagagctgagatccaagccgcggtgtgg

SEQ ID NO: 231247 - DNA, 122 bp, Homo sapiens
ataatcagttttcagatatgatttatgtgatctgaagtgcagctgcaacatctttcagcacgagtgtagaaatggaaataggattaagtcagactctttaaaacattaaaagctgtgataag

SEQ ID NO: 231248 - DNA, 122 bp, Homo sapiens
gtcactttcatgctgtattccccaggcagctctggcaatgagacctgctgcagtaacaggcggttgttgttgtccacttggaatttgctggaaaatgtccctgaagactggatagtcacctg

SEQ ID NO: 231249 - DNA, 122 bp, Homo sapiens
tgcagctcgggcttccctttctttgcctcgccgcgagtcgggcgcgaccccgaggcggctcggccactcaccatattacagatggaggcgatgtttcggacagtcattagtctaaaggttgc

SEQ ID NO: 231250 - DNA, 122 bp, Homo sapiens
tgtacttcagaacaatttcaagcttcctgactaaagaggtcacgcagcccggggacggggcggatcctgcaacaggagcagctgtcctcggaccccagtgccagggctgcaattgcagcagc

SEQ ID NO: 231251 - DNA, 122 bp, Homo sapiens
cccagttgctgtctgcatcccctcctgtcctccctctccctaagtccttccctgcaggcacgcaccatctggggcaggtggtctgcttttgtgtctctgtgtctgtgtttacagtgtttctt

SEQ ID NO: 231252 - DNA, 122 bp, Homo sapiens
ggctgcacgggaaggcagagctttgatgaggtcctgcttgtgacgggggtgtgtcagaaccgttttctctgtagtgtgctgcaccctcctgctccgtgtacacaagagcggcgtggtaattg

SEQ ID NO: 231253 - DNA, 122 bp, Homo sapiens
tggggtggtgctggcagttgtagttcttcctcgatgctcccatcctgggtctggagaggtcgagcaggcttgcaggtgggatggcgttccctctggcctcagcccagcctggtcacaggccc

SEQ ID NO: 231254 - DNA, 122 bp, Homo sapiens
acccataagcacttacccttggtagtggttttcattccagcaggaatgagccacaggggccggcctgtgtggccgatgatctaagccctttcctgggatacctaaactcctctttaccatgg

SEQ ID NO: 231255 - DNA, 122 bp, Homo sapiens
cccagctccaggtatcatgagacgttcccacccatggctgcaactccttggaacagggcgcgtctctaaatctgaaccaaccagacttcctctggggttatccatgtaggaaagcagaggca

SEQ ID NO: 231256 - DNA, 122 bp, Homo sapiens
cctgttcttcctcctcttcccctcggcgggccgcgccggcgccccgacccccacccttgccgcctcccggcctcccggagccccgcactcaccacgagtaggtctgctccgccatggcgctg

SEQ ID NO: 231257 - DNA, 122 bp, Homo sapiens
tgtctttttcttctaccaagattcctcacccctaggagacgttggttaatataggcatttcggtttggttaatctgatcatgagtgcccgtgagcatggcatgaggcatgattgaagcagtt

SEQ ID NO: 231258 - DNA, 122 bp, Homo sapiens
gcctcccgcccgccctcctcggcgtgttttcatttctaagtctacgggcagggattgccccgacccagtgtgtgtgtgcgtgtgtgtgtgtgcgtggtttcatttacattttaaaaatcatt

SEQ ID NO: 231259 - DNA, 122 bp, Homo sapiens
tcttcaagagcgcccatcgtggccagtcctgtgccgggcattcccagggagaaaggcctgcgtcccagcctcctccggtgccccatttggccgaggaggctgacttgtttctgccactgatt

SEQ ID NO: 231260 - DNA, 122 bp, Homo sapiens
cgctgcgctgcagtcttctctaccttcccaagccgcctccaaccccaccttggagtctcccgagtcctcttcagtagcacacccaagggctccccgaaatctccaggcgcccccaccccttc

SEQ ID NO: 231261 - DNA, 122 bp, Homo sapiens
aaaacagctggacacgttgctgggagcccagacagaacgtgaccagtagttctcagaaaccgcttctaaataccagctccaacaggcttgtagcgtccgagtgcggataaggcaagagcaaa

SEQ ID NO: 231262 - DNA, 122 bp, Homo sapiens
aggtggccaacctcaatggcacatcccggaaggtgctcttctggcaggaccttgaccagccgagggccatcgccttggaccccgctcacgggtaaaccctgctgcgactccacctgggtcca

SEQ ID NO: 231263 - DNA, 122 bp, Homo sapiens
gcctttgtctgtctcagcccttgtttgctgaccagcagccgctgctcggggtgtggcacacgaatcccgagacggtctcaggctgttctttgagactcatgtgaatgcttttcccgcaacag

SEQ ID NO: 231264 - DNA, 122 bp, Homo sapiens
tcgggctggggcgacgtggccagcccagtcctgccgaggggtggggctggccctggggctcgctggccccgcgccgccgcggagagagcgcgcccgggccaccccggctggaaggcatcccc

SEQ ID NO: 231265 - DNA, 122 bp, Homo sapiens
tctaataaggaaattacgccgggcctcactgttaatagtacagtatttatcagcagctgccgcggttaagaggaagccacggccccctgtagtctgtacctcctaagatggatgatttagct

SEQ ID NO: 231266 - DNA, 122 bp, Homo sapiens
ttgttaatttattaacactatattaatgcagtaatttgtgagttttactacctggaagatcgtgtccatgaggaattgatgagctgtatgaatggtagactctcggcttctttctggtttct

SEQ ID NO: 231267 - DNA, 122 bp, Homo sapiens
taccgaaaaagtattcggggatctctagggagctttgggcagcccaagggaacaatagcgcgttgggaaatttacagttttacctgaatgaaaggggcccaagtagggaacaggagtgagga

SEQ ID NO: 231268 - DNA, 122 bp, Homo sapiens
acttcctgggggccctgcagcagcctcgcgccccgcgttccgggcggctccaagagagagcggagcaagtgtcccgggcccttcagccagccctggatagctacttccatcccccggggact

SEQ ID NO: 231269 - DNA, 122 bp, Homo sapiens
ccccgacggcttcctgcgcgtggagcgcgtcgcggcgctcggactgcgcttcggccagggcgaggaggtaagctggcccgaccccagtcccggcccggggaccccagcccagccccgccgcc

SEQ ID NO: 231270 - DNA, 122 bp, Homo sapiens
agtggaggtggacgttggtgaacagctgcagcagtatgctgccccgctgaacctggcccacgtggaggaggccttgccaagcggccaggcggttgacttggcttacagcaactaccacgtga

SEQ ID NO: 231271 - DNA, 122 bp, Homo sapiens
ggctcagcggaagtcgcttgggggtgcgggggggtggagggtgcggtagggatggagcctcgcccagtgctttcgcctcctcagcgtgctccccgggcccggctgggttcaggtgtccctcc

SEQ ID NO: 231272 - DNA, 122 bp, Homo sapiens
ggggctggtgaggcccgggttaaatgaggtcctcgctgcctgctcaggcagagaaagtggcgcctgtggtttctgctgctcctctgtttcccacccaagtgagttgggagcgtgaggagacg

SEQ ID NO: 231273 - DNA, 122 bp, Homo sapiens
ggggcggggcgcacgtgcgtgtgtttgtgtcggagccggccgggcggacgcgcgcggggtcgttccctcaaccagcgagctccggacgctgagctaaagacgaaaattggcaggaagagcgg

SEQ ID NO: 231274 - DNA, 122 bp, Homo sapiens
aatgtattcaaataagaatgtgccaagtgttttggaagtcgcagtaattttatgaggatgcggaataggaggaacataatcaggcaggctcctaagacttgaaggaaaaacaatttggccag

SEQ ID NO: 231275 - DNA, 122 bp, Homo sapiens
tgtcagccaggctgcagtcatctcaaggctgactggagaaagatttgcttccaagccactcgtacggttgttggcaggattcacttccttgctggctgctggccacaggcctccctcattcc

SEQ ID NO: 231276 - DNA, 122 bp, Homo sapiens
cagctctgccatggcgctcccaggggtcgggacacaactgctgcacccgcgctccgaggccgccgaggaaacgaaacctagctcgagaggagcagtccctgaagccgtcaggaagtcacgtg

SEQ ID NO: 231277 - DNA, 122 bp, Homo sapiens
gggagaggaacagggccctggagcacctggtttcggggacagtagggttggtgggagttgcgatgatattgccacctacctcttacatcttttagtgcgtatgttctgtccacccagctact

SEQ ID NO: 231278 - DNA, 122 bp, Homo sapiens
ctctgcccgcgcagcacgggcacagctcgccagcactgcgaacccggatgggtcgtcgggcgcggccctcagcagagctgccttcacagatgtggtgcccaggtcaatgccgagggtgatcg

SEQ ID NO: 231279 - DNA, 122 bp, Homo sapiens
gcttgggcggcaggtgcagctcggcctcgaacggggcgctgctgctcttaggggagcctgcgggcaagggagagctatcagccagccggccggccggggagtcccagccagggctgctgccg

SEQ ID NO: 231280 - DNA, 122 bp, Homo sapiens
agacttctggggctttatgtggcctctccctccccaggtctgaggagagcctctgggtgtcgacctggcttcctggtgagtgcccagccacccagccctggcttgtaggagggggactcttg

SEQ ID NO: 231281 - DNA, 122 bp, Homo sapiens
tagagacgggcattgagctcttgggctagagcgtcgccgagtcggagccggagcctgagccgcgcgctgtgtctccgctgcgtccgccgaggcccccgagtgtcagggacaaaagcctccgc

SEQ ID NO: 231282 - DNA, 122 bp, Homo sapiens
agcacaaatttaatgaagtagaatttaccgttactattttatttgggaaagaaatgtgctcgcgactcaatagattggagtattcactcctggatctcaacttgcaatttgaaaacgcatct

SEQ ID NO: 231283 - DNA, 122 bp, Homo sapiens
ctcgtggtgccctgttttttaagcctgtcggaaaagcgccgtattcgggtgggagttacccgattttccaggtgccgtccgtcacccctttctttgactaggaaagggaactccctgacccc

SEQ ID NO: 231284 - DNA, 122 bp, Homo sapiens
atgcctgcagaatcgggagctgcctaccgcgcggctacaggacacagccacggccaccaccgaggatccagagctcttggctttcttgtcccgctataagttccacttggccctggaaaatg

SEQ ID NO: 231285 - DNA, 122 bp, Homo sapiens
atggcagccgctgcagccgtgcagacttcaggaaggagtccgggtctgcgggcaggcagccggggtcggtctgggcatctcctatctggccctgcccaccctccaggtgggactattcagcg

SEQ ID NO: 231286 - DNA, 122 bp, Homo sapiens
ggaccaggtgctggggtgccttggaggagggcggttggtggtgtctccactacgactcaccgtgccggggtggatgtggcccctgagctgccggccccgccctcgccggctgtgatgctttg

SEQ ID NO: 231287 - DNA, 122 bp, Homo sapiens
cgcacgtctttcccttgtcgccctccccagtcatgacccggacgtgaccttcagggacctcggcctgtactgggatccctgtccccgcgaacactgcgcgtttcggctttcgcgcgctcggg

SEQ ID NO: 231288 - DNA, 122 bp, Homo sapiens
aactggcacaggaagtccttgcatcctgtgtggaccaccaggtggcgtcgcacatccttccgggtgtagaagcatctttcacagtggtcgcactggtgcttcttttccttggttccgctagg

SEQ ID NO: 231289 - DNA, 122 bp, Homo sapiens
tgagctcagctgcttcctttcaggtttgggttttcttttgcccctgcctcccgctgtgtgcggtttaatttagaaccttgctataatggtggccttctccctgtgttagcaccgtgctctca

SEQ ID NO: 231290 - DNA, 122 bp, Homo sapiens
gcagccgccacgggcgcccctgcagcgcacgcccaagtgcgcgcgctgccgcaaccatggcgtcctgtcctggctcaagggccacaagcgttactgccgcttcaaggactgcacctgcgaga

SEQ ID NO: 231291 - DNA, 122 bp, Homo sapiens
aattagttgggcatagtggcctgtgcctgtagtcctagctactcgcgaggctaagaggggcgtattggttgagcctagatggagccagtgcactgcggcctgggtgacagagggagattctg

SEQ ID NO: 231292 - DNA, 122 bp, Homo sapiens
ggttctgatccatggcctgagggttggggacccctgcactatggagctgactggtgggagcggggccagactgggaggcagcggcgggggccctgggtccccatcttggctttgccaccaga

SEQ ID NO: 231293 - DNA, 122 bp, Homo sapiens
ttagtaattcaaaacgcctagctggaataaaagtcctctttaaacattacagtttgtctccgcgttgccagtgtttgtttccagtttcataggctattctggtatgtcaagagttgtgttat

SEQ ID NO: 231294 - DNA, 122 bp, Homo sapiens
agccacaacctctattccctcagaaatggaagtgcttggtgaggtttggtgtgtccgagccgaagagcagccaatgacaggcctggggatcgtctggcacagcccacttcttgacaaggcct

SEQ ID NO: 231295 - DNA, 122 bp, Homo sapiens
gaccctgagattaagagtctcatgctctaccgactgagctagccgggcactgattactggcgtcttcttatgtggaatcattttccactgacggagcggttgtatgatctaattgcatatta

SEQ ID NO: 231296 - DNA, 122 bp, Homo sapiens
tggggcaacacagtttatatcatctgacaacataaagcatgcacatcctttgtgtcaagccgcactgcttcctggaacaaactcaaggcagaatttattacctgggttcctgtttaagtgca

SEQ ID NO: 231297 - DNA, 122 bp, Homo sapiens
catttattattgccagtgtgtgggtgcgcacccaaggcagcgcgcgacacattccgctgccgatctcccccttggggtgggaagatcttacaaactgcatgtctctcccacttaaattcgta

SEQ ID NO: 231298 - DNA, 122 bp, Homo sapiens
tccgcgggcggaggaggccgagcgcgcgagccaaggctctggcgccccctggtggccgcgcgctgcctgcccgacagcccggccgccccagcccggaacgtggtcattcacatctttttttt

SEQ ID NO: 231299 - DNA, 122 bp, Homo sapiens
cctccttcctggagggatgagccaacagggctgagccccctactctctcggtggtcagcccgcccgaccaccacgcccctcctttctagggccccagctcccgggccgcggctcgtttgcat

SEQ ID NO: 231300 - DNA, 122 bp, Homo sapiens
atggaaactcggatgagtaaatatggtagaacgactttgcaaactagcaccctattcacacgtaaggggttgctcttgtcaccgagactgttagaggcaacgtgagttaacagaaatagctt

SEQ ID NO: 231301 - DNA, 122 bp, Homo sapiens
ccccgccccccgcactgggtgaggcccagctgggtgggtacgcggcctggcggccggccccgattccagggacgccgtccccgccagggtcccggatccaacccagacaccccggcggccga

SEQ ID NO: 231302 - DNA, 122 bp, Homo sapiens
aacagtggataattagcattttaagttgcttttctcccttagcgagaatgataaaatagacgttgcttgatcttctgaattcatgaatcataatctgtgttcataatttgagaatggttatg

SEQ ID NO: 231303 - DNA, 122 bp, Homo sapiens
gatgttctgcaggggcgtccctgggatagagactggacatgtagcaaagagctccgtgagcgtgagcgaggcaagccctgaacccacactgtatcacctacttatagggcagtgcataaaaa

SEQ ID NO: 231304 - DNA, 122 bp, Homo sapiens
ggggttggcttctttctttctatgattcccaacaaacacgctatgcacacactctcttaccgcccaattgccccgttgtttctgagagtgggactagatgtagaaagataatagaagtcagg

SEQ ID NO: 231305 - DNA, 122 bp, Homo sapiens
aaaaggtggtatgcacttatacctttaaggtattggggtttcacataatttttcctttgacgggggagtgttttgctgctcaacagaaaaggtctgaagtctactgtgtatgctagggttat

SEQ ID NO: 231306 - DNA, 122 bp, Homo sapiens
acaaactgtgctacatccataccgtggaatactacttcacaataaaaataaatgaactgtcgatgcactcaacaacttggatgggtccaaagggaattgtgctgagtgaacaaagactcagc

SEQ ID NO: 231307 - DNA, 122 bp, Homo sapiens
agacattagagaggggaatgatccattactgtaggtcatctaataccctcagaggccaatcgtccttgctctattatccagtgcttttcacaggttattttaaataactacagaaatgaaga

SEQ ID NO: 231308 - DNA, 122 bp, Homo sapiens
caatccagagtcgttccagtcaacttgttgggaatatgttcttttccactgaatctgaatcgtagttacttgtattgctttacatttgctcgtcccagtgtgtgagggccatggaaacacat

SEQ ID NO: 231309 - DNA, 122 bp, Homo sapiens
atgggtacagcctccctgggctctgaatgccttgtgtggggagggtgggggtgtctggagcggaagcctcagaccattcaaagcaaagcctggcttcaccatctaatcagggggcgaggagg

SEQ ID NO: 231310 - DNA, 122 bp, Homo sapiens
gacctcgccgtgcttaccgtatggggggtggccctggaaacgtcggggatttgagccctacgtccgcctttgctaaggaggaaacgcttgagtttggtagccaggagatggccaaggagttg

SEQ ID NO: 231311 - DNA, 122 bp, Homo sapiens
ctggtggaacccctgcacagagacggacacaggatgagctctaagtacccgcggtctgtccggcgctgcctgcccctctgggccctaacactggaagcagctctcattctcctcttctattt

SEQ ID NO: 231312 - DNA, 122 bp, Homo sapiens
aaccgaatccacactgtcacacccagtcccaagctccctgacgtctgcatcctcagactccgtaacacagaagtaaccagactgccatggtagacatgggagagacgaggaagctgagaaag

SEQ ID NO: 231313 - DNA, 122 bp, Homo sapiens
cagctagcagaggtttgagaaggcagcccagaccatgcaaactcattgaaaacctctgctcgggtgacatcctttaatatttcattggcaagacccagcgcagtggctcacacctgtaatcc

SEQ ID NO: 231314 - DNA, 122 bp, Homo sapiens
tcggtgtcctccgcctgtgcgccccagcctgcggggccgcccttcagggcgcgcaaggggcgagtctgtccagccggcagcaccccaggccggatggacgcttgttcctggttctgtgcccc

SEQ ID NO: 231315 - DNA, 122 bp, Homo sapiens
ctttgacgatcgcccttcgggagccctgctaaagaaccaaaccatgaacttggggctgaccggaccgtttaaccctttgcaaccaggtaatgaagcccccggggcgcggctcgcttgcctac

SEQ ID NO: 231316 - DNA, 122 bp, Homo sapiens
gcgggatgaagcgcacccagccctctctcctacccttcctcctttggtcccttcggctttcgtgtaccttatctcccgcgcgcccagctccttggccggctcacctgctaagcggagcgcgg

SEQ ID NO: 231317 - DNA, 122 bp, Homo sapiens
atcccgtacaccctgtactcggtgttcaaccccagcgaccacgacctcggtgagctccggcgtgtcgtggctgcactctgggcaggtgggccctgtgctccccaggccaggcccagacaggg

SEQ ID NO: 231318 - DNA, 122 bp, Homo sapiens
tcccacccacttccgggtctcctctgtttacgaatgtttgggcgcgaattactctaagcgcggctctcagaagggtgcaagaagaatcagtggtgagtcgtgatatccttaaccggctgggt

SEQ ID NO: 231319 - DNA, 122 bp, Homo sapiens
atttattacgtcctcaggtcccgtctacgtctgcaggactccaccactcaggattcacgccgcgcttgtaaccccgaccgcgcttgtaaccccgaccgctgtcccgaacttggggtttgttt

SEQ ID NO: 231320 - DNA, 122 bp, Homo sapiens
aggagcactccacagccttgcgggcagcactgcagctccacgtctgcctgagcatcctggcgtctgggattaaaagggctgaagagcctgcctgtttgagactcctccccgagatgccccca

SEQ ID NO: 231321 - DNA, 122 bp, Homo sapiens
accaatcctgtttttcctatgctctgggtgaatagagcctgatggtatactactgctttgcggaattgcatacaactgtgcattacaaagttaatatggtaattatggtctggggtaaaatt

SEQ ID NO: 231322 - DNA, 122 bp, Homo sapiens
gtccagtgttacccgaaccccaaaggggactgttgtgccaggtggtgggggatttgggaccgtaggaggggccaccatgggcagatgtggtgagggaggaaaggagagcagaagaggggacc

SEQ ID NO: 231323 - DNA, 122 bp, Homo sapiens
aaaaatatcaagctgctagaaaccactgaggaagataaacagaaaaactttctatttttacgactttgggataggaatatggacatagcaatgggctggaagggtgcccaggccatgcagtt

SEQ ID NO: 231324 - DNA, 122 bp, Homo sapiens
gccatttgctgtgtcttccctcatatttacttcaactgttgttaggcagttcctcccactcgcctaagacccgtcttcctaaatggagaattcctcacacccggcctcaacgggaggtgaaa

SEQ ID NO: 231325 - DNA, 122 bp, Homo sapiens
cgcacccctccacacttcccttcgggcgcggcgagttttcagcaccgcggacagcgcctccgcctcccgcctgaccctgcagtgtggcctccgcctgggacccacaagacacttgggcctga

SEQ ID NO: 231326 - DNA, 122 bp, Homo sapiens
acagaaggcaaggcacgctgcgggagaattcagagggcgtccgtgtgggagctgtctaaacggtgtgacttttggatcttctgcctttcgaaattctttccccttggctcactgaggcctga

SEQ ID NO: 231327 - DNA, 122 bp, Homo sapiens
aatttctttatatcatttttcacaatatgtaattacataaccacatgtggtggccgggtgcggtggcacacgtctgtaatcccagcactttgggagactgaggcgggcagatcacttgaggt

SEQ ID NO: 231328 - DNA, 122 bp, Homo sapiens
acccaaaccctgcagttccaagcctagaaaatcgcaagcgccaaaacggggtgggagtgacgcgcctgcagtgctgcctgtcacctggcagaagaccatccccaaacttcccaggattgggg

SEQ ID NO: 231329 - DNA, 122 bp, Homo sapiens
tgtggcgcccctgctccgcccagtcccgcggcctcctcgcccctagtccccggcgctccccgccccttcccgtgggatccgcccctccgccagccccgctggcttcccctctccgccacccc

SEQ ID NO: 231330 - DNA, 122 bp, Homo sapiens
cctcacactgcggccacatcagtgccccctcccacccaccatccaggccaccccaggagccgcccagaggccagggcagcagcaggagggtagacagctcaggtgccaatctgcctgaatca

SEQ ID NO: 231331 - DNA, 122 bp, Homo sapiens
cgcgtgtactgggggccgagggggaagaagggcccgtgtgggtgactgaggctgtgtcctcggtcttcggataacactggaggggaagaaagctggaagctttgttatcttggttgtgtgtg

SEQ ID NO: 231332 - DNA, 122 bp, Homo sapiens
cggccacctggttcctgcgtgctacggccctgtgggcctgggagctgcctctgaggaacacgccgcaggtatggggggctccggggcaggcggggcgtggactggccgagcaggctgctgtc

SEQ ID NO: 231333 - DNA, 122 bp, Homo sapiens
aggaactatccaccatcgcggggcttcggggagtgtggaaggctctcaggagcgggtcggcgtctggttggatgcgggttcgagccgcgtgtacgtactggagggagatggtcagactgggc

SEQ ID NO: 231334 - DNA, 122 bp, Homo sapiens
ggcgcactgacctgagatggtctcctggtagcccttggtgaagaactgcatggccgaggccgccctccagggcgtcttgagcagcccttgccgctgggggttctcgcccagcgagctcagga

SEQ ID NO: 231335 - DNA, 122 bp, Homo sapiens
gggtgaggagtcgcgaggaagaggcggaaggcgccggaaggtgagtgagcgagcggcccccggccctagagccttctgcacccattttgaagagcaggcagggagggacagtgggcaggcag

SEQ ID NO: 231336 - DNA, 122 bp, Homo sapiens
aaacacaaaattgttaatgtggcaactaacacaatcctaaccataaatacttgccaaagccggaatgcagaatttcaatgaacccacctagtcttttatcccactgacataatttaaatcat

SEQ ID NO: 231337 - DNA, 122 bp, Homo sapiens
attaggaacacattgcattttattacgtgtcttgcaactgctgacaacctcaagacaaaccgaggctttccttttccacatctgcaagcagctgggagcgccgctacttcggtgggagctgt

SEQ ID NO: 231338 - DNA, 122 bp, Homo sapiens
ctgggcttggcggctgacccccgggctaggagagggcccagcgccccggatctcggtggccgctgctagagcgcggcctgtgccatggccaccttcaccgcctcctcagagcatttcgagaa

SEQ ID NO: 231339 - DNA, 122 bp, Homo sapiens
acgcagggacccccagtcccccagctcacctgtggtactgagcttgcagtagctgaaattcgtctttgatgcggtcgcaggagtccgaggtggtgaatttgagttgctggggtaggtgcgag

SEQ ID NO: 231340 - DNA, 122 bp, Homo sapiens
cctccgccgcgcacgcgcagtcctcacgaacgagcgcgccaagcgcacagcgccgccttccggcagagccctcccaccagccctcaggtacccggacgtcgctcactagacccctccgcacc

SEQ ID NO: 231341 - DNA, 122 bp, Homo sapiens
agttgatgcttcttgagtcctggtctaaaataatgtctttttgtgttgcagatctcctaccgatatcttattattgctctcggaatccagctggactatgagaaggtaccgtgtgaaactgt

SEQ ID NO: 231342 - DNA, 122 bp, Homo sapiens
cctcgacccggtagtgtcggcggaggggcgtccggctgggcaggaggagtgtagacctcccggtgtccctgtgtctgggaaagaagccctggctcaactttctgctttgaagaggccctaat

SEQ ID NO: 231343 - DNA, 122 bp, Homo sapiens
cagcatcatgattgtcttccttttacaattgaggaaataggctcagaaaggctaactggccggggggatttgacctcaactcagctgtctccctaaccttcaacctaggtttagctgcctct

SEQ ID NO: 231344 - DNA, 122 bp, Homo sapiens
tgaggagcaggacagggggccggcctgggggaccctgttgccggcagacgtgcctcaggacgggcctgtgcctcctgttctcagctctggagtgaggggatgcctccggggtccaggaagcc

SEQ ID NO: 231345 - DNA, 122 bp, Homo sapiens
gccagaaagaacaggtattgctccacccgagtaaacgctgactcaactctgcagggctggcgcgctctttcctcacctcacccctcctgccaggcacaactgagatccagaaataagaggat

SEQ ID NO: 231346 - DNA, 122 bp, Homo sapiens
atgaggacagagaaatatgtcctggcaactattttttgtgttggcaaacaagtccagctccgactaactcttccttttccttgcctgaaagccttttcaaattctagacaaactacttctct

SEQ ID NO: 231347 - DNA, 122 bp, Homo sapiens
gtggaaatcagtgctcggctccctgaggggcgatgccttaaatattccaccactgggcagcgtgcacccccttcccatgtgagcgccagctgaaacggaagtgagggcggcaggcgtttgtt

SEQ ID NO: 231348 - DNA, 122 bp, Homo sapiens
gaaacgggaggaaggggccccaggtggtggggagccattccggggggtgcccttgccccccggatcggggctgggctccccattgggcaggcggggcgggggcccggttgggggctgtgggg

SEQ ID NO: 231349 - DNA, 122 bp, Homo sapiens
tgtgctccctgggaagaaggttctccacatgctgagtagagtgtggttgctccattgggtcgatgccagctgcctttttgttcctccccacctctggcttatctgctaacgcccgttggaga

SEQ ID NO: 231350 - DNA, 122 bp, Homo sapiens
ggggaagcagacaataatcaatgtagcaaatacatcatactacgtgagtgatacgcaccacgggaaaagagagcagagtgaagggggatgggagcaggggccggtggggtgcaggctggctt

SEQ ID NO: 231351 - DNA, 122 bp, Homo sapiens
attaattaattaattaatttatttatttatttatttatttatttatttatttattttaaccgacagaaagcaagctgccctgagagtttggcaactctaggctagcgtgcttcaaccgacaa

SEQ ID NO: 231352 - DNA, 122 bp, Homo sapiens
ggcggcagaagggaaggccccggccgccctgctccgctccgctacagctgcaggcctctgcggtgacgggtgggggcaaaaaccctgcagaaaagtcaccgtcacacgcagagtccaaaact

SEQ ID NO: 231353 - DNA, 122 bp, Homo sapiens
ttcgccgctgcagaagctggatggagagacctccccgcggggctggcgtaaccctggtgccgccgccgcgaaactccgcctgcagagtcgccgccgccgccgccgccggaggagcgagccga

SEQ ID NO: 231354 - DNA, 122 bp, Homo sapiens
tcccttttctgctcttccacccgcctcccacccaccttcccagatacccgcgtcatcccccgaggcttctgaggactctgggctgtccccaaacctcaaacaaaatgtcactttaaaaactg

SEQ ID NO: 231355 - DNA, 122 bp, Homo sapiens
ccagagccagcagcaagaacccgaggcattaataaacttgagatgtagcttcgcttaactcgtgcagagggtttccgtgtcacttatgtagaaactagggcctaatttcaactccctcaact

SEQ ID NO: 231356 - DNA, 122 bp, Homo sapiens
ggcgaggtgaaaaatcaccttgggggcccaggttccccacgaacagctaattctcaggtacggaatgggctctggagggccgcgaggtgagcgtgcactgtcaggaaggtgcagcacgagtc

SEQ ID NO: 231357 - DNA, 122 bp, Homo sapiens
gaagctgggaccccaagagagtacttaacttgtctgaggtgactcagccctggagctgggcggggacacagccatgtgtctctctgaaggttgctgccagggaggcatctaaaagtgcattg

SEQ ID NO: 231358 - DNA, 122 bp, Homo sapiens
atgggataaactgagccactgccagtggcaggatcccaggaacactctactctggcctcacgtcccgcatccgtccattgcatctgggcacatattccgtgggccccttgcctgcgagagtg

SEQ ID NO: 231359 - DNA, 122 bp, Homo sapiens
ctttaccagtgattaaatgcaaatgcgacagtccgtgagaccgaagcccctggtagaagccgggaccctcctgcctctggctgccgctctccgaggggcggggctgaggcggggcttggggc

SEQ ID NO: 231360 - DNA, 122 bp, Homo sapiens
gctagccgtagatttcacatcatcacagcgacacctagtggccaagtgtgaaagtccatccggccccccctcctccatagaggctctggaagccaggggaggaggagtttatggattccaga

SEQ ID NO: 231361 - DNA, 122 bp, Homo sapiens
gaaatagaaacaggtttttcaagcagaaaacctactttgtactggctatgtagcctcagacgttctctccacttctgagtttctccccatgaaaaatgggggtgatgctggtgaaccccact

SEQ ID NO: 231362 - DNA, 122 bp, Homo sapiens
tagtttgggacctgatctcgcgttgtttgataagcaggggaatgaggtgaaagcgaagcacgaaacatcgcgagaggctactggactctcgcgacgatttctgggattgcccctcccccctt

SEQ ID NO: 231363 - DNA, 122 bp, Homo sapiens
ttcaattaagaagccaaaacctgtaagaccatggagctccacacaggactgaggcggcggcgattttgttcaatgacacggagctcgctggaatccacgcccctgagtttgatcgtggtcac

SEQ ID NO: 231364 - DNA, 122 bp, Homo sapiens
ggtgttcttcgggacggagtacgtggtccgcctctggtccgccggctgccgcagcaagtacgtgggcctctgggggcggctgcgctttgcccggaagcccatttccatcatcggtgagtcat

SEQ ID NO: 231365 - DNA, 122 bp, Homo sapiens
attcaagcaatgagtctaggctggggattctggcctccagatcttggggctgggggtggtcgagcagagggcctcaagctgtattggggtcacctcgcctctttgggagggtcggaggaaga

SEQ ID NO: 231366 - DNA, 122 bp, Homo sapiens
ttacagctggttccttcctgtggttgatcccgccctggccaacaggctggggcctggctgcgcatgtctaatggagccctgcactccagtgtcatgctcgtaggctacacgcagcccacact

SEQ ID NO: 231367 - DNA, 122 bp, Homo sapiens
caagaaccggctcaaggccctgcgcgggggcgcggcgggggcgctggagctgctgtccagcgagagcggcagtctgcacaacagccccaccgacagctacctgggcagcagccgcaacagcc

SEQ ID NO: 231368 - DNA, 122 bp, Homo sapiens
gcagaggctgcggcaggtcccagccaggtgccctggaacgtggctcctccttccctgaggcgctcccctgggcacgaggatgggtctcgaagcaggaggaagccgccttccctcacccgctg

SEQ ID NO: 231369 - DNA, 122 bp, Homo sapiens
gacctagacagaagtgcagataaggtctgacttatcccagcatttaactccgtgtgtcgccgccatccggtctgggaggtgaggagcatctctgcccggctgcccgtcgtctgggatgtggg

SEQ ID NO: 231370 - DNA, 122 bp, Homo sapiens
cacgtgcagatgtgtcacatgttcattttcggctcaaggcgtacacgtgcaggtgtgttacgtgttcattttcggctcaaggcttacacgtgcaggtgtgccacatgttcattttcggttca

SEQ ID NO: 231371 - DNA, 122 bp, Homo sapiens
caggccggctttggcgttgtggggccccaaagcggccaggggtcgcgaggcgccctccggcgagaggagctgaccccagggttgctcttgggggccgtgcctgccaagtatcgcgggacttg

SEQ ID NO: 231372 - DNA, 122 bp, Homo sapiens
gggtgcacgctgatggatttactcaccgggtgcttggagctccagcagctggctggagcccgcgatgacgtcacggactcgggtcacatggccaagtccgccccgccccctccccgtccccg

SEQ ID NO: 231373 - DNA, 122 bp, Homo sapiens
taaaatccacttttctgtgaaggttttggagcccctagagatttttccacaggggaatgacgactgctgttgtgacttagaaggcgaagcagattatattttccaaaaatgaccataacaag

SEQ ID NO: 231374 - DNA, 122 bp, Homo sapiens
ccgcgtggatccggaggtggcacagacaatgattaacttcttctttatttattctttagccgggcagcctccggagccagagttcactcagagactccctcatggcagaagctgataagtgc

SEQ ID NO: 231375 - DNA, 122 bp, Homo sapiens
ttactacactttacatcgaaatttgagatgacctccacattaggctttcttgttcctttccggtttataatgagaacatgtccacactaacacactgttcccagaataagaatgagtaactc

SEQ ID NO: 231376 - DNA, 122 bp, Homo sapiens
ccgaggtcggagctgtgtgtgctgtgaggggtacccagagcaggccccagcctggagatacgctgggcagtggcctcccatgcgcgcacagcctgaggattagaactggtgaaactgggttc

SEQ ID NO: 231377 - DNA, 122 bp, Homo sapiens
cgtccacactcggacatgaaaaccaccacccaccgagcaccaacactcaccgtccacactcggagatgaaaaccaccacctattgagtgccaacaatcaccgtccacactcgtagatgaaaa

SEQ ID NO: 231378 - DNA, 122 bp, Homo sapiens
taagaaataatcaggaaagctcagtttggataccaagtcagctgataacgtcctattgaacgtattgtccatttttctccccaaacatctccagttttatcatgaagagttcaaactgcact

SEQ ID NO: 231379 - DNA, 122 bp, Homo sapiens
taatgttaacctaatgaaatgtcattctccagaatgcatccagaaattttgctagaaaaacgtagtagctactttcagaaatgaacataatttaaatgctattccttcaatgggacaaatgc

SEQ ID NO: 231380 - DNA, 122 bp, Homo sapiens
caaacaaacacatcaacagacagtttacagttccatgtgataggcacggtgggctggggccggatcaggggagtctgtggaagcccatgcaggggcacctggggctgaaagcctgggaaggc

SEQ ID NO: 231381 - DNA, 122 bp, Homo sapiens
gaaagaataagggatgctggccatactccagtcactcgccttgtttctttcacctagcggcgtttcagatctaaagtactaagagatcttaaaggcaggttcagaaactagaagtcttagta

SEQ ID NO: 231382 - DNA, 122 bp, Homo sapiens
gtaaactcaacagattttttcccctgtgaatctaacatttctagatctttgcattcctcccgtgagaagtccacctctgaatcctttcgagagctcagattcctaggaactcagatttttga

SEQ ID NO: 231383 - DNA, 122 bp, Homo sapiens
ccagaggcctggttctctcccattatagggcaaacaagccctggcaagatatttcactcccgccccatgccatgcattaaaaatccaaaattgcctatattccacctgccaagcaagagatg

SEQ ID NO: 231384 - DNA, 122 bp, Homo sapiens
gtcgctaaagctccaggctgcccagagcctagagtcgggacgcctgcaggggcacgggagcggagaggaggattctgagggccagtcggagggggacaggggcagggcttgggataagcatt

SEQ ID NO: 231385 - DNA, 122 bp, Homo sapiens
ctaagccagacaccccttgccctgcccatttttcttctactgcttcactctggcctctatcggcacagcattccttaggtaaatggcaactgagtctacgaccacggtggcttccaaactga

SEQ ID NO: 231386 - DNA, 122 bp, Homo sapiens
gacaaggacagccgtggggcggccgcgaccactaccaccactgagcaccgcttcttccgccggagcgtcatctgtgactccaatgccactgcactggagcttcccggccttcctctttccct

SEQ ID NO: 231387 - DNA, 122 bp, Homo sapiens
gtggccaaccactgctctatgctctgcaaatgggccacacaatccatttctgtgttttaccgtctctactgttcctgctacatgtattaccctccctcacctctgccaagatcacattattt

SEQ ID NO: 231388 - DNA, 122 bp, Homo sapiens
tgaacagtgagatttttctttccagctgaatctaaatctgattttaaagaaatcactgctcgtgcttttgtgtcctccgggtttctaacttccactctccctccttcaagggcatctcccag

SEQ ID NO: 231389 - DNA, 122 bp, Homo sapiens
tgtgggagtaaaagattggccagagggatttaaagagagaacaggagaaaaaaaattggacgcacttagtatagacagctatttcaaggaattttgctgcaaaggtgagcagaggaatgggg

SEQ ID NO: 231390 - DNA, 122 bp, Homo sapiens
cttcactgtaaaaaacagaagatcagcaaagtgcagcagagcagagtgagggctgcagcccgggtgcgcggtgggcggcggcctgcgggtgtggtgggcgtcccgggtgcgcggtgggcggc

SEQ ID NO: 231391 - DNA, 122 bp, Homo sapiens
caacagtgtatagtaaggtcaaggatgaaatttctcagaaactcgctccccacagcaccacgcacaagaagacccacccattccagccaaccccgtgtgtccaagtcccattcgcccacata

SEQ ID NO: 231392 - DNA, 122 bp, Homo sapiens
gctcaggccacgcccagcgccagcataattaccgggagaataattacgagcccagagagccgccgaccccgcccattgccgaccattctcaggcctggggcggtggcgccctctcctcctca

SEQ ID NO: 231393 - DNA, 122 bp, Homo sapiens
gctcttcccggcgcggagggatccggaggcgagccgagcgcggtggtgaggccgcctcagcgaaaaaaatgtccgcctgaagagacccacaagttctattcggggggaccgacagcccgccc

SEQ ID NO: 231394 - DNA, 122 bp, Homo sapiens
aggtcctcggcccgcgcgcgccgctcgggagcccgcgaggctgcggtgtgctccagcgggcgcatttcccaggccccgccacatcgtgtgtgttagtggctgggaaggacacgaggacagag

SEQ ID NO: 231395 - DNA, 122 bp, Homo sapiens
tgagaccggatccggaagcaagggcaccgcctcccgcgccgcccccgcagcacctgttcgcggcgcctctagcaccaacccaccgcagaagcccttaacattctctagcttgggccaaaaac

SEQ ID NO: 231396 - DNA, 122 bp, Homo sapiens
atgagcatcagctcagctcagctcagctcagcatcagctcagctgtcctgaggcagccggcggctgtgaaggagctccaggctgcccccatccccacgcccttctcggctcagggcgtgcat

SEQ ID NO: 231397 - DNA, 122 bp, Homo sapiens
cacagtaggagtttctccctaccctgtcagggctgctcgcgacagccgtctgggaaagaccgtgagcctcacagcatggcccagggaagagtccctgagtgtgcctggaccaagatgggtca

SEQ ID NO: 231398 - DNA, 122 bp, Homo sapiens
aatgtcccctgtggcccagggccacaagtgtcctcctccatgcccccttgtgacctgggacgccctgactagacctcgaacagtgcccagtggagcccagcaaggagctggggagtccacac

SEQ ID NO: 231399 - DNA, 122 bp, Homo sapiens
gcagccacgcaacttttgggttaccttcccgccacgaaatggaaatgatttcctgagggccggaaagatcatttgcatcgggcctcaggtctggggctgggaaagcaggccccggccggaaa

SEQ ID NO: 231400 - DNA, 122 bp, Homo sapiens
tggggcccctttattgaaacaactcacagcacagtatttgagacagacagtgttggccggcggaaccccaggaggctgagaagtcgaggttgcggcatccctcactgccctcctgggggagg

SEQ ID NO: 231401 - DNA, 122 bp, Homo sapiens
ccatttcctgttcttggtttggaacgcttattctcacagtctggccgtatgagtaacgaacgattgcattttgaccctcgtcttgcagagtggatgaagatgaggagatcattgtgaaggcc

SEQ ID NO: 231402 - DNA, 122 bp, Homo sapiens
ctgaatgaggtgagcctctccccattttctggagtccacagctgtctttctaagctaagtcggcatttaagtggcacaacagagatgccaggttaatggctgtgaaggatgacaaatatcag

SEQ ID NO: 231403 - DNA, 122 bp, Homo sapiens
tgtgggcctgagccaagggtgattagggaaactctatggctctttagctgggagtgtgtacgtggctgtcccaggcaaagtgtgtaatcctggccttgccacgaggtccttgggaattattc

SEQ ID NO: 231404 - DNA, 122 bp, Homo sapiens
cccagcagcccccgagcagtccccggagcgctgggggactctgcagcgcgcaggtgaccacgcagagacagccccagcgcgatgaataattgaggcgcagagtggaattacctctgtgggct

SEQ ID NO: 231405 - DNA, 122 bp, Homo sapiens
catgtttattaataacacattaaaaaatagccagaggctggaaacagccttggtgtctggcgagaggagtggataagctgtagtaccttcacacatgggatgcacctcacccgcccacaaga

SEQ ID NO: 231406 - DNA, 122 bp, Homo sapiens
gcctctccttggccttgggatgcggcccaaatttgaggcgtctcggccgctgcctggagccgggctggaagcacactggatcccttggggaaggcaggctgcccttagcatacagaaacccc

SEQ ID NO: 231407 - DNA, 122 bp, Homo sapiens
cccgcacgactcagcacccatcacagtggctcattccccagacccttaatgagagtgcagcggcgctgcggaagcagcaggctaacggggcaggccttgccctcgcgtggtacgacggggaa

SEQ ID NO: 231408 - DNA, 122 bp, Homo sapiens
taaaagagctctggtatgtcttttgctcaagccatggcaaatacttactgtgttctcttacggctataatttttaaaacatgcttggaaaggtccacgcacatccatacaatgccattgaca

SEQ ID NO: 231409 - DNA, 122 bp, Homo sapiens
cgcgggaggggccacctgggcactaggaaaaggggccacggttccaggcggggcggtccccgctctgctgactcggacgggcctcacttccccgccagaagaagcggcacccatccacgggg

SEQ ID NO: 231410 - DNA, 122 bp, Homo sapiens
tctaaaagtacccagagttgaactaccttccactcagcaatcccattactgggtctgtaccgaaagaaaaataagtggttcttccagaaagacacatgaatccctatgttcatcgaagtgct

SEQ ID NO: 231411 - DNA, 122 bp, Homo sapiens
cgcgcgccatcaagagggcctgtacctggagcgctttggctttgagcgtgcgagtggccacgaggcagcgggaggagctgctgcaccacgttcggcggctgcaaaggcatgcggaggagcgc

SEQ ID NO: 231412 - DNA, 122 bp, Homo sapiens
caatgagttaaaataaagtgtgctattcattcactgagcaatggggctattgcctgggcacggtggctcacgcctgtaaacccagcactttgggaggctgaggcagatggatcacaaggtca

SEQ ID NO: 231413 - DNA, 122 bp, Homo sapiens
agcaggcgggaaaaggggggggtgctttgaggtgctactcactctcgtcaggcaactggtcgagctccgccatcttgaacgagccgcgccgctttttcaaaggctgcccgccgcggtgcatt

SEQ ID NO: 231414 - DNA, 122 bp, Homo sapiens
ccgtgtctctgtctctttttgtgtctctctctgtcctttctctgtgtctctatttctctgcgtgtttgtctcttttcctccatctctatctttttctatctctctatgtctctttgtctctg

SEQ ID NO: 231415 - DNA, 122 bp, Homo sapiens
cggcagggctgtgggagggggcgtggccggctcagcacgcggagcagcttcgggtatttccggaaactgccgaaagcccccttgaagtgggcggggaaaggccggtgggcgtggctggatgg

SEQ ID NO: 231416 - DNA, 122 bp, Homo sapiens
ctattgtggttattttgatttgtgtgagggctggaatctcactgagactgagcggagtctcgctctgtcgcccaggctggagtgcagtggctcgatctcggctcactgcaggctccgcctcc

SEQ ID NO: 231417 - DNA, 122 bp, Homo sapiens
gtgtctcagagagctgggtctgcaagccccacccctggctggacctaggctggcaaatgtcgcatcaagaaggacttccaagaatccagtctaacaagttggattttatagtagagggaacc

SEQ ID NO: 231418 - DNA, 122 bp, Homo sapiens
ccagatcgaggacatgttcgagcagggtaagtgggacgtgttttccgagaacttgctggccgacgtgaagggcgcgcgggccgccctcaacgagatcgagagccgccaccgcgaactgctgc

SEQ ID NO: 231419 - DNA, 122 bp, Homo sapiens
agggaactgactacataatcaaattatccagttcaaagggcaagttgtataattcaagaccgtaaagtaaaagtcctcctgtgttgtttaatagtaagtttccattgctgactattttcgtg

SEQ ID NO: 231420 - DNA, 122 bp, Homo sapiens
gcatccaacccgcctccccacccagccactggcagtccgcccccgataatgtcccatacacgctcctggctgtgggcagtgcagcccatgggtagcgcccccaaccagcccccagccatggg

SEQ ID NO: 231421 - DNA, 122 bp, Homo sapiens
gtgtctatacccaaagcaccacccggtgattttgaacaaacaggaaacaaatcaacgtagcgtgtggttcctgcagaaggctgctgtcagactgcagtcagtaggggtggagtcctctgggg

SEQ ID NO: 231422 - DNA, 122 bp, Homo sapiens
ggccaaaactaggaggaaaccgaccaagtgggctgcggcggccgggaaagaaaccacgtgcgctgatgtcctcagaaacgcagggagatgttccacccacggaaaccatttgggttctgcta

SEQ ID NO: 231423 - DNA, 122 bp, Homo sapiens
ggtcatcatcagcagatatgctcctctggaacggctggaaagtggggactggtcccttctcggggtcctggagtggtgagagacctacctcagtgtggagcaggaggttgcccaaccatgga

SEQ ID NO: 231424 - DNA, 122 bp, Homo sapiens
gaatgtccgcttgggattctggttcttttccggttctctgcagccaggtctgttccctggcgtagcttcgcaactggaaggtgctgctcagcagactgtgagaagtgtgtgtcggtgcaggc

SEQ ID NO: 231425 - DNA, 122 bp, Homo sapiens
tcatataataatctacctatgcttcttacccttcagtactttctcgttttggaaccacagcgcgtcagtgggcgcggcctcattctcgggaaaactcggcggtgggaggagtcccctccggg

SEQ ID NO: 231426 - DNA, 122 bp, Homo sapiens
ccctccccatttagagatgtgcacctcacggtgtgcacctcagagaagttctgtctgattcggtgcggcgtgcggtacgggagcgggagggagggagcacgggcggagagagcgccagagcc

SEQ ID NO: 231427 - DNA, 122 bp, Homo sapiens
ctgttgactggcccagctgtaggccaggcacacactgccccattgtactgtgctttccgacgcagcccttgtcatagcctctaatccttgggctgcttctctcccagcccctcagagcctgt

SEQ ID NO: 231428 - DNA, 122 bp, Homo sapiens
acggcgcgggggctgaggaggtgctggcacctctgaggctagcagtgcgccagcaggtaccggtgttttgcgctctccgctaagcctccggctctcctcccagggccttcttctggtcatcc

SEQ ID NO: 231429 - DNA, 122 bp, Homo sapiens
caaaagcacgtgaggccctgattgcggtcagatagcaccctgtgttccttgctcctccaccgtgagtgtaaggacacaggtccaggcccttcccaacgctgtgctggggcaggagcccgcag

SEQ ID NO: 231430 - DNA, 122 bp, Homo sapiens
gtcccactcagcctcctcctgcctgctctgaacctcacagggcttcactgccatccacttcgccgcccaatggggcaagcttgcatgcctgcaggtcctggtagaggagtacaagtttcccg

SEQ ID NO: 231431 - DNA, 122 bp, Homo sapiens
attatggcacaatctgaccctcctaacacttctgaacaaagcaactgctcagaagcacagcgggaaccctctacacaggggtgactgcttctcccctggccccgacccagtctaaccgagaa

SEQ ID NO: 231432 - DNA, 122 bp, Homo sapiens
atcccctactgccccctggcctacatgctcccctccttcagaaagcaccccagccaaccccgccgcccaccctggggctctgagctgcctccttagcccagaagcctgaggatgcattttcc

SEQ ID NO: 231433 - DNA, 122 bp, Homo sapiens
caggtgggtgggtggtcccgctgggcttccgtggtgcatgccagggacctcagaatggagcgccccactgagccagcggctctgcttcaggcccaagagcagggagtaagagagaagcctgc

SEQ ID NO: 231434 - DNA, 122 bp, Homo sapiens
ggatggggctgatgggcagcttctccacaggacaggcatcgcagctccccaggacctggacgagcaggcactacacaagtgcaagcgtccatgaggaaccacaggttaaactcttcatttca

SEQ ID NO: 231435 - DNA, 122 bp, Homo sapiens
actcactgtatccctctcacttttcaaaacctatgttgagatccaaatctgagtagataccgaagagtataaacacaaagtctgagaagcgttgccatacatacaaaaatattgcaaaattt

SEQ ID NO: 231436 - DNA, 122 bp, Homo sapiens
cttacagcagcatattttatatgctcttttttctcaagaagtcccagctgtaagtggaaacggggtcgtggctacaatgcaggctggtcctaaagtgcttcctgccccacctttgcactcag

SEQ ID NO: 231437 - DNA, 122 bp, Homo sapiens
attcatttggaagaaacaacagaagtcagaggccgctcttggagtgggacctaagaccaacgtcatacacaatgtcgggtgattcttccagtgattcttctgacccttccaagggtcagatt

SEQ ID NO: 231438 - DNA, 122 bp, Homo sapiens
caataccggagaagcaggagccgagaccccggagcagccacaagttcatggggacgtgcacggggccgccctcctggccctgaagctgcgccggcctccctgagcgtttcgctgcggaggga

SEQ ID NO: 231439 - DNA, 122 bp, Homo sapiens
cccctttcatgggctgtaagcccagcacatgctggagtttaacacggttcctgctggatgcgcacagaagccctggagccaagcaggcgtgtgcgcgtttggggctggctgtgtgatgggtt

SEQ ID NO: 231440 - DNA, 122 bp, Homo sapiens
gctgtcattatgacttttaattgggatgggaataatcattgagacagagtcactgtctttcgggatcctctttggaccacagatacccaagtcagtcagtttcagagtattggccagtgtac

SEQ ID NO: 231441 - DNA, 122 bp, Homo sapiens
tccccgttactggcctcttgcatcgctgtggccaggaacccattggacattttttaaagtcgcatactttttattggggcaaaaaacacatcacatcaatgtactgtcctaaatgtacactg

SEQ ID NO: 231442 - DNA, 122 bp, Homo sapiens
gcatctcatgcgccagtagtggcgcccgccccgaacggtgtcgacggggcgttctctgagcggttcagggtcactggaagggaccagaggtgattggaatattcattgagcttggaaagggg

SEQ ID NO: 231443 - DNA, 122 bp, Homo sapiens
ggccgggagagagggtgcggccgggccctcgggccactggggatcagtggtgggcggggccggacgacagccccggagccgcctcccagtcagcccgccccggcggcgctcgcagcgtctcc

SEQ ID NO: 231444 - DNA, 122 bp, Homo sapiens
tcccagcaggccttgggcctcagtgcggccgcgaagcagagcgggctgtagagccttgcgcgcgcagtggggatggaacgttgctaggcttagcgggtctggctgctgggggcccgagcagc

SEQ ID NO: 231445 - DNA, 122 bp, Homo sapiens
tcgcagagcctccagccaagcggccagggctgggggtggggagaggtgtcttatagcagccggggagaggcacagggaactaaaaatacagtttacatggcaaggctcctcctctccctgca

SEQ ID NO: 231446 - DNA, 122 bp, Homo sapiens
cgtccccctaaagaaaaggctcaatcctagagagacagctctgcagccgcggccaatcaacgaggccgagcgccctttgctccgcccaggccggcctcccgccccctagtctggagcccact

SEQ ID NO: 231447 - DNA, 122 bp, Homo sapiens
tctatggaaacataaaatgacccaattttcttagctatcttgttacatatcaccacccttcgctactgattaacagcagtttcttttgaagatggaatacagctattagtatattaacgtaa

SEQ ID NO: 231448 - DNA, 122 bp, Homo sapiens
catcctctgccgagggcagggcggccggcggggacaagagccaagggaagcccaagaccccggtcagctcccaggccccggtgccggccaagaggcccatcaagccttccagatcggaaatc

SEQ ID NO: 231449 - DNA, 122 bp, Homo sapiens
ccatccaggctcccgaggtgacttccgagatgtttccacactaccttaacttaggctccgcgggcctcctgcagttgctgctgggctggttggtggcatccctacacctggctcctcccact

SEQ ID NO: 231450 - DNA, 122 bp, Homo sapiens
cgagggggcggagccgggaggaatcggtccaattctcggccgggaagtctctggccgggacggggcagggcgaacctgccagtgactggactcagcttctttgcgtaaccaatactggaagg

SEQ ID NO: 231451 - DNA, 122 bp, Homo sapiens
gaggtggaccctcacccaaaagtgcaaactgattggtggattttgagggctgggcggaaacggaaaaggctaagggccaatgggcagaaagcgccggcggcgaacccggttgtttgggaagg

SEQ ID NO: 231452 - DNA, 122 bp, Homo sapiens
tgctgctgcgggtcgtggtaatttacatcctctctgtgtacattaacttatctgcagccgcgctggctgcgctccttcagtcagcctgtctcctgcgcagcctgggagccttccccgaccca

SEQ ID NO: 231453 - DNA, 122 bp, Homo sapiens
tagtgatctgcccggctaacgctggggctttgcggacctcaggtcttaggcaggagcttgcgggcctaaaatgcattagctggtttttactgaatttacgcttagcagagacctacagaaaa

SEQ ID NO: 231454 - DNA, 122 bp, Homo sapiens
actttctcagctgctcttggttttgcaaaggaagatactgacatgttcagattaagaaatcgtaaagcttctgaactactaaggaagggaaaagaggggcccagggcccacatgtgtgccag

SEQ ID NO: 231455 - DNA, 122 bp, Homo sapiens
cacacaaccctgagccactcaacttgcctgtttggttcaggtttgaagcaattaactgcccgtttcaaacaatccacctctttaattaccctttcatgcttttaccctttaattccatgtct

SEQ ID NO: 231456 - DNA, 122 bp, Homo sapiens
cctgcccaggtcattacagggaaatcgatattaagaattttgagtcctgggagctcacttcgtaatgttttctggctaccagccccataaatgaggcagcgcgacgtaaagaaccctggact

SEQ ID NO: 231457 - DNA, 122 bp, Homo sapiens
cttttaggtggttagatgacgctgttattgatgagatcacacccaagctgatcagagatccgcccaattcttgcacctacagcaaggccttgggagaaatggtggtgcagcaggagagcaga

SEQ ID NO: 231458 - DNA, 122 bp, Homo sapiens
gatgtgctccaggtcaggctgcggggcagggtctggagtcaccaggctgggtgttttacccgagggaaacccaaccctgtgaggagccgggtgggtggaacccagtcccaccccatcacgag

SEQ ID NO: 231459 - DNA, 122 bp, Homo sapiens
agtcagcactgattcaaaccccttagcttagctctctgctgcctacatttcttagggaagcggctctggggaacacgggaggaataagcatggagggaggtaacaaagctattttgaagtgt

SEQ ID NO: 231460 - DNA, 122 bp, Homo sapiens
tcatccttgtgatagatatgcatgcaaaaccaaaatgaaatcaaatccccacagatggctcgtaagtcaaaaacactgtttaattctttcactgcatccctttgggaagcctggcccttggt

SEQ ID NO: 231461 - DNA, 122 bp, Homo sapiens
tgaggtcatgggcacccggaggcagcagcctgagaaacaccctagagacctgtgacatctcggcccacaccccacattagacctcaagatatatccaaagtctctttcccgcccatctagac

SEQ ID NO: 231462 - DNA, 122 bp, Homo sapiens
tggggcggagccctggctgcttaggtcctttccattggttctacttggtgaccacgcccacggccccgcctcctgggcggaagagccaattgggccgcgagttgtggtttaaaccaggagtg

SEQ ID NO: 231463 - DNA, 122 bp, Homo sapiens
tacgggaagcacgagacatgatgatctccagctgggaaatgtctgcccagtcttggtttccgcagtcattcataaaaagagctagattttgtgagtggagcacaaacatcattgcttgtggt

SEQ ID NO: 231464 - DNA, 122 bp, Homo sapiens
agagccaagtaagaatgaggggtctgggctcggcccaccttccctgcaaggccctgtgcccgctcccctcaaagctggtcttgcatgttgctctggcggcctctgtagcaggagttcactct

SEQ ID NO: 231465 - DNA, 122 bp, Homo sapiens
caggaaaaacgacctgcacgggacactgctttgctaacttcattgggggaacctcagatgcgcctcgcgaactcggagttgcgaagcttcgcatcgaacggagatcggcggcagcaaaatgc

SEQ ID NO: 231466 - DNA, 122 bp, Homo sapiens
tgtctgggacgcacgacctagggacacggacccagtgcacggtgtgggggaggaggttagcgagggatcctgggcccacccgtctccgggctaccccacccctaccccgccagtccccgcca

SEQ ID NO: 231467 - DNA, 122 bp, Homo sapiens
tccagccgccgccgtcggcgacctgagagcccgtccgggcctgagtgccccccacgctcacgaccaccaccgaactcgggccccgctcctgtcggcctccaggaaaataaagacagaggaga

SEQ ID NO: 231468 - DNA, 122 bp, Homo sapiens
tctcctacaacttaattgcaaaacacacataatcccaattttaaaatgagcaaaggagtccgagcgcagtggctcacgcctgtaatctcagcactttgggaggctgaagtgggtggatcact

SEQ ID NO: 231469 - DNA, 122 bp, Homo sapiens
gtggtttcttctggatgctctaagtctgggcagacaataaaacatcaccacagtgacagccgggttattactttccagcttgtgaccaaaatgagaccctagtgtggcagaattaaaattcg

SEQ ID NO: 231470 - DNA, 122 bp, Homo sapiens
ggagaggcaattttcacacaacggaagaaagttgagagtttgtaagggagaaactacaggcgcttggaagcctgctggctctcagggctcccaggctggcggcagtgtgaggaaggactgaa

SEQ ID NO: 231471 - DNA, 122 bp, Homo sapiens
aataaagcaataattggcgcagggacgggccacaaaacgagacggggcacctgctcccctcgggccaccctcccgcaccgcccaggtgcctggcttggtgcactcaggggagggttggtcct

SEQ ID NO: 231472 - DNA, 122 bp, Homo sapiens
aatttcagcttcagcagttgcttggaactttggttctggcagcagcagcaacatcattaccgctagcggcagttttgtgccgaggcacctacacacctcccgtcctctctgccagatcgcgg

SEQ ID NO: 231473 - DNA, 122 bp, Homo sapiens
agccctgcgaggcaggggcctctccgcaccgcctcctctccgcagccgcaagatccaatccgcttgccctggcaggcctttaattccagcaatgcaggcaccccttggaaagggctgacgct

SEQ ID NO: 231474 - DNA, 122 bp, Homo sapiens
gcattctgcgtaccagtcatacgggagtcacaggattgaaatactcttgtcctgctttctcggggcacatagctgggcagagggacccaagttcaaagttgcctcacggagccttcttccct

SEQ ID NO: 231475 - DNA, 122 bp, Homo sapiens
ttttaatttgtctccaataagcaatgtcttctgcccatccagcatgggaagtgggtcccacgtgaagggggcccaccacccactttgggagctgaaggcagagactcgggagccctcccggc

SEQ ID NO: 231476 - DNA, 122 bp, Homo sapiens
ctgggttcacgccattctcctgcctcagcctcccgagcagctgggactacaggcgcctgccgccacacccggctaatttttttgtagtttttttagtaaagatggggtttcaccgtgttagc

SEQ ID NO: 231477 - DNA, 122 bp, Homo sapiens
ctgtgtttcctttataaaataacaaatgccctgcaagaaatatgtattatctctatcactcgggggaattcaacgtagaatttgtccctgagctttagcaagggctgtgagagggatgcaca

SEQ ID NO: 231478 - DNA, 122 bp, Homo sapiens
ttgttttggcaagatctcgcttgccaatgccatctggttacccccactatccttcagggacgcagtagaaaaacatcaatagtttgtctatgcacattttttctttcttgcttgcttttctt

SEQ ID NO: 231479 - DNA, 122 bp, Homo sapiens
caaattctagaggtggagtgaaagtgcatttgtccctgaaagcatcctgtggtaaatcaccgctcttgcatattcagaagtcgtcagtttcataagcagaagcgtgactctgttgggcaact

SEQ ID NO: 231480 - DNA, 122 bp, Homo sapiens
ggaagaattgtatattatgacatattgaggaatttcctgggagagagcccaacccaaggacggtgaacttgattcattagcaaagctttggtccacagagttagggatcacgctgagtgtag

SEQ ID NO: 231481 - DNA, 122 bp, Homo sapiens
caggccgggtcatgctaacggaagtgcttcctttttacagtccgggtggacccaaagctccgtggcggtgctgaactttagggcagccactagccacggacttaagcggcaattgagctcct

SEQ ID NO: 231482 - DNA, 122 bp, Homo sapiens
gccatcgagagcgccccggacaagcggctcacgctctcgcagatctacgactggatggtccgttacgtgccctacttcaaggataaaggcgacagcaacagctcggccggctggaaggtggg

SEQ ID NO: 231483 - DNA, 122 bp, Homo sapiens
ccctcacgccgcccgcccgcccgctccccgcccggcccctgcgcgcgtgcgtgtcctgctcgctccatgttgccgcctctcccggtacctgctgctgctcccggggcttcgggaaatgcgag

SEQ ID NO: 231484 - DNA, 122 bp, Homo sapiens
gatacgtgggcttggttgctaagatgatgatgcctcctccccttcaccacattcagctgacgcctgagcgacagggagttgatgtacgcagagcacggatctaacaatgtcaactgtgctga

SEQ ID NO: 231485 - DNA, 122 bp, Homo sapiens
cagggtccgcgctctccacacaaggtggggcgccggttcccagctggtggcaaacgggggcgcggggccaaggggtcggggcgccccttaccaggccgtaagcggcaaccctggccgcctcc

SEQ ID NO: 231486 - DNA, 122 bp, Homo sapiens
ggtttcctatactcatccggcaggtggcagccgccagccacttccggtaagtggatccagcgcaaagagctgctctggtggtggccaggcttcacattacgggtttatggcgtttgtcttct

SEQ ID NO: 231487 - DNA, 122 bp, Homo sapiens
aggcagggcgcaggcggcggcgggcggcatggagagcctgctggagaatccggtgcgcgccgtgctctacctcaaggagctcacggccatcgtgcagaaccagcagagcctcatccacaccc

SEQ ID NO: 231488 - DNA, 122 bp, Homo sapiens
cccccacctcggccgctgacagcctcgcagggaggccccagcgatgagcaagggggctggcgggaggacgggaggccccgccggcctgagtcctggacaggtgattggcaggtgaatgagct

SEQ ID NO: 231489 - DNA, 122 bp, Homo sapiens
aacctgtactcgcatcggaacctgcagacacttgtggaggagtcggcagagcaggcacaccggtgcgacgagatgctgcttctcagagctgctgtccaacctgcactagcgtgggaacgaga

SEQ ID NO: 231490 - DNA, 122 bp, Homo sapiens
tccaacaacacagccagacttaaagaggtttgatgaaaggcgagtggctttgtttggaggcgctggtgctgggccctaggctcagtctgtggcatgcatgagaagctagtggcttatcaacg

SEQ ID NO: 231491 - DNA, 122 bp, Homo sapiens
cagaagcttaaccagatcttctgatcaatgtcccaaaggctgtaatcaacatctgaggtacgaaggtcttcttccaagctcacctgggctgggctgtctgctccccatttcaatgctaggtg

SEQ ID NO: 231492 - DNA, 122 bp, Homo sapiens
ctcgccgccgccagcccagcgccgcagctacctgcctctcaggcttcgcggtgcagaattcgcttctgaaccacccagcgcgcctgcgcaccgcggccacgccccccccagtggaagtgacg

SEQ ID NO: 231493 - DNA, 122 bp, Homo sapiens
tcgactaccagacccgcctgcccctcagctcgccccggtcggaggtgatgtatctcaaaccggcctccaacaacctgactgtccctcaggggcacgcgggctgccacaccagcttcaccgga

SEQ ID NO: 231494 - DNA, 122 bp, Homo sapiens
agtcaccttttaatgtccagtcctacagtcctacacagaatatgtctaaggactttctcacggagagtttcattcctttcacttaaagataaatagttaagtactggccgggcatggtggct

SEQ ID NO: 231495 - DNA, 122 bp, Homo sapiens
aaattatatacaggaaggcaacatagaggtaattcacctcacttcatttactttgtcagccgacattgtgaaactgtacttcaagatcatctagtttgttctttgtcccacaatgtgagaaa

SEQ ID NO: 231496 - DNA, 122 bp, Homo sapiens
caaaggtgctggtgcccggccaccctcagtcaaggcggcaagaacccctcggtgagtggacgtggccccacagggatgtagaggatgaggcagaacccagggctccccgagttccaagtcca

SEQ ID NO: 231497 - DNA, 122 bp, Homo sapiens
accgtggggtcttcttcctcatctgccatcccactagcacgccaactcacagcgtcctgccggctggctcccagctggttacactacttccgccgcctcacttccggtgacgcgcggggccg

SEQ ID NO: 231498 - DNA, 122 bp, Homo sapiens
aaaccagctgcaggcacagaaaggcaaagccacggccccactcgtgtggggtgtcagagacgccgacaagcacggtggctactgggggctggggtggggaagcctggggagatgctggccgg

SEQ ID NO: 231499 - DNA, 122 bp, Homo sapiens
tcctgccccaccctcaggcagcagccctatccagccaagaccaggtcacaccaccgtgagcgcaggcggagtcctcaatgaccagcactggcactatgtgcgggtggaccgatttggccgcg

SEQ ID NO: 231500 - DNA, 122 bp, Homo sapiens
gggaacctaagttcacttgttgcatctggcagcctcaaaccatgaaccctcactgcaaagcgaggatgaacgcgctgctgcaccttggagagctctttcggacaggtacggaggggagggcg

SEQ ID NO: 231501 - DNA, 122 bp, Homo sapiens
gatctgccactattaacactactccagacttgatgtagctgtcactagctttttggctaacgcctttccctttcaggatcccagccaggataccacactgcatttagcatcctgtgcccttt

SEQ ID NO: 231502 - DNA, 122 bp, Homo sapiens
gtagagcccagtgtgggcaaagtcctagagcccggggaagttgcccgggcggggcagcctcggctgaagcatttcctgtcagccctatctggaaggggcagagcccaggacagggctccatg

SEQ ID NO: 231503 - DNA, 122 bp, Homo sapiens
tccagagctgattcgcatgtacagtgtaattgagcacatgaattcataggtgacactgcccgagtctgtgctgtcctccctgcctggaaagtcactcacccctacctcttctatagttcaag

SEQ ID NO: 231504 - DNA, 122 bp, Homo sapiens
ccacagtcctcctgtgctaggactttccgctcctccgacctggaggatcctccttgtcctcggactccaggcttccgctttcgtctcccgctgggctgcagcccgcccccgcccgccctggg

SEQ ID NO: 231505 - DNA, 122 bp, Homo sapiens
aaacggtaatgctgtcaggcgacgcgcaggaggcgggggccgaggccgggcggcccttcgcggaccctccgagctcatagtcttcaggctgtggaatcggagctgccaccgcccgagactcc

SEQ ID NO: 231506 - DNA, 122 bp, Homo sapiens
agagagcagccctggtcattctccaccaagaccacacatgaggccccgatggcacagtgccgggatcctgtgtaattagggtctgggtgccctcgttgccctactcctctgaaagcgagcca

SEQ ID NO: 231507 - DNA, 122 bp, Homo sapiens
gtaacggagggaagtatttgtccacttacctgttgatatgctacccagacagaagacacccgagcatgagtgtgggagagcttttgatgtcatgttagcaagactcatgcaattattacatc

SEQ ID NO: 231508 - DNA, 122 bp, Homo sapiens
ctacggtgccctctgggaggcagcaccagcaggacgaatcgaggggacagtgccacgggacggtgactgtcccatgtggatgcagtgaggggacgccacaggatggtgaccgtctgtccttc

SEQ ID NO: 231509 - DNA, 122 bp, Homo sapiens
tgaaggtggatcaggaagtgaagctcaaggtagcggcaccggtccggcctttttgcccctcgctttgatcccccagcagtctgaccggcttcctactccccatggcgtctttgtctccctgg

SEQ ID NO: 231510 - DNA, 122 bp, Homo sapiens
agcatcaggattacacaaggcaacctgactaaatctccaaggtccaggtaaagaccgggacgtctcaaccattacatctgcaacttggttcaagaatgctccagctccggcttccctggggc

SEQ ID NO: 231511 - DNA, 122 bp, Homo sapiens
ccgagccccccggtggcctgggggcttgccggccggagccaggaggcgcgtggaccacagcgcgggggggtgggggaggctgacaaagttgagagcccactgtggcccctcgttcccccaag

SEQ ID NO: 231512 - DNA, 122 bp, Homo sapiens
ccagctaggaagggcagcaacagcacgtgcacgcacacacgcacacaacgcgcacacacacgcatgtgtcagtgctaatttttgggcagagcgatgtctgcctacaggagacgtctccttaa

SEQ ID NO: 231513 - DNA, 122 bp, Homo sapiens
gcgcgcgggcagagagaacccccttcccagcaccgctcggaggatccacaccccaccgggcgaacaaggcagctgcgtctctggtgcacaaggagccccccgcctcctctcgcgcccacggg

SEQ ID NO: 231514 - DNA, 122 bp, Homo sapiens
ccagggttgacctcaaacacaggaggaagggggaggctggagccagccaagcgagccagccgtccccccaccaaggcacgcaaggaggccattcatcttcactgcctctgccgaaaatatac

SEQ ID NO: 231515 - DNA, 122 bp, Homo sapiens
ccagggacgtggaagagatggggctctaaaggcgccgggacggagctggctccccagaggcgcccaccctgccagcgaaggccgccatcggaggtgggcaaaccagggacctggggtggacc

SEQ ID NO: 231516 - DNA, 122 bp, Homo sapiens
cccctccctgggcagggcaagacccctgggcctgagggaggtgggaacgagtgcaggtggcgggggtaaacatctctgcaggaggcagagcctgtgagccagtgcctccggccagcccctac

SEQ ID NO: 231517 - DNA, 122 bp, Homo sapiens
aggtgtccaatgggtcgctcctcgcctagcgtcaccactgccatgccaggtggggcccggcggccccgtgcgcccgtcaggaacaccacacgctccagccggtgccccagcgtgcggttcac

SEQ ID NO: 231518 - DNA, 122 bp, Homo sapiens
tgcccacatgtggcccaggaaacaccgtcatggcacacaggtgcccgagacagcaatcagcgttctaagtctctttctagctcaattccttccaactcatttttctcaatacttgagctgaa

SEQ ID NO: 231519 - DNA, 122 bp, Homo sapiens
agtctcgctctgtcgcccaggctggagtgcagtggcgcgatctcggctcactgcaagctccgtagttgaggcatttttaattaggggaaatgcatgcttcattatctgactcactgaaaggg

SEQ ID NO: 231520 - DNA, 122 bp, Homo sapiens
ctgccgagtagagctgctggggctcggggactcagggcacacaggcggaggagggcggggcgctgaggactttgagactcggccctggtgttgatgaacaggccagcagggccatctccttg

SEQ ID NO: 231521 - DNA, 122 bp, Homo sapiens
acaaaccagctgatcttaatttcaccttaccattaacacactccgtaatcttacaagttgcgccattgtttgttttgcttaatttttgttgttgttgtttgcttgtttctgtttttgttgtt

SEQ ID NO: 231522 - DNA, 122 bp, Homo sapiens
acactggtgttaagatgaacccctgagcagacaagcatagagaattagtttgtaaaattgcggtgggggcaagcccagaccgcgtccagggctgccaccaaggagctggggggattcccaat

SEQ ID NO: 231523 - DNA, 122 bp, Homo sapiens
gtccaaactgcatgtaaaaaaaagtttaatgtcatttagaatcagaggaaaatctgatgccgagaagtgctgcatggttattttaaaaactagaagatacagaaaagattaatgaagaaaat

SEQ ID NO: 231524 - DNA, 122 bp, Homo sapiens
acaaatgcctaaggagccccccggaaccagctgtgggtcccgcaggcactcgcaggctagcggacacctttggaggactgagagacctgtcctgcaatccaatgttcctcactctcacaaga

SEQ ID NO: 231525 - DNA, 122 bp, Homo sapiens
aagcacctttcataaatcaatggtattcctgacacatggatcaatttttggttgttaatccgaaaggaggagttttaattgcttcctgcgttgtcgtccaggcatctaggcgcttcgacctt

SEQ ID NO: 231526 - DNA, 122 bp, Homo sapiens
tcactggggatgctaaggttagtcattcacccactggggctatctaactgagctcaggtccgggtgcactgccagcagctgtttgtgtacttacagccccctgggtgcagacggacccccag

SEQ ID NO: 231527 - DNA, 122 bp, Homo sapiens
gttccttgtgctgtcatttcccttatatctggaatttgtcagcattcctgaaaacctacacgtgtatatcagtaaccaaaatgctatgccttttttgcacctttgtacagcagccaaatcat

SEQ ID NO: 231528 - DNA, 122 bp, Homo sapiens
cgcaccgcccagagcgggcccttcctgtcaattacctactgaagggcaggcggccagcatcgccatggagaccaacacccttcccaccaccactccccctttctctcagggcccctgtcccc

SEQ ID NO: 231529 - DNA, 122 bp, Homo sapiens
tagatagatagatagatagatagatagatagatagatagatagatcaatctccttgtaatcggttgaaaagtgaaagagtatttggcaaattgacttgaaattattatggcaatgaactggc

SEQ ID NO: 231530 - DNA, 122 bp, Homo sapiens
atgaagcccgtgctccagtccctctaccaccgagtgctgctctaccccccaccccagcaccgggtggaagccatcaaaataatgaaagaggtgaggaggcactggagatcgccaccaggttt

SEQ ID NO: 231531 - DNA, 122 bp, Homo sapiens
ccttcccgtcactcctcgatgtcacatcagagtgctctctcctgggtgggaacccgcgcacggaggaaacactttaccagagtaaacgagattataacttgtttgccagagaacctctcctg

SEQ ID NO: 231532 - DNA, 122 bp, Homo sapiens
aaatcccttaacctacaagccttccatgaggttgatttgagttaataactccatctgccacgggcgtggccagcctcgcattaattaaactcttggtttactgcaatgccctggtcttcatt

SEQ ID NO: 231533 - DNA, 122 bp, Homo sapiens
cgtgctacgtcactgtgcgatcgggttgtgcttagcttggggtctcctggccccttgacgcgtcaggttgctgtacccctgcatcggatgcgctgtaccctgcgctggctccgtgaacctta

SEQ ID NO: 231534 - DNA, 122 bp, Homo sapiens
tcagtcccggattctttctctgagtcaacagcaacaactaaagtcgcttctctgttacctcgtggggccttttcaggatgatggatccactttacaaaatatagtttggggttctggtgtcc

SEQ ID NO: 231535 - DNA, 122 bp, Homo sapiens
tgtggggactaatctcatttccctgtcagtgtaccctgtcagctgctgcagatgaaaatacgattagcccttccctttaattgcccacgcaataaacccatcatctcaaaaccatggtgtgg

SEQ ID NO: 231536 - DNA, 122 bp, Homo sapiens
ccgtgtggtccctagaagtagaagggtaaggaggatgcaggagatggtcctacttgtggccgcaacggggctcagaagtccgcttgttagagatggcagtgacctgtgacaatccagtctgc

SEQ ID NO: 231537 - DNA, 122 bp, Homo sapiens
ttgtgtttatagcttccagaatgctaatctacaattttccctctggtgaattcgatacatcggctttacagggttacagtgattaccaagtgtttttttttatcaaaatacccagagttttt

SEQ ID NO: 231538 - DNA, 122 bp, Homo sapiens
aggcgccgcccggcttgtaccggccgaagggccatccgggtcaggcgcacagggcagcggcgctgccggaggaccagggccggcgtgccggcgtccagcgaggatgcgcagactgcctcagg

SEQ ID NO: 231539 - DNA, 122 bp, Homo sapiens
gttatagagatcgagaagtgggttttgattttcagccttttggatctagatctctggaatcgagcagaaaattcacaaagcatttgaggaaagtgacccagtttggctattttccagcagta

SEQ ID NO: 231540 - DNA, 122 bp, Homo sapiens
ttctcctgcgtggtctggagcccccagaaaatgacagcactctattcccttccaggcagccgaggggaccctgggcccccaggaccacctcctgtcatcctgccaggaatgaaagacattaa

SEQ ID NO: 231541 - DNA, 122 bp, Homo sapiens
ttaggcccagaggttcacgcgagcgagcgcgctgtggtgagcgcgataaccggcgagccgcgaggcgattcggagaatttctgaaggctctgtaataaaaggtgacagcacaaagcccatga

SEQ ID NO: 231542 - DNA, 122 bp, Homo sapiens
gtcgtgaggacggaagtgcggaccttctcccccgtctccccacccccagatcaagggtcgcgccagctccactcacgtttctggaaaggaagggaagtgtcagattgcaccccacccactgg

SEQ ID NO: 231543 - DNA, 122 bp, Homo sapiens
agaggaccacgatgacgatgagcatgcggatcacccttttcttggccatcaggttggctgcggagctgttactccggatgcggttggccctgctgctgctgccggtggacagctgccggagc

SEQ ID NO: 231544 - DNA, 122 bp, Homo sapiens
caagcgcttcattgagaactaccggcgccacatcggctgcgtggccgtgttctacgccatcgctggggggcttttcctggagagggcctactgtgagtgactttacttaccacgagccctgt

SEQ ID NO: 231545 - DNA, 122 bp, Homo sapiens
caaacgctggaagctccgcctcccagaggagatcagcccaggagtgggagtgaagaacttcgctccatcacaaagctctgaaatacagatggcttcggaaaaccccgtgagaacaccgattc

SEQ ID NO: 231546 - DNA, 122 bp, Homo sapiens
ctcgccaaggggaggattcggggtctgtgaagccagcccaggtgcggtccagggagcaggcgctggggacttgggtgcccagccgcagggatccctcttaactccactgtcctcatcgggcg

SEQ ID NO: 231547 - DNA, 122 bp, Homo sapiens
cagaagtccagccggacgggctccacttaggtgtgacttggaggctcccagcctctcagccggccttcccattttcagtctgctgcccctgtttttagaatatgtcaaactgcctagcacac

SEQ ID NO: 231548 - DNA, 122 bp, Homo sapiens
cattcagatggagtttgggttgttactgccagctggagcatactgcaagcagaacagaagcgtaagtcaggagctgaagacagatctcagcagcccttggaaatcctcccccaccccccagg

SEQ ID NO: 231549 - DNA, 122 bp, Homo sapiens
cagcagagggctctcttcttcctcccatctctaagaccactgccggcgccgccccagaaccgcccacaagagcatggcctctgcacaaagtggtgaccccgcggccctcctctccccagcag

SEQ ID NO: 231550 - DNA, 122 bp, Homo sapiens
actctttccttccagaaggttctctgtgcagagatgtgcccgctgccaccttggcatttccgcctcggagatggtcatgcgcgcccgagactctgtctaccacctgagctgcttcacctgct

SEQ ID NO: 231551 - DNA, 122 bp, Homo sapiens
tcaccagcttactgacgcgtccccaccctccggtcttgctcctggggtcactttggccttcgctgtgaatgggtcaggcttgaggccatgccaagagccagggaagccagcactggccgtca

SEQ ID NO: 231552 - DNA, 122 bp, Homo sapiens
ttgaagactctttaccctacagaatttccctgaggtcccaaaagtctgagctgattgctacgtccagttatactggggagactactctgtgttgcagctgcttcagcttggcaccagcattg

SEQ ID NO: 231553 - DNA, 122 bp, Homo sapiens
tcgggctgtttaaggaggttaaaacgagaggagaaggctctacagctaattgtccttgtgcgttaatcacagtgtgctgcgggggcgcctgttagaatgtgttaatttggtaattaccgagg

SEQ ID NO: 231554 - DNA, 122 bp, Homo sapiens
agtgctgggattacaggtgtgagccaacgcgcccggcctttgagcagaattttaaaagtacgctacctggattggggaagagaaaacccggggctacacgtagagggaaagtttagtgttga

SEQ ID NO: 231555 - DNA, 122 bp, Homo sapiens
gccgccagcacgaagcggtgggcggggatgcgctgcgggcccccagcggcggcggcgccgcgacccttgcccagtacgaagcgcacatcgctcagcagctccgagttgaagaggaaggcgaa

SEQ ID NO: 231556 - DNA, 122 bp, Homo sapiens
gcccccagcccttgtgggcggcgggcagagctggcctgggggccgggtcccgtggggggtcgcgcagacagtgtgtccggagcgcccccggcgggagcgcaggctgcggggcgagagggaag

SEQ ID NO: 231557 - DNA, 122 bp, Homo sapiens
ggccccgcccccgcccaaccgcccgcacgcccggccccgccccacgtcggcggatgcttgcgcggagggcccgcccccacggcccagccacgcccccacagctaggccacgcccccagctca

SEQ ID NO: 231558 - DNA, 122 bp, Homo sapiens
ctccacctacacacagggcgggcctgcatgcataaaacaggatgctggcccagggtgaaacggagaaactcttttccccatctgatgactaatacttgtctctgctttcagaaagggaaagc

SEQ ID NO: 231559 - DNA, 122 bp, Homo sapiens
gaccgaccacgccaagagcccaccgaggagatggtgtcgagggacggggaccaccacaggcgacgcggggaacccgaggctccaagataacgtggcaagtgcaacagcagctgccgaaagtt

SEQ ID NO: 231560 - DNA, 122 bp, Homo sapiens
acttcggcatccaatggaagtctccgaaaaaaaaaaaaaaaaacaagggctcaaggtacgcggcggaaggttgtcgccactccagcaaatccctagtgtttgtttaaagtagaaagtcgtct

SEQ ID NO: 231561 - DNA, 122 bp, Homo sapiens
cttgcacactcgacccccagccaaaggcttataccgcccaggacatagaaattgactcaccgcccagaggcttacagctcaaggaggggtgcgcgcagctgcaccccgggacaggtcagcat

SEQ ID NO: 231562 - DNA, 122 bp, Homo sapiens
aaatcctgggacaacgcgaaagcggtggtcgccccacactctgcggagaaagtggtttcgcgcacgcgcgccacgcccatcgaaccctcctaactcactatagacccgaaacggcactcacg

SEQ ID NO: 231563 - DNA, 122 bp, Homo sapiens
ggagcagtggcgacgtggccccggcctgcagtcaccaggtcggggagcgggcagcactcacggccacactgtgtcctcaggttggcgccactccaccagctgctgcagcccatggccggctg

SEQ ID NO: 231564 - DNA, 122 bp, Homo sapiens
cctgggcgacagagtgagactccatctcaaaacaaacaacaagactgactttaaagatgacgatgacagtaacttcgtgagcccacatctgtggagagcctggtgaatatatttaataccag

SEQ ID NO: 231565 - DNA, 122 bp, Homo sapiens
gggcgggacgggatgggggctggaggggtcccactcacagggagctgatgtcgcccggcacgatcctgggcacccaggaagagcccacgcagatgatagactccttggtacagctgcaagtg

SEQ ID NO: 231566 - DNA, 122 bp, Homo sapiens
ggggttcctaatctcactaagaaagactttgctgatgacagggtttcctgggagtccatgcgtgcctggagcagcagcgtctccagggacaggcagccaccatgagcctcagtgaggagcag

SEQ ID NO: 231567 - DNA, 122 bp, Homo sapiens
tgccagacacacggaatccctcgcggaacaccgatgggcccacaaaacacgcgggggctgcggtcgctgatgatgtgagcaaattcgattcacggtgtctggggtacagccctgagggttca

SEQ ID NO: 231568 - DNA, 122 bp, Homo sapiens
tgttcctcatttctccctactttatattaattctaaagagatacggagtaaaatatgtgtcgtatttggaagcagtacttccacagaattttagagcacaaaaattaatttcaggcatcagt

SEQ ID NO: 231569 - DNA, 122 bp, Homo sapiens
tctctttgaagtgatagaaacctcagagatgttgaccccagctgggacatctgtaccacacgccacaaaatccccatgtcaatagcaccaccccttccctctgctggaggatacaatcccga

SEQ ID NO: 231570 - DNA, 122 bp, Homo sapiens
tcgaaacagttgcggtctgaacaggcaggaaacagttttcttttaattgccgaaatcattcggaagtgcttcatgccctgcttctgtacagcagatgctgtgcattaattggcctgcgtaga

SEQ ID NO: 231571 - DNA, 122 bp, Homo sapiens
ggcaggacactgccaacgttttagcggagggaggaaatgacggggtgcatacgtgaggaacgggctctgaatgtgactgggagctcttgcccgtgacatggttgaatccctgtatctgatcc

SEQ ID NO: 231572 - DNA, 122 bp, Homo sapiens
atccgctagtcgctgactctgaaatgcgccggtctgcgaggtaataatgaccgttgcttgcggctgtcagggctggcacgccgcaccaagggcactcagggccggccaagccttgaacaagg

SEQ ID NO: 231573 - DNA, 122 bp, Homo sapiens
ccgcgaacccgggccggggcctgggcctgagtggccatactgtgctgctgaagctggcatcgctgccgcccttgtgccaagcactgcgcacgtcctggggcaggagagacgccgctgtgaac

SEQ ID NO: 231574 - DNA, 122 bp, Homo sapiens
ggcgaagaacacggcagcgctgggaaccgggctagggctttccgtgtgggccgcgcctgccggccctctctgttgtcccacttggcacggactgggctaccgccacggtttgacttccgcca

SEQ ID NO: 231575 - DNA, 122 bp, Homo sapiens
ccagcagcccagccggttcatgctcgctgcacgcctccttttaccttgtaacatttcaaacgcccttcccttcccggcccccaacatgcacaatccacgtcctctttcttcctcccacttcc

SEQ ID NO: 231576 - DNA, 122 bp, Homo sapiens
aacgtaaggccagcagcagcggggcctgggcccctgggccctgcccagaaactgcaggggcgggggtggcggggtgaagccatactcgctgtttcctctcgtccacccagggagcactctgg

SEQ ID NO: 231577 - DNA, 122 bp, Homo sapiens
tccaggccgggcgtgttagtgtcttcgcgggaaaactgccaataaagtttttcttcttctcgctcccaagatccccgcctccccttaagcaccgcgagatctgacggcgcggctaccatggc

SEQ ID NO: 231578 - DNA, 122 bp, Homo sapiens
ctggttcctgtggcgccagccgggcgagtttcctgtcactgctctcctgctgggggcaggcgctggggggctcctggccataggtgagtgtggaagcagaaagttcggggtgggcagaggct

SEQ ID NO: 231579 - DNA, 122 bp, Homo sapiens
ccggtaaccgttttccttccccgcctaagaaaaacagttttttcctctagaccacttcggcggcctcttctgacagttttgcttctcctatgccagcgggtctccgcgcctttagggggtgc

SEQ ID NO: 231580 - DNA, 122 bp, Homo sapiens
cagaattcccacctaaggacagacatggggcttcctatttagggactcccccagcatctccgatccaggggtggggagcgtgagccttcactttacagatgaagaaactgagtctgaaagag

SEQ ID NO: 231581 - DNA, 122 bp, Homo sapiens
ggtcccgggacgggaaggggcgtggtggggacttgccggttccgcagcggctatgggacccgccctcccgggtcgggagcctgcacgtggcctcgagggatgcgaactcgggtactgcggtt

SEQ ID NO: 231582 - DNA, 122 bp, Homo sapiens
aaagaggtcatgatatttcttccatttccttcctcactgagctgcattttctggaagtgacggagctgttctaaatataattccttcaccatgcctccattctggttctgttaacatagttc

SEQ ID NO: 231583 - DNA, 122 bp, Homo sapiens
acacttccggtacttgggggtgtaagaggttgtactgagcctttagaaaagggcggggttcgggggggagtgagctgaaaaactctccctagacaggaaaggtagaagacctcctcatccct

SEQ ID NO: 231584 - DNA, 122 bp, Homo sapiens
ctctatcaccctcaggaaagtcagtgggagtggtaaccaccacacgggtgcagcatgcctcgccagccggcgcctacgcccacacggtgaaccgcaactggtactcggatgccgacgtgcct

SEQ ID NO: 231585 - DNA, 122 bp, Homo sapiens
actgcgccgtgcatagtgctgaggaaagctgcccactctgttctcgcccttgtagctgctcgctcctctagcctgacttcaactgttccttaaacttgatctcttaagagtctgtcagtttc

SEQ ID NO: 231586 - DNA, 122 bp, Homo sapiens
tcccctgcttgactaaatatggtcagggagcgcagcccgagggggccacttggccagggccgcgtgtttgggatgcttggccgggtatataagaactgcaaaggtgaggccggctcctgacc

SEQ ID NO: 231587 - DNA, 122 bp, Homo sapiens
aggaaatgcattaacttgaaagaagcctgctttcagagagagttgtagatacctggaaaccgagtagtacaattccagggtggtggaattcccttaggaatttaaattgtgagcattttgat

SEQ ID NO: 231588 - DNA, 122 bp, Homo sapiens
ttgttctggactcgggatgccaggttgagacacgtcctgcaaacctctggcagaaatgggcgcaagggggtggatttcgttttcgcctcccgggctttttctttctccccgctcacatgcct

SEQ ID NO: 231589 - DNA, 122 bp, Homo sapiens
ttgaaggagacagggagagttttacagcaagcagggatagcatgagaatatatatgaaggcgaatcagtgaaagttgtgttggggaaagagcaaagactccagggtatgttgagaggtagaa

SEQ ID NO: 231590 - DNA, 122 bp, Homo sapiens
tcagctccccggccgccctcccagccgcgggaccccagcccctccgggacagcgtcttggcggccaagcatgtgctgacgaagaacagcggcaccctagatacggcgtccccacaccacgtc

SEQ ID NO: 231591 - DNA, 122 bp, Homo sapiens
gcagcagctccgcattatcctcactagcaacttcttcaaatccaaccccctttgcaagagcgatacagcttgggttggttttggggagatcttctgaaggctcaaaggctttggaatcataa

SEQ ID NO: 231592 - DNA, 122 bp, Homo sapiens
tgtgtgttccagttctcgttcggaacgcacgtggagagcggagtaaaatgtgtgtatgaacgaaagaatggatggcagtaactgtgtgcactctgctgagtacactttctttccctgtccaa

SEQ ID NO: 231593 - DNA, 122 bp, Homo sapiens
gctcttaactccactgcctatcccaaaacctctaagaactaataatgataatccaccacccgttgctgactctctttttggactcagcccgtctgcacccaggtgaaataaacagccatgtt

SEQ ID NO: 231594 - DNA, 122 bp, Homo sapiens
ctggttggttggggcaagatggggcctcgcaggatcttctgagcggcgagggatccaaaacgatacatccgcgacagggcggaggaatggaaggggtcccaggatcgtgggccctgggccgt

SEQ ID NO: 231595 - DNA, 122 bp, Homo sapiens
ggttgttgtaggggtgctcgctgaaggtcatctttttgactactgggagctcactgtagccgggccagattttctcactgggggtccccagctcctgaaagacagaggtgcttcaacagcca

SEQ ID NO: 231596 - DNA, 122 bp, Homo sapiens
ttcttggggttgatcttgaacttggccccatgaggcctatagtgcacgggagtgggcgtccgctcctcctccagggagcgcaggtagtggccgggcaggcgggaacagatgccctcccgcag

SEQ ID NO: 231597 - DNA, 122 bp, Homo sapiens
agacgtcccctttctgaagcatccatccttctccacactgaaccaagagagaaagccaggcgggctgcctgcactgctttgtctatatctgcctgttagagaggaagaggcacaactgaaga

SEQ ID NO: 231598 - DNA, 122 bp, Homo sapiens
gcaccccgcattaggagctctgcgtctagagcacagtaatctgtgctttaagaagccctccggatgattctggtgcatgctaaaatctgaaaaccactggtcttaatatttaagagaacaga

SEQ ID NO: 231599 - DNA, 122 bp, Homo sapiens
tcttttggggttggagaataaagttctttacctcatcagttagactctatctaaggtacacgagggcttgctagtctcctaagttagtctgctaataaatgttaaccctaataactgaaatt

SEQ ID NO: 231600 - DNA, 122 bp, Homo sapiens
aggtagagcgtttaagggattcccagcagttcccgagtacacgtggaggctgctccccggcgtgctggagcggctgcgggctcagtctgcggagggcgccccggtgaagtgtggagttcgca

SEQ ID NO: 231601 - DNA, 122 bp, Homo sapiens
ctagtcctctctggaagtaaccactcttaacaagtttttccatgttcttccagaaaacttcgcacactagagcaacacaggtgtccttttagaaaatattatcggccgggcacggtggctca

SEQ ID NO: 231602 - DNA, 122 bp, Homo sapiens
tcagcgcctcctgtgtgctgcagcagatggcgcgctgcagaccccagcctggtgcctccgcgactcctccccaaccatgatttacaggcggggacagccacattcctgcgccccaacttcca

SEQ ID NO: 231603 - DNA, 122 bp, Homo sapiens
gaactgggacccggcctatttactgggttgtatcctcggtgcctagagcagtgcctgacacggagaggaactcaataaatattcaatggatcattatgatgagggagtaaggacagcagatt

SEQ ID NO: 231604 - DNA, 122 bp, Homo sapiens
ccctctgtttcctgaaaaggtccctgtgcttccaggtctttcctggggctgctgggctcccggctccccacctcggtgtcacagaaggcacttgggagcaggggtgggcgggaactgcgctc

SEQ ID NO: 231605 - DNA, 122 bp, Homo sapiens
gttagtggtgagactgtactatgctgagagctcattctgttcctgcagctacctgtcgctcgctgcacagtactcagtgcacctcagggctttaccttccacatctggccatgcacactgca

SEQ ID NO: 231606 - DNA, 122 bp, Homo sapiens
actgctgatgggataaaccaactcagatttgggcttttcattttcaaccacattttgaagcgtacctgatgatgtctaaggctgaaaatgtcgctcctcccgaaggcctcaggggaccccgg

SEQ ID NO: 231607 - DNA, 122 bp, Homo sapiens
cacccggatacatgttaccatcgggtacggccccatggccaggggacacccacccggatacgtgttaccatcgggtacagccccatggccaagggacacccacccggatacgtgttaccatc

SEQ ID NO: 231608 - DNA, 122 bp, Homo sapiens
gcggtggggacgcctccgagggtgggttgcttcccctctagctttaggttaggcactccccgcccccgcccaaaattttgctgctctgtcctgattccccgtgttcgagtctcagcttctca

SEQ ID NO: 231609 - DNA, 122 bp, Homo sapiens
cgagcaggacaccatgaccttctcggacgggctgaccctgaaccggacccagatgcacaacgctggcttcggccccctcaccgacctggtctttgccttcgccaaccagctgctgcccctgg

SEQ ID NO: 231610 - DNA, 122 bp, Homo sapiens
ttgctcatgagaatagtgaaaaacgcaacttgggtggaggtttaagatgctaatgaggcacgtgatgtatggacaagcatggacagctactgcatgtgcacccagagggccacccagaatgt

SEQ ID NO: 231611 - DNA, 122 bp, Homo sapiens
gccctctggagaaagacagtccctcagagtttgagcgttgggggtacccaagaccctgtccggaccctcgggaggcaggcagccttggggaccggattgctcagaggaccgagatcaagtcc

SEQ ID NO: 231612 - DNA, 122 bp, Homo sapiens
cccacgtttctcttttgttcccaggagccgacgagcttttgaagaggtgacacctcgcttcgccttctcctgctctaggccctgccctcgtccagcatccctcctgccccacgaagcgagag

SEQ ID NO: 231613 - DNA, 122 bp, Homo sapiens
gctggtgcagcagaggctgaggcatcaggtgcagctgcatccggatctcctgccttggagcgtactccttgtctctaagtcgggaggcaggacgtggtcaggccggggctgtggaggtgcgc

SEQ ID NO: 231614 - DNA, 122 bp, Homo sapiens
tacagtataaggcttgcggtgaggtttcttcacccctccagtagagggtgcacttgcaagcggcatttgtagcattcggtgaggtttctttacccctccggtagagggtgcactcgcaagag

SEQ ID NO: 231615 - DNA, 122 bp, Homo sapiens
catttcccgtctgtagggtggcatcctgcacagggccagagagacccactgtgcttgggccgtgcgagacagcgacccacctgaatacctcccgtgggcacgccaccagctgctcctgagcc

SEQ ID NO: 231616 - DNA, 122 bp, Homo sapiens
caggctgaactcccaaatctgtgacttccaaattcctcggctccaccagagcttccagagcgtttctaaactgaacagtctccccaacaaccaagcggagagctgcgggaggacgcgaagca

SEQ ID NO: 231617 - DNA, 122 bp, Homo sapiens
acttctgggtaaaggctaaaatgaatcaacggagaactgacgagactgtttccccactgacgggtctgtaagagttgggggctgcccgccgcctggtcagtcacgctatgcagctcttaggt

SEQ ID NO: 231618 - DNA, 122 bp, Homo sapiens
gagcccctgacgtgggcgccccgttacctcggggtgggtgcctggggcccctgaggtgggcgcgggttgccccggggtgggcgcccggcccgcgcgggttatttttggcgcccgcagaggcg

SEQ ID NO: 231619 - DNA, 122 bp, Homo sapiens
gacctgacagaactcttggccatggccagttaggactgttgagacaagtaggagctggggcgctgcacacctgctgactgtccctctgccatgtggaagcaggagcatggtgtggtaagagc

SEQ ID NO: 231620 - DNA, 122 bp, Homo sapiens
caattctgacatcagctacctggcgttagcacaaatcccacaggttaaggggcttagtcccgcaagactgcccacttcaggtaccaactacaagtcctgggtgtcctcaagccactcacact

SEQ ID NO: 231621 - DNA, 122 bp, Homo sapiens
ccccgggcgggagccagccggaggagctccgctcagtaacatggggccagccagactgagcgaggggagcgcagcggcgggtggggggcgggggcgggggtggggaggggggcggggctccg

SEQ ID NO: 231622 - DNA, 122 bp, Homo sapiens
gaagctgctggctccaggctccgctgcaggctgccctggctgagcgggtgctgggcaccgcggagggctgcctggtgctctgaagccatgccccagtgcctccctgggagttctgctgtgga

SEQ ID NO: 231623 - DNA, 122 bp, Homo sapiens
atctttctgccagatggtcgttcaaattctcagggtgctttgcccttctggttcctacaacgtgagccaagcccagagaactttggtccttcaatttcccccttgctccacccctcttgtga

SEQ ID NO: 231624 - DNA, 122 bp, Homo sapiens
accagcaggtttcagagtgaaagagacagcctcactggaccgtgggtttctgtctctaaacgaaataattaaacctatattccaagtcctgctgtaagaattacaggtaatgcactttggaa

SEQ ID NO: 231625 - DNA, 122 bp, Homo sapiens
ttaggggtatatttggggcccactctgccaccacagcattaaatattattatgtgggcatcgggagcctcaatgccccgtcacagagccctcctactccagggtctgtcactttggagaatg

SEQ ID NO: 231626 - DNA, 122 bp, Homo sapiens
accacccactgtcctgatggcctatctgggcatctgcccacatggctgggaacaagcacgcggggcccagatgctagccagagcctgctctcagcttctgggtggccctgtctgggctgcca

SEQ ID NO: 231627 - DNA, 122 bp, Homo sapiens
tgggaagtacctgccgccatcttgctcaccagcctccaaaatgcggctggggctcctgagcgtggcgctgttgtttgtggggagctctcacttatactcagaccactactcgccctctggaa

SEQ ID NO: 231628 - DNA, 122 bp, Homo sapiens
agatgagttcctgtgactctgcgttggtgaaagtcacggtgcccccttcataatccagggcgatgcccactctccggggccgcagtgctgggaaaagctcagcctcggggctggtgttggcc

SEQ ID NO: 231629 - DNA, 122 bp, Homo sapiens
cctatctctctggtttgctctcttggtctctcactgtttctctctctgtgggcaggacaccgaatggccctctcggctgaagcagcccggcccaagtgcccttctgcccagcagccaggctc

SEQ ID NO: 231630 - DNA, 122 bp, Homo sapiens
acacacaaggcgatgttaagtccattgggattctcccattccccacctgtagcaccatctcggacctggcttactgcgaggaagtagaggcaatggtgacagcttcccgggacagcaccgtg

SEQ ID NO: 231631 - DNA, 122 bp, Homo sapiens
agcggctcactttcctcggggcgcctaaagctccccgcccggcattgccccgggagcgaacgctgagcccctgggacccagccccgactcggcgcagcggtttccctctcggcttgcgcccg

SEQ ID NO: 231632 - DNA, 122 bp, Homo sapiens
aaaaaaaaccgcaacaagagcagatctgtgagtctcagtccagggctttcctgaccctcacggctactccggacccttcctcttcccggcctgagaggatccggccgaaacggggccgccag

SEQ ID NO: 231633 - DNA, 122 bp, Homo sapiens
catcagtgcataggtgaactcgtggcgccccgtgtcagcagtagcgtccggggctttaggcgcccgcaagctggggtgaggagggcgcgtaggggccacgctgaagctgttggagttgtggt

SEQ ID NO: 231634 - DNA, 122 bp, Homo sapiens
gcactccagcctgggccatacagcaagtctcaaaaataaataaatgcaaaggctgctgagcgcagtgactcatgcttataatcctgtcattttaggaggccgaggcaggaagactgcttaag

SEQ ID NO: 231635 - DNA, 122 bp, Homo sapiens
ttgtgagaagccatcaggagcagggggaggaccaccagggtgacctggatctgctggaagcggccgacaccccccacctgctgcaggaggtcattaaaggccattgggccaggcccagccca

SEQ ID NO: 231636 - DNA, 122 bp, Homo sapiens
ccctcccgacgctcctggcttcctccgtgcccctttcctggcagcggggtcgccgagattcgcccgttgctttgtccttgctgctctccaggcaaacgggcggctcctcctcaccgactgcc

SEQ ID NO: 231637 - DNA, 122 bp, Homo sapiens
aaatccgggcagggtgggtggcccaggcttcacacccagcccagctcagtgaagccatgtcgttgtctgggataaatacctggggttcgttgtctcaccaaggaaatccggtaggcagacac

SEQ ID NO: 231638 - DNA, 122 bp, Homo sapiens
acctcgcagtcctcgtacttgatattatccgtcaatttccaaagcattttcatggatcggcgtgaacggatatgcccctctcggtctcgcacccaagtggagctactctctgggtgagcgca

SEQ ID NO: 231639 - DNA, 122 bp, Homo sapiens
ggtgctgagtcagtgatgtgcaagttgacacgtgctgcctggtccaggctttctgagttccggaacctgagtggagaacatggcttacacgtggggagctccacccactgcacgccccgccc

SEQ ID NO: 231640 - DNA, 122 bp, Homo sapiens
atttactccacgctgggtgcgttttatatccccttgactttgatactgattctctattaccggatttaccacgcggccaagagcctttaccagaaaaggggatcaagtcggcacttaagcaa

SEQ ID NO: 231641 - DNA, 122 bp, Homo sapiens
catcgccgctatctgcctacgtgagctgctctcctcccatcgcccccgcctcccctactacggagaaaatcttgcacgttttcccttgtgaaaagcagagttctctttttctcattaccacc

SEQ ID NO: 231642 - DNA, 122 bp, Homo sapiens
aaagaatctagagtcatctccagtgatgaagagtcccgatgattaatgaaaccacctttgcgaagattatgacagcaagaggagtctaacatgaccaactccatcttgcttctagcctcaca

SEQ ID NO: 231643 - DNA, 122 bp, Homo sapiens
gacacgcacgctggccgaagggtggcatctccacggatcttggcggcatgtccttgggcacgggcgtctccagggggccccgactgtccttacactggcggtccggacaccgagacccctgc

SEQ ID NO: 231644 - DNA, 122 bp, Homo sapiens
ggtatcaggtaacacacatgtatataaattacagttcacgaaagaaaataagtgcctaggcgatcctgagaaaaaaaatattaagtgggagaggtaccaaagaaggtagattattctacaat

SEQ ID NO: 231645 - DNA, 122 bp, Homo sapiens
acctctctttccccaagctccatttgcataaactgtctctgatgagatttagggcgcttacggtggtatggctgtagacaactgtctcaggaaacagacccatgacccacccagttgccaag

SEQ ID NO: 231646 - DNA, 122 bp, Homo sapiens
ccggccacacagccacaggcgctgcggaacccagcccggactctccccggctggagtgtgcgaagggcttcccgcccaggggcccagggtggtcttagtgaaaaagggatggcgctgcagca

SEQ ID NO: 231647 - DNA, 122 bp, Homo sapiens
taggcggagtccttccttaagctcccgcccgcggctccgaactgagtcctctcagccgcccgagggcgctgcgctgagccttacactctatgattgctcctaccgactcccatgaggaagtg

SEQ ID NO: 231648 - DNA, 122 bp, Homo sapiens
acactgctgggcgcccgccgcccgcccctgttctagacacactgctgggcgcccgccgcccgcccctgttctagacacactgctgggcgcccgccgcccgaacctgttctagacacactgct

SEQ ID NO: 231649 - DNA, 122 bp, Homo sapiens
tcacacttggtccctggaggcaccacataccattcaggcggcaggcagatcagggccacacgctggttcagggtcacagatctttaacaagaatgggggcactcagggtctgaggccacaag

SEQ ID NO: 231650 - DNA, 122 bp, Homo sapiens
gcgcctcacgtgaccataagggggcgtggctctgagcggtgcccggcttccgggtggctgcgcggaagcgcggtgcaggcgtgggctggccctgcggcgcctgcgcgctaaaaagaggaagt

SEQ ID NO: 231651 - DNA, 122 bp, Homo sapiens
ccccggtcggcggcattcccaccaggactctccctagcatgtgcacagtgacgcagaaaccgatgcccagagacagcccccaaagggcgctttgatttatacagttgtaattggctataaac

SEQ ID NO: 231652 - DNA, 122 bp, Homo sapiens
cccagtcggggggaggggaggaatcccgggagcggccgagaccgaggcagcggcggcgcgcggcgcggcccctttaaggctctccccgcccaccgatggagccggcctcagcccgccgctct

SEQ ID NO: 231653 - DNA, 122 bp, Homo sapiens
tttttttaatagagacggtgtttcaccgtgtcagctaagatggtctcgatctcccgacctcgtgatctgcccgtctcagcctcccagagtgctgggattacaggtgtgaggcaccgtgccca

SEQ ID NO: 231654 - DNA, 122 bp, Homo sapiens
gagcaggctcagttgctccacgtcagttcccctaacttagcctctgacagtgacctcagtcgccgcagttcctctactatgagcaagtctgagtacatggagatcgaagaggatatgaataa

SEQ ID NO: 231655 - DNA, 122 bp, Homo sapiens
caggggactgtgagctgcagcaacagtgacccctacagtgctgacagtgtggggcggtcccgggtccgatcctggctgttcctccgagcggccgtaggggtccgccctggcccctacactat

SEQ ID NO: 231656 - DNA, 122 bp, Homo sapiens
gggccacagcagccccgggctggaagtcaaacaaggaagtgggatcgtgttggaacctgacgcttctgccggtgtgctgggtgcagagaatggctctgacaatcagagcaatggcacaaaag

SEQ ID NO: 231657 - DNA, 122 bp, Homo sapiens
ccaacggaccagcagtggaggcgctcggaatcccgcggcgctggagcccggataacgccgcggagtgattgacccgcccaccctggaggctcctcccatcccgtcggagccccgcccgctgg

SEQ ID NO: 231658 - DNA, 122 bp, Homo sapiens
caccccagacccttcaggaacaaaaccctgacatcctccctcatgcatttgttgtgatctcgtgtggccctgctctcagctcaccccacttctcttggctgccaggtttccgtgttttgaga

SEQ ID NO: 231659 - DNA, 122 bp, Homo sapiens
tcccgggacccctgaccgggagccccaggcccggccccgccccgcgcgccccactcccggcggggccgaacccttccaaatgtccgcatccccggggggcctcccaggcccggggctcccgg

SEQ ID NO: 231660 - DNA, 122 bp, Homo sapiens
tgacggagctagcgtacaagaggtcgtctttagtggagaggcctgaggtctccgcagtgacgggggtggcagcgcgaccccttagtcttcaactacaggccagtcccaggtgccccaaaggg

SEQ ID NO: 231661 - DNA, 122 bp, Homo sapiens
accaacatccaagcctgcaaagctaagaggttaggatctgcaggagcccaggtgcctccgcgggaggaatgtggctcagattcgggggaccggtgcgcggtgtgtccaggagacgcaggcac

SEQ ID NO: 231662 - DNA, 122 bp, Homo sapiens
cccagcctgggcccgctgctctcctctccatgttcctccttcttccaggtttgaatctcccgccgttgggccaccgcccctcaccgtcggcaccgccagacaggacacttcccgtccacacc

SEQ ID NO: 231663 - DNA, 122 bp, Homo sapiens
agacaggtggattcctagaggccaggacttcgagaccagtctggccaacatggcgaaacccggtctttactaaaagtacaaaattagctgggtatggtggggcatgcctgtaatcccagcta

SEQ ID NO: 231664 - DNA, 122 bp, Homo sapiens
tgcatccaatagaggttttcttctctgtggtctttagggctaccactttcattgtctattcgctgatgtggtgggggcggggcgggggggcggcggggaagggcgtttccctgggtcctgac

SEQ ID NO: 231665 - DNA, 122 bp, Homo sapiens
tgcgctcttccttctcttctccctcccaaaggctgcggctttgcatgggcagcttgctggcgccactgggcgcgtcccgcagactttaaatggaatgagtggaggtctcggactgctgccgg

SEQ ID NO: 231666 - DNA, 122 bp, Homo sapiens
gcgcccattggggaggctcgggccatgtgggggcccacggggtaggggtatagggcatggcgggctgcaggtcctgagccctggcccatggggaagcagctgaggcctggcaagaattcaag

SEQ ID NO: 231667 - DNA, 122 bp, Homo sapiens
cagcattgtaaaccattttccagtgagttgtaatagaaacccagggcaaaaggtcacttccgttttggagcctccctgactctgcagagttgctccctctgtcctctgccccaacacaatgc

SEQ ID NO: 231668 - DNA, 122 bp, Homo sapiens
ggtggggcgcagcttcgagggccgggagctcctggtcatcgagctgtccgacaaccctggcgtccatgagcctggtaagggcgctgccccctgacagccctgggggcatcccggaggggggc

SEQ ID NO: 231669 - DNA, 122 bp, Homo sapiens
caacacacacacacacacacacacacacacacacacacacacagactggggcagagcaggcgagagggtggctcactccccccacggagctgaccagacgctgtctgagcccacaggcctag

SEQ ID NO: 231670 - DNA, 122 bp, Homo sapiens
tgacaagaaagggacaaagttcttctttttgtgtggtttggtgctcatgaatggccacaacgcccaccagtggccacttcctggaagccaagttaactgcgaggattttctctgctcactct

SEQ ID NO: 231671 - DNA, 122 bp, Homo sapiens
cattaaaaatgcaacactgttgcattcaggacccatgcccataaaatccacattgccaaacggaggagtttcgtggctacgtgacaaccttaccctcagaaggggaaaggagcaggcccacc

SEQ ID NO: 231672 - DNA, 122 bp, Homo sapiens
cctcccctccacctggcatctgtgctgtgtgttctcccttttgttgggcacctcgctaatcgtcaccacagccccacaggggcagccaggcctccacctcaccagggggcttccggagttca

SEQ ID NO: 231673 - DNA, 122 bp, Homo sapiens
cccggtgcggggggactcccatggagcgcggactcctaaggaagtcgctgggaatcccaccggctgtaccgcagggcgttagtacctagatggcttcggtgcccccaagcgatgggctcaag

SEQ ID NO: 231674 - DNA, 122 bp, Homo sapiens
atgcgctggaacaagggaaccatcttaaaagcatccgtggactatatccgaaagttgcaacgagaacagcaacgcgcaaaagaacttgaaaaccgacagaagaaactggagcacgccaaccg

SEQ ID NO: 231675 - DNA, 122 bp, Homo sapiens
cgtccgcatcccctgcttggcatctgggggaagcgggcagtcgcggcccccacagcgctgcgagttgggctgtattccagagtaatgtgccctgtccccatcctgcgtccaggtcagcgctt

SEQ ID NO: 231676 - DNA, 122 bp, Homo sapiens
catggctatgctatacgggatggcctactgcgcggctacgctatactggatggcctactgcgcgtctacgctatacgggatggcctactgctcctgggctacataacctatggctgtacatt

SEQ ID NO: 231677 - DNA, 122 bp, Homo sapiens
gatgctggaggaggagcctcagaggagcgaggaggtggagacaaaactgacccctaattccgactcacccatcaggaaaacctctggccagaaggttggaaggatgggactgtgagatactg

SEQ ID NO: 231678 - DNA, 122 bp, Homo sapiens
gcgagcgcgtccacatggtgcacgcctgcacttttccccacactctggattctgggagcgcgtctacacggtacatgcctgcacgtctccctacactctggattctgcgagcgcgtccacac

SEQ ID NO: 231679 - DNA, 122 bp, Homo sapiens
ccaaacggcgcgcgtcagggaccgcggcaggctgtgtccgtctgtccgtccccgtctgtccgtccgccagcccgcccgctcccggtgccctccgcaggcctttccgcagcaagcccgctccc

SEQ ID NO: 231680 - DNA, 122 bp, Homo sapiens
caggctggaatgcagtggtgcgttcacggctcaatgcagcaacgacctccagggctcaggcgatcccccgacctcagcctccggagaagcttggaccacaggcgcgcgccaccacgcccagc

SEQ ID NO: 231681 - DNA, 122 bp, Homo sapiens
gcagtataattttcagcgtaaaagacaagtaaagagccatagcgaagtgaaaaacaaccacgtgcagtggccgggaattgaacccgggtctcccgcatgggaggcgagaattctaccactaa

SEQ ID NO: 231682 - DNA, 122 bp, Homo sapiens
ctctgcagcttcccagaatccacactccttctggagctggaggccaccttcaagggagggcgggctccgggggaagcccccaggagtttgcaaaaggagccccctttccctccttttgcaaa

SEQ ID NO: 231683 - DNA, 122 bp, Homo sapiens
ccccagggcattgcgtggttctctgagccacattccaggtgacttctctgcgccacccttcggcatctttcgccagggagccctgaggagcttggcaccttacgatccacagaggtgggaac

SEQ ID NO: 231684 - DNA, 122 bp, Homo sapiens
gataccccgggtgtggaaatacaaacacgtggtctgagttgtggcgctttttacctaacccggaccttagcgttctttattgtagtcttagcttcgtttctgtttctccttttctagtcaga

SEQ ID NO: 231685 - DNA, 122 bp, Homo sapiens
catggcgggagggcgggaggccgggaggccgggcgggagcgggcgggctgctggaggggccggggaccctcggggctgacgcggcctgtggcctctgttgttacagctgctcggtagtctgc

SEQ ID NO: 231686 - DNA, 122 bp, Homo sapiens
gttcaaacagaaaaaggaaaaataaatttctattcaaaatgttgctgtgaagcgtaaatacgatactttgtgaaaagcacctgccactcagtgggcattcaaggactgtaacttctttataa

SEQ ID NO: 231687 - DNA, 122 bp, Homo sapiens
ccagcctaaagaccacagggtcagaagctgtctagaagccacagccaaaagtatgccctccgctcctccaaagccagggaaagatctggcccccagcctgccttggagggaaggggcgatgc

SEQ ID NO: 231688 - DNA, 122 bp, Homo sapiens
gcttttagcgcgggtccttgtgtaggcgagctcatatactacgatggggcaggggcgcgacggtctggcggctccggggcattgtctaagcgggacggggcggggcttcttcgggccacgcc

SEQ ID NO: 231689 - DNA, 122 bp, Homo sapiens
aaattcaaggcctgcagagggcccagctcagtcttcaggtgggtttggtttggcccggcccgcagtggaccgagctgtcagcatttaggaattgcgagttctcacatgaccagcctggggtc

SEQ ID NO: 231690 - DNA, 122 bp, Homo sapiens
ctcccacggtgcagctgcgggctgaaaggctcctcaagcgcggtcagagtgggctgaggccgaagaggcgccgagagccagcgagggatgccagcaagctgtcacctctcagaaatacagga

SEQ ID NO: 231691 - DNA, 122 bp, Homo sapiens
ggtgctctgtgggggtggcgcaccaccatgaggccaagaggaaatcctcggccctttccacgccctggcccctctgctaggccggtggtggcctccctgtggcctcagttccttgcacccct

SEQ ID NO: 231692 - DNA, 122 bp, Homo sapiens
tcattaaattttggtataatggcaagatcttgcaatcagaagacctaggtttttatccttcgccccttactaactatgcaaagttaagaatcttactaaatataatcctccatttccatatc

SEQ ID NO: 231693 - DNA, 122 bp, Homo sapiens
caaatggtgttagtaatctgctcacaggctagaaatccacggacagaaaaagtaagtaaacggagcccaggaatagagaaggaagtgcaggttgtggactgggcaacccccaaggcggcaaa

SEQ ID NO: 231694 - DNA, 122 bp, Homo sapiens
tggggctcgtcggtggcagggctgaaaccagtggttattagctatcattattctgaatgacgacggctcctatggcttatgggtcatttcacgtttgctactgaatatttaatcgtcaccgt

SEQ ID NO: 231695 - DNA, 122 bp, Homo sapiens
ttgttttgtttttaaatctctgatgcgccatcagaaaattatttctgcctctgcccctggcgtggctttcggagatgcttgtctgtcagccaatggggaggatcggattctggcagggggct

SEQ ID NO: 231696 - DNA, 122 bp, Homo sapiens
catcctgagggaagtgagagaaaagaacgtccgcagcagcgagagccagaccgacgtgtccgtctccaacctcaacctcgtggacaaagtcaggaggtttggggtggccaaagtggtgaact

SEQ ID NO: 231697 - DNA, 122 bp, Homo sapiens
tttgggtatgaaaccctgaagcgtattagaaagtgaccgttaattgctaacctgagagaacgtttgtattccaggctgtcatgaagcccctgactggcttaaggacagattattttattcaa

SEQ ID NO: 231698 - DNA, 122 bp, Homo sapiens
ttttttcccaaggagaatttctttaaaaccaagcacattgctaaatagcaacattatactcggtaaacaataattggcaacaaaataagtttaatattctgcccaaaccagtcccagatact

SEQ ID NO: 231699 - DNA, 122 bp, Homo sapiens
gccatggccccgggcggccacgcacttccggcggccgcgccccgccccggaaccacgccccgcccccgtgaaatgcgttcccagtagccacggcaacgcccagctccgccctccccgcgcat

SEQ ID NO: 231700 - DNA, 122 bp, Homo sapiens
gtggctccccggggccgcacctgtgcctccgccgggcctgtggggtgagtgggatgctaacgcctggccttggagagagatgtctgggaggaggagggggggacgtgcaagggacgattggg

SEQ ID NO: 231701 - DNA, 122 bp, Homo sapiens
ccggccccgtccgtcaccgtcaccctcgcctcggcccgggccgctgccgcccccagccctcggcccctccgccaaacgctggccccggccccccgcggctcccacccagacgcctgccgcct

SEQ ID NO: 231702 - DNA, 122 bp, Homo sapiens
gggggggagcctacgcagcagggcgcctgccactctcacccagggtcacgagaaagcgctcggaaggagccctgcgacctaatgggagcacagcctggaacctgttgccctcatgccccatc

SEQ ID NO: 231703 - DNA, 122 bp, Homo sapiens
cacgacggaggcggacccgtgccgttccagacccttcaaatagaggcggatccggggagtcgcgagagatcccagcgcgcagaacttggggagccgccgccgccatccgccgccgcagccag

SEQ ID NO: 231704 - DNA, 122 bp, Homo sapiens
aggcttggagtagcctctcctaggcatctttatgctcagcccccaagtccactggagggacggtgaagcccagaccactctgctcacatccctcttccttatataggatccggcacaagggg

SEQ ID NO: 231705 - DNA, 122 bp, Homo sapiens
caggattaggcatcgtggggccaagatgcttgatctcacctgaaccagtgctgaaccagccgactgggaagaggagccgcttgggggcgaccgagagcccatccgtttcccctttaagacca

SEQ ID NO: 231706 - DNA, 122 bp, Homo sapiens
ccgtcaaaggcaggactcaagaacgctgcctttcgtgcaagtgagatgggctccgctgcccgcgcccgcttgttctcggtcttggccgacctgagggtgcgtctctcccgggctctccagag

SEQ ID NO: 231707 - DNA, 122 bp, Homo sapiens
agatgcccgcgggctcagctgtctcggtgcctggcattccgggggtattgttcctctctacgagtcccagattccagcaacagctgctgccccaggctcccccgccagcttccccctgcgct

SEQ ID NO: 231708 - DNA, 122 bp, Homo sapiens
gcactcagtcaacttgctcaagacaagtcataaagctaaacaatacgagacgccaaaacccgtgttctcgtcatcacgccagctgaacagagactgtgctggacaacccgaagcgacagagg

SEQ ID NO: 231709 - DNA, 122 bp, Homo sapiens
atggagtgggcagcgcttcctggctgcagctgggagggtgcccacagtgcacctgctggccgatcatggcatcccagttgggcctgtgccttcctctgcaaatgtcctcccttcccaagccc

SEQ ID NO: 231710 - DNA, 122 bp, Homo sapiens
ggtctacttcgaggaggcggccatagccactgaaaaagcgctggatggccttctcctggacgttgtagcttaggcgtcctatgtagacgcgcggcatgtccgtggcgggcgggggcccaagg

SEQ ID NO: 231711 - DNA, 122 bp, Homo sapiens
catcccagcatcctcaaccccatcaacatcgttgtggtcaaggtgctgcttcttagagatcgtgactccgggcccaaggtcaccggcaatgcggccctgacgctgcgcaacttctgtgcctg

SEQ ID NO: 231712 - DNA, 122 bp, Homo sapiens
tggctacacctcaacctactccactcttgcagtgggggcaacagctttaggagcagggaccgtgtgtgggggctgcacccttgcagtgcgtggcctggacacggcccaagccctccgccgcc

SEQ ID NO: 231713 - DNA, 122 bp, Homo sapiens
gccagaggcaagtgatgctgatcagcatgggcttggaagccgcctaagaaccaaccacagcgacttttccagtgggatgaggaggacggggaggagaaaaaagtgggcgggggcgggggagg

SEQ ID NO: 231714 - DNA, 122 bp, Homo sapiens
ctgccttgccacagtgcttcaattttaggcagatctatgagccaactggagccaaagagacgcaaagaacagtttgtcaggaatcacaggatagaaattgttgccactagacttgaaattgg

SEQ ID NO: 231715 - DNA, 122 bp, Homo sapiens
tatctaagcgcttccctttccagattactaacggggggggggggggactacagaagtctccggaaattatttcggccaaacatagctgtgtagatcctttggtaccacagtaggacttgtag

SEQ ID NO: 231716 - DNA, 122 bp, Homo sapiens
cggcggaggcgccattttgtgtagccgccgaaccttgttggaggttctggggcgcagaaccgctactgctgcttcggtctctccttggggtaagtgcggcggctgtctgtaacgacggtagg

SEQ ID NO: 231717 - DNA, 122 bp, Homo sapiens
ccaggaaaagcaagaacagagcgtcctcttcggctaccctacccgggagttcaggcgctgcgcctggccctctggggcgtgtttgaccataactcgcaccgcttgctcttttcccatttcag

SEQ ID NO: 231718 - DNA, 122 bp, Homo sapiens
aggccctgcttgcgtcagtcttggcgctagaacccgagggcctggagccgccaggggagacgcggagctcggccgagacgaggtggcttttggcacctctttaccctctggccccagtgctg

SEQ ID NO: 231719 - DNA, 122 bp, Homo sapiens
ccagctccgagccctgctcgtggagccattggtgctgcggcggggagaagaggccacaggcggggacgccccagacactcccgtggggcccgtgccagggtctcctgctcctcagaaagagc

SEQ ID NO: 231720 - DNA, 122 bp, Homo sapiens
gctagagcctaagtgcttgggtccaaatcctggctctgctatttactaactctgtgacctcgggcaagttactcaagctctcctctctcaatctttgcatctgtaaagcacagataatgaaa

SEQ ID NO: 231721 - DNA, 122 bp, Homo sapiens
gccagagaccagccccagtttcggttaatcagtccctttccagtgggattcgcaattccccgggtagttctctcccactgttccccttccctggtcctctcgcccagggtctcctttcccac

SEQ ID NO: 231722 - DNA, 122 bp, Homo sapiens
aaagcgggtgggtgggtgggcgggcgggggggcggcggcggcccgcggtgccagggagctcgctgggggctcgctggggtcttacagccacctccggagcggcctggccgcagcccagagga

SEQ ID NO: 231723 - DNA, 122 bp, Homo sapiens
gttccttatgatgttcggatgtgttggcagttttttccttctggtgggtttcgcggtctccgccggctcaggaacaaagctgcggaccttcacggttagtgttagggctcttaaggcggcac

SEQ ID NO: 231724 - DNA, 122 bp, Homo sapiens
tgtattttagataacatttggtcagccaggcttggacattcagagcagaagtatggaatacgtacagcggcaaatatccaaggaatgtggaagcctaaagtcccaaaatagggtaagtaatg

SEQ ID NO: 231725 - DNA, 122 bp, Homo sapiens
attgttccctgtgctgcccgtggggccattcacagaagggagctacgacggagggaggctcgcagccccgccagctgacatgcccataaatggctccagcactgctaggcacgtttagaagt

SEQ ID NO: 231726 - DNA, 122 bp, Homo sapiens
gcctccattctttctgtaacctcaagatattaatagtatataagcttctgtactccactacggggttaggtaatcactgtgtgatgttccctgtgtccagattaataaactgtatgcctttt

SEQ ID NO: 231727 - DNA, 122 bp, Homo sapiens
aaccgagaagccgagaagccaaggccgtcaggctctgatgaccggacaaggagcccaaggcgcggggaccgtggcacgcagctcggttggacggcttgggccggcggccgccctctctggac

SEQ ID NO: 231728 - DNA, 122 bp, Homo sapiens
ggcgggaagccgagcctgcccgcgaagagactggggattccgaggcggctcctgggagaccggacgcgcgcggcctccgccgctcccagtcccgccagacccgatgccgggctggagaagcg

SEQ ID NO: 231729 - DNA, 122 bp, Homo sapiens
tgagattaattaagtgcgagaattaaatgaggtgagccgcgaacggggcctagcatagtgcggggcgcactcagcaggtgttgtttatagggatcatttccctgtaactggccaggtggact

SEQ ID NO: 231730 - DNA, 122 bp, Homo sapiens
tggcttgccgaaggggcaggggttctgaggctcttgtagactgccactgaaggtatttggcgccacctgttgggcgtgttacccacgattgcctcctgaatctattgtcatttttgtgtcct

SEQ ID NO: 231731 - DNA, 122 bp, Homo sapiens
agcctttgacagtatatgggaccgtgtgggactgtgtgacactgtatgtgcttaagaccacgtcaccatgtgtgagactgggaatgtgtgacagtgttaaactgtcattatgtgtagaccac

SEQ ID NO: 231732 - DNA, 122 bp, Homo sapiens
aaggcaaataggccaatcagcgtccagactcttcagctacggcagtccgcttctcctcctcgccctgtcggatctctaggctggatccgggcctctccaatcaacagcggttaggagggcgg

SEQ ID NO: 231733 - DNA, 122 bp, Homo sapiens
ttttccctggcttagtacagctttcggccccatcattccgccctcatcttccttggtttccgaattactagaacaaggggtcagtgacacatattgaaaggatcagaggactggagttgaag

SEQ ID NO: 231734 - DNA, 122 bp, Homo sapiens
tctatcatattataattgacaggtcaattctgttaatatctttttgttaattttgctacacgtttgcctctgaaggaggtgagacttgtgctgctttttgggatcatgttcttttttcatgt

SEQ ID NO: 231735 - DNA, 122 bp, Homo sapiens
gggaaagtcacggagagtggtggatctgggatagacagcttccttaacacttcctccttccgtgtagccctctgtgactccaagttcccggtataattatgctaaatatatgtggtcttggt

SEQ ID NO: 231736 - DNA, 122 bp, Homo sapiens
agagcagccccacccagccagcccttcagcctctgggctcctgctgcttaaaggcagagccgcctggttggtctccaccctgtgcattgggagcccagccaccatgctgacgggtatttttc

SEQ ID NO: 231737 - DNA, 122 bp, Homo sapiens
actggcagtcacggggaggcagcacaagaggttttcgccctcatgtgctggtgcaactatcgcgaccatcaccctgagaactggaggaagggtgccgcaggcaaagagtggcgcgcctgcag

SEQ ID NO: 231738 - DNA, 122 bp, Homo sapiens
tcatggactctcacaattagcagagatgcagagtgacctaatccaacatcccagctgaaacgtgaacaaaccaccctcccaaggaatttgtccacccaccaaagctgttttccaatgtgact

SEQ ID NO: 231739 - DNA, 122 bp, Homo sapiens
gagaacatttatgaagatgtttaaggtcaatactaacttgagtaaagtctagccggtctccgctcagcttctcaaggccacctcctgatgtgtatgttagctgttttaatactatgacaact

SEQ ID NO: 231740 - DNA, 122 bp, Homo sapiens
cagtgccttccctggctttccctccatcaactgtggtcgggctggaggacgtggccgcgccgctgcgaagatttctctgccagggaatgtggaccaggattccagggagaacgcagctgcac

SEQ ID NO: 231741 - DNA, 122 bp, Homo sapiens
ttgctgtgggtctgtcactcatgccttccccagccagagtgcagctctcattgcctgccccgcagctccctgtgtgctgggagtcagattacggccacttgtctgattgggtttttggagtg

SEQ ID NO: 231742 - DNA, 122 bp, Homo sapiens
ctccagacccgccatcttccttctagcaacaaactgtggcgggggcgggggcagtggccacgtgacttacccctttccgtgcggtgctcggcgccgcgcaccacccccggagttttattatt

SEQ ID NO: 231743 - DNA, 122 bp, Homo sapiens
tgagcggatgggcgtcttccagaacgcactctgcaggcactcggcaacgtgaagtgttcacgtcctgtgatgcagcctctgctccaggccacttccggaactgcgagggaacagctgtgggc

SEQ ID NO: 231744 - DNA, 122 bp, Homo sapiens
atggaaagatctcaatgtagtctacttaccaccaagtgtctacttgatctcctaaagatacggtgtcaaattaaggaccagtctcacaggttaagcattcagatgaggcagtaagtaagtag

SEQ ID NO: 231745 - DNA, 122 bp, Homo sapiens
gaaacacagcctaaagggtttctgggatctgggaggtgagacagtagtcctggtattctccgggtgttgacaatggtaactgactcacaggtggccttgtatctcaaagcatcagggggtca

SEQ ID NO: 231746 - DNA, 122 bp, Homo sapiens
agtttctgtagacaaattgtaggaactggcacagcaaactggccacaaagacgttaggggcgtggacaccagctgcttgagctgcctgctgtcccagactcccgtatgtcatcgcgcagcgt

SEQ ID NO: 231747 - DNA, 122 bp, Homo sapiens
aatgactctttggatttttcaggaaatgtttcaagccttcttattcagacaccctttcagcgtccagtgatggacgaagctgtgccctagagtcccaccttcccaaacagtgggcaacttgc

SEQ ID NO: 231748 - DNA, 122 bp, Homo sapiens
acgaaggccgcggttccccttgacgacattcagcatgcatgtgagtgttcagtggaatgccgtcttcccttgcgctgtaaatctgagagttgcaagggccgccaggggactgcctcacctca

SEQ ID NO: 231749 - DNA, 122 bp, Homo sapiens
gtgcgccaggcagtgcggctctaccactcggtgggtgttaggtgccccccggcaggaaggcgggcacgtcagtagtgctgggtgtttcggataaccatgtccagaacagtatgctaagcctc

SEQ ID NO: 231750 - DNA, 122 bp, Homo sapiens
tttaaaaaaaaacttatatctatccttacattcagtgtaggtggaggctaatggtcataccgtaattcaaagccagaatcatggaactgtctagcaaaatgtgttcagcaaaataaaaccta

SEQ ID NO: 231751 - DNA, 122 bp, Homo sapiens
ccttgcaggggccggggcgtggcagcccctttttctgagcccagttgtcctttttcctcccgcctgtgacacgtgcattcatcacgctggcccaggacccgctggagtttattcttcccggg

SEQ ID NO: 231752 - DNA, 122 bp, Homo sapiens
ctttttccacaacgaaaagcaggtttttaccgctctatctgcaaaaggcagagcactgcccgtgaaccctgtctttctcgtcctttaccacgagtgaccagaaccacgtggggattctcaac

SEQ ID NO: 231753 - DNA, 122 bp, Homo sapiens
aaagcaaacgtgaataagcctgccttttcaaaagcttttgtataattgctagtaaacgcacgatttccactagacttttttgaaatattgaaaatagcactggctctgccattggcccttta

SEQ ID NO: 231754 - DNA, 122 bp, Homo sapiens
agggtaatcagaggggtggcaataagataacttattttaataacctaaggtgagaggtttcgggattctggatgacaatgtctcggtgccctcaaggccactgattcctcgccacacagtct

SEQ ID NO: 231755 - DNA, 122 bp, Homo sapiens
aggggccacctctctgtggggtttccttagtcaggacaaacagggggctctgtagagccacggcgtgcagggggctggggtacgggtacacctccctgccgccctgggacaccaggtcctgc

SEQ ID NO: 231756 - DNA, 122 bp, Homo sapiens
tccaggaatgtgtatgtctgtgtgaagtcctcaaggtcattagatctcatgaatttactccggcatttccatttccatgcatgctttttccatttagactaaactagcgcttggggtgcttg

SEQ ID NO: 231757 - DNA, 122 bp, Homo sapiens
gttgtttttgaggcatcagagggtgtgcgtgccgccacatgttgattggggtggcttctgcgttcagcgctgccgcatcccttcacccttccccggcacttcagaattgacacttgagcttt

SEQ ID NO: 231758 - DNA, 122 bp, Homo sapiens
cttcagtaactggatcatctcagcatggggcatgctgggcagtcacagccaaatgggagccggcatggctggactcagggggatctgaaaaagtataaaaccacttatgtgctaacagtgct

SEQ ID NO: 231759 - DNA, 122 bp, Homo sapiens
tagaatgtaaacactgagtaatccattccctaggtaatgagtccaggaatagttgagagtcgattttgaactaggcagtccctgtggttgctttgcttagtttattagattgcttctcaaac

SEQ ID NO: 231760 - DNA, 122 bp, Homo sapiens
aggaccaagagagtgagtttggtcagcacgtccagcacgttcatcaccacttccgatttgcgcctttggcccaagaaatagcgctggtagaggcgttccaaatcccgagatttgaaggagtt

SEQ ID NO: 231761 - DNA, 122 bp, Homo sapiens
acagtcaccccaaatacctgtcaattaggttgagctgtgtgaagcgcgcagaaggttctccgcattcgtgcgggctgctgtctgctgctgtctggctaccctggggcctcctccaaacacgg

SEQ ID NO: 231762 - DNA, 122 bp, Homo sapiens
ggccgggtctttgccgccttatccccgcgatcccaggagaatggagggagggcgagcgggcggtgtcatggggtgtggggacacatcccagtctgaaaaccaggagatctggggcgaggcgg

SEQ ID NO: 231763 - DNA, 122 bp, Homo sapiens
gagcgtgaggccgtcgacggacacctcgagtcgctctgcgttcagcaccgccgccatctccggctgctgcacctcctcagcggggacagacggcagccacgtatcgacttcctgctgacctc

SEQ ID NO: 231764 - DNA, 122 bp, Homo sapiens
catcttcgttttgaacagctttaatcagcaagtgattgtcttccactgcagcccttctaccgctggaggacgtgggtccctcctgggggttgttatgatccctgctctccatgacggtaaat

SEQ ID NO: 231765 - DNA, 122 bp, Homo sapiens
ctgtctgcctcacttgctgtctctcccacaatctcatcaatctgggctgatgcctcatgccgggcattgtaataggcctttcgtagacgacaaacatctctcccaactggggatttacgccc

SEQ ID NO: 231766 - DNA, 122 bp, Homo sapiens
tgctcgaagtcacacagctaataaaatgcagtgcccttaaccactgagccaggctgcctccgccgtttaaccaaaggattagtagtgacagagctgaaaccgcagtaaaaactatgaacggc

SEQ ID NO: 231767 - DNA, 122 bp, Homo sapiens
acaggaaaaggcggattgaggctgctgggtcagccttgatcgcacagacagagcttgtgccggatttggccctgtcaaggggactggtgccttgttttcatcactccttcctagttctactg

SEQ ID NO: 231768 - DNA, 122 bp, Homo sapiens
tactcagacagcttccgcgcctgccccgcccctccccgcctcccgggctgggcctgggaccgcggccggcgctaaccacagaactgagctttaagactcaaataaacccaccgtcctctcca

SEQ ID NO: 231769 - DNA, 122 bp, Homo sapiens
gatgtcttcattagacacatacctagcagaagacaaaacagattatacacaaaaacagttcgtttaaagtcaatttttgtcaggaaaaaaaaattgtgttgcttggcaattaaaacaagtag

SEQ ID NO: 231770 - DNA, 122 bp, Homo sapiens
ggaggcccggctggaacggcacggggcggggcgccaaggcttggcggccccgtggttgggcgtcccggcagccgcttgagggatggggcggggtcggccgggacctcctccttcattccctc

SEQ ID NO: 231771 - DNA, 122 bp, Homo sapiens
ggctctcccgtcggaggcggggccgccgcccagggtgtgcgactattgggtgacggctgacgcgcaccgccctcctttgcacaccgcccgcagcacctctcgacgacgcaccgcggcgctgc

SEQ ID NO: 231772 - DNA, 122 bp, Homo sapiens
ttacatcagtttatttctcagcctctgccgaatcagttggtacttttaaagacagcttttcgaatggaaattcaaatggaaacttctctcattttaaaatataaaaggctaatgacttagcc

SEQ ID NO: 231773 - DNA, 122 bp, Homo sapiens
agttctcagagaacaccggagactcccccgacttgcctgtatcaagtttctagaggtaagcggtgaaaatccacaatatgaagtcactctcagacgggtcccttctcttgtcacactccact

SEQ ID NO: 231774 - DNA, 122 bp, Homo sapiens
aagtcaagcgccctcgaccacattcagaactttcctgtctcagagcttggctatttgcatcgctggatataatcacggggcaaattgtgcaagaatgagcaatggaagacgtctggcgattg

SEQ ID NO: 231775 - DNA, 122 bp, Homo sapiens
agtagctgggaccacaggtatactaccatgcctggctaacttttgtattttttgtagagacgggattttgccgtgttgcccaggctggtctcaaactcctggcctcaagggattcacctgcc

SEQ ID NO: 231776 - DNA, 122 bp, Homo sapiens
gcttgggggaggtttacattttaacttaaggctttcacaagatggaagctgcaggccttccggccctagcatggcctcgtgtggtggtttatttggccctaaataacggcagctgcacctag

SEQ ID NO: 231777 - DNA, 122 bp, Homo sapiens
gctcaggggtgccgacctcgggctctagttagccgaatccctacggcggactgcccccggcgacgggggaagagcccgaagaaagctggaccccagccccaaacacctgctcgcacagacac

SEQ ID NO: 231778 - DNA, 122 bp, Homo sapiens
tgagggggtttcacacactgcggtaactaaggcctgagccccacccactctccacccctgcgcttagtcccacttgacagatagaagatcctattgtccctgagcactgttaagggctgaac

SEQ ID NO: 231779 - DNA, 122 bp, Homo sapiens
atgaaggactgattgggcttcagcttttattcactcatttatctgctcccaaacatgcatcgagcatctcgagtggagccctgtgtgcattctggtaagactggatggatcaagggatttcc

SEQ ID NO: 231780 - DNA, 122 bp, Homo sapiens
ttggtaaaactgaccctgagtccctgagtctgtgctgggagcggtccgtgttgcctcatccggtcctgatgaggctcacagtgcctattcccccagccaggaagaggccagaacaagcctca

SEQ ID NO: 231781 - DNA, 122 bp, Homo sapiens
gacggacgggcgggtgggccaatgggctcgggagggcgggcgaagggtggccaatggcggcggcgcggccgggggtggggcggcgcggcggccctggtggtgcgggaagcggcggggcggcg

SEQ ID NO: 231782 - DNA, 122 bp, Homo sapiens
aaacactgatttctaggatatgctggtcaataaaaatagcctaagcgactccctttcacccgccccatctgccacaggcttgcctattgcctctgagtgacagaatcaggctaggtggagtg

SEQ ID NO: 231783 - DNA, 122 bp, Homo sapiens
gatatgtcacgcatttcataactcatgttcagatgttaatttacacaagatagggaaccacgggagcaaggtcagaggttttgcctttattagggcttcagttagtcacaggtgaactttgg

SEQ ID NO: 231784 - DNA, 122 bp, Homo sapiens
aagacaggttagcgtaagaaacttggtatcaatgagaatcatgtaggcaagctaagagaacgggccttggagattggcaggatccagggtagctctaaggactagaaagtgggagccaaagg

SEQ ID NO: 231785 - DNA, 122 bp, Homo sapiens
aggctggagtgcaatggcgcgatctcggctcactgcaaccttccgcctcccggattcaagcgattctcggcctcagcctccgagtatctagaattacaggcgtccgccaccacgcccgggtt

SEQ ID NO: 231786 - DNA, 122 bp, Homo sapiens
taattaagtgatacttgatattgctctagacggtttcttccacttccttacggtttgtcacgtgcggatggctttgccaaagccatcctgttaatagttgatcacatgttgatgagaacctt

SEQ ID NO: 231787 - DNA, 122 bp, Homo sapiens
cgagcccagcgcccctccagcccgagtcctggtcttgcctgcgcgtccgcccgctcccgccgccgccgctgcagtctctcgggcagagcagagaaaagtccctgatctcggggggcggagcg

SEQ ID NO: 231788 - DNA, 122 bp, Homo sapiens
cgcggcacccccgggatgagccccccacagaggcaagcccactagagctgagattcactccgagttcctgagcgcctgagccgcgggcactgcgtctctgcagcttccagccaacacctgcg

SEQ ID NO: 231789 - DNA, 122 bp, Homo sapiens
tgtgcctcccattggtggaacccaactagaagccagaaggtaggggagcttgtggatatacgccatccagatcagagcacacttggaaagggtggaggatggatttggagcacaaagggaga

SEQ ID NO: 231790 - DNA, 122 bp, Homo sapiens
gggcagagaagcatctagaccttgtcactaccaagggtgcggctccacacccgcgggacccgagcctctagaaatgagggagaagacgactctgcctttctgcaatttagacgtcgcaagga

SEQ ID NO: 231791 - DNA, 122 bp, Homo sapiens
agcagatgtttgaccttcaggatctcttcccccagaagctatatgactgtggctcagaaccgtgtgcccaaaggagacagagaggataatttatctacacacatctgttgcccatcactcaa

SEQ ID NO: 231792 - DNA, 122 bp, Homo sapiens
gcccagcccctccacggccaccgctcacctgcgtccacacagccgcttcctttccacacacgtgatgcagcacacgctcttgtgtcttggagctgggtgattttaacaggttctcaaatatt

SEQ ID NO: 231793 - DNA, 122 bp, Homo sapiens
ttccaggttcagagtgggtagaaaagtaaacgtgagtggcagctatgagagacataatgccgcacccggtaggatgtgttccataagggcaaagtttgataaatctcccttggactcggtaa

SEQ ID NO: 231794 - DNA, 122 bp, Homo sapiens
tgacagggcaggctccacccaggagaagctggaagaatgggagttccgcggcagaggaggcggggcagggcgttcctccaaacacaggaataccacgtgcgaaaacaaaggggtgtgcgaag

SEQ ID NO: 231795 - DNA, 122 bp, Homo sapiens
cagcttctgcccgggctgtggctcccctccagccacctgcgcgtgttcgggatagaagcgcggtcaggaggggagctcagtccaccagccactccagggagagacggaaactacaaatccca

SEQ ID NO: 231796 - DNA, 122 bp, Homo sapiens
gggctccccgcgggagaatccccgagaggcagagggcgagctccccgagagcggtggccccgcagccccccctgacgccgagctgtcacctcgctggagcagcagtgcagcggctgtggctg

SEQ ID NO: 231797 - DNA, 122 bp, Homo sapiens
caatgccctgagaacgcagccgggtgctgagcctccggagtccggtagctgaatgaaatacgcagggatcaccagccggacccaaatcttgcgtccctgccagcatcctggagtcctaagag

SEQ ID NO: 231798 - DNA, 122 bp, Homo sapiens
gtgggagtgagagagtgaggacgctgggctgggggaaacgggaagccgctgcaagtccaccgcctcagctacccagattgggatctgcccaggcccgctttatggactagtgtgggcggcag

SEQ ID NO: 231799 - DNA, 122 bp, Homo sapiens
tcaagcatcactttttctttctttggagtacatcaacaaatatctttgtacagaagtcaccgaaggcccatgagttctcatgacagatgacaactggttgggtgagagcattattgaaatcc

SEQ ID NO: 231800 - DNA, 122 bp, Homo sapiens
ggactgggcgctggagtggcgagggggtctggggagctcactccctgcagaagacgtactcggtgtagctggtccagatcttgtcctcgctctggtcggtgctgctggcaaaggcgcaggtg

SEQ ID NO: 231801 - DNA, 122 bp, Homo sapiens
gacctggcgcggcagacagggctcgaagacctcatcttgattaagaaggccacaaattcgcgtttgcctctgctcggagaaatcccttaccaaggtggcacttgcagtgggcgggaccatgt

SEQ ID NO: 231802 - DNA, 122 bp, Homo sapiens
taaactgccacattgaaaagaaaaggaagtgattcattgacaggagaattcaactaattacgtgaatctagaaagcatgcagacaagtggaaaccgaagatgcagggcagaggctgtacaat

SEQ ID NO: 231803 - DNA, 122 bp, Homo sapiens
tttaagtctattaggaatcctgccaaatagtctttaaaatgtttaaatcaaaccaaaagtcgggctgaatgccccttgctttgatgttaatattgaatcctgcagccctggatgaagataaa

SEQ ID NO: 231804 - DNA, 122 bp, Homo sapiens
aatgacaacaggtcgtgggagcaacaagtgccgggctgcccggaggtgtcacaggatccgcgactgtcagcgatcccgccgccgccaacgcgcccaaaatagccggcggctgcagggcgggg

SEQ ID NO: 231805 - DNA, 122 bp, Homo sapiens
atgtaaattacatctcaataaagctgtttgggaaatccagccttcacagttgttgattcgcgtgaggagggaaggagagatggggggacgtgggacagggagaaaacaacataaatcatata

SEQ ID NO: 231806 - DNA, 122 bp, Homo sapiens
ccacgcgatccaggagtcgctgcgaagggcagcgcaggagcgggctggccaggccctacgcgcaggtgggagagaggcgggagaagaagggggcggggcgctaagctcttgtggggggttag

SEQ ID NO: 231807 - DNA, 122 bp, Homo sapiens
gtttgggagccatggagtagggcacaggaatttgcatttttaacaaattctcaggtgattcggatgccgctcctgggacaaacgtttgagaatcaattgtctagagtttcccttccctaagt

SEQ ID NO: 231808 - DNA, 122 bp, Homo sapiens
tttacagaacggtttgccttcagtacgttttcctgttttctactgagtgccggtttctaccgtgaaaatgagtaattgctgggatccataatctttatagtagtgcatgcgaacaataacag

SEQ ID NO: 231809 - DNA, 122 bp, Homo sapiens
aattgaagggataattaagaaagtgttagtcactactgaatgtagtgtatatgctttcttcggaattttaaggggggagaaaggcccattaagtcatcttaaaagggctcttgctgtaaaat

SEQ ID NO: 231810 - DNA, 122 bp, Homo sapiens
actgggggcggggctgtagcagactccgccctttatcagacaagaagagttgggcgtgtccggccccggcgtacccccggcgcatgcgctctggtgggctcgtctaccggcggctgggtttc

SEQ ID NO: 231811 - DNA, 122 bp, Homo sapiens
gggcggagtgcagaggcgccgccggcggggcggcttcgggagggcgcggcccctttaagacgccccgccggccccgcccccgagccccgcctcccgccgcccacgtgaccccggtcttgtga

SEQ ID NO: 231812 - DNA, 122 bp, Homo sapiens
gcgtaggagtaagcgtccggcgcaagaccacagcacgtctcatatgcggctgtatcggcacgcagcgatgagatgtgtaagaactaacacgaagctgcgttcctcccagtcacgcgcaggat

SEQ ID NO: 231813 - DNA, 122 bp, Homo sapiens
ggaagtaacttggggatgcgtggtcattgctgtcctgattcccggcttaggggtcttgtccgtgccaccgcaggtcctcccggggtccccgagctctgggcaggcagggctttctgaagcgc

SEQ ID NO: 231814 - DNA, 122 bp, Homo sapiens
tagaacttagctcccttttaaaaggagcacattaaaattctcagaggacttggcaagggccgcacagctggggcctgaagagcggtcacctgacttcggaactcgcaagccctttttcccag

SEQ ID NO: 231815 - DNA, 122 bp, Homo sapiens
ctctgcagggcccctaacccagctgacgccctcccttcctcccccttcccatcctggcttcggtgccagccacagactaacagcctgccaagtagaagtctccttcactcctcctctttcct

SEQ ID NO: 231816 - DNA, 122 bp, Homo sapiens
ctgcacaggaaggccgggcaccggcccaggggtgtcctcctgagccctgtctccgagccccggccagcgcccggggcaccgaggtgctcctcagcagcaccagctcccaagggccctttcag

SEQ ID NO: 231817 - DNA, 122 bp, Homo sapiens
gggtgctggacatgtgcccggctactggacagcagccagggagcaagtcacaacagaagccgagggggaggatcctgcatccccactgctccagaaggtgcatccagctggggcgccctcac

SEQ ID NO: 231818 - DNA, 122 bp, Homo sapiens
ccctgacctggatttaaagatttgcaagaagacaaattccaaacagatgcccattagggccgtgacagccgcagcttaaagataacatttacattctgccggggtttgtatctctctgttcc

SEQ ID NO: 231819 - DNA, 122 bp, Homo sapiens
taccaacgcggaaatttacccacttctgtcagaaaactgatcagccatgtcttcgccacacgtgatgccaggattcttaaacaggcccaagaccggagaccaagatgtcgacggagtgttat

SEQ ID NO: 231820 - DNA, 122 bp, Homo sapiens
tggagttcagaggcccaaaacttctcccccaaagccaagccatttaatgacctcagtttgcgtatgtgtggttgctctgggaagcccaaagcacagacctatatccctttgcagcttgtctt

SEQ ID NO: 231821 - DNA, 122 bp, Homo sapiens
aaactagttgctttctgatttcctcaaccctcttgcactggaactttgttctatattctccgcaaatcccttcttctgcaaaactctctttattcagctctcttacctaattctaagagtga

SEQ ID NO: 231822 - DNA, 122 bp, Homo sapiens
ggcgggaagaccgaggacttataagatgttacttaaaagggcttctaacggtccgagaaccgggcagggagagagatgcggaaacggtcgcagacaaagcggggcgaggttttgcccatgtg

SEQ ID NO: 231823 - DNA, 122 bp, Homo sapiens
acagccaagcttattctgtgttcctctccaccctggctgccctgttctcctatgcagggccggccgccttccccatccctacccttgtgcaaataaaacgaggactgagatttatttaaaaa

SEQ ID NO: 231824 - DNA, 122 bp, Homo sapiens
agtcccgtcgtgcagtcaggtgggcggtgtgtctttccagaaggtcacgtggaaatgtctcgggacttgggtcccggagtgcccgtgaagcgtgtttttgctcctgaggtgcattttctcat

SEQ ID NO: 231825 - DNA, 122 bp, Homo sapiens
cgctcccatcatctctgtagcagaaggctgttggaagccttagccaaagcaaaagaaccccgggagatctgtttgatttgagatttgtttaagcagtcagcacctacctgctatgaaagagg

SEQ ID NO: 231826 - DNA, 122 bp, Homo sapiens
gaccgcggccttctgaccaggaccggagcagggccccaagcccccgggcctggtgggggacgcgcttcttcccacactgtgagcctcagcagctccagccagcggacccgacggctgagagg

SEQ ID NO: 231827 - DNA, 122 bp, Homo sapiens
aggcttcaccctagtccctttctctcggggtaaacacacaacctggtggttaccgcttcacgttcagatgattttgctgattcctgtataataacctgggaagaaaaagttgaaacgaacca

SEQ ID NO: 231828 - DNA, 122 bp, Homo sapiens
ctgggggtccgggggtgggatctaggggggcccagtcccccggacttccctggctcatggcgggagaaggtgggagggagggcaccccggccctggccccggccaccactctgcagagcagc

SEQ ID NO: 231829 - DNA, 122 bp, Homo sapiens
cgttgcccgcggccccgggcgccgcccgggccccactcatcgcgccgcggcccggccacgcgcctgccccgctgcagcgaaccaaggctttcccccggcccgcccccttcccggcggtgccc

SEQ ID NO: 231830 - DNA, 122 bp, Homo sapiens
agacaccagagcagagcgtgagtaagggcaggctctgcccctgggtgcgtgctccagggccgtggacagttatgggaactgtctacaagcagcacagggagttcacattttacatttcatag

SEQ ID NO: 231831 - DNA, 122 bp, Homo sapiens
ctttatcctcacgttgcccagtaccggctgcgaggtgcgcaagcaggggaacttgtactgcgccaacagaacgattccgagagccgggcctagtaacacaggggcttttcttcagaacggtg

SEQ ID NO: 231832 - DNA, 122 bp, Homo sapiens
acttatgctctgtcaccctttggagctcttcagaggtgggctagtcccagtagggcttcgcggggggcaaggaactaaagggtttgggagcaataaataacagagacttttcctttctctcc

SEQ ID NO: 231833 - DNA, 122 bp, Homo sapiens
aaaacacaaactttagggtaatctaaacggacccttggctacctagggggtcggatctgccgtggctaccctttcccccaccctgcccccaccagaggcatgttccaagcaggccaaggtat

SEQ ID NO: 231834 - DNA, 122 bp, Homo sapiens
tttgccacttaagttcccttgggaactgacacaaatagcaaagctaagaggcctggctcccgctacacagctataaacatcacaccagattctgtttgcctgaaaactccttctgactgagt

SEQ ID NO: 231835 - DNA, 122 bp, Homo sapiens
gcggcgcggcggccgcttgaaaagctagctgacccaggggcggccacaggagctctggcccgctgaggctggcgatgaggccgcagggagggttactgcgtgcttgtgacagacgattttta

SEQ ID NO: 231836 - DNA, 122 bp, Homo sapiens
ggggctgcccgtgtcgcagaagtcctggtccattatcgccacggccgtgctgctgccttgcgccttccttaagaacctcaaggccgtgtccaagttcagtctgctgtgcactctggcccact

SEQ ID NO: 231837 - DNA, 122 bp, Homo sapiens
ctctgggcctgcatgacgctgcgctcgctgggctgcgcgtagagcacggccgcgggccgccggttcagcatgatgtgcaggtaggtctccttgtagttccaggtgtgcacgttgaggctgag

SEQ ID NO: 231838 - DNA, 122 bp, Homo sapiens
ggactcgggaacacctgcctaccctagaagaggcggagaataaccccgtagggagttaagcggcctctgcctacagcgttcctcccgcctccacggcgccgagccctgattgacgttcagcc

SEQ ID NO: 231839 - DNA, 122 bp, Homo sapiens
tgctgcagggtgggccgcgcgcctgccccccactcgctaccggctgggcgcccgcggaggcgctcccacctactgcattacgggtggtgctgaaccggacagctccctgcgccgcccgctcc

SEQ ID NO: 231840 - DNA, 122 bp, Homo sapiens
atgtcctaggccgttgagattcccatctctgtaatatcagcaaccatactgtattgagaacgtaatactgataacactctactggcagtaacatgtgcatgaataattgtcttcttccttac

SEQ ID NO: 231841 - DNA, 122 bp, Homo sapiens
ccggggcggggacaagaagtgtgcatgcggattggttcctcgcggctgggggcggggccgcgcgggccggcggaagcggcgggcttcgggaggggcactgcgacggcgttgactgagggggc

SEQ ID NO: 231842 - DNA, 122 bp, Homo sapiens
ctccgcgaggcgccaatcagagctaagcacaatgcagggggcggggtccctctgcagctccgcaacctgcaggagaagggattggttcatctgcattccaatcgctctgcctgccctcttta

SEQ ID NO: 231843 - DNA, 122 bp, Homo sapiens
ctaaccctaagggcttcccttgtgttgggcaacgtatccttcaaaaggcagggctgagttcggaaaaggcatcctgctaagcccccagccctgcacccagcacccacaactccagacccctg

SEQ ID NO: 231844 - DNA, 122 bp, Homo sapiens
acttttcaaattaatgaattaggctttctgactatgaatatgggcttgaaatctcaggcacgtcttgatctctgttacatgaaatacaatcttctagaaaacaaagacatagttgacaatct

SEQ ID NO: 231845 - DNA, 122 bp, Homo sapiens
cctccgccggacacccgggcctggcgtcccgcctgcgccccgcaccctccgcgcctccgtcgcctgcctcctggggcccagagcccggccactcccgctgcccgcctcacgaggggcgcttg

SEQ ID NO: 231846 - DNA, 122 bp, Homo sapiens
tggaccccgcccccggcccccgcaccacccagcccgcaactctgcagctttcttcgcccacgccgcacagcctccaaaccagcggattccgcccacgttgccagcctaggccccccaccacc

SEQ ID NO: 231847 - DNA, 122 bp, Homo sapiens
cccctgtcatcgttaatgtttgctacacagaagcggtgacagaggctgctctgggagcctcggggcccgccaacgtctgcaaacaggaggctcctgccctctgtgcgttcttcctatttgaa

SEQ ID NO: 231848 - DNA, 122 bp, Homo sapiens
ccggggcgggtcaccgggtgaggaccggggcggagggtgttaagttacagggcaggagcccgggtccctccgcgggcaggaaggggagggcccatcggggctaggggaaccccggcgcagac

SEQ ID NO: 231849 - DNA, 122 bp, Homo sapiens
aaggacctggggtgtaggacccatggaaggctctcaaatagcagagctagaaacactggccggtgtcgtagactgtacaaacaaaatcttttgaccctcataaccgtcctaacataagctgc

SEQ ID NO: 231850 - DNA, 122 bp, Homo sapiens
ggggagggccggtgtaagttccaagctgaaacgagcatttttataacagccccgtggcgtcggcaccaccgcatcccattccacagatagacccaggctggagaggtgagcaaggccacgtg

SEQ ID NO: 231851 - DNA, 122 bp, Homo sapiens
gcaaatatgcacggagtaaaattgcaatctcctgaaataggggggttttcatggaaacgacgttggagagctgctgtcatcacaggcagagccgttgtgcagggaggatctatcagttttag

SEQ ID NO: 231852 - DNA, 122 bp, Homo sapiens
ccccgcccctcaggctccgcccgcccgagcccggcagggccaacccctcgaggccccgtccgggtcggccctccgctgccaccgcctcccctgaccctacgctccgggccgcctcggcggca

SEQ ID NO: 231853 - DNA, 122 bp, Homo sapiens
gggcagctttcgagtcattttcagcgagtgcaaagctccctcgtcggaacggtcggagtgcgcggcgagcgcggggcctgcgcggcttttatctcctcagggcgttccagggcggaacgtgc

SEQ ID NO: 231854 - DNA, 122 bp, Homo sapiens
taatagttcctctattttccaatcaacaaactgaactatctcagagctcaagcggaaggccggactacaagtcccggcatgctccgcagggtccccgggcgcccggccaccgtcgtaggtgc

SEQ ID NO: 231855 - DNA, 122 bp, Homo sapiens
ccatcccaggagagcacagctctgcttttctgcactgtggccgcagctcaggtgtggctgcgttttgtcctttctctgtgcctcatgtgcgtttctctccacgcaggtgtttgtagccaatc

SEQ ID NO: 231856 - DNA, 122 bp, Homo sapiens
aacctttctagaggagtttttcttgttaagcatctagttatttgactgaacaactcaaaccgcgagagggtaacaggaataaatcctagtgtctgctgccaccttgtggtgagaagttccat

SEQ ID NO: 231857 - DNA, 122 bp, Homo sapiens
gccgggggctcttcaggctcagggcataggcaggcggcggccgcgttttctggagacggtcgctctcggagggaccctgcaattgcccgagaccgagagtgggcgctgcctgaaagtttgtc

SEQ ID NO: 231858 - DNA, 122 bp, Homo sapiens
cgcctagcatcgaatttggtgcacaagaggtgcacagcaaacgcctgtggaatgagtgaacggtggggacggtcagggctgcccctgcttgcacccgcgggaggctggggagggcaggaagg

SEQ ID NO: 231859 - DNA, 122 bp, Homo sapiens
ctgcacatcatcctcttccagccgcagaagaacgtggttagccaccgggcacccaccagccgctttggcagtgctgctgccagggccagctccagccttggccaaggtcagtgtcctaagca

SEQ ID NO: 231860 - DNA, 122 bp, Homo sapiens
ggccccggcccgggagcctcgtctttgcgggcccttggccgggtcgggttcccctgggggcgcccagcgcatggtccgcggggccggggccggggccagagcaggcggtgccgagggggccg

SEQ ID NO: 231861 - DNA, 122 bp, Homo sapiens
gcgcatgatttgatggaccctgtaagagccccttccctctaaaattgttttcctgtcattcgtccatgcctaaaattctccgataaagcccattaaataaaaactcagtatttttggcctaa

SEQ ID NO: 231862 - DNA, 122 bp, Homo sapiens
cggtgacgcgcggtcctcacgtgacccggagctgcagagctacgcagccttcgttgcagtcgtcactcgcatctggctaccagctccccgctgccctgcgctcggcgggctggcatcgggcc

SEQ ID NO: 231863 - DNA, 122 bp, Homo sapiens
ggggaccccagagctgggctagtcaaactcccagaggaaagagactgcatggaccttgagcgccacacatcactctgaccagggtgcttatgtgtgtctcacgagctgtgtaagcctgggga

SEQ ID NO: 231864 - DNA, 122 bp, Homo sapiens
tagtggacgctggcaccctgcttcctggcagaactctagagaggtgacaggacttttgatcgggatagtgatgggatactgggaaaatgactaccaaggccttgaagccacagcgaaaatcc

SEQ ID NO: 231865 - DNA, 122 bp, Homo sapiens
ggcgacgaccagctggcagcgaagtaagcaccgaccgaggtggcagtgacaatctaaatccgcagctccagcgccggccggaccctaggaggcagcctcaggacggcgcaagtccccgcctc

SEQ ID NO: 231866 - DNA, 122 bp, Homo sapiens
ttggaaacatctcttagtggctgcacgcctcagcgtttccacccagtccaaatggaatggcgctgcggctgctatcggcaaagcaccttgagatctgtagatggaaggctctccgcggatat

SEQ ID NO: 231867 - DNA, 122 bp, Homo sapiens
atgtctgaggagcagctgtcccgctacgaagtgtgtcgccggtcagctttcccaagagcacgcattgcgggtctgatgcggtctatcactggcagttcggtgtctgagaacgcggccattgc

SEQ ID NO: 231868 - DNA, 122 bp, Homo sapiens
ggccgggacgcccctctgggaggaacgcgcggccacccttggaaacctgtaagtgatccacggtccaggtgtggaatgctcacagttgtcactatgatgaatgatgaaaaccctattgctgc

SEQ ID NO: 231869 - DNA, 122 bp, Homo sapiens
aatagcatggacagaaaggtgctgcagctccagtcggccgcatccgtgtggctccagcaccgaagaggagacgcctccagacttgtcagccaccaagaccttctcttcggaggctgtgaagg

SEQ ID NO: 231870 - DNA, 122 bp, Homo sapiens
gggagggagggagcgagcaggcgaagccgcggaggacggggtgaagatggcggccttctccggtgcgtttgtggaaactctgggggtggtggggcggcttgttgcacgcctcagccctgggg

SEQ ID NO: 231871 - DNA, 122 bp, Homo sapiens
aagggggtaccataagcacccgcatcttgggagcatggcttctcctcctgccaggttaggcgagtgggctgggggtcaaggggagcctcctgtgcatggatgccctggcttcctgggtgtgg

SEQ ID NO: 231872 - DNA, 122 bp, Homo sapiens
cgcgcctcttagcgcgccgtgtacgcgcctggaggcagggaccggggacgcggagctgggcgggagactcgcgggtcagggacgcggggtgaggctgggggtgagagacaaggctggagtcc

SEQ ID NO: 231873 - DNA, 122 bp, Homo sapiens
atgacatatatattttgatcactggcactgtgttttaccaaaatacaaactgtttaccatcgcttaaaattgggagctctcatataaaatttcagacttctggcctcatctttcatacataa

SEQ ID NO: 231874 - DNA, 122 bp, Homo sapiens
tactgaaccccttcggcaagcaggggaaagaccctcccgcctttccgtacgaagacatggcgctgccctatattgggctggcgcctcccggccaagagcagtctcctccttcctgatgctga

SEQ ID NO: 231875 - DNA, 122 bp, Homo sapiens
gtgtatgtgtggccggggtcttgccattggcgtcctggctctctgcagctgggactgcttcggttcttccccgcttttcctatcccacttcggttcagccctactcccgcccgcccctagcc

SEQ ID NO: 231876 - DNA, 122 bp, Homo sapiens
caggataggaattaatcatggagaattttataaatctctttgtggcctttacgcgtgccacggccacatcaaaacttagttatttctagtagcaactgacgattgggagctcttaccttttg

SEQ ID NO: 231877 - DNA, 122 bp, Homo sapiens
gagtacatcctcattttgtcttctcaatctgttcacccagcgcctgtgacccggacccagcgcgcgactcacagaccccggctctgggcacccctggtgagtgccttctgccccagagctcc

SEQ ID NO: 231878 - DNA, 122 bp, Homo sapiens
cttcccatcacacctagtatataattcaagacactctctccctcatcatggcctacaaaacgctacagaatctgaccctcctgactttccattgaccctccctttcacctccaccctctctc

SEQ ID NO: 231879 - DNA, 122 bp, Homo sapiens
ggggcccgcccctttcctaggagctgtccgttcccaggacaacagtcaacacagcacaggcgggagttcaaaacgaaactgggctcaaatgctctccccagcccggagagccctgtccccat

SEQ ID NO: 231880 - DNA, 122 bp, Homo sapiens
atcgcacagcgactagcaccgattgacaagctccacggaccagccacttgcgcgtatgggcgggactaagctagccagagtctagaagcccgcgctaagggttgctagggacgcaccaaaca

SEQ ID NO: 231881 - DNA, 122 bp, Homo sapiens
cacaggactgggaggtcaaatctgccagggtggcccagcgcagcaggccaggtagcactgcggggcagggccttgtcccccaggcacccagggcctgatgggacccaccggggtgcccagaa

SEQ ID NO: 231882 - DNA, 122 bp, Homo sapiens
tccctgtgcagcccgagggacccgcgagactccagtgatcatagaggtgccagcggcacccggctccaatcagctccctctagaggaagttgctctgtggccaccggatgcagacgcacagg

SEQ ID NO: 231883 - DNA, 122 bp, Homo sapiens
tttgccgtctcctaaatgaaggagggaaagggctagcacctctcaatctggtcacctacacgactctgaatcacaagggagacaatggaaagggggaaagggcgaaaaacgattcttaagaa

SEQ ID NO: 231884 - DNA, 122 bp, Homo sapiens
aagaattaggctcctaactgtaaggaatgcagaccatctacctacctggctacctcaaatcgaagataattttctttcgttttatacctccctctacatatcgttagcactgaataaacacc

SEQ ID NO: 231885 - DNA, 122 bp, Homo sapiens
aagggatgtcccctttattgctgcaaactctccccaggtaaacagtcactgctccataaacgtgaatgccctcaggaggctagaaacatgaggaagattttgtccgttcagcaactctcagt

SEQ ID NO: 231886 - DNA, 122 bp, Homo sapiens
tctttttttttttttttttttttaagagacagggtctcactatgttgtccaggctggtctcgaactcctgcgctcaagcagtctgcccccctcggcctctgaaagtgttggaattacaggcg

SEQ ID NO: 231887 - DNA, 122 bp, Homo sapiens
ggtgctctcaaagcccccagcaccaacatcttatgaacacaaacagaagacgcacattgccgtccctggcctcctgcaatagatcactgtcagttttctttagtagggaaaaaccaacagat

SEQ ID NO: 231888 - DNA, 122 bp, Homo sapiens
agggcgccgcgagctccccggatgcactggtcccacaggccgtgcccgagtggagcactgcgaatggggccaagaaattttggcctttctcgccggacctggctgcctccgcgggcctctcc

SEQ ID NO: 231889 - DNA, 122 bp, Homo sapiens
tgtgacagagaagaacatcatctcctaccctgaatgcatgactcagctctacttcttcctcgtttttgctattgcagagtgtcacatgttggctgcaatggcgtatgaccgttacatggcca

SEQ ID NO: 231890 - DNA, 122 bp, Homo sapiens
agctctctgcccacagctgcatacaaggctagtgaggaatcttaacaagcttaaaggggccgtatttcagatactccagaaccaaggtgggaggaaataagtattttgagcacttactatgt

SEQ ID NO: 231891 - DNA, 122 bp, Homo sapiens
gtgggtaagcagtttcatgtcgccgcacaaactctcgccaggccggaaccggaaaaaggtcgtcctccgctgcctcacttccggggatgctcctctcgatgctattggatagccaggagaac

SEQ ID NO: 231892 - DNA, 122 bp, Homo sapiens
tccaggttccccgaggttccccgtggtggttttgcacaggctatttaggcacatctcggccgccgtggcggggcacggctcagctgttgcggggcggggccttcgcagagcatggcggcggg

SEQ ID NO: 231893 - DNA, 122 bp, Homo sapiens
acagggaaatctttctggaaccgggcaccaacttgcgtgtttgttttcatgctctttgtgcggggattagctgtcgtgccgggcctgaaaatgctgcgagcgccgggcgacatctaatccag

SEQ ID NO: 231894 - DNA, 122 bp, Homo sapiens
ccggggggatcactgctgttgtcccccacccagatctcctgagggtccggcaggaggtggcggctgcagctctgaggggccccagtggcctggaagcccacctgccctcctccacggcaggt

SEQ ID NO: 231895 - DNA, 122 bp, Homo sapiens
tctgctctgatttgctacataaagttgtataatcacctggaaatatgcactgtgctgccacgtgattttcaaatgcaaatgagcaggttaacaaccccagtgttgcaatgttctagctgtaa

SEQ ID NO: 231896 - DNA, 122 bp, Homo sapiens
attcaggggcatgcaatctagtaggttaggggacaggacagacacaccatgataggtgatcgagaccttttaagagcagtgtgatgaaattgctatgggaactgggaggaaacattttctag

SEQ ID NO: 231897 - DNA, 122 bp, Homo sapiens
agcacagtgaccaccccttgcatcagcacaggtgttgcctcaagcatttctgcagcacaacgagtggtacctgcatgggccccagtgggtgtcagcaggctttgagggcatcaggtgccccc

SEQ ID NO: 231898 - DNA, 122 bp, Homo sapiens
agctggatcttgctggggtcgaagcagttggattccatgatgggaaggccattggcctctcggtatttcacaagcctctcagcttcgcggcgggaccactctttcatcctggtagtgcaaat

SEQ ID NO: 231899 - DNA, 122 bp, Homo sapiens
gtccccggtggccctgagtggctgcggcgcctgagccaggcccggcctggccgctcccagcgccctgcaccgcaggcccagcgctcgccccaccgaaattgccgaacctggttcacacactc

SEQ ID NO: 231900 - DNA, 122 bp, Homo sapiens
cctcagtggctggtgggggctggtgggctccctggggcagtggttgtgactctacactcgcgtcctccgcttctggaaactgaggctgcctggggtgggcgcggggccaggcaaggttaggc

SEQ ID NO: 231901 - DNA, 122 bp, Homo sapiens
agctttcttcctcaccagtgggctgtgcttgttccatttctgtacacccttattttataccgtttttcttcaacaatggcgaaattgactgtagtgctgaaccaaaagtatccctttccctc

SEQ ID NO: 231902 - DNA, 122 bp, Homo sapiens
ccggcaggtttagggtaaaggggcgctccgctctctccgcgcgccccctgcagccctggacgcagcacctccgtttgggacgccctacgcccaccttaacttgaggctcccatccacgcagc

SEQ ID NO: 231903 - DNA, 122 bp, Homo sapiens
ggcagccgcgcggcgtcttacttttctggctggagtaacctggataatagccatagtagccggtgatccgcaggatccggtcctcgatagtggccaccccgttgggggccgccttgacatcc

SEQ ID NO: 231904 - DNA, 122 bp, Homo sapiens
tgcagagattagatacccctctgggagtactagaaatgcagtatgtcaggtgaattttagcgaagcctgaattgctaaccctctgggttccccagcccctctaagctttacaactgctgagg

SEQ ID NO: 231905 - DNA, 122 bp, Homo sapiens
caaaggtgaggaactctcattgttcacttggtttctgtcccacctcgtgtttaaggtatccggtctaaaagcccggaggagagccgaggtgtaaggggatagggagaagggaagagatgggt

SEQ ID NO: 231906 - DNA, 122 bp, Homo sapiens
gttgccctcactcccacttcagtgctctgtccattaagtactgcccaacattaaagggttcgtggttaggagtatcctcaaaactgaacccatgtggaacttctggattagagctagggtcc

SEQ ID NO: 231907 - DNA, 122 bp, Homo sapiens
gcagaggcaaagaactttcactgcaaggttcacaatgtagctggcaagagaccacaacatcggttctctgcagttatgacaaatccacaaaagggaaaaaagaggctagcatgcccagttct

SEQ ID NO: 231908 - DNA, 122 bp, Homo sapiens
tggccgacttcctcatggcccttaaacacctttgaacacattttcctgcgcacagcgggccgttgtcctgcacagcagcccgaccacccactgttgcttgctgaccaaacacgggccgggag

SEQ ID NO: 231909 - DNA, 122 bp, Homo sapiens
agcccagaaaatatagggcggctgttcactaaaatctggggctcccattccagaaaggctcgtgtcaagtcgacatcttaggaacttcacaagggtcgcggaggcgggagatggcggcgcgg

SEQ ID NO: 231910 - DNA, 122 bp, Homo sapiens
aatatgaatatataaatgcttagtcaacattttgaaattttaaatcttcataatcctgtgcgtattttacacttacagttcatttcagttggaactagctagtgggtaggtgccctattgca

SEQ ID NO: 231911 - DNA, 122 bp, Homo sapiens
ttcctcacctttgcctcccggtccttccgaagtcgggcggggatgccgccccaggtgctacgacaagccccagggtgccggcaccagccagcggtgccgtcgctcaagcagccgcgcgcact

SEQ ID NO: 231912 - DNA, 122 bp, Homo sapiens
cttacatccaaagtgtccttgtaagaaaaagagaggccacgcagagacccacagagaaggcggccccgtgaccacggagacacagaggttggagaatgcagctccaagccaagaactgccca

SEQ ID NO: 231913 - DNA, 122 bp, Homo sapiens
actggcagccccccgagcgagggaaggaggtgagggtgaggatggaaggaacagacagaccggccaatagacccaccccaacaacccaaaccaaaaccctgagcccgggggaaagacgcgag

SEQ ID NO: 231914 - DNA, 122 bp, Homo sapiens
gtttcaccttctgaatcgcagcgggagtgatctcccccttgcctcgctgcctcggggccgcgaaagccacagacatgttgccgccgtcaccactatcggcaagtcccgagcgctccgggtga

SEQ ID NO: 231915 - DNA, 122 bp, Homo sapiens
gcctctctgctgatgacaggactctgaccccagtctgcccccaggaaggggctatagaaacgaaaggggcctgaatcggcgctttcgccgctccacggacctcgaatgcagcaggtaaggaa

SEQ ID NO: 231916 - DNA, 122 bp, Homo sapiens
gccgcagctgcatggagtgtgcgggaaaaacgtggggccaactccaaacgctgcgccttccgccaggcccttggcccggaggggcacggacgggagccaggacccccactctggttgagggg

SEQ ID NO: 231917 - DNA, 122 bp, Homo sapiens
gcggccgcgtgggcgtcttccccagcaactacgtggcccccggcgcccccgctgcacccgcgggcctccagctgccccaggagatccccttccacgagctgcagctagaggagatcatcggt

SEQ ID NO: 231918 - DNA, 122 bp, Homo sapiens
ggattacaggtgtgagccaatgagtccagctatgatagttctttaactgatactcatggacgcctggttatgtggaagagtttgaatgtcagtgaatcacataaaattcttgcagaatttag

SEQ ID NO: 231919 - DNA, 122 bp, Homo sapiens
taaggacactcatgagaaaaacctccatttatacaagaggaacaggacccttccttatctcgaggatgatgtcccgcaggagacgcctgctctcctccagacaggctctagggctgttcatc

SEQ ID NO: 231920 - DNA, 122 bp, Homo sapiens
tcttcctgccctggacagagagttgggtcatgccaggctgccagcgtggaaaaccggccacgtgcaggtctggggctgggcacacacagggtcacacccaggaagggataagctatgcattt

SEQ ID NO: 231921 - DNA, 122 bp, Homo sapiens
atagcattttacacatttgaaaaggctataccaattcaaattgtaggtaaaatagagtatcgaatggcttggaatctggttgctcaatggcaggctaagaggagaaaggtacctgggagaat

SEQ ID NO: 231922 - DNA, 122 bp, Homo sapiens
acctgctcatacttctccagctccgagtggtatatgtgacggatctgggcaagtttgctgcgatagtccgagtgttcgatggagttgtcaggggacacaccaccaccagaggctgcagcggc

SEQ ID NO: 231923 - DNA, 122 bp, Homo sapiens
ctcttcgcgcgcagtcccttagggggcgcctggaagcctggcgcatgcgccctgagggctcgctgacctaccgggtgccagagaggctgcggcagggtttctgtggcgtgggtcgggcagca

SEQ ID NO: 231924 - DNA, 122 bp, Homo sapiens
gcgtggggctgctctcaccggaagctgcacgctcggggaagcgcggaggcgggggtgctgcgcgcttgggagcacgtgggggaacacgcagggactgccggcgcgaatggcttcgaacgcat

SEQ ID NO: 231925 - DNA, 122 bp, Homo sapiens
ggcgcgcccgaactggctgagcagtggagcgggaaagggcgcgggacccgggactgtaaccgccacttccaggccctcgctccccgcgcttggagccctcaagggcactctcagggatcctc

SEQ ID NO: 231926 - DNA, 122 bp, Homo sapiens
ctctttggcgctataagcccgtgggaacgagcattggagacccttttcacaagatggcgccgaaagcgaagaaggaaggtgtgtgttggtgatggggccgcagctggtttaccggggattgc

SEQ ID NO: 231927 - DNA, 122 bp, Homo sapiens
tgatccctgaaaggaaaagagtaaatcagcctgcactctttggtacttgattttaactgccgattttcaacaggcccaggagttgggtgaagtaaattccacaagaaatatgtttccagtgt

SEQ ID NO: 231928 - DNA, 122 bp, Homo sapiens
gagaggcggttgctttttccagcctgagagatgagagagagctggagagcgcagcagtgccgcaggcttcctggcaccctggagtcctttcccgggccgactccgtcatcctcccccgcccg

SEQ ID NO: 231929 - DNA, 122 bp, Homo sapiens
ggtgttttctaggagagggggcctgggagcccgggatctgcttctttggcttctgctcctcgcagcctgggaggtggggagcggccagctccactactcgatcccggaggaagccaaacacg

SEQ ID NO: 231930 - DNA, 122 bp, Homo sapiens
cctgctaaatgccactccagtagagactgagtgttgataaatacaggggaaggaaaaagtcgtaagctgagcctggtcacattgccccttgtgatatcgttttatttttaacttcgcaacac

SEQ ID NO: 231931 - DNA, 122 bp, Homo sapiens
ctctgccctccacaaagcctgggagctgtcacccatctttgagggtgtccttccgtatgccgtgggccacgtgtcttcagaggtgtccggcatcaggagttcctcatacaattcccatcccc

SEQ ID NO: 231932 - DNA, 122 bp, Homo sapiens
aggctccctggaaaggctccctgcactcagcacggaagcagcttctggaaaggtctcagccgctctgggtctggcttcaggagcggggtccttcccagccgtcgtcactctgcaaagacccg

SEQ ID NO: 231933 - DNA, 122 bp, Homo sapiens
ctcacctgcacacatgtactgctcaaatttgtatcccatgtacataagctcccggaggagcggtggccgagcaagcctctgggcccgagcgttcggtgtctccacttcactcaggtatagtg

SEQ ID NO: 231934 - DNA, 122 bp, Homo sapiens
tgtgccctacactgcggcgtccgcctcagatgcagccgctggctaccctgcccgaggcgacgcaaaatgacgtctcgctcctgcacacgctctggagagacgctctaggccggcggaggacc

SEQ ID NO: 231935 - DNA, 122 bp, Homo sapiens
ggctcggccgccgcgtccggtccccgcgtccagcctccggcctgacccgctcgccgccgccgccgccctccacggggccccggcccagccaacccagcagccccgcctgccgggggcatgtg

SEQ ID NO: 231936 - DNA, 122 bp, Homo sapiens
ccaagccctgccccgcggggaggtggctgaggcctggcgagaattcaagcgcggtgcgggcgggctggctggcagtgctgggggacccggcacaccctctgcagctgctggcccaggtgcta

SEQ ID NO: 231937 - DNA, 122 bp, Homo sapiens
ggtccgctctaggcggctgatagtactcaatgctccggcagtcctgctccttcccggttacgtcccttccagcccttggcggagtctgcgggcgagagggcgcaggtgcagaggtgccgccg

SEQ ID NO: 231938 - DNA, 122 bp, Homo sapiens
cctcccagtctctctggcgggtccccctgccttaccagctcccggctgtggcgcgctctccgcctgctcctcacatccacacagctgctgggagaggaggaaggaaaggcgggcgcgccgcg

SEQ ID NO: 231939 - DNA, 122 bp, Homo sapiens
aattcagggaaggtttcttcctggaaggaacacaaatgagaacttgtgccttcccatgttcggatgttgtaatgtgagggcatcctacaaccattatggtctttcttttgaccataaagaaa

SEQ ID NO: 231940 - DNA, 122 bp, Homo sapiens
gagcgcacctaccaggagctgctggttaaccagaaccccatcgtgcagcccctggcttctcgccgcctcacgcggaacctctacaaatgcatcaagaaagccatgaagcagaagcagcttcg

SEQ ID NO: 231941 - DNA, 122 bp, Homo sapiens
tcgtatgatattccccattctgagtccagaatacctagaaatttggaatttggctattgccgtgtctggactgtgagtatgggaaggggaagcttttctgtctgttgtccccactaccgccc

SEQ ID NO: 231942 - DNA, 122 bp, Homo sapiens
cgagtaaaaatagccccggaggcgaatgtgagagtgaggtggggaccacacctaagggggcggacccaagcaggctccgacttccctgggcccagggagagggaatggctgcccgagaaacc

SEQ ID NO: 231943 - DNA, 122 bp, Homo sapiens
agcctggcaaaagcaatacagtatttttaaaatggtgtggccttaagaaacgcagcggttcgggggaggagacttttagaattatctttcaaacacttaagggaggagctgggtggttgggt

SEQ ID NO: 231944 - DNA, 122 bp, Homo sapiens
agattttggcagagcaacattcagactatatcgcacagctaagcagttgttctttgagggcgggattcagtatgcagtatttcacacatttattaaaacacatttttttcttccatccattt

SEQ ID NO: 231945 - DNA, 122 bp, Homo sapiens
cgttgtactacactctgagcaggcacccctgtgctactcacggaagcgggaccattaggtcggccattcctcctcaccccacgacacgcacccactgggtcgggccgcctccttgcagggag

SEQ ID NO: 231946 - DNA, 122 bp, Homo sapiens
ttaagttgcatgtgtgtaaatcaaaattttgtgagcctttctttctcagtgttgtttcaacgactacccgatagggtgagatactgcaaggtgaggagactagcctagttacagttttaaat

SEQ ID NO: 231947 - DNA, 122 bp, Homo sapiens
tcctgagccctgccccgcggggaggcagctaaggcccggggagaaatcgagcgcagcacccgtgggctggcactgctgagggacccagcacaccctccgcagccgctggcccgggtgctaag

SEQ ID NO: 231948 - DNA, 122 bp, Homo sapiens
tgggctaaaacgaggcatcgccagagcatcccacttcctcggaaagctgcggtctggggacgcgtcttggccctgaagaggctccagatggctcccatcaggcctctccgcctacgtgcggc

SEQ ID NO: 231949 - DNA, 122 bp, Homo sapiens
agtttgaagtagttatgtttgaatgggatctaatcctttgggcaacaacagttgagatatcgcctaagtgaaaagttgaacaagttcaatacgggacttattttagctctctaaactattgt

SEQ ID NO: 231950 - DNA, 122 bp, Homo sapiens
tcttgcagatggacaggcctgtaaggccggcgccactgccaagctctaggacagtcctggcgggaggaaaggggaccgtgtcttcgactgcaccagggtaagcctgcctcggtgccctgccc

SEQ ID NO: 231951 - DNA, 122 bp, Homo sapiens
tgtgtgtgtgtgtgtgtgtgtgtgtgtgtgtgtgtgtgtgtgtgtgtgtgtctgtgtacgcgctttggaaggctacaattgcgagaagcgcaggtctccgccaccgaagctttagactcata

SEQ ID NO: 231952 - DNA, 122 bp, Homo sapiens
ccagctgtcaatcaggcgcgggctgagctctacgaggcggagcggcggcggtggcgacggcgatgggaccccagcgagagatctgcagctaggctggctgcacttgctccacgggtcagggg

SEQ ID NO: 231953 - DNA, 122 bp, Homo sapiens
ctgatgcctcatttgcctctcgcctcttttcgaccaccattttgggggctgaggcactcacggggcctccccaggtttcactccgtttctacacagtcggagccccatggatctcccatctc

SEQ ID NO: 231954 - DNA, 122 bp, Homo sapiens
tcccggtccccggccacatggcgagcggggcgacaccgaagcagcccacggagctcgaggcgacgctgctgagcctggttccccaaagcggccgcgccactccccgcttccccgcccggctc

SEQ ID NO: 231955 - DNA, 122 bp, Homo sapiens
gggccctcgcgggccggcctcgttccggggccttttcccccacaagggcccccccgcggccgcctctgtgttttgtttccgctggtccccggcgctgtgactcccatttccgttcgtggaga

SEQ ID NO: 231956 - DNA, 122 bp, Homo sapiens
ctgagtccttgcctgggcttgacagctcagagcagtgtccccagctgtggccctagaaggcgcgctgcagcaggagcagggacagctggctcctggtggggctgccatctcctgaaagggtg

SEQ ID NO: 231957 - DNA, 122 bp, Homo sapiens
tagctattggctgaacaaaggaatcctgaacagtggaatttctagtattgctaaccattccggctaattatccagtttgtgaattattcagatactttgcttgtctttcttttcatcctttg

SEQ ID NO: 231958 - DNA, 122 bp, Homo sapiens
agccggtggatgagtcacagccccgtgcctgagcccgggccgagggcatccccgctcacacgctcacacagggccggggagcagccgttcaccaaaattacacggaggccatcagagctcag

SEQ ID NO: 231959 - DNA, 122 bp, Homo sapiens
cacaactcgccggagaggtgcgcgcctttagggcagggctggggagcggccggcgcctgtcgccgattgtcccgcgcgggaggacgaagggggctcccggcctgtggccgctctcgcgtggg

SEQ ID NO: 231960 - DNA, 122 bp, Homo sapiens
ccaccccctccccctactctctggtgcggcagggggcagtggcagtttgcaccagcccctcgaatttctaacactggctcagccctgccttcccagcagtcagccccttacgcggcaccttt

SEQ ID NO: 231961 - DNA, 122 bp, Homo sapiens
ctctggtggacggtatcttatgagatcacgttagcatgagaaggcagctgaagaggagggcggagactggccctggcctcctggctcttggtcaggttaataatcttctcctgtaaacccct

SEQ ID NO: 231962 - DNA, 122 bp, Homo sapiens
tatgcgcaatagagcatgacggagcgcaaggcgggaagccgcgacagacgtgtgtgcgtgcgtgcgtgcgtgcgtgatgcgcgaggcgtggcttgctggtggggcgtgctgtgccttggttg

SEQ ID NO: 231963 - DNA, 122 bp, Homo sapiens
aaatacactttactgcatgcataaataggtaccttaaaatcaattcctcctacaaagatgcgattagggatcactgttccatatcttggggcacttgttgggttattcaaaggcacaggtga

SEQ ID NO: 231964 - DNA, 122 bp, Homo sapiens
cacgcggctccgggtccccaaggtcacacagcaagccagaggcagagccagggttggacccgggtcttctggctcccaactctggcaatttccactacccggagcggtctctgaggcaccgc

SEQ ID NO: 231965 - DNA, 122 bp, Homo sapiens
tgatgaggggcattaatagctcctaatgacaccatctgagcctggcctccttccttctctcgctgctcactccttcctctttccctccatcccttgaagacacatgatcccacagacagaca

SEQ ID NO: 231966 - DNA, 122 bp, Homo sapiens
ggtcctggcccagtctgggctcagcattcttctctgtgataggcggttcctaccccaccacgggaaggacgtccaaagcctccctaagtcatctggtgccacctccatcctccacagagcct

SEQ ID NO: 231967 - DNA, 122 bp, Homo sapiens
tttcgcttttcccgccagtccgagtcgggattggcggcgcggcccggtcccccgtcggggcgcccccaccctcccgcagcgcctcccccagggagcctgccggggacacccgagcgccgccc

SEQ ID NO: 231968 - DNA, 122 bp, Homo sapiens
actcttcagcgcctttgatccctctcacactacaccagggttcgattgagaaaacaacagcgctgaccacccgtccttctcgatccttggggaaaaaacttttttggacggtagagtcagat

SEQ ID NO: 231969 - DNA, 122 bp, Homo sapiens
ctgacaggctggagagtacccaggcttcaggcaagcatcagcagtcaaatccaagatcagcggacgggtaaagttatttactacatcaggcagacagggtgggtgtctgtccatgttatcta

SEQ ID NO: 231970 - DNA, 122 bp, Homo sapiens
gtggagccacggcaggaggggcagacaggaacaaacggtggccatgaatcatgctgtgtgcgagctcctttgtttctaaggcatgtggtttccagagaaaccagggaacactgccttcaggt

SEQ ID NO: 231971 - DNA, 122 bp, Homo sapiens
tcagaggctgctgaggggcatggatatgactgcatccttgtctcttctatggaggcaagacgacttttataagttctatcaatgaagagagtcctaaactggagtaaagcaaactggatgct

SEQ ID NO: 231972 - DNA, 122 bp, Homo sapiens
tatgctggaatagcaacatcccagagtggaaaaaggagccagcccagcgtcctcagctaacggaggcctccttgctggccgccagataggccaccccgcagatacaggaaccaggcacgggc

SEQ ID NO: 231973 - DNA, 122 bp, Homo sapiens
cagctcacaaagccgctgcctctgtgccggcgcgcagaactgtgcagagctccacagacacgctttgaagacaaaacaggatggagtctacggtcccccatgtctgtcgctgagtcaccaca

SEQ ID NO: 231974 - DNA, 122 bp, Homo sapiens
cccgtcccggggctacactagagtgggcagtgatgccacaaacaaggcttctaaaagccccgagcctttgagctccttgcactcatctggacgcagctgggcccgggacagcccaaattctg

SEQ ID NO: 231975 - DNA, 122 bp, Homo sapiens
gcccggcctagttttttattcatttatttttcagatggagtcttgctctgtcagcagtgacgtgatcttggctcacggcaacctccgtctcccagattcaagcaattctcctgcctcagcct

SEQ ID NO: 231976 - DNA, 122 bp, Homo sapiens
gaggttcaaattaaggctctgattaaataagaaggcagcaaaggccgggcaaaaagccgccgcaacaaaaagctgcgctgacgggcggaaaaagccgcggcggcggagccaaaaagccgggg

SEQ ID NO: 231977 - DNA, 122 bp, Homo sapiens
cacccaggatgctactgctggggaggacggggaccacccgggatgctactcccaagaggacgaggattacccaggatgctatacccagggggacagggaccacccaggatgccacctcctga

SEQ ID NO: 231978 - DNA, 122 bp, Homo sapiens
aataaagtgcctagccagcactcttagaccgcccaaccttcccagctcttccttccgaggcggctactcgatgacatcacatccacttccgcttccgaaggcggcctcttttcattcctcgg

SEQ ID NO: 231979 - DNA, 122 bp, Homo sapiens
cgccagctgcccgcagcagccgcagtcgcctctcccggtcccggcgcgccctctgccggccgctcccggaggccgccggattccgcttcctcgctgaccctccacttgctatctatcgcccg

SEQ ID NO: 231980 - DNA, 122 bp, Homo sapiens
gaccctggaagagtctaagcgacagccaaaatcaccattcaatgtcagctaggtgcaaggcgggactttaagtacggaagctgccccgggacatgaggaaaggaacaagggaaagagccggt

SEQ ID NO: 231981 - DNA, 122 bp, Homo sapiens
attttttcttttcttttcttttaaaatctgaaacgggagcttccgcatttattatttgcacgtggttttgaggcgcactcctggccacatcacagctatgttctcttgcctctgggaaatac

SEQ ID NO: 231982 - DNA, 122 bp, Homo sapiens
tttggaaagaggtggggttggagcgggttctggggcaacttggggccctcggtcctggggcgatcagaggatatctctggattggctggcatcacagccagttgggagcctcccaagcctgg

SEQ ID NO: 231983 - DNA, 122 bp, Homo sapiens
ccctgttgtccaggcttgagtgcagtggcataatcttagctgactgcaacctcttcctgccgggttcgagccattctcctgcctcagccccctgaatagctgggattacaggcacacaccac

SEQ ID NO: 231984 - DNA, 122 bp, Homo sapiens
aagactctggcaacactgttttagactgtggggcatgggaacgttagatcccctcatcgccgttctgaagcccgtagctgttcgccatagaggagcaggccgcggcttctaagatggcgtct

SEQ ID NO: 231985 - DNA, 122 bp, Homo sapiens
caggattcgaacctgcgcggggagaccccaatggatttctagtccatcgccttaaccactcggccacgactacgaggcttagggcttcgttttcatccaatgcctttcttacttcccttgac

SEQ ID NO: 231986 - DNA, 122 bp, Homo sapiens
tggaaaaaccgatgaatgacgttttctgtttccgatactctgcctgccagaatcccctgccgcaccgccccaccacgaagcacatggaacccacggactacacgaggacagaggtctgttct

SEQ ID NO: 231987 - DNA, 122 bp, Homo sapiens
tcactgtgtctgcagtagaaaacatccctttagtgattatttttgtgggtcctacagcttcgttgcccttttttcctgaacagtactgaatgcatattgtaagtttgccctcaatcctttat

SEQ ID NO: 231988 - DNA, 122 bp, Homo sapiens
atggtgcgagagatcccacagaaaccaccgagttttacagcacagagaaacgacagattgcgataagccctcttccaggctgcactaaactcaagcctctatcctgctggattctgagctcc

SEQ ID NO: 231989 - DNA, 122 bp, Homo sapiens
ggcctgggtatagacttgaggctggagcccgcgtggcccatggccgagcactggctgcagcggtgggtggggcagcatctgggctcaggcaggcatattttccatttaagctgtgctggctt

SEQ ID NO: 231990 - DNA, 122 bp, Homo sapiens
gccagcattggcctgggcgggctaggagccccgcgggcccctcaccgagtgcccagagcccggatccaccagcggccggagagctccctgccatgccacctcgcccctgggctgcggctgac

SEQ ID NO: 231991 - DNA, 122 bp, Homo sapiens
aaaccacccccaaagctgccacccattccgctggcgcccgtcccgttgcccgcgatgactcggttttgtccagcataaatcaatgaccaccgtcccgggagccttggagcactttgagccat

SEQ ID NO: 231992 - DNA, 122 bp, Homo sapiens
ctagatgtggtgtagttgtaatgacctaatgttgctactgcttcagcgcttgaaaaaagacgctcccaaaaaaggttattcactgctaaaggttgaaggaattttagtcaaatctcctttaa

SEQ ID NO: 231993 - DNA, 122 bp, Homo sapiens
ttaagtacctctttctaaaggacaattcagaaaagggatggcttaatacgcaagagtaaacgctgtgcataacgtcatagagcttgcaggacacacttattccaggcaacatcatctcttcc

SEQ ID NO: 231994 - DNA, 122 bp, Homo sapiens
cctggtcgcctccgctcttcgcctaaaaggggatgcagctccgggaaagtaaggccgccgcggttgcggctatattatgtatatgtcttagagacgtgagtctatctctgccttcaagcttt

SEQ ID NO: 231995 - DNA, 122 bp, Homo sapiens
cgccgccagtccagctccagcctccactgcggccgcagctgcttgggcttctgcagccgccgccactgctagggccatcccgctgctggcgtactgtcatatactgcgcggagccagacctc

SEQ ID NO: 231996 - DNA, 122 bp, Homo sapiens
cgtgctcccccatcctaagttggtcagcagtcccaagtcggtgggaggaatgcgaggcgccggccgggtgagtgctgtgaccaggctgacgtcgggggaagagacaggaacacatcccgcca

SEQ ID NO: 231997 - DNA, 122 bp, Homo sapiens
atacaacatgcctcagattcttgcttctttcaaacccagggagtcgggttctagaatctgcgcttttcgtcatcatgccccttgtaaagcatttttttttacaacatcctgctaataaacca

SEQ ID NO: 231998 - DNA, 122 bp, Homo sapiens
ggcaatcccagcagggtggggccgtggtactctctcctcacctgttcagggaggtggcaccgtggtggctgtcaaagctccgcccaagtggcataaccatccccagcggcctcaccctccac

SEQ ID NO: 231999 - DNA, 122 bp, Homo sapiens
ccttctttgcctaaatacctctgaaacttgaagaaatggaacccctgatgctggcaggtgcggccccctcctctggatagggtcttaggtaattatcttagcttccccacccaattttccac

SEQ ID NO: 232000 - DNA, 122 bp, Homo sapiens
acctacaccagaatcccagagtcccagtccctggatgggctcagtcccaaccaggccagacgccccggagccccgtagcccgggtcctccagccctcgctgccgccgcttctcgcggagccg

SEQ ID NO: 232001 - DNA, 122 bp, Homo sapiens
ggagagtccaggcaacatctccatggttggcttgtctggcggagtaagctgtgccctcggcgcgggtatcttcaggagacagagctcctggctgcagcgagccgggacttgccgcgccccgg

SEQ ID NO: 232002 - DNA, 122 bp, Homo sapiens
ggggaacttgcggggagcagcctcagctagtccctggggcagagtctccacttgggtgcacgccctggggtggggcttcttcgggaagccgggggccttcaactctgctcaggagctcgggc

SEQ ID NO: 232003 - DNA, 122 bp, Homo sapiens
tcatggctgcggtcccggctgcggcttcggggaggggaggctgaggagtgggcaccactgcgttcttcatagccccagtcaaagcttcgagggggaccatcaccagcccctgggccctctgc

SEQ ID NO: 232004 - DNA, 122 bp, Homo sapiens
tgtggacacttcggactgcacggtcatgaacatcgcagagcactacatggcttccgacgtcgaatgggatcctactgggcgctacgtcgtcacctctgtgtcctggtggagccataaggtgc

SEQ ID NO: 232005 - DNA, 122 bp, Homo sapiens
gggccccagaggtacggccccgccccacccgcacacctcccatgttgcatctgtggcaggcgaggctgcgccgcggggcccctctattggtgtctgctgaaatcatttgagacaaagttaca

SEQ ID NO: 232006 - DNA, 122 bp, Homo sapiens
atgcaagtaggagtaggaaaggggaggaggggagaagtcagaagcttatattttttatcccggggcataccatatcgggtgcaccaattatcagagggactagtcagttgccaaacccccag

SEQ ID NO: 232007 - DNA, 122 bp, Homo sapiens
tccttggcgaccactcagggcagcagtgggcagccagaacaaatgcctgcagtggggaagcggctaggagggacagcagcacagcatcatagcacagttgtatagccaaagaagaccttctt

SEQ ID NO: 232008 - DNA, 122 bp, Homo sapiens
gactgacgtctacccacacccattgcttttctgattccttctcaaacaaaccaatgaatgcgacgacggagacagcagcgtgccccaggcgctagaagtggctctgccccttctactttgct

SEQ ID NO: 232009 - DNA, 122 bp, Homo sapiens
ttcactactgagctaccctgggctacctgtgggcatgagtggaacacaggtatggccccacggaggtctctctgctggtcctgctgggtgacctgggattggggtttgttcatgcccttcag

SEQ ID NO: 232010 - DNA, 122 bp, Homo sapiens
tcaactaatgcccaaagggcacttgaaattgacaaacttcccatctaccgtggcataggacgggcctcaccagccacctctctacagaaataaggtcattttggtcctaaaaggaaaatgac

SEQ ID NO: 232011 - DNA, 122 bp, Homo sapiens
tccttccatcctgcttcgacttctcaactaaattcttaagtcctggagtgcaggtatcaccgaaatttgccccatgcctgaaatacatggtagtagatggtgactctgacaagcgtgaagtg

SEQ ID NO: 232012 - DNA, 122 bp, Homo sapiens
ctgcggccgcccggccccgccctaggtgtgccggtaatgagggttggggtggggagggcacggattcttcccagggtagcaacccccagagaactcccggctcgctcgcagtcccttcccaa

SEQ ID NO: 232013 - DNA, 122 bp, Homo sapiens
gctgctaatactcatcttgtcagcccaaatttgtagagctttataactgagtatcttcctcgtcagactgcatttcaagaagctaggtcccaagtctctggatctttattttcctggcttag

SEQ ID NO: 232014 - DNA, 122 bp, Homo sapiens
cgagaccctgtctctaaaaataaatgaataagtaaatcatgcgattctcatcaaaagcgacgtagcctgtggactaactttggcatcttacaaagttaaacataatctccaccacatgaccc

SEQ ID NO: 232015 - DNA, 122 bp, Homo sapiens
ggtcgacctagtgggcagcacctgggaaataattggtggcagcgaagggagcagagtctccggggaacatggtcttgtattttgtcggattgagggtgaagaggaaataacccccccccccg

SEQ ID NO: 232016 - DNA, 122 bp, Homo sapiens
accgctccttctttaaatatataaatttcagcccaggtcagcctcggcggcccccctcaccgcgctcccggcgcccctcccgtcagttcgccagctgccagccccgggaccttttcatctct

SEQ ID NO: 232017 - DNA, 122 bp, Homo sapiens
gctgagagtgggggcggggcggaaggaggcgagagggaaaaggccatccgcgcgactgcccgattaaaaacagtcctgatcgtcttccctgcggcatgccgatgccctcagcttgactctgg

SEQ ID NO: 232018 - DNA, 122 bp, Homo sapiens
agacttctgcttcacagaaatgtcaatccgcaggaatcccaaccggagatctcaagagctcgagaaaaaaaaaaggcagcggcggcggcagatgaattacaattttcagtccggtattcgca

SEQ ID NO: 232019 - DNA, 122 bp, Homo sapiens
ttttgctaagccccggggatggcgcgtgtcaggcccagagtgctgatgccagcgtggatccgagccaggcctcaggggactggcgttcagacctcgggccgctcgcatctctaacaatttga

SEQ ID NO: 232020 - DNA, 122 bp, Homo sapiens
gctccaggaagatagtgtttattgggactgcattcaaagagatctaagagatcctgcctccggcttctgaactttctgcttgagatccatgccctgttctcccaggagaagtgattttagtc

SEQ ID NO: 232021 - DNA, 122 bp, Homo sapiens
tcatcaggagcaaccagagcctccaagccaaggggcctgcattctcccaagtcaggagcccgagcttacttttggcaaccttggagcttgtactgtagggttacttctcaggccagaaattt

SEQ ID NO: 232022 - DNA, 122 bp, Homo sapiens
gtgtgcgtgtgtgtgtgtacctggagccttcgacagccggctgggactctaaaaagatcgcgctggtccaccacttgttaaccctttcttcccgccaactcaaaagtttctgagctgacgtc

SEQ ID NO: 232023 - DNA, 122 bp, Homo sapiens
tcgtcgctccgtccgctaccccgtcccccagccgcaagcgccgaggagccggaagagaggcggaaagggcagcaggctccttacccagaccagcgaggggaggtcagctcgtcgcggggtgt

SEQ ID NO: 232024 - DNA, 122 bp, Homo sapiens
cacacgggctgacccgggcgcccagcggctggctcggccctaacgcgtggtctggcctcgcgctctttgccttggctgagtcttctgcccgcaatgacctggccagcttcctccctcgcctc

SEQ ID NO: 232025 - DNA, 122 bp, Homo sapiens
gaattcggctctggagtcacagactcaagttcaagtgccagccgtaccgcttgctagcagcgtggccttgggcaagtcacttggcttcggtttcctcctcttagctgcaaaatatgaaaaac

SEQ ID NO: 232026 - DNA, 122 bp, Homo sapiens
gggtagtcaaatgccttatgggggtggtttaggattctgagaggccaaagcagaagttgccgttctcttaaatgttggcccaaacaggcacagagtcccttctgccataacttactggtcaa

SEQ ID NO: 232027 - DNA, 122 bp, Homo sapiens
gctccacgtcattgactgtgtaagcagagaggggccagctgcgaggcaagcctggagccccggctctgagcgccgcgggctcctaagtgcaggcccctggctgacccctaccccgccccaca

SEQ ID NO: 232028 - DNA, 122 bp, Homo sapiens
ccctcatcctgagcattctcttcaaccctggctttctagctgtctctcattttgtgaaaacgttcatactctcaataataggcaattctgtcacaaagatggaaggcatgcaaactactgag

SEQ ID NO: 232029 - DNA, 122 bp, Homo sapiens
ctggcaccctccattctccggctgccctgttggtctcactagggatggctacgaaggcgccgggtgtatggaagagtgaaattaactcccaggatgggacgtgacccatttgggaagtgctt

SEQ ID NO: 232030 - DNA, 122 bp, Homo sapiens
cgttatggattccgggggagagttggccgtgctcctgggtgggaaccgtgaaggagaagtcgtcgaggggtggtcgcttctcatgggttaacatcagctctaaaaggaacgtgggtttccct

SEQ ID NO: 232031 - DNA, 122 bp, Homo sapiens
tacttctaaaaatattccggaattcttaagaatgttaggctgatgtttctgaacatccagcgcaatacctagcacagagtggtggctcaagcaatatgtgttaaataaataaaagaatcaat

SEQ ID NO: 232032 - DNA, 122 bp, Homo sapiens
taacaacctctcctgctccaaaccctgccgggcccccgcttggcattctggcgccgccttcggtcccagtgactcctggagctgctggggctccggccatcgaatcacccctccctgagccg

SEQ ID NO: 232033 - DNA, 122 bp, Homo sapiens
gaatcttggggtaggagtgggggttaacactcttgaatgggtggtcagaaaaggcttccccgacaaggtggttttttgagctaaacttgaaggaggtgacgaaatgagctatgcagatgcct

SEQ ID NO: 232034 - DNA, 122 bp, Homo sapiens
cctttcaggcactgctctggctgtgttattagcagaaaagacttctttttgacctcttcacgcctcctcaccccttcccagtgcccaaggggaaccataaagttacccatttatgctagtaa

SEQ ID NO: 232035 - DNA, 122 bp, Homo sapiens
gctttttctctagtttatttcactttatcttcctggactgtaactctgggcaagtacgatcgtttaattgttggagatgatgagccttaataggttcctcatttagatggcatcatttaaaa

SEQ ID NO: 232036 - DNA, 122 bp, Homo sapiens
gcaactgaacacagaacaaatatcaccgatataattggggtgggggtcgccatgtaaacacggggtgttgttactttaggatacttctgaccctgtcccggcctgagtcctcgctccctgac

SEQ ID NO: 232037 - DNA, 122 bp, Homo sapiens
tcccagggtctcctcagcattcacttacccaggcagactcctcagtgggcggctgaggcacgtgtgcgcctgtgtgtcaggaagggactccatgcaggggcctctgggtgtgcccaggtctt

SEQ ID NO: 232038 - DNA, 122 bp, Homo sapiens
tccaccggggcctgccacgcgctgctctggcaaggcgttccactggggcaaatgcctacccgggagcactctcaggatccgcattgctcaagccggagtcccccacagggatgctctacaga

SEQ ID NO: 232039 - DNA, 122 bp, Homo sapiens
gctttgcggaggcggtactgcaggatccggcagtttttgttggctctctccaactcgtggcgcatttcctgcagttgacaggcatcctcctcgaagaaagtgtccctcatctcgtccatctc

SEQ ID NO: 232040 - DNA, 122 bp, Homo sapiens
gccccttcctacctggacctgcagctcgtgcttgtgtaaggtggagtggatcagggcgagcgtggaggagtctgagcaggccggggaggggcctcggcggggtgaacggcctcggccgggcg

SEQ ID NO: 232041 - DNA, 122 bp, Homo sapiens
gctttgttttattttttaaaaataaacaaataaggggtgaaaatgaacctacagaaattgcgccattgtgttaatttaagactttgggacagtggatttctgacaaagagctgttggacact

SEQ ID NO: 232042 - DNA, 122 bp, Homo sapiens
agagggagttgccaacgtaagcgatcactagttccatcacaaagaggaggatgctaacgacgcacatgaggattaaacggaagcttcttccggagtatcgccccatggcgtctcggtgccct

SEQ ID NO: 232043 - DNA, 122 bp, Homo sapiens
tactccagcgcggaagaagccaacaggccggggatagcgagtagcgtccacgtgatgcctcgcaacccgggagggaggggattggccagcggctggtccaggtgtcatgtgacaccgcggac

SEQ ID NO: 232044 - DNA, 122 bp, Homo sapiens
acctcaggctccgtggcccccagcgaccgccgcggccgccgcctccccgaacccggggcccgggctccttgtgtagcaccaactccgcctcctcggccgccgccgccatcttagcctgtgcg

SEQ ID NO: 232045 - DNA, 122 bp, Homo sapiens
ctcacccacctcttcgtgggctacgtgtccgtgaacttcctgcagccggcagacgcggagcgtgctctggccaccatgaactttgatgttataaagggcaagccagtataagtcctgtggtc

SEQ ID NO: 232046 - DNA, 122 bp, Homo sapiens
tggctgggcttgtaccgagctctgattggcttcctattctgattttttttttcctttccccgccctcgttagtttgtccaaccggtgggacataatctgccccattcccccggatgagcccc

SEQ ID NO: 232047 - DNA, 122 bp, Homo sapiens
ttcggagacccaaacaaatgaaaataagccaagttctcacttcctggttgcctactctttcggaaggcccccgacaccagacggacacaggggaaacggggctcccgtggagtaacggggcc

SEQ ID NO: 232048 - DNA, 122 bp, Homo sapiens
aattctcgatcgctgattggtccttctgcttcaggggcggagcccctggcaggcgtgatgcgtagttccggctgccggttgacatgaagaagcagcagcggctagggcggcggtagctgcag

SEQ ID NO: 232049 - DNA, 122 bp, Homo sapiens
cttcctcactcatgaatcattctaactttaggcactgtaaaagcctagttgaggacgtatcgctggggaggtagcgtgttatacaagtctcaaatcctaccactgaagcagtgcctactctg

SEQ ID NO: 232050 - DNA, 122 bp, Homo sapiens
tcctcattgaaattggtgagggttggaagaatacgcaaacgaatgtttggtgtggaagaacgctggaggagtaaacttactatactcacaatttggattacaacatagtttggttaacccag

SEQ ID NO: 232051 - DNA, 122 bp, Homo sapiens
gagcccgcccccgacctcccgccccgacgccggagttcctcgcgttcattggctagagggcgcatcactcagtgccaggtggcggcctccccgcttgtcccgcctcccgctcctcctcattg

SEQ ID NO: 232052 - DNA, 122 bp, Homo sapiens
aaaaaaaaaaaaggttaaagaaaaaaagaaaagaaaacacaagataatcctgtccgcaaacgcttagcagtcttaaatcggcctggtggaaggatgcagggacactcccccaccctgccccc

SEQ ID NO: 232053 - DNA, 122 bp, Homo sapiens
tggcttcctgcagggtggcagctacctcgcccacccatgggagcgtcttctgtacaggttcgattggcttcagctgttcaaacatcttctcttctgtggtgtctctttctagctttatccac

SEQ ID NO: 232054 - DNA, 122 bp, Homo sapiens
gaccccatcctcagccctgactttccgtagatatgtgcaaaatgagtaaattactcacctcgggccagatccaagttttacccaacagaaggggcaccggaccaagaatgaaccaactcaca

SEQ ID NO: 232055 - DNA, 122 bp, Homo sapiens
gccgggaatggagggggagaccaggcccaggccccgggtgtgtgaggtgggggcgggggccgcaggagctggtcttcttccgggaaaccaccaaatggtgtcctgagcgggtgaacatttca

SEQ ID NO: 232056 - DNA, 122 bp, Homo sapiens
aatgattgaattttcattttttttgtttgtttgtttgtttcaatggtttctctgtaggaacgtgggggaagatcctatggaaccacagaacaccacacaggtatcaatgtttgtcctcttag

SEQ ID NO: 232057 - DNA, 122 bp, Homo sapiens
gacagttcccacgaacccgccccacggcccttactggatacggcgtcaggtgccgcccctcgtggactgattgacagaagaagcgatcttgcacagctgagtggagccagatgagcaagttc

SEQ ID NO: 232058 - DNA, 122 bp, Homo sapiens
ggtgccgatgtgacacgaagagtgattgcgccgccctgcagaggcggtggcgggacgctgcgctcgggctgggaaaggccggccccagggcgacccctccggaggcccccggagagcaggtg

SEQ ID NO: 232059 - DNA, 122 bp, Homo sapiens
aattccaatgatgatgttttagcccagctttgattcatttcaacagcaccttctggatggcggctccactatgggaaattaccagccatttatcatcacctacttcctgcttgctggggcct

SEQ ID NO: 232060 - DNA, 122 bp, Homo sapiens
agggacgcgaacaacaagcaccaacttacaccttttccaatctggtcgcggtgttgagtccgtgggtgtccttgacttgcttgagcgttggagttattcaggcagttttcaaaaatattgat

SEQ ID NO: 232061 - DNA, 122 bp, Homo sapiens
ataatctccagagcgggagatgatattactcacaataaggtaaataggctgtgagtccaccgcggatcctaaaatccaggggggcaagaggggctggctcttactccttgcatcgcgggggg

SEQ ID NO: 232062 - DNA, 122 bp, Homo sapiens
catggagcggatgagctgagacaaggggccggatgcgaatcacagctgaaaagaccgctccggcctggtgggcaggatgtctgcactttcacaagacttttcagccaccttgaaaagggatc

SEQ ID NO: 232063 - DNA, 122 bp, Homo sapiens
tccctcttggggaggcagaggaagtcccaagaatacacaaagacaggagagtggaagggccggccagtctggagatactaaaagagactccggatgaggataggggctgacccgaaagcccc

SEQ ID NO: 232064 - DNA, 122 bp, Homo sapiens
gagcgccacgcggtgggcgaggggatgccctagtaaattcgcaggtctcttgactctttccgcctttgtttacaaccctgccatgatctccctcttgcaaaagcgagggctacagaacaggc

SEQ ID NO: 232065 - DNA, 122 bp, Homo sapiens
gaggtgtggagggagaggcacgggcaggaaccggggatgcgtgtggcgcttgtgggccagcgccagttcctggtgggtgtgggctctgcggccccgcattcagagcggctggcccgcctgca

SEQ ID NO: 232066 - DNA, 122 bp, Homo sapiens
gccttacactgcggtccccggagcctgttccgcgcgcagggcggtcctttgcaattaccgcgggcaatgatcctttggaagcagaaattaaaagttgggagaaataatggtggaccgatcgg

SEQ ID NO: 232067 - DNA, 122 bp, Homo sapiens
ccatttatcagcagattactcccagaagctttctaaggaatttgaaaaaccagaatataacgtttgtttcagtcccatcgtctcagaaagcaacttgtgaacatccaggagtgtggccaaag

SEQ ID NO: 232068 - DNA, 122 bp, Homo sapiens
caccggacttgggagtggactgaggctgcaggggctgtaaagggtgtgggtcagctgggccgggcacagggctcactgtccagctggtgacactgacatgaccgagcctgcatcccggctgt

SEQ ID NO: 232069 - DNA, 122 bp, Homo sapiens
gagctgctctccaaatcctggcttgggccaagctgacattcttggaattccgagtgtgtgcgcttcctatccctccatttcccagcagagcccctgagatctggagactgccccagcctcag

SEQ ID NO: 232070 - DNA, 122 bp, Homo sapiens
gtggcgctgcggccggctcagggcggtggtcgtggctgcatggaggcgcagcaccgcccccgaggtttaaggagggagtgagtccggttctagctccaagaagacccctggcccaagagcag

SEQ ID NO: 232071 - DNA, 122 bp, Homo sapiens
ggatggaaagcgtgctgaagtcttgttaaactagcaagcttttgtttggaggtccaccgccgaaggcgcacaggcctgtgggaacacgagcgttgagactgggggcgtctagatgatccaag

SEQ ID NO: 232072 - DNA, 122 bp, Homo sapiens
ttctttgttcttaaattaactcaaacagtttagtaatttggcacattacacatgtgtatgcgcatttaattgccgtttgaggtggtgtttttaatttaagggcatggataaagtgcttactt

SEQ ID NO: 232073 - DNA, 122 bp, Homo sapiens
gccctggtaaggataaaatactgtcatttgtcttgagccactagaaataaagtgtgtacacgtgtgtacacatgtatgtctttcaagcaaggctatgtattactcagaacttcacatactac

SEQ ID NO: 232074 - DNA, 122 bp, Homo sapiens
ggagcccagcttgcagccaagagcggcccagcggcgccaccggacttgagaaagtttgtgcgcgcccctccgcgccacggccacgcgcagaagagactcggagccggccccaggtctggccc

SEQ ID NO: 232075 - DNA, 122 bp, Homo sapiens
cccgcccagcgcggacgggctccgggctaggagctcgcagagggacgggctgtgtcgcctcgcctctccctgcctctgtgtaggaattccccgccgctgaggtcaggagggcgggagtgaca

SEQ ID NO: 232076 - DNA, 122 bp, Homo sapiens
agtgtgtaataaggaacgctgaaaacagcctcctgagaatgcggtttgagtgttttacaacgccgtaagtgcctaaagtaaccgacctcaaatggccatctagtggatgtttgtggtttaac

SEQ ID NO: 232077 - DNA, 122 bp, Homo sapiens
ggaggaggaggcggagaccgaggagcagcagcgattctcttaccaacaggtacaggaaaacgggggtcgggctgggctggggcaggacggcgtcgagtttctggacagaaaagtacccggca

SEQ ID NO: 232078 - DNA, 122 bp, Homo sapiens
gagaacgccccttaccgcctcacctccttcctcccctcatcttcctatctcaaaccaaaacgacaatgcaatttatccccaaccggaaatttgacagtgaaagggagctctactaataattg

SEQ ID NO: 232079 - DNA, 122 bp, Homo sapiens
attgaaaaagacattaacaatcacaggcaacactgaagtgcagaggaatatatttaagcacgaagatctgaagaacaaagcctccatttggggaagagggccttttatttcaagggcacttt

SEQ ID NO: 232080 - DNA, 122 bp, Homo sapiens
gaaaccatgtaataaagcatctctggggagggcttaggactcttcctcagtcttcttccccgggcttgaaccccgcctctgaggttctccctgatatacacttctgcttttccttccaaatt

SEQ ID NO: 232081 - DNA, 122 bp, Homo sapiens
tttttttttgcttcctggtagtaactgttcttcctggaagagcagaatcacaggattcaacgccagccatgaccttgagagagaactgccgatcctagcaggagagcatctggaacccaccg

SEQ ID NO: 232082 - DNA, 122 bp, Homo sapiens
caccaacggacgcatggctcaactatacacaccacacaccacattccccatcagcaccaacggacgcatggctcaactgtagacaccaagtactacattccctatcagcaccgacagacgca

SEQ ID NO: 232083 - DNA, 122 bp, Homo sapiens
cacatgtctgaggcaggaaaacaaggctgccccactcgtggcagtcctgacgacgatcctcgagggctgctcttggcctccagccttggctaaggagaacagggaccccccaaagcccatgg

SEQ ID NO: 232084 - DNA, 122 bp, Homo sapiens
agtgaatggccggtcatcgggagtttcaggccacggggaaagtgctcgtgtgcggagccccgtgtgcctcacagcctccgagctggtgctgggctcggaaagccaagaggccagaggcgcca

SEQ ID NO: 232085 - DNA, 122 bp, Homo sapiens
ggggtccgataccccgtggcttagtcccaggaaacagtcagtctacgcggctccgtgccccggggtgtaatatgcccgggaggggcagcgcttggctaccccaacccttcctcctcttctgt

SEQ ID NO: 232086 - DNA, 122 bp, Homo sapiens
ggctagttagagccagggcagaaaatagaggtggaggactggaagccatccagggcccagcgggagggatttcaggaactggtgaaaagagagatggggctgatacaaaaacaagggtgagg

SEQ ID NO: 232087 - DNA, 122 bp, Homo sapiens
taatcgtgaggcttagaaccttgtttcacagccctgatcgtgccttttgagaatcttttacgttctggatattctggtatggaagaggagaaaaaccggcgctgggcagtttgcaatccagg

SEQ ID NO: 232088 - DNA, 122 bp, Homo sapiens
cagggatggaaaggcgatacctgaagactgcaagagtggcagacagtccgcaccccagcacggagcagacctcaccggtgctgagccacaagacaggaggggcgagactccacccctgcgcc

SEQ ID NO: 232089 - DNA, 122 bp, Homo sapiens
tccatttcaggtgttctgttaaaagcaacagaaaacaaactaacacacagtgaaagcctccgcaactcagcacaggtcgctcaagctgtgttcctagagcttctgcagctggcaccaccctg

SEQ ID NO: 232090 - DNA, 122 bp, Homo sapiens
agctttagaaaaatctcttctgtgaggctgggctgtggggccattgaagcccaggcggctcggcagggccctcagcagttctccctattcacgacgcgcaggtggctgataaatttcccagg

SEQ ID NO: 232091 - DNA, 122 bp, Homo sapiens
aatacctactacaaaaattttaatgggataattagaaagaaatagcttgggccactgcttcgagcagaagatggagttcagtggctaccataggaagggtcaatatcaggatggcctgtgag

SEQ ID NO: 232092 - DNA, 122 bp, Homo sapiens
tcagaaggcctgtcaggtgaagtcttcagcctcccacagcgcagggtcccagcatctccacgcgcgcccgtgggaggtgggtccggccggagaggcctcccgcggacgccgtctctccagaa

SEQ ID NO: 232093 - DNA, 122 bp, Homo sapiens
caccaggctgggaaagtgtccacaccatctccagggactccaggagtccaggttccaagccgaggtcactggggcttctgggcatcttggaaccctgcagaagtgatggctcctgtctcttt

SEQ ID NO: 232094 - DNA, 122 bp, Homo sapiens
aaaaaattgaacggaagatacttggagagccagggtccattcagcacagcgcggctgggtcggcttccattcctgggtccgcagcgccctcgtgtggtaggtgcccagccttcctggctgca

SEQ ID NO: 232095 - DNA, 122 bp, Homo sapiens
ggaacaagtgaggcttgtattacatggccaaattgatattaatgatggtggcctcgagaacggattccatcccaagacatctgatctgcagacagttgagcattcacagcagttttgacttt

SEQ ID NO: 232096 - DNA, 122 bp, Homo sapiens
agagacaggaagagagtatcagagtgcccagcaccacagagaaggggtggctggccagggcgcccattgcaggcagatgaaaagggtgcccccgaacaggcacgatgggtagggcaccccca

SEQ ID NO: 232097 - DNA, 122 bp, Homo sapiens
tatcattggaagcatccagcagggcttctgcactcggctgtaacttcctgccttgcccttcgctgtggatggggcctgggtgaatgggcctggctggcagagtgggagagggtcttgaaatg

SEQ ID NO: 232098 - DNA, 122 bp, Homo sapiens
tttatttatttagactagaaaagcgagccggcttggagggagtccgcccggggatccgagcgcgcattcatcagtgtcgagagaaaaaaagctacataaatatatattatgtggataaatct

SEQ ID NO: 232099 - DNA, 122 bp, Homo sapiens
cgatggctgcaatgggcctgtggtaggaacccgctacaagtgcagcgtctgcccagactacgacttgtgtagcgtctgcgagggaaagggcttgcaccgggggcacaccaagctcgcattcc

SEQ ID NO: 232100 - DNA, 122 bp, Homo sapiens
cccggggctggggcggtaggagtaggcagccaagggccaaggcccgccgctgggctgaagcgcctgcggcgactggcgacccctcagagcgacaccgcttccgcctctgctgggggcagggc

SEQ ID NO: 232101 - DNA, 122 bp, Homo sapiens
gaaagatgtggctggagagaatgcttccactcaagcttcttcctggtgggcttggcttagcgaggcttgaggaatgagccacgtgtgtgaaacaactctctaatattaggcacccacctcta

SEQ ID NO: 232102 - DNA, 122 bp, Homo sapiens
gtggaccgggagcgcgggcacggccgggtgtggaaagggcccgggtgagggtttctggggcggtgggacgccagacccgcctccaccccccagagtgggagccttggctttctcctgggtct

SEQ ID NO: 232103 - DNA, 122 bp, Homo sapiens
atgaagaagcaaatcttagagacaagaatagtgaactgtccggccaggcgcagtggctcacgcctgtaatcccagcactttgggaggccgaggcaggtggatcacgaggtcaggagatcgag

SEQ ID NO: 232104 - DNA, 122 bp, Homo sapiens
ttatattgcattaggtattataagtaatctaggatgtatgtaggttatatgcaaatacttcgctcttttatatgagggacttgagcagccttggattttcctatccatgggggtcccggtcc

SEQ ID NO: 232105 - DNA, 122 bp, Homo sapiens
ttggcgctcacaaagcgatctgtctccgcgtcccgctctgggacgcctcgggtctcagcgcggtggccacagtcctgggaagctggagaacgctggggaaatcaatcttcccggcaaggaga

SEQ ID NO: 232106 - DNA, 122 bp, Homo sapiens
cgaccgagaacgccttgacggtagtgaaatggtcttgccaatagactccagagcaggctccgccacgatgtcagcgccaggaaatgttggtgaatgaatgaatgaaggctttctgctgcgaa

SEQ ID NO: 232107 - DNA, 122 bp, Homo sapiens
tttggaatgcttgctgattcccctcccaggacctccagaaagaagtggtggttgcttcagcggtcacttggtgatgactggcaggtatatacctgtgtagctggcacatctggtgcctgtga

SEQ ID NO: 232108 - DNA, 122 bp, Homo sapiens
gtgaaacatgccaggaagggtggggacaggaaggtgacactagggcctctgtgtctgccccggggcactgtcagctgggtcaggatttatgccctgatgttcccacccccagacctggtcac

SEQ ID NO: 232109 - DNA, 122 bp, Homo sapiens
ggcgcgggacacctcctgctgagggctggtaaacccagacttctctgcgtccttgctgcacgcgaggagcaaatggaacagcacaagctgcccgcagcccgcaccatcgctccctcgtgaga

SEQ ID NO: 232110 - DNA, 122 bp, Homo sapiens
tcaattcctatgaaagatcaattcccctgagagctctgagaataggatcaaagtagaaagcgcagtctgcctctgcttggttacactgagccgatgtttctttagccaaaggcagtgggcta

SEQ ID NO: 232111 - DNA, 122 bp, Homo sapiens
agtgactagtaattgatagttctctagcgttactaaaccccagggtataccctgttggcacgtcacactccagctaattgaagacatttaccaccctgagtaggtcctgctgcttcattaag

SEQ ID NO: 232112 - DNA, 122 bp, Homo sapiens
ccgtctggctttttcttagtggccccagttcttccccattggagactcatcctgctctcacgttctcacagtcttcaaagaaaccaaatctagcagtcacctgccttgagttcactggtgct

SEQ ID NO: 232113 - DNA, 122 bp, Homo sapiens
ttattgagaatccgatatataccaagctctctgctaagcattagggatacagaaatggcacggcctccattctcaatttgctcacagtcaaaatccaaaagacacacaaataattgttaaaa

SEQ ID NO: 232114 - DNA, 122 bp, Homo sapiens
aactctgcgcggacgacgaatgcagcagtgagtgcgctggaggggcggctggcctcggggcggctggccttggggtctccgccggccccgggggtctccgcggcggcgccgcctgggctgtg

SEQ ID NO: 232115 - DNA, 122 bp, Homo sapiens
caccagtgcgtctctagcctggggctcctattttccctagagggaccctggaaaatgggacggctgccgaagagaaggcgaaggtcagggcgcggagctctacggtaaccacgcgacgcgta

SEQ ID NO: 232116 - DNA, 122 bp, Homo sapiens
aaaatgttggataaaaaaagtcatggtccttcccggaagcggtgtaggagggaggactggcgagagtgcagctgaccccgtgtgatcgcagcctgctgtatgtgagagacgcagttgcagtg

SEQ ID NO: 232117 - DNA, 122 bp, Homo sapiens
aagcgccggagtggcggcgggggatgacgtcactgtctgtgagtggccgggcgtggcctgcgcctcccgcttccctggcttggcggcagcctcaagggactcctctcccaagccagctacct

SEQ ID NO: 232118 - DNA, 122 bp, Homo sapiens
gcagcgcccgctcggccacggcagggggcggccgcgcgcgacccagccaggcctccagcgcgtggaacagctccagttcatcctgcagcaccaggtccgagcgttgcaggagctgccagagc

SEQ ID NO: 232119 - DNA, 122 bp, Homo sapiens
ggcctggcgctgtgacggctttcccgagtgcgatgaccagagcgacgaggagggctgccccgtgtgctccgccgcccagttcccctgcgcgcggggtcagtgtgtggacctgcgcctgcgct

SEQ ID NO: 232120 - DNA, 122 bp, Homo sapiens
aaactgagggcaggagtctgggtggggtggcttcagtgtggcacggaaatccggcagccacgcaggatgggaactctcggcggcgtctgtttacagttagtgagccctccctccccactcat

SEQ ID NO: 232121 - DNA, 122 bp, Homo sapiens
gcccggctctggggtgcaggtccttccacactggggtcagttttagggagtcaagatagacgtgagaggccgagggctgtggggggggcgtggggcatgttaggggacagaggagcccaggg

SEQ ID NO: 232122 - DNA, 122 bp, Homo sapiens
cgaactagccctggccacaccggtgcctcagatgctgcagggccttctgggctccgacgacgaggaacaggaagaccccaaagactactgcaagggtgagacttggccttggggacatgcgg

SEQ ID NO: 232123 - DNA, 122 bp, Homo sapiens
agccattataattgggtgtttggaagtcaaaagataaaattgtatttgaatgtctgtctgcgcaatttatggtaataatgaggcctaatgaggttgttagaaagataaaatgttatttacca

SEQ ID NO: 232124 - DNA, 122 bp, Homo sapiens
tttacctgcacctccacacctcctcaacagatctttatcctggacacggcagggggtccccgtgccctccgagaatccaagaacccgccccgcttctacgcggaaagctgggagaaaaactg

SEQ ID NO: 232125 - DNA, 122 bp, Homo sapiens
gggcaggcaggctccccatccggcggctctcggtgctgcgtctgccgcttgtgcttcatgcgccggttctgaaaccagactttgacctgcctttcggtgaggtccagcaaggccgcgatctc

SEQ ID NO: 232126 - DNA, 122 bp, Homo sapiens
cgagccttccctggcagtctagacactcacccttcctcccgcccaacagaccatgacctccgatgcatccttcaaagacaccaactcagaggtcacctctgcaaagcctccccagctggccg

SEQ ID NO: 232127 - DNA, 122 bp, Homo sapiens
cccaccacaccagactaaggccttgagtgattaaaaagaaaatcttttcctgtgtaggcacgatcgcaatatggatgaaccacagcctttgttcccgtctgcacaaggcttctcccccgtct

SEQ ID NO: 232128 - DNA, 122 bp, Homo sapiens
tactggttcgtccagggggctgcagaggctccctgcccgcctcaggggcagggccgtgtccgagctgccctccaggctccgagagtccctccgcagtaccagctggctggtgctcttgaaga

SEQ ID NO: 232129 - DNA, 122 bp, Homo sapiens
ccgagaagaaaatcatgtgaccagaaactgaccaatgaaaagtcaacttccccaagggggcggaaacttttggccaataagagcaggaattgagagccaggggaggggaagggaggtctagc

SEQ ID NO: 232130 - DNA, 122 bp, Homo sapiens
attccccagataaattcctagtgtccaccaaattcctcagcgctcgctcaccctcctctacggccacgactctgggagtggggaaacagagagccggttcctctgctgcagaagtcctcggg

SEQ ID NO: 232131 - DNA, 122 bp, Homo sapiens
caggcatcgaagacgctagcttcagaaatgtccctgactgctgcggcctccactatgtttcgaatgacgaatttcttaatggccttgcccttgggcacacatcgggcacagttagtgcggcg

SEQ ID NO: 232132 - DNA, 122 bp, Homo sapiens
aaaatatctaccccatttggtgaagtgaaaaacagaaaaataagaccctgtggagaaattcgttgttcccactgaaatggactgactgtaacgattgacaccaaaatgaaccttgctatcaa

SEQ ID NO: 232133 - DNA, 122 bp, Homo sapiens
tgggccgtcactcggaagaagtgtccgggggaagtgtgctcgccgtcagagaggcggaagcggaagcctccatccagggttcctggggacaggggcattgggtccagctggcccgagccggc

SEQ ID NO: 232134 - DNA, 122 bp, Homo sapiens
gacgcagagaggagaggaaagaggcaggcagatgggattatgcaaaccgtggcgatgcctcggtgtgttgcaatgccgcgcatttcgtgatgtttgtgatgctcctgacttactaatgccct

SEQ ID NO: 232135 - DNA, 122 bp, Homo sapiens
cggggccgcgcgagttgccgttaggacagttaaaaccgttagctgcctgtcgtggcggggcggggccctgggacaggacggaatccctattggtcagaagaggacctgggggcggggccgcg

SEQ ID NO: 232136 - DNA, 122 bp, Homo sapiens
gggtctaaggccagggcccaagtgggaggctgggcccacagataaccctaggcaggtcagcggctcgggacaggagtgtgaggctgagtcagggccagaggatgtgggactgctgggggctg

SEQ ID NO: 232137 - DNA, 122 bp, Homo sapiens
atactccccctcctggccccgaggccgtggagcaggcaccggtgtggtgggtgaaggcggcggcagtgagtcatgcggccgagagtaggggctatcaggccggggcagcgacgcggggattg

SEQ ID NO: 232138 - DNA, 122 bp, Homo sapiens
tcctcagggattagaccaagtagtctacaactctgcttccagttctgtggctctgactcacgtggaaacagcagtggggaaaggccctatcccttagccccaccggaagtgtctactgctga

SEQ ID NO: 232139 - DNA, 122 bp, Homo sapiens
ccaaacaattttcttcatggtcatttaagctttgtctaaacagctgggtgtgttgccaagcgacatcaccatctcctctgcttaattctgcttccaaaataacttcagtggcaccagaaaaa

SEQ ID NO: 232140 - DNA, 122 bp, Homo sapiens
aaggacttggggtgggtgggcaggcgccgagaggctccaccagagcctgggctcagagcgcgtctccccagggctcgagcccttggagggcagcagcgtggccacccctgggccacctgtcg

SEQ ID NO: 232141 - DNA, 122 bp, Homo sapiens
gctcagcccaggatggggttcagagccccagattaattggatgcagcctcagactttgaacgtcagagctggctggggggtgtgtgcgctggtgtgtttgagtgtgaaatgtgctaataagg

SEQ ID NO: 232142 - DNA, 122 bp, Homo sapiens
cacacacgcacggggacccgccaacttcagcccccgcctgcccacacagaccctgcctgacgccccccgccctgttctcccgcccaggccagcatctggggccccgcaggttacccctcacc

SEQ ID NO: 232143 - DNA, 122 bp, Homo sapiens
ttttcaaagctgtagtttccacaatggaaacaacccactttgcctggagacccttaggtccgttccgtggggacccggtttcaactcttggacagaggaagtcggtagtccaccgtgagctc

SEQ ID NO: 232144 - DNA, 122 bp, Homo sapiens
gtaaaacaggaggaatggacatagtcagagaattcaggggagaagtccttgaggaagtgacgactaggcttagctatgttttgaattcagttatggcccaatgtctccaatggttactaaag

SEQ ID NO: 232145 - DNA, 122 bp, Homo sapiens
ccgtacattgataactctcaaatgtgtgctatatccagacccagtttttcctcaggacaccgtgctcacatactcaagtgcctgcttgacatttccatgcaaatatctaaaaaaagaatttc

SEQ ID NO: 232146 - DNA, 122 bp, Homo sapiens
ccagtacctactgttgcttgaggtttcttataatagagcaggatgagcaacacgacttctcgttttgtaatttggcacatatgtatatgttttatacatacatgctatgtgtctatatgtac

SEQ ID NO: 232147 - DNA, 122 bp, Homo sapiens
tttgggatggtttcagcgtgttcgctggggcacccatttaccctgcagtaagaattctgccgtgactcgaggcagagcctccgcagacccccctgcctgcccctcgagccacgcaggtggtg

SEQ ID NO: 232148 - DNA, 122 bp, Homo sapiens
ggggcggagctgcgggcgcgaggcggggcggggctgcgggggtgggggcggggctacgtgcgtgggggcggggtggggctgcgggcccgaggagggacggggctgcgggcgtgggggcggag

SEQ ID NO: 232149 - DNA, 122 bp, Homo sapiens
atgcagctctcagaggtccagataaaaacctggtttcaaaatcgccggatgaaacacaaacggcaaatgcaggactcccagctaaacggccccttatcggggtctctccacgggccccctgc

SEQ ID NO: 232150 - DNA, 122 bp, Homo sapiens
tgcctggctccttggctctgggctcatccatgtgatttggtcagccagtggaatgtttgccgatgtgacacaaacccagaactgaaacaggcctgtacattggggcatgccctctgtgcttg

SEQ ID NO: 232151 - DNA, 122 bp, Homo sapiens
gaaaggggtgggcacccgggcagagggagccctggggattggtagcggctgtgggcagggcgggagggccgggggcggagtcaacttgtacatgtgaaaaactctggcgggggccgggcatt

SEQ ID NO: 232152 - DNA, 122 bp, Homo sapiens
tgggaaccctctttgcttcagggcaacacgggaggggtctggatctccgacccaccgttccgggtctgaatccagctccgggacctgacagggatgtgattgtggggcagccgcatggcctc

SEQ ID NO: 232153 - DNA, 122 bp, Homo sapiens
gaaagttcttccggagctcctcttgaacatcttactccctctcttggcaggtgcctggctcgtgacttctgcctggctgggctgcctgcctctctcagcttttcccagcttgccctccccac

SEQ ID NO: 232154 - DNA, 122 bp, Homo sapiens
aaccccatgcagatttctggagatttttctctgctggtagtctgctttgcaaaatatagccgctggagcctcccaaaactccaatctctgtcccttcaactcagcgaaattaccaagttctg

SEQ ID NO: 232155 - DNA, 122 bp, Homo sapiens
cgggtgggacagagctgagcagcaggctgacctctccaccaagggcctggacatagcagccggcagctccaaccgcaggcccaggtacagggggcgggcagccttgggggtgagccttcctc

SEQ ID NO: 232156 - DNA, 122 bp, Homo sapiens
tgttcttgtctttcttttgcaggatgtcagagtcaaccagagcaggtagggcccactccccggtcctgcctccttttactcaacatcaagactgaatgggaaggggcaggggcacttactgc

SEQ ID NO: 232157 - DNA, 122 bp, Homo sapiens
tcgctctaatggggcggattcgcgaagactaggacgtcttgggcttctggccgcaagtcccgtctctggaataaccttttctagtcctggagaaaggagctctgaattgaaggcggagtcct

SEQ ID NO: 232158 - DNA, 122 bp, Homo sapiens
gagacaagccatcataaaccggaagacactaagaagacccggaggatagatgtcatcgagcgtcctgaatgggacccaggacagaaaaggacaggagcggatacatgagtaaaatctgaatc

SEQ ID NO: 232159 - DNA, 122 bp, Homo sapiens
tcaaatgatcccacccgccctgtcctcccgaagtgctgggattacaggcatgagctaccacgtccactgcctgcctgtcttttactgaagttgtagatgtcctctttgcctattctctgaat

SEQ ID NO: 232160 - DNA, 122 bp, Homo sapiens
gccggcgcgacccgcggacacacagtgcaggcgcccaagccgccgccgccagatcggtgccgattcctgccctgccccgaccgccagcgcgaccatgtcccatcactgggggtacggcaaac

SEQ ID NO: 232161 - DNA, 122 bp, Homo sapiens
caacttgcttttctttagatcattgaaaaatgacaggaatacacttactctgtaaaagcacgaacaatgtaggaatatatagagtaaaagcaaaaggcacaaacctctcctgatcccaaaag

SEQ ID NO: 232162 - DNA, 122 bp, Homo sapiens
atggagggtctctgaggtgatgacttttacgattttgccatctcgctcgcccctgccatacgcagtcacactggtctggcaaaaccctagccttgtgtaaatctaggtctcctctgactgtc

SEQ ID NO: 232163 - DNA, 122 bp, Homo sapiens
cgcccgactacttcctgccgccacagccaccaatgccgcccctggagtacccagagctcccgctgccgtccccggacttcatggagacccccctggacttcgtgctccctcccctcgctgtc

SEQ ID NO: 232164 - DNA, 122 bp, Homo sapiens
atcaacattttggcctcctggagtggcacctcacgtgcggcctgtccaccccaccttgcccgtctatttaggggagcttggtggttaatgagggcagcgcctcatcctaaggtgttggacag

SEQ ID NO: 232165 - DNA, 122 bp, Homo sapiens
acagagtccctgtcttccagagatcatccggggctttaatattaatggcccccaaaactccgtaagaagcaggaaatgcagcccaagttttacaaatgggtaaacagaggcactgagagata

SEQ ID NO: 232166 - DNA, 122 bp, Homo sapiens
tccacgcagctggggcacctgggttgatgtctcagcctccagcatctgccctggcagcgtcgtgtggtcaccctcggcattcccgctccttgctgttagcagacgtacagttcacgaggaaa

SEQ ID NO: 232167 - DNA, 122 bp, Homo sapiens
tggtgagagcaagagagggcgtgtggatctctgtgtccgtggactgaccgtgggaggcctcgccatccatccatattttgactgaagtattaaaaggcattttaaatagatccaaaagattc

SEQ ID NO: 232168 - DNA, 122 bp, Homo sapiens
gaaacgcgcacatttcctcaacttgccgcttcttgggcacgtttaggctcttattagagccgcgctttggagttgcctcctcctgctgtacaaacccgccgcggcgttcccccggatgccgc

SEQ ID NO: 232169 - DNA, 122 bp, Homo sapiens
cacctgcggcaggtgacgtagcagcaccagtggtacttacagtggcaccgctcgaccacgcggtctgtgtaggggttgtagccacgcccgcagcacataaggtcgcagctgtcgcttccgtt

SEQ ID NO: 232170 - DNA, 122 bp, Homo sapiens
agagtctttgaataatcagaacatctcttttagaaatctctaaataaaaaagaaatcttacgcttagagtccgtgaatggtcttgagtaaaattctgtataaaatttttgtctgtgtgcctg

SEQ ID NO: 232171 - DNA, 122 bp, Homo sapiens
atgaactgacaaatgcacagagtgccaatttcatctgaggattccactatttcagaaacgcgggtgcagattaatatatctttagatttatatttcaagatgaaattttaacactgcaatgc

SEQ ID NO: 232172 - DNA, 122 bp, Homo sapiens
aggaaagcaaagcgaagggggacctcgctcgcacccaggcttgcagaggcagcgtggggacgcggactttttccaaggcgggggccttgaggccagaaaggcaacgcaaggctggagagagc

SEQ ID NO: 232173 - DNA, 122 bp, Homo sapiens
attcgcctgctcccctgcacagagattctgagggtggagcccccacttgctccggcaccccgcccagcccggaccccaggcaccctccagcgtcaggtgcggatcccccagatgcccgcccc

SEQ ID NO: 232174 - DNA, 122 bp, Homo sapiens
gcctgggagccgcactccctgccaagcccgggtgggatagcgctttggtgagaaggtagccgagaccccccccccaccccagagcccaatccacggggacccgcttatgagctcactgtttt

SEQ ID NO: 232175 - DNA, 122 bp, Homo sapiens
tgggccaatggcatttctccacgtagggcctggtgagtcccgccctctgaatgaatcagccgggccgtgtagctgtgctgttcacaggaggagccgtgggaactagaggcattcccactcaa

SEQ ID NO: 232176 - DNA, 122 bp, Homo sapiens
taacgtgggagagaagccgtgatgtacccatctacacgggtgtctctggggtttctaaaccggagtagcttctcagtccctgaccctcgattttctgcccctcttccttcaagcacagctcg

SEQ ID NO: 232177 - DNA, 122 bp, Homo sapiens
gcacctctaggaagctttctctgtctgcctggggctgagcagtggtccaggcatcagtgtcggagctctgtgctcactgacccgccccggtttccttgttattctgcactgtgagctacttg

SEQ ID NO: 232178 - DNA, 122 bp, Homo sapiens
tttctacctctcaacatacctggagtctttgctctttccccaacacaactttcactgattcgccttcatatatattctcatgctatcccttcttgctgtaaaactctccctgtctccttcaa

SEQ ID NO: 232179 - DNA, 122 bp, Homo sapiens
caccgcggctcctgttcattgagcaccttcgataggctgggctctttcccacggtctctgcgttgttggttcttccccctgtgaaggaagctctgtgattatcaccaaatgaaggcaggggc

SEQ ID NO: 232180 - DNA, 122 bp, Homo sapiens
acaccccaacaacgaaggggggacaccacgtccctaactacaacgccactagaagggttgcgcatgcgcgccagcctcctgcgcagccgcagaaaccactcagcgcgcgagtctctgaaagg

SEQ ID NO: 232181 - DNA, 122 bp, Homo sapiens
ttcacatatgatggaatccaaaacaatacctcagttttatctgacagggaattactgtcacgtttgcctccccaatgcttcctgttgggggtgagtggtctattcttcagcatgacaaagtc

SEQ ID NO: 232182 - DNA, 122 bp, Homo sapiens
ccccacctaagcctggcccctgcgcgtgtggcagctccgcaaacaccaacacacaagggccgctttgagagacgaagggtgagtgagacagagacacagagactcacagagaccccaggcca

SEQ ID NO: 232183 - DNA, 122 bp, Homo sapiens
gggaagggggggaatgacccctgagcttctgatttgggcaactgggtggaaagttggggccgttctcgaaataaagagaacaccagcaagaggagacgcttgatgaggaaaagaatgtgtcc

SEQ ID NO: 232184 - DNA, 122 bp, Homo sapiens
gtgggaaaggtgttccctggtcaatagtgaatgaacaaacgaggaactggaagtccgtgccggcccgggaacgcggcccagggagccagtgcgtggtcgccgggggcacagcagagctctgc

SEQ ID NO: 232185 - DNA, 122 bp, Homo sapiens
agggagccctggttcctgtcagtggtgcctcctttatccccaaatttgagacgctggctccggccaagcaagggggtcagggtccgggaggggatttttccttgtttttttggggaggaggc

SEQ ID NO: 232186 - DNA, 122 bp, Homo sapiens
tgcgccgtgtggtgaagacgaagcccccgccctcggtgtgcgccgcttgctggggaaagacgcagcccccgccctcagtgtgcgccgcgttctgaggaaagaggcaacccgcgccctcagtg

SEQ ID NO: 232187 - DNA, 122 bp, Homo sapiens
tgaccgccccccctgcctattgtcccgccgcttgtcccatttccaaaagctagagctaagcgaggcgctggggctggggcaggtgactaaccagctcacaatgccccctgcgggggaggaag

SEQ ID NO: 232188 - DNA, 122 bp, Homo sapiens
gctcaggggtaagaacaagggattacaatccgactcggagaccctggcggtggcctggaccggccaagcgtggtgaactccagggaacatgggcacacagtgtaggggctgggatgagtgga

SEQ ID NO: 232189 - DNA, 122 bp, Homo sapiens
agcagcaggctgcagagcatgaggctagtgccagagaggaccctcatagttctggcagcacgggcagcagccggcacggttgtgggaccagtggggtccaggtcttatcaaccccactgccc

SEQ ID NO: 232190 - DNA, 122 bp, Homo sapiens
gaggtggggagagacggggatgcccgcgagggaggccgggaggagggccggggtctccgccggagcgggcctcacctccagctccgcttgcaagcacgttccctcgcccaggaacggagcca

SEQ ID NO: 232191 - DNA, 122 bp, Homo sapiens
tcgggcccctctgtgcgtgggggtgggctgaggggcatctcacaggggtcttctacctaccggggccaggacaaggggcaggtcaacgcctcccacacactttcctcggtctcctacgtctt

SEQ ID NO: 232192 - DNA, 122 bp, Homo sapiens
ctcttcgtgcctgcatttgttccgaggagcgcagggaggctgctggggcccattcccagtcgcagcttgagagccggactctcaggatcagatgcctcgcgggcaagggaaggaaccccagc

SEQ ID NO: 232193 - DNA, 122 bp, Homo sapiens
agctgcacgcgctgcgcgcggtagcggtcggggatgcagcggaagtcgggcccactaggtcgccaccacttgccgcggccgatggcgttgggcagcaggcgcgccgggccgcactggccgga

SEQ ID NO: 232194 - DNA, 122 bp, Homo sapiens
tcctccgcatggccaggaccaggcccagtggcgagccgaagaggaagaagtcggacacatcgaagtcaaagcggcccaggctgacctcagggagctgcggccccccagccgccggggtctca

SEQ ID NO: 232195 - DNA, 122 bp, Homo sapiens
ggatggatggagttcagcctgggaaagttgagaacgtccagaggtggctgggcgctcgctcggcgtctgtgggtttttttcctcaacaccaaatgtcacttcgtcacgagcgggcgcgcgtg

SEQ ID NO: 232196 - DNA, 122 bp, Homo sapiens
ccaggtgttgttgtagttcttccgccacagctctgccacacactggtacttgcctgcttccgtgtcactggctcggctgatgcttaggcggacgttgttgctggactcagccttctcgatgg

SEQ ID NO: 232197 - DNA, 122 bp, Homo sapiens
gaagaactctgtctctgattggcaggagagtcacgaaccggtcagccccgggtcaggggccgcaagtgaggacactacaagtgtcgaggggcctaggggaagccggggcttgggagggcagg

SEQ ID NO: 232198 - DNA, 122 bp, Homo sapiens
ttgcaaatacttggttccggcaagttcttggcccttcccaggcttggggctgccggctcacggttcttctctctgcatttcagccaggcccccatatgctgggtttgcaggtcacgaccacc

SEQ ID NO: 232199 - DNA, 122 bp, Homo sapiens
ggggcgccatctcagtggcttcttagctaagcccaccctggccaccttcatctaaaactgcggtctccaactaaccctgcctccccgcactgaggcccccagcctgagtaatggggaagggc

SEQ ID NO: 232200 - DNA, 122 bp, Homo sapiens
gcctaacccggcctccgaggggtgtcccagcggggcctggggtccagggcagagttcttccgccccagccattgggaatgaaggcctcagtgatgttatctgtaaagccggaggaatggcat

SEQ ID NO: 232201 - DNA, 122 bp, Homo sapiens
tatgactgatcctttttcttcacgtaagcggtggagttaagtgtttggaattgctgcagacgctgagaaaggcctgcccctgtcacgccggattgtcccctgctcagcagctgacacagccc

SEQ ID NO: 232202 - DNA, 122 bp, Homo sapiens
aaccttctaaacttgaaaccttccaaactcaccacttggcggcgttgatccatccgcccgcgcacaaagagaagatcgcggaacttcagagttaaggggagccgtttcccgcagcgctagcc

SEQ ID NO: 232203 - DNA, 122 bp, Homo sapiens
agcctcccagagcagacacagagccttctaagagaaatgaaaatatccctcctaaacacacgcaagcacataacaaaagccaagttaagaaggttagcgatttagttgtctcagcaacatgt

SEQ ID NO: 232204 - DNA, 122 bp, Homo sapiens
ctcaggagtttgcatacgaagccgagggagcgaggggcttctgataatgatattcagcgtcgaacagagtcgctcatatgcagagccggagtctctcccagctttgatatatgagattatta

SEQ ID NO: 232205 - DNA, 122 bp, Homo sapiens
ggtggaaaagggaggagatctcagagctcagcatttcccttcctgtcctggttggacactcgaattcccccaccctctctatgcccgaaagctggctggccccagcccaggccacccccaac

SEQ ID NO: 232206 - DNA, 122 bp, Homo sapiens
gagccctgacactcccacacctgagcctcagattccaatagctcactccctagagcctgacgccggggcccctgacccctgagcctcagattccaatacctcactccccagagcctgatgcc

SEQ ID NO: 232207 - DNA, 122 bp, Homo sapiens
ccagcagggaaacatctacacctgccaagtggagcaccccagcctggacagtcctgtcaccgtggagtggagtgagggtctgatgaccctctagactccacctctgaagagcaggggactct

SEQ ID NO: 232208 - DNA, 122 bp, Homo sapiens
aaaccgccgtggtgcccgcgcacagtgcaccgcgcctgcgcatggtctccaaaggctgagcgagggcctgccagtgcgcatgctccgctctttagcgcttcctgagcaaagtttgaacgcct

SEQ ID NO: 232209 - DNA, 122 bp, Homo sapiens
tccttcacgaacttgtccttggcatccacaactcgactaactgttcggtgcaagaggcctcgctcttggcctatgccagcttttcatatgccttcctcactaagcttaatcattgctagctt

SEQ ID NO: 232210 - DNA, 122 bp, Homo sapiens
acccccttgcaacgtccggcgccccagtggcgcgcgtgctcgccccgcgaccccgttggccgccccgcctcgcgcgcctctgagttaccacgacatcgtgccacacacacacgctcgcggcc

SEQ ID NO: 232211 - DNA, 122 bp, Homo sapiens
tcactggacccagaaaccacagcgctctctctctccatgactgtttcagctgcccatccccgttctagactgtgggaatagcagccaatgaagcaaagtcctggccccatggagccagccaa

SEQ ID NO: 232212 - DNA, 122 bp, Homo sapiens
gaagggatcgccctcctccctcggtgacttagcaagaaaagtattcttgggttggaagggcgtggggaccaggtagctctctgatcttggggaaaaggatcggccctgctctccccggccgc

SEQ ID NO: 232213 - DNA, 122 bp, Homo sapiens
agcgttgaaaaccttcattcaagacgtagtgtgtcccaaatcagccctacctacggagcacgcccagtcacattgtcctggtcactccggagctgcgaaatgcaggctccactgtgccaggt

SEQ ID NO: 232214 - DNA, 122 bp, Homo sapiens
cacaggtttgggggaatcaggacgtgggcatctctagagcattatcctgcccaggacactcgggcatggcaaagatggcacagcctccgggttcccccatccccactcccctatggttagtc

SEQ ID NO: 232215 - DNA, 122 bp, Homo sapiens
tgagaaaatgtgaatgggtgaaacttaaagggaagcctaagagaagagtgagcagaggaccgaggagaacattgtatgcccagggttttgctcaggaaagctagcagcccgaaagcggcgcg

SEQ ID NO: 232216 - DNA, 122 bp, Homo sapiens
tgaacgtgcacttcggcggagagcgcattgcctatgaggtcagcgtgcaagaggcagtggcgctgtatggaggacacacacctgcaggcatgcagaccaagtacctcgatgtcggctggggc

SEQ ID NO: 232217 - DNA, 122 bp, Homo sapiens
cctggagagcaggccacagcggcaagacaaaggaagctcctcagcctccagtcgccttttcgtgcatgcacataggtcactgatctcgcctactgataagtttcccaggaaccccattaaca

SEQ ID NO: 232218 - DNA, 122 bp, Homo sapiens
agacagggttctgctgaaaaaaaaataaatgcttttctaaggttaacgccgggaaaagtccggggcctcccgaattccactccagtgctctttagtcaccgggccacttgccttgtcaaatg

SEQ ID NO: 232219 - DNA, 122 bp, Homo sapiens
ggccccagccacctccggcgccatggaaggaggccgagggggtctggctgaagctgtgtccggagttcatggtcccatctgtgtttgggacggggctgagctctgctccactccctggcacc

SEQ ID NO: 232220 - DNA, 122 bp, Homo sapiens
tggatggggctgtgggccatagcctgggctggcgctgcacaggcacctgggggtgtagaccggggtgcagccgtacgggcacctgagggctgtagaccggggtgcagccgcacaggcacctg

SEQ ID NO: 232221 - DNA, 122 bp, Homo sapiens
acaggatggtgaccgtctgtccttcatggacaaagcgaggggacaaagtgggacagcgaccgtctgttccacgtggacgaagcaacgtctgtcccacgtggacgaagcaaggggacagtgcg

SEQ ID NO: 232222 - DNA, 122 bp, Homo sapiens
gaactgaaagcgggagcgaggataaggaggcgttgctgcctcactttttgctccgcccctcgaggggcagtgacctaaggactgcgagggagaacacaatagtttcactttttaatcccttt

SEQ ID NO: 232223 - DNA, 122 bp, Homo sapiens
ggcgttggatctactggaatgagcagcagccgcttcctcggcagccttgggaagcacgggcgactggacagcagccgccgggcacggttatgggggcggggtgggcggggaggctagattgt

SEQ ID NO: 232224 - DNA, 122 bp, Homo sapiens
tttgatcagatgtgcagtgctgggctgaaaacccttctcctgtggaaattccaaagcaggcgagtggggctgggctgagtcttgtgtcccggtgggtgacatcccccacccgtggtatcagt

SEQ ID NO: 232225 - DNA, 122 bp, Homo sapiens
tctcctgcagcttgaccttaagctccttgttctggcgttccagctgctgccgagcattctcgttcttctgggcgtggctgcgctccaggttcaggtcggtgttgatctggtcgatctgcaga

SEQ ID NO: 232226 - DNA, 122 bp, Homo sapiens
ccacgatgagaacagaaggacacggggtcgggagcctcgctttacggcatagcgaggtgacggagcggctccgagggggacgaagacctgggcagggagcttttgcgacagtgggagaaaga

SEQ ID NO: 232227 - DNA, 122 bp, Homo sapiens
gattttcaccccaaatacaaacacgatacctctaggagcaggagaccaatacagggaccgcgctccgaggacacgcggcgcagccgaggaggaaaaagggcccggggccgagagctaaggct

SEQ ID NO: 232228 - DNA, 122 bp, Homo sapiens
atctcactagggagtgccagccagtgggcacaggtcagtgggtgcacgcgcgagcctagccgaagcagggtgaggcattgcctcactcgggaagagcagggggtcagggagttccctttcct

SEQ ID NO: 232229 - DNA, 122 bp, Homo sapiens
caccccactctgacctgtgcccagactcagccgccagcctatgcactctgccctcgcggccgccggccttgctgtcctgtcggcggctgccttccacttgcgcctggcttctgctgccacac

SEQ ID NO: 232230 - DNA, 122 bp, Homo sapiens
tccgaaagccgggcacccattggcccgccgggcagggacacgtggggccccggcccgccccgcccccagcccgcaccgcctcccaacggccccgcccgcgccacccccgcgcgctcgcgacc

SEQ ID NO: 232231 - DNA, 122 bp, Homo sapiens
ctggctggtcactctagcagctggtggggaagccagcctggcggggccgcagccgtgcttcgaggagacgggtgccacagggttcctggagccaggagccagttgggtttgccgcctctggt

SEQ ID NO: 232232 - DNA, 122 bp, Homo sapiens
gcttgggttatgtggtgaaattccacctctaccaaaaatacaatggtggcatgcacctgtcgtcccagctacttgggaggctgaggtgggaggatccactgagccaggaggtcgaggctgca

SEQ ID NO: 232233 - DNA, 122 bp, Homo sapiens
tggaatcagttagaaaggtcaggggtgacactggcatggatggtgaggttgcacttctgacgtttgcattcctcaggtgatggagagcaccccttcaaggggactgaaccgagtacacctac

SEQ ID NO: 232234 - DNA, 122 bp, Homo sapiens
gggtccccaccccgtgcgcccagcaaacagtgggtgagccatgaagatgtgcgagtcagccggaccctccccgtcaggcgcggacccgctgcggccagagaacccagtctgcgccagcccgg

SEQ ID NO: 232235 - DNA, 122 bp, Homo sapiens
gaattaaagagtccaggctcatgttgtgatagtgattattcctcataaccagtgttgtggcgacaactgactcactggcggtcgggtggactccccccttggtgcgcacaggcgcctgcccc

SEQ ID NO: 232236 - DNA, 122 bp, Homo sapiens
ccgggcgggcggagttgggaccggctccgggaggcgggggcgagcgcgcggagaggcagacgcgaggagggaggcggctgagcagcgcgggcggctctgcggcgggcgcggtgggcgcgggc

SEQ ID NO: 232237 - DNA, 122 bp, Homo sapiens
tttaaagttcctaacagatctggttgcagcatctgccggagcttgcaccccatcatcggacggtcatcttcctgctgcagaagttaggtaacataagacttagatttcttcctgttctagca

SEQ ID NO: 232238 - DNA, 122 bp, Homo sapiens
tgacctagtaatccacctgcctcggcctcccaaagtgctgggattacaggcgtgagccaccgcgcccggcctccttaggtttgtagacattaattgggccataatgcttacttgggtagaga

SEQ ID NO: 232239 - DNA, 122 bp, Homo sapiens
tttgggaggcggaggtaggaggatcacctgaagtcaggagtttgagagcagcctgggcaacgaagtgagaccccatctctacaaaatatttgaaaaggctgggtgtgatggctcacacctgt

SEQ ID NO: 232240 - DNA, 122 bp, Homo sapiens
ctcgcgggttctcctgggctggccagggctgccccaggaccacggacggaaaatcgcaggcgcgcggcccaccccgccttaaggggagggcccgcctggccgtgtagcccgccccgctcctc

SEQ ID NO: 232241 - DNA, 122 bp, Homo sapiens
ccagacagagggatgattcatatcccaggcaggatggagcagggcagtgtgctatttcatcgtgctactcagaacttatgaattgtttatttctggaatttcccatttaatatttttggact

SEQ ID NO: 232242 - DNA, 122 bp, Homo sapiens
ggagcacactccttctgcctgatcatgggcacacgctccttctgcccgatcatgggcacacgctccttctgcccgatcgttgggagcacactccttctgcccaatcattgggctcacgctcc

SEQ ID NO: 232243 - DNA, 122 bp, Homo sapiens
gctcccggcagctgcctcagtcggaggtccgcgggcgccccatgctggcagtggtaatgccgccggctggcatccggttggctgcgcgctgggaacgccagcgaggcagcgccaccggcttg

SEQ ID NO: 232244 - DNA, 122 bp, Homo sapiens
cccgtggctggaataatgacaggaaatctatcttcctctccatactcaccgtgtacagcacgtacacatctcacacgttttaataaaggccctttaaaacggcaaagcccgacatatcattt

SEQ ID NO: 232245 - DNA, 122 bp, Homo sapiens
cccaactctgcctcccccttgggtgtctttctgtcccaggaaaagccagttcgctgagctcggtgggtgcctatgtggacggaaatgtggagaaatactttaatcacagctctaacctgtgt

SEQ ID NO: 232246 - DNA, 122 bp, Homo sapiens
ggagtcccttgtgcctagagaaagcccacctacactgacccccttacttccatacttcctcgctttcttaggcagaaataatgagggtccagaacttcagccctcctgactccagcactcac

SEQ ID NO: 232247 - DNA, 122 bp, Homo sapiens
cccagggtccactgggaagcggtgtgggagagcagtgagagcatggagtttggacccagacgttcctctgggctcaggttccagtggcaacactttctagcctatggcctgggcaggtaacc

SEQ ID NO: 232248 - DNA, 122 bp, Homo sapiens
cttaaaagcctggatttggatcatgtccctcctttattcaaaactctccatggcttctagcgtcctcaccttgaatgcacagccctcggcctgcttactcttccagggagagctccacctca

SEQ ID NO: 232249 - DNA, 122 bp, Homo sapiens
tcaagtgatctgtccacctcggcctcccaaagtgttgggaggctgaggcatgagccagcgcgccaggttttaattctcaatgagaacactatttttgttgacaatgagacgcccagaagata

SEQ ID NO: 232250 - DNA, 122 bp, Homo sapiens
agggtaggataaagaaaatgacttgaatttagactttaggtaagaatgtacattataattcgaggatgaccattgaaagaataaatataacttccaaaccagtagaaagaaaaaaaatggaa

SEQ ID NO: 232251 - DNA, 122 bp, Homo sapiens
accttcagcttcagctgctaccgctctctgagtactgaagtttttatagttccctgagggcgcacactgtgacactcctgcattctctgctagtgtttagtttcctttgctgggagtacctt

SEQ ID NO: 232252 - DNA, 122 bp, Homo sapiens
gctcagttagacggaaagtgttgctctaagtatttatgggcaggtcttcaatacccgtgacgtcgctgcccatatatggactgaggaacagggctgggccaggcggcttttgccgtcacatg

SEQ ID NO: 232253 - DNA, 122 bp, Homo sapiens
tggccacaggagattaataatgaagacaggagggcggagctaaaggagagggtattttaacgacattaactgtgtttttgtgttagtaactcggaaagagagaggctgccccaagtcagcgc

SEQ ID NO: 232254 - DNA, 122 bp, Homo sapiens
atctgtgaagtggggatgagagcaatgataatcatgctactcttccaactgacaacagtacggcaggcgctaacatctgctggggccaggcacccatgctgagaacttcccatgtgggttga

SEQ ID NO: 232255 - DNA, 122 bp, Homo sapiens
gacacgctcaccccgtggggaatcacgagagacgctcaccccgtgagaaactatgagagacgctcagcccgtgagaatctacgagagacactcagcccgtgtgaaactacgagagacactca

SEQ ID NO: 232256 - DNA, 122 bp, Homo sapiens
acagtgctgactttgaggctttctgtcatccatggccatactgaacatgacatcactacccgtaataggctggaggaggcggccagccctgcacccacaagcatgggtttattctcacccat

SEQ ID NO: 232257 - DNA, 122 bp, Homo sapiens
ggtgatctgcccacctcggcctcccaaagtgtgaggattacaggcgtcagccactgcaggcggccttgaccattttaaggctccaggaagagttctttggacgcaggtcatggacagagctc

SEQ ID NO: 232258 - DNA, 122 bp, Homo sapiens
cactgtccggcacagtgaggcgctggtgctggatctcgtttctggtagtgtggcagggagcgggagagcgacacggtcagggggctgcgcgggcaacagcttggagctgcgcctgagccggg

SEQ ID NO: 232259 - DNA, 122 bp, Homo sapiens
atctgaatcctgaatccgggcttttatgtctgctaaactaggctcttgagagatcgaagccgctgccccctcctctgggtcctctaccttagtcacagtaaaatgtggcattgttatagtta

SEQ ID NO: 232260 - DNA, 122 bp, Homo sapiens
gagctttgaatcaagcgcggtagtttcagctgtagccaatcctagaacaaaatctttttgcgtcagttgttgctgaggcctagatctcacccagatcagttctagtcgctgctgcttgtacc

SEQ ID NO: 232261 - DNA, 122 bp, Homo sapiens
aggggttcacaggacaaaagcttcttaatttgacttgtaaactgtaatctgacttgaccacggaccatgagtttttcaagaactgtctcttgggacaagtgcttagcagactgtgagaaatg

SEQ ID NO: 232262 - DNA, 122 bp, Homo sapiens
aaaaaagtcatcctggtagttaaaagatttgttaaaaaggatgttgaaattattttgtcacggagcctgggagtgtttgtttaatcagttaccgataaagttttggttaaaaaaaaaaaact

SEQ ID NO: 232263 - DNA, 122 bp, Homo sapiens
gtacatttcgctgcatctgagcagagagagaagagcaccgagggccccagtgggctgccccggcaccctcggcggcaacgcggagaccaactgtccgaaacaaacaagaccaggaggtttga

SEQ ID NO: 232264 - DNA, 122 bp, Homo sapiens
cacatttttggccggacagatgggaagagggagaggaggaggaggagggaaatcctcgtccgaactgtcagttgctcgttccccagtctccaccggcctctggactttcccagcagcacacg

SEQ ID NO: 232265 - DNA, 122 bp, Homo sapiens
acaggggcggggaagggccttagcactgagagccgaaaagtataaaacgattagtttcggcgtcaggcgttttgaaaggctttgcaggtcctgttttctgcgtaatttttccgtgattactg

SEQ ID NO: 232266 - DNA, 122 bp, Homo sapiens
gtaaaaatagcgtccccgtaaagatgtgggctttgtcgctgggtgacgtggtatctctcacgttccaggtggtgggagggcttgctatctttccatcagctccatttcccacaagtaaagat

SEQ ID NO: 232267 - DNA, 122 bp, Homo sapiens
aggctcctgctggtggcctgagcacggagtgagctcgaaggcttgagagcggcctctgcgcgccccgcagactcttgtgcctgcccggcccgttagtttgagggcgggtggcagccgcggga

SEQ ID NO: 232268 - DNA, 122 bp, Homo sapiens
tgcctaagtctccagcctcatccctccctggccctgcgcagcagcctcactgcagttgcccggctcctcagccggggctttgcttgtgccattccttcatcctggagcaccctttcctccct

SEQ ID NO: 232269 - DNA, 122 bp, Homo sapiens
cgtggcctctgtttgggggtctggggtggaggtcgtcccggcccgggtggttccggacgccggctttccgcacctggctcggtgacggcctcggcgccccgccctcttggccacggtccgca

SEQ ID NO: 232270 - DNA, 122 bp, Homo sapiens
ggtgtccagcagggaccactccaaagctcaacagcgggtccggtaacctatagggattagcgattgtcaaggaggttcaaaaattgaagctgctgtcaaaggcagcttgaggtatttcatga

SEQ ID NO: 232271 - DNA, 122 bp, Homo sapiens
gtatccgggactccgaaacgcgcggcgagcagccccctcccccaccgcccagacggggtgcgaccgcccacgtgtcgccccttgcccagtcgggtccttccctcgggctccgggagccggag

SEQ ID NO: 232272 - DNA, 122 bp, Homo sapiens
aggaggctgcactatcaagaactacatttatggtgccacattgagaggtgacagagactgcggccagagacagggaaataggtgtacctgaggacacacagatacacctaagtgtgttagaa

SEQ ID NO: 232273 - DNA, 122 bp, Homo sapiens
taggcagcacggagcagaggaagttggggctgtcggtgcgcaccagctcgcccgggtggtcggccagcacctccaccatgctgcggtcgccgctcctcagcttgccggccagggcagcgccg

SEQ ID NO: 232274 - DNA, 122 bp, Homo sapiens
gtctcttgttaatttcccacgaaggaccgggtggggtcagagctccagctgcaggggcctcggcccttctccctgatccctgcaggacgctggatgatcccggaagccttctgacctctttt

SEQ ID NO: 232275 - DNA, 122 bp, Homo sapiens
gagatttgtgcctgacggcctcggggaagggcgccaaccgggctaagagctcacctggcacgcatcggtgccgccctcgaggaaccctgcgcagagcatgccggggaggatggaggatccgt

SEQ ID NO: 232276 - DNA, 122 bp, Homo sapiens
tggcccaaggcttacctctgccttctgtccaccccgaaagctgatgccatcggaaatgcacgactggaattcggcaatggtgtagtactccacctcaacagaagggggctctggtggctttg

SEQ ID NO: 232277 - DNA, 122 bp, Homo sapiens
ttgcattcccttaacagcaatgtctcccctagattggggtgagctacaggtctgtgtctccggagggtggagcctgggattttggacgtggtctgggagaggtggagtggtagcaggtgcca

SEQ ID NO: 232278 - DNA, 122 bp, Homo sapiens
gtgcccctatctgctcgagtcagctgtgtgccagcgagaaggagacgcactcggagaaggcgtccaagcctctgtgagcagcgcccacgcctctacttgtggagctgcagaaggcaggcggg

SEQ ID NO: 232279 - DNA, 122 bp, Homo sapiens
ccctaccccctccccctccttagcacccgcggtgacatcacggaggcctgggcctgtctacggtctggggaccgccccctctggctcctgccgggccccttggcctcccccatcgttgctgg

SEQ ID NO: 232280 - DNA, 122 bp, Homo sapiens
gggcagagcccagagaattggaggtggggccaatgtgggccccgcccccaaccattgtgtcggagagggaagtggacgagctcctcggtaagaaccaatgaggatgtggtatgcaaataagc

SEQ ID NO: 232281 - DNA, 122 bp, Homo sapiens
tccagcctgggtgacagagaacgactccgtctcaaaaaaaaaaaaaaagttagggccggtcgtggtggctcacgcctgtaagcgaggccaaagctccagaacagcatctctactaaaaatac

SEQ ID NO: 232282 - DNA, 122 bp, Homo sapiens
tttgcttgttttctatgagttagccaaactagccaactgttctgttctctaacccagtaacggaacatagtgttacctgtgtttcttgattcgcggttggactagaattttcagaaatttct

SEQ ID NO: 232283 - DNA, 122 bp, Homo sapiens
ttaaagaattctccattcccctatgtttattcatcaaagaacaatcagtatgcaataatccgcattacctcactgagctaatataattccacgaacttggtgtttgagttaccctctgaagc

SEQ ID NO: 232284 - DNA, 122 bp, Homo sapiens
aggccggtggagcggcccctgaggggcgctactttgcggcgcggaggagcatcgtggcggcgatgcgtcccccgttggtcgttgagcctgcctctgattggctggtttgtacctgcaatgcg

SEQ ID NO: 232285 - DNA, 122 bp, Homo sapiens
agaaagttgcctttctcaacctcatattcttaacgcttgtaaataaaaacccctcctcttcggttttcactttagaccaggaaatctggggagagttggcaagcaaggttttgcactgtcgg

SEQ ID NO: 232286 - DNA, 122 bp, Homo sapiens
gacttaaagtgaatgtaggagaccaagatgttatgaggcacttagaagcagtaaaataaacggcataatgaaagtagaatttggtatatagtattctttcaggtctgggagcccacaaggaa

SEQ ID NO: 232287 - DNA, 122 bp, Homo sapiens
atatacgtttccaggactcaccactggttaaacgcacaacttcattctctaccccacttgcgttaagaagcagtgaataagcggtaggttgacagagctaccgtcttcctgtttttttcctc

SEQ ID NO: 232288 - DNA, 122 bp, Homo sapiens
gggagagaaaacgctcggctcccaggacgcaaggggaattggcgttaaactttgcagggccgacgggccggcggccagaggaggcggctggcacccccggcgccgccgcggcccctccagct

SEQ ID NO: 232289 - DNA, 122 bp, Homo sapiens
cagggttcctggcgcgtgaataaaggccctgagagaaagcggggactctagattacgcaccgccctccacaacacacactgaaggaactcccagtgccttgggcaggggatcctcagcccca

SEQ ID NO: 232290 - DNA, 122 bp, Homo sapiens
tttttttttttttttttttttgatacagggtcttgcactgtctcccaggctggagtgctacggtgtgaacacagctcactacatcctcaacttcctgggatcaagcgatcctcccacttcag

SEQ ID NO: 232291 - DNA, 122 bp, Homo sapiens
gtgctctgcggcggggcgggagggctcgcatccccatagtgctgggttacagtgaaggtacgccccgcgctctgctctggagaggcagggtgggatagggaacgtctcgagtggcgcccgca

SEQ ID NO: 232292 - DNA, 122 bp, Homo sapiens
tcttctttctgatgctcaaattgccccatctttagccaataggaacctcctggccgggcgcggtggctcatgcctgtaaccccagcactttgggaggctgaggtgggtggatcacgaggtca

SEQ ID NO: 232293 - DNA, 122 bp, Homo sapiens
gtaaaatgagaactgcctgtgaaggttcttacccagtccagccttgtttctacccaaacgcgcattcataccaactctaatacagccctctgaagccaatctccaacttggagccaaatgcc

SEQ ID NO: 232294 - DNA, 122 bp, Homo sapiens
cctgaagctttcggtcaatcactaacatacaaaaagccaaaggctgggtgcagtggctcacgccggtaatcccaacactttgggaggccgaggcaggcagatcacctgaggtcaggagttcg

SEQ ID NO: 232295 - DNA, 122 bp, Homo sapiens
aaataggaatgacagcaataacaacaaactataataaaaaatacgtactttgcgcccgggcgctgtggctcatgcctgtaatcccagcacttttgggaggccgaggcgggcggatcacctgc

SEQ ID NO: 232296 - DNA, 122 bp, Homo sapiens
ggacttgacctccgcctggcaccctggcgtaagggtgattgccacatctcggattcgccgcggggcaactacctgggaaaaccgcagactgggcaatgaaagactacatccggcaaccggat

SEQ ID NO: 232297 - DNA, 122 bp, Homo sapiens
taaaagcacttcttgtattgtttttaaggtgagaaataggaaagaaaacgccggcttgtgcgctcgctgcctgcctctctggctgtctgcttttgcagggctgctgggagtttttaagctct

SEQ ID NO: 232298 - DNA, 122 bp, Homo sapiens
gatgcaggcgacagggaggccctggaacattctgcttacagatcgcgaactgtcaaggcccgaggccccgctttgtgacttggacaggctgctcattgtgggctggcgggcggggcatcctc

SEQ ID NO: 232299 - DNA, 122 bp, Homo sapiens
ccatttaaaaaggaggaaacggaagcttctgccgctgcctgatcctccattgctccgagccgcgcgggtgcagcgggctgtggagccgcgggccgagccccgccggagcgcccgagagcccg

SEQ ID NO: 232300 - DNA, 122 bp, Homo sapiens
aagccggctcggccatggcggttccgcacgaaccggccctgcctggcacggcctcccctccgctccgccccaacccaactcccaggtacagccctgctggcccccaaaggcagagccggccg

SEQ ID NO: 232301 - DNA, 122 bp, Homo sapiens
gagggttggacacggcaatgtggacctcgccgcttccacaacgatgctggctactgatcgcgtgcacttccttgccaaagaaagtgagtccggagagggacaggaggggcaggtccgggctg

SEQ ID NO: 232302 - DNA, 122 bp, Homo sapiens
ggctatggaaaagcgtcaataacataaactgactttaatttttcttcatagaaatgtttccggtgaaattttctaagaaatcaggggacagttaatttgcttggttgacgctcacactcctt

SEQ ID NO: 232303 - DNA, 122 bp, Homo sapiens
taagtctccaggcagttctctgcatgtgtaggatacttcctgggctttgtggcagagaagcgctggaaccaaggcaggatctctttaagatctaccgtgggaatgaagccaaaaagccggtc

SEQ ID NO: 232304 - DNA, 122 bp, Homo sapiens
gcctggccacagccggggttggcttatcacctcagtccaccatgtatatgcttctcactccgaggtcaacaatttcactgtaagctgagttacctgtcataagtgactccattttgagacat

SEQ ID NO: 232305 - DNA, 122 bp, Homo sapiens
ccccggaatggttgaggaaaaactgtttgctgcaccgggccgggcgacgtgttgaagaaccgagagcctggagcccaggcccaggaactgaagaaacccggggttgggggctcaaaggcgct

SEQ ID NO: 232306 - DNA, 122 bp, Homo sapiens
gggcacgttcaccagactcagcttcaggacaagaccccaggtcattcccaactgaggctccgaggtgcaggagctccgtcctgtctgtaaaactccctcagttttcggctctgggtttggtg

SEQ ID NO: 232307 - DNA, 122 bp, Homo sapiens
cgaaagtaaacggtggacggcgcggcccgaggcaggtggcgggagtcagtttaaggctggcgcccagctttccgcgcctgcgtgctaggcgcaggccgcctctcggaagcttggcctcgcag

SEQ ID NO: 232308 - DNA, 122 bp, Homo sapiens
tagaggaccatgtaccatgcctggcacataagtcattcaagtattagctagatgatcacacgatctttgcgagcaagactttgctattcatacaaatgaagcatctcagacccaatggactt

SEQ ID NO: 232309 - DNA, 122 bp, Homo sapiens
gccttagctagatgagaccccaggatgggtctcatgcattctcctcctccactgagtctccgcttgcctcatgtgagggttgatggctttggctttactccaacttcctgcatcttctctga

SEQ ID NO: 232310 - DNA, 122 bp, Homo sapiens
cagaaatctcaggactgacgcctccagggctgccacggtgtcgcaatctcacaattggggcgggaggctacggagtcaggagagagaaaccgaaagatttctcagcgagctagcgctcgctt

SEQ ID NO: 232311 - DNA, 122 bp, Homo sapiens
cagaatgcagtggagcggtggctgcgggttgttggtcaggtgcccagcgccgggcccacccgcgggatgggagcgggcgaagagagaaggcgtagctattcctctggggataaggctctcga

SEQ ID NO: 232312 - DNA, 122 bp, Homo sapiens
tcttcccacatctcccctacctgcttgaaagggggtgttaagacctcctccacacctgagcgcccccaccctgtggccgccaccaccagaaccaccatcaactctggaggccgatctgagga

SEQ ID NO: 232313 - DNA, 122 bp, Homo sapiens
aggtttcccaggcaaagttcggcaagttgggagggagaaggctggcacgtgtcaagtttccgtcagtcctcaggagagacccgtgcccctgagagcacgcagaccacggttaactccggctt

SEQ ID NO: 232314 - DNA, 122 bp, Homo sapiens
cccatagccatgctgcagcacttcctcaatcaccctcttctcgctgcacgcattgactttcggtttcttcacagagtcactgacagcttgcagctttggcttatcgatagccccgtggttct

SEQ ID NO: 232315 - DNA, 122 bp, Homo sapiens
actgacttcataggaaggtggagtggggctccctccaggatcagagaggggggtccaactcggctccagcagcctgtgctattcacgggccaggacacaattgcctagaggatacagcctag

SEQ ID NO: 232316 - DNA, 122 bp, Homo sapiens
gaattcctttagttgttattgatgcacataaaagcatcctttgcacttgaataaaacatccgagttgctttttatattttttatttgctgctgtttatgaattgtatcactgtgtgtttatc

SEQ ID NO: 232317 - DNA, 122 bp, Homo sapiens
gtgggaactctggccttgtctgtctgtctgaccataatgataactctggtcttgtctgtccgtctgaccgtagtgggaactctggccttgtctgtctgtctgaccacagcctaattcctgac

SEQ ID NO: 232318 - DNA, 122 bp, Homo sapiens
catcagaatcatctggggtgccccttgaaaatgcaatgttccgggccaacgagtcaatctcggagtgtaaatcttgtgaagctgtattttaacaagctcacttggtgatttatttgtgtacg

SEQ ID NO: 232319 - DNA, 122 bp, Homo sapiens
tgactacaggctgaccttgaggagagtaggctgatggtgtggctacatctggatccctcacgcctctcttttcatgctataaagttatggaggaatcacagtgtgaggatttctggtacctt

SEQ ID NO: 232320 - DNA, 122 bp, Homo sapiens
aatgagcagctctctttggagccacgcaccttcctccctgggctctgccaaggtaggtcacggctctgagagactgcaggaaggcttctcagaggagctggtactatgaggggtgactcggc

SEQ ID NO: 232321 - DNA, 122 bp, Homo sapiens
gctcggcgcacaagcgagctggcatcaccggggattccctccggcccggtgggactccggcgcgcttgtagcgaggacccccagcccagggcagagcctaccctccgctcccccagtctggg

SEQ ID NO: 232322 - DNA, 122 bp, Homo sapiens
tggctgccagttagagaaggaagaagccactggtgggtggaggctggagcttgtgtcccacggcacacagaatgcaggcttagtgcggttatgttcgattcctagaaggcctgttatggtgt

SEQ ID NO: 232323 - DNA, 122 bp, Homo sapiens
tctgagaaatagcagacacacacaggagaagttctgaaaacagagtagaggttaccctttcgtaagggaaatttacatttaaaaaagaaatctccatttgtagaggtgtctccctctctgta

SEQ ID NO: 232324 - DNA, 122 bp, Homo sapiens
ggcgggtagaggggacgggcatcaaagagcactcgggcgctcatgattggacaaggagcccgaagggcgggaagcagttctggagggggcgggaccagagggcccaaggagcgttacttctg

SEQ ID NO: 232325 - DNA, 122 bp, Homo sapiens
gggctacggggcggggcgagggcgcggtaaatggcgctctgagtactttctgtctcagtccggctggccgctcacgcgtcgggcccccatttactctcgttactgaggagacacggctccag

SEQ ID NO: 232326 - DNA, 122 bp, Homo sapiens
tgttattatccagtgctgtaaggacgagatgctttcaccagcagccgagtgagatgaaagcgcttttccgatccaccgaatcagtcccactgcaactgtaagctggagaccctctgggcctt

SEQ ID NO: 232327 - DNA, 122 bp, Homo sapiens
ccgcatcctgctcctctcatcagagcatgatccaggcttctgacagcttccagttcccaccgcgctctcctccacccacgacctcatccccgccagttccccagcacagcgcgaactctgaa

SEQ ID NO: 232328 - DNA, 122 bp, Homo sapiens
acaggctttccagccaccaaacaactttctgcagggaacccaggggctatcttggtcctgcgaaggagaaggttacctgctaagtcactgtgcaatgatcaattctcagttgttccctaatc

SEQ ID NO: 232329 - DNA, 122 bp, Homo sapiens
aaggcttcttactccccttctgttcctctctgagaacatccaaaacagagctgctgtgcccggcatcttttagaaggttagaagacagtgtgtggtcagtgtggggactgatttcaacatca

SEQ ID NO: 232330 - DNA, 122 bp, Homo sapiens
cctagctccctggagaaatgaacacccccctcctgactttggcgggagcaggcccacagccggggtggttctgacccgctgggctccctccattcagaatgatccccgtaatgatgggattt

SEQ ID NO: 232331 - DNA, 122 bp, Homo sapiens
acactgggacaagggattctgggtcataaattctcccattcctcatttactctgcagcaccgggtggctgcgaactccgctcttctgcttgggtttccgcatcaccagcagcttctttcctt

SEQ ID NO: 232332 - DNA, 122 bp, Homo sapiens
tggaggggcgggcccagaaagcggcccccgcagcagttacaggccggggcgaggaggggacggaacccgctctccgtgattgacggaaaatattactcttcagcccgcctcccgcgtgcccg

SEQ ID NO: 232333 - DNA, 122 bp, Homo sapiens
cccttcaaatgtgaattttgtgtgcagctttttaaggataaaacggacttgtcagaacatcgctttttgcttcatggagttgggaatatctttgtgtgttctgtttgtaaaaaagaatttgc

SEQ ID NO: 232334 - DNA, 122 bp, Homo sapiens
gtcgggtgtggtggtgctcaactgctgtcccagctactcaggaagcccaggtgggaggctcgcttgagcccaggagtgtgaggctgtagtgagctatgactgcaccactgcactccagcctg

SEQ ID NO: 232335 - DNA, 122 bp, Homo sapiens
aaacccccgcgggttggtcggggcagggcggggctcgggggaccgggctgaccgcgggggcggggccaggttctcacaccatgcaggtgatgtatggctgcgacgtggggcccgacgggcgc

SEQ ID NO: 232336 - DNA, 122 bp, Homo sapiens
gggaggcaccagaagcaccgtgcctgcctggctgggcaagggcgaccgaagtctcccaagcgcacgatggggagcaggcgttgtcaccgcgtggaggcgcacgaaagggagagggtcttaca

SEQ ID NO: 232337 - DNA, 122 bp, Homo sapiens
aggatgttaaaagatggtcaagaaaggcccacaatccttaaaagcacagccttctaacatcgcttccagtaagggagaaactgaagaggaaagactgtcttgccagaaatggccagcttgtg

SEQ ID NO: 232338 - DNA, 122 bp, Homo sapiens
ggcttgaagctcttggttggtacaagtgggactgatgttacccacgtgtaacttggttgacgctttgctcttattcttgctggcttccacgttgatgttcaccccatgaagcttgtaatgat

SEQ ID NO: 232339 - DNA, 122 bp, Homo sapiens
cgtggggggaacatggctggatgagaaccgtcttaggaccccgacacatctggggtcgcgcgatcctcgacttccgctctcccttcgcgcccagagggcttgttcgcctcccgaggccgcgc

SEQ ID NO: 232340 - DNA, 122 bp, Homo sapiens
tggagatggcaacagtgccacctgctggtgggaggtgtggtggagcgatgccgagaggttcgcagatgcctccagggggcataggaaaacccaagaacctgaggttcagcggacggcttcct

SEQ ID NO: 232341 - DNA, 122 bp, Homo sapiens
gtggcaacttataataccatcagacatatatataataataaaaatatgccagatcctcatcgcattttacttatttgcttaatcttaataaaaacccatgggataggtactattgtcattcc

SEQ ID NO: 232342 - DNA, 122 bp, Homo sapiens
gatgaggagctaacacttgaggacatttcctttttaactggaaaaagctggagtgtactgcgtaggctgtaactgcgctactcggcacagaatgaacccatcacttgctgtccttctggttc

SEQ ID NO: 232343 - DNA, 122 bp, Homo sapiens
acaccttgggtaccatgcgtgagggccacaggacgggagaggtcctgagccagcaccaggcgcatgggttagggtccagccatcagctggaagggtctcctgtggaggtgataacaggggct

SEQ ID NO: 232344 - DNA, 122 bp, Homo sapiens
gtcagaagcccacagtgcttggctgtgtcctccactcagggtctcacaaggaccgaatcccggggtcagctgcctgggcttttctctccaagctcgggggagaatctgcttccacgatcatt

SEQ ID NO: 232345 - DNA, 122 bp, Homo sapiens
ctcccatcttttatcatgagctgcctcttggactaaaggtttgaggctcgttcagtgaaccgccactgacagtttgggccttgcattgcttcggggggcacgtctgatcttcccagagtaaa

SEQ ID NO: 232346 - DNA, 122 bp, Homo sapiens
atttaaaagggagcccctcccttcggggcgagtgacggctcccacgagggccgcttccggcgggaggtggcggggcttaagtccccagacccacggttgcttttaacgctggaactccgagg

SEQ ID NO: 232347 - DNA, 122 bp, Homo sapiens
atcggcgcggctcggctctaaagcaaacaggggtccgggaaccgccccttcatttgggaccggggaagccgcagccctcttcacacggatgattcaaagttgcgcgccgccgtcctcccgac

SEQ ID NO: 232348 - DNA, 122 bp, Homo sapiens
ttaagctcacactaatatcttgctgaatgtgggttacctttttttttccaggttggtgaccgttgttatgatgaaaaaatgtatgatgctgctaagttgttgtacaataatgtttccaattt

SEQ ID NO: 232349 - DNA, 122 bp, Homo sapiens
tacttaggaggccgaggcaggaaaatcacttgagcccaggaggtggaggttgcagtgagccgagatcacaccattgcagtccagcctgagcgacagtgcaagagtctgtctcaaaaaaaaaa

SEQ ID NO: 232350 - DNA, 122 bp, Homo sapiens
ttcccggcttgtcgctgtgtaatcttggtgctcagacgtcgccagcaggcctcatatgaacgccccgagattgctggcatggaggacttttttgccgggtttgaaagcgtcaccccctcatg

SEQ ID NO: 232351 - DNA, 122 bp, Homo sapiens
cctggaggcgacgcggcaggagctccaggtagcccagcggaagctgcaggaacaagaaggcgagttccggacccgcgagcgaggcctgctgggcttcctggaggaggtgcgcggcaccgaaa

SEQ ID NO: 232352 - DNA, 122 bp, Homo sapiens
ccgccccttcccctgcacgcggccccgcgtcggggaggtttccggcccggggcccgactgcgggtggcatttctggctaagccgttaggcgcgaattgtatgtctggtttattcgtagtggc

SEQ ID NO: 232353 - DNA, 122 bp, Homo sapiens
tgatatttctccccatatcgcaggtggtgtacacccccttgtgatattgtccgcaacatccggggtggggaaggatattaatccccatatcgcagaatgtgtacacccccctgtaatattgc

SEQ ID NO: 232354 - DNA, 122 bp, Homo sapiens
aatcggagcgcacttccgtggctgactagcgcggtataaaggcgtgtggctcaggctgagcggctgggaccttgagagcggccaggccagcctcggagccagcagggagctgggagctgggg

SEQ ID NO: 232355 - DNA, 122 bp, Homo sapiens
ggaagaacttccttgattagcatagtatcgaccctggggccgcgctgcgaggcggaggttcggtcccagctggggtgaagtgtgcagaccggttgcgattgtggtcagacgcagcacctact

SEQ ID NO: 232356 - DNA, 122 bp, Homo sapiens
accgggatctgtctgcattccctttggttcccgatgccaagggataaatgggatacctaccgtctggaaactaggctttctgcgaggctgcggagcctggcgatttagggactcacggcgtg

SEQ ID NO: 232357 - DNA, 122 bp, Homo sapiens
gtttgtcaattaacaaacactgtggctggcttgtcaatgcctcactgggtagcgacgacacggagaagggggatttttcctcctattgttgtgaaccgttatttttgtgtagtgcgtacaaa

SEQ ID NO: 232358 - DNA, 122 bp, Homo sapiens
tttgtactctcgtagtgtgcccgaggccttcatggcgtgctctccgcgttcgccgccacccgcaaaaggagacttgctgataaattttgtaacataaaaacaacaggaacggctgggcgcgg

SEQ ID NO: 232359 - DNA, 122 bp, Homo sapiens
ctcctgtcagtcacgcttagctccgcccccaggattaaggcccgcccaggggcttccctccgcccttcgcttgagaattccttttaaataccgctctggcgcccgagcgcgcctcttgcgtg

SEQ ID NO: 232360 - DNA, 122 bp, Homo sapiens
ggaagctatgcccatcagagaaaactaacagaagccggaatctcctcacattcatgttcacgacatcgcagatatagtccgaggttacccggaaatgatctgcggagacacaagaaaccatg

SEQ ID NO: 232361 - DNA, 122 bp, Homo sapiens
ggtccaggaggcaggacttacaggaatttgattggcatagacagtggccaatcagatgtccgggctgtgggagcggaggccctgggggagggcgggtatgactactgacccctcgccagggc

SEQ ID NO: 232362 - DNA, 122 bp, Homo sapiens
aaaaaaatttcaagaagacaatcttcaaaggtcatttaatgtagcacaacaaaacaacaacgaccaaagtggcataactcagtactgtttccttctcaaaaaatcaggtcatctcgaaaatt

SEQ ID NO: 232363 - DNA, 122 bp, Homo sapiens
tatttatgcagtgcatgtaaacattgaaagcaaattcacatcaccaaggaaaatgatccccgtaacatgtctaaaaatcatctgtgactcagtgatatgattagtcctgtgaaagcgttcag

SEQ ID NO: 232364 - DNA, 122 bp, Homo sapiens
agcaggacctgtttcctttgtataagctacaacttctgaagcattacagttcctctagcacggtgctcaatcacagcacttggagcacctctctgcataaaggcaaacaaaacattgcctaa

SEQ ID NO: 232365 - DNA, 122 bp, Homo sapiens
ctcaggtgatctgcccacctcagcctcccaaagtgctgggattacaggcgtgagccaccacgtctggcctaatgtctactactcttagccccattctgcagagcagtatactgaagcctcaa

SEQ ID NO: 232366 - DNA, 122 bp, Homo sapiens
ctccacctcccgagactaggagcccgccagggttaagtaggagggataccctaggggccccgcagggtttttagggttggggtggattggaaattgttcattgcctttcagttccgggacat

SEQ ID NO: 232367 - DNA, 122 bp, Homo sapiens
aggtgtccagcagccgcgcgcccaggcgcacgccgggcagcagctcggggtcggcgttgacgcggtccagcgcgtacagcatggcctccagccggtgcacgccctgctccttcttcagctgc

SEQ ID NO: 232368 - DNA, 122 bp, Homo sapiens
aaggaaggggtgtgttgacagggccgttcgggccggagcaggtgcgacaggaatgtcccacgtcctctcgtgtgctgtcgggagacaaacctcttcctgcttcaatatcccattcgttccag

SEQ ID NO: 232369 - DNA, 122 bp, Homo sapiens
cctgtcctcctgggtataaagcgcctgtccatctcggcgtgggagagaggagacgctcgccgtcccctgacccccagctcagcgccggctccaagcccagccaggtgggtgccccgggccgg

SEQ ID NO: 232370 - DNA, 122 bp, Homo sapiens
atacatacacatgcacgtgtagctatgtgcatcgatatgtgcacacatgtacacacaggccgtgcacatgtggtcgtgtgtgcctatggctgtgtgcatctgtatatgtgtgtggcgcgtgt

SEQ ID NO: 232371 - DNA, 122 bp, Homo sapiens
acgcggctgtcgcgagggcgggggtcggggctgcaggcggggcagggctgggtgggggcgcgcgacgcacctgcctgcttcctgcacgggtggtccccaagcactgcggggccccagcccaa

SEQ ID NO: 232372 - DNA, 122 bp, Homo sapiens
cccctaaaaaaagaaaaagtagccgagggtggtggcatgcgtctgtagtcccatctactccggaggctgaggcaggagaatctctttaggcaggagaatcatgccacaatagtgcagcctga

SEQ ID NO: 232373 - DNA, 122 bp, Homo sapiens
cgggggcgcgcgccgctgggggaaggaggggccccgaacttggaaaaaagggaactcgcacggaaaaatcaaatccaagtggtctgcgttcacccctgcttgggagacacaaaggaagggcg

SEQ ID NO: 232374 - DNA, 122 bp, Homo sapiens
gagcgagggagggagttcctcgggcctggcccctttactaggtcagtctggcaggtacctcgccggcccaggacggggctggccaaacctcaccgcttgctcccgggctggcttccagacca

SEQ ID NO: 232375 - DNA, 122 bp, Homo sapiens
accccaaccgcggcggggccggctctctgaccctctcttccccacctctgctctgccctccgagtttcacacttaaagcggagacttctgcttcagcaccgccgcaccgaggcctgggccct

SEQ ID NO: 232376 - DNA, 122 bp, Homo sapiens
ggcggcccggccctcgctgggcctaacgcccccgcccgcccgggaggaggaaggtggcgccgctctccccgctagggctccaccactcaggccgcgggaatttccggcctcgccgcgcggcg

SEQ ID NO: 232377 - DNA, 122 bp, Homo sapiens
actgaaggggaggagctacttcctagggtctcttcccagcatcacagccctacatcccagcgaccaacggtgttatactcctgggggccaaagaggacccggattgctttgttttgtgccat

SEQ ID NO: 232378 - DNA, 122 bp, Homo sapiens
cctggacgggggcagggcacccgggccgaggacgaggaagtgccgggggcctggccgggccgccccacccctgggaaagtccccggagactggcaggccactcgcccaatcgcgccgcgcgc

SEQ ID NO: 232379 - DNA, 122 bp, Homo sapiens
cccctctcctccaatgccactccctaggaccctctccccagggttccggacccccaaccccggatatgttcccccagggccatccagttgttctacctccaggattactgatttagcctctt

SEQ ID NO: 232380 - DNA, 122 bp, Homo sapiens
ttggcgtggatggaagttgctgaagcatagatattcagcaaccatcaaatgcagaaacaccggtggggcccgcaacattgcctcatagatggcatttgattaataaattggaaatgtggagt

SEQ ID NO: 232381 - DNA, 122 bp, Homo sapiens
gtggtggtgggccggcacccgctgcacctgctggaggacgccgtcaccaagccagagctgcggccctgccccaccccatgagctggcaccagagccccgcgcccgctgtaattattttctat

SEQ ID NO: 232382 - DNA, 122 bp, Homo sapiens
catctcatttccaggcacttcaataggtcgctgattggtccttgcaccagcagtggtagtcgtacctatttcagagaggtctgaaattcaggttcttagtttgccagggacaggccctatct

SEQ ID NO: 232383 - DNA, 122 bp, Homo sapiens
ggggggaccacaggaggctggggagagagcgaggcagtagtgagaagccgggacgctcaccgttggccgagtaccttagagcagccctgacgcctgcttctgtctcttggtgaaagtggcgc

SEQ ID NO: 232384 - DNA, 122 bp, Homo sapiens
gccgcgcggccaggcgcgctgcgattggccggcagcggccgggggcggggccaggagagccggtgtcgcacggaccgcctcaaaagagcccaggatattgcagagcgcactggagccctggc

SEQ ID NO: 232385 - DNA, 122 bp, Homo sapiens
agatgctccccggcctggctccgagtaactgcgagctggaggcgcggctgctctctcgggcggacctcagctctgcgaaccctgtggctgccggagcactgagcgccctgcccggagtcccg

SEQ ID NO: 232386 - DNA, 122 bp, Homo sapiens
agtgggcacaaaaactgtttttcaagacacaatttcaatttggcttgtggaaactggatacgagtaagtttccttaaaattcgagtagaaagcagctgtcctccccgggccccttgatgaga

SEQ ID NO: 232387 - DNA, 122 bp, Homo sapiens
taatcccgtggtggggaaggggttaaaaggtcaattcacgcctgttcctgacttaggcaccgtggtaaaattactgagagtgagggggcttgaggctgcctgcctgcttacctgtggaggga

SEQ ID NO: 232388 - DNA, 122 bp, Homo sapiens
aaaccccgacgaacctgtgctaaagtggcaaaactggggcccaagtcctgagtctgccaccgtccagcaatataacgttgggctagtcaatttgtgtctttttcttttttttgagactgggt

SEQ ID NO: 232389 - DNA, 122 bp, Homo sapiens
ctgacaggaagaagaaacagcatccaatcggcacttgtgtctcaatgaccaatcaaatttcgccttacattgcatcgctgggataaacggagctggacgactcagtctcttggtctgtggct

SEQ ID NO: 232390 - DNA, 122 bp, Homo sapiens
tgtgatccgcccacctcagcctcccaaagtgctgggattacaggcgtgaaccaccttgcccggccctatgcaatgaacatttctaaggtggaaaggcttttaaagtttgaacaagcaatgat

SEQ ID NO: 232391 - DNA, 122 bp, Homo sapiens
ccagcgcacggcgccatcgtggcgcaggaccacgttggtgctggcggaacctggaggctgcgcgtcggctctgggggcaggcggggcagggctcacctaggctgtccagcctgaggagcagc

SEQ ID NO: 232392 - DNA, 122 bp, Homo sapiens
cttcatgactgttcatctgtattcttttttcttttttttttcttttttaacatgaggtctcgctctgtcacccaggatggaatacagttgtgattacaactcactgcctcaacctcctaggt

SEQ ID NO: 232393 - DNA, 122 bp, Homo sapiens
taaggggaatgtttccaggaatctgactttggccctacctttttctgctttttctctctgcgtgtgtgttctgggcattccaatttggatttccctttccctcccccaatgcactttactgt

SEQ ID NO: 232394 - DNA, 122 bp, Homo sapiens
taagccgcgggaacatccgagtgggagaagcaccgaaaccgtctgagcccgagaaaggaacgagtggaaaattccctcacacccaggccgcccccaggccggggctggggcgcggacactcg

SEQ ID NO: 232395 - DNA, 122 bp, Homo sapiens
ttgtcaaatttgacctggaggtgaaggcgcttattcaggtactgatcccgggacccctgccgggctccagcagccctaacccaagctctgctggtctgtgagcttggcagtgtcactcccga

SEQ ID NO: 232396 - DNA, 122 bp, Homo sapiens
ggtgtcggccctaggtgtcactggcggtcagttccaggctgttccagcagggggcggccacgcacagtgaaagcccacaggtacagccggccagaatggttcgaaagagtgaatctaccagg

SEQ ID NO: 232397 - DNA, 122 bp, Homo sapiens
gttaatgaatatgtactatgacccttcacagggggatggaactgctgcaataaaggtgggcgctggaaagaagatgttttgagaagtcagtgtttccgagaaactttaagcttctaaagatg

SEQ ID NO: 232398 - DNA, 122 bp, Homo sapiens
gcgggtggggccgcctcccggctgggcacgcctccaagccagactggacgcgaaggaaaccggaacctgtctgcctacggtgcctgtttccggaagcagcttgagtccggacaccaacgacg

SEQ ID NO: 232399 - DNA, 122 bp, Homo sapiens
ttagcaaccggttggaaaccagagacgctaatgaggcggagtgagctgggagcctgtgcccgctgcctctgctcttgctaaacccccttctcccaggcttccctgctgtcttaacaaacata

SEQ ID NO: 232400 - DNA, 122 bp, Homo sapiens
aagccctgatcgctaacgagggagtggcccctttaaatgcaaattaaccgccttctctctcgcccccccacccccatcccaacttcgctcctcgtgcccagactccaccagctgccattgac

SEQ ID NO: 232401 - DNA, 122 bp, Homo sapiens
gcggcaatgcgaagtgattgcctgctctccggaagcccggcctccccgaaggtccctccacgcaccgccgccctcacccgggactcaccaggggtccggtgccatcctgcagactccgcccg

SEQ ID NO: 232402 - DNA, 122 bp, Homo sapiens
gctctcggagaagcgcctgtatttgcatggcgttcggggtttttggtaggtagagcagcccgtcactctggaaggccgggaccgcccactccacctcggtccacagctctcttcctgcgcag

SEQ ID NO: 232403 - DNA, 122 bp, Homo sapiens
gaggttgctgctgtggttgaactgcttgccacagcgagggcacatgaagatgaagtgctgcgcccgcatgtggaagaccagcttctccacgccctggaacacttccgggcacttggtgcact

SEQ ID NO: 232404 - DNA, 122 bp, Homo sapiens
ggataccggatgtggccaggcacacctcaaagtcttggctctccaaaaccagggcctggtcgagagttttattggacaccgagttcctgcgaatatctcacttttcacacaggcactgccaa

SEQ ID NO: 232405 - DNA, 122 bp, Homo sapiens
cgcaggcgcaaaatgtcgcagccgtagggaggctccgcctctgacgcttgccttgcatcacgtggtaatggccgctcaaaaaacgccttagcgaaaaccagagcgtgccctcgtcacgtgat

SEQ ID NO: 232406 - DNA, 122 bp, Homo sapiens
agagatttaatacatctggaggaaaataattagagggccagataatcaattgcagagcgccgccaggaaacatcgtgttgaaagaggccggggtgattacaaacgagtctcaatgtcatgag

SEQ ID NO: 232407 - DNA, 122 bp, Homo sapiens
tgttgaaaactgaatatcgagaggaggtcgcggcgccggaggccccagaagggtcgaaggcgccgcgggctggggtcggtggcttagggagcccgtctggccatggtggccgcggctggtgg

SEQ ID NO: 232408 - DNA, 122 bp, Homo sapiens
cccgtgcgctttgctctgcggcggatcccgggtctccgggagagtcgggctcgggccctgcggttcccaggctggactggccgccctgttactaaagttctgagaaggaaagtcagccgtca

SEQ ID NO: 232409 - DNA, 122 bp, Homo sapiens
acctgcccgccctcccgctcgctccccacttggcccgagaagccggccgctcggcgctggcgggaagtccgcaagcacgcagccgctgcaagcacgcacactttctccaccccggcacaatg

SEQ ID NO: 232410 - DNA, 122 bp, Homo sapiens
agaaacttccatctaaatcagattgagtcatttgctcctcttaacaaaaaatctgatgttcgacacaattgcagcctatcactaaccctgctgttcgcttgcatgtatcttgtttttaaaaa

SEQ ID NO: 232411 - DNA, 122 bp, Homo sapiens
ttcagttccttcctggattctcaggaggagcaggtctccctctaagtgccacgggacaagcgcgttggtggtaaacggagccgcggggaagagtggggcctttgagaaccagctgcattgac

SEQ ID NO: 232412 - DNA, 122 bp, Homo sapiens
ccggcgcagaaggtgagtccccccaccgtcccccggccgggctgcgggtcgcggggcaggcgcatgaggcgagtctcccatcaccacccccggacaagcgagctctctcccgccgcgcggtc

SEQ ID NO: 232413 - DNA, 122 bp, Homo sapiens
cgtgctggtcgccggcgttgccagtcttgagccgcttaggggcaccgccgccctcactgccgccgccttagtagccgccaccgccgcctctgccgccccccgccgccatcttcatcgctccc

SEQ ID NO: 232414 - DNA, 122 bp, Homo sapiens
cgacgaggcatgggtgacgggttccctggtgtcgggaagccacgccccgtggctgtgccgcgcccttgcagccaagcttcccagccttgggggtgcaggtctgcctgcgattgcctctgccc

SEQ ID NO: 232415 - DNA, 122 bp, Homo sapiens
ccacagaaatctcaaaatctaggtgttctcagcggagctgggcaccttccctacaagcctcgcgtgtttcctgtctcagcaaagacaacactacaatctggtcattatccccctaccccaat

SEQ ID NO: 232416 - DNA, 122 bp, Homo sapiens
gttgtgcctgtattaaaggtgtggaactgaacatagacgtggtattgccgggtgcatgttcgtggacctgtgccactgtttcattgcatcagtgcccctcagaggttcccggtactgtattt

SEQ ID NO: 232417 - DNA, 122 bp, Homo sapiens
ttctttttggttccgaagctgcaaggagggaagggggctgcaggggaggggtggagcacacgtgccccacagcaacaccaccacaaacagctgtgcaggagctcactgcccaggcgggcacc

SEQ ID NO: 232418 - DNA, 122 bp, Homo sapiens
ctcccaaccccctccctgcttcctctcagggcttttcctgaggaaaccaggccggaggggcgggctgccacgaggcacctccctgagagggagggggtggctggaaagactgacactcaaaa

SEQ ID NO: 232419 - DNA, 122 bp, Homo sapiens
tgagatctaatctaattatctgatggctgtttttgcatttggtctcacaagatctgaatccggaagccccattctctggttttagaaatcaaattgcattcggcagagaaaagagaaaaatg

SEQ ID NO: 232420 - DNA, 122 bp, Homo sapiens
attacaggcgtgagccaccgctcttggccaacacagacttttccataggatcatagctgacgttcaaaacttagcacagcactcgacacctaatgggtgctgaataaatatttgctgtggtt

SEQ ID NO: 232421 - DNA, 122 bp, Homo sapiens
gaattctccccacctctctcactctgcttcttgctgttcctgcacttgctttttctgctccgtggaatgctattaccctcaaactccacctcctttctgactcaccttcttcaggtctttac

SEQ ID NO: 232422 - DNA, 122 bp, Homo sapiens
gccatatgtggtctgaaatagagacgtgagactggaaattatatcattgcccagtcagagcgaggaaacggggagacattcttttttaatctctgctctctacctgtctacgcgtcaagcgc

SEQ ID NO: 232423 - DNA, 122 bp, Homo sapiens
tgaagcatgcatgttcacagaaataggcctgagcagggctagcatgggtgacgtcacaggcgtgtgcttgtgtgggtgctgggctgctcctcccagacagcgcagctgcacgtattgccatt

SEQ ID NO: 232424 - DNA, 122 bp, Homo sapiens
cctctttatgccaacccctgtccgggcacgcgtgttcccagaatctactagaaagaggcacgtgcctttctcagtcttgtgaactcacaagactgccgtgcagtgagagaacacatggaggc

SEQ ID NO: 232425 - DNA, 122 bp, Homo sapiens
tggtctttgttaggggtccaggctgactggggttcattggtgtccactgggggcagctcccgtgccttcagcagtcctgagtctccttctactgagtgtggagtctgcgtaccctccgggct

SEQ ID NO: 232426 - DNA, 122 bp, Homo sapiens
tggaggtcacgaagcttcccgtgctggaaaacgtgtcttacatgaaacagccagccggggcgtcgccctccacgctgccgtcccacgtccccggccatgcgaaactggagaaagagcaggcc

SEQ ID NO: 232427 - DNA, 122 bp, Homo sapiens
tcctcagagctgttaggaaggaatggcaggaggcggagctggaaggaatgggtcagattacgccaccctaagggaaactggtggaggattttaaaggtgagagacgtattggattcagtgat

SEQ ID NO: 232428 - DNA, 122 bp, Homo sapiens
tcaagataaccaggagagctataaagatattgaagctcacaacataaataagaacaagctcgctaatatgtctatcagagcaagagagaaccatgactgctggaatatcacagaaaaagtga

SEQ ID NO: 232429 - DNA, 122 bp, Homo sapiens
agacgctcttccaaaggcctctcctgacccgcccacggagtgggggcagtttggtatcaacgcacagtctttcccttctaggccctcctgccaacacgacacacaactttcgccctcagttt

SEQ ID NO: 232430 - DNA, 122 bp, Homo sapiens
tcggtccgctggttggtcgggcgcttggtccggcagttggtcggtgggccagtggcccgtcgctcgcttctgggctctcatgtttgaaggtgggagggacacgggagcggcccgcacacctg

SEQ ID NO: 232431 - DNA, 122 bp, Homo sapiens
tcacagggaggaaactgaggcccagaggagcaggtagctgttcaaactcactgagtgactcgctgtccccgtcaggtcggagggccgggccccggacccctatttcaaggaccctccctgac

SEQ ID NO: 232432 - DNA, 122 bp, Homo sapiens
aggattcctaaatagtctctcgctttttacacaaaaagcagaaacctgcccagtgtcatccggcaaacccacgacgggcaaggtctccccgcgcaggtcaggtggccgcagggtgagggcca

SEQ ID NO: 232433 - DNA, 122 bp, Homo sapiens
ggatgaaataagtttccagactgtttactacagtggaatggccaactatcggaacatgagcgagattcctctggttctggtgggaacccaggatgccataagttccactaacctgagggtca

SEQ ID NO: 232434 - DNA, 122 bp, Homo sapiens
cccgcgggggtggggccgggaagccaggcgtccgggctccccgcggccgaagagggagggcgctggcccgttagaaagctccgccgaaccagcccagacaacaaaagcgattgtgcgggttg

SEQ ID NO: 232435 - DNA, 122 bp, Homo sapiens
cggtctctgtctcgatcacataatcgctctctttctctttctctatcacgtcctctatctcgctctctgtctcgtctgttatctctagggcggtctcgctctcgttcccggtctctttcacg

SEQ ID NO: 232436 - DNA, 122 bp, Homo sapiens
gtgaaacagatatttcgagcatgactgagcttattaagagccctgcggcgcttcctctgccgggggtttagaaatttcaaaggatgggggttgagggagggaggagttatgggcatgtgatg

SEQ ID NO: 232437 - DNA, 122 bp, Homo sapiens
atgtgagagacatggcttctgccagagaagccccggacagctgcgagcgctggctgagaacgtcgctgggggccagtctttccggggtcacagccagcatgctgatgtcatggctgataaca

SEQ ID NO: 232438 - DNA, 122 bp, Homo sapiens
gctgggtgtagtggcatacacctgtagtcccagctatttggaaggctgaggtgggaggatcgcttgagcccaggagacattgcagtgagcagagatctcactacactccagcctgggcgaga

SEQ ID NO: 232439 - DNA, 122 bp, Homo sapiens
ggtgatccacccaccttggcctcccaaagtgctgggattacgggaatcagtcactgcgcccggctgaaaacatactcttattgacctgcaatcaccgcctagggcaggaaccttacctgaat

SEQ ID NO: 232440 - DNA, 122 bp, Homo sapiens
ctcagcaccctccggaggggacccggccttcctgggcatggccgtgagcaccctgtgtggcgaggtgccgctctactacatctaggacgcctccggtgagcaggtgtgatcccagggcccct

SEQ ID NO: 232441 - DNA, 122 bp, Homo sapiens
gccccggggcgagacgtgcagagagctatctgggcatcgcggggaggttctgggactccgcggccagctggaaccagccgcgtaacgggaaccctgggctaggggccgggcaggcacgtacc

SEQ ID NO: 232442 - DNA, 122 bp, Homo sapiens
cataacccaccaggaggccactgacagcagcagtgacagatgacaggaaggtaaacatgccgcagcctgcaagcagagagaagagacagggaggtcagttctcagttgagattttaaacatt

SEQ ID NO: 232443 - DNA, 122 bp, Homo sapiens
ttgccacatgtggctcatggcaattgtattgggcagagcagatagagaacccttccatcacgacataaaagttctagagcgcagcactgggggctggcttctgccagttcaagagcccttga

SEQ ID NO: 232444 - DNA, 122 bp, Homo sapiens
ctttccctaaacaaaccaacctctcctcacatcccccactctgtactttcactgactatgcgttggcagattctgccaagttctacctgtaactggcttcattttcaagtcagacgtttggc

SEQ ID NO: 232445 - DNA, 122 bp, Homo sapiens
cacaccaccggtttctgctgctttggcacagccacgcagcacctaggatgcttctctgcacgcagcagaggcctaatccgtgcaccctctgacggtgttggagggagctggggagcaacatc

SEQ ID NO: 232446 - DNA, 122 bp, Homo sapiens
gggtggcagggctgctctgcagggggcggcgtgaggggcacaggcagggcatcgcacactcgccacagccccaggaggcaccgcacacgccagagcccgggtgtaactacaggcgctagtta

SEQ ID NO: 232447 - DNA, 122 bp, Homo sapiens
aataataaaagtctgggaagaagaagaggcgagaacgaccccgggaccgaccaaagcccgcgcgccgccgcatcccgcgtacagcacctacatcccgccaccgtcaccgccaccaccatgcc

SEQ ID NO: 232448 - DNA, 122 bp, Homo sapiens
tgttcggagaccgcagcagtggggaggcgatccgctcccagaacattatggctgcagcttcgattgccaatattgtaaaaagtgctcttggtccgttgtcttggataaaatgttggtggatg

SEQ ID NO: 232449 - DNA, 122 bp, Homo sapiens
gccgagggcgaggagatggaggcggcggcgtggctggaggggccgtgtctggctgctgcccgggtaggggatgcccagtgaatgtgcactgccgaggagaatgccagccagggcccgggaga

SEQ ID NO: 232450 - DNA, 122 bp, Homo sapiens
tgtagttagtggccatgatcttgtgctgtttacactcgttgcttggcaactgcagaaggccgacctcctgggactaccaatgagcagaggctgcctttctcttctgcttattattattcact

SEQ ID NO: 232451 - DNA, 122 bp, Homo sapiens
cagggacacgaagtaggcggggcctaggaaggaaatggcgtagctgggcttcgccaggcgcggaatgcaggttatcttcctggagttccggcttggaatttattggaaatgcaaattctcaa

SEQ ID NO: 232452 - DNA, 122 bp, Homo sapiens
acagccagtctttctgaagctcttactccaacttgggcactgaaggctattcacaagccccgggggaatggaaagagggagacaaggtcacttcttgctgcttttaaaaggacttactccaa

SEQ ID NO: 232453 - DNA, 122 bp, Homo sapiens
agcacagcggagcaggaggcatgtgggggcctctgccaggcactgcacaggagggcgcgtcggtcggtggctcacctgtggacgcgctccagctccaggcgatgctcctggaatgccagctg

SEQ ID NO: 232454 - DNA, 122 bp, Homo sapiens
ttggccccagatgcctctgtacctgactccttatgtaacaaactgcaatttaacttagtacgtcaactactgaaagcctaacttaggttgcagtttgttacataagcactcaggtacagagg

SEQ ID NO: 232455 - DNA, 122 bp, Homo sapiens
gaccttcagggtgagtgttacagctctcaaggcggggcgtctggagttgtttgttccttccggtgggctcctggtctcgctggcttccggagtgaagctgcagaccttcccggtgagtgtta

SEQ ID NO: 232456 - DNA, 122 bp, Homo sapiens
aggggcccctcccagccaggtgtcagcagagggagaggagagccaaagaaggaggaggtgcggccaccaccctagtccaaggctgctggctcccaagcctggtgttggtgggagggacagag

SEQ ID NO: 232457 - DNA, 122 bp, Homo sapiens
ttgccacgcccctctgcgctgggattggcttagtgctgggattcccacccacccacagcccgccatggcgtctcagctccagaaccgactccgctccgcactggccttggtcacaggttgag

SEQ ID NO: 232458 - DNA, 122 bp, Homo sapiens
aagcctagtgaaccgccagctatgtggccttaaccatattacttaaaaattctgagccttcgtttatctgatgtataaaatagacttttgcagtgacatctgttgtttttggttgcccagaa

SEQ ID NO: 232459 - DNA, 122 bp, Homo sapiens
cactgggctctgcatacagtaaatattcagccgttgtctgcagacttgcctaagtgtgtacgcagtagttattctaggcaggtgctgtgctccaggctggaagttgtgtataggatagagag

SEQ ID NO: 232460 - DNA, 122 bp, Homo sapiens
aggggatgagtgctccaggagaggtctgagagagaagggcaggggcctgagaaagccccacgcccagccgtcattctgcagatgtttgcagagggcctgctctgggccaggaagggaccggg

SEQ ID NO: 232461 - DNA, 122 bp, Homo sapiens
gctattttttaatgacatcttttccaaaatatgtcaccaagtacccactcctgcgggagccgcccgggctggggagggcgagtccgagcggggcggggcagaggcggccgaggggcggccgg

SEQ ID NO: 232462 - DNA, 122 bp, Homo sapiens
ccagctgatgcgggtgcgcgcgcagctgttgtttactagccggtaactgtttcagagccgcggcgcgcgcagggttcgcgctgccggggctggcgccccctccccggcccgacgccagagca

SEQ ID NO: 232463 - DNA, 122 bp, Homo sapiens
tgtttgaggagcaggaagaaggctcagtggtgggcaacatcgccaaggacctggggttggcgccccgggagctggcggagcgcggagtccgcatcgtctccagaggtaggacgcagcttttc

SEQ ID NO: 232464 - DNA, 122 bp, Homo sapiens
tttaaagggctgggatgtctcctgaatgctatgaggtgcttgaaagggcctcttcttacccgacttgctctctctcatctcttcatttccttctgccccttgcttgccttagcctccatcat

SEQ ID NO: 232465 - DNA, 122 bp, Homo sapiens
ggagcagcttaatcacactttgggttcagtgatgtctccagttgccacagtaatcagaggcggcctttacaaatagattgcatttgaccttgttggtttgatggacgggagtggagtccggc

SEQ ID NO: 232466 - DNA, 122 bp, Homo sapiens
tgatgtcagccggttcaccttaggttcaaaattccaacaggcaaaaatgtcataaaacgtcgttattcctagtgactagaagattaaattgcactctaattgagagcaagccctaaatgtca

SEQ ID NO: 232467 - DNA, 122 bp, Homo sapiens
cgagcaggcggacaggcagagctgcccagtggccgaggcgcggcagggctccgcgttgggcgagtgagtgagcctctataggacagcaggactgggactccagtggcaccagcggccccttc

SEQ ID NO: 232468 - DNA, 122 bp, Homo sapiens
cctcaggtgatcctcccgcctcggcctccaaagtgctgagattacaggcgtgagccactgcgcctggcctaaaattgttttttagatggtaaattttacgtgacactagtcccctcttatcc

SEQ ID NO: 232469 - DNA, 122 bp, Homo sapiens
ctgggcgcacaggtggtgagagcctgggtcaccccactcccactggatgtgccctggtggcgaccggggcacagcccactgtcaggtcgatgggaaagactgcttggcacagaggctcccgc

SEQ ID NO: 232470 - DNA, 122 bp, Homo sapiens
ggtcattcccactcagatcattttggagggaagaattaaagcatccaagtagctaaatcccggctgctgctgatttgtatgctccaagggaggagatggcttaaaagcaggagtgtcaaagg

SEQ ID NO: 232471 - DNA, 122 bp, Homo sapiens
atggggggtggtgcttctgggagctgcgctgccctctcccccacggcgagccggcctgcacgttctggaagcctccaggtgatgggtcgggggagtctgtggactcctccctcagcacccac

SEQ ID NO: 232472 - DNA, 122 bp, Homo sapiens
tttgttcatcagaggtggcaccttctgaatgaattacaccatttcattttagacaagctacggtacatacaaaacaagtgtgtggagggggttggggggtggacatgaatagagattggagg

SEQ ID NO: 232473 - DNA, 122 bp, Homo sapiens
tccagtgtcggtagagtgtgaggatggagaccggttcccggcgcaccatgtcatcgtcaccgtgcccttaggtaggtcaggttttcagcccaaacccccatcccaagtgcccccgcctctgc

SEQ ID NO: 232474 - DNA, 122 bp, Homo sapiens
acgaccacgtgaaggagactggcttccacttcaccatcacgaaccagggcgcctcggttgcgggcccggcttcagcctcaagttctggcaaggtcagagccgactccaagtcatggggagga

SEQ ID NO: 232475 - DNA, 122 bp, Homo sapiens
gggagttgagagcaccgcggctacctggcttccctgagtcccggctgccgggaacgggcgcgggggtgaataggtaagttagcgcctagtttccctcgctcatccaagaagcgaagcttgga

SEQ ID NO: 232476 - DNA, 122 bp, Homo sapiens
actacaactcccagcataccaggcgcggcgcgcaccgccctgccccttcctctggggttgcgaaccgcccccgagcctggtacaggctgggattgtagtcctgcagccttgtggccgaaggg

SEQ ID NO: 232477 - DNA, 122 bp, Homo sapiens
cccgcccctcccgcccctcccgcccctcgcctgcactgctctcccttcgctgtggggaagcgacaacgtcccgataacttgcagactgtggcgcaactggtcttggtagcggaggcacccga

SEQ ID NO: 232478 - DNA, 122 bp, Homo sapiens
taataacagaaattattactaaacgttatttgttgattcatttcagattgaagaatgtcccggattccactggggaaggtcctcctgaggaatgtcatccggcacacagatgctcacaataa

SEQ ID NO: 232479 - DNA, 122 bp, Homo sapiens
agtctgtggtcccacccactcgggagactgaggcaggaggatcactggagtccaggagttcgaggccagcctgggccacacagggtttgggtcttgcatgtgagcctggtctgtttggtgaa

SEQ ID NO: 232480 - DNA, 122 bp, Homo sapiens
tccaaagaaggaggtctgggctgacgcggaaccgtctccaaagaaggaggtctgggctgacgcggaaccgtctccaagacattgttcatacaaagcaagcatgcagcataaccctgtcagtc

SEQ ID NO: 232481 - DNA, 122 bp, Homo sapiens
cgcatacaaggctgtcacagataaggcgtattgtgtcccttccttcaatccctgcagcaccgtattggttgtatctcccctcacagtgacctcttgagtttcaccccctgccactggggtat

SEQ ID NO: 232482 - DNA, 122 bp, Homo sapiens
cccgccccccccgcgcccccccccgaacccgtgcccaggcctggcccggctcccccagcccgagctccccctgcgggaaccttcccggcttggccgctcctccctgggcaggactcgacatg

SEQ ID NO: 232483 - DNA, 122 bp, Homo sapiens
gagccactgcacccagctggctcaatatttctaacagctaaaaagctcattttgctgctccgctcctcagatggacttgctcccctgtgcagtgctatatatgtgcttggggaccatgctgg

SEQ ID NO: 232484 - DNA, 122 bp, Homo sapiens
actccagcctggcgacagagcaagactctgtctccaaaaaaaagaaaaaagaaaacagtacgttgcatgtggtaaatttatgtttggtgaaacttttgtttcagttgtacatatagatttat

SEQ ID NO: 232485 - DNA, 122 bp, Homo sapiens
taaatgaggccgttcttgtaaggagcctggcacacggaaagccctcaacgtcaactgtcacggtcttattatccttatcgtagaactcctcttagggtgccctctcctcaaagcctcaaaca

SEQ ID NO: 232486 - DNA, 122 bp, Homo sapiens
agccccgagtcgctgctggacatcgcggcgcgcagggtggcggagaagtggccgttccagcgcgtggaggagcgctttgagcgcatcccggagccggtgcagcgccgcatagtctattggtc

SEQ ID NO: 232487 - DNA, 122 bp, Homo sapiens
cacagattgtccccttctctcactcctttcctctgtcctcatctcccattcccttcccagcgtcccctgcacttcacgctggtggcctcagtcctgtgcacttgctgctccctcttcctgga

SEQ ID NO: 232488 - DNA, 122 bp, Homo sapiens
tttagcagagatagactgaagaaatagacaaatgggatggtgcaatgtattttaacattccgtgggatgggatatagtacgctaagaatttaaaactagttaaacaattctaaaattaaacc

SEQ ID NO: 232489 - DNA, 122 bp, Homo sapiens
aacctgccaaggggaataggtcgcacggagagaatacgacacgcttggagggaagaaccacgtgctgtacaggtttaaaggatggagagtcacgtgcgcttaggtcccaaacttaagggacc

SEQ ID NO: 232490 - DNA, 122 bp, Homo sapiens
cggctgcagcgtttttcagaagagccgcggccataatcacaaggcgtccgcctcccggcccgggagcccatcagttattatctgcagcacaaacacctaccactttgtactaacattttggc

SEQ ID NO: 232491 - DNA, 122 bp, Homo sapiens
tgattatacactcacgtttcaagggtgtcagaccacgcagggatgcctgccttggtccttcgcccttagcggcaagtcccgctttcctggggccggggcaagtacccctcaaccccttctcc

SEQ ID NO: 232492 - DNA, 122 bp, Homo sapiens
tgtgacgattatgcacatgaccagaggcggccggtaatcagggcagagtctggtgtggaccgccgggcgcagagcggctccgcggcgggagctgagcggaaggcgcgggctgcgatctgctc

SEQ ID NO: 232493 - DNA, 122 bp, Homo sapiens
tagggttgggggagagatatttttagaggtgactaggaagccagcactctggcgcacccccggctggcgggcgctgggctccaatgcgggcggggggtgcgcggctcggggaggggtattgt

SEQ ID NO: 232494 - DNA, 122 bp, Homo sapiens
gggagagggaggcggcggttgggtgctggagggcgctggtgccgtgccagtgggcggtggcgccttacgccacccgccccacccccgtcaccgtgcccgccccactgcgtgggattttacaa

SEQ ID NO: 232495 - DNA, 122 bp, Homo sapiens
gctcagccaagcatcagccatctatggggtaggatgcaagaattcagcaatgttaccttccgggcagtctttctcaagaactcctggaggataggctcaacacaagcaaggggggaccaaga

SEQ ID NO: 232496 - DNA, 122 bp, Homo sapiens
cagcctgggcaacaagagcgaaaatccatctcaacaaacaaaagtgcaagtgagcaagagcgcacagacaccgggaactgagggacacggcaaggggccaaaagaaagggtctttttggcag

SEQ ID NO: 232497 - DNA, 122 bp, Homo sapiens
atgggggaaggagcaaccgccaccccgcccatgtgagaaaagagcccagcagccaaatgccggtgcaagtatttacttaaccttcctgagaacgcaaaggtaaccggagtgtgcgtgcgtgt

SEQ ID NO: 232498 - DNA, 122 bp, Homo sapiens
agaccgggccttacttctgtaacgatactgtgaggcatcggaaggccagcctgttgtgtccgttttgaaggtcggtgggctagactggctggccttctaggggtgtggagacttcccaactc

SEQ ID NO: 232499 - DNA, 122 bp, Homo sapiens
gccttttcctgccacaataggcctggcacctccaccacaaggtcatgtgctgactgatgtcggcacagagcaggtgggacatgtctggaggggacatgtggtttcatggctgcaggaacctt

SEQ ID NO: 232500 - DNA, 122 bp, Homo sapiens
aacgttctacacgccgttttctaggaaacgagtgggatctgatcaggtggatcctgacctcgcgcttggcatgatttgtgactttggtggctctccctgcagtgttgtcaaacgctgctggg

SEQ ID NO: 232501 - DNA, 122 bp, Homo sapiens
ctgaggcacttactttggtataaaagactcttggtctccgcattaaagacacaaacaggccggcacggtggctcatgcctgtaatcccagcactttgggaggctgaggcgggcagatcacga

SEQ ID NO: 232502 - DNA, 122 bp, Homo sapiens
ccacttcctctggctgtgggatggataggaagggaatggagtgggggaaacaggaaagatcggacagatgctgaaagagaacaagacacagacacagaaatgcaagcgattccctcctgtcc

SEQ ID NO: 232503 - DNA, 122 bp, Homo sapiens
cgttgaatccttcgggctgcttgacttcggaggcctatgaagtctgatgtttttatcctgcgatactggggatggatttttcatttagtgttggagatagtgttaccatgtatatcctcggg

SEQ ID NO: 232504 - DNA, 122 bp, Homo sapiens
agcccagggctgcctatgagcgacctcaaaacgcataacgtccacgtggagattgagcagcggtggcatcaggtggagaccacacctctccgggaagagaagcaggtgcccatcgcccccgt

SEQ ID NO: 232505 - DNA, 122 bp, Homo sapiens
tgtgctccacagacggcactttccgggagctccggctggtgaagggccgcagtccctgcgcgggactccccgagatcagaaacgtgaatggggtggaccgcctctgtgtcctgcatgtggag

SEQ ID NO: 232506 - DNA, 122 bp, Homo sapiens
atgatttttcctctcgaatccaaaccagccagggcgtgaactgagggcggtgagggggtacgggcatctccctgcatgcaacgcggtttttgtataaactacaaatcccagcatgccactct

SEQ ID NO: 232507 - DNA, 122 bp, Homo sapiens
tcgcctttctttgtcctcctccctcttcgagtccaatcaatgccctttctccttaatgaacgaggtgtccttggagtttgaggttttgttggatgattttaaataaaattattaagttataa

SEQ ID NO: 232508 - DNA, 122 bp, Homo sapiens
cgcactacagcgtggaagtgggtaagggcgagtggcgaccgtggccgaggctcggattcacgggtggaagccagattctcccatggggcccaccacatctcctcactcgagcctgtagcagc

SEQ ID NO: 232509 - DNA, 122 bp, Homo sapiens
agtcacaaatcactgtggtctttacagagccccaggaaatactgagtgagtcaactgagacgactaaaaagatagcatgctaaatcagatactgtcttaaactagacaccatgggttcaaga

SEQ ID NO: 232510 - DNA, 122 bp, Homo sapiens
cgagatccagctggctcctccatcggggtgctcacactttctcatttgatttcaggtctgcggacgctgtataccctcctccacttcccgctgcagccaataaaggccgttcctaccatagt

SEQ ID NO: 232511 - DNA, 122 bp, Homo sapiens
cgggcattttgagctgcacgaacccagccctctcaagacaaagctgcctcaccctgctgtcgccattcagtgccccaggtgacaacagtctcctgagaacagctgcagggagcggttctggc

SEQ ID NO: 232512 - DNA, 122 bp, Homo sapiens
ctactatgacaccttcaaaggagatgactacaatgaggagaatcctactgaacccggcagcgacggcaccatgtcagacaaggaaattactcatgatgtcaaaggtaaccccatgtagagcc

SEQ ID NO: 232513 - DNA, 122 bp, Homo sapiens
caagcaaaaaaaaccaattattagattagatttattctaagtgtctttctggagtaatgtcggtgatatagtgtatcagctaaagccatcatgtgtgagacaaattaaaaacaaatctaata

SEQ ID NO: 232514 - DNA, 122 bp, Homo sapiens
taacaaccccgcgaaaagggggatactagtctcattatacagatgagaaaactgagggtccgagtggttgagagattcgcgtgaagtccacatccagtccacacctagatctgtctgaccct

SEQ ID NO: 232515 - DNA, 122 bp, Homo sapiens
gccttcctttccattcgctgtttccttctctagctcagtctgaactgagccctcccacagcgtctcccacaggtctccccatcccgatgggagagcgggcctggcccggtctcaggtgatct

SEQ ID NO: 232516 - DNA, 122 bp, Homo sapiens
ctggacttttccctatcatagcacttatcacactatattgtcattgtctgtttacttctccgtatctcccacttgccagtgacccaggaatgatatcagtcttgttaaccattgtataccta

SEQ ID NO: 232517 - DNA, 122 bp, Homo sapiens
ctggagactcagctgaaagctgtgagcccccaacactttctgcaccaggggacatctggacgtatttcacagagccactatagttatatagaaagatatatgtttctttattaacactttaa

SEQ ID NO: 232518 - DNA, 122 bp, Homo sapiens
cagcatcaaaagtgcgtttgttccagccatagcaaggaaaaattctgcctttcctctttacgactgagcactcaggttgtccccaccactgtctggactcctgagtgagcctcccccttccc

SEQ ID NO: 232519 - DNA, 122 bp, Homo sapiens
tccccaggcagaactgccactgacacgtgtgtttctacggtttcacgctgcagttgcattcgggaggccgcaagcctggctatcatgggcgtctgcaagacctcccagcagggctgcggagg

SEQ ID NO: 232520 - DNA, 122 bp, Homo sapiens
gggagggagctccaggcctggagcaaaggctcctcctaggggcccgcggtcggcagagagcgcgggacactcacggccatggagagcagcccgcccggtgaatggagcctttctctgggcac

SEQ ID NO: 232521 - DNA, 122 bp, Homo sapiens
agcctgcaacctcatccctgctttatttacctccaaggcacttaccaccttctagcttgccgtgtataggttgagtattctttattccagaatgcttgggaccagaagtgtttcagattttg

SEQ ID NO: 232522 - DNA, 122 bp, Homo sapiens
tcagcatctcccactgtgtgtgttcccatgagttggactccaagagatgctcttggtaagcgtatctatgtgggaaacatgttactcaatctagcaaggcagccagtgcagtggtttagcac

SEQ ID NO: 232523 - DNA, 122 bp, Homo sapiens
agagagagagagagagagagacgagaggaagcaacgttctcgcgacaagaggggtgtcgacggaaactcggaaatggtcccctagacgacccggccccagctagtgggtggggccagggtac

SEQ ID NO: 232524 - DNA, 122 bp, Homo sapiens
ctggctttgtccgagctgtgtaagcacgcacacacgcacacacacacacacacacgggcgcgcgcacacacgcaagattcagggagagtcatgcgtttattgttcaaccagggctttctacc

SEQ ID NO: 232525 - DNA, 122 bp, Homo sapiens
aaccaagttgccagaggttacataaatagtaagtggcagagcgggactcaggatcccaagcggtgtgattctggtacccaggctcttaaccactatgcaaactgcttccaaactctggtggg

SEQ ID NO: 232526 - DNA, 122 bp, Homo sapiens
ccgggctcaccacttctccccatatcccaccccaagtctggcgccggtaattccgcccgccgtggcaccctgcatctgcaggatctggccgggctccccagtggctggtacctcagctgggc

SEQ ID NO: 232527 - DNA, 122 bp, Homo sapiens
tagatctgcagcctcatgagagggggcattgctgagcgagggggcgtccgtgtgggccaccgcatcatcgagatcaacgggcagagcgtggtggccacagcccacgagaagatagtccaagc

SEQ ID NO: 232528 - DNA, 122 bp, Homo sapiens
cgtgagcagccacagcccgaagaatccccctgctgctctcacggacatggacacgcctcacgtgggcagagagaggcacagcttttgaaaatcatctgtgcccccacccacagacgctccga

SEQ ID NO: 232529 - DNA, 122 bp, Homo sapiens
tcacaggcagagtaagtcagtggggagtgggccccgggcagaggccgcctcgtgtggcttcgtgttcccaccttggtttctctcctgcagctatcagcgttcccggccctccgggcccccct

SEQ ID NO: 232530 - DNA, 122 bp, Homo sapiens
cgcggcggaaggatgcgtctgtgctgcgtccccatagagacgaagtctataaagggccggcgggcggccacggcagccatttctactttgcccgcccacagatgtagttttctctgcgcgtg

SEQ ID NO: 232531 - DNA, 122 bp, Homo sapiens
agaagccaggaactgggaaggcgaggaggcgtgaaggcaccacctactgccaacccggctcgagctggtcactttgccctccatgagatcgtaggtgtgcttgttgttttattttacggggg

SEQ ID NO: 232532 - DNA, 122 bp, Homo sapiens
caatcccaagtcggtaactaaatcggaacagctggagctctgcctggaatgtgaggattccggaccccaggagtagtccaggcaaacttttttggtctggatgatacatgtgatctacattc

SEQ ID NO: 232533 - DNA, 122 bp, Homo sapiens
ctggaactgctgctgtaaccggatgagtggaccgctgtgacagggaggtagggcaggacacgcccctgagtgaggcacggagcctggagggaggagagaagaggagggagccgcggacgcca

SEQ ID NO: 232534 - DNA, 122 bp, Homo sapiens
gactagccgtacactccttatgctgagatccttaaagatagcatctatgtcgccccgaaccgtattgaaaggtagatttcctacgtatgctgtgtaggggggctctgtgggcaactccttct

SEQ ID NO: 232535 - DNA, 122 bp, Homo sapiens
aggaaatgagaactgcagagacaagggggcaagtcacctccccaggctctactaaacaaccgccccatgccctccagctctgacttggagaaaaaagagaagccacagaagataatccggtg

SEQ ID NO: 232536 - DNA, 122 bp, Homo sapiens
tcccccgactgcctgcccgggtggaactggttcattcctcctttgtggcccccagggtggcgcttgaaaccttgttgtgcctgtcagttgtatgtctctccttgtacccccaaagctggtga

SEQ ID NO: 232537 - DNA, 122 bp, Homo sapiens
tttttcttttttgagacggagtctcactcactctgtcacactcaggctgcagtgcagtggcgcaatctcagctcactgcaacccccgcctcctgggttcaagcaattctcctgcctcagcct

SEQ ID NO: 232538 - DNA, 122 bp, Homo sapiens
gaaacgcctaccttggcacttagggaccagaagcctctggatgtctagcaacaggggtcacgggatcactgcgtggggtctctgtaagcagtcccctgaggcagtgcaaaaccggaaacctg

SEQ ID NO: 232539 - DNA, 122 bp, Homo sapiens
cgctgcagcggccctggcgggtgccctggctaccatggaccatcctgctggtcagcactgcggctggtgagtagctccggccggcacgtcccggccactgcccctgcgggtggcgagggagg

SEQ ID NO: 232540 - DNA, 122 bp, Homo sapiens
ccacagatggaaagggaggaatagtaagttctgcttccccaaatgtatccacacacaggccggccctggaggacctgggattggagaggaatctaggtgagcatgtctcaaaggccaggcgt

SEQ ID NO: 232541 - DNA, 122 bp, Homo sapiens
gggttgggaggaggctgggggccccagtacacatgagttggacgtgtgcccccctgcacccgcagactggtccctgagcgacgtggatcagtgggacacggcagccctggctgacggcatta

SEQ ID NO: 232542 - DNA, 122 bp, Homo sapiens
gcggaggctgcagccgcccactgcagaacgcgcccttggttgggtctggcgagctgcccgcgtagtggagtggtgttagggctcccaagtagaaagaacctgttccctacgtaggtgtcggt

SEQ ID NO: 232543 - DNA, 122 bp, Homo sapiens
aaggaagttccctggaagagggcaggggagcgcctctccaatgtagttgcggggggcgggcggtgaggacaccgcttcataagggaaggggtggctgcctccccaagcagggggtggcccct

SEQ ID NO: 232544 - DNA, 122 bp, Homo sapiens
aaacttttaaaggaaatagggcaagcaagggggataggactagcagggtctgacaccgagcgtctctcttatggttagccaaggagaataagcagataaggggcagggtctgctttttagtg

SEQ ID NO: 232545 - DNA, 122 bp, Homo sapiens
ccctgccaaaggaacgctccccagctctggcacccccttctccaacctaaaggccagctccggctaagatagtccatctggctgtgcccccagtccaaccctttctgggccctggccgggcg

SEQ ID NO: 232546 - DNA, 122 bp, Homo sapiens
gctaaacagacagttgcataaaagggcgatcagtttgcctgacagagcctaagcgtgggacgccagagatggcttcctggagaaagtagtcctctgacaggtaaataaaaggaactggaggg

SEQ ID NO: 232547 - DNA, 122 bp, Homo sapiens
tgctggaaccagcccccgcaagggcccgcagcggccgggccgtttacctcagacccgcgccgcagcctcccggagcccgcgcccaggactccctcacgacctctccagggtcccggcccgac

SEQ ID NO: 232548 - DNA, 122 bp, Homo sapiens
actggttcaggagatggagggaagtgaaggtgatgtcccgtgagatcactgacatctgaacgcagcagcatgtgtgatgagcctgcaggtcttgcgggagcttcagaagcgcgggctgacct

SEQ ID NO: 232549 - DNA, 122 bp, Homo sapiens
tgcctgtctcacgctggcacagtccccggacggcaggtcagcaacagtcacatctcacatcgcacagccaggcatacaggcaaagggcctagaactaccccggccacaggtctcagaaccag

SEQ ID NO: 232550 - DNA, 122 bp, Homo sapiens
aaatgtaagtgtggatgagagaggtgcacacaagcacatatataagtaaatcttcattcacgcatgcaggcatctgagtgtgtaccaatgtatatgtatttgtgattatgtgcatgcaagtg

SEQ ID NO: 232551 - DNA, 122 bp, Homo sapiens
aagcccgcgccagtccagttttagccgttcttttggaagagcaagtcagttgaacgccatcgaagaggctcctgatttagatattaattgtgcttaaatgcagatgactccccactctcatg

SEQ ID NO: 232552 - DNA, 122 bp, Homo sapiens
gcgcaaggcgggcgccctaaagtcctatttcactctgttgggaggagggggaaaggtgtacgcaggcgcagtggcgtctaaatttgggcccactaaatgcgtcggagcatctccgcgcccag

SEQ ID NO: 232553 - DNA, 122 bp, Homo sapiens
accgtccagcgcaggagcaaggagtcggaggtcctgtctgtcaccgtcagctcacccaggcgtggtgggcctgaggacttcccaggcttctcctcatccttgtctggagtttgagaggcaaa

SEQ ID NO: 232554 - DNA, 122 bp, Homo sapiens
tctttgatttcagccagccgtgaaaaattatactggtgtaccactgagaaactgttttgccgcaaagagcctacgcctaatcactggctttctccctccgacaaaagtgtaattattttgtt

SEQ ID NO: 232555 - DNA, 122 bp, Homo sapiens
aatgacgatggggtgacggtatctggaggccttaggtggggttggtgaaatttgcatgcccgctgcagtggaaagatttaggggctaaagatagccctttgcctttggcaaggctgagggga

SEQ ID NO: 232556 - DNA, 122 bp, Homo sapiens
agaacgcgcgggcaaatctgctggtgaccgcctggggtggccccctctcggttctaggctcggcgagggtgaggttctccagccgggctccgcgagccttctttagaaagaagagaaactaa

SEQ ID NO: 232557 - DNA, 122 bp, Homo sapiens
aaaaaaaaataccctagattcataaacaaaagcttgcagttacccacagcccaatacaaacgacccgacgccctcacttctatagcccgtgagtctcccagcccctaacaggctcgtctccc

SEQ ID NO: 232558 - DNA, 122 bp, Homo sapiens
tgctttaggtgctttctccgacactgccttatttcaaccacacaactcacttgtgacgtgcggggttatctgcatggatgattcagaaaggggacaggccttcgccagacacggcaattaaa

SEQ ID NO: 232559 - DNA, 122 bp, Homo sapiens
agcaccagactggctgaggtctctgcggctcttcgtctccttttcggggggcggagtgagcggaaccttgtacttcaggctcagcagccccaggagctggagcctgaggagctgctggggtc

SEQ ID NO: 232560 - DNA, 122 bp, Homo sapiens
tcgtttatgtcagttgtgcctcaaagccattttaaaatgactgtcacatatggggtatgtcgctttaaattagcctagggccttctaaagctccagaattcctgggctttgcttttagacat

SEQ ID NO: 232561 - DNA, 122 bp, Homo sapiens
ggccaggagtgggaggggtctttcaaagtgcaggagaagtagctgagcacttgctccaggcgcctggactggatgggccaagcaaggcagggcaggaaagatgcctggggcctgggacttga

SEQ ID NO: 232562 - DNA, 122 bp, Homo sapiens
tcttagcagcctgatgtgtgatttgaggttctacttccattcctttctatgaaagctggacgagcagaattcccaaactttggtctgaagatttagggctcactttatcattacctttggac

SEQ ID NO: 232563 - DNA, 122 bp, Homo sapiens
tggctgcttttgtcacccttgcatgctggtcactctgccctcagcaggtatggatgatgacgccactcacagattcaaagaaagggcaaactggcagagtgagtcattggatgttgctggca

SEQ ID NO: 232564 - DNA, 122 bp, Homo sapiens
tgaccagggccctgttcagcccagcgcagggcacaggcaggttctgagtccggatcatggcgatgagggcggggcttcaggcctggtcagaaccactagcgccggctctgcagggcttcgac

SEQ ID NO: 232565 - DNA, 122 bp, Homo sapiens
tgtccaatcaggggcggcgccggaaaggagggtacggctacgctgcgcaaatgcgtgctacgtcactgtgcgatcgggttgtgcttagcttggggtctcctggccccttgacgcgtcaggtt

SEQ ID NO: 232566 - DNA, 122 bp, Homo sapiens
cgtggtggcaaagtggtgtccacaattacttgtgtcgtccgtgagcacactggctgtggacggaggaaggctgtggctccaggattgtcatttcagcaccgctgcccatggtccaagagccg

SEQ ID NO: 232567 - DNA, 122 bp, Homo sapiens
aacccggactgcgcgcggtgcttgcgggccaacgcgagttctgggtaggtgtgggatctgcgggccccgcactgggagcgcacggccggccctaaaggccccaggcaatgaggggcttagca

SEQ ID NO: 232568 - DNA, 122 bp, Homo sapiens
gatgccacctcgcctctcttctctgtcctcgctcctttttgtgttcagtggccctggttgcgatgtgttttattttcatcgtctttttattggtattgttttttttctctttttcttttctt

SEQ ID NO: 232569 - DNA, 122 bp, Homo sapiens
ataatcgcccatctgaaggtcctttacagacgcggttacttgagatgaaccttatgcatgcgcctcaagtatgtgttttaatgctttttaggcatgtttccaacattgttttagtaattgtg

SEQ ID NO: 232570 - DNA, 122 bp, Homo sapiens
gctgggctgacatcggtttcacctcggccacggttcccacgatgattgtggacatgcagtcgcatagcagagtcatccctcatgcgggctgcctgacgcagatgtatttcttggtctttttt

SEQ ID NO: 232571 - DNA, 122 bp, Homo sapiens
aagcatgtgtgtagtgtaactgagtcccctcagggcaggtgactgagagccaaagccacacgcaggcacgccatgtgtgccactgtgcaggcaggagtagctccgggccctcccctgcctcg

SEQ ID NO: 232572 - DNA, 122 bp, Homo sapiens
aacctcctggctcaagctatcttcttatctcaacctcctgagtagctatcaccacaggctcgcgccgccacattcagctaattttgttaattttagtagagatggggtttcatcatgttacc

SEQ ID NO: 232573 - DNA, 122 bp, Homo sapiens
gtgctgtgttcaaggtcaccaggaagcttgggcagtctttcctatctgctcctggtgctgcggctctgcctccccagctctgtccctgtcccccctgcccctccagcccccaccagcaactt

SEQ ID NO: 232574 - DNA, 122 bp, Homo sapiens
tttggaaaatttaaccagaatatagaggaagcataagtcctgtttcaagagaccagctcacggagcatgcacatttctcaccataggcaagctatggacaattcaatcacatgggatggccc

SEQ ID NO: 232575 - DNA, 122 bp, Homo sapiens
gtatacggagtaatggttgaaatctcactggcgcctcagcaggacgggcagccagatccgcggctttggagaaggccagcccacggtcgtccgactgaggcgacttgagcaagaccaaaggc

SEQ ID NO: 232576 - DNA, 122 bp, Homo sapiens
gaaactccagagaagctgccagcccaacaggatagccaatgccacccatggctgctgcgacggacattgggagtgactgctgtgtggagactgctgtactgggaccatcagtatgaatactt

SEQ ID NO: 232577 - DNA, 122 bp, Homo sapiens
gggtgtcatgaccacggccctcaccaggatgggcttgctgtggggtgtgatgggctcctccgccaccatgtcacacatgtactcgatgtacctgggggcagacgtgccgcgtcaccacgtga

SEQ ID NO: 232578 - DNA, 122 bp, Homo sapiens
ttcagccaggtgcagactaaggcagtgcaggttccaggcagaagggaaagcacgtggacacgctgagatgcaggcaaggcctcacagccagagctggcttgtcacctggcgtgggaacacct

SEQ ID NO: 232579 - DNA, 122 bp, Homo sapiens
gctcctcctccttgtggcgctgctgcgcctggtggcgccagtactccagcactaggcagccgccgcccacgatgaagatggtggcttcgcccagcagctctgcgcccagctcagctgccgcc

SEQ ID NO: 232580 - DNA, 122 bp, Homo sapiens
ggaagaatcatcccagacttctccctgtctttacctgcatattcaatcagttgctgagtccggattccacctcctcttcctatcttctgattccttttctgttttcccagacttgtcttttg

SEQ ID NO: 232581 - DNA, 122 bp, Homo sapiens
tgtcattttgcccgtgaggatggcctgttggccgcacggggacgacagtcaagagagaaccgtgaccttgtttgcattgcgttgctgatacacacgagtctttgaaacaggccatccatgag

SEQ ID NO: 232582 - DNA, 122 bp, Homo sapiens
gggggccagggaaggagctaggcaggagggagaagcttgggggcttgagggactgtggagcgatgacacatcagtttgagactgcataaaaggaggatggggaagtcagggtccagggtgcg

SEQ ID NO: 232583 - DNA, 122 bp, Homo sapiens
tcagtactgagagacccggaaggcggggagcactgaagactccacaccgggagtcagtaccgagagacccggaaggcggggagcactggactccacagcgggagtcagtactgagagacccg

SEQ ID NO: 232584 - DNA, 122 bp, Homo sapiens
gccggtaaagcagtgggttgacaagcgtgtggccaaacctgaaggccgcggtggcgaaggcgttgaagatgccagcattgatgccggggtcgtagccgtggtactctcccagcgtcctcatg

SEQ ID NO: 232585 - DNA, 122 bp, Homo sapiens
tccctcctcctcacagcagagacccgggggcatgaggcagcgtctgctccagagtgggcccgatgggcctgtgggccgggtgaaaccatgtgcacagaaagcttgcagcagacaagaaacat

SEQ ID NO: 232586 - DNA, 122 bp, Homo sapiens
acaggcaggagccgggacaggcaggacccgggacaggcaggacccgggaaaggcaggacccgggacaggcaggacctgggacaggcagccattgctctggaaccctcccagtgtggatagag

SEQ ID NO: 232587 - DNA, 122 bp, Homo sapiens
ggtccccggcctggccctccgcgtccgtgggactggatccacagcgccgccttcaggaagcgaggcctccatgcagccccaggagggccctgagcacgcgcactcaccgcacatgcccaccc

SEQ ID NO: 232588 - DNA, 122 bp, Homo sapiens
ccgcacctacactttgctgtggggaggcactccttaggggaatagactgctggaaacgaccgtccaatctgatggaaagaactctaccaagttaataagcacaaaagcccagctcagtagca

SEQ ID NO: 232589 - DNA, 122 bp, Homo sapiens
aaggaaagaaggaaggctgtgaagaaccgtggtgcctgcctgcacagccctcctcgcgtgcgagcattagttggctaaagtcgcctgtctcgacagtctcccctgcggggtatctggggacc

SEQ ID NO: 232590 - DNA, 122 bp, Homo sapiens
tgcgctgggcccgcctcactgtagggggctgcgctgggcccgcctcactgtcgggggctgcgctgggcctgcctcactgcacgggaagtgtgctgccgctgtccttggtgctgaagtcaagg

SEQ ID NO: 232591 - DNA, 122 bp, Homo sapiens
agggaatgccgacacctgctgccacgcgcaggaacattgaggacgctctgccgagggaaacgggccagtcctaagacaaacaccgcatgattccactcagccgaggcccctagaggagtcaa

SEQ ID NO: 232592 - DNA, 122 bp, Homo sapiens
cttcccagacagtcgtaaacgccatgtgtttacgcgactggagcaagcggacgccggccccgctccgtcattgcaggccacgcctccactgaaccagggccacgcccccgagatgacggcga

SEQ ID NO: 232593 - DNA, 122 bp, Homo sapiens
taggaagcccaggattccggggcccctcatttccaaatgggagcaggactcaaagaacagcgctgggctctgacgccaagtccatccccaggcagctggaaactcccgggtcgcagagcagc

SEQ ID NO: 232594 - DNA, 122 bp, Homo sapiens
aatggctggctctccccgggaaatgacactgtcaaagccttgcccaaaccacgtctctttcggtctcttttgaagcaagatgagggccagggcagcagccgtcaccagggccgttagcacac

SEQ ID NO: 232595 - DNA, 122 bp, Homo sapiens
gacaggagagttttctgcgggccagggcggcggaggcgggacttccgcttcttcgtgtgacgtcatctccgtgggccggtttggccctgaaacagtgtggggcctagagcgctgggtgggcg

SEQ ID NO: 232596 - DNA, 122 bp, Homo sapiens
caaggaaggtgggtagcccgggggtccagctctggaccttggttcactcacacctccccacgccctcagtgctcccgggcacccacacgtggcctgtgcatcctcctgtcacagcagcctgc

SEQ ID NO: 232597 - DNA, 122 bp, Homo sapiens
gggcgggggctctggttgtaaaacacacttcctgctgcgaaagacccacatgctacaagacgggcaaaataaagtgacagatgaccaccctgcagctctccagcttcctctctgaaatccca

SEQ ID NO: 232598 - DNA, 122 bp, Homo sapiens
cagcacttggtgtggccttcccttctacctagcgggatggggctcccccaggggctgtcccggaggcggtgggcctggttaaataaggcagggtttatatgcactttcttccgatctgtacc

SEQ ID NO: 232599 - DNA, 122 bp, Homo sapiens
gtgggacatttgcaacgtgggtaggatggaggctttgtagtcaccaggggaaacccacggcggcgtctgtctttcaccacaggagactgttctctgcccatgcacgttccttgaggccacgg

SEQ ID NO: 232600 - DNA, 122 bp, Homo sapiens
gggccgggcacttgctctccgaagtgaacctggaggcctctgccacttggctctctgggtcgtgggtctggcaaggtcggggccaggaggccgccccgatggtgcctgttgctttcagggca

SEQ ID NO: 232601 - DNA, 122 bp, Homo sapiens
gtgcgctgtgagcaaggatcagggaaccggaagggcttggtttgatggcgagcggatgcgcggtgttaaactaagggatgacagggccttgtcagcaagggacctggagatattagagggga

SEQ ID NO: 232602 - DNA, 122 bp, Homo sapiens
gcgtcaggccgacagccgggcacccgcttcacacagggggttcttccacagggctggacacgcaggctctgcatcctgacagtgactggtgggtgccagccacccaccggccccccgagtcc

SEQ ID NO: 232603 - DNA, 122 bp, Homo sapiens
agagtcttgctgtgttgcccaagctggggtgtcggggggcgattgttccattagttccagcgctttcctcagcactcgccacctacactcatgacctccttcagccccagagatgtgacctg

SEQ ID NO: 232604 - DNA, 122 bp, Homo sapiens
ttagagcctccagacggaacttagccctactcgcgccatgatcaagtgtctgacctccagcgctggaagggagaatcttcagaagagtatctattttctaaagccactgagcttgtggtaat

SEQ ID NO: 232605 - DNA, 122 bp, Homo sapiens
gttggggcggggagtggaggttgtcttaagaatgcaaatggggcagggcacagtggctcacgcctgcaatcccagcactttgggaggccgaggtgggtggatcatgaagtcaggagatcaag

SEQ ID NO: 232606 - DNA, 122 bp, Homo sapiens
tcccctctccattgttttctcgcccaatccttccctcttgctccctttgggaaaaagccacgtggagctcactgggcccctcccccagctgaagggacatgaccctcctctgccctcttccc

SEQ ID NO: 232607 - DNA, 122 bp, Homo sapiens
aaatgcatgtattcattggatcattcattgagcaaatatttattgagttcctactaaacacgaggcactgggaataaaacactgaataaaacaagtggaatcatgactaatgtttcctctgg

SEQ ID NO: 232608 - DNA, 122 bp, Homo sapiens
cttcaccacgtcagtatactcatctttaaaattaagatactaatatgtgccatctcagcgcggttgtgtagattagttactatatttaaaatgcctgctacaccataagcagcaaatgttag

SEQ ID NO: 232609 - DNA, 122 bp, Homo sapiens
cacagtgagcgagcgagctagtgacgagtgacagaaggactcctttcactgaagctgaggcgaggggagagggaggggagacaggtcataattaaagaggaaacactcggaaaaaggagatc

SEQ ID NO: 232610 - DNA, 122 bp, Homo sapiens
cagcgactttgtcatcctgggccgagtctctgagctgaccgaggagcctgactcgggccgcgccctggtgactgtggatgaggtcctaaaggatgagaaaatgggcctcaagttcctgggcc

SEQ ID NO: 232611 - DNA, 122 bp, Homo sapiens
gtggctcccctgcctgcgcgcttcttcgtatctttgccattacggcgctaatgcagtgcacgactgaaggtccagtggcggcctacgacctgcgaggcaattcacaccagggactttcctcc

SEQ ID NO: 232612 - DNA, 122 bp, Homo sapiens
attttaagtctttagacagtaatttaactctttccaccaattgccaatcagaaaatctttcgatctacttataacctggaagtcgtccacttccccaaccccattccagttgtccagccttt

SEQ ID NO: 232613 - DNA, 122 bp, Homo sapiens
cagtgccgaggcaaagcgcctgtaggggatggcggccagggtcagcggctctccctgtgacggcctttgcccgtcatcctggtccccgcgagggcctcagggtgggtgtcgtggggctgaaa

SEQ ID NO: 232614 - DNA, 122 bp, Homo sapiens
ttcgggacaacatttgaaaccacattttatcaacatcatcaaagaccagagcacacacttcgggctctgagctctggagcccgcttcttgcagaaaaccgggtatgggggaagggctgcagg

SEQ ID NO: 232615 - DNA, 122 bp, Homo sapiens
tgctactctaggctctcctttctcctaaagataagcattttcattatgtatcatgtttatcgtataggcatgaacacacgcgcggccccttccaggcagtcttcagtgatgtcacgtgttcc

SEQ ID NO: 232616 - DNA, 122 bp, Homo sapiens
gatttcgaaggagtcaaattctccctcagtcaccatccaggagagatgcagggtgtgtgacgtggcctcctccactgtcaactccccgaggtggggctcaggcgctggaggggtcggggccg

SEQ ID NO: 232617 - DNA, 122 bp, Homo sapiens
gcctcccaccgctcgcctcctcctggctctgtccgcggtcgctgccggggcctgtgggctcggggctcaggttcgctgagtgaatctgggtctcggccttagtctatctgggtctctgtctc

SEQ ID NO: 232618 - DNA, 122 bp, Homo sapiens
catctgccgcttgctcaccttggctgtccatgcacccgtagctgtgaccatgggcggtggcgccagctcggacttcaccccgttggagcgggcaggatgtcacactgagctaatgtgagatt

SEQ ID NO: 232619 - DNA, 122 bp, Homo sapiens
tggctaagtaaaatttattttatagtattgcattgtacagatagactacaatttgtttagcgattcactattggacatttgcgttgtttaccttttggctattacaaataaagctgctgcga

SEQ ID NO: 232620 - DNA, 122 bp, Homo sapiens
gtcccacggaaagagaccagacctggaaaagacagagtcaaagctgggtgagcaggccttcgaagggcgtggctcagcaaagataatccatattgtagtgcaagaggattcttgtggaatat

SEQ ID NO: 232621 - DNA, 122 bp, Homo sapiens
aatccgcggccggcgtggggcccggcctggcggaggtgatgctggtatgtgcgtcgccaccgcccctcccagcactgacgggcctgagggacgacaagttgacgctcctttcgtcatcacct

SEQ ID NO: 232622 - DNA, 122 bp, Homo sapiens
ccgcctgcctctaaacactaaaaatctaagttccctctagtcaccaacgcccacctggcacggaaaggccttgttttggtgcctttgaccccatttacactccagcaacctttacccccacc

SEQ ID NO: 232623 - DNA, 122 bp, Homo sapiens
tagctagcacccacatggcctcacaaagtcccctctgctgtcagccctaggaagccttggcggagatggcaggctgaattctgcctggaaagtctcagggagatgactggttccgtctaatt

SEQ ID NO: 232624 - DNA, 122 bp, Homo sapiens
tgccccgccggcctcccacgccggaggcccagagcgaagaggagagatccgatgaggagccggaggccaaagaagaggaagaggaaaagtaaaggcacacccttacaccttgtcccggggct

SEQ ID NO: 232625 - DNA, 122 bp, Homo sapiens
cttcaaaccactgggaaatctggctccagtgctccaagtttaccaatcaagaatcacacacgcccaagaaaacccttgtctggatctttgcttcagcactccaagatggcagcagcagcagc

SEQ ID NO: 232626 - DNA, 122 bp, Homo sapiens
ttaaaattccaagtaatgctaatcatctcaaagtgagcagttcatctctctagtaaattgcgtattacagtaaaaagtgatctaaaggtttcttattttttattgtgtttagtgcaatacta

SEQ ID NO: 232627 - DNA, 122 bp, Homo sapiens
aactcaagagtcctcccctgctcctaaaatagttataaaattaatgtgctgtactcaagtcgttactccacgtaaaagagtaaaagactcccatattaagcagagaagtccagcctcctctc

SEQ ID NO: 232628 - DNA, 122 bp, Homo sapiens
cctgccaccaaaaatattctttgaaaaacttacttttctagcatggtccctgtggtagaccgtgccctccactcagtcctgagctcaggttgtcactggtggcttagatttaaaagggtaac

SEQ ID NO: 232629 - DNA, 122 bp, Homo sapiens
gcgccccgagtgaaggggagcctccccttccaaagttaggagactcagaggagcagcagccgcacctgagccctttccaaagctgaggcaggtgcgggcggccctggacaccccgtggcgag

SEQ ID NO: 232630 - DNA, 122 bp, Homo sapiens
tacagggcggcggtgaccacagaggtggtgcccaggaggatgaactggcacagcgagggccgccctccgctctccatgacggcggcgagccccggtggccgactgtggcgccaaggataggc

SEQ ID NO: 232631 - DNA, 122 bp, Homo sapiens
gaccaaggcagtaaacctgtagataattagaaaagaaaatcttgccatgggggaggtgggcggaggtatacagttgcagataactctctattgtaaatagattgcatctgtgctatttattt

SEQ ID NO: 232632 - DNA, 122 bp, Homo sapiens
gactccgcctctggcgcccaagcccgcccaccgatgagccaatcgccgcacggcggggcccggcctttcggagtttccagtccgccaaccaatcagcaattgcctctccgcaagcccgcctg

SEQ ID NO: 232633 - DNA, 122 bp, Homo sapiens
ggcactgacgcccgcagatgggcaggggatgcgggtgggggctgcccttggggtggaggccgtggagcgcatcccgctgtgtgatcgggcacgtggcttcgctgccctgaacctccctttcc

SEQ ID NO: 232634 - DNA, 122 bp, Homo sapiens
acacgatttaccttaaggtccaaacctcagaaccctcgggcacctgagagagatgttttgcggcgatgtcgtgttggagggatgaagatggagttatcctctgcagaaattcctagacgcct

SEQ ID NO: 232635 - DNA, 122 bp, Homo sapiens
agcggttcccattgagcagctcctctgtggttccacccagccttccaaccaataacgcagcgtctcctgcaggaaactcatcgcttgggtcacctgttgctctttgctctaatgagccttga

SEQ ID NO: 232636 - DNA, 122 bp, Homo sapiens
ggagggctctagggagcggcccggagctgctcggcggggcgcccagggcgcagcgggcagcgcttaccgagggcgcgcaggtactcctcgaaattctcgttgaccaacatcttccagtaccc

SEQ ID NO: 232637 - DNA, 122 bp, Homo sapiens
tggtcactcccttggtacaatatcccccttgctttctctacaatgggcacattgctcccacgacctgctgggtcaaaggcaccgcagtcaggggtagctggggagcaggagttgcgggggtg

SEQ ID NO: 232638 - DNA, 122 bp, Homo sapiens
gtcatttactgtgtatctaatatacgccaggcacatatcataaatgctttatccgctgggcgcagtggctcacgcctataatcccagcacttcgggaggccaaggcaggcggatcatttgag

SEQ ID NO: 232639 - DNA, 122 bp, Homo sapiens
ggaaatatgtggttagaatttgatggtgccacaaaataggaatcgcagttttgaagtgagcggtcatatcgccatggacatgataaaataatagcttaagtgaggctgaagccatccacaca

SEQ ID NO: 232640 - DNA, 122 bp, Homo sapiens
cacctccacttcctgtttccgcagccgccctaccaggagcctggcactctcctcagggcccgcctccccgccagggggcgcaccgcctccacttcctgtgtccacggctgtcgcgagagccc

SEQ ID NO: 232641 - DNA, 122 bp, Homo sapiens
tcaactcatgagctcaagcaatccgcccgcctcagcctcccgaagtgctgggattacagacgtgagccgtcgcgcccagtcctgaattctctcctatgctgacccctgctcctggtggtact

SEQ ID NO: 232642 - DNA, 122 bp, Homo sapiens
taaaagctccgcaggcaatactaaagtgcagaccagtttgggaactacagcgccaggcaccgtgtcacagcgcgataagagagaacgttcggaaaagccctttatagattaagagactgagg

SEQ ID NO: 232643 - DNA, 122 bp, Homo sapiens
gcaccccaagcaccccggagccgggcatgtgagccctccaccccccggcggtctcggggacggcccccaggacggccagcaggcccctgcaggaggaagcagcaagcagtagtggtggcaga

SEQ ID NO: 232644 - DNA, 122 bp, Homo sapiens
cacggcttggctctgcgctcactcaccaggctccactccagcacgccagcctgcacgtcccgtgcaagaaaatcacaacttcctggggtgcttgcactcccagacgcatgcatgactccccc

SEQ ID NO: 232645 - DNA, 122 bp, Homo sapiens
tagacgcccgcagcctcagcgggaccggatccggggcggcgggggcgctcactcaccgcgcgccctcatgttccctgcgcaggacgctctgccccgcagcgggctgaacctgaaggaggagc

SEQ ID NO: 232646 - DNA, 122 bp, Homo sapiens
ggagggtctgcctccccttcctcgccctgtgtcctctcatcctcccgccgcccgtcaggccggccagcctcacatcagtctctccgccccggggaaggctcagccacttttcatcgaggact

SEQ ID NO: 232647 - DNA, 122 bp, Homo sapiens
aacattatttacaaatcattccttagagactgacactcttgtgaatgcttctgctacactcgatgctcattccctttgcaatacaccctgagcctcaaaagaaagggaaatttacactcatt

SEQ ID NO: 232648 - DNA, 122 bp, Homo sapiens
aggtcctttcctgttccaatctggtgtctgttatgctgacgaggccatcaggcaaggccgcgcacttgccaggcaaggcccactgcatgttggcaggcagcctgttttctgaagccatggca

SEQ ID NO: 232649 - DNA, 122 bp, Homo sapiens
ctctccctccagttcccatgcccagaccctcctccctcattcctgggcagctgcgcacaacgcctgctcatcttccggcttcagcttcagcctggaggagtctgtttcgtttgcctgagaaa

SEQ ID NO: 232650 - DNA, 122 bp, Homo sapiens
catttagtagagctcagtggtatggttttgaaattttgagaggggtggggaagtgctgaacgttaataaacatgaaggtcaagaaacccagagtacagagggttttgttattctttcaacat

SEQ ID NO: 232651 - DNA, 122 bp, Homo sapiens
gaaaggacggacacccaagcccagcaacaacctttccagtctgagtgcccttggtctgaccgacagactagaagctggcccagcaggcgactagtgctcagccccgcccggcgggggcgggg

SEQ ID NO: 232652 - DNA, 122 bp, Homo sapiens
gacgctgcggggctagagcggagcccgggctgcgaagcccggccccggactgcgcgcatgcgcccgtctttcatacctgcactccggacgcgcccttcgggtctgcactgacaatgacttgc

SEQ ID NO: 232653 - DNA, 122 bp, Homo sapiens
gggagtgtcttctggaggccactaaagcaggaatagcattttcatgttagcgtgcacgggcggtctccgcagcccctcctcgtgccggagcctgtcctggggcctgcggggcggctccgggc

SEQ ID NO: 232654 - DNA, 122 bp, Homo sapiens
tggagggcgatcataacagggtggttgtgaaaagcaccgagatgacggctgacgataagacgggcacagtgactcatcacacgcttgccatgtgcccaggcactaaaagactacacacgtta

SEQ ID NO: 232655 - DNA, 122 bp, Homo sapiens
gggagtccaggaggcccgggtggggacgcctggatgacgtcactcgaggtgggcaggccccgcgcggggcgtgacgtcacgcgggcggtcccgtcagccgtgaggtcacctggtgggcgcgg

SEQ ID NO: 232656 - DNA, 122 bp, Homo sapiens
gaagcagcccgggtgggggcgttcgctggaaacggggcccctctgaagggcgtgggcagccggtgcctgcagagcgtggagagctgcggccgcctcacctgacacaattgggcagcgatttc

SEQ ID NO: 232657 - DNA, 122 bp, Homo sapiens
agaaagatggaagatcccagctgcaaatggccatttgcagttagatggaacagctgctgacgttcagggaaatgcatgtctctcttcagatgggaaggagcagtggaaaggggtgacgagtt

SEQ ID NO: 232658 - DNA, 122 bp, Homo sapiens
gggagggcggctcacggccctcgcgtatccctgcgcggcgctcgcgagccgcccctcccccggcgtttgtccctgacgcagccccaccggttgcgcagtccctccccgcccccgctctcccc

SEQ ID NO: 232659 - DNA, 122 bp, Homo sapiens
ccccagtgccaggtgcgctggagaaaacaggcatgggagcacaggaaggatcacggctgtcgcacaggaggcatggagctgacgggacctccaggggcacaggatggggtcaggataggcga

SEQ ID NO: 232660 - DNA, 122 bp, Homo sapiens
tcaaaatgaactctacccttatattttattaaaagggcaaacatcatgaattaacccagccgcttacttgaattacaaaagtaacatgattcaatatgaaaataagaaactgtctacaaatc

SEQ ID NO: 232661 - DNA, 122 bp, Homo sapiens
actcttaacctcaggggacctttctcaggccaagcgagggcccctcctggcgggtgcagtcgcagagccctgaggttcgactccactggccccgccgctccccgcgttcaccccaccgcaca

SEQ ID NO: 232662 - DNA, 122 bp, Homo sapiens
aaaaaaaaaaaaaaaaaaaaaaccggaaatgggtcctaccatcttctcggagccggagtgcgaagaaataaagaaatagtgctttaagtcaatgaattcctccttgggacccactatcgaga

SEQ ID NO: 232663 - DNA, 122 bp, Homo sapiens
cttaccctgtaggttacgccccagaagcaggactttctgcctctgggaaaactctaaaaccgttcacccggaacctttacttcagaaaaattaacctcacgctgaggcatcatttttaaatg

SEQ ID NO: 232664 - DNA, 122 bp, Homo sapiens
gtcgggcgagcacaggggcggtccgtggtgctgctggtgcccagctgcggcgcggggagccgcgcagtgcacggcaggggcagggacccagcgccccgaggccgcagtcccgccccagcccg

SEQ ID NO: 232665 - DNA, 122 bp, Homo sapiens
cctcgtctacctctgcagagcaaagggccaagatgagaacggtatagccacatgtgtgcacgcatgtacatgcacacagacacactcatgcattcacgcactcacacacaccaagatctgac

SEQ ID NO: 232666 - DNA, 122 bp, Homo sapiens
ctcctctcaccctggccccgggggcaggaaatgtcgccttacccacagccttagttctggcgaggactcacgtcatggaaagccttaagacgattgtcccacccccggaagccacgcagctg

SEQ ID NO: 232667 - DNA, 122 bp, Homo sapiens
aatgcgaaaaatgtagtgttaacggaagagtttaggtcctgcctcactgtccgggaaacgcgtgccctcgggggagcctttgccaagccggtttttcccgaaggtgaccagatgctcctggg

SEQ ID NO: 232668 - DNA, 122 bp, Homo sapiens
acacaaagcctgtttgatcgtctcttcacatggacgcgagtgaaatttggtgccgtgactcggatcgggagacctcccttgggagatcaatcccctgtcctactctttgctccgtgagaaag

SEQ ID NO: 232669 - DNA, 122 bp, Homo sapiens
aaaaacagcctctcctggcacagctcagtttttaaactctgacttggcaggtagactcctcgtgcatctatctgtttatttatattgaggtttgttagcccagtatcagtggatatataaaa

SEQ ID NO: 232670 - DNA, 122 bp, Homo sapiens
tcctcgttcccaaaggaccctgcctaagagaccacaggccacggttacacacactccacgcggtgccaagtgagccactgacagaaggagaaagaaaccacccagtgatgtctgccaagctc

SEQ ID NO: 232671 - DNA, 122 bp, Homo sapiens
tattcatttacatgtcatttgactgtctcactttttacccagaacagtaacaacccacaccgtcttccttcagggatttccaactggcactctgtgggtgctacacagaatgcaatttaatg

SEQ ID NO: 232672 - DNA, 122 bp, Homo sapiens
gttcctttcgctgtctggtcacagttgcaatgactgttcccagttgctttcagctcactccgtcatttttgcctcttccgggtctgtttctgttgacggcttcttcgtaggatgacgggaca

SEQ ID NO: 232673 - DNA, 122 bp, Homo sapiens
gaagctgcctcggctcatccgtaagggcgctgattagggacgacaaagacctcaccccaccgtccccgtcccatttccgccctcccagatccccaacctccttcgagtcctctccaagtcgc

SEQ ID NO: 232674 - DNA, 122 bp, Homo sapiens
ggcaccagcctcctgccccggccgtgccctccgccgggagccgcggaccaggagtcgcaccgcctccggggaccgcaccccgcatgcagcctccagcccctgcctcttgctgctcgagggca

SEQ ID NO: 232675 - DNA, 122 bp, Homo sapiens
gctccagctacaggtaggggaacggtcctgtcccgccccacagccaaccacgttctcatccgactgctggggacagcctcggggctccctgactctgaaacccccctgccccagcgaggcct

SEQ ID NO: 232676 - DNA, 122 bp, Homo sapiens
gcaggcgccccggtctacgccgtttcccattggtcgctgcctcctcgcgtcatccctccgcgccggccgacgcgccagccaccacgtctcgagtgcaggcccagtccactgtagatgcgctt

SEQ ID NO: 232677 - DNA, 122 bp, Homo sapiens
tggagtgcaccctcagctgccttgtccctctcacccagttggccaagcccagctgggcaccgggcctgcacccaagctgccaggagtggaaagagaggagacacagccatgtggattggttt

SEQ ID NO: 232678 - DNA, 122 bp, Homo sapiens
tcctccaatcacagcttgaagtgagattgatgtgtcttttcaccaatcaccgccaaggcgcgagggggttgtcgggatgggggcgggagccaacatagagccctcagtgggatgagggtgaa

SEQ ID NO: 232679 - DNA, 122 bp, Homo sapiens
aagatccaaatgtgactgagatcattccagcctgcactttttatttgtaggcagaaggaacgggataggttgaggggcatgatgggggctctcgccacctcttgtctgcacctctggaacag

SEQ ID NO: 232680 - DNA, 122 bp, Homo sapiens
ccagttttcatccttacttagcacctgctggcttggagtggtgtcacccaagcaatcagacggagggacgtgccaagagcctgccctcccctcccactgtgtgctgcccctcctccccacac

SEQ ID NO: 232681 - DNA, 122 bp, Homo sapiens
gagactgggggtggctctgagggggatgcgtttcctgcctctctccgccatgctggggctcgctgcatcttcgtgctcctctgcttgtggatgcgtcactctggctccgttcttcttcacgc

SEQ ID NO: 232682 - DNA, 122 bp, Homo sapiens
ttaagggggctctcgcaggtagcaggaatgggcaatacccaccgtcttgctgaggtagctcgtgctggtgttcatgcactgcagcccctcactattgcagcaacccccacatctgtagacgg

SEQ ID NO: 232683 - DNA, 122 bp, Homo sapiens
tcaacccacacacagatcagagaccgccctcagcttctctgcgcctttccgccccgtcaccgcatcaatggggtggaggccaaactcaaacacttgcggggcacagacgtcccagaagcaaa

SEQ ID NO: 232684 - DNA, 122 bp, Homo sapiens
gggcctcatcaatctccggaagctgaacctctccgacaaccacctgggggagctgcctggcgtgcagtcatcggacgaaatcatctgttccaggtggctccccggggtgtgaccggagccgt

SEQ ID NO: 232685 - DNA, 122 bp, Homo sapiens
gcccagccggtcccacgtcgagaggcgctgggttgggagaagttctgctggtcgtgggctcggcccccaggcgccaggccgagtgcccacctcggcttctttagggggcctacagcgggcag

SEQ ID NO: 232686 - DNA, 122 bp, Homo sapiens
tacccgctgggctacccagaccggagcgcggcgcgagaggcgtgagtcgatgacctctagcgagggaggccacctagcggccaggccaagtctggaggatacttccgttgggccgccagggg

SEQ ID NO: 232687 - DNA, 122 bp, Homo sapiens
cagcgtctgtctccgcatcttgtgatatttcgctccccgggagccagccccactgcgctccggaggcagctcggcaaacaaacccagcgacagattgtgccgcggctcattccggggaagga

SEQ ID NO: 232688 - DNA, 122 bp, Homo sapiens
ccacctcaaagggtgccatgaaacttgtggtaacgtaagcaaagaacaatgtcacacattcgaagagatgttgctgttagaatagctttcaaatgtatatgaaacactgggacataaaatgc

SEQ ID NO: 232689 - DNA, 122 bp, Homo sapiens
ctgcaggggaccctccgcattccagacgtgctcctcctcatcctccttgtgcaacccggccgattccgcccgataaaatcagtcccgtggcccgggcagtaactgccttttttacctattga

SEQ ID NO: 232690 - DNA, 122 bp, Homo sapiens
taaggcaaagactggcacctggcccgtagttctcaggctcccaaaggctgtgagtcctgccgtgtggcagaatcctcactactagtggtgccagttcagcaggccctgagattctaagctga

SEQ ID NO: 232691 - DNA, 122 bp, Homo sapiens
gggcactgccgcgcatgcgcggcccatttccgagagtggcagggctgggcgcggtggggtcgcctctggggtcaaagagcacgccgagcccgccggagggcggggccgcggccttggccctt

SEQ ID NO: 232692 - DNA, 122 bp, Homo sapiens
cgctttttcccgctacggttttccccggagctgacaggggcagcaaggtcggagttgatccgagggtccctgcctggtcccggggggacggtcagcctcccgcccggagccgcggggagagg

SEQ ID NO: 232693 - DNA, 122 bp, Homo sapiens
cccgctctgccgctcggtcgccgtggacaccctgcgctgctggaaggacggcgccacgtccgcacacttccaggtgtactaggaccgaacactgaggacacccagaaggacgccaagggtca

SEQ ID NO: 232694 - DNA, 122 bp, Homo sapiens
gccatcgccctgcccatccaccccatcatcaacaactttgtcaggtactacaacaagcagcgcgtcctggagaccgcggccaagcacgagctggagctgatggaactcaactccagcagcgg

SEQ ID NO: 232695 - DNA, 122 bp, Homo sapiens
acaattgtccacctaaagatctgagtcactgccattgtgactgtcactggccatgtgcaccggctggacgtgggataaactcacagcccccaacagcccctccctgcacacctgcctcgcca

SEQ ID NO: 232696 - DNA, 122 bp, Homo sapiens
ctctaccaggagaccgggcactcgccaatacacacaatcccactccaccgggagaccaggcgctcgtcaatacactcaatcccactccaccgggagaccaggcactcaccaatacacgcaat

SEQ ID NO: 232697 - DNA, 122 bp, Homo sapiens
gtggtgcgtcctgcggggctgtgctacgcgtagtgaccctgggcctgtggtgcgtgttcccgggctgtgctacacatagtgactctgggccttttgggcaggtctcagatttactgtctgtt

SEQ ID NO: 232698 - DNA, 122 bp, Homo sapiens
ttgctattcagttttgaaagtttctattatcatatcctcatgctgaaagattctttcctccgttgtgtccagtctactaatgagtccatcacaggaattctttatttctgttgcagtggttt

SEQ ID NO: 232699 - DNA, 122 bp, Homo sapiens
cgagactccgtgggcgtgggatcctgtgagccatgtgcgggatataatctcctggcgcgccgttttttaagccggtccgaaaagcgcaatatttgggtgggagtgacctgatttttcaggtg

SEQ ID NO: 232700 - DNA, 122 bp, Homo sapiens
gtgggtgccaagaagagcagttttctgagcagagggctccccacaaaagcagacactgaacggggttgctgtatcagctgccaagggaaaaaaaaaaagaggaggaggaggtttccctgatg

SEQ ID NO: 232701 - DNA, 122 bp, Homo sapiens
aaatgcacgattattttgatcctggtttgttggtgctgttgttttagttgtaagagctttcgtgagacgaacgcatgtactgctctgaaataaggaaatcggggcatctcctcacctcttct

SEQ ID NO: 232702 - DNA, 122 bp, Homo sapiens
cctggtctctggtttggtgcccaacacatcttagttgtctctaggtgatgtggtgctacacgtttgtgccttccttggctccttcctggtctctagggaggaaggtgctgctggctgacgcc

SEQ ID NO: 232703 - DNA, 122 bp, Homo sapiens
tccgaagttatgcccacttcctggaagtttggaggcacgggaactacattgcccaaaaggcgcagcgccgcgaggcggcgatccctgaccaatgaaaagaggtctgcccgagcgtgcgacac

SEQ ID NO: 232704 - DNA, 122 bp, Homo sapiens
tttgacagcaattgcaagcctgggcaatgactgattgtttaacttctgccctgtgttgttcgaagggagcgggactgagatctagttcttcacctgcagcagtgagatttcttatgtatttc

SEQ ID NO: 232705 - DNA, 122 bp, Homo sapiens
tgcgaaagagaaaaaggctggcggggacccgcggtggctaggagagacgtggcggcccaacggctgactacttgggcccgcgccgagccaggctttctccacggtgcgtgtgggagtgcaca

SEQ ID NO: 232706 - DNA, 122 bp, Homo sapiens
cagctgcgggcccggcgagccgagctcgagcgagcgagaccggcagtactgcgagctgtgcgggaagatggagaacctgctgcgctgcagccgcagctccttctgctgcaaggagcgccagc

SEQ ID NO: 232707 - DNA, 122 bp, Homo sapiens
gggaagcttaaaagttcctcctgcccacttctgagggctgacacgtggccgacgcggaggcgtgagaaatgtgttgatattgggaggttgacgggtgaatccacaaattcaccggtgtttat

SEQ ID NO: 232708 - DNA, 122 bp, Homo sapiens
atttctgttatgtgaactccaaccactgattaaatggatgaatagaaattgtgggcatgacgattatgcatgtcatagaaagagccatgtaaaatttcattgagaccaacctaaaaaccaag

SEQ ID NO: 232709 - DNA, 122 bp, Homo sapiens
aagatgagtcatgttcaagatgggtgctgagttctacttatcctgggcagcctggtgcgccgcctgccactggctcagcttcccagcttcctgctccttctcagcctgtggtcggctgtaca

SEQ ID NO: 232710 - DNA, 122 bp, Homo sapiens
tcatttagaaaatgatgaagtggcttcaacatgattatgaagaaacattggacttccagccgaggcactggcctgtgctttatcaatatttatggtagtgccaacctgtgggtctagtgatt

SEQ ID NO: 232711 - DNA, 122 bp, Homo sapiens
gtccactataatgtttcccaaacctgccacagggtctagaaaagaggagggctcagtaaacggtggattgaattcctggattacaatagctacttgactggcctttctaaatttcagttctt

SEQ ID NO: 232712 - DNA, 122 bp, Homo sapiens
ggggccaaagaaaagggccagggtaaccgtaggatcccaccctttatttcttcctctggccgggctactcccgccagccgcagccccagcccgtttcctcctggaccctgcccgctcccctc

SEQ ID NO: 232713 - DNA, 122 bp, Homo sapiens
ccaccgatgccttcgcagcataggatttggggacctccacgtgccgtcccatgggaaagccgagtccttgtaggggaggagcgtcactgctctcagcaggggaccgtttctctaacgggagc

SEQ ID NO: 232714 - DNA, 122 bp, Homo sapiens
ggtaacaggcttttttttttttttttttttttttttctgagacaggatctggcagtatcgcgcaggttggagtgcggtggcgcgatcacggctcactgcaaactcaacctccagggctgggc

SEQ ID NO: 232715 - DNA, 122 bp, Homo sapiens
aggcagcgccgtgcagacactgtctagttaatcaccattagctattgttgtttagcacaccgccgacatgccaccttcctttgtttgctttaatgttggactagcgggggttatatttgctc

SEQ ID NO: 232716 - DNA, 122 bp, Homo sapiens
gctttggccagcattacaggagcccttccagaagccgggccatcgtttcagtcacgcagccgcagccttgcccggcacgcaggtggggcttctccccttcccagtatctcacatccctgctc

SEQ ID NO: 232717 - DNA, 122 bp, Homo sapiens
cacctcccagggtcttctggtctctgcggtggtgaggggtctgcagcccgcctacggttacggcatgcatccggcctgggtgagcttggtcacgcattccttgccctacttcggaaagtccc

SEQ ID NO: 232718 - DNA, 122 bp, Homo sapiens
tctgtttatgggtttgctcagacagcttgggaagatcccagccaccataaaaacttcagccgttggtcagttcataaactctatagatctctatcattctctgcgttagattcttttaattc

SEQ ID NO: 232719 - DNA, 122 bp, Homo sapiens
ggtcgggcgcgcgggtcaggtggcgaagggcggagtctgcgcggggttgggcggagcctgcgcggggccggtaggatcgcgtcgggagccggtaccgaggcccgagccgcgggagtcgagcg

SEQ ID NO: 232720 - DNA, 122 bp, Homo sapiens
gagataccggcgccatgtccagcgctcggacccccctacccacgctgaacgagagggacacggagcaggtaaggagccccgagggctccccgaattctctggctgggccctttgcaccttgc

SEQ ID NO: 232721 - DNA, 122 bp, Homo sapiens
gaagagaaattggagaaagggggaggaagcccccaagatggatcacccattgcctggtttcgcaggagactgtccgccttcagttctccagcagctcggggatcatggcccactgaaccccc

SEQ ID NO: 232722 - DNA, 122 bp, Homo sapiens
taggattattagcaaaggagcgggagtgcgctcctcacttcctggttcctctacctttcccgtttgctactgaagttggctgggccgttagcagagccctaagctgggccaggtaaagtgga

SEQ ID NO: 232723 - DNA, 122 bp, Homo sapiens
tacaagcctagaagcagctgctatgtcagcacaaaaatcactgctgcacaaaaatccaaacgatgtcatttcaaatgacatacagacctttcaggccgggtgtggtggctcacgcctgtaat

SEQ ID NO: 232724 - DNA, 122 bp, Homo sapiens
gagcaagggggacccctcctcggacaacatcctgctcccaccctcagccatggaggtgggcgacaagagctctgggcagaggagctccttaccacctgccttcccaactcccccacctcccc

SEQ ID NO: 232725 - DNA, 122 bp, Homo sapiens
ctggcctaatgatggaagatttaaggactcaggaattaccaggcagccatccagcctcttcgtgggtccaggcttcacattggatttataccctcttaaacaccaatcttatttctttaatt

SEQ ID NO: 232726 - DNA, 122 bp, Homo sapiens
ggcggcagcggtggccgccccttggggcttggggtgtgtttatttgcataagcgggcgcgcgccgtccgggctgggtggatccggcgggatttgactgctccgctgtccagaggcggagaag

SEQ ID NO: 232727 - DNA, 122 bp, Homo sapiens
aagggaggtggccggtctccgtcgtgacctctgacggtttctgagcgttggcctttggcacgcgctacccccttttgctttggttctgccatgccgatgtaccaggtaaagccctatcacgg

SEQ ID NO: 232728 - DNA, 122 bp, Homo sapiens
ctctgagccctgcagatgatgcaaccgagcttcactgcttgcatcaggcaggggtcccggcggcagtgagggctggaaggaggtggaacgggtagggggctaagtaaggggaaagggtattg

SEQ ID NO: 232729 - DNA, 122 bp, Homo sapiens
gagccacgcccccccccccgccccgcccagagacctctcccggccccgcctctcgagcaacggccctgcccccgcccacctggccctggtggtccacgtagtagaaatactcgcgggtccgc

SEQ ID NO: 232730 - DNA, 122 bp, Homo sapiens
ccagcatggctctggcctggaccctaccactcgcttgtcccccctctgcagcctcctgcccgaaggccacctgaacctaacggctccctgcaacgctgcctgcagctgccagccagaacact

SEQ ID NO: 232731 - DNA, 122 bp, Homo sapiens
tccagtggatccggtgtctgcggcggctccggggttgcctgagtgacagctaaggccggccggatctctgggggcctgacttccacccaagacgccactagcttggtgaggggccccagagc

SEQ ID NO: 232732 - DNA, 122 bp, Homo sapiens
caagtaaccctgtgaagaggtccatgtggcaaggaactgaggcttcatggcagcagccggcgcccacttgcccactgtggtgaagaagccactttgggactgtatcctccgaccctagtcaa

SEQ ID NO: 232733 - DNA, 122 bp, Homo sapiens
ttagtaaacgaaagtttttactatctggatagtaaatgaaagtttctgaaccaggatatgcggtgacagaaatgatattctaggaagatatatctgatgtaccagatcaaatgtaccagaga

SEQ ID NO: 232734 - DNA, 122 bp, Homo sapiens
ggggagcggaattagcgggcagttggaaagcccgcgaaacgctttttccgcctgggaggccggacgatcgcgattgggcaggaggaagaggaggtgctccccatctgggcccccaccttttt

SEQ ID NO: 232735 - DNA, 122 bp, Homo sapiens
ggagcccctccctccgctcccctccccaacaccctcccaacacctccgctcgcacacctgcgagggtcacacaaaggcgcaggactcccggcgcaccgcagctcagacaaaggcgcgcccga

SEQ ID NO: 232736 - DNA, 122 bp, Homo sapiens
gaatacaaggcacaggtttccaggtgtatgtaaatacatctccattttacgttctttaatcgcttaatccttttggaccgggataagagaatatttgaaatttcttattaaagcaataactt

SEQ ID NO: 232737 - DNA, 122 bp, Homo sapiens
tttttggtggggaggggtcagggcgctgtgtttaagatcaggcgtgtgaaagcccctaaacgccctcctttcctttgggaagtccctatggagggaaaggcaggtaggcgcagcggtccccg

SEQ ID NO: 232738 - DNA, 122 bp, Homo sapiens
cttctttcccggggtgaaaactttgctcggagctggcggcagctcgcggacgttattggccggcgccccgcccggcggccccgccccccgcccccgcgctcccctccgcccctcactcccag

SEQ ID NO: 232739 - DNA, 122 bp, Homo sapiens
cggcggcgcctgtgtggtctcagtgcaggagcccgcgatctaaccaattccagcttggctcggagaccgagggtcctgctgcaggctgagactggcgccggtcaccgggtctcccagggtct

SEQ ID NO: 232740 - DNA, 122 bp, Homo sapiens
ggctgctgttttccctttcccccctctctcaggatcctttcaagggcttagatgttgctgcggcttgtttctgttttcctcgtggccggcctgtctttctccgagaaaattcaaacctggga

SEQ ID NO: 232741 - DNA, 122 bp, Homo sapiens
cctgcctatgccagacggccaggcagctgccacctggtggggacacgtgggagaggtctgcggcaggccaaggagggccgggctgcaggaggaggggtggagagctaatggtacagggtttc

SEQ ID NO: 232742 - DNA, 122 bp, Homo sapiens
ctcgactaaaatcttgttgtgcaatcctaatgaattctcgaaggtgtttccagcggcgtccgtgctatgcaatcactggacccgggagctccccagtctcggggcgggaggggcaggtgtgc

SEQ ID NO: 232743 - DNA, 122 bp, Homo sapiens
cctgggtcacgtgacgcagccgcccacgggcgcgcgcccctgagactccgcgcgtcgtgacgtctccatggatgccccgccccgctcctggcgctgtccacggtgctggcggcccaggcccg

SEQ ID NO: 232744 - DNA, 122 bp, Homo sapiens
accggcatttccaggtccggccaggtccaaaaaaaaaaaaaaggaattgagggtttgcatcgtttttcaatataactggaagctgttttatcactttgtattttgagaaccgctccctttcc

SEQ ID NO: 232745 - DNA, 122 bp, Homo sapiens
tcagattttaagccgagacagcaacctatgaaaaagcagattctaactgccaatgctgtgcggcaggggcctgcaaactacagccccggggccaaacccaggtgccacttcttcctgcaagt

SEQ ID NO: 232746 - DNA, 122 bp, Homo sapiens
tagaaagtttgacctcctctaggcccatggccttgggaaacagcgatagcagaatatttccgtatctttcttcaagatcaatagggtgagactagtttttattcttggcactctaggaacta

SEQ ID NO: 232747 - DNA, 122 bp, Homo sapiens
gaacagtaccgcatttcgattctctgtcttcccacttccagcaaattcggatcagccaggcgggctttgcatgtgtatcggaatcgttgctcatagtggccgccgttgtcagagatgttgac

SEQ ID NO: 232748 - DNA, 122 bp, Homo sapiens
gggttaaccattccagtggcagatcctccccaacagcctggagccactgcctgtgggggtcgagggctgggccccttcccctggacaggcagcctcggtggtcttttttttttcgagttgga

SEQ ID NO: 232749 - DNA, 122 bp, Homo sapiens
cccactactcggtatacatccgaaggaaatgaaaccggtatgtcaaaggggacactggcacgcccatgtttatcgctgccctattcacaatagccaggacgtggaatcggcctaagtgtccc

SEQ ID NO: 232750 - DNA, 122 bp, Homo sapiens
gcaccgtgggaggggttttctccagtctgtgtgcccgtctgtggtcttagccatggagtccgaggcagcctggcctgcctggaggtgcctcccctcagagctggccaggggttcagggatca

SEQ ID NO: 232751 - DNA, 122 bp, Homo sapiens
ccggcgaagacaggcgggcgagggaggcccctccagcgtcctgctggggttgagttggggcggctcgtcccgtggccgctgggtcgtctggtttccgctttccgaaagaaatgagaggagag

SEQ ID NO: 232752 - DNA, 122 bp, Homo sapiens
ttccatgcccccttgcacgtgcaccggaagatcatgtcatccccgctctccaaggagctgcggcagaagtacaatgtccgctccacacccatccgcaaggacgacgaggtccaggtagttca

SEQ ID NO: 232753 - DNA, 122 bp, Homo sapiens
tgtgctgaacctctccatcacgctgcctctctgcttttagggcagctctcatgggggtatcgtgaggatcaggaaacacagtgtctgtgaaacactctagagctgagctcacacggtacgcg

SEQ ID NO: 232754 - DNA, 122 bp, Homo sapiens
tagaactgtggcattaaacagaagtgcgaacagaagttgagagtgggaagaaaggctgcccggaagggggtcaggaaagctcaggcaagcccaccctcaggcactacagctagactccgagc

SEQ ID NO: 232755 - DNA, 122 bp, Homo sapiens
cccaattcattctttagaatctatcctaaagaaatgtttactgctgggtacagtggctcacgcctgtggtccctcagctaccctcacctacctgggaggctgaggccgaaggattgcttgag

SEQ ID NO: 232756 - DNA, 122 bp, Homo sapiens
gtggcggcggcggcggcaccggcaccttgcagtatcactggggagacggcggctgtatagcgcttgccgccccacggattatcccagcaggatctacgcaccccgcatcctccgtagttccg

SEQ ID NO: 232757 - DNA, 122 bp, Homo sapiens
ggtggaggcgggacgctcactgtccacggcactcagggcccggggcctgcctgtcgcctccgtgacttccatggagcccttggacctgtctggagcccgggaggccctgaggaaggttcggg

SEQ ID NO: 232758 - DNA, 122 bp, Homo sapiens
tgcttctgaagccagtgggggctcctcagatagagaggttcccctttcaaatcccagtgccgctctgttctctttccttcccctcccactccccctcttcttcctctgtagagatgcaagaa

SEQ ID NO: 232759 - DNA, 122 bp, Homo sapiens
gtcgccttccagaaaattcactccccagccacctcccgagcctcgggttgggcaagcggccgccgtcttccccgccccgacgcctctcgcggttttccattggctttggctcccctggggta

SEQ ID NO: 232760 - DNA, 122 bp, Homo sapiens
cagagtcaccacctgcctgtgcttcctgggccagctgaacaccaacctgcacaagctggccgtcaacatggtcccctttccttgcccgcacttcttcatgcctggcttcgcacccctgacca

SEQ ID NO: 232761 - DNA, 122 bp, Homo sapiens
gtcatgatcatgatcatgacgatagttggcatgtattgagtatgcatgcatcatgtgccacgtattgaactcaaaaaactcttaagtgtgatattttcagaaccttctacaatccttcaagc

SEQ ID NO: 232762 - DNA, 122 bp, Homo sapiens
cactcgcgcgtgcactggctcgcagtttggacagagaccctacaggccaggccgcagctgcgcccagaccacccccagcgggtgaagactgccgcggcggcgcagttcccggcatgcctccg

SEQ ID NO: 232763 - DNA, 122 bp, Homo sapiens
ccctggcctcggcggagggctcctcaccaggccagggcggcagcctcagagagggcgggccgcgcgctgccagggcagggactcggccgagagtgcccccgcggccggcagctgcgggcgcc

SEQ ID NO: 232764 - DNA, 122 bp, Homo sapiens
gaagaatatgaactcatccttttctatggctgcatagtattccatggtgtatatgtgtcacgttttctttatccggtctatcatttgtgggtattttggttggttccaagtctttgctattg

SEQ ID NO: 232765 - DNA, 122 bp, Homo sapiens
ctcttccccatccccagatgacttccggatcttctgtggggatctgggcaatgaggtgaacgatgacatcttggcacgcgccttcagccgcttcccatccttccttaaggccaaggtgatcc

SEQ ID NO: 232766 - DNA, 122 bp, Homo sapiens
gcacttcctgtggcttctgaagctccaggggacagtctgcagtggggccctgctccactccgcaacgctgctgtggtttcctgtttgcagctgctgtgctgggctggcctccccagcccctc

SEQ ID NO: 232767 - DNA, 122 bp, Homo sapiens
ttccccgcaggcaaccttggctccactagtctgaccgccggtccaccttgtctatagtgacgctacctttcccgaggctgaacggggtcctcggtctatgtgaagtgagagctgccctccct

SEQ ID NO: 232768 - DNA, 122 bp, Homo sapiens
gcctgtgtggccctgtgtgtcggaaagatggagcaagaagccgagcccgaggggcggccgcgacccctctgaccgagatcctgctgctttcgcagccaggagcaccgtccctccccggatta

SEQ ID NO: 232769 - DNA, 122 bp, Homo sapiens
taagacaacttagttttcttttctctcctttggaaatctcatccaagttcatttctttagcgatcgcctcttaagaggctacagtgccttccaaggcttgttgagcacgtgccaagtctttt

SEQ ID NO: 232770 - DNA, 122 bp, Homo sapiens
ggtcggcgtccttagccgctggcgcgttgttggtttcgggttgtcaggcagcgcgcgaggcggcgggcagctagcagctggcggacgcgacccggaggcggtgggggtgcggctgagccatg

SEQ ID NO: 232771 - DNA, 122 bp, Homo sapiens
cgagggtctcccagcgacttgtcgactctggtgtgagtctggcaggaggtaacccagtcccggggagggcggaggctgggcgggcgagttcccctttccccagctgggccgctgcccacccg

SEQ ID NO: 232772 - DNA, 122 bp, Homo sapiens
cgatacaggttcgatgttaaatgaaccttcaggccgccggacaatggcgcagacctcacacgggggcaccgcgccttcccccagccgtgctcggctcccgccgcttctttatttcacgtggt

SEQ ID NO: 232773 - DNA, 122 bp, Homo sapiens
gcacagtgggggccctggcactggccaagggttggcagctgtggggagtgggggagagtgcgggctctgcagccagtcagcatgggcttaagtcctggcttcaccacttactcgttggggga

SEQ ID NO: 232774 - DNA, 122 bp, Homo sapiens
tgaggtggcactccatggcagcggggcggttggtggaataaatgcagaatgggcacctgccggggaaagcaacgcaagggaggttcagccgggaaggttcggaggcagccgcgcttctcgcc

SEQ ID NO: 232775 - DNA, 122 bp, Homo sapiens
atagaaaatagttgatggtgtgttattttagagggagaaaaactattaaaatgtttctgacggtagcaacaataaaatactaatgagccagaggaacagatggaaattgaaaagcatgtgca

SEQ ID NO: 232776 - DNA, 122 bp, Homo sapiens
gtggagcatcagatggggcggggacacgctgggggcggtacctagagcggggatttggagcggggacagaggagacgagcgccgggaccgggcagggccacactgggggcggttacagtacc

SEQ ID NO: 232777 - DNA, 122 bp, Homo sapiens
ctgttatcctggtctaataaccccccacacatacacctctggtgacctatttgcacagaccgtcgtcttccctccagtcttctgagggataggggacattccatcccaagcttctcccttac

SEQ ID NO: 232778 - DNA, 122 bp, Homo sapiens
gccgggtcccccgcaaccgcctccgccgccgccgcccgaggagtcgtccgacagcgagcccgaggcggagcccggctccccacagaagctcatccgcaaggtgtccacgtcgggtcagatcc

SEQ ID NO: 232779 - DNA, 122 bp, Homo sapiens
atctagacgtgggtgaggacaggaaccctgtatccgtctggaatccgaagggagcctcagcgagagggctggccaggacggcgcgtcctggcgcccggcgtctgcagtgcagagccagtccc

SEQ ID NO: 232780 - DNA, 122 bp, Homo sapiens
ctacctccagttagttacaaatttttttccttattcctcttagagaagaatcattcttcccgattttgcacatttttcctactaattccctagtactgagttatcctccctatgtcaatata

SEQ ID NO: 232781 - DNA, 122 bp, Homo sapiens
agagcaaagcgccccgccccgccctctgatctccccgtcccgcccccaatcaccccgccccgccccgattgctggccccgtggacgccctaccccgcctctgatcctgcaggcccgcccagt

SEQ ID NO: 232782 - DNA, 122 bp, Homo sapiens
ccccgcgcccgcgtcacgggggaaacgtgggcggtgtcccaacttcggaggacctgggcgcggagggctgtggcgtgaagaccgctctaaaaccgagatgactagaggttccgtttaaccga

SEQ ID NO: 232783 - DNA, 122 bp, Homo sapiens
aaagtggcattcacgactcataaatggcttaggatgtaaactcagttttattccctgggacgccctctctgctcttcagcacttgaagttcaggcagcgagagttgacatggggccagggct

SEQ ID NO: 232784 - DNA, 122 bp, Homo sapiens
tgaaaagggaaggcgaggcacctgtggaaggaaaaaagacggagtggcagagaaagcgggcgtgggtcctcccacggatgatagtgccttcccagcagactgtgcatgagggctgggggatt

SEQ ID NO: 232785 - DNA, 122 bp, Homo sapiens
aaaaatctgcccccctccccccgccgtgattatttttcatattaaaaagacacccaccaccgagggccagtttaaattgtacaatcacagcccataggccaccaatggaaaagcctaagcaa

SEQ ID NO: 232786 - DNA, 122 bp, Homo sapiens
agaggccacaggcttaaccacggaatcctagcccgcccgcacatccctccatcgcgggagcgacctatctcatccgtagacaccttccgctgcacccagccgcagctggtcaggcgggcgga

SEQ ID NO: 232787 - DNA, 122 bp, Homo sapiens
aaacatactgccaatatgtcaatgacccccagatacacagctctattcccaatcattcctcgatagcccacacttgtgtatctgtctactctctagacccgatgagaaatgaaagccttcaa

SEQ ID NO: 232788 - DNA, 122 bp, Homo sapiens
ggctaaggtcagcgggagaggaggggtgagatgtggtgctagttttaggcacactgtgctcgttatcagattgcctaggggcccgactgaagtattcctccgcccagcgcctcgggcaaacg

SEQ ID NO: 232789 - DNA, 122 bp, Homo sapiens
tgtgacaaggaattcagggcagcaatcatccaggatgccagaaccaggagtccacagagccgagggttcatgatgactgtgtagtgcagaggatgacagatggccacaaaccgatcataggc

SEQ ID NO: 232790 - DNA, 122 bp, Homo sapiens
cacccctgcacctggcccacccatcttaaaggggtatcctgctccatgaggctggcagttcggtaaacttcttataaggcactggagcatgactcctgcaaacagtaccatcaggagttaaa

SEQ ID NO: 232791 - DNA, 122 bp, Homo sapiens
gcaaaggatgcgtaggatggagctaaatttatttgttcctttctttctcagcaacagcgacgaggcccgaggtgcagctgtctcgcctcgcctgtcttttgcaggcaccggcatgcacagaa

SEQ ID NO: 232792 - DNA, 122 bp, Homo sapiens
tgccggggaagtgggtaagcaagcccggttaggctgcagaccttatcccactctgtgatgcgcctctcctcccaaccttccccgtccagaccccgccattttcccgccagcgtacccccttc

SEQ ID NO: 232793 - DNA, 122 bp, Homo sapiens
gatacagatgacccatgaagaattactcagaacgctgtgatcaatgggaacgtggccctgcgtgatggacacaacaacaaggaggagggcatggaggacgaaaccagttagcgctccgaggc

SEQ ID NO: 232794 - DNA, 122 bp, Homo sapiens
tactaagtgaatggaaatggaggttgcctaacttaattaactgtaatcattactcattgtcgtactgcttagaaagattagttgagggtatttcttctgtggtattactttaggcgtttctc

SEQ ID NO: 232795 - DNA, 122 bp, Homo sapiens
gtgccatgttctgtggtgctgtgcacgagttcctttggcagaagtgtcctatttattgatcgatttagaggcatttgtctgagaagggtccagacccaggggtgcttgagtaaactgcttgc

SEQ ID NO: 232796 - DNA, 122 bp, Homo sapiens
ttaaagctttgactttaggaaaagcctgctctgtctaatctgggaatttggcagtgataccgagacaggaagagcattcttcaaaagtaatactgggatgtattcctctttgctagtctgtt

SEQ ID NO: 232797 - DNA, 122 bp, Homo sapiens
ggggtcctgcgggttctgtagggttccctggtgtgtggagtccctacccgctacaagctccgttgggtctacggagtgtgcggggatctcccagccctgttggctgtacgggctcagtgggg

SEQ ID NO: 232798 - DNA, 122 bp, Homo sapiens
ggcggctgtcccgggacggggaagagagctttggtgcctgagggaagatggcttagggcccggtcccttaagggtgaaaggctgcgtgttcaaaattacgggactagagggggcgggagtcc

SEQ ID NO: 232799 - DNA, 122 bp, Homo sapiens
gtggcgttcaacgcagagcattctaggtaatgtagttttcatagatcccgaggtgggtgccggggaccctttgcaccaacctcttggagtaaaagcgaagctccagggcgctgggcgatgag

SEQ ID NO: 232800 - DNA, 122 bp, Homo sapiens
cctccccgtcccggatcatcgccctcagagcgcagggcgcggggtagcccaggcgcgaggcgcttgcagccccaggccaatgactcttgacctcgccgctgggaatcaccgcaacccggcgt

SEQ ID NO: 232801 - DNA, 122 bp, Homo sapiens
ggcgagtgggactccacggcccgagctttcggccaccgaatttagaatgatactgaaaaccgaagggaagtcaaacagggatcactacgcccttgtttcgcaccttaaaacctacttcttcc

SEQ ID NO: 232802 - DNA, 122 bp, Homo sapiens
cccagaatccccatccagcaccctaggagcaatccaggagctcagaattcactgttatcccggtagagtgtgcatctttgcctgtcaaggtacgccccaactccaaggtctgccacgcaccc

SEQ ID NO: 232803 - DNA, 122 bp, Homo sapiens
caccacgtctcgactccggaagcccgaggagcctggagccctggagtggtgccggatgagcgcgcgagctccagcgggcactacctgggcgggcagcgaagctgagcctgagcgcgcggcgg

SEQ ID NO: 232804 - DNA, 122 bp, Homo sapiens
actcagccacttccagtgcctttcccttcacagtattaatcacattctgcatcctggggccggagtagcggccggccccgcgacgggatggaaagtgcagccgtgtcaggggccagggagtc

SEQ ID NO: 232805 - DNA, 122 bp, Homo sapiens
gcttggctgtgagtttgctggtattcctgtgctgcttctacagctctttggctgtgtgaccgtcacctttggcaagttcctttacctttctatgtgttggtttcctcatcaataaaatggaa

SEQ ID NO: 232806 - DNA, 122 bp, Homo sapiens
aaacgaggggtggtgaggccgggcggcggctggtgacgcagcaaaatgcccgggccttgccgccgcgcgtgcgcagtccttgtttttgggctccggcgcggctttctagagatatctacgga

SEQ ID NO: 232807 - DNA, 122 bp, Homo sapiens
gggctgtcaggagcttgtgggggctctccggaggcccgccgtgaaatcggtttgaaatggcgtgtcaggtttttctctccctgctgaagcgaccatctggctgatagactcggcgctgggat

SEQ ID NO: 232808 - DNA, 122 bp, Homo sapiens
gatagttgcaaagatcactatggcataagcagaggcttccccactcgggttacagcagtgcggttctttgtttgcaaactgcagttaccagctgaagcatctgctgtgatttttttttttaa

SEQ ID NO: 232809 - DNA, 122 bp, Homo sapiens
agaggaaaaaaaaaagccagaaaaagttttcttttctggagtcccaaacgaggtgcgggacggaagagggggtgaaggccagaggctcggggcttcaagaccgctgtctggagtcccccttt

SEQ ID NO: 232810 - DNA, 122 bp, Homo sapiens
aagaccagcctggccaacgtggtgccacactgtctctaataaaaacacgaaaattagggccgggctcggtggctcacgcctgtaatcccagcactttgggaagccgaggcgggcggatcacg

SEQ ID NO: 232811 - DNA, 122 bp, Homo sapiens
ctctaattctcgtgtggttgcgctttgctgtgtcggtgtgaaagtgtgtgtgcgtgtccacgtgaatagtctccatgtgtgcgtgtcagtgagtgaatttgtgtgagagctggggagtgacc

SEQ ID NO: 232812 - DNA, 122 bp, Homo sapiens
ctcataagcggcaggatcgtctgtctgccgggcagggagggttaaatatgactgtggtcccggccctggctgcagggtacgggagctgcttctgccacctcaggaaaccacgtctaaatctt

SEQ ID NO: 232813 - DNA, 122 bp, Homo sapiens
ggtgatccacctgcctcggcctcccaaagtgctgggattacaggcgtgagccaccgcacccggccactcatgtattttttaggaactcaggaatgggtggcagtaactgtgggtccaaagtc

SEQ ID NO: 232814 - DNA, 122 bp, Homo sapiens
ctttgcattttatcaagagaaggataatgaatgcacaactattgatttccaaggaatttccgcccccagggacagggagtctatcatgtggatcagagacacatttctttccctcattaatt

SEQ ID NO: 232815 - DNA, 122 bp, Homo sapiens
ccacgccctccagcactatgagagccccgcgccgggccgccatgactgtccaccgcccgccgctggcgtctccacgcagccttccggagctcccattggccggcgtcaacagcgcgcgccgt

SEQ ID NO: 232816 - DNA, 122 bp, Homo sapiens
tgccacaacaacagggcaccaacctgctcaagaaaagggctccaaagcacaagggaaaggcggctgattcaatgggctctgtactcaccgtcctgctcaggtgatcttgctcttaatcaccc

SEQ ID NO: 232817 - DNA, 122 bp, Homo sapiens
ccggaggccacgtggctttgtttatgggctcggcttgttttccgaggcgcctgcggctcacgctcccctcccggttgcacaaccgcgccggtggaaacttgaagcggtgctgccgggccggg

SEQ ID NO: 232818 - DNA, 122 bp, Homo sapiens
gggttgtatgtgcgtcctgagaggaagacagcctgggaagacagggtggcttgcagaagacgcccaccatttgcacagagctagccgaggcagctggcctgaacatgtgtgcatgcgtgtgc

SEQ ID NO: 232819 - DNA, 122 bp, Homo sapiens
ggtagacctttctcctccttaggctcccagtaaaatgctgggtcccttgccagtggaaaacggaagaaaagtttggagcgtttctggagccgcccgtttgggaagaaatgaactctgacccc

SEQ ID NO: 232820 - DNA, 122 bp, Homo sapiens
tcagatcccaccaagcaccacctatgccattacgcccatgaaacgcccaatggaggaggacggggaggagaagtcgcccagcaaaaagaagaagaagattcagaagaaaggtacaggccggg

SEQ ID NO: 232821 - DNA, 122 bp, Homo sapiens
cacgcacttacacacaaaaggaagtcatggaaggtgctggtccctgcatacaggcacactcgcgcgggacacacacacaccccccaaaaagaggcgtgcggggttcgccagacggtgggcaa

SEQ ID NO: 232822 - DNA, 122 bp, Homo sapiens
gtggggcgaggccagacgtcactgtcaataccctgaggcatctcttcctttctagtgggccggtcaggctggggcctgggtcagagcggtgctgcccgtgccgcctgaagagctgcagccag

SEQ ID NO: 232823 - DNA, 122 bp, Homo sapiens
agaaacccaatcacatccaaagagtggtactggaaccaggtgaggtcatgggctgcaactcgaaggtgtttggctcctttgtggggcatgacaaattcaatccagaagactgctcgatccag

SEQ ID NO: 232824 - DNA, 122 bp, Homo sapiens
gcgtgggagcctggcctgggaacagggcaggccgttgcgtatgcctcggaccgggagcttcggtccctttggcggggtctttggcctctaggggcctatctgggtttccttcttggtttggt

SEQ ID NO: 232825 - DNA, 122 bp, Homo sapiens
gtccatcacggataggattggaggggagaggagatcgcggagatgcctgaggcagaagctcggaaacccgagctgcacaggccaggatcttacttcctgtcgtcgcgcagcgatgacatcac

SEQ ID NO: 232826 - DNA, 122 bp, Homo sapiens
tgggcgccctcggaccgtggcccgaagcctagtgttgggaagtcttgcatgggcgcctgacggcggtccccgagccccaggtcccaccggctccagttcccacctggactggggtcttccgc

SEQ ID NO: 232827 - DNA, 122 bp, Homo sapiens
atcgccaacacccccatgctctgtggccttcttacacttctcagagggcagagtggcagccgggcaccctacagaaactcagagggcagagtggcagccaggcccacatgtctctcaagtac

SEQ ID NO: 232828 - DNA, 122 bp, Homo sapiens
ggggacactgagatttagagcagttaagtacctgccccgaggcccataaacagtaggcaacgaagctgaaattcaaaccaaaagtagtacaacaacagagactgtgctctactcactctaat

SEQ ID NO: 232829 - DNA, 122 bp, Homo sapiens
caggctgttcttttgtttctaaaaattcaatccagggcccatcctaactgcctgcctgaccggtttctttctttttcctctctcaattcttattaaggcagaaaaattctagaatgactttt

SEQ ID NO: 232830 - DNA, 122 bp, Homo sapiens
atagctcctctctggccttgaagccttgctaccctaatccatcaatgaccatttcacaaccggggaatgacatctgtccatgtactcactttttatggtccggtcctttacagcctacacac

SEQ ID NO: 232831 - DNA, 122 bp, Homo sapiens
ttttccctctgcttttagttgctctgtgcagcctctggactataaatgtcggtggggacgcggccgccatgtgtggctgtgtgggctcagcgtggcccagtggccagcccagccctcactca

SEQ ID NO: 232832 - DNA, 122 bp, Homo sapiens
gctgagacgttttaaccctcagcttgccacctacaccagggcaaaaccagtaatacagtccgatgcagtgattccatgaaaatgcaagacacaaaaaaagacagcaaaggtaaacaaagaga

SEQ ID NO: 232833 - DNA, 122 bp, Homo sapiens
ttttcaacccctacggcaaacgcttgtccctcacagggcgccgccatcttggtccgctgccgagttgcttccccgagagtttgaaggctccggaacttccgtcctgggaggttaatatccgc

SEQ ID NO: 232834 - DNA, 122 bp, Homo sapiens
acgaggtgctccggccggcgcaggggacccagggaagacacagaggggacggatggtctgcgccagagcagggaaaacgcgaaaccaaggagaaggagaatgatgagtttaaaaataataat

SEQ ID NO: 232835 - DNA, 122 bp, Homo sapiens
atggggttatgtccccaataaacccatcataaattgaaagtatcttaagttggccaggcacggtggcttacgcctgtaattccagcactttgggaggctgaggcaggtggatcatgaggtca

SEQ ID NO: 232836 - DNA, 122 bp, Homo sapiens
tgtagtaggagaataccagctcctccccaggtctcataaggattgatataatttctctcccgcctacttctcaaatctcatctcctgcaatcttcctcttattctgtatgcaacagccacct

SEQ ID NO: 232837 - DNA, 122 bp, Homo sapiens
gccgcatcaacctcatcgagaccacgcctcccttctttcaaatcctcccgtgttactaagcgacagtccctgctttaggcacacttctgctctgaattgaatttactattaccctatccacc

SEQ ID NO: 232838 - DNA, 122 bp, Homo sapiens
gacaaacgaaccgaggcgggagcggccacgggtgacagcggcagcggcggggccgggctgcgctcccgaaggcgttcctggagggccctgggatggactcagagatccccagagccccaggg

SEQ ID NO: 232839 - DNA, 122 bp, Homo sapiens
tttccaatatcactttctcttcttaaagcaaagagcaaatcgcctgtaaaatctacggagcggacagcaaagttgaccctaaactccaagcaccaccctgcacccactgtactctaattcac

SEQ ID NO: 232840 - DNA, 122 bp, Homo sapiens
tgtcgtcaaagttgcatgaaatcaggaaatggagcggccgggagaaggctgccatgtggccggatgttatgtatttctaattagtgctatacatctttcaacagcaagtgtccttctgctgg

SEQ ID NO: 232841 - DNA, 122 bp, Homo sapiens
cagcggacagccggagggtctattttcaggtgccctctctgtggccccgcgggtggggagcgggggcggcggtgacagggccgggctctgcgcgtagcggtgcaggggatgcggccaggcgt

SEQ ID NO: 232842 - DNA, 122 bp, Homo sapiens
gcgctgcagaggaaaccagcgatccatcgtggcttcgaggcaaaagacagacatccgagacgcagtttacactactctggcttaaaaggacaagatgttcaataaatatagagaactcagtg

SEQ ID NO: 232843 - DNA, 122 bp, Homo sapiens
tgatgccgatggcgacgtacatatgagaaacctcttgtgagaaggaggcggccaccatcccggtgctgacaagtagcccccccaacatcactaccagacggtgtccgaaacgattgctcagg

SEQ ID NO: 232844 - DNA, 122 bp, Homo sapiens
cacctcagcaggtgtgcaaggtgcgggggcggacacaaagactgcggcttccggagaggacggctagggggccgcctttgcaagtgctctccaaaataattggtcaccgttctcgagtgctt

SEQ ID NO: 232845 - DNA, 122 bp, Homo sapiens
cttttttccctaactctgtttaggcggtgttggactaagaaaacagcatccggtgcgtcccgggaccacaaggtggccgtgcaccgtcgaggttactaaacactgtctccttggcaaaagaa

SEQ ID NO: 232846 - DNA, 122 bp, Homo sapiens
cccccagccaacggcccaccactcctcccaggtccagggtgtgtgacacaggtgacagggcgagagtggggatagcctgtgcctctgccgtacagtggcagagccttctgggaagtgagcct

SEQ ID NO: 232847 - DNA, 122 bp, Homo sapiens
tcttctctccagaggtccttcctaggactgactttgtggagattctgtgctggtaggtggcggggcaagacacgcctgtctctccccctggaaggagtcagtccagcaagaaacctgatgaa

SEQ ID NO: 232848 - DNA, 122 bp, Homo sapiens
aagagtcatttcacacttggccgcctgctttcccagcacacgatacctgggatatgtgggcggctgtgatttttcaacttggaaggaagtgggctttcaagctcccagcttctctttgagtc

SEQ ID NO: 232849 - DNA, 122 bp, Homo sapiens
cagagttacaaccatcaccactactgaaatttagaaagttttcatcacgacacaaagaaacgttctatcaattagtggtcatctcctatttcaacctccctgagacattggcaaccactatt

SEQ ID NO: 232850 - DNA, 122 bp, Homo sapiens
tcaccgcgagggtccacggcttcattcttgaagtcagtgagaccaagaacccaccaattccggacacattttggcaaccacgaagggacttttgcctatcaccaagcagtgagacaattgcc

SEQ ID NO: 232851 - DNA, 122 bp, Homo sapiens
ctgtttgctttcctcagctaaagcagctctggcatctcctattcccacctgcaccatggccggtacctgacagctgtgacttccccgccgctgtgcctacctggccaagctcatggccctct

SEQ ID NO: 232852 - DNA, 122 bp, Homo sapiens
ttctctgcttgtacataacaatggtctagaaatgccaagaaatacatagaatgccataagcgaagtgagaagggaacctcagatatggcccaggaaagccagaaaaaaggctttagaaaagg

SEQ ID NO: 232853 - DNA, 122 bp, Homo sapiens
acggcccacacctggccagcagaagcccaggcacttgctcctgaggactggactttgagacgtgccagccaccctctcccggcccctctcccatctgctaccagggcctcgttcctaggctt

SEQ ID NO: 232854 - DNA, 122 bp, Homo sapiens
taaattttgcaaacagtattttccttcctggtatttattccatcttaattaaaaatggttcgtacagttttgtaagtaaagtctgtctcctccactgtaatctaagtcccatgggggtgagg

SEQ ID NO: 232855 - DNA, 122 bp, Homo sapiens
gctccactgcaaggatgaatattcacattgctgctctgaatcttagaacggggcacctggcgtaaaaaagaaaatttcaatctcatcttaagtgtaacactgagagcactgtttttttttaa

SEQ ID NO: 232856 - DNA, 122 bp, Homo sapiens
taataattatgtacttatcttaaatgagttttgttttgtttgttttttgagatggagtctcgctctatcacccaggctggagtgctgtggtccgatctcagctcactgcaacctctacttct

SEQ ID NO: 232857 - DNA, 122 bp, Homo sapiens
tttttctaaaaaaaactaaacgaaccgttctgctacggtacggggtcgggggctgccgggcgtgcacagggcacggggcgggagagacgacggcctccggagaggaccccgggttccgcact

SEQ ID NO: 232858 - DNA, 122 bp, Homo sapiens
cgctgccccacgcctagcggcttggatctgcatagacatctatctacccgcaacaagatccgagctgcagaagcaaacctaatctgtctccgcaccatcccctgctctgtagacccactgcc

SEQ ID NO: 232859 - DNA, 122 bp, Homo sapiens
tagacgcactgcacgaagtgagcttgccagctcttcctttaagaaacgtgttaggccgggcgcggtggctcacgcctgtaatcccagcactttgggagaccgaggcgggcggatcccaaggt

SEQ ID NO: 232860 - DNA, 122 bp, Homo sapiens
tgtgtgaacagaggactgtgcaggggtgtgtgtaggttcgcgggtgtgtgcatgtagattcgtgtctgaatatgggagtgtgcacacacgtgcatgaactcacgtgtgtgtagattagtgtc

SEQ ID NO: 232861 - DNA, 122 bp, Homo sapiens
cgccgggagcgcagggaggggctggcggcggcgcggggcgggggcgccgggagcaaggtgcgccgcgcccccgccccggctgctctgccgcgcccaccggagcgccgcccccgccccgcccc

SEQ ID NO: 232862 - DNA, 122 bp, Homo sapiens
gttaatgtgagtgcgagcccagggcagagcgggcccagataaataattcatgagcgccaccggggaagaccgggcactcgtggagttcaacagatcataagcaggatccagggtcgtgtagc

SEQ ID NO: 232863 - DNA, 122 bp, Homo sapiens
tgtggaagtgctcggtgattcactgttatgctgatctgagcccttcctcttcctggggaccggaaccaatggggtgggggccagtgagagtcttggagggatccttctgtgttcaggatata

SEQ ID NO: 232864 - DNA, 122 bp, Homo sapiens
acaaggctgcgctgctgctagctgcaatgcccataaccactgtctccactgccacaccaccgttcttctgtctgtagggaggtaaaatagtgcttctaaggtggtttacagattcacacaat

SEQ ID NO: 232865 - DNA, 122 bp, Homo sapiens
ccccaggactgcagggctccaggaggtctgggctgcctccagcttcccactcccaggttgcggctggactgggactggttcctttccagttgaatctggcagccaaacctctcctccccctc

SEQ ID NO: 232866 - DNA, 122 bp, Homo sapiens
cagggggtggagctggttgaaggaacggggcagtcccctgaggagcggggctggttgaaacgctaggggcgggatctggcggagtggaaggtaccggtccggcccgataaggggtggagtta

SEQ ID NO: 232867 - DNA, 122 bp, Homo sapiens
ccccacccgagagcgccgggaccctgtcccgcgctgcctcccaagccggatggggttgagcgcgcccaccccagtcccaggagctcaggccccgccttgggggaggagccgagaggcggcgc

SEQ ID NO: 232868 - DNA, 122 bp, Homo sapiens
cagacaatcttgcaagaatgacgtcactaccaagcttcacttgttaggaatccgtacccacgctgaatgagtcactacccaaactgccgagggaccctaacagttacagcgcgtgcattcct

SEQ ID NO: 232869 - DNA, 122 bp, Homo sapiens
cagctcagacactcctagccttggggcagctgccgggcgagtcagcggagtagcggccagcgggcgatggagacagagagacacccgacgagaggaggcggggtgggggaggcggggagagt

SEQ ID NO: 232870 - DNA, 122 bp, Homo sapiens
agtcttaatataattatcaactaacaatgtactcaatctatttaatgtttgctgatggagcgtattggcatattttaaaacttttgctacatttggttgaggaatatgagtaaacaaaacac

SEQ ID NO: 232871 - DNA, 122 bp, Homo sapiens
ttgcccctaacattaaggatgcatgaagcaaaagttaaaacccgcagcggaacccgagagcgtttcttggcaccttgaggtgctggaggctttctggccgcgcaagttctgccccactgaga

SEQ ID NO: 232872 - DNA, 122 bp, Homo sapiens
gacgctgtccctcgacaacagggactcggtggacctggccgagctggtgcccgcggtgggcgcccacccccgggccgcctggagggcggcaggcccggcccccgggcatgaggactgcaatg

SEQ ID NO: 232873 - DNA, 122 bp, Homo sapiens
cagatccttgatctcgtgacctctgacctgcagtgacctcgccaaccgacgcggccgccccgccacgcccccgcccgcccgatctcctccgccggccacgtacgccacttacgcagccgggg

SEQ ID NO: 232874 - DNA, 122 bp, Homo sapiens
actcattaccctgatttgccaggactgagtgggttcctggagcggcctgggagccggcggcggtggtggctttcctgagccctgtttgtctaatgtaggcccggttcgcactgttcattcac

SEQ ID NO: 232875 - DNA, 122 bp, Homo sapiens
caatgaaatggggctaaatctgatatactaggtgttacaaccagaaaatatattcctgaccgtattttctatgtgagcttcaacaaggatgaaggaaagagggaatgaaggaagactgaaaa

SEQ ID NO: 232876 - DNA, 122 bp, Homo sapiens
ctgccgctcccgccaatggcctccctaacacatgatgtgccaactaatgccttcctcgggcgtgagaacagagtgtgaaagggaaggaccagagctgccagcagaaaacaggccctgcggga

SEQ ID NO: 232877 - DNA, 122 bp, Homo sapiens
cacggggaaggctggaggaggagccgaggggcagggcaagatcaagagtttggttctgtccgcagcatggggcacatgtgttccagagaagctggctggaaagtaacgctgtgggcaagaac

SEQ ID NO: 232878 - DNA, 122 bp, Homo sapiens
ggggctcctcacttctcagatggggcggctgccgggcggagggtctcctcacttcttagtcggggcggccgggcagagacgctcctcacctcctagacggggtcgcggctgtgcagacgtgc

SEQ ID NO: 232879 - DNA, 122 bp, Homo sapiens
atcgaagtagttgaaatagccaaaacaattgtccatgtagagtttcagacaatcttttgccggtgccagttgcattagaccattcattcatttattcaattattcaggcttttacaggacat

SEQ ID NO: 232880 - DNA, 122 bp, Homo sapiens
aaaacaccaagacccggattcagctggtctcattacctgcctctacccacttccccattccgtgcttccctcagcggatcgcctatatgcaccgggttcttaccgtatgtgggggatgccaa

SEQ ID NO: 232881 - DNA, 122 bp, Homo sapiens
gcatcttatctgttttctctaagttcaaagaccctggggcctaatgaataatatataatacgtcaaacaaagttccattctctgagaacaatgccaaagttccattctccgagaacaatgcc

SEQ ID NO: 232882 - DNA, 122 bp, Homo sapiens
gacacaaacggccacaagttgtatggttcgttttatatgaagagttcagaatagacaaatcgatagagacagaagtcacacgaagacaagcccatagtggagcctggtgagtatggcactgg

SEQ ID NO: 232883 - DNA, 122 bp, Homo sapiens
gtcagaatcctccagttacaaaaatccagtgctggagcagaagacaggctccatcttgatcgtattagagtcttgctgacattaaacacttacaactgcttccatctagcatggcagcgttc

SEQ ID NO: 232884 - DNA, 122 bp, Homo sapiens
ccgccgacaccaataagctacaaggaggagctttaccgctgcctgtactactactgcctgcgctacttcccagcctgcggcgtagggcgcagcaagggcctgacgcttagcgagcaggcgct

SEQ ID NO: 232885 - DNA, 122 bp, Homo sapiens
aggcgctgagcccaggtggctttcactccctgtgtgtgaggccatcgctcagcatctgcacgctgtctgctgcgtctaacgacccctcctctaggttggggatcctgtccaggagccctgca

SEQ ID NO: 232886 - DNA, 122 bp, Homo sapiens
gcttttgcccttctcgttccctcctctggtatcttctctgctttctggattgaagtcccccggctctcctcctggtgccaacaagtcatggttttttaggctattgctgtctaaagctttcc

SEQ ID NO: 232887 - DNA, 122 bp, Homo sapiens
cggcgggccggctggttgctccaagtgcggggcctgccaagcccacgcccacccagaactcgcgctggcccccaagcgccacgcgcagccctggttcccgaccatgcctctccctctacacc

SEQ ID NO: 232888 - DNA, 122 bp, Homo sapiens
taagagcacagaatctttgcattgtttttcttagtgcgtgctctctcttccctctgcctccggcttacagaccatgccactgcaactctcacaccctccagctcaccatagggatctggctc

SEQ ID NO: 232889 - DNA, 122 bp, Homo sapiens
gcagtccttgtctgaggctggcgagtcccgtgttactgatagagatggtgaacggatgcccgccatagtgacagttgtcgataaccggtgttatccctccggtcccctagtaacccccagta

SEQ ID NO: 232890 - DNA, 122 bp, Homo sapiens
tacttatcaaggacatgataggaaactcctgagcggtaaggccaggccgaactcatgccacggacgccccgtgcctcccggcctgggccggcagcgctgaactattaccttatattaaacac

SEQ ID NO: 232891 - DNA, 122 bp, Homo sapiens
aggtaggaaaacaagcttctcgttgtggtctataacctcttctctcctctgggttcagggcgggagagttacaatgcccagagaagggcatgcctcttccagccccctaatacatataacca

SEQ ID NO: 232892 - DNA, 122 bp, Homo sapiens
tcaccagcagcagacgaccgcccagcaggggcgccgggtcggcttcggagccgatcctgacgccctccaggaccagagcgtcctggcgcggcagtctcacgtccacccgcacggcgcgggct

SEQ ID NO: 232893 - DNA, 122 bp, Homo sapiens
atcttatatatctcctgcactaattgtaaactcacaaactctggaattatgtttatttgacgttgtatccccagggtctgagaaatgtttaagttcattacaacccctttggaatgtggcat

SEQ ID NO: 232894 - DNA, 122 bp, Homo sapiens
ttatgccccgagtggtaatttcgcttcccggcacgcgaaaaatgaatgggcgccatcttgcgcgtggcatcttgggaaatgtagtttacaggctcaataacaagcacggtccaagaagggag

SEQ ID NO: 232895 - DNA, 122 bp, Homo sapiens
ggtactcagtccttccaaagtgtttattaatcaagcacctgtcatgtgccattgagcccacgatggggaatgaggacagtccctgcccccatgaagcttgtgtcctgttgggaggacagaca

SEQ ID NO: 232896 - DNA, 122 bp, Homo sapiens
ccttggttttaatcccacccccagccccacgagctactgacgtctctaattctgcccctccgagctctgcctggaagtccacatccggaggggccgcctatcggccaagtctatccacactc

SEQ ID NO: 232897 - DNA, 122 bp, Homo sapiens
agctctctagtctccctgacagctctctatgctgagggaatttgcatcacttacatagagcgtaccccgctggtagataactgagtttgcttctctatgacctctagctaaagggaaaacaa

SEQ ID NO: 232898 - DNA, 122 bp, Homo sapiens
aagagagcgggaagccgagctgggcgagaagtaggggagggcggtgctccgccgcggtggcggttgctatcgcttcgcagaacctactcaggcagccagctgagaagagttgagggaaagtg

SEQ ID NO: 232899 - DNA, 122 bp, Homo sapiens
tgctgccagaactcagagcccctgtaccacactgcctctagatgagaggtctccaggcagcggtgaagcatggctcatgggatgaaatactaatgtacaccagccacatacaggccagaggc

SEQ ID NO: 232900 - DNA, 122 bp, Homo sapiens
aacctgccctgcatctcacagctagaaagcagtggtgccgagaattaaacagagtctggacgtttccatgacatagggaagagatgacttccagctgaaggtggcaatcagggagcagcttg

SEQ ID NO: 232901 - DNA, 122 bp, Homo sapiens
ccttccagtttaaccgtcgcgtgcaacagcagcatctccgacaacacagtcatctattcacgcctactgcatccgagcacaccagctgcatttgatcttcataataaccttaggagagtagc

SEQ ID NO: 232902 - DNA, 122 bp, Homo sapiens
aaaggtgcgcccctccagcacccaccaaaacaaaagacttcacaaggctcaaaggacccacggctttggacactccatcctaagcaccgaacagttgacctcacggtggcagatttgaaaga

SEQ ID NO: 232903 - DNA, 122 bp, Homo sapiens
ctggggagtgacaggtgccatagcagagacgcagacagcgatgaaggactgagctggccacgttcctcctgcctgccttcctaacaggaaaggagactcttcatttccatcaaaccacagtg

SEQ ID NO: 232904 - DNA, 122 bp, Homo sapiens
cggatcccccttcatggccaagagaacctgagacacgggattcccggccatggtgggaagcggcggacacctctcgttacgccccctcccctttggcgtccgggcaccaccaaccagcattg

SEQ ID NO: 232905 - DNA, 122 bp, Homo sapiens
ccgtccccaaccccttctctcctctggagggacccctgaacctaacagaagaataggcggcgagcctggatcccagccccactccatgctttcccgcaccggcgtctcaaccatccactatc

SEQ ID NO: 232906 - DNA, 122 bp, Homo sapiens
gcacagggactgcaggcaggtgcacctggtgaaaggaggggctgtgcgtgcaaaggcgagcggacccaggttagtggtggccttcccagcaccacgccctgctcccgcctgcgccctgctcc

SEQ ID NO: 232907 - DNA, 122 bp, Homo sapiens
aggctgagatgtctgagaaataaagttgtacgcggatttacgcctgggcaggttgaaatgcgtgtgccatgacagatccggaagcttgtctactcgaaggtccacatccaggtatgtttcac

SEQ ID NO: 232908 - DNA, 122 bp, Homo sapiens
aggcgccaagggcgtaggaggtgggtggttgtgagggaacgcccccagccagctcacttccggtgggcttcacatgctgtggggtgtcactgttaaggtaaaatgctgggacgctcgcgagg

SEQ ID NO: 232909 - DNA, 122 bp, Homo sapiens
agaccgctatgtattaaattcctgattgtttgacataaattctctctctctctttcactccgacaggaatcttctcatttatttacgaataggttaagaccttcgccttgtttctaactatg

SEQ ID NO: 232910 - DNA, 122 bp, Homo sapiens
ccagtggaaaggaaaataaataaatgacagaggtctgcacgcatataccacttgccaatccgtacttgggaagacgcgcgaggtgtggatgcattctttctccacctccacggccgtccccc

SEQ ID NO: 232911 - DNA, 122 bp, Homo sapiens
ctctgggcattcccacgaagcatccacgacaaaagaagctgaaggcgtcacggaggaaggcgcatcagaccgcacaggggacggcatcaccattgatattgtttggcaaaaaaaaaaaaaaa

SEQ ID NO: 232912 - DNA, 122 bp, Homo sapiens
cccttgggcggagtggggcgcggtggggaacacagcttggacgcctaggcgtcctgagcccggcaccctgcgcgcagagcagacccaggcgctctcgcgagctctagcgtccgtcatgtttc

SEQ ID NO: 232913 - DNA, 122 bp, Homo sapiens
tgggtccccggcctttgctgatagtggccaaggctgggccgcatcttggatgtttcaaagcgttttctctccatttccatagggccacgccaatattatctcctgcctctgcgtcagtgaag

SEQ ID NO: 232914 - DNA, 122 bp, Homo sapiens
ggtgccgcagccagtgcggttttaaataccggagaaggtccccaagtcaggagagtctctcggcgccacgggttcctctgggagtgcgccctggccttgccttagggtttcagcctcggagg

SEQ ID NO: 232915 - DNA, 122 bp, Homo sapiens
caccggcactacgggaagaagccggccggctagggcacggagctctgggcttgcggggtgcggcgcacgcccctccctcccaccgcctaaggtttttccgaagctgctgggcgtgcgccgcg

SEQ ID NO: 232916 - DNA, 122 bp, Homo sapiens
gggcaggacttgccccagcccgtctggtccagcagccgcactctcagctggacccttagacgggaaatcttagcgacttttctagggtgaagcttgatggcgttgtgatggggcgttctcga

SEQ ID NO: 232917 - DNA, 122 bp, Homo sapiens
gtgcgggctgctctgtgctgtgtgggctgctctgctctgtgcgggctgctgtgtgctgtgcgggctgctctgtgcttgggaaaatgaaggttggcatgatttcctgcggcaatgccctcccg

SEQ ID NO: 232918 - DNA, 122 bp, Homo sapiens
caacaagagcgaaactccatctcaaaaaaaaaaaaaaaaaaagtcatgggcagatgaaggcgaagtaaagataccttcaagcaaataaccaaagggttttagcatctagctgctctcacaga

SEQ ID NO: 232919 - DNA, 122 bp, Homo sapiens
cggcattgggtgttgtatcatcctctcccacgttgaaattaggaacaatatcactgggggcgtgtccaccccatgcgatattgaaagtaatatcatcctcttctctcctggatcatgggaac

SEQ ID NO: 232920 - DNA, 122 bp, Homo sapiens
ctcgctcgctggcgctctcctcgccgcgctcccctccctcccccccaggcgctggctccgcgctctttccagctgtcaaagcgtcagccccggccgcggccccatcgccctggaactccttc

SEQ ID NO: 232921 - DNA, 122 bp, Homo sapiens
ggggtcagggagttccctttcctaatcaaagaaaggggtgacggacggcacctggagaatcgggaaaatcgggtcactcccactcgaatactgcgcttttcccacgggcttaaaaaacggtg

SEQ ID NO: 232922 - DNA, 122 bp, Homo sapiens
tccagccacagaagcaaagcaaacaggcccctgactttgtttctatttcagaaaccttgccgccaccaccaccactgctgccaccgcagagcacgaaatcatcacggggctgtggaaatcca

SEQ ID NO: 232923 - DNA, 122 bp, Homo sapiens
ttcggtggaaggaaacccagtccatgggaaaggcagcagagccagaggggggcagcgcagcgcctttgctgcggccctaacagctggcaatgccaacccaagggagagaccctgtggccatt

SEQ ID NO: 232924 - DNA, 122 bp, Homo sapiens
tgagctgaaaggacatggaggctgtaagagggaggggagctgcaaagggttcgggagccccgaatgcctggtaaggagtttgtgctttatcctgtgtgtaatgaggagccactgaaagattt

SEQ ID NO: 232925 - DNA, 122 bp, Homo sapiens
agaagtctcagctggacacacaacatgctttagagtgagtggctcttgtcttctcaactccggacggcgacagtgaaattgtgggaagaacctgaggctctgagctgtggcctcagaagctc

SEQ ID NO: 232926 - DNA, 122 bp, Homo sapiens
cggcggcggcggcggcggctgcctgggcgagatcaacaagtcggggctgagcttcggctccgcgctcgctgctattctgtcccgcacttcggagcgcccggagccgggcaccaaggcaggac

SEQ ID NO: 232927 - DNA, 122 bp, Homo sapiens
ggcccaggagtggggcaatacccagcgtctaccccagatggcaccctgctgtgaactgggcgccctcagcccctgccttgaggaaggggcaataccaccagcgtgtcttttatcagggaaga

SEQ ID NO: 232928 - DNA, 122 bp, Homo sapiens
gacagcagttcccgggtgcctccgagcagaaaggagagtgggggcacagggatagccccacgccaaagccgtacagaacacactcacctgtcccctgtgacagcgtccccaggaagtcgagg

SEQ ID NO: 232929 - DNA, 122 bp, Homo sapiens
gtgccttttgagaatcttttacgttctggatattctggtatggaagaggagaaaaaccggcgctgggcagtttgcaatccaggaaaatagggaaggataaacctgaagcctgtgcgtccagg

SEQ ID NO: 232930 - DNA, 122 bp, Homo sapiens
gcgggttcctcctcactgaagtcatggacttggctcgctgcggaggggccggcgcgcgaacgtggcttgagccaaaaaagaaaaagtgcacacaatgtgtttcttgttagggactgcaagcc

SEQ ID NO: 232931 - DNA, 122 bp, Homo sapiens
cccctgggccctggggccaggactccaggactctgactacctgccctcccccagcctcagcggctgcacctcctcgttagtactgatgcactgacctcggcacacagctgggaggggttggg

SEQ ID NO: 232932 - DNA, 122 bp, Homo sapiens
gcgcacctcgtggaggaagccatagtgcacgagctccgaggcgaggtcctgggcgctgtccgctgaggcaatggcgtaaggcgaggcatgaggccgctgcccacccgccgcctggggtcacc

SEQ ID NO: 232933 - DNA, 122 bp, Homo sapiens
ctaacaggtcacaggtcacaccgttcacagcagcgtttttcacgacggccagagggtggacgaatgtgttacatgacccctgccccgaatgtgatatgtacgcacaatgggacgtcagtggt

SEQ ID NO: 232934 - DNA, 122 bp, Homo sapiens
agagatgagaagaatgaggaatggagggaggctggtgtgtttgtctttgagatagaatgacgtgaatatgttgcagccccaacaggatagagaggagaggttgaaaacaggagagagggaga

SEQ ID NO: 232935 - DNA, 122 bp, Homo sapiens
gaggctgaggcaggagagagttcacggggggattcagcagacaggcctgggagaggggtccgggcaacacctgccagttgtactggggcctgttctcacacctgtctccctggtctcccctg

SEQ ID NO: 232936 - DNA, 122 bp, Homo sapiens
tctaattttttgtacctattcaccaaccttaccttccgttctcagacttttaaatttcatcgttcaataaaattaaaacaactacaaaccttgaagatttgcctttttattttatcaagtaa

SEQ ID NO: 232937 - DNA, 122 bp, Homo sapiens
acatggttaatgctaaaccatttaatgctggactttcccaagcttttaatgactagtgtgcgttgtgaatctccaagagtggaattatcatgcaacattttcactctttagttgacaaaatt

SEQ ID NO: 232938 - DNA, 122 bp, Homo sapiens
tactgctcgatggccaggatggcgttctcctgcgtgctgtggtgcaggtggttgggcatccgcgtgatgttccagggcatgtgccggcacatagggatgcgcaccgcctcgcagggcgcgcc

SEQ ID NO: 232939 - DNA, 122 bp, Homo sapiens
ataaaacagataaggagaaggctgtatctaggctgaatggctggccaatgttttcctctccgtcagtataaataaaatggatggaagaaaacacccctggatactatcaaatatgcctttca

SEQ ID NO: 232940 - DNA, 122 bp, Homo sapiens
atagaatcgaaggcattctaaaatggctaaccgtacactgaaggatgcgcacagcgtccgcggcaccaaccctcaatatctggtggggaagatcattcgaatgcgaatctgtgagtccaagc

SEQ ID NO: 232941 - DNA, 122 bp, Homo sapiens
tgcttaccccgtgtcagtacagcccccgttgtgcatgcgtcattctatcctcttcccagacgtgccgtccagtccccctgcctggagtgatgtgttatgaaagtcttcactttcctaagaag

SEQ ID NO: 232942 - DNA, 122 bp, Homo sapiens
cctgcacatgctctttgagggtttccagctcgtcgttgaagccctccacgtactggcgatcggctgtcctaatctcagtgaagaactgccggaagcaggcccgggggtccaccttcaggctc

SEQ ID NO: 232943 - DNA, 122 bp, Homo sapiens
cttggccacatttatttctacaggaaaagcttgtgatgacttgcctttatgaatggtgaccgtaaatctcattctctccaaggtttccagatgcatttgtgaccttcagttccttccagagg

SEQ ID NO: 232944 - DNA, 122 bp, Homo sapiens
ccgtgactgtgctgccagggaagccacttgaccctggtgcccccaaggagggattcagcccgagccccacctctcccttagggacctccgcccactctaccctcaagccaggatgcccggag

SEQ ID NO: 232945 - DNA, 122 bp, Homo sapiens
atgcatttgacttcaacaggcacgctaagcgcggtacctggaaacctccagtccacgcaccggcgtccacgcatctagctcctgcacctgaacctggctctcgacctcacctcctccagtcc

SEQ ID NO: 232946 - DNA, 122 bp, Homo sapiens
ataagcaatgtcagtctcctctaaactggcatcctgcgcttgacaggtaggcagaacaaacgggacgctggcaccggaacctgcagcgttactgagattcaacaactcaaggtgtctcgtct

SEQ ID NO: 232947 - DNA, 122 bp, Homo sapiens
aaatactgatggcagcacaaagtgtaatggctccagatgggaaatcacccaagtgtcacccgcagtagaatggataactacattggggctgattcctcagtcaaatactgtgaaacaggagt

SEQ ID NO: 232948 - DNA, 122 bp, Homo sapiens
ccgcccactcgcccgcgccgcgtcgtttgtcggccggcaccagccttgcggccccagctccgccctcctgcagcccaggcccagcagctccggaactggcgccctttggcgcacccgcctcg

SEQ ID NO: 232949 - DNA, 122 bp, Homo sapiens
aaatgaaaccacttaagttatgaaactctttccttttgagttattctggagaccttactccgccttcggaaccgccccagtggtgtcacatacttgagggcctgactctcggttgccagaca

SEQ ID NO: 232950 - DNA, 122 bp, Homo sapiens
gaaacctccccgcgccctcctccactgagcggccctttcaacccttacaatgccggagggcgcaattcctgggtcctgtgaccttggtgaccgacgcccgggacaagtcagaaagacccaag

SEQ ID NO: 232951 - DNA, 122 bp, Homo sapiens
agaaacgtcatgaccggacagagcaggatacatggtcgggagctcatctggtgaacgtgacgggattcgcgagggcaaagtctcagtccatacgtgctgctgccacaaaataccggggactg

SEQ ID NO: 232952 - DNA, 122 bp, Homo sapiens
tgggatggggcttgtgactccagcgggcctgaggacagagatggaggccggtgggcaaagcggggaggatctgggccgcggccgtgggggtgctggggagagacgggggtgcgagcacaggg

SEQ ID NO: 232953 - DNA, 122 bp, Homo sapiens
tgctacagaatcgccaaatatactagattgcatttgtcttttaacaacatagagaaatatcgaaagcatttccacaagaccctctttccaaatgattaaggaaaacagggcttcctgcgttg

SEQ ID NO: 232954 - DNA, 122 bp, Homo sapiens
acgtcagtcataagcaatggccaataggcatggggaacaggatcttagactgggctaagccgcctttggtctggcctggtgcgcctgcgaccactcctccgtcagtcatcggtgatgaccaa

SEQ ID NO: 232955 - DNA, 122 bp, Homo sapiens
accagcaggaagaaactccgaacacgtccgaacgtcagaaggaacaaattccggacataccgtctttaggaactttaacactcaccgggagggtccgcggcttcattgttgaagtcagtgag

SEQ ID NO: 232956 - DNA, 122 bp, Homo sapiens
acctcagctgggtcagaaccaagcggcctgctctaagccgtttgaaaccgcttgggccgccgcacaccccgcagtgtcctcgttctttattggtcctcgacggaccgcccatcggactttta

SEQ ID NO: 232957 - DNA, 122 bp, Homo sapiens
tgctctggctccatagctcagcctggcagcggccactgggtgccctgatttggtcggccccgccccaccgggccttacttccgggatgcttctggcgggagcaagaaacatggttacatacg

SEQ ID NO: 232958 - DNA, 122 bp, Homo sapiens
tcagtccttgtcttgaactaagtgccagttttagccttgatgtcaattaactagtcctgtcgctctaaggtactaatgatgccactttcatattacaaaagtcatcacagaaggataattta

SEQ ID NO: 232959 - DNA, 122 bp, Homo sapiens
cttaagaggaaactacgatgcttcctctcttaccagaatgataatcgagatattaacacacggctttgtcataaatcctaaacacaactaagtatagataaagatctacaacagagcaaaaa

SEQ ID NO: 232960 - DNA, 122 bp, Homo sapiens
tccttaatgctgtttttacatgacggccttgtcagagccttcagctcctcctgctgtcttcgacgttctaggcacagctccctccggagggcatgcttcccacctggggcttgctggcggag

SEQ ID NO: 232961 - DNA, 122 bp, Homo sapiens
cttggatgtgcaactgaatgttcagaacccaagtgaaaatgtaatttttcactcactcgccgtccttgctttaattagattaaatgcatctgtttcctaagtcctcataatgccttggatac

SEQ ID NO: 232962 - DNA, 122 bp, Homo sapiens
gctgtgtcttcatcgagccagccttggggaccgggcatttaccagtcttcctgaggtgtacggtggctgcttcaagacaaaggaaatgccaagtggatgaagtgctctggggtccaattcct

SEQ ID NO: 232963 - DNA, 122 bp, Homo sapiens
cacggacaccgctctagccagggccacggcgaggccgccgagcagcacctcagagacctgcgtgagttctaaagcctggggctactacaattctgctcatctgtttgtcctgtgaaatgatt

SEQ ID NO: 232964 - DNA, 122 bp, Homo sapiens
ttttagtttcccatgggtagtggcaaaattttgaaggcaatgcaaccaggaagatgggagcgaatattttctcacgccaacagggaggccagtttccgggagaggaactcggcggcgtctgg

SEQ ID NO: 232965 - DNA, 122 bp, Homo sapiens
gaccgcattagagacagagcataatttaggaagtctcctcgtgcagacatcattccttgacgggcgctaagcaaggtggcacgtctataagaacagaaaggaaaatgtttattagaagaata

SEQ ID NO: 232966 - DNA, 122 bp, Homo sapiens
ttatgcttaggtcactcttagaggactatcctcaaacttgaggtgacagggaactcttcacgggggcaggatttgatgttttgtttttagccatgtttgtcaatgacaatgtcaatttctag

SEQ ID NO: 232967 - DNA, 122 bp, Homo sapiens
ggcggctgccgggtgcgaggaccgaaccgcgaagccgctagcactactgcgcaacgagggcgaacaaaggagacagcaaactttatactgcccgggaacgaggctgaaggacccggatggaa

SEQ ID NO: 232968 - DNA, 122 bp, Homo sapiens
gaaggtctctgttccgggagcgtgtgccttagggcatgtcctcctggggagaataggcctcgatttgcctctcatctcatttacttcagagtttataaattctgtgaggagacactgatgac

SEQ ID NO: 232969 - DNA, 122 bp, Homo sapiens
tgcttcggagccagaggaaccgtccaccatggtggaagtgttcgtgccccgcagactcggcgggcccgggctggacccctcagtcgctcacaggtttccgtaaggggtcgggggagcattgg

SEQ ID NO: 232970 - DNA, 122 bp, Homo sapiens
taaaacggtaagtcttatccatccttctgtttctttatagggcccacaaggcattcgtggcgataagggagagcccggtgaaaaggggcccagaggtcttcctggcttaaagggacacaatg

SEQ ID NO: 232971 - DNA, 122 bp, Homo sapiens
gctccagcgttggtgcctgtttcgtctgcgcatgcgccgggacacgcctgcgcccttggccgcagtcagggctcccgagtggtcactctggttgacccgcgcaagctctggcctcgcccact

SEQ ID NO: 232972 - DNA, 122 bp, Homo sapiens
ggagagctgattgaaaacacaaagcacctctggcagagaggttggcattacactctctgtcgacgctcaaaagcttcaggaagagtttaccatctcagaggaatgagaacaggtatcatagt

SEQ ID NO: 232973 - DNA, 122 bp, Homo sapiens
tgaaaagcgtggagcgcatttagaggaattcgacgaaaacacaggaaatcactcctctcccgctcctgggcgccgctgccactggggcagaggactgggaaccgcggcagcgggataagtgg

SEQ ID NO: 232974 - DNA, 122 bp, Homo sapiens
ttcctcagggtagcagggcaacagtgcccagctgggtactgaggtccaggcagggaaccccgagggctctatcaggcctggggctatttgaaggaacaagatttcaaaacactcttgagggg

SEQ ID NO: 232975 - DNA, 122 bp, Homo sapiens
tccctctgtctaggatgccctctccctgcccctgatttctctccctccccattgtcctcacgccaatgtgccctgctccaactgtacctcccaggaagcatctcttcatctccctgagctcc

SEQ ID NO: 232976 - DNA, 122 bp, Homo sapiens
tgcccccaggcctggaggccccaaaggcgccagaggagctgggagcccctgtccctggagcggagccagcgcgggcgagggcatggagggggcgtcggcccaggacacgcgggcgaaggcag

SEQ ID NO: 232977 - DNA, 122 bp, Homo sapiens
ccccctgggcactgagtgacagaagaagcgatcacacagtgctgagtcgagcgggatgaacgagttccaggcacagcccttgacagggcaggcttcctccctgtgctgtcctgatccctccc

SEQ ID NO: 232978 - DNA, 122 bp, Homo sapiens
cagcccggcagtttgtttaaaggtctgggttaccttgggccccaggcgcgtgatatagaacgtcagcaactgctgctgtccaggcgctcctcagccagccttctctcctgacctctcctcag

SEQ ID NO: 232979 - DNA, 122 bp, Homo sapiens
ggaggggaggcctgggcttccccagggcccttgcagtggcttcgagcaccgccacctcctcggcctgctgagcctccatgagtgccatctgctgctccaacttccggcgttgctcttcctgc

SEQ ID NO: 232980 - DNA, 122 bp, Homo sapiens
gagatggccggccaaaagttgcaggagacccaggggaggcagttgctgaggacggggccccgagggggatgacctggcaacctccgtgccttctcactctgtttcccgtccccttaggagca

SEQ ID NO: 232981 - DNA, 122 bp, Homo sapiens
tcgacagggcccggcggcctttgcaggacgcgagttggggggctccgaaggcggccggcgcgcccccccgcgcctcccacaatccccggcgcccggccccgcgcccctgacccgggtgtcac

SEQ ID NO: 232982 - DNA, 122 bp, Homo sapiens
agcggaactttttggaccctgccttatatttgaccagttgaccctctgggcctggggttccgggactttcctagtgtgccacccggagcggccactggctgccacccaggtctgcaggccag

SEQ ID NO: 232983 - DNA, 122 bp, Homo sapiens
ctttttggtttaatatcctgtaaggcacgtgagtgtacactttttttttttttaaggatacgggacaattttaagatgtaataccaatactttagaagtttggtcgtgtcgtttgtatgaaa

SEQ ID NO: 232984 - DNA, 122 bp, Homo sapiens
gtaacccgagaggagggttgggtaacctgagatcagcgagggtgggaccttagagctagccgagacccgggcccatagctccctgggggttttaaagatgacggcgaacttaaatttggggc

SEQ ID NO: 232985 - DNA, 122 bp, Homo sapiens
gcgctgcgctcaggactgggcgggctcggctggccggtccccgccacgcaggccggtccccgccacgcaggccggtcggtgagccacttcgcaccgccacagccctagcatcgggccaccag

SEQ ID NO: 232986 - DNA, 122 bp, Homo sapiens
gacaaatgtttactgagtgcccacggggtgcctagagcctggcgggacgtcgcggggatgcggctggaggaatcggagccggccctgccctctcggcactcgcggtccggaccaggaaggcg

SEQ ID NO: 232987 - DNA, 122 bp, Homo sapiens
ggattcagtgcccattcccctctcactcacaatcacacactccatctaacgcggagaacgcggtgcaaccatttgttctatgccaatcatggattcactttcctcgtgtttagtagtaacat

SEQ ID NO: 232988 - DNA, 122 bp, Homo sapiens
actgaaatcttgggtagtaaatatatatctggaccatttaaaagtaactttactttgaggcgcatcacgtcaaatagaggctgttttgtagtctaccttgtattttactgctgtgaactctg

SEQ ID NO: 232989 - DNA, 122 bp, Homo sapiens
aagtccccactggagaaatttatggtcaaactgtgtactcatcatcaaaagcaattcattcgtgttctgaacgacctgtacactgaatctcaaccaggcactgaggacctgcagccttctga

SEQ ID NO: 232990 - DNA, 122 bp, Homo sapiens
ctggcgctgcaaccctgcctggcgctgcaaccctgcctggcgctgcaaccctgaccctcgcgctcacaccccagtgctcgcgccactcgacgtcttccatttgattggattaactgttcttc

SEQ ID NO: 232991 - DNA, 122 bp, Homo sapiens
ctcaggtgtttcacccacctcaacctcctgagtagctgagactacaggtgcatgccaccacgtgcctatagtctcagctattcaggaggtaactggtaactctattgataaccaaaccctag

SEQ ID NO: 232992 - DNA, 122 bp, Homo sapiens
cctgtttctgcgaaattgcagaagaatgaggctggtgactccgcccagaaccccagcccccgccctccccagtgaacagatgaaagctgatggcagcgagcagtggccactccctcgtagcg

SEQ ID NO: 232993 - DNA, 122 bp, Homo sapiens
ggccaagcgggcggcggcgggcccggcaccgggccgggactgggggaggcaggtaggacgcgggtcccgcaggccccgccgccgcctacggctttcggcttcatttcaccggctgcacccgg

SEQ ID NO: 232994 - DNA, 122 bp, Homo sapiens
gcttgtctgctgagccattttcctggtcaactttgtacagctggcaagaatccagggcaacgtggttccctcgctcacggtcccggaaatgtccagggaagcaggtctgagcctgctgctgt

SEQ ID NO: 232995 - DNA, 122 bp, Homo sapiens
ccactctgtccccagggaggcagagggcagagggggcttccccagcagcacagggcatggcgagcccctggctgggctctggtccctggggtctccctgctgcccctcccctcacagtcctg

SEQ ID NO: 232996 - DNA, 122 bp, Homo sapiens
acaaggagttggggctgagcctcgccctaatgatgtcacagcgaagtcaaggctaggccacgcctcggggagccctccctggcacccgactcccagcaccatagaatcgacagagtctgtga

SEQ ID NO: 232997 - DNA, 122 bp, Homo sapiens
gatgttatcagtcaatgtagaaagtattgtcaagatatgtatctgatacttcttgagcaccgccctttgtgcattctctcttacatttcagctctttgcatcactccagctgcagctgcttg

SEQ ID NO: 232998 - DNA, 122 bp, Homo sapiens
cctgactggggcggccctgttagtgtagcgtgacccctggcgcattcgcacagataataccggcacctcttttcactctaatctcctacccgtctgagcaattcagcaggagataggggcat

SEQ ID NO: 232999 - DNA, 122 bp, Homo sapiens
ccagagcagcggcttagggtcacggccaccattcctgcctcccggccctgcccagagcagcggcctagacacgcgcttgcttttctgtcattccagacgcagttgctgagcctggggccccg

SEQ ID NO: 233000 - DNA, 122 bp, Homo sapiens
tcaacagccgcaggcgttgaccattcaaaccttccgccagcccagtaacctatccccgctcgcctctaagctgcgtcagccaatctccgcgcgcgcgcccagggcctcatggcctatcgttg

SEQ ID NO: 233001 - DNA, 122 bp, Homo sapiens
tctggtatttacagaggccacaatagtgtgcagtcgtgtcctggcctcacgttcaggtgccgcttactcaccaactcgccaactcacctgggcaacctccactcctgccagctccagtcatg

SEQ ID NO: 233002 - DNA, 122 bp, Homo sapiens
caccgcggtgcctttcctctgggaagctccgggcgcccaggcttgggcttcgtcgtggagcgtttgcgcggccagcttggggaagggtcgtttcaaggttgggcttggaggagagggcagta

SEQ ID NO: 233003 - DNA, 122 bp, Homo sapiens
ctcgttagagaaaacagcgatgctcaaaggcaacctccttcctgacattgcctggtaggacgcgacgtggtgtttgcccgcgcggaatgcggacgcaaggctgctcctaggtctcggggacg

SEQ ID NO: 233004 - DNA, 122 bp, Homo sapiens
taccttcttttcttctttagtgctacctactaatcttcatttgaaccagatttatctgaccgtattaatagattcagggtttgaaaaaggtcaggacacagtgagagcctcagtcattagcc

SEQ ID NO: 233005 - DNA, 122 bp, Homo sapiens
gattgtgaagatggcatgatccgaaggtaaacacagggtttatcaacacccctgcagcatcgtggagagagagagaatgtaggaaacacgcagtggcgactgacgcggatctcctgtgtggt

SEQ ID NO: 233006 - DNA, 122 bp, Homo sapiens
aaagtgactcacacaattcgtttcacgcaaccaatgttttgtgaatactcactatatgcccggtactgtggcagttatccaatattctacaacataaaataaatacctcattccaaatatcc

SEQ ID NO: 233007 - DNA, 122 bp, Homo sapiens
cagaggtgccccacagagaggagcttctcagtgggggttcctggaaaggagtggaggtcgcggttatccctcccgccaccgccaggcgtcaccaccagcctggaaatgaaaggcacagtcag

SEQ ID NO: 233008 - DNA, 122 bp, Homo sapiens
cgagaagaactgcgccaaggacattagcggctactatggcttctactcgcacagctaggccgcccctgcccgcccggccccgccgcggcccggacccccagccagcccctcacagctcttcc

SEQ ID NO: 233009 - DNA, 122 bp, Homo sapiens
agtaggactagaggtctgcaattgctgggggagggagcagaaactgccacacaaaaaaatcggaagcagagtttggttgccacaggaagaggggagggaactctgacaaaggtccaggcaca

SEQ ID NO: 233010 - DNA, 122 bp, Homo sapiens
tctactaaaaatacaaaaattagccgggcgtggtgtcgggcacctgtaatcccagctactcgggtggctgacgtatgacaatcacttgaactcgggagacagaggttgcagagagctgagat

SEQ ID NO: 233011 - DNA, 122 bp, Homo sapiens
tgctggagttggcccgtgagcttgcagagccggtcattagagctccgggaatgcacgagccgggcgttcaatgctgccattatcagaattgcatcagataaacttaccatgaagtaaattct

SEQ ID NO: 233012 - DNA, 122 bp, Homo sapiens
ttcagatcctgagtcgactccctggtacgtaaaatggcgggaaggatactttttgccgggcgcgggaggagggtcgcgaagtgtggggaaagaggggaccggaggggaggcggcgggcgagg

SEQ ID NO: 233013 - DNA, 122 bp, Homo sapiens
aacatacacacctctcccaagagcgtttccggagggttccgaaaatacccgagcgggcctcggcgccctcattggccatcaccgcgagggcttacgaagaccggaaatatccaaaggtgccg

SEQ ID NO: 233014 - DNA, 122 bp, Homo sapiens
tggaagggaaggtgggagcgtcacgctgcaccatctctgtccttcccgtctttaaaaggtcgaaggagacactaggcaggctccggatagcggcgccaactctgcgggctcgcctggatccg

SEQ ID NO: 233015 - DNA, 122 bp, Homo sapiens
acactgcaggtggtcagcaggtggtcacctgtctgtgtctggccttggcgccatgtttctcggacccatccacgtggcagcatgtgttggtgcttcgtcccttcccgtggcgggacggcatc

SEQ ID NO: 233016 - DNA, 122 bp, Homo sapiens
tataggacaaaataaatgttttcctgttttagcagttagtctttattgaacataagagcccgtagaatagagagagtaataagagtaataacctagtcttttcaacatgttctaagggccca

SEQ ID NO: 233017 - DNA, 122 bp, Homo sapiens
agtctcaattgcccgcgtgcttaccccagtgcgctggagcagctaagcacatcggtcagacgtggggcgatttctgcccttgattttgccaaaatatttgggaatgcaacattatatgaaat

SEQ ID NO: 233018 - DNA, 122 bp, Homo sapiens
gtgccagcagcgcttcaagcgcaaggaccgcatgagctaccacgtgcgctcacatgacggcgctgtgcacaagccctacaactgctcccactgtggcaagagcttctcccggtgtgcacggg

SEQ ID NO: 233019 - DNA, 122 bp, Homo sapiens
gacatttgattaagaaaatggagattccccaagctccctgttttaacagctgctctgtgacgatgacaaatattggctcccaggggctcaggtctaggggaggggccccctcacacctttgt

SEQ ID NO: 233020 - DNA, 122 bp, Homo sapiens
atttaccgcttgggggctggggggatcctggatttaactggcgactgttttgggggacgccggacgccatgttgtggaaaataaccgataatgtcaagtacgaagaggactgcgaggtgagc

SEQ ID NO: 233021 - DNA, 122 bp, Homo sapiens
cgccatctactttcaggagaacatacctgatcctggcacttcctgctcctcatggttctgcgggtggccctgcctcacctgggttactgctctccgagaacacagagggagctgggagtgag

SEQ ID NO: 233022 - DNA, 122 bp, Homo sapiens
gtggtcgatgggactgggtgccgtggagcagggggtggtgcttgtcggggaggctcgggccgcacaggagcccatggagtgggtgggaggcttaggcatggcgggctgcaggtcccgagccc

SEQ ID NO: 233023 - DNA, 122 bp, Homo sapiens
aagttctctatcatggctcgagaggcctggtccatcagtttctgagccagaccgaggcgccggtgggaacgcttcacagcctggtgggagaagagcagagatggggtgagggactgggacct

SEQ ID NO: 233024 - DNA, 122 bp, Homo sapiens
cgcaggacaacacgtgtctgcgtggacctgggtggtagatgtcacggtgttcctgaagcacgaggcacacacctgcaccacggttaaagcatgaaggtgctggcctgagcatgccctcatgt

SEQ ID NO: 233025 - DNA, 122 bp, Homo sapiens
ccagcagcagcatcagcaatgcagggggcgggaggctcggctagcaagggcggcgcggggcgcggcgggggcggcgcgcgctcgttggaacagcccaggcggctgcagccccgcccctcgcg

SEQ ID NO: 233026 - DNA, 122 bp, Homo sapiens
ggggctcagctcagcatggctgggcgcgggggctccgcaaaagttgctggcggaggggggcggcgggcgggggcgggggcggggcgcggggccgggagagccacagggagtccgcgcgcaat

SEQ ID NO: 233027 - DNA, 122 bp, Homo sapiens
agtcagcaacacagaaggaagtcataatgtctccttgcacagctctgcagggacagaaggcggacagcaaggcacatggacaagggacttgggcagcaagggacgtgcacactgagtcaggc

SEQ ID NO: 233028 - DNA, 122 bp, Homo sapiens
gggaaccctgcttaagggctttactagggaaaacggtgctggttcactggggcgcgtttccgggaaggtgaataccggtgaaagttatgctgagggtgaggtaggctctgacgacgcacttg

SEQ ID NO: 233029 - DNA, 122 bp, Homo sapiens
ggcctcgggagggggcgccgtggctgggcggagagcacgagcggcagcactgggtgcggacggtgggcagctggcagcggcccagtaggcgcagtgtctcacagaacccgaaggacaggcgg

SEQ ID NO: 233030 - DNA, 122 bp, Homo sapiens
aatgggggagacctcaagttccacatctacaacgtgggcacgcgtggcctggacatgagccgggtgatcttttactcggcccagatagcctgtgggatgctgcacctccatgaactcggcat

SEQ ID NO: 233031 - DNA, 122 bp, Homo sapiens
tacaccaaggtcctctcagtagccttggcccctttctccagctcttcccgcagccgccggcgcaatgacagcaccagcagcagcagcaccaggcacacagcccccagggccaccaccgccag

SEQ ID NO: 233032 - DNA, 122 bp, Homo sapiens
caggcaggagctagggatgggttccaaattatccaggtggttccgtccaaatatcggcttcggtcgaatcatcttggggagttgggggggggtttattccgggtccatctcacacaaagtca

SEQ ID NO: 233033 - DNA, 122 bp, Homo sapiens
gatcgcgcaccctggaaggggcagtgtggtggggagcgcgggcgtgtgtatgcgcgtgtgcgtgtgtctgtctgtccatctgtctgtcccaaggatgtatcgggggagatgatgacgccccc

SEQ ID NO: 233034 - DNA, 122 bp, Homo sapiens
ctcaagtgatccacccgcctcagcctcccaaagtgctgggattacaggtgtgagccactgcgcccgtcctgactcatgcaacttctgcttcaggtaagcagatttaggctgtttattctgtg

SEQ ID NO: 233035 - DNA, 122 bp, Homo sapiens
attaggggctcttctttagaagagtctaagcctttacaagagtctttacgagactctttccgcgttgtcgaaaccccataggttaaaatgtctcatctgtgtgctctgcacaggcacacaga

SEQ ID NO: 233036 - DNA, 122 bp, Homo sapiens
ggggaaacggagccttgctaacgggcccaacgctggggagcagccaggccaggtggcgggcgcagacttcgagagcgaggacgagggcgaggaatttgatgactgggaggacgactacgact

SEQ ID NO: 233037 - DNA, 122 bp, Homo sapiens
aatgaattgaggtgctttacttgacaatttatcttaataaacagttcttaaacaaagcctcgtacaggccaggaggtaagacgttcttctgtaaagtcaaacttccaagatgtactggttca

SEQ ID NO: 233038 - DNA, 122 bp, Homo sapiens
ccgcctcggctcccgtagtccggctccggcctggcccagcgcctcggactcgctcggcagcgctcggccaaattcggctgttctcgggcccgcccggccccgcccccactgcccggggccgc

SEQ ID NO: 233039 - DNA, 122 bp, Homo sapiens
caaaagttttcattttgccttgaatggaacctactaaaaagagagatgaaaaaaaatcagcgaggttgatgtagataataatttctatgggaccaaagactagacagaattcagtaagtcac

SEQ ID NO: 233040 - DNA, 122 bp, Homo sapiens
agttcaggccactttctgcagggtcctggaccaacaggcacttctctcctggaggttcctcgaagccagctggcgggccgtgcggagggcccagcccatcaaagtccctcgtcgttgtaagt

SEQ ID NO: 233041 - DNA, 122 bp, Homo sapiens
aacaggcatagatatatgcagccatcagcttctcaaacttgattttattgtaatcatcaccgttggtggtgaggatttgtccaatttggtttctccatgtttaattagtcttcctcaccctc

SEQ ID NO: 233042 - DNA, 122 bp, Homo sapiens
atgctctccggcactcgccattttgccagcttctcccctacgtgacctgaactcagtgggcgcggccgggcctcgcggaaactacaacccccagaaggccccacggcgttgggggcggagcc

SEQ ID NO: 233043 - DNA, 122 bp, Homo sapiens
atctcaggtcccgccccatcagcaatgacaagacaccccgcttcattccaaacccgcccccgggcctcgttctcaggtccaactacacccatagaagctcaaccccgcccaccttaagcatg

SEQ ID NO: 233044 - DNA, 122 bp, Homo sapiens
gctcctggctccacagccagccccggacccttcgtcacagcaccacgtcccggggactgccgagagctgctgcaccaggcacgttaccaacgtcatcccgctgaatcctcaagcagccccac

SEQ ID NO: 233045 - DNA, 122 bp, Homo sapiens
ctctcaaagacgcttccgaggcctaaatgttttcctggaaaacacgtgcagaggagcatccgtggaagactgaaaggtccccgcagctccagtcctggcaggatgtgcaaggcctctcgagg

SEQ ID NO: 233046 - DNA, 122 bp, Homo sapiens
agttcatataagtagaatcatacagtatctgcccttttgtgcctggcatattttacttagcgtaatattttcaaggcccattcatgatgcagtgcatatccaaacttaattcctatttacag

SEQ ID NO: 233047 - DNA, 122 bp, Homo sapiens
atttgcacgattggcagttattaaggtacaccaggctagaagggagtccatctggctctccgctgggccctgtactcttggcccaggatctgaaccatagcctatgcttaataaatatttgt

SEQ ID NO: 233048 - DNA, 122 bp, Homo sapiens
attgtgactaactgctgtccgagcaaattggtgtctaaatgatctggaagatatagcgagcgatgacaggaatgaatatatagtgttagaaattcattgctcgacgatgatgctcagcacca

SEQ ID NO: 233049 - DNA, 122 bp, Homo sapiens
cacgggccggggcgcgcaggtcccgtcgccggtgagcacgggctccctctcgcgtggcctcgccgggtccgcctggcctgcccacctccggagccacctctgcccccgcatgggctggcgaa

SEQ ID NO: 233050 - DNA, 122 bp, Homo sapiens
tctcagcttccccagagcgcaaacagcggccggctggcgcctcccgcagtaagtaagtggcgatgtcaggtcgtacacactcgccagctacctgtacaaacagcgtccgctctctccactgt

SEQ ID NO: 233051 - DNA, 122 bp, Homo sapiens
cgccaacccctatgctgactcgcactggagggcggccgagcgcttcctgcagttcgagatcgcctggttcgccgagccgctcttcaagaccggggactaccccgcggccatgagggaataca

SEQ ID NO: 233052 - DNA, 122 bp, Homo sapiens
caggctctgccccaggcaccctcctgcacccagcggtggcaggcgcacagccgggtggggcgcgacgccctcttgctgatcaggaatctctgggaagccgagaagagaggccggagaggcta

SEQ ID NO: 233053 - DNA, 122 bp, Homo sapiens
tctagtgtgaagggacaaaggatgtatctctgtgatccaccatttgccaagtctgaccagcgtggaatcacataaagcaggtgtcaccctgggaaagccccgcagggtttggccgttcctta

SEQ ID NO: 233054 - DNA, 122 bp, Homo sapiens
atgcctactacttctcagccttctctgctgtcttcttttttgtgccgctgatcatttccacggtctgttatgtgtctatcattcgatgtcttagctcttccgcagttgccaaccgcagcaag

SEQ ID NO: 233055 - DNA, 122 bp, Homo sapiens
tggtcggatggccgtgggtggaaggaaaagaggaaaaccagctcagtggaaattgtcctgcggttggctcaggcgcccacgacactgtatttatagagagctccttgcagctcttaattcct

SEQ ID NO: 233056 - DNA, 122 bp, Homo sapiens
ttccgaggcggctgcctgccggttcctctcgcgcctgttacacggcggacggcaggctcccgggctcttgtaaatcaaagggcaacaggactcgcctcgccaccactcaggctctttctgcg

SEQ ID NO: 233057 - DNA, 122 bp, Homo sapiens
atatatttatttggttttggttattacagcagtagaacataatttccagggagagagaaacgattttgttctctgctttatatgcagtacctggaacagtgcctggcactactagttatgct

SEQ ID NO: 233058 - DNA, 122 bp, Homo sapiens
gtggcccgggcgaggtctgtgtggtgctgaacgcctcctctgctctgttcccttccagcccgaccctgcccgccctggactggcagctgccgtcccactcaggcccgtatgagcttcggatt

SEQ ID NO: 233059 - DNA, 122 bp, Homo sapiens
gttggacatgtaaccaggtgaacttgtaaagggccaggaattcattatccccaataacaacgcaaccttgttttcttggttgtattcgtatcctaatcttattacattttctgccattcttc

SEQ ID NO: 233060 - DNA, 122 bp, Homo sapiens
ctcgggagacactgccccactggagccagggctgcgtcagtgccttgcaggtaggcagcccggctgtctccctggcgaggcttgaccggcagctaccccttcccaggcagatccatgacccc

SEQ ID NO: 233061 - DNA, 122 bp, Homo sapiens
aggtgggaggatcgcttgagcccatgttggacaacgctgtctctaccaaaaaattttagccgggtgtggtggcacacgcctgtggtctccgctaggaggctgaggtgggaggatcacctgag

SEQ ID NO: 233062 - DNA, 122 bp, Homo sapiens
tcacatcaaagctcttgcttcatctaagcgtccgccctgctacgggggtgggaggctcatcgggaaagaattctcgttttgtcagaggtttgggaaggactgacgtgaatcaatagactgtt

SEQ ID NO: 233063 - DNA, 122 bp, Homo sapiens
aagctcgtcagagaccctgacctctcccgggagcacaacacagactcgaactggctaactcgggctgacgccggttcagctgactcccatcctggcaagaggcttccggagtgttccagcgc

SEQ ID NO: 233064 - DNA, 122 bp, Homo sapiens
gcgttactgacgtatctactgatctttccgaccctgcgccaccaatcccctgcctacatccggaaggggcatggacctgcgcccgggagatcgaatattttccatgatcaaacgctgttcat

SEQ ID NO: 233065 - DNA, 122 bp, Homo sapiens
tttgggtttagggctttgctgggcgggcctagtctccgctgcgagtaggcccagcgccgtcggttcaagaggtaggaccacaggccaggaatactcctttactgttaaaaaagccagggaaa

SEQ ID NO: 233066 - DNA, 122 bp, Homo sapiens
ttttttcttgagacagagtttcacccttgtcaccaaggctagagtgcagcggcgcagtctcggctcactgcaacctccacctcctggattcaagtgactatcctgcttcagcctcccaaata

SEQ ID NO: 233067 - DNA, 122 bp, Homo sapiens
gctagtcactccagaaatagagggttctctgctttcttgactgattgactcatatgcaaacgcttctcatttcattttgttatttttttgagaaagggcttgttctgtctcccaggctggag

SEQ ID NO: 233068 - DNA, 122 bp, Homo sapiens
aggagaagtggtggcctcataccataatagaacctgcagagcaggtagatgtacttcacccgcagttgtggagacttcctttgtgatctggttacaatgaagttttgcatgtgtttcaataa

SEQ ID NO: 233069 - DNA, 122 bp, Homo sapiens
cggtgggaagggagcctgggggcaacacccaaaccaccaggcctggcgaggctgggtcagcgcttggcatcggagttctcagcagcgacttccccagcacagaggagtgacgtccacaggcc

SEQ ID NO: 233070 - DNA, 122 bp, Homo sapiens
tccggctctgggctgcgagggacctcagtccccgccgtcgtgtaaaatgcacacaaggttcgcggcgccgcctctgcgcgccgtgaggacacagggctgtcgccaaggccccaggaagggtt

SEQ ID NO: 233071 - DNA, 122 bp, Homo sapiens
ggtgccacacaactccctcaggtgtgcaccacgggcagttcacccacagccccttgcatgcgtgtggacatgcccacgtgacgtgccaacgtgcccatgtgccgattccagacaccggcctg

SEQ ID NO: 233072 - DNA, 122 bp, Homo sapiens
gaccgcccaggggggcggggcttgggagttggggcggggcccgggtgaggggcggggcctcggggcgtcgcggacgtcctggcggcctactgcgtgggagggagtcctgggccgcgccccgc

SEQ ID NO: 233073 - DNA, 122 bp, Homo sapiens
gaagagggtgggcgccgggaagagggtgcgcaggctccgagaacctgggggcagcaaggccggtcaaggctggagactccaacagtggcagcagcaagggtgttggccaagccacagagaca

SEQ ID NO: 233074 - DNA, 122 bp, Homo sapiens
cggctcctggctccacctagggcagagcagacctccgtccctgggccttagaggcgggcacggggctgacccccaacccgtgccactccagcgcacaggccccactcagcatcgcgccctgt

SEQ ID NO: 233075 - DNA, 122 bp, Homo sapiens
catcatggaggctcccgctgcgcaggagcccatggcaggggtggggcggctcaggcatggcgggctgcaggtccggagccctgccccgcggggaggcagctgaagcctggcgagaattccag

SEQ ID NO: 233076 - DNA, 122 bp, Homo sapiens
tgggacgtcaggcgcgcgccgccacgcccggctaattttttgtgttttttgtagagggggcgtcttcccgcgttggccaggctgttctcggactgctggcttctgctgggattacaggcctg

SEQ ID NO: 233077 - DNA, 122 bp, Homo sapiens
aggctggggcattttggagccttgctgagcctgcagagactgctcctcctgactacccaacgcttagagatagtcaataatttgtttgcaacttcaggtttcctgtgcaaacaaacaaatcc

SEQ ID NO: 233078 - DNA, 122 bp, Homo sapiens
gaactcaaagagtggcagaaaggcaagagggcagaagggcacattcatggtttcctgccccggacgcaggtaactccatactctgccagaggagctggaatgggggacttgctcctgaagac

SEQ ID NO: 233079 - DNA, 122 bp, Homo sapiens
caatcctggtatagaagaaccagcagggcaaacacagggtcaggtctgcagcagcagcagcgtctgaccgacagcccaactcccacctgagcggacgtggccccacagcagaggactgctcg

SEQ ID NO: 233080 - DNA, 122 bp, Homo sapiens
aattaaatggcaatgcctgtgattatatcataatgattaacttaagtgaatataatgaagcgtgtagtgaattcctaatatccttttcagagagagtggttatcctagtctaccttaatctc

SEQ ID NO: 233081 - DNA, 122 bp, Homo sapiens
cagctgcagcaccaagctctccaggcagcgccctggcgcaggtgaagcagcccaggcccgcgctgcaagggagccacactccagccggcgcattggcagagagagtgctctcccaggagagg

SEQ ID NO: 233082 - DNA, 122 bp, Homo sapiens
cccgcgcgtcactgcggccgccggggcgccgaggccagtgcggggacacagcaagcctcccgccttcggaccttccgccgtggccccgcgagtgccacaggtttccacagggccggggcacg

SEQ ID NO: 233083 - DNA, 122 bp, Homo sapiens
cgcccaactcagctgggctgcgctggaaattgaccggaacaggaactatgagaaaatagtcgggcaaatgagaagtaagctcaaaagcgtaggctcaagagccatttcaagccgggctgcgc

SEQ ID NO: 233084 - DNA, 122 bp, Homo sapiens
cctttcctagtcaaagaaaggggtgacaggcggcacctggaaaatcgggtcactcccacccgaatactgcgcttttccgacgagcttaaaaaacggcgcaccaggagattatatcctgcacc

SEQ ID NO: 233085 - DNA, 122 bp, Homo sapiens
tcaacgagaggggttggtgactgctctcggcccgccccgttactcagtgcattgcaatggcgaccgccaggctccccaagccgcctgatctcggccccttccccctactgctcactggctgc

SEQ ID NO: 233086 - DNA, 122 bp, Homo sapiens
tgttaactgtctctctaaaataataattggttgcagccaatgccaggaaaaggcactctccgaatagatagaaaacatctgaaactggttatcagcagcttccccataagagctcaggagtt

SEQ ID NO: 233087 - DNA, 122 bp, Homo sapiens
ggtcgcagcttctctcggaggtgggcatgctgtggggcagccggagtctgtgaggagccccgccgaagggctctgacggcatctttctgggatcggtatccaagaatcctgtccaaggcttc

SEQ ID NO: 233088 - DNA, 122 bp, Homo sapiens
gaactgctgtgagggtgccagatgctgagggctgcagagggagggaggagctagtggtagcggggatagctcctctgtgcaacagcgtgggaaacctcactgcctgcaaggtgcaggcatgc

SEQ ID NO: 233089 - DNA, 122 bp, Homo sapiens
ccgcgcggcgccaaatcatggtcagagcccggatctgcagcgagctctactgccggacaccgcggatcccgggagcccgcctcctccggcccggcccccgccttgccccgccccgtcccgcc

SEQ ID NO: 233090 - DNA, 122 bp, Homo sapiens
gccggtgccatgctcctccctgtgtcttgtatgaaaggggccactgtgtgtcttcctccccggcgggagccccacatgtgtgcactgtaggacagcggccccgaggtggaagcctggctgga

SEQ ID NO: 233091 - DNA, 122 bp, Homo sapiens
ccattgatcaatttgcttttgattgatcaattattcttcctaatttcctgcttttctatacggcaatattttatcggttgccagacatttgggctttgtcttcctttggggtctggtgggca

SEQ ID NO: 233092 - DNA, 122 bp, Homo sapiens
agttgccggctaataaaggactcctgaattcgtctcagagtgtggcgtttctctataattcgctcggttacaaaaaaagaagcaaaatccactcatttattagtcagaattggaagatgttg

SEQ ID NO: 233093 - DNA, 122 bp, Homo sapiens
ctggggcatctccgagtccaagttgggcctcaggggtgcctcctggcagagtggcactggcgcgcccgtgaggtggcaccagtgcccgggaggaggcccgaggacacagatgccctgcctgc

SEQ ID NO: 233094 - DNA, 122 bp, Homo sapiens
cttggtggcgctgcaggctgagtgaaaaactgcagaatcagtgtctccttaaaagctgtgcgggttttctggcagctccaaaaggaaacactttttcactactggggataggtttcagagag

SEQ ID NO: 233095 - DNA, 122 bp, Homo sapiens
atcttgcggggtcgggctctagctgcagttgtgcagctggcggggcggtggctgcgcaagcgcaatattcattttcaagatctaatgttcttgttggacgccatttgggttctagatttaat

SEQ ID NO: 233096 - DNA, 122 bp, Homo sapiens
tcgggcgtcgttggaagaacccaaagccaggcatgaaaggacctcagccagggagggcaccgcattcacacaaatgctgcgtgttcccatggaaacagcacaaaacctgaccgaggaaatga

SEQ ID NO: 233097 - DNA, 122 bp, Homo sapiens
agaacatgcagactcaggccttggtgacataagctccgcattgctaaaaccgcgtgacctcgagggctgactggcctgagaaccctggatggcgctctcggccacccccacctcccacccca

SEQ ID NO: 233098 - DNA, 122 bp, Homo sapiens
aagaaacacttgctatgggctgaaccatccttttgttccctggtcattctttagctaagccgagttcataatttcttgttactgtaaaggttttgacagctacatagtcactgcaaaaatat

SEQ ID NO: 233099 - DNA, 122 bp, Homo sapiens
ttgctcaccccaggaaccactcctccctataaactataaacttttcagtaagagttaccacgagatagcctaccatcttacatttcaaaaaaacactaaaaactccggggacacattcccat

SEQ ID NO: 233100 - DNA, 122 bp, Homo sapiens
aacaacctttactactagataggattctgcctctctttagctttcaggacacttaaaggacgtaaaataatacttactcctttgcagagggaagcctgcatttcttgcatgatgacagctaa

SEQ ID NO: 233101 - DNA, 122 bp, Homo sapiens
gatgactgtccccgagcaggggggtgactgtgcccgagcgggggggtgactgtccccgagcgggggggtgactgtccccgagcaggggggtgactgtccccggttggaaggtgactgcccac

SEQ ID NO: 233102 - DNA, 122 bp, Homo sapiens
cctgtggtgtaggggcacaggatatgatcagtggctggagtatcaggtggagctctgagtcgcctctagggggcagggccacggtggatgcatctcttccccttgacaggtgctggaggagc

SEQ ID NO: 233103 - DNA, 122 bp, Homo sapiens
gaaagaaccgggtctgcggtggtgggcaggactgaggaaaggccgtgaatgcgggaagcacgggaggcaggactgaaaaggaaagaggcacaggggctcacaaaacctgagggccgcgtccc

SEQ ID NO: 233104 - DNA, 122 bp, Homo sapiens
tatttctcaccttcttgaggtgagattttaaatgtagacaaaaatcaactgttttggatacgtaggcacaatgttcttaagatgtctatggaagaaagcatacaaataaagctatttgtaca

SEQ ID NO: 233105 - DNA, 122 bp, Homo sapiens
caactgacatcatgggtttctggtgagggttgggaaagcctgagtcagtaagcaagggctcgtaatccataaagcacctccttgcctaatcctggcaagcattaccgggagcgggaatggca

SEQ ID NO: 233106 - DNA, 122 bp, Homo sapiens
cccggcccggcggaacaagatggccgggggctcccgttcagggctgccgggagccccctccgcctcgtcgtcctcctcggccagggtgaacactcccggctccagccccttctccaccatag

SEQ ID NO: 233107 - DNA, 122 bp, Homo sapiens
ctgcgtgttgaagataattcatcttcctgaatcactgccgatctgccatgtggttaaccacggaataaacatgggggagagtgtaagcaccgccctaacaacctcacgcttcttccgttacc

SEQ ID NO: 233108 - DNA, 122 bp, Homo sapiens
aggcaggggggcttccccggggccgttgcagggtgttcctcttaaaggatgaaaccagagcgagcacagaagtctcgctgcaagtgcaggctctggtcacacggccatttgccagctgtgtc

SEQ ID NO: 233109 - DNA, 122 bp, Homo sapiens
cctcctgaggcaacaccctggaggtgagagtttcttggaggcatgctttggtctgcaaatcgactgtctactctcaaggagagattcatcttgccctgtaggaaatgtttggtgagggggag

SEQ ID NO: 233110 - DNA, 122 bp, Homo sapiens
ttggccggaacggggttaccccgggcacaaacggctcccgggaagctcccgtcaaagctccgcccccaacaaatgccccttgtgataagtcgggccccacgttccattgggtcctgccaagc

SEQ ID NO: 233111 - DNA, 122 bp, Homo sapiens
acggcgcggttcagcaggcaggcgtcaggttctaccaaggcgctgaaatgagcccatcagcgggtaggagcccttcccccgccgtcccctccccaggctcgtgaacggcgcctgatgcccgc

SEQ ID NO: 233112 - DNA, 122 bp, Homo sapiens
tccaggagaggcaggagccatcagtgtaacaggctcgtggtctgcaactcttccccctcccgccccactccgctccccccaggccggcgcgcctttaaccctaggccaccgggctcaccgtg

SEQ ID NO: 233113 - DNA, 122 bp, Homo sapiens
ccctgggcattggtcctttgtttcagcaatctgccgtttgattggtccgagagctgggggcggggatttgggccgctgccgggagaagccggaattactttggagagccccgccccctggct

SEQ ID NO: 233114 - DNA, 122 bp, Homo sapiens
ctggaggatgctaaagcaagttgacagtgtgaaatgtgtctgtgctcattattgctccatcgatgagcaggaaaacaccttcagggagaaccaagtttagagggtcaggtgggtgtgctcca

SEQ ID NO: 233115 - DNA, 122 bp, Homo sapiens
tccgccctaactgcttctccagctgggcgtgaccccactcccgaagccgccggggccgcccgtctgggctacagaatgcgttccacgtcggtcccgtccacgcccgccctcggctccctggg

SEQ ID NO: 233116 - DNA, 122 bp, Homo sapiens
tccggagtcggccgccagcctttgggccccacgctccgggtctggtgcgcggtctggccgcgctcgggccctcgccaaatgagagcgcagcgcctctccgccttcggatccagagaaagagc

SEQ ID NO: 233117 - DNA, 122 bp, Homo sapiens
tagcaagtccagattggaaggcaggctcagccagctcactgtattgcccagagcccacagcggtggccaggacaccccctcccctcctggggccccttcccagggatggggcatggaaggga

SEQ ID NO: 233118 - DNA, 122 bp, Homo sapiens
ttctgagcctcctgcagcagttctctccagcaacaccttggcgcagcagaccagggaggccgcgttgttggcttatctaatgagaaatgagaggactgggccaaagagccctatttctgtcc

SEQ ID NO: 233119 - DNA, 122 bp, Homo sapiens
ggtcggggcaccaggagctgtcaggtggcctcggggcagcccggctggcagagaagagttcgccggcgcggcggcggctgctgcgagcccggagccggaagtgccacgtgtcctgattgcgg

SEQ ID NO: 233120 - DNA, 122 bp, Homo sapiens
gggaagccactccgggccccgctgactaagccctggactgatggtctggagtctttaggccgggtcaactatgactcttgacgttgactcattctccttaggcgagtgacttaatcgctcgg

SEQ ID NO: 233121 - DNA, 122 bp, Homo sapiens
aaagaaagggagaaagaacggcgaagatcccgaagtattgaccgggggttagaacgcaggcgcagcagaagtagggaaaggcatagaagtcgcagtcgaagtcgtgataggaaaggggatag

SEQ ID NO: 233122 - DNA, 122 bp, Homo sapiens
ctcctccatcactagttctgtttttttacgagggtgtgagccagaagacagcagccttgccggaaggcagagtttgtggtcagaccgtgtctacagcacctcatttcatccttcccaccacc

SEQ ID NO: 233123 - DNA, 122 bp, Homo sapiens
ggcccggccccgtcaaggctgtcggggatttaaagggccgggacccacccggacggcggacgcccctccccgtgcccgcgcaggccgcacccacttgggggcggcgcgccggggcctggtgc

SEQ ID NO: 233124 - DNA, 122 bp, Homo sapiens
aagcaatcttcagcccggagcctgctgatagatgggcacagcagcgagtaaacggttctccggctgaaggctggctttttatcatcacttgtggatcctcccacgtctcaccctaggcagcc

SEQ ID NO: 233125 - DNA, 122 bp, Homo sapiens
tgggtcccgcccctcggactttgatcactgcggcaggagtccggatatcgaattgaaccgcggcaccctggtgatactttcgcgtgtgagtgccgccctacgtgggccgggttctaactcga

SEQ ID NO: 233126 - DNA, 122 bp, Homo sapiens
atcacttctcattaggccccacctcccaacactgttactttggggattaagtttccaacacgtgcctttgggggaatagattcgaaccatagcacttcctagagtaattaattttaaaagat

SEQ ID NO: 233127 - DNA, 122 bp, Homo sapiens
ggcaggagggtagctgagatgaccgcgagccagttagaggaatttcgctgcctccagccccgcagcccgccgcagtgccaaataacagacggcagagggcgctcctacctaacctttcccat

SEQ ID NO: 233128 - DNA, 122 bp, Homo sapiens
atttgctctggggcacctggctgttcccagttccctgggtgtagcctagggacggtgacccgtagtcactgagcagctggcggtactgtgaagacgtcgccatgctgctggaaggccagggg

SEQ ID NO: 233129 - DNA, 122 bp, Homo sapiens
ccacgtttactgccaaaagaggagacttggaaaattttggtctggctattccaattatagcgctttatgaaaccacacaggatacagcactaccttcttgagaaaagcaacgatgccttgac

SEQ ID NO: 233130 - DNA, 122 bp, Homo sapiens
ctcggcagcagcggcctcggccgcctctggcagcccgggcccgggcgagggctccgctggcggcgaaaagcgctccaccgccccttcggccgcagcctcggcctctgcctcagccgcggcgt

SEQ ID NO: 233131 - DNA, 122 bp, Homo sapiens
attcaattattgttaatatgttggcattttaaatgtatttttatcttagtaacagtagcacgcttttgggcacagtgcttcctttaattgtcacaatccagtgagttggtattatctctatt

SEQ ID NO: 233132 - DNA, 122 bp, Homo sapiens
caggctagcaatagagataccaacccgggaatctccgcaccaccccccaagaggaagcagcgtctgacgtcttccggaaacgagctccactggccttatgggaaatgtggtctccgacggat

SEQ ID NO: 233133 - DNA, 122 bp, Homo sapiens
tcctttttacacccaaaagcagaatctcagttcaggaattatttgctgctgccttcaaaacgacaaagactatggccttttagattcagtgtcctcgggagacataccttgtgtattctgct

SEQ ID NO: 233134 - DNA, 122 bp, Homo sapiens
gctgctgtgcttcctcagcccgatggagggggccgaggagagtagcctgtttcggggaggcggggcacggggactgggtcaggagaagccccagggggacgtggaaccgagagattttcggg

SEQ ID NO: 233135 - DNA, 122 bp, Homo sapiens
cattcaggctttgcattgtctccttcttattctggatgcctcccattcctgccagacccccggccatccccgcggccaggtccccggaccccatgccaccccggaagctggtggagcgggac

SEQ ID NO: 233136 - DNA, 122 bp, Homo sapiens
cctgttggcttagtttctccttctctgaggaacccagcctgatacaaatacccagctgagcgagtgtctttgctgatcttcaccgcctgaagccagtgctttaaaccatgagaatgaaacat

SEQ ID NO: 233137 - DNA, 122 bp, Homo sapiens
atgcgttaggggtttacacttgagcggaagaaggggcggaaactggaggcgggtccaaggcgcagaaagacacatgtgttactcaatcccaatctacctggctcctggcgctcagtcccctc

SEQ ID NO: 233138 - DNA, 122 bp, Homo sapiens
gacagccagcacgcaccgacgcagcaccgacgcagcgccaggaggggccggggacactcacggtggggcccaaaagcgaggagcagcacactgggagtgtggatcttccaccccgcacctgt

SEQ ID NO: 233139 - DNA, 122 bp, Homo sapiens
ttgcctgtctgcttcgtcacaatctggatcttggaccatctggaggctgggttgagggcccgcggctgcaggggaggggcgggcatggcgggcgtggtggcctctgtggtggacagctctgt

SEQ ID NO: 233140 - DNA, 122 bp, Homo sapiens
cctcagcggcccttctgttccatcctctgtgggcaggggtgtggctttgttttcctccctcgtttgcttccacctcgtgcacagcgctctgcacagacaacacgctcaataaaagttcagcc

SEQ ID NO: 233141 - DNA, 122 bp, Homo sapiens
gccgcgcgacgcgagagaactgctgggatgcgtggccctggtatgggcgcacccagcgtccggggcgcaggttctctcagcccagcttctcctcccactcactcgctcggatctcctccctc

SEQ ID NO: 233142 - DNA, 122 bp, Homo sapiens
cgggcaccgccctcctcgtcacgggaccaatcggtgagcagcatcccctggccaatgagacggcggcgcttcatttgaatgattgcatccggccgccaatcgctatctgcggaggaggtgag

SEQ ID NO: 233143 - DNA, 122 bp, Homo sapiens
cgatggtcttcagatgcccacgtgggcactgctgagaaagccacttggtaaaactgatgccggaaatggggctttttgggatccctgctcagctgcttctgagtcccagcatgccctgggtt

SEQ ID NO: 233144 - DNA, 122 bp, Homo sapiens
tggcgccaaggtctccagaacaccccctgcccaccgtgagaaggtggaactcggcaccaccgcactggagcacgcgttgccacttcagccacccaagcgccgtggggcaaatactacaatta

SEQ ID NO: 233145 - DNA, 122 bp, Homo sapiens
ggagctaaggggagagcacgaggatgcagagagaggaatcagacatccctgctgtcctcgcggtccaggagcactgggcagcttcactgaccggagaccgcgcctgtccaggaaagtggaca

SEQ ID NO: 233146 - DNA, 122 bp, Homo sapiens
tttggctttaggctctggggcccccctgcccgggtgtttctgggaggctggagggtcccacgtgagctccaccgcgggcagctggagggagtggggcaggacgctgagcgccgggaggggtg

SEQ ID NO: 233147 - DNA, 122 bp, Homo sapiens
tttccaaatatgaatactggaatccataaactgcaatttatcagtccgtaaaactcgtagcgtcagggcgagactccgcctctggggccccgcccaccgcgagcggcaggtggggccggcag

SEQ ID NO: 233148 - DNA, 122 bp, Homo sapiens
agaacgcgggcgcgcgcacgcgcaccggggcctcagccatggcgaccgtgctgtccagggcgctcaagctgccgggtaaggagtcgcatgcttgcgaccacccagtccccgccggtgttgga

SEQ ID NO: 233149 - DNA, 122 bp, Homo sapiens
ctggcgaggtgggtacggctatcctccttccttagcggcccaaggcacgggtttggagagcggggtcacaggcacgcacgggaagggcggggatttgttgacgccgggccctctgactccga

SEQ ID NO: 233150 - DNA, 122 bp, Homo sapiens
attcaatttctttcccccaggtcacagccaaaggggctgtcatgcacggagatgaggggccgcacaggcactctggggacctggggctttctttcctcaggaggcccaggggcgcgggtgag

SEQ ID NO: 233151 - DNA, 122 bp, Homo sapiens
ccctacacccccacaatgtgtacccctcttatctgccctggagcctgtacagccatgccacgctacccctgagagtctagaaagctggtcactaactttgcagacggatgagccttgagcac

SEQ ID NO: 233152 - DNA, 122 bp, Homo sapiens
ttaaacaatttgaaataggatacctgtcagcagtttcaaagtggttttcaaacacttttgcgctaccccctcccccgcccagcatttttaattccatattcaggaatttgcaaaacttcagt

SEQ ID NO: 233153 - DNA, 122 bp, Homo sapiens
ggcccagccgtcaaggcgccccagggccagggccggcaggcaggggcgggggccagtctgcgtcaccgcccgcccggccccccgcccccctgcccgccctaactccaccccgagggaaggcg

SEQ ID NO: 233154 - DNA, 122 bp, Homo sapiens
taaaactttcactgtctctgttgtttcattgtctcaccagtgaagaatctgagatttccacgcaaatctccaatagctttggtgtgcacacctcttgctccctgaccttggccccttgtgct

SEQ ID NO: 233155 - DNA, 122 bp, Homo sapiens
acacgtgcaccctcgcacacgcatacacatatgggcagccccacgcggcggctacccccacggtgcacgctcacactctgtgtgtgaaggcgcacctggggtctaggccacagaggccggcc

SEQ ID NO: 233156 - DNA, 122 bp, Homo sapiens
gcaaaccgtctactcactctgccatccctgccacatccactatgacctcgtgggcaagtacgagacactggaagaggattctaattacgtcctgcagctggcaggagtgggcagctacctga

SEQ ID NO: 233157 - DNA, 122 bp, Homo sapiens
ggcttctgcgtcaaggacggcgcgggtcagctgaggccaagaccgcaggcactgccctaccgctctccagatcacagctccgcctctgcaaggccccggggaaacgggcatcccttcttcag

SEQ ID NO: 233158 - DNA, 122 bp, Homo sapiens
ggcaactgagccgacttcgcaactcggaagtttttctttggctgtgatggtcgatttgcccgtctaagaaatgggactctgggccgggcgcggtggctcaagcctgtaatcccagcgccctg

SEQ ID NO: 233159 - DNA, 122 bp, Homo sapiens
tgcggagccccaggggacccgagccgcccgcgctgtctcgaacgggtccgccggccgcgccgcctgcgagccagtctgacagcgcgctgcacacctccgcaccccacttccggcgcacttcc

SEQ ID NO: 233160 - DNA, 122 bp, Homo sapiens
caccccgccgtggccggctcgccgccctccctttcctcttccgtccggcctccccgccctcggtccaccccctccgcgcgctcgcccaccccgcccagcccggatctctgtcagcggccgga

SEQ ID NO: 233161 - DNA, 122 bp, Homo sapiens
taatacccagagggtagagtatgacatgactgccaacacagtaatcaatgtacagccacccggtgatatcgctcctaatattcacggaagaagcgtatgatattactcccaatatcgcaggg

SEQ ID NO: 233162 - DNA, 122 bp, Homo sapiens
agaagcagagcgcccgcgtgattacgttccaggccagaagacagaacgcgccaggcaccgcgggctccccgccagcctgctgcccacggttcctcgtggggttcccactctcttcatccctg

SEQ ID NO: 233163 - DNA, 122 bp, Homo sapiens
aaagggcgttagtggagggacagaattgcagctccgtcctcccagggggcgctgcaggcacgtctgcttgggcaggggcccggcggaagcgccgctctaggctgcagccgcgcccccagccg

SEQ ID NO: 233164 - DNA, 122 bp, Homo sapiens
tcacagagagctggtcatatttataattccatttcatatttcctctctctacacaaaagacgtatgtccctgcatcactctctctggtgtctctgatgctcagggtacaatccttgttctgt

SEQ ID NO: 233165 - DNA, 122 bp, Homo sapiens
agccgctcctgaacgtcggtttcagaagcgagaggagcgagcagggtctcgactcgcgcccgagccctgccgctgagctcgaaatagacactccagccctgcgtcccaggaatctctctcca

SEQ ID NO: 233166 - DNA, 122 bp, Homo sapiens
gaaggtgtgtggagtaaaagccttagagaggaggaggtggtggacacacattctgaaagacgaagtattctaaagccaggctggccagcaaggattttatattaccgaatcttttggggttt

SEQ ID NO: 233167 - DNA, 122 bp, Homo sapiens
tcagagaggcggccccgcgacgaggcctcgaaagcagggctgtgtggacaacgtcacagccggaaagttgggtgttctaatgacgagagtgactaacggcaccagtgatgtagctgtctgtt

SEQ ID NO: 233168 - DNA, 122 bp, Homo sapiens
ggtcgtcatgaaagacgtgcatgaggttgtcggggttgaagcggttggcgatgagggccacgtctggcacgaacaccggcttgggcatgaagcgcagggcagcagcaggcagctccacgaag

SEQ ID NO: 233169 - DNA, 122 bp, Homo sapiens
ggaggcctccggactccgccaccatcccagctgccccgggagcaggcgagcagggcgccacgtgctcccccagagcagcctcccagtccccgctgccgtccatcttggagccgggcaaagac

SEQ ID NO: 233170 - DNA, 122 bp, Homo sapiens
gtccccgggatagacatgctaatgtgcttacctatgtgtttcacaccatccatgattgaccgaaagaacttgcggacccggtcagccacctctttggtcttccgggcaatagctttaatctt

SEQ ID NO: 233171 - DNA, 122 bp, Homo sapiens
cctcctcttcctcctcctcctcgcccactcctgcactttccaccgcggcggtcgcctccccggaaagcactctcaactccggcgcccgcaggccacttccgcctatgtgtccctgcgcgcgt

SEQ ID NO: 233172 - DNA, 122 bp, Homo sapiens
agacacacggggaagcacacacagacacacggggaaacacacacacacacagcatgtgcacggagcaccgtgatgcacagaacatctcagaaagtaaatatggagttaccagaaggtcaggc

SEQ ID NO: 233173 - DNA, 122 bp, Homo sapiens
attgattgaattagtgtggaaaacatggttttccatgtccatggaaacaggtgatccacccgcctcagcttccgaaagtgctgggattaccggcgtgagccacagcgcccagcttggttaca

SEQ ID NO: 233174 - DNA, 122 bp, Homo sapiens
tgcgggcctaggtggcgggagtcagcgtgtgcgtgtgtctgtccatcccctctggctctccgcgtgcgccccaggatccgggcacggcgtccgctcaggctcccgcgctcggcaggcagcag

SEQ ID NO: 233175 - DNA, 122 bp, Homo sapiens
gacagtattccagttactgaactttcagcaagtggaccttttgaaagtcatgatcttcttcggaaagggtatatgggggagttatgactttgattttgttatgtttctgtgaattttcacaa

SEQ ID NO: 233176 - DNA, 122 bp, Homo sapiens
gtagaacatgagttttgaggatgatgtgccaccctcctcgcttcctgcggaaaggacggccgtggctgagcgcggtgggtgcgggccttgatcccggactgcggtgtgttgtcaggtttctc

SEQ ID NO: 233177 - DNA, 122 bp, Homo sapiens
gctgtggagcccacaaccacctctctctcactgcattggtttacctcttctggtttagcacgcgcccctcccctcacctaacctcaaccctctgcgcccctgccccttctgctttccacctt

SEQ ID NO: 233178 - DNA, 122 bp, Homo sapiens
taagaataattccttttagttttcggatttcaaaagaataaacctagtagaagtgaaacccgtattgggttgtaaggttcgtgttcctaccttactctggatgactcactggtctaggtttc

SEQ ID NO: 233179 - DNA, 122 bp, Homo sapiens
gggatggagggaggagcctggccctgggacgacgccggggccaggcaggctgggggagtgcgctggagccacccgggatgggggtgggggtcgggagcggcaggatcgggcggagggacggg

SEQ ID NO: 233180 - DNA, 122 bp, Homo sapiens
caagccggaagccgccttcctagtggagacgcgagtgggggaggagcagtccgaggggaacgtgggttgaacgttgcaactagggtggagatcaagctggaacaggagttccgatcgacccg

SEQ ID NO: 233181 - DNA, 122 bp, Homo sapiens
cccaagaacctgctcatggtttgcctccttgcagagactaccctcctgcctctgccatcacggccaggcccagggctcccactcatcagccagtgcctctggcaccaaaactcagtgcaacc

SEQ ID NO: 233182 - DNA, 122 bp, Homo sapiens
gtttgtcttctccttcttggcactgggtaagttgggctgcactgtaagacgggagaccaccgcactcaggtggggcagagcagccacaccaggtgcacacagcacattgatggtggcaagac

SEQ ID NO: 233183 - DNA, 122 bp, Homo sapiens
gttctcatcagcatgcctgtccttccacctagaaaaccatcctactgtcttcctggcccgcgaggaagttctggggcctgcagcagctcccactgaacatggccctggctctgccacctcct

SEQ ID NO: 233184 - DNA, 122 bp, Homo sapiens
tgccggagttgacacagaggagagagggccctggccttcgggagctccagggatgtgggtcgggctggtgggtcaaagtatctgttggcttctttcaagtggtgggaccccaaagaatgttt

SEQ ID NO: 233185 - DNA, 122 bp, Homo sapiens
atcaccttggttgtgggtgttacccccgatcagtccactgacattattttcctgataacacgtgtccctacctagcattctcttggttgcttctgtctcccccacggcaatgtaagcatcac

SEQ ID NO: 233186 - DNA, 122 bp, Homo sapiens
ctgtgctctctcatccaggtggtgacatgcttgtatctgtggttaagaggtagtatctgccgggcgcggtggctcatgcctgtaatcccagtactttgcgaggccgaggcgggtggttcacc

SEQ ID NO: 233187 - DNA, 122 bp, Homo sapiens
aacccagctcaagtgcaggaaagctgccaatctgcacacgtagaaacgctggcgggaaaccgactgcccttctcaagaatcatcatggatgtttgcaaccacatctcaacacacaaccagct

SEQ ID NO: 233188 - DNA, 122 bp, Homo sapiens
gctccggccgcttctcgcacacagtggggaagccgctgcccttgcggagcgggcgcgcggcggggatactggagaggactcctcggattgtgcaatctgatctcccctctggaccctgggtc

SEQ ID NO: 233189 - DNA, 122 bp, Homo sapiens
aaacagctggagacaaagaaagggggtgtagcgaaaagaggtgaaaacaggaaagataagcgaacagaacagaccaaagagagaaaaataacagaagagactgagaaaaagaaaagtcaagt

SEQ ID NO: 233190 - DNA, 122 bp, Homo sapiens
gaacaactgaacagaatagctgctgcagaaagcatctccggaatatttgcaacccagagccgtgcgccccacacgcaatacaccggcaaagggttaatctagtggtgcctccagcgcggaaa

SEQ ID NO: 233191 - DNA, 122 bp, Homo sapiens
gggattacaggtgcccaccaccacaaccagctaattttttttctgtattttcagtagagacggggtttcaccatgttggccaggctggtctcgaactcctgacctcaagtgatccgcccgcc

SEQ ID NO: 233192 - DNA, 122 bp, Homo sapiens
gtttaacacaggacacagacaacgcttccacggccaaagtgggcaaaactcactgcctcgcgtgacagcgatctacaagacgattgcaaacatgttagcatagaagcatgtaccgaacatgc

SEQ ID NO: 233193 - DNA, 122 bp, Homo sapiens
aggcacacaacagctcagacagtgagtgcgcagggcacctgctcccaaggggctgagcgacgcggacgtggagggtgggaaaagcggggtaacggatgcttacacagttgcgtttcttgcat

SEQ ID NO: 233194 - DNA, 122 bp, Homo sapiens
tgggggcctcggctgcaaagttagggtcgctcagatccttactttgttctgacatgtctgcgccgtctggcaagggcagggcctctgcgtccaggagctcttcgagcctgcgctccctccgc

SEQ ID NO: 233195 - DNA, 122 bp, Homo sapiens
tggggcatcgtgattccccccaccccacgcaaaccatctggggaggacgctggctgctgtcgaggcggcctcagcattcatcaattgacgattatttgattatttttgtggctgaaactgac

SEQ ID NO: 233196 - DNA, 122 bp, Homo sapiens
cctaagtctcagggagacacgtcagcttgagctctgggcaatttcagcctggcagtctcgcggcccggggaggggcggcgggtgtctgcagacgggctctagggcccagcggccgggcgcca

SEQ ID NO: 233197 - DNA, 122 bp, Homo sapiens
gaaaaaagaaatttcaggcagacgaggtcgcggcgccggaggccccagaagggtcgaaggcgccgcgggctggggtcggtggcttagggagcccgtccggccatggtggccgtggctggtgg

SEQ ID NO: 233198 - DNA, 122 bp, Homo sapiens
cttctggggccaggaccagcgagctcccgggaaagcttcccggaaagcttacccagagagcgcggacccaggcgccgagtcttcccggagatgacgagacaccgcgagaggagcacagcgca

SEQ ID NO: 233199 - DNA, 122 bp, Homo sapiens
gagggcccaggtgggctggggctctgagaggctcaacttttagcccagaatgtcaaagggcgctggcagagtcacctctcatctgactacagaggaacgttgtaccccaccccaccccaaat

SEQ ID NO: 233200 - DNA, 122 bp, Homo sapiens
gagcaacagccttccactgccggccactcaccttgttgaattttagtcactagctgatggcgtgctagaatccggctcatcctgtaaggagagcgtcttgtagtctgatcaaatcgcaagta

SEQ ID NO: 233201 - DNA, 122 bp, Homo sapiens
ataaacacactttgaaaggaaaggaagaaagctagaccacactaagcccaaataaaagaacggtggagcagcttgatcaatctcaggcagaacaaggaaacgatcaggaatgaaaaatggca

SEQ ID NO: 233202 - DNA, 122 bp, Homo sapiens
agagacctgggcaggcctcagacctgaggagtggagctccgcatcactcaaccctgggggcggagctagcccaggctcccacacccgacgctctggcccacacagacgctactctgtagcat

SEQ ID NO: 233203 - DNA, 122 bp, Homo sapiens
aagcactagttgtaaaagtcgatttgatcacgaagtgaccctgtgtggttgttttgggagcgcagagtctggaagcgaaggaggtgggggcgtttcgagagttgtggaccaggtgactgctg

SEQ ID NO: 233204 - DNA, 122 bp, Homo sapiens
tgtcagttgtgactgattaaaacgtggtgataacactgccatagtcctgggtacaagccccgtgtgtgccaatgacattatatttttcttcagccacaggcttcatgtctcattttagctga

SEQ ID NO: 233205 - DNA, 122 bp, Homo sapiens
agaagaaaataccgaaatcacagcaatgaccactgtagtctaggggtccagatgtttacccgaaggtatatttcacttgctgtgagctgacgagttgagggaataatcagaaagagagctcc

SEQ ID NO: 233206 - DNA, 122 bp, Homo sapiens
cggacatcttctctgatccccaagccgctcccttataacccagccgccccatgcttcccccgaggccgcagcactgaggccctgcctggcacactctccctggcttctctcttcccaccccc

SEQ ID NO: 233207 - DNA, 122 bp, Homo sapiens
caggcggaggccctggttctctcctctgtcagcagcccgtgccctcggccctgagatcagcgactctcacgggggaggcagaaaggactcagcagctccaagcaggagcagagcagggaagc

SEQ ID NO: 233208 - DNA, 122 bp, Homo sapiens
gaatccctacgcgtccctttgggtttagcacgatgagctcaatcggcactggggtgagttcgctgtctgtcggtgtaatagtttaacctaaggattggggttgaagggaactcggacagacc

SEQ ID NO: 233209 - DNA, 122 bp, Homo sapiens
ctccaagatacacctgtttattaaaccttccgccaagatacacccatttatgaaacccttcgccatgatgcacctgtttattaaacccttcccctagatacacccgtttattaaacccttcg

SEQ ID NO: 233210 - DNA, 122 bp, Homo sapiens
ggggccaatggaagcgaggctctggtgttgctgggcggggccgggagggctgcgcgggcccgagacccactgcgcacgcgcgctcgctacccgcccttcccgccgcgcacgcgctcccgtgt

SEQ ID NO: 233211 - DNA, 122 bp, Homo sapiens
gtcctggcgcgccccctcccgggaggagagggaacgggcgtgcaggcggcgcgtgggcagcggaaataaagctcccttgagtcccaatagtggaggccgggtggacttaggttcgaatccca

SEQ ID NO: 233212 - DNA, 122 bp, Homo sapiens
agactcgatacgcgacatcacgtcacggcctatgccccgccccacggccggccgagcgcgcgtggccgggaagcaagtcttgtcccgccacccgggtctcgcttcccagcggagccgcgcgc

SEQ ID NO: 233213 - DNA, 122 bp, Homo sapiens
cccctagttgcggaagtgcctcgcctggcttgctcaagtcctctcttctctttctctctccggaaacgtgagtagctaatcgaaagttccggatattgaaactggtgggaatatggggaacg

SEQ ID NO: 233214 - DNA, 122 bp, Homo sapiens
ctatggagatatactgcgggcaagtttgccgctaaatgagctgtggaattaacagaggcacgagactgcgcccctaacaacatgcctctcagagctgagcctgagtttaaaaaccctgaccg

SEQ ID NO: 233215 - DNA, 122 bp, Homo sapiens
gtcacagattcatggggccataaaaggccccagcgcccattaactccgcccatggggcaacgtggccttaactcctagtggagactgtggtgggagtcgaaggtgaatccctagttggctgg

SEQ ID NO: 233216 - DNA, 122 bp, Homo sapiens
tcctcgggccccgggaggctgagggtcccagtcctgggtgcggtgccttccctcagccctcgccctgcggccccgggtctcatgcccgccgggtccgtgtgctcagccggagacgtggggga

SEQ ID NO: 233217 - DNA, 122 bp, Homo sapiens
cccagcatccctggcgccacccgcagccattttgtgggagggtgggcgaagctgcagcggcgcgtcatctgcagggcagggctctgggctccatccgcaggctgcagctgtgctcgcccggg

SEQ ID NO: 233218 - DNA, 122 bp, Homo sapiens
caccaggatgagcaagctgcccagggagctgacccgagacttggagcgcagcctgcctgccgtggcctccctgggctcctcactgtcccacagccagagcctctcctcgcacctccttccgc

SEQ ID NO: 233219 - DNA, 122 bp, Homo sapiens
aaatttactgtcagtaactaccaaaaaaaaaaaaaaagaaagagcagagcattgtcttcgcgattatgctgggacactttcagagtaagtccccaagatacaaggtccaaaaaaaatactga

SEQ ID NO: 233220 - DNA, 122 bp, Homo sapiens
cttgtcaaggaagctccacaagttggtccagtctgactctcttagggccatgattttccccgcacatggaaagtcaggtcaaaggccattcaactggtcactgaaatttcaaacaggtggct

SEQ ID NO: 233221 - DNA, 122 bp, Homo sapiens
gcataaatatgaatatgtttaattgtggtgtgctctgtattccagatctcccaggagtgtcgaagatgactctgtgcctgcactctatgaaccttctgaaatgtgagtatcctggattccag

SEQ ID NO: 233222 - DNA, 122 bp, Homo sapiens
gatatttaagttggatgatgtaatacagttgccagattcaaagttagcaagctcctcccccgtcccgccaaggggacgccacccagagccctgtgccacccccagccccgcccccgctgcaa

SEQ ID NO: 233223 - DNA, 122 bp, Homo sapiens
gcggactcctgccccgagggtccggacgcgccccagctcgcgccccttcccatatttattcggaccccaagcatcgccccaataaagaccagcaagcaaccggctggggtgtccgtgcgtgt

SEQ ID NO: 233224 - DNA, 122 bp, Homo sapiens
gcaattgctatcagatgctgaatgtctgtggtcacatactcagcttcctgtttataaatgcgctctgttttcagtgagtcagcagtttcttgttctacagagaggtaaaactggtggtgtca

SEQ ID NO: 233225 - DNA, 122 bp, Homo sapiens
gctgtattggtgcagcccgccagggtgtcactggagacagaatggaggtgctgccggactcggaaatggggtaggtgctggagccaccatggccaggcttgctgcggggggaggggggaagg

SEQ ID NO: 233226 - DNA, 122 bp, Homo sapiens
tacacaatggtgtactatttggccataaaaaagaatgagatcctgtcatctgcaacaacacggatggaactgtatggtaagtaaaagaagccagccaaggaaagaacaactttgcatgtagt

SEQ ID NO: 233227 - DNA, 122 bp, Homo sapiens
gacagagcgcaagccttgcccctggaattctagagccgccgcaaagataggaactcaaaacgacccgagccccggagccgcagcccctcgggacggtcacgagcagagctcccaaggggacc

SEQ ID NO: 233228 - DNA, 122 bp, Homo sapiens
agcccccgaagggagccagtcggaagtggggagccacggctggactgcatcctcacttgccgcccttgcgggacagacaccgggggaggcaagagaaagtctgcttgacgcgcgccagcagc

SEQ ID NO: 233229 - DNA, 122 bp, Homo sapiens
ccaaagcgctgggataccaggcctggcctttatgcattttaggatattttcaatttaccacgagttttgttacatggttaggtagccccaaggaaatcaagcagcatggtgaagcggcgggc

SEQ ID NO: 233230 - DNA, 122 bp, Homo sapiens
aggccagccccaggccggcagccaagcagggcagcggaaggtcctgcagcagcagccaggcgagcgcgggcagtcgatccctgtgcccataggcgtcgtagaagagcgggaaggcccgcgtg

SEQ ID NO: 233231 - DNA, 122 bp, Homo sapiens
ttccacgcaaaagcaaagttccctgcagacgctccattaagttctgggtgcaaggaagcgcggatccttcagttctgggcgttttcaccaggtggcactcagaacaccctcacgtgacaagc

SEQ ID NO: 233232 - DNA, 122 bp, Homo sapiens
ccggtctcgggcccgggcagatcagggccgcaggtaccccggtctcctgctgtcactcttcggcccccaactccacgccgctccagagctgcccaggacgcgctctgggtggctcaccgcgg

SEQ ID NO: 233233 - DNA, 122 bp, Homo sapiens
tggtggtgtgagcacaggcctcccctgggaagctgacagcaggcaagagtgccctgtccccgggtgccattgccaggcagcacctgacactcacctggcatccgcctcactgtaatactccc

SEQ ID NO: 233234 - DNA, 122 bp, Homo sapiens
ctaaacacttcttttctaatgagctgctctgtgtgaggccctggtcagggaaaacgtggtcgataaggcatcacatttttgacatggagcttctgacaaataatctcaaatttatcactgac

SEQ ID NO: 233235 - DNA, 122 bp, Homo sapiens
cccggggaggcggtggtgtctcggcggggtcagcaacggtctgtggggggtcccctgcagcgcgcagccggtttccgcctccgcagctcccagccagcgcggacgccgccctccccggcgcc

SEQ ID NO: 233236 - DNA, 122 bp, Homo sapiens
catggggtgaggactcctgggggacgaggcactagagcctgctttctgtttcctgcagaccgattagtcttatggaagcagacaagggagaaaaaaatgggggggaccccagaactgccatg

SEQ ID NO: 233237 - DNA, 122 bp, Homo sapiens
ctgctaaagcccagggagaggtggagttgggctggcctcttcattcccattttgggaaggcgaccttaaaccctgccacttgatctggggcagcggaagctctcgcttgcatctcttgtggc

SEQ ID NO: 233238 - DNA, 122 bp, Homo sapiens
taaaggtcacctcttcaaaaagctatacctgactcaccctagagaatttggttcctctggcgtgtgctcgtgatacttcatttgctggatggaacatgagtgaatggagtggtggcattcct

SEQ ID NO: 233239 - DNA, 122 bp, Homo sapiens
gcggtggggcgcgcggcgatgcgtgcgcgcgcttcccgggtacgtcgggcaggagcgacgcgcaccccacactgagcccggggctcgcgggccatcgaggccaccccgcccgctcgcggtcg

SEQ ID NO: 233240 - DNA, 122 bp, Homo sapiens
cctttaacctgttaaggttgcttggtcctgttaaagccctccgttcttgttaggactcctcgattgcctgggtccccaatcctgtcagggcccccatttccctcttattcaccctcccaagg

SEQ ID NO: 233241 - DNA, 122 bp, Homo sapiens
ctgctcctctcctaatgacctcctggccccacctcagagttctttggggtgtggcagggccgggatgtggctgggtctcccaaggctgtcattgtcaggtcactgcagaaggaggagagata

SEQ ID NO: 233242 - DNA, 122 bp, Homo sapiens
ccattccagaacaatgtttctgctttagccttactcccaagctcctatgctcattcttagcgtgctctctcctcctatgcatttagtttcttcctttttcctctaccttaagtcagtgttgt

SEQ ID NO: 233243 - DNA, 122 bp, Homo sapiens
ctgcaggacccctggtccacaccagaccctccccagtctctctggaggaggctgggctgccgggcctgtcctccaaggaagaagcagcaccaacttgaagctggatgcagccttgcatgtgt

SEQ ID NO: 233244 - DNA, 122 bp, Homo sapiens
ctagtttgtatgctccccctctgctcccgtacaggtttgagcggcggggaactgaagcagcgagccacacgccccgtcgcatgccttgtgagagggacaagggaacttttccggtttcgctg

SEQ ID NO: 233245 - DNA, 122 bp, Homo sapiens
cggaagcacgcgggaggagcactcatgccggatctcaggcatgggccggagaggccgcagcgtagggctgggactggaggggcaggcagccgaaaaaagaggctgggcggcgcgcctcgcgg

SEQ ID NO: 233246 - DNA, 122 bp, Homo sapiens
gggagagggagagcaccatcaagttcacgctgcccacagaccacgccctggccgagaagacgagccacgtatgaggtgcctgccctgggctctggaccccgggcacacgagggacggtgccc

SEQ ID NO: 233247 - DNA, 122 bp, Homo sapiens
gtgtatatgcagaggtatgccaggctctgccccttaaagtttgggggccggcggaggcggcgccgtggccgggagaaagtgtctctcatttaggagggtttgcaggtccagagtaaagtcac

SEQ ID NO: 233248 - DNA, 122 bp, Homo sapiens
tttatgtccagagacacattagcaatagtctatagaccaagaagccccttgctcctccttcgacataactaattttgagtaatagaaaataaatctgggtcacttttttgtagctgtaaatc

SEQ ID NO: 233249 - DNA, 122 bp, Homo sapiens
gcaatgttctagattttcgcctctgcccgcccctcctggttcatcaacatattaaatgagcgtagggaatgagggcgtattaagtgtcctctttttgaagagacaaagaagtggctgactac

SEQ ID NO: 233250 - DNA, 122 bp, Homo sapiens
gtcaatattgaagccaagcaaaatattgcctgcagtgccacattagaacagcttgaagaccgttcatttttaagtgacaagagactcacctccaagaagcaattgtgttttcaggtagcaaa

SEQ ID NO: 233251 - DNA, 122 bp, Homo sapiens
tatctcatttgaacttcactacaaccctatgaagtaggtacagcacgtattataatccaccgccaccaccacttaaaagacagctatactgaggcacaagcatgtcgagaaacttgtttaag

SEQ ID NO: 233252 - DNA, 122 bp, Homo sapiens
gaacaaagacgcccttgatgggggattcagggaggcccgggctgcttctcagggctcagacggggctgcctgcacgcgccggaccagccgccagccctgagggcttttctgttctcctaggt

SEQ ID NO: 233253 - DNA, 122 bp, Homo sapiens
tgttgctatgcattttccatgttcctaccggatgaaatacgtcagttaaacacgaggggccggatggtgaataccatagatgagaaggccttagagtttctaggaactcctcacctcccatg

SEQ ID NO: 233254 - DNA, 122 bp, Homo sapiens
caggcgcactgctggcaagggtgcttgcctgtgctggggtgggcggagctaaacccggagcgggatgacgtcatgaggacgcagccgcagagcgattcgcgtcccggaagcggcggtggcgg

SEQ ID NO: 233255 - DNA, 122 bp, Homo sapiens
cgcaggaagttgccgctgggtatggccgcctggtccacagcaatccctctgtgcacgcgccggcctcctcccagcttgccaaggccatgcagcaaggaggtgtctcccaagcacacactagg

SEQ ID NO: 233256 - DNA, 122 bp, Homo sapiens
acccagctccaaagctactcatggcggcgggtggcggagcttcggggccgggggtggagccgggaccggctctgccgcttccggccctgggaggcgcccgggccgccgcgcccctgccccgc

SEQ ID NO: 233257 - DNA, 122 bp, Homo sapiens
cttctgaggaccgagctgggagccgggcaggggcccagggcgagggtggtgggagggggacggcaccctcatgcgtccttgggcctgaaggacgccgctcaaacctgttcgaaccgcagctc

SEQ ID NO: 233258 - DNA, 122 bp, Homo sapiens
ttattattaattttatcaattaacttttaacctttaagtttgtcttattttcaaattggccggttatgttgaagaccggaagagttccagtaatgacaagtcccagttcctaaaaatagatt

SEQ ID NO: 233259 - DNA, 122 bp, Homo sapiens
tgaccccggtcggcaagtccccttcgctctcggggtctcaggggctcaagagaggaggtgcggggtataaagggattggttaagaccctctcgattctgctcggttctcaagcacaacaaac

SEQ ID NO: 233260 - DNA, 122 bp, Homo sapiens
agaatcctcccccagcaccgagaacacagcagctgaaccccaagggacagccccctcccccggcaccaggctccacagcccccatggggtccttcggcagcagaggcccagcggaaccttgg

SEQ ID NO: 233261 - DNA, 122 bp, Homo sapiens
acaaccacactgcgtcgcaagcaggaggaggtatctgcagtggtcctgcagcgtgcctaccggggacatttggcaaggcggggcttcatctgcaaaaagacaacttctaataagctggagaa

SEQ ID NO: 233262 - DNA, 122 bp, Homo sapiens
tgcacatctctgctacagaaatgctcacgaaaatcaagcagttgccagaaaccacgcctccgaaagacagatgcccttcagggatggggcccgagacaactgctgggcaggctccagctttc

SEQ ID NO: 233263 - DNA, 122 bp, Homo sapiens
gcttcctgcctcattccacttgcagtgagcggatattaaattggccataaacaccgagtacgatgaccttacaatccgcaaactgcacctttcatgtgtaaaaggattgctactactttact

SEQ ID NO: 233264 - DNA, 122 bp, Homo sapiens
agggacttgttcgcctagcctagccttcctggcccagccccactgagttgctttctctggcgctcagcactgagcggctctgcaagggctgaggagccagtggcagacagcatcctcccctc

SEQ ID NO: 233265 - DNA, 122 bp, Homo sapiens
ggaggctgaggcaggagaatcgcttgaatccggggcaggggcgcggaggtttcagtgagccgaaatcgcgccacttcacactccagcctgggagaaagagcgaaactccgtctcaaaaaaat

SEQ ID NO: 233266 - DNA, 122 bp, Homo sapiens
gactggctgctgccgtgaatcagaagaaaaggatggacagatcagagtgggggcagagagcggcgtcaggggtcaacagattctgcttaagtattaagaattttgggctttgtaattgtgta

SEQ ID NO: 233267 - DNA, 122 bp, Homo sapiens
acagctgagagcctcacagagacacacagtgtgtggcaacctcacacaggccgcagattccggccaataagtcgttcctggtttgttcttcctctcgcataacgcgtggttgaatccctcct

SEQ ID NO: 233268 - DNA, 122 bp, Homo sapiens
tgaatgtgtcccaagaatccagcgaaacagggtctcccaggaggcgggactggaagggtccggagaggggccacaggctcctggcctttctaagcacaccaagtgcccagtcgcggaccccc

SEQ ID NO: 233269 - DNA, 122 bp, Homo sapiens
cgtcccgggctgcggagctcgctgggttgggatggactcgttcagacctgagtgctaggacgccgaagggggcggtgaggcgtcccggcgaggagctggggtcgtctggagtttaaaagaca

SEQ ID NO: 233270 - DNA, 122 bp, Homo sapiens
cccgacagcagcatggagctctgccttcctctgcaggggacagtacattgcacctgcccccgggcccaggctgcggcctctgtgcttccaggctgatggatttcagctggcatggaaagtgc

SEQ ID NO: 233271 - DNA, 122 bp, Homo sapiens
aaagccgccatgcgccctctacacttgtgctttgggagaagatctttcctggctcagcttcgatatccagtcaactgcctgattgcatgttcatcgggagcaactgaggggcgaagtcggca

SEQ ID NO: 233272 - DNA, 122 bp, Homo sapiens
atggtaaagccgccctgcctggcgtggctgggcttggccaagacccagaagcagaagttccggaagctggagacagtggctgtggggggcgcaaggcggcgggggactgtcgctgttacgag

SEQ ID NO: 233273 - DNA, 122 bp, Homo sapiens
gttttgaggaacagaagatgtgaaatgcaatatttagtctgggtcagtgcaagatccaggcgagggtggaggatggccggctgcacagacctctgttccggtgctttctcttcatccctccc

SEQ ID NO: 233274 - DNA, 122 bp, Homo sapiens
aaaccttcctgtcccccatattagctacttcttcaggggatcagggctccagggttccatcgaaagtttccatgtcagtttacttgcactttatgtggatattaagaagaaatcaaaaccaa

SEQ ID NO: 233275 - DNA, 122 bp, Homo sapiens
cggacagcgcgctcccacctcgcccccggaggccacgggctcgggccgtgttcagcaccgcggacagcgccagcaactccgagggtctcctggcctccagcccgccgtctctgacctccctg

SEQ ID NO: 233276 - DNA, 122 bp, Homo sapiens
ccatcttgccacccgggagcgcgggggtcgccgggagttgcggttcggcgccggcgcgagcgcgtttttgtggcgcctgccccgccccctcgctccaagcccgcctccccggccccgcccgc

SEQ ID NO: 233277 - DNA, 122 bp, Homo sapiens
tcttgctcttccttcccttcttctgagcctgggatcccctggggaaaggacatgtgtggccgctggctcctctcaggccacattctcccccgatctcactgcttaaaaggctggggacaccc

SEQ ID NO: 233278 - DNA, 122 bp, Homo sapiens
gcaacatggttgagacgcttctctcctgccgggactggaaaggtgggccctgtggtcagccggtgccgcagccaaccctgcagtccagaaagcagacgctttgctgatgaacagtgagcaga

SEQ ID NO: 233279 - DNA, 122 bp, Homo sapiens
ttgggtttccttcagagctggggctccaggtcaaggacttctgctcccagcctcagctcccgctctctcacctggttggcttggccccttggtggactggcactgctacctatgaagtgact

SEQ ID NO: 233280 - DNA, 122 bp, Homo sapiens
ccaatgttgctttatatattaatccagggtttttgcttccctacctttagggtgttggggcgggcaacaacaggttactgtttgtccccatacctggttggaggaagtcatcctttctctca

SEQ ID NO: 233281 - DNA, 122 bp, Homo sapiens
cagacggcctgaattctaatcccggccccagacggcctgaattataatcctaactccagacggcctgagttctaatcctgccccagacggcctgaattataatcctggctccagatggcctg

SEQ ID NO: 233282 - DNA, 122 bp, Homo sapiens
gccttgggatgcagaactgctcagtcaagatgctcagggccatggtgggaccctgctccgcgtggcctgtggcaggcggcctctgcctctgcaggagagggtctgtgcagctgggatccaca

SEQ ID NO: 233283 - DNA, 122 bp, Homo sapiens
tactgtcctgatggagagcagggaggaaccctgcccctcggagagggggagccggccgcccgtgccccagccaatcagagctgcctggcccggcccccaatttgggagttggaatggagagg

SEQ ID NO: 233284 - DNA, 122 bp, Homo sapiens
tttattgtttatcctactagaatttaagcaccaagagggtagaaattttgtcatgttcaacgcagtttccctggcaactagaatcaaagttagaattctcagagactatgagggttcactat

SEQ ID NO: 233285 - DNA, 122 bp, Homo sapiens
tagaagggaggaggcttcatagaactggtcaggttttcacctttaaggatggtaggatttcgattcacagacaaggtgaggacaggtatttccaggaagtggctgagcggaaacagcataat

SEQ ID NO: 233286 - DNA, 122 bp, Homo sapiens
attcagttaaaaaaaaaaaaagctgtgacaaactctaggtgccttcccattagccccacccgcacctcttggtatccaatccttcgtatgagcctctccccttggatatgggcaggacctga

SEQ ID NO: 233287 - DNA, 122 bp, Homo sapiens
tggaggggaactagtctgctccaggtggcaagctgcgtgagcaagcaagccaacatggaccgcgactcgtaccatcactatttctacgactatgacggcggggaggatttctaccgctccac

SEQ ID NO: 233288 - DNA, 122 bp, Homo sapiens
gtcttaagcgagtcttcagacggattgagcgcgtctctctgggcgaatctgtccaggatccgtgtttagggtgccgagcaggggcacgtgctttgcaggaaagggcgtacctttaggattgt

SEQ ID NO: 233289 - DNA, 122 bp, Homo sapiens
cgaggatccgcccccttctctctctggccgttggggccaggggagccgacagttagaatgcgcctcggggcgactagtcccaagtcacggaaacctcggcgcatccccgcccgcccttcccc

SEQ ID NO: 233290 - DNA, 122 bp, Homo sapiens
tgccccgccctccgccccagggattggccctgcatggtgatgggcggagcttgtagggggcggattctgaaggaggggcttcagggcgcatgcccgggcagctgcgcgagtgaggggtggaa

SEQ ID NO: 233291 - DNA, 122 bp, Homo sapiens
tccccaggagaccaaagaggttggacggggccccgggtactaggctgggtgggggttgggcgcctgggccggtcgcagttgtctgggggccctggggctctctgcgtcgagagcgctcgaag

SEQ ID NO: 233292 - DNA, 122 bp, Homo sapiens
tggttccccggttggaagagcagactgctggcgcacagggtgcaccgacatccccacccacggctggtggagagcaggagaagggattgctacgaccaacctggaaaagtaacggcgttatc

SEQ ID NO: 233293 - DNA, 122 bp, Homo sapiens
cagaacctgcgtggacacagaacctgcgtggacacatagcctgcgtggacacatagcctgcgtggacacagaccctgcgtggacacatagcctgcgtggacacagaccctgcgtggacacat

SEQ ID NO: 233294 - DNA, 122 bp, Homo sapiens
ggagcaaaaaagaggacacaggagtgtgggcaaggccagggctcaccaggggccgggggacgtcctggtcctgctacatctgaggcctgcccggctaggccagcacgacgccccctctgagg

SEQ ID NO: 233295 - DNA, 122 bp, Homo sapiens
gcagcacgaggaagagatggcagcagaggctggggaagccgtggcgtcccccatggacgacgggtttctgagcctggattcgccctcctatgtcccgtacagggacagaacagaatgggctg

SEQ ID NO: 233296 - DNA, 122 bp, Homo sapiens
aggaaataaattcagagaatgccaaatactacattcagcaggaagctaatgctgggattccggcagtccagggaagggctggctcagggtgactctccccagttcagtcctccgtttgctgg

SEQ ID NO: 233297 - DNA, 122 bp, Homo sapiens
gcagggaaaggcggcggcaggcttagagctgcaaactcccggggcgccgctcatgaggcccgctctgtgccaccaggggacgccatgtgcacagcctgtgctgggccctgactgcggctcag

SEQ ID NO: 233298 - DNA, 122 bp, Homo sapiens
gtagctttctttaaaagccagcgcctcgtagtatgcccaggcgccccagtttggggaagtcggggtgaagccccctggaacaccctcacactggcaaagaagctgcctcggctatctgcggg

SEQ ID NO: 233299 - DNA, 122 bp, Homo sapiens
cctcgctctctattcctcagctcctcggaatgcgtgggggcttcctgcaacatcagtctccgccgccctccactaaatcgcgaccctgggaaggtgtttccactgtgcccatcacactaggg

SEQ ID NO: 233300 - DNA, 122 bp, Homo sapiens
gctgcaggtcagcaggtgcgtccagcacaccggccctcaagtagaggatgctccgggacgcgtggtgacgacccacggccacgagcacagccagccctccttagccatggcccccgcacctg

SEQ ID NO: 233301 - DNA, 122 bp, Homo sapiens
actgctcacccgggcaccgctggcgaccggaacccagctccctccgggctccgggagaggcggcctcagctgtgtgctggtgctgccctccagcggcgctgggtccccatggcacctggctt

SEQ ID NO: 233302 - DNA, 122 bp, Homo sapiens
taaaagtatttcaaacacaaagggaaatttatatattgggcaggcaatcttaaaataaaccgattttgttgatagcactgcaaatgtaattgtgggaaacccccttctgatgtctgaattta

SEQ ID NO: 233303 - DNA, 122 bp, Homo sapiens
ctccctgtgcactcccgtaccagcctggaggtggtccagggccggacagggccgcccgaccgcgccccagcaacctccccagaacctgcctcccggcaggttgcggacaagtctgtctcttg

SEQ ID NO: 233304 - DNA, 122 bp, Homo sapiens
tgtgtgtgtgtgtgtgggtgggtgtgtaaatatatacatggataggaggcctgaggtagacgttttacctggagatataatttggcagtgtttgcaattactcagggagagtctgtacagtg

SEQ ID NO: 233305 - DNA, 122 bp, Homo sapiens
tactgcctttggaatatgacagaatcaatagcccagagagcttagtcaaagacgatatcacggtctaccttaaccaaggcactttcttaagcagaaaatattgttgaggttacctttgctgc

SEQ ID NO: 233306 - DNA, 122 bp, Homo sapiens
aaaaaataaaaacaaaaatttagctgggcgtgggggtgcatgcctgtaattccagatactcgggaggctgaggcaggagattcgcttgaatccagaagacagaggttgccgtgagtcaagac

SEQ ID NO: 233307 - DNA, 122 bp, Homo sapiens
gactggtggccgtgtggtcggttctggggcgtctgtagtgaacctcgcacatcagggtttcgaagccgctgtgcctgaagtctttgatcttgacttggggactccacgaacctgcaattccc

SEQ ID NO: 233308 - DNA, 122 bp, Homo sapiens
ctacaattcaacttgtgaaagttatagtcacaccttttctgccattgaccactccgctgtcgaactgcttgggtcacgtggatctggtgatcagttctctttcagcgtatccccttcgcaca

SEQ ID NO: 233309 - DNA, 122 bp, Homo sapiens
gaactacattaatatctggcaggggctctcaaatgtgccatagcaagctacttgattacacgtatgttatttagttaaatttgtgaaaattatgagatgctcaccaacccggtgataaactt

SEQ ID NO: 233310 - DNA, 122 bp, Homo sapiens
ttgtatcccgcggctgatgcgttgcggtgtctctcttggcggctgattgccattcggtcacgtgtggtaggaggagagatttgtctaaaaaccggagaccgctcccagcccaggatccctgg

SEQ ID NO: 233311 - DNA, 122 bp, Homo sapiens
gcattttactttgcatccttgattgggagtctcaggggctacgaacaaacgttttatccccgggtagccggcgggtgcggagcgagtattcgtggggcgggataagtgcggaagtcgctgcg

SEQ ID NO: 233312 - DNA, 122 bp, Homo sapiens
tgacacctagtggctcccgctcccttctccgaagagcaccgggtcctatctgagcattcccgcgactcccagcccctgatcgcagctaagacacccattcgcgcacccggcttctcccacat

SEQ ID NO: 233313 - DNA, 122 bp, Homo sapiens
ggaggaagggggtgtggaaggcgccgggcccgcaggcgggctgtgctgtccgcctcttctcggctgagctggagagtaaaccctgtgaaacacgcatacttagcaggcctgacttgcgcttc

SEQ ID NO: 233314 - DNA, 122 bp, Homo sapiens
tcgcgctctcgcgacgaaggctcctcgagcccagccgggtacaacaagtctgtcctccgacgtcagggggtcattaataaccaattaggagggtcactgcggctcctataaaggcgctgaga

SEQ ID NO: 233315 - DNA, 122 bp, Homo sapiens
gccgggcaggcggggtccactggcctgttcccgctgttaccggcccacggcccccgccgccgctttccctcgtggtgcggtgactctggtccctctgcgagaacgctcctccccagccccgt

SEQ ID NO: 233316 - DNA, 122 bp, Homo sapiens
agcggtgctttctgggaactgtagtcttcttacgtcctgaagggatacccaggcaatccccgaaactacaatgcccaaaatgctccaagtgggacgcgcccagagtgaaggagcaaagggga

SEQ ID NO: 233317 - DNA, 122 bp, Homo sapiens
gggtgtcatctcctcaattcttttcctgctcagtggcctcttctcctttttgtaaagagtcgtaactttccaattcaccaagtataccctcagcctaggatgatggtaagaaagaggatggt

SEQ ID NO: 233318 - DNA, 122 bp, Homo sapiens
ggcgccgtggctaccctgcgagtgagaaccaatacaaaaggacatttcagggaaagtgggcgggactttatgcacaagtccaatgggaagaccgagtcttgacgctggtgggcgggcctcag

SEQ ID NO: 233319 - DNA, 122 bp, Homo sapiens
tgcaaacactcttggctacagccccatctccgagtgcgttcggctatttccggaaaccgtcggcatctaggctcaagtccgctaaattctagtgcccgtaggggtcgagatcgttggctgtt

SEQ ID NO: 233320 - DNA, 122 bp, Homo sapiens
gcggcggcggcagcgaggcggtgctatcgggcgtggggctgcacgtggactccttggaatcgtcgtcctcggaggagcagcgcgcctcgccctttttggcgcccgccgcgcccgccgcgccc

SEQ ID NO: 233321 - DNA, 122 bp, Homo sapiens
ggtttctgttgtttctctttgtcatagagatcaccttcttcccattgctcttggccatatcgcaaatggaggggctccagttctggggctgcaatctcctttgctctatatgtcccccgtgg

SEQ ID NO: 233322 - DNA, 122 bp, Homo sapiens
aggctttcaggttgtctagagaagaaagtctgtccaggaagtcctgaggaggcagacgggcggcctgggcttggtcctgactgagcagcgtgtgcacctgctcctgcaccttctggagtgat

SEQ ID NO: 233323 - DNA, 122 bp, Homo sapiens
ctttttgacccctgtggaaattagtcatattgacagacgcccagggaaggtaaattaccccgcgcgctgacgttacgcagaggcgcaccgggttccgactccaccgcggcgccgagggggcc

SEQ ID NO: 233324 - DNA, 122 bp, Homo sapiens
ggccaaaccagggaaggctccaggtggctgaagcctggtctgtgcccagcagggccctggcgggctgttcctcactccaccgggcaggtgataactggtcagagctgcctccccacaggtgc

SEQ ID NO: 233325 - DNA, 122 bp, Homo sapiens
cttgttttttttaaactgacaggcaggagctgctcaccactattgtttaacctagccttacggccgatatgctaaccttgaatatctaacagacttttaagaaattcttaggtttatgcaga

SEQ ID NO: 233326 - DNA, 122 bp, Homo sapiens
ctgttggcgaggagtttcctgtttcccccgcagcgctgagttgaagttgagtgagtcactcgcgcgcacggagcgacgacacccccgcgcgtgcacccgctcgggacaggagccggactcct

SEQ ID NO: 233327 - DNA, 122 bp, Homo sapiens
gcctgggggcaggaaatgaaacctagtagaacagaaagtgaaactgccccggtggggcctcgggaaggaaggtaagcggccctaacacacctggacctggcagaaaaataaaactggggtga

SEQ ID NO: 233328 - DNA, 122 bp, Homo sapiens
ttcactaggggaatgagagaaaacattagaaataaaatgagcatctgtctcaaataggcacgaaacatagcctgtaaaatcacagaagtgtgtctactaggttcacttgtgtaactaggagt

SEQ ID NO: 233329 - DNA, 122 bp, Homo sapiens
gtaatcccagcactttgggaggcccaggcaggcgaatggcttgagcccagaagttgaaggcggcagtgactaggatcgcactgctggcgatccagctggagatccagtctgggtgacagtga

SEQ ID NO: 233330 - DNA, 122 bp, Homo sapiens
ctgtttaacatggctgagccctctctgaggccaccctgtcctctctccccaggaggtggtcgtgacccccatgatggggagtgtcaggaggcactctataaatgagaaaacgctgcccaccg

SEQ ID NO: 233331 - DNA, 122 bp, Homo sapiens
cgcacgacctcagcaaggcagtgagtacccgctggccgggcgccgctgcggaggagaatgcgggggccccggggctctagagacacatccggctggggttgcaggaaagatccagaggcgag

SEQ ID NO: 233332 - DNA, 122 bp, Homo sapiens
ccctgtccctggataggtcagtttagctcacctgtactttccttcgcccgtccacagcgccgtccaaaccgtaccagcatctctgacgaggtgtccatgatgctcctagatctggaaaagtg

SEQ ID NO: 233333 - DNA, 122 bp, Homo sapiens
cgttgttaacccttcgtacacttcttcgtttgtcctcacctgcccggaggtctccgcgttcgccggcgcccaacgcaccagcggcagtgaccagccttccgatcccctgaactcgccctccc

SEQ ID NO: 233334 - DNA, 122 bp, Homo sapiens
ccggctccgtaaacctcacggcacggagactaggtctcccagaatccatggcgtgacaaacgcagtaatttggcaacaaaagtagaccggaattagttcctagatctggagcagggaagtta

SEQ ID NO: 233335 - DNA, 122 bp, Homo sapiens
tctttcatgctaagtctctattttacgttcatggcacaactattttacactctcagccagcggccacaccgcacaacctgggtctgggatgccaaaagccttcggtcctgggacgcctcgtt

SEQ ID NO: 233336 - DNA, 122 bp, Homo sapiens
ggaccggagggcacaaggcttgaattcagggcccaggacggggctgtgcctccttcaccacgtcctctgctgcgcccgggcgcaaggaggaaggagagccgggagggcgtacctggcagcca

SEQ ID NO: 233337 - DNA, 122 bp, Homo sapiens
gggcgttttattcacctgggtatgactaggtccccgcacctattacatatttaatttatgcgtgctgaaagaatggacttggaaatgtaggtgcgcgttacatttatctctttgtttctacg

SEQ ID NO: 233338 - DNA, 122 bp, Homo sapiens
actgagcatggaagtgtcagaccccataaagtgatgggtgcatggctctgaggggaactccggggagggaggagagaggtgaggctggcatggggtagggcagtcagggcaggctgctggga

SEQ ID NO: 233339 - DNA, 122 bp, Homo sapiens
tggtccttagggtccacgggtcgggccaggagcttgtagtcgtccccttccccaccccgtcgcctgcagtacagggtccctggttcttccgctgggctgaggccccttccaggatggacgtc

SEQ ID NO: 233340 - DNA, 122 bp, Homo sapiens
caccagcttgacagaaacaggacagcagatctcagcagggtgggctcatctctatggacccgagggctggggtgacgagtgtccggtagtctagcccaaatgagactccaatgtacaacttg

SEQ ID NO: 233341 - DNA, 122 bp, Homo sapiens
ggggcaggctgaaagttggagcaagcaggaagtgaactgagggccaccctgggaggaagccgactaggcgaattcacttactgaccggcctgggctgctctgagacatggtgagccaactgg

SEQ ID NO: 233342 - DNA, 122 bp, Homo sapiens
cttccccttggctgcacattggaatctcctgggcaactttccaaaatactgatacttggccgggcgcggtggctcacgcctgtaattccagcactttggaaggcctaggcgggcagatcacc

SEQ ID NO: 233343 - DNA, 122 bp, Homo sapiens
aggccgcccccggggctggggagagaaaagggcggccggcacagcaaacaccaaacgacccggcccccaaacgcagggagtccagcagggagcactcagcccccaaactcacggcgtccagc

SEQ ID NO: 233344 - DNA, 122 bp, Homo sapiens
ttcatccagtgaatatttgtagattaccaacaatgcacagggtgctggagatacatgatacgtgatatgttctctgtcttcatgaaacttactttaaaaaattgatagatgactagcaattt

SEQ ID NO: 233345 - DNA, 122 bp, Homo sapiens
agctgagcacgctccatccgaggggagaaaaatcacacttcccctcccattgtcatcggacgagggtttggggggcctaaatcccattgtccactgcttaattctggttaggtcatgctgag

SEQ ID NO: 233346 - DNA, 122 bp, Homo sapiens
aggtggcgcaaaggagatgctgtgctgatcccccacaggagtggcacctggtgtccacaacgtagaaatggaaggcagcttctctttccactcctgggtttggctcgttccacaccctagtt

SEQ ID NO: 233347 - DNA, 122 bp, Homo sapiens
gtgtatctcatcttcatgactaatggcagtgcagagacaaaagtagaaccagagctcagccgtggaataaatcacttaaacaatttcagccgggcttggtggcttatgcctgtaatcccagc

SEQ ID NO: 233348 - DNA, 122 bp, Homo sapiens
agggacctggtatgttctcctcagactgagggtagggcctccaaacagccttgcttgcttcgagaaccatttgcttcccgctcagacgtcttgagtgctacaggaagctggcaccactactt

SEQ ID NO: 233349 - DNA, 122 bp, Homo sapiens
cagagctggggacatctggggatgccaaatgcagctgactgatacaattgccagaccccacgactcagggcttcatcagtacatcaatatatacaatatgccgggatacaccaacatcccct

SEQ ID NO: 233350 - DNA, 122 bp, Homo sapiens
actctccagataagcaattaacaataagaccaagcaatttgtccattttgtctaaattgtcgaacacagtgggttaaagttgttcataatatcctctccttatcctgttaatgtgtgtagaa

SEQ ID NO: 233351 - DNA, 122 bp, Homo sapiens
ctgcctgcagacttctccagcactaaatatatttgttccctctataaaccattcatctttcggacagaacttactgtaaagaaagaaatctgcctagaggatatatgtaaggaagattccac

SEQ ID NO: 233352 - DNA, 122 bp, Homo sapiens
catcataggacatcaagtctctcctcttctcctgtgccttcctccctgctgtagcaaatccgagtggcttctataagcatctcttggtacaagttaatgtggcccttggccaagtgcggtgg

SEQ ID NO: 233353 - DNA, 122 bp, Homo sapiens
gacaagaggaaggagctgtcctcaagggccttttgtgtgaagacatctggcacacagatacgctgcatgcaggtggcttgagagaacatgcatccaggtataaatctggcatcgacaggttg

SEQ ID NO: 233354 - DNA, 122 bp, Homo sapiens
gctatgaggaagctggccccaggtgaaggggctggctggagaccatgccactggctaccccgtcatccactcctgggagccaggcctctttgagctgattcctgcttcatgcttccccgtgt

SEQ ID NO: 233355 - DNA, 122 bp, Homo sapiens
cacataacttggggttagagcacaagcgttcccaggaactactcaccttaccatcttggccgtttcatttgtcttccaccagttctggaaagagaaggcctagaagttcagaaaaaaaggta

SEQ ID NO: 233356 - DNA, 122 bp, Homo sapiens
aggattctaattcctaatccttcaccgctctagatgtctgcggatttcaaatcctaaccacggcgtcctgccccccgcgagattccaacagtactacgggccctatgggaggaggaggattt

SEQ ID NO: 233357 - DNA, 122 bp, Homo sapiens
cttctgggcagctacagacctctcctcggaggagtctaggagaggcctggctggaagccccggcacccgccgggccccgggcctcagatgagtgaggcgtcgtcgtggcaacgcgggctcag

SEQ ID NO: 233358 - DNA, 122 bp, Homo sapiens
gccaacaagctgcgcgataccggagcaaagtcgggatcagcagccgcctttcgcggagggcgttctgcgctccaagcaaattggcgaaatgcggggattcagacacgaaacgagcgcgctag

SEQ ID NO: 233359 - DNA, 122 bp, Homo sapiens
ccttggggggctagcggtggccccgggctgggctgtgtggggcaggggtggtcagctggacgtggaggacgtccactaggccaactctggtcccaagagacatttattcaattaatttattt

SEQ ID NO: 233360 - DNA, 122 bp, Homo sapiens
cggaggatcaacgtggctgtcacccgtgcccgacgccacgtggcggtcatctgtgactcccgtactgtcaacaaccatgcatttttgaagaccctggtggagtatttcacacagcatgggga

SEQ ID NO: 233361 - DNA, 122 bp, Homo sapiens
cgggccaatgttcaaatgcgcagctcttagtcgcgggccgactggtgtttatccgtcactcgccgaggttccttgggtcatggtgccagcctgactgagaagaggacgctcccgggagacga

SEQ ID NO: 233362 - DNA, 122 bp, Homo sapiens
ctactcccttggagcctgcttatttctgggataccagatgaaagaatatttctgagcctacgtgactaaagaccaggctgtggaaacaggtcacgaggaagcctgtgccctcaggtgggcat

SEQ ID NO: 233363 - DNA, 122 bp, Homo sapiens
tgtatacatttgcaggaaggctaacttgatgcttttgcttttacacctctgaatttatcacgttgccttcagggaaagatcaaactacgtaaagacttgttgtgaaggggaggctcacctca

SEQ ID NO: 233364 - DNA, 122 bp, Homo sapiens
agggatatccacttacttgcagcttggatgcgagccttccggctgaccaccagcccaaagcggttctgggccacacactcatagtcaccttcatccgaagggctgcctcccggctccagcct

SEQ ID NO: 233365 - DNA, 122 bp, Homo sapiens
gcgcacctggagcagctgtgcctccaggttgctgatgagctgctgcacctgggacagctgcgcgcagtaatcgccctcggcttcggccaaggagtcctccagggatttcttctgcacgtggg

SEQ ID NO: 233366 - DNA, 122 bp, Homo sapiens
ggtcagtggccggctctggcctcagccccatggcccacgttttgtgccttttcctccgggcgcgtctctgtgctccgtgaatgttacgtgaaagaaagtaaagcctggcagtgtgttgaaag

SEQ ID NO: 233367 - DNA, 122 bp, Homo sapiens
agcccttgctcagttgtggagacagaatttacacgcagtgagatgctcagtgcttctgtgcgtgactcagtgactttggcaacgcggccgccgacaaactcacattcccatcaagacacgga

SEQ ID NO: 233368 - DNA, 122 bp, Homo sapiens
ccaatctttaaaactactccccaaggcagcccttgagtatggagcaaaggagaggtgggacgaagtctatgtttcccctacaacagcaatgtgatctgaatagaaccttggccactgccatc

SEQ ID NO: 233369 - DNA, 122 bp, Homo sapiens
ggcacgggcaggatcggaggactcgcggaggaggaagccagtgccggcccgcggggtgcacgcccagccagcccccaggcccagccctgcctctggccggacccaccacacttcctttattg

SEQ ID NO: 233370 - DNA, 122 bp, Homo sapiens
atagcaaaacaaaacaaaaactgttgactctgtgtgagaagttgtcaacttaccagtgctcggattaaagtgcatttaatgagggctgttttaggttagagaggcatgacaaattttgaaag

SEQ ID NO: 233371 - DNA, 122 bp, Homo sapiens
agctgtagaaaagggacgtctggtgttgctgccgcccctcgctcatcagcaccagctccccgactgccctgtccagcccgggctccgccagcctccctctagtgctgttctgcgtcccaggc

SEQ ID NO: 233372 - DNA, 122 bp, Homo sapiens
ctaaaaatacaaaaaaattagccgggcgtggtggtgcacacacttgtattcccagctactcgggagtctgaggcaggagaatcgcttgaaccaaggaggcagaggttgtgccactgtactct

SEQ ID NO: 233373 - DNA, 122 bp, Homo sapiens
gagcgggtggtgggcatctgagaagtcgccaccatgaggaagctcctcagttttgggagacgcctgggccaggcgctcctgagctccatggaccaagagtatgcgggtcgggggtaccacat

SEQ ID NO: 233374 - DNA, 122 bp, Homo sapiens
ggactagaagaccaactaagatgggcgcctgcgcactgatgagtgttcgtcagcggggcgcgcctgcgcagacttgtgcagcagctttcgccctccagaggcctagttagggggttactttc

SEQ ID NO: 233375 - DNA, 122 bp, Homo sapiens
taaaccaaggagataacaatgggttgtctacttggaaatttttttgtgtactagaagacacgctgtatgtgcgtgtttggatttagggaccccagtttgatcaggttagcggaccgagagga

SEQ ID NO: 233376 - DNA, 122 bp, Homo sapiens
gccccctacccacagacttgctctgctgaatgaggctctgctttccttctctcctagctacggtgcctggaatagcctctcgattaagaagcctgaaggataagggaaaattgattttattc

SEQ ID NO: 233377 - DNA, 122 bp, Homo sapiens
ttaccctggccagctttgtcccttggctcgcgttggagctgcccgctcagcagaggaaggcgttagaatctggaaggagttccgctctgggaagtgggcacactgcgagtgtccataggttt

SEQ ID NO: 233378 - DNA, 122 bp, Homo sapiens
ggtcccaatcagtgatttcctgcatatcctgggcagcccaagggcctgggaaatgacaagcgtagtcctagtggatcccctcctttcacccctcctgactgaggacttcccatgaacccggc

SEQ ID NO: 233379 - DNA, 122 bp, Homo sapiens
gacatgggcagaaagaaacaaacacatacataatacaaacatagctgacatgtactttgacgtttttgaggaccctattctttttttctttttttgagacatagtctccttctgtcatccag

SEQ ID NO: 233380 - DNA, 122 bp, Homo sapiens
cccactcccaaagcctttcttcgctatcccaggaagcagccctgagttgtggtttgcgcccgggtgtgggttctgttctgcagcccaggctctgtccgtggtctatgaaggagccacctaat

SEQ ID NO: 233381 - DNA, 122 bp, Homo sapiens
tgtccaggtggtactttggctcgttggctagattaaccttctctgtccgagtgtgccacacgagaacctgaaggggaaggaaatagcttgggtagcgcactcttcatggtgacactcgaggt

SEQ ID NO: 233382 - DNA, 122 bp, Homo sapiens
taaccactcctcacctcccaggctcgcggttggacgggcggaagccctgtgagtccagatcgctttgtgtcgggggtggggaaatgggagtgggagtgggggtggagggggaatgcgggggg

SEQ ID NO: 233383 - DNA, 122 bp, Homo sapiens
aggcttgagctcaagtgcacttcctgtttctgaacccttgtgggaagtcagctaatgacacggagcctcagtttccccactggtgaaataaaagtcattcttctcctgatgaccacaggggg

SEQ ID NO: 233384 - DNA, 122 bp, Homo sapiens
ggagtgtgtcccagacctttgtcctctcgctgggcgaaagctgtgagtttccgccgtacccggctgcctgaccccttcacttcgggttctgaaacctcaaattacagggcccctctttatgc

SEQ ID NO: 233385 - DNA, 122 bp, Homo sapiens
ctgaagtcgctgcgagactttacttggattttcatgagatcgtttgtgtgtgagcacgctcgtgtttttcccagagcaggtgtaatgatgggtctttacttactctccccactccccacccc

SEQ ID NO: 233386 - DNA, 122 bp, Homo sapiens
accagttaaaggcaaatttcaataatgagagcagttatcacgtatctagtacttaccatgcgccagactatgatctaaatttatgacacatattaaatcatttaagccttacaaccatgtat

SEQ ID NO: 233387 - DNA, 122 bp, Homo sapiens
tgtcggggttgcgcgtgcacggcgtggtcttcgaagacgactcgcgcgcgcccgccgtcgcgcccatcctcgacttcctgtcggcgcagacctcgctgcccatcgtggccgtgcacggcggc

SEQ ID NO: 233388 - DNA, 122 bp, Homo sapiens
gaactttccaagtttcgcagagagcgaggccttgctctcacactcagccgaggcagaggacgcccctgagctctgcttcatcatttacaattccctcggtgaacacacgtttcctgggtccc

SEQ ID NO: 233389 - DNA, 122 bp, Homo sapiens
ctccctgctgctgcttcaccttgccttagcttgtgtaagcgtcagggaaacaggcaaatgcgtctcatttgtcttcagaaccctgtcttattagatcgccatcaactacatttggagcaatc

SEQ ID NO: 233390 - DNA, 122 bp, Homo sapiens
ccgtctggctcaggagcgtgaggcagacctgcgagagcagagggggcttcggcaggcaaccgaccaccaggagctggtggaaatccccaccaggccgctgctgaccaagctgagcctgatca

SEQ ID NO: 233391 - DNA, 122 bp, Homo sapiens
atccggagataaagccgaggccccacccagggggccggaccgcaggggagacagatgtcccgctcccaggctggaatcccgcctttgcccttgccggtagacccgaagcacgtcgcttcctt

SEQ ID NO: 233392 - DNA, 122 bp, Homo sapiens
attcaaatgcatccacatctggttttcccatagtgctgcctatattattggagccctgcccgaagagctcatgctacagaagcttctgtagacatgaaagcctctttagacattcttactgg

SEQ ID NO: 233393 - DNA, 122 bp, Homo sapiens
gcgctgtgtggccttggcagtttccatagtgataggctggccagcttttccattagactccggggtcctctggaatgtgtgcttcccgggatgaagacgccccagcacccgctgaagcctgc

SEQ ID NO: 233394 - DNA, 122 bp, Homo sapiens
atgggacactcagaaggtgtggatcaggagagaatagtgcccttttactccccagtgacacggagaagcagtggtgacctttttatatgccaaagggaactcagttgctggcacacttcctt

SEQ ID NO: 233395 - DNA, 122 bp, Homo sapiens
agctccatccactgctggtgcatcagctccatccacccctggtacatcagctctgtccaacgctggtgcatcagctccatccacccccggtacaccagctccatccaacactggtgcatcag

SEQ ID NO: 233396 - DNA, 122 bp, Homo sapiens
aagccctcctcctgcgcaccacatctggggcctccgaggagggacaaagcattcaactcccgggacctgtgggtgggaatgtccccaggcccagccctttagtgcctgctgatggctgtcac

SEQ ID NO: 233397 - DNA, 122 bp, Homo sapiens
aacagcagagacttaacattggctgtcacagacatgaacattactatttttgtgtttatacgttttttattttgggtagaacacccaaaacagagctcaggaaaagctggtagacaacctgg

SEQ ID NO: 233398 - DNA, 122 bp, Homo sapiens
ctctggcctgcgctgatttcttggtgggtgtgactgtgatgcccttcagcatggtcaggacggtggagagctgctggtattttgggaggagtttttgtactttccacacctgctgtgatgtg

SEQ ID NO: 233399 - DNA, 122 bp, Homo sapiens
gctatgcatgcagggacttgtagtctcaggctccccagccggctgggctgggcagcactccgggcggagtcgacgagcgcaggatgtgagctcacagcttgggactgctgaggggcaggcgg

SEQ ID NO: 233400 - DNA, 122 bp, Homo sapiens
tatctcataatgtggaaaagccatagcggctccatttcacagatgagaaaaactgaggcccgcaggtgagatcactcatgcccactggtctgccagctggggagtggctgggctagagttca

SEQ ID NO: 233401 - DNA, 122 bp, Homo sapiens
cctctcccagtctctcagcttccgtttctttcttaaactttctctcagtctctgaggtctcgaaatcacgaggcttcgacccctgtggaccagatgcccagctagtggcctttctccagccc

SEQ ID NO: 233402 - DNA, 122 bp, Homo sapiens
ctttggctattgtgaagattaaaggaaatcatgttcacgaaaagcttagggcagccctggcgtgtgaagggctggggaaacatgagccgtcgttattaccattgcacaagtctgcatctctg

SEQ ID NO: 233403 - DNA, 122 bp, Homo sapiens
agccccgcaccttccccgggctgtggggtgaggagtagctcatctggaagacgcctgcgtcgcgtgcgcgatgccggagtgggagcagctgtggtccgggggggtcctatccctacttgacc

SEQ ID NO: 233404 - DNA, 122 bp, Homo sapiens
agcacccctctcctcaatcgaggctgctgagcgcctgcaaggcctggctggaagccagctcgacctccagccttggaacccaacacccaccactttagtgatttttttctacaataaacata

SEQ ID NO: 233405 - DNA, 122 bp, Homo sapiens
cttttcacaggactcacggccccgccccgagtgatgtcagctgcctttccatccctttcccggcgatgcgaagcttgaataagctagcaacccggcagagtggcccttcattgctgtaaatg

SEQ ID NO: 233406 - DNA, 122 bp, Homo sapiens
ccagtcctggcccagtacctgccactcggaggtcacaggccagggcaagctctaggcctccgcccaaggcaaacccatccatagccgcaatggtgggtgcagggaaggctgctgtggagagg

SEQ ID NO: 233407 - DNA, 122 bp, Homo sapiens
caagtgagcctttgctgatgtggtccatctcccctgtgtgagtgcacttagcccctgggacggccacaaagcatagtggaaggtgctggggcttcctggggaggggtcctccgggggcagct

SEQ ID NO: 233408 - DNA, 122 bp, Homo sapiens
tgcgaggcgaggccgggaggcgagggctctgcgcacgcgcggcgcaggcgcactgggcgccggtgctgttgccttcaggtgaccacggattcgccatcgtgagttccaggtgggcgcgcggg

SEQ ID NO: 233409 - DNA, 122 bp, Homo sapiens
atgtgcttgcgtgcccgtagttaatgctgtccacggagtgaatgctgtccacgtagttaacgctgtccatgtagttagttaacgctgttcacgtagctcttttctgccttttcacttagagc

SEQ ID NO: 233410 - DNA, 122 bp, Homo sapiens
ccccacctgagcagggtgaggccgggcagggcccagcaggccccggccccaccaaacctccggggccaaatctgctgctgattggccaactcatggaaccgaaacggaaaatcccccacccg

SEQ ID NO: 233411 - DNA, 122 bp, Homo sapiens
tttgttttcctaatacctgtgattttagatcaatcccagtggccagaaatgttacagactcgcccacatctttacccaaacacaccaccgagcaaccctacatgcaggccaggagaacctac

SEQ ID NO: 233412 - DNA, 122 bp, Homo sapiens
cgtttttccctgttgtcacagctacagcattggattaaaagtcacaccctgaagcattaacgcttgagcatctgtaccaagttttatatccttggtataagcccgaaggaggtgaggagcca

SEQ ID NO: 233413 - DNA, 122 bp, Homo sapiens
atttatatggatattggaatctatctgaggtcagtgggtccagtttgtgtcaataacccacgctgacctctgtggcaaagactcaggcaggatgacttcctggtacactcgatgaggataaa

SEQ ID NO: 233414 - DNA, 122 bp, Homo sapiens
ggggtatcattgttcccatggtgcacttgggaatgcgaaggggagccactcatccaagggcgcaaagaacagattagaactcagctcgcaggtatcccaggccagtggcccttccacacgac

SEQ ID NO: 233415 - DNA, 122 bp, Homo sapiens
caaaagcagaggtctttcctttttcatctcacctgtatgtcagggcagaagcagtgtagacgggaggatgagccctgaggcaggcatcctggcttctagtgcacactcaggctttcccataa

SEQ ID NO: 233416 - DNA, 122 bp, Homo sapiens
cccttcccatcccccactgcacttcactcatgtaagacgtctgcccggtgctggtccaggcgggcatgtgagtttgtagcctctgctccaaaggatggtttacacattattttttcattacc

SEQ ID NO: 233417 - DNA, 122 bp, Homo sapiens
agcccccggtctgccgtcccctcagccgcccccgagccaagcgggccctgagctctgtcccggccgcacgctctttatgaagccccagggcccgtcttccctattgtttgcctgtgtttaca

SEQ ID NO: 233418 - DNA, 122 bp, Homo sapiens
ctactggacctccagtgctacagggacggtgcaggagatatcaagtggctctagcccaggcgctgcccacaggccccgggccaagtacctgcgactcgaacgagcagcagcgacagcggcag

SEQ ID NO: 233419 - DNA, 122 bp, Homo sapiens
ggcgcccatggctcagcagcttcctcctggggttccccggccctggaaaggccgggcaaacgccccgcccccagacccggccgggccaatcggggtggggggcggggccagggcgcggtctg

SEQ ID NO: 233420 - DNA, 122 bp, Homo sapiens
aaaagagatggccatggcaacagggggaaacatgcagagcagtgacactaatgacaattacgagggaagtccagctaacatttgattttcactgatttatttataggcatggtcttgctctg

SEQ ID NO: 233421 - DNA, 122 bp, Homo sapiens
ccgcgcgccgtctggctctgcccagggaagcacagggcggaaggagccctttcgccggcgcgcagacgcgcgaccagcccagccaatcagcgcgctccctctgccggcccgaccggcgctct

SEQ ID NO: 233422 - DNA, 122 bp, Homo sapiens
ctgccttcccccaaaggccatcacgcctcccctttccgggaagggttggggatctgaccacgtctccctaccccacagactggggccgacagctcctgtggcccagatgtgctgagcccgca

SEQ ID NO: 233423 - DNA, 122 bp, Homo sapiens
cctcagagctccctgctggctgcagggcaaagtctaagcccttaaccaggcacaagagaccgtccctcaccggcctgtgcttccactattatttcctgccactccttgccccttgccttgaa

SEQ ID NO: 233424 - DNA, 122 bp, Homo sapiens
tggccacctccgttctttaatcctgcaggaactcaggacccacgtgcaaatacaaagaaccgtatccacccacccccggcccttcttcatcctgcgcttccaaccttgggggggtcctctct

SEQ ID NO: 233425 - DNA, 122 bp, Homo sapiens
ggaacgggagggggcgtgccgagcagcccagagtgtgccgggagcgcgggggaggggaggcgccgggcacgtcaatgtcacggcttaatatttatccctatatcattgtgttgcgccgctac

SEQ ID NO: 233426 - DNA, 122 bp, Homo sapiens
cttgaaatgtttttcccttcctgcttttcaaatctgtaaaaatgttccggggaatgtttccgaagtccagggctccgtccttcggcgggattgctggcattcgggcaaggcgagtcgcggtg

SEQ ID NO: 233427 - DNA, 122 bp, Homo sapiens
tccttattttaaaaaaaaaaaaaaacaatgacttcctttattgccatgaaaataaataaacgagaaggcctgtgcaaggtgcctaagatatagatccctaatgcctccttagccagtcaatt

SEQ ID NO: 233428 - DNA, 122 bp, Homo sapiens
tttcttgctgaaagacaaggctgaatccctctgtcttacctgggctgggacagggctttccggcctcatgggggcagtttaccatttctggtaaccttgtgatgtttgccacttttcatgac

SEQ ID NO: 233429 - DNA, 122 bp, Homo sapiens
aaaattaaagcaattaattcaagaaagagatgttaagaaaaaaacagaacctaaaccacccgtgccagtcagaagccttctgacaagagctggagcagcacgcatgaatttggataggactg

SEQ ID NO: 233430 - DNA, 122 bp, Homo sapiens
ggggagttccgccgcgtcggaactcgctccgggcgtggattggcggcttgctggcgggggcggaaccggaagttccgtgttgtggggctcagctggttcatttatgttgtttttcctgtacc

SEQ ID NO: 233431 - DNA, 122 bp, Homo sapiens
tggccgtcagtcgtatgtgaatggtggataaggagaatttgggagacaacaacatgtcttcggagcaggtggcgagatttcacagaagaggcaatttccatggactgtcacatactgtcttt

SEQ ID NO: 233432 - DNA, 122 bp, Homo sapiens
ggaagagaaatgcaaaagcagctgcagaatcctgccccttccaccccaaggggcacagcccggagatgaagcttattttaggatcacaagtgcacgctctggtagacggaggatgactttgt

SEQ ID NO: 233433 - DNA, 122 bp, Homo sapiens
tgcggtcctggacttggccccagacagccgggtaacaaatgactgccccctcgagcccaccgccacctccaggactatgctcctactcgtgtcccttgagccacccgggccccagtgaccgt

SEQ ID NO: 233434 - DNA, 122 bp, Homo sapiens
taggggactcaggaaggttctactcatgttgaagggtgaaggggaagcaggcatgtcacacggtgagaaagtgagctagagagatgccaggctcttttaaacaaccagcccagctctcacgt

SEQ ID NO: 233435 - DNA, 122 bp, Homo sapiens
agatggtgattgcaaagtgctgagccatcgggacacatatttccaagacctcctgagtgccggctggcccctggagcagagatgagacccctgtggggcctacagtccagttatgaaggcag

SEQ ID NO: 233436 - DNA, 122 bp, Homo sapiens
ctccagcaggaaggggcgactcaggtggcggtgcgactgccgctggtttcggttctggtgcgccatgacgggccgctgccgctttctgccgccgcgcttggcgccccgggcctccgcaccgc

SEQ ID NO: 233437 - DNA, 122 bp, Homo sapiens
tttgtgatcatggtaatgtttttgtttgtgcagtccaatatggcaggcactaaccacatgcgggtactaggcacttaaattgtggttagtgcaggcaaggaactgaatttttcgttttattg

SEQ ID NO: 233438 - DNA, 122 bp, Homo sapiens
agcttcccgcctctggctgggctcggggacctcggaggcctgtttctgagcccctccccgcggactcgctccccggacgcccccagcgggctcctctggcctcggccctgcacgccgccggg

SEQ ID NO: 233439 - DNA, 122 bp, Homo sapiens
cgggggcgccaggcaagccagatggccttgtgggcagtcacttcccgtggtcgggtggggcggggaaggccctgaggcgctgccggctgtgtaccgcctggcccagctccctacccgctgcc

SEQ ID NO: 233440 - DNA, 122 bp, Homo sapiens
tcctccccttcctcctcctggccgcttagtctcacacccgccgggccgttgttcccgagacgttgttgagtcccctgtgtcctcttctgggtgaggcgtccggccacttaagggaagggaag

SEQ ID NO: 233441 - DNA, 122 bp, Homo sapiens
gccattcttgttttcaggctccatttacccgtttctcagagaggccctggtgtgagtggccgggccacatatgactcgcccgtagcacctgtgggtctggcacgaccacacgccaggctgac

SEQ ID NO: 233442 - DNA, 122 bp, Homo sapiens
gaaagaggtggaccaggagagccagcgacacggggacattatccagaaggatttcctagacgtctattacaatctgaccctgaagaccatgatgggcatagaatgggtccatcgcttttgtc

SEQ ID NO: 233443 - DNA, 122 bp, Homo sapiens
gtcaggatatacaaagagatctcacccacttcccctccctgaaatcagccaggatttctgcggggacaggctgcagagagccaccgagtttctctgctcaactctcagcagcatcatgctcc

SEQ ID NO: 233444 - DNA, 122 bp, Homo sapiens
cccgttttggccagtagtgccatcagcatcttctctgcagtcatctgactctgaaaacctcggtgctgggctcacgctgtgactccactgggacgtcctgagtcattggcagtctcgcttgg

SEQ ID NO: 233445 - DNA, 122 bp, Homo sapiens
gttctgacgccacaacgaggtaagactcagtgttggccgatcacgtgtggctgttgtcatcgccagaggctccgcccccgtcccacgccccctcctgcagcccggagtcaggtggtgctttc

SEQ ID NO: 233446 - DNA, 122 bp, Homo sapiens
agagtcaaactactcctccaaattgacaaaaaccatgtgttttatatccagtcttcaatacgcaacgtgtagtaagagctcatttctctgagcatacattcttggagaaatacaaactttct

SEQ ID NO: 233447 - DNA, 122 bp, Homo sapiens
gtttagctgccggatctgcggaatccccatatactttccctccagtgacagtttacctttcggaaagctgccggatctgtggaatccccatatactttccctccggtgacagtttacctttt

SEQ ID NO: 233448 - DNA, 122 bp, Homo sapiens
tacttatttgagacggagtctcgctctgtcacccaggctggagtgcagtggtacagtctccgctctctgcgacctccgcctcctgagttcgagcgatccgcctgcctcagcctccagagtag

SEQ ID NO: 233449 - DNA, 122 bp, Homo sapiens
gcggcggcttccgccgagtgggcgcggcgttcggggtcctccgggagcaggtgcgaaggacgtgtctggagtctgtcgtctggacctctggcctctgggtgcgcagcaacccctcgcggcag

SEQ ID NO: 233450 - DNA, 122 bp, Homo sapiens
gctgcagaactattcctgttctcctactcctgcagggttaccagcttcctttttctgcagcgtcaatatctgcatcacctctctatcgactctcagtgttttagttacattttccttttaga

SEQ ID NO: 233451 - DNA, 122 bp, Homo sapiens
gaggccttgggttcgtccggagcgcctggaaggtttgcagtcccccctccccgccacccccgaggccttgggttcgtccggagcttctagaaggtttgcagtcccccctccccccaagcccc

SEQ ID NO: 233452 - DNA, 122 bp, Homo sapiens
ccaaagcatcctgtgaaccccgaaatggtgcgccaagatggccacacagtctgtgagcctcgccacgggagcgggatttccttcctcactgtgaattctcttctttcctactacgcagcttg

SEQ ID NO: 233453 - DNA, 122 bp, Homo sapiens
acgagtgacaaccatgttttcccagatagaagaccggagccctgctcctttgcgatccgccgagggctgcagagagcatcctcatccatttgggcacccctgcccaggaagagcccggccat

SEQ ID NO: 233454 - DNA, 122 bp, Homo sapiens
aagggcccgcagcggccgggccgtttacctcagacccgcgccgcagcctcccggagcccgcgcccaggactccctcacgacctctccagggtcccggcccgacaccaaggggcaggtgaggg

SEQ ID NO: 233455 - DNA, 122 bp, Homo sapiens
gccaccagtgctgacgataacgaaatctccttattgtcctgttgcttttggattccaacgcgcctttctgagggccacccagctccttcctgccactgcggtgcatcccgcgcagatgccac

SEQ ID NO: 233456 - DNA, 122 bp, Homo sapiens
ccagggtacagattggagtgcactgacaaactgcacaacacaccagggtacagatcggagcgcacggagaaaccgcacaacgcacaacacaccagggtacagattggagtgcaatgacaaac

SEQ ID NO: 233457 - DNA, 122 bp, Homo sapiens
agaactctgctgtgaagcaaaacactcaaacctttaagggactgtccttggggaggcaggcggggctgacagctcaggagtgtctgcacactgtctcggaagccaggattccatttgtgttg

SEQ ID NO: 233458 - DNA, 122 bp, Homo sapiens
ttcatggcagcacccagctcccaggcctcagcactgccttcccaaccccttctcctaccccgggtggagggccagctgccctcacatttgcagggcccatggtaatatgtcacaatacttaa

SEQ ID NO: 233459 - DNA, 122 bp, Homo sapiens
tgggccggcaccagggtggacctgggtgtgcagtggaagccaggggtcagcagacccggccgcccccatggtggaggtgccacgagagggttgtgcacagaggctgccggctgccctcatcc

SEQ ID NO: 233460 - DNA, 122 bp, Homo sapiens
tcttgcccacccggaaacagcctcgccccgcctacgcgggacccaaccgcggcgaccggacgtgcactcctccagtagcggctgcacgtcgtgccaatggcccgctatgaggaggtgagcgt

SEQ ID NO: 233461 - DNA, 122 bp, Homo sapiens
gtccaggtccagggaacactcacacgcaggcatcaattttcttctgaaaccccacccacacgcctggaaatcttctctgaaggaggggaaaagcccaataacccagacccgacaacgtggca

SEQ ID NO: 233462 - DNA, 122 bp, Homo sapiens
tccctgcctaagtcttcatccagtgtacttactaagtggcagaggcagagtggggacccacgagcatggagctccaagtctaggtttcttcggaaggcaggcagctccctcttcccatctca

SEQ ID NO: 233463 - DNA, 122 bp, Homo sapiens
agcaatactgacatttcttttgataaaacctccagccttctctgtgttgttccgacataccgaggaccaactggtctacatggatgccctgaacatgcaattctttcttccaaaataaaaca

SEQ ID NO: 233464 - DNA, 122 bp, Homo sapiens
aatgccggacggagcggctgttgcagacggtgaggccgcagccccgcttgagggtagggtcgggcggggtgtcggggtcctggcagaggccgcggcgagggcaggagccggtgcgctggccg

SEQ ID NO: 233465 - DNA, 122 bp, Homo sapiens
ccgggcggggctggcagtcggaaaagcaagttctgcggcggaccacgggtttaggctcaccgcgcagtcccaatacaactctatttcctgcgactctggaaactgagttttctttctgttct

SEQ ID NO: 233466 - DNA, 122 bp, Homo sapiens
ctgcagagctgtcctttggactgtatttcttcatgctttccagagttagagccttgatcacggaacatcattgtgtgcagaagaatactgtacctagtactaagttcttttcatctttgatt

SEQ ID NO: 233467 - DNA, 122 bp, Homo sapiens
ccaccttaacttgctgccggtttcaagtgaaaataaatggtacataagtaatcaagaagtcgcagtcccagacctctgaccaaagaaccgaaaaaggacagcgaacgaccggttcccaattc

SEQ ID NO: 233468 - DNA, 122 bp, Homo sapiens
catttgctcaatacatttgcacttcataggcttctttagctgtcttccttttaccccggacgggatgtagatgttaattctggaacaattgcagctacaagaatttgtcatcctgccccttt

SEQ ID NO: 233469 - DNA, 122 bp, Homo sapiens
cttctcatttccttcctttctctccagagtccaccatgttcacctctcagccgatcatgtcggtattaactgcatttctctggaatacacattctgtggctccttctggacttgagcgctcg

SEQ ID NO: 233470 - DNA, 122 bp, Homo sapiens
catcctctgtgccccgcctgaaccgccatggactttcgtcaccggagctctcacactccgcgttccagccggacggtcatctgaaaaacaaagcgtttccatttatggctagggaacagctg

SEQ ID NO: 233471 - DNA, 122 bp, Homo sapiens
gttctcactctgggggcctgacattcctcgcgtgtctaaggcaatgagggagcagtgaagcgcggggaagccgcacaaaagacatccaaaggctatcaatggaaaaagatcaattaggtgca

SEQ ID NO: 233472 - DNA, 122 bp, Homo sapiens
cgttttcactcaacacagtgccttttaattggtgactaacatcaaaacaccttgacaaaccgttaaaacagtatcagaaaccatgtgtacatccctgtgcctcttagattgctaagttctgc

SEQ ID NO: 233473 - DNA, 122 bp, Homo sapiens
gccgccggaactccggggtcgccagccccaccccctgtcctttctcactccctgcctacccgggtccccaacccccgcccggtgtctgagcatccaaccgagacagacagacacagacgggg

SEQ ID NO: 233474 - DNA, 122 bp, Homo sapiens
ctcatgctcgtagcagcactattcccaatggccaaaaggtggaagcaaccgagtgtccatcggaggatgattagataaacgacccatggtgcacatagcatggaatattattcagccttaaa

SEQ ID NO: 233475 - DNA, 122 bp, Homo sapiens
cagggacttgggagaggaccttatgagtcaaacctctatgaaccccaacctttttgtactcggggaggctgaacccctgcccaaaatagcgcggtgaaagctactgccttctcccaagtagg

SEQ ID NO: 233476 - DNA, 122 bp, Homo sapiens
ctgcccacctaagccttcttacttccactttctctgaggttgtaaagtcaggctttgtgtcgttgctgctgcgcagcggggcgggatttccctgacccccaccccgccccacccaggcccct

SEQ ID NO: 233477 - DNA, 122 bp, Homo sapiens
tcccaggagtctgcgggctgccccgtcccctccgcaaagtctactcgaaccctgcagtcacgccttggctgtggggaatgcggctctccgcaccactctcgcaagtcaccaggtggggcaag

SEQ ID NO: 233478 - DNA, 122 bp, Homo sapiens
cgccggtccgtttcccttttcgtttgtggtctgcccggagccttgtgcaaggcggggggccggcccgcgtgcgcccccacctccgggccccggcgcgcgctcggtcggaggtcgagcgggga

SEQ ID NO: 233479 - DNA, 122 bp, Homo sapiens
gctcagccctgagcgaggtgtggaaggagccccgcgccacccccgccgtgtgagctcccgcgtaggcccagggttggatgagatgacaccaaggcactgtggcgagcagaaccgtttcccca

SEQ ID NO: 233480 - DNA, 122 bp, Homo sapiens
gaggttgccttttgttgaaggaggtgttttacaaagggaaatagggtgtctcctgggcatcgcattagcacttaaatacatgtatcactgaaatgaaatgaactgatgaaatgatgaaatga

SEQ ID NO: 233481 - DNA, 122 bp, Homo sapiens
tcacactgtggtcagctagggagatcacttttcggaaatgacaaatgaatttccatcttccgaaaggaaaggccttttttccagccatcagacatgctttctggtcggtgccatccaccacc

SEQ ID NO: 233482 - DNA, 122 bp, Homo sapiens
tcctccggggtgggcgaggaggctgtgcggccttccccagcggctgtagcaggagacctgcggctgcatctcccagggccttccggcggggccgagggtaggaccgaggcacttcttccttg

SEQ ID NO: 233483 - DNA, 122 bp, Homo sapiens
tccacagtgtagataaggccctagaagcaagtgtagacttcgtccacagctgtactccatcggccactgacagtcttattgcattatttcaacggcacaagcaatcatttacacttgttatt

SEQ ID NO: 233484 - DNA, 122 bp, Homo sapiens
cggagcccgcgccaggctcggctctcagtccagcaggcgtgtgcggtggcgcccagcgtccgggccacctcccgggcctcctgctgggatctcatggcctcctggggtccccggtgcgggcg

SEQ ID NO: 233485 - DNA, 122 bp, Homo sapiens
cgggtacagttgcacacagtggatcacacagatccgaagtctgaggcacagggcgcggtccgcgagtgggagcggctgcttgtgggcagggtggacgcggggccacgtcttggccggcgttt

SEQ ID NO: 233486 - DNA, 122 bp, Homo sapiens
cccaggccccgcactcaccgaggctctgcagcgtggccactagccccccggcgggcacgccgcccccattcaggatcgcagaccagctcatcagcgaggcagccaccgagttggccgcgatg

SEQ ID NO: 233487 - DNA, 122 bp, Homo sapiens
tcacacggcactgacacagacactgagctgcaagtcccagctcactacgtggcagtgagtcgcagctccccgtctccgagcctcagtttccatgcaggagacgtacggtattttgcggaaag

SEQ ID NO: 233488 - DNA, 122 bp, Homo sapiens
cacttttctctatcactggacattattagtatcctttctaactttcctcagctttccatgcggctgaatgccaggctacatatgctcaccaggcaaccaaagtccaggataaagaccaagct

SEQ ID NO: 233489 - DNA, 122 bp, Homo sapiens
ggttccgccctcgggattcccttccagtctcctagtctgagcacccttcctgctggatgccggcaactcttgtttccttgggtcagcgaccctccttccgaacaagtcctgcagactgactt

SEQ ID NO: 233490 - DNA, 122 bp, Homo sapiens
tttcctattcctgggcagctcagctcccagctttctgcatggcttagtgcttctgctctccgtcagcttggatagcactttttcctgacaaccttatctaaatgaagtgcctctatcaaccc

SEQ ID NO: 233491 - DNA, 122 bp, Homo sapiens
ctttttcatgcagctgcattaatactacattgtcaaagacaaagacgaacatgagacatgcgatatgagttttaaaaggagagaagagcaaaaaaacaatacagctatccaaggagcaagtg

SEQ ID NO: 233492 - DNA, 122 bp, Homo sapiens
ggctccggggcctggctctgaaaaggatggcccgcttctgcccagacgctgccctggtcacgctcacagcagcccgggtgactcagggtgacacgctcccccgccctccaccgcaagcaggg

SEQ ID NO: 233493 - DNA, 122 bp, Homo sapiens
gccatccccctttgttttatgtcctgctttcgaagttgacctttcagtgttttattggctcgttccaccgaggcctgtcctcgagagttacaggggatgctggttgtgtgagcaattgccca

SEQ ID NO: 233494 - DNA, 122 bp, Homo sapiens
ttcagggcctagagtccgtcgtcgcctgacaggtgtagccagaggcgccctggccgtggccggcctctatctcgggcccgcccagaattcccagacggtgcccggttgccaggctctgggct

SEQ ID NO: 233495 - DNA, 122 bp, Homo sapiens
ctgaaaagtctgaggccagaactgggattccgagcattcctcccatctgcatttccagcacgttggctgtcaactcaaacctgtggtacgatgactgattttagtatcagaaccatgcaggg

SEQ ID NO: 233496 - DNA, 122 bp, Homo sapiens
ggtggagaggaccctgttgtgactctccgactgacttgtcttccttgatgtcctttaagccggagctgattcgggctgctgccttatttctgagttagcgctcttaagattgggcctcccag

SEQ ID NO: 233497 - DNA, 122 bp, Homo sapiens
atgcactgaaagagcttacggtggtctcactctgctgcccaaatccagcggggtcccagccgcagtttggagctacttgatcatagctttctgttctaccttaactattgatggggatgatt

SEQ ID NO: 233498 - DNA, 122 bp, Homo sapiens
tctggtgggggatgaggaccctagatggggacacccctgcgcattcttacgtgatgtcaacgacccctgcgacacaaaccctattgtctccactcaccccgggttgaccggtgggcccttaa

SEQ ID NO: 233499 - DNA, 122 bp, Homo sapiens
ctaaggggctccgtcagcgtctggagcagcaaggccaacccccgtcctgcctgggacgcacgctgccgcggggcccacactttgcagagcagctcctcggatgactcccccgtggctcctgg

SEQ ID NO: 233500 - DNA, 122 bp, Homo sapiens
ctaacctgtgcaaacttcacacaatttgtgctccacctttataatttttcaggtaacttacgacctatttctccgtggcgttggctgttttctgttgttgttcctgttctgatcgtctctaa

SEQ ID NO: 233501 - DNA, 122 bp, Homo sapiens
aggggccttccaatttcttttcctctgtttatgggagacccttattacattacgttctctcgccgccctctgtcccggtttccctttctcatgcatagaaataaaggtccaaaaggaataga

SEQ ID NO: 233502 - DNA, 122 bp, Homo sapiens
catgcagcatctaatctaatgtatacccactgatgtcacctaagcggtgaaccttggattcgcagtgtgccaggtacattcagatgcaggctgccaggagtattaccaatagaggtccttga

SEQ ID NO: 233503 - DNA, 122 bp, Homo sapiens
caaccattaataaatatatagaatgccttaattaaatttggctattttctcgtcatttctcgtcataatttttgcctttctctcagaaggtagtagactctgattagtcttccaacagcctc

SEQ ID NO: 233504 - DNA, 122 bp, Homo sapiens
caggccggcccctacggccgctcagaaaacgcggcgagcggaacccgcacgcggaagcgccggccgcactgagcatgcccagttgcagagccgaccagaggagttttttcttttcttttctt

SEQ ID NO: 233505 - DNA, 122 bp, Homo sapiens
ggggcccatggatggcactgtccgatcgggtcacatgaggctgcagcgcgcgggatgcagcgccccctgcaggcgcagggccgggtgtgcagggcgcgcgcgcaccagagcgcagcgcagca

SEQ ID NO: 233506 - DNA, 122 bp, Homo sapiens
agctgctcttcccagagtaagactcagccgtctgtcactgggtgtggttttgtccctgaccgacagctgacactggggcccccaggggccttggtagggcgggtggcatcccaggcctgaag

SEQ ID NO: 233507 - DNA, 122 bp, Homo sapiens
gctgggggcggtgacgccgtctcccttccttctttcctccctctcgctgcgcagccaacacggggattgtcaatcacacccactcccggatgggctccataatgagcacggggattgtccaa

SEQ ID NO: 233508 - DNA, 122 bp, Homo sapiens
cctgtgctcctaaccaaaccaccatctgcctctcctgagcccattgtccttaacttcttgcggtcatgtgtgctggagagaatgtgatcaaagccctggaccttctccctaggaaaacgcag

SEQ ID NO: 233509 - DNA, 122 bp, Homo sapiens
accaggaacggggcgaggaggaaactgtccccgaggacgcctctgagagccccgggaaagcgcctcggaacgcggccagctgtaacctggacagggctctcccggcgcaggagggcagggga

SEQ ID NO: 233510 - DNA, 122 bp, Homo sapiens
cctctcatagtctgttctatttctttatgttctgtcacatcaatatgctatttatcttgtcggagatcttgaaagtagaaagtagagccctcaagtgctggtctctacttgtctctggttaa

SEQ ID NO: 233511 - DNA, 122 bp, Homo sapiens
ccgaggacagtcagtgggcccggcaccaaagcaaggtggtgttggagacctcgatgttgacgacagggtcccagggagaagcgaggcaccggacacccgggcgagtagaaggcctcgtacgc

SEQ ID NO: 233512 - DNA, 122 bp, Homo sapiens
agaagccttcccaaactgttcccttaccacatccttttataaactgtcttagcctgcacacggctgtacgtggttgatttgtatcaagtcttccccgctagacggtaagttcctgatagcag

SEQ ID NO: 233513 - DNA, 122 bp, Homo sapiens
ctgcctggattctcttcgctccctccggccatgacaacccttatcccgatttctacttcgcggcaccaaagaggaaagcagcattcaccagaacgctccaggctgaatccgttagctggact

SEQ ID NO: 233514 - DNA, 122 bp, Homo sapiens
ttttagtaaaaaaggggccttggcttggtccactgacaaggcctagaggcggcgagtgcacgccccacactaagcccgggtcccacgcaaggaaccaaggccccttggacaaatggctgact

SEQ ID NO: 233515 - DNA, 122 bp, Homo sapiens
gacttctaacgcctttgcccttgtcccgcccctttcttctcctcactgtctccagcacaacggccactgttagactggaaagcaaatctagctttgtgattggctcatggtcctgtcaatct

SEQ ID NO: 233516 - DNA, 122 bp, Homo sapiens
aaaaggggagtctgggggaggggcaaggccctgtctgcagtgtctccctgctgaatgccacgcacccaggatggctgccagcaccatgggggctcacatgcaggtgctttaggcaagaatgc

SEQ ID NO: 233517 - DNA, 122 bp, Homo sapiens
ttcgcctcctgacagcgctggttgtgttgcttggggcgcccaggcgcggccgctgcgctgcggaaacccatgccactcctgggtcatagttgggtgcagtacatttatttttattttgttat

SEQ ID NO: 233518 - DNA, 122 bp, Homo sapiens
cagggtcttggcgccgattggccaacgagagcgcagggcggagccaaatcttaaaggatccgggagctaagccagacccgggtggcggtggcagctgcgaaacccagggagccgatgccacg

SEQ ID NO: 233519 - DNA, 122 bp, Homo sapiens
ggagtggagcaggtatgagatccggagtgaccacagcctttggattgggcatgtgagtgccgaagatgagggaacgtacacctgtgtggcggagaacagtgtgggccgcgctgaagcatctg

SEQ ID NO: 233520 - DNA, 122 bp, Homo sapiens
ctagtggccgcccgggccgcccaaactccagagtccgtctccgccggagaccggcagcgacgctgaccggccacttccgacgcaagaaccggaagccatggcctgacttccggcaccgcccc

SEQ ID NO: 233521 - DNA, 122 bp, Homo sapiens
tttttcatttgtccttgaccacgtggtccaaacctcaatttccctagcagaacgcggtttcgatcactggtggatccgtctcacagcaccagtcatgctgcctcgctgggaagtggagggct

SEQ ID NO: 233522 - DNA, 122 bp, Homo sapiens
gagtactgcagaggtcacagggaagtcacagaacagtaatacgctagcaggggcatggggcgtgaagaacagaagacaggaagcgtttcagagactccaaagaagaaatcagggccaaccac

SEQ ID NO: 233523 - DNA, 122 bp, Homo sapiens
acaaggccagcgcgtggtgcggctctcggagtatgtgtctgcacgaggctggcagggcatcgatccagctggtggggaggaggtcgaggcccggaacctgcaaggcctggtctgggacccac

SEQ ID NO: 233524 - DNA, 122 bp, Homo sapiens
caggggtgaagccaaacctagaacctgtagactcaggaccctggtttaacagttggtgaacgggccgagggcaggctcggctcagggcagcggggtgatgcgggccagaccgcggaacacag

SEQ ID NO: 233525 - DNA, 122 bp, Homo sapiens
attaattgatcagtggtaggcttatgtaatttattagtacaaataattggtatgctgcttcgttctgggaatccagaagatccaagtcttaatcctgttttaaatttgttctgcctccatcc

SEQ ID NO: 233526 - DNA, 122 bp, Homo sapiens
gtaagatactgatgcagtgcagcaaatatgcaaagcatcttctttcacacagtccgtgcacgacatctaatttttgtttaagttctgagataaaaatgatttaaaaaaatccaggatgaaca

SEQ ID NO: 233527 - DNA, 122 bp, Homo sapiens
caagcaatcctccggcattggcctctcaaagtgctgggatgacaggtgtgacccaccgctcggagttctggctttatttccatgaaataagaaattttcttccaccttctgtgtataatagg

SEQ ID NO: 233528 - DNA, 122 bp, Homo sapiens
ggattaggaggaagcctcctggggcttaaagcaggacttacctccgatgagaacacaaagcgttcctcctctggccagccatgggaatgcagcctgctgtgggccgtctttttattgcaatt

SEQ ID NO: 233529 - DNA, 122 bp, Homo sapiens
ccgtgtatgcaaaccgggctcccgccccctcctcctgggcttataaacgccgccgcctggcgaggcccgaggtggatcctgcgcctggccagccccgcctggccttccctccggcccacctg

SEQ ID NO: 233530 - DNA, 122 bp, Homo sapiens
ctccctaattcacgcctgaggctcatggagagttgctagacctgggactgccctgggaggcgcacacaaccaggccgggtggcagccaggacctctcccatgtccctgcttttcttgggtga

SEQ ID NO: 233531 - DNA, 122 bp, Homo sapiens
gcttgctggccacaggcgggaagagccttgcctcggaggctctctgccctgtccctgttgcgtcctccccttttcatcccatggccatcccccttggaacaggcacagctcccctggattga

SEQ ID NO: 233532 - DNA, 122 bp, Homo sapiens
tcacaggcgtaagctaccatgcccagccaatctccatttttaaatgacacaaataatattcgttcattacagaaaactgaaaatgcacaggagcaaaaatgagaaaagaaaatcaccctgta

SEQ ID NO: 233533 - DNA, 122 bp, Homo sapiens
tctccgctattggcgaaagtgctgatgcgaaactgctggctcgacataggcacagagccgcggaagagaaccctagagaccaggcaccagctctgctccccgactcacgggagaaagctagt

SEQ ID NO: 233534 - DNA, 122 bp, Homo sapiens
ggggaaggacacaagtgcagacactgaccgggcttcaaaccccggtactgtgtgaagatgcgccagacgcccgggttccctccttaagcaattgatttacagtgacatctagtggagaaagg

SEQ ID NO: 233535 - DNA, 122 bp, Homo sapiens
ctcgggagtctgcagtgtcttgtatccctgggtatgtgactgtgccttgggtttatatgacgagtaagtgataatcacgagccagtgagaggacaggcaacttccttctacctaacgctctt

SEQ ID NO: 233536 - DNA, 122 bp, Homo sapiens
ggatgggaggcggatgcgtctgcctgctctgtccaggcctggggcctgttcccaccaggacgtgccggaaagaggctcttgctctgtgggaaaatcattctgctcctctttcctgtacagcc

SEQ ID NO: 233537 - DNA, 122 bp, Homo sapiens
tcttttattgtcacagactaatgagaaaaagaaaagaaggagtgggatttaatatatgcacgatgcattgaagaccagggaaagccagatgaccgccaggcactcaatagagtcagaaaggt

SEQ ID NO: 233538 - DNA, 122 bp, Homo sapiens
tatataagcaaactgaatttccataatcctgtcttgaaattctttctttctgttagtatacgaggagccttgaaaatggaaatggctcaagactctctcagctgctgagcttatttcaggcg

SEQ ID NO: 233539 - DNA, 122 bp, Homo sapiens
ctgggcgtgctgcagctacagctgggcctggatgggcaccgcacgctgccctcctctgtgcgcatctacctgcacggccggcagctgtccgtcagcaggcacgaagcgtttcctctccgtgt

SEQ ID NO: 233540 - DNA, 122 bp, Homo sapiens
ccgcgcgtgcgcttacggaaacaccacctttcggaggcctcattggctgaaggtcgccgtcgcccaacgcaggccattctgggtaatgttcccacaggcgcacggcgggagagtgagggtcg

SEQ ID NO: 233541 - DNA, 122 bp, Homo sapiens
ttttctttgtagaaagatttgcagtgtccattttcaaggtaggagaacattcagaagtggcgtgtaatcagtaatagtcctgagtgcctggagtctgacagccctgcctttgaatccctgct

SEQ ID NO: 233542 - DNA, 122 bp, Homo sapiens
agaaaactaagaattctctctctgttgcttggagtataaactggtaaaaccagcctggcacggtggctcatgcctgtaatcccagcactttgggaggccaaggcgggtggatgcgaggtcag

SEQ ID NO: 233543 - DNA, 122 bp, Homo sapiens
ccagaggcgctctccgacctgcagcccccagggctcctggccctttcccgtttgccactgcggcttgttgtcaagaaatggaacttcagaaaacccccagatatacactgcgttaggtaagg

SEQ ID NO: 233544 - DNA, 122 bp, Homo sapiens
ctagagcggcagtacggctctatccgctctagccggctcgccgtctcagtcccgtgatctcgttcctgaccttttcgatgttcagtaggctggtccctggagctaaggctggggaaaaagca

SEQ ID NO: 233545 - DNA, 122 bp, Homo sapiens
ctgaggcaggagaatcgcttgaacccggcaggcagaggttgcagtgagctgagatgatgccgttgcactctagcctaggaaacaagaatgagacgctgtctcaaaaaaaaagtgtggactct

SEQ ID NO: 233546 - DNA, 122 bp, Homo sapiens
atttccaaaatgggacgatattagtcatctttgagtcaggtgagtcccacaagttcccagcgtctcctcatggtctgtgttaggggtccaggctgactggggttcactggtgtccactgggg

SEQ ID NO: 233547 - DNA, 122 bp, Homo sapiens
cgacgcgggacctagtgcaggctggtggagccccctccgcggtcctctgagtacagctgccggtccccacctctgaggcagaacttgaggaaaatggggtcaaatggaaggtactggtatcg

SEQ ID NO: 233548 - DNA, 122 bp, Homo sapiens
tgctctctgctattttaaggggcctcatttagcataatatttgcatcatttgtgtcttaccggataattaggagtagagacaaattcttcttgttcccagactaagggcactggggtggaga

SEQ ID NO: 233549 - DNA, 122 bp, Homo sapiens
caatgaaggagagattgaagaggaaatagtacattggtgtgtggaggtgagaatttagaccgaaaagagtgatcaagccaaggttgcctaccatggtgacaatgtagatcactagaaacagg

SEQ ID NO: 233550 - DNA, 122 bp, Homo sapiens
cacccatggggacaaacgtcccagcacaaaggggtctcaggcctgcaaggcccaagtggacgctcggacaagggcaggaaggtatttgctgattctccttctccatgtgacgtgtctctcaa

SEQ ID NO: 233551 - DNA, 122 bp, Homo sapiens
ctctactcacctgtctccgaatccgtcgtggtgtttcaagcgagtcaagattccagatcgcgccccaggctggactcggaattactgccccgcgggtctgcattttcacagcggcaggtgtg

SEQ ID NO: 233552 - DNA, 122 bp, Homo sapiens
aaaacacgcgcaggtgcgaggaagcagcctggtcctgcagcccagagacatcgtggtcttcgtcgctgtcttgttaaaaagaaaaagcctgctgtttagccgtgactcacctgcacacagat

SEQ ID NO: 233553 - DNA, 122 bp, Homo sapiens
agtttcccctcgaagcaacgggaccaatcgcaccgccggcaggacatcttgtgcggggcgcgaagtgacaaaagtcaggatttgcagaagttcccactcggtaacgacccccaccccggcaa

SEQ ID NO: 233554 - DNA, 122 bp, Homo sapiens
cagggccggtggcgccggccagccactcagagggcaggacctgccgagcccacacccacccggaactcgcgctggcccaggagcgcttcatgcagccctgattcccacctgcgcctctccct

SEQ ID NO: 233555 - DNA, 122 bp, Homo sapiens
gggtttcctagtggaatcatatttttgctggtggagggtcttgtgttagtattgactgatcgaggtggtggttgctgaagattggggtgactgtggtaatttcttaaaataagacaacgacg

SEQ ID NO: 233556 - DNA, 122 bp, Homo sapiens
aagcctggcctgcccatgaggaatttcctccctcagaaggtagtggctgtgggttgggtccgtcatctggcctcatgcttaatcatttcactccagcatgggaaatattatgattacctgtc

SEQ ID NO: 233557 - DNA, 122 bp, Homo sapiens
ccttctcggcccggctaggtcctgagccgcggggacgccttgcgagtctgactgctgtggcgtcgggggtgttgccgctccggccccgccaggagctgcgaagctggtcggccgccctctgg

SEQ ID NO: 233558 - DNA, 122 bp, Homo sapiens
acacttaagtctactggctggacttcatctccatggcaacaagcatggaaggtgagacatcgctgtctgcgaagtaactttctcccccttccctccgcattaactgacagcgttccaaatgc

SEQ ID NO: 233559 - DNA, 122 bp, Homo sapiens
atcctccactgtggctcatcctgactcatttccagtctcatctgctgccacataaaaccacggcattccctgagcctttatacaggcttccctctgcttgaaatagcctatcccctggtgaa

SEQ ID NO: 233560 - DNA, 122 bp, Homo sapiens
cctcgctctgtccagtagaattttctgcggtgagaaaaatattttatatctgcactgttccgtatggtagtcactgcccacatgtggctcttaagcacacgaagtgtggctagtatgactga

SEQ ID NO: 233561 - DNA, 122 bp, Homo sapiens
gcaaacgtcacttccgtggcctttggctcaggacgggaggaggtgtggatccaaaggtggcgcgtgcctgtaaccccacctactagaaaggctgaggcaggaggatctgttgaacctgggag

SEQ ID NO: 233562 - DNA, 122 bp, Homo sapiens
aagtaaggactctgcctgggaaatgataaaactcatttggcagcatactttgaaataactcgcctgctgcacagggggcataggctgccccatccccattcattccctcttctttcctgcca

SEQ ID NO: 233563 - DNA, 122 bp, Homo sapiens
gtccacacatgcaaatggaaacatgttaccccttggatactagcttaaatttatttactccgaggtgatttaaagtccacatataggtatgcttgtttcagcaggtcagatttaaggatacc

SEQ ID NO: 233564 - DNA, 122 bp, Homo sapiens
cacttcagtcagcctggccccacctgggccacccttcacttcgctccgcgcctcacccaacggcagagcagcgccgcgcccacagctccggtttgaaaaccttcaccaaccaatcacagaga

SEQ ID NO: 233565 - DNA, 122 bp, Homo sapiens
tgaaaggttagcggaagtgtccttctttcctttttgctggtagggccgggtggttgctgccggtaagtagaagcttgggttgaatctttcaatccgctgccatccgcggcttgggggtcgaa

SEQ ID NO: 233566 - DNA, 122 bp, Homo sapiens
catttctccctttcaggtaatggcaccgaagcctcctttcgctatgtttgaacagcgccacgctttcctatatatttttatagcagagcctaaggcacagcctggcacagtgcgggaaacag

SEQ ID NO: 233567 - DNA, 122 bp, Homo sapiens
gactcctgccacaatctcctgtgtatctcaccgctttcctgagggagctgggtatcctggcgggtccaaagcagctggcttggtggtcctgaactctcatccaacagcacaacctattgcaa

SEQ ID NO: 233568 - DNA, 122 bp, Homo sapiens
ttatgtcaggtggtgaaaacaggaatgagaacgaggagtcaacctcaaaggctgaaacctcggaagattcagcatcacgcggggagacaacaggaagatcccagaaagagtttggagagaaa

SEQ ID NO: 233569 - DNA, 122 bp, Homo sapiens
ggggcctgccgattggattctttcgcgtgtgtgtagaagcggccgccgccgccgccgcggcggagacgacaacaacttgctggttttcaggttgggttaacggcatggagaacagtcacccc

SEQ ID NO: 233570 - DNA, 122 bp, Homo sapiens
ccattggaccgctacatcctggtggacattgatgacatcttcgtgggcaaggagggcacacgcatgaaggtggaggacgtgaaggtatggccgggggtgctagaccgggcaaggcaggtggg

SEQ ID NO: 233571 - DNA, 122 bp, Homo sapiens
gcttaaaggtagacaaggacaaagtttcagaatgtaacagtttccactaatgcttcccaacggcctagactacatttcatgagatgtacttaaaatccatatatccattagcctttcagtgt

SEQ ID NO: 233572 - DNA, 122 bp, Homo sapiens
gccgatttttccacaatttaaatctcagttcacctggtatccagctccagcaacttagagcgtttcacgtcacgccgggcgccaggcgtcggcttgtataacctgaaaacgctcctgttttt

SEQ ID NO: 233573 - DNA, 122 bp, Homo sapiens
gaaagtgtcagagatggttgacaattctatacatgggttcatcaggaataactgggctgtcgggcacaatgtggagggacagtgttgaatcagtttcagctagggatgtagtagaaagatat

SEQ ID NO: 233574 - DNA, 122 bp, Homo sapiens
atttaagccttacaaagggaaagcctctggccgtcacacgtaggacgcatgaaggtcactcgtggtgaggctgacatgctcacacattacaacagtagagagggaacatcctaagacagagg

SEQ ID NO: 233575 - DNA, 122 bp, Homo sapiens
cggccggggcagtctccttcggtaaaagcggcctctgctttttcactgggcttcctgtggcggcgggggccggggccgtgacggtgaccgtggaggacgtgctggtggtggctgtggcgcca

SEQ ID NO: 233576 - DNA, 122 bp, Homo sapiens
cccggggagctcctcgccgccctcgccccacttcgtccgggtccctcaaacatgtcgcagcgtggctgctcactgtcccctctgggcaagaggaggccccagacatttccacgggatctgaa

SEQ ID NO: 233577 - DNA, 122 bp, Homo sapiens
acatgcccacttggcatgcaacacacctggaactcacacccaggtctggggagatcccagcgttcttacccccatgcacgttacagctgaacttacagaaggtcacccaaaagaagccttga

SEQ ID NO: 233578 - DNA, 122 bp, Homo sapiens
ggacgggcttatttgcatacagggcgtcaccctggaggcggcgatgggcgtgcacttgggcgtggccccgacccgggagttcatgggcctgggactcagacgcgaaaggatgctggggcgcc

SEQ ID NO: 233579 - DNA, 122 bp, Homo sapiens
cctcctgcgccaatgggagcacccaagcccctgcgcgggaagatgccgattggtcagtgccgccggacgctgcggggagctcgtgcgcgcggcgcttttggggcggagcctgccaccggccg

SEQ ID NO: 233580 - DNA, 122 bp, Homo sapiens
gcgccagctggagggtggtgcagagggaggtggatgaaaagagctgactggacagagaaccggcacccacaagagtcagccaaaaggacagctgaggttgacattggcacgagcagatgtct

SEQ ID NO: 233581 - DNA, 122 bp, Homo sapiens
accgggcatgctagcgcatgcctgtaatcctagctactcgggacgctgagtcaggagaatcgcttgaaccggggaggcggaggttgcggtgagccaagatcacaccattgcactccaacctg

SEQ ID NO: 233582 - DNA, 122 bp, Homo sapiens
agaccaataaaccacacagccaggtactctctctgacccagagggcagggagccaggcttcgggaggaatacttagaggcctccttggaatgtggccaccgacaggaatatgtgggggtgca

SEQ ID NO: 233583 - DNA, 122 bp, Homo sapiens
ggcccgcaggatagacctgcacctgtcttggagcccaggaaacctgtgggcagtcttgggcgtcctgaggggttgaggggaggcctggcacggctcgagggtctttcgctgagaatttggac

SEQ ID NO: 233584 - DNA, 122 bp, Homo sapiens
gggtggggcagaggtggattctagattacggaagaagtgctgtggcaccttacaccaggccgggtagaagggggtggggaggtggtttttaaaatttatttatttatttttttattcattca

SEQ ID NO: 233585 - DNA, 122 bp, Homo sapiens
gggaggctctaagagaaaatgacattgatttgggaaataggacattgcaatgagaatacacgtgccattgtagattatgtgcacattcagggaagcaaagaagacaaaggtttttaagggaa

SEQ ID NO: 233586 - DNA, 122 bp, Homo sapiens
aaccccgctccttaagaagaaaagcttgctgtggagggcagtttcgctcctggggagccccggagctgttgccctcggcctgggaacttctagaaaagcaccagagcccgggtctgggcctt

SEQ ID NO: 233587 - DNA, 122 bp, Homo sapiens
agtctcgccacctctctagcatttctgccattataaccgaggttcctggactgcaccaatcgctctgcaaccccagcacctctcggaggagaccccgaggtagaccggcctggagcatgcgc

SEQ ID NO: 233588 - DNA, 122 bp, Homo sapiens
aagaagccttctccagtaacgaggagctgccccagcttggttttagatgtgacagagccgcgtctgcccctccaccgcgcagcccgcacctctcagcctgacacacacatgcacacacaaac

SEQ ID NO: 233589 - DNA, 122 bp, Homo sapiens
cttctgcctgcatctttttaatgaccatacttgtcctgcctccagatagatgttttaaaacgaataacaaaaataggggaaaggtgaaagttctttctaccgaaatctaataaagaaaagtc

SEQ ID NO: 233590 - DNA, 122 bp, Homo sapiens
agggggaaggaattgctctcagccgaaaaacattaagctttgtcaattatcccccaaacccgctgggtttataaatatccctttttatttttagggttttccctcccgctcgcccccatccc

SEQ ID NO: 233591 - DNA, 122 bp, Homo sapiens
atatttggtaaagccacaaggtaaacaaaattatccaaatttttccatttagctttagtacgtatttacaagaatctatttaaagaaaggcctctgatattgcgaaaccacatttttttttc

SEQ ID NO: 233592 - DNA, 122 bp, Homo sapiens
gcagctccacggtgcaccccgtagcccagtagacgccatagaaggctgcccccaggagcgcgaccaccagcaggttgagcagcacccgcaccaaccaaaccctggcttgctggcccagcgtc

SEQ ID NO: 233593 - DNA, 122 bp, Homo sapiens
cctgcctgattctcctgcctcagcctgccgagtgcctgccattgcaggtgcgcgccgccacgcctgactggttttcgtgttttttttggtggagatggggttttgctgtgttggccgggctg

SEQ ID NO: 233594 - DNA, 122 bp, Homo sapiens
ggatctgcgtctcccgtcccccgtctctaggcctcttgctccccttccttggttccttctcggggtccctgtcctccacagctgtctctcagggtctttgtccaactcttttcatccctctc

SEQ ID NO: 233595 - DNA, 122 bp, Homo sapiens
ttcaaattaaactaacaaagacagattaacagcaggaaaagaaaagcatacagttttattcgtattttacgtgcatgggagttcacagaaaagaagtgaaactcaaagaagtggttagttag

SEQ ID NO: 233596 - DNA, 122 bp, Homo sapiens
gaatacagactctaactcctcttcaggtccccaggacttaacaaaatcctaggacagatgcggtatttattggtggtggtagcagggaggctctcaatattcaagagacagcaggcattact

SEQ ID NO: 233597 - DNA, 122 bp, Homo sapiens
acgtgtgcaggtgcagagagctcggccaggctcaggcggcgggcgggctggggtgggctccgaccgtccctcgggcgctccgtgacacgaagccccggccaaggccaagaagggggccagcc

SEQ ID NO: 233598 - DNA, 122 bp, Homo sapiens
gactctggagctctgttgggaagctggcaggagccaggtctgtggtccaaaattgcctctcgatactggaaggagagaagcggtcgaatcgcagacggtggagatcagcgagagcaagcgag

SEQ ID NO: 233599 - DNA, 122 bp, Homo sapiens
cccctccttgctctgagagccactgatagcctctccccaaaggctcctgctctgacccatcggcctgggcttccaggcttcagatgcagctgagaaactatccaaaacatttccatgatgga

SEQ ID NO: 233600 - DNA, 122 bp, Homo sapiens
gatgggaaccgtttgaatgaccgggcacgggtctgcaagaaactcagctcccaggccagccgtggctcaggaagcctcccacgtcgggtagaatcccaggaatccacccttgcccccatcct

SEQ ID NO: 233601 - DNA, 122 bp, Homo sapiens
ccttcccgccacccctccaccgccttccccctcctccctcctctcgccacctctaggccccgccccggtcctgccgcccagtctcctcgctgcagtcgctccggagctgcacgggtgttttg

SEQ ID NO: 233602 - DNA, 122 bp, Homo sapiens
cttattctaatgctggattctagtctgatcataagatatgcgaatggtgaatgtggtttacgcccttgaatcctgggaggtgttcctggttttaaatcctgggatcctggccagttaagagc

SEQ ID NO: 233603 - DNA, 122 bp, Homo sapiens
tttttttgtggctttaggcatcctcatttccaacagttgtcatctatgtaatggacacatcgagaagtaccaacccagtgaccttcatgtccaacatgctctatgcctgcaggtaattgatt

SEQ ID NO: 233604 - DNA, 122 bp, Homo sapiens
ttaaacattcagtttgacagggtgtcggggcgactgcccttccttgtgctcaggaagagtcgggcaggcctgctcctgcagggcgccggtggtgctattttaggcgtcctgctctgaagggc

SEQ ID NO: 233605 - DNA, 122 bp, Homo sapiens
gcttttcccctttcttcctcgccggctaacgccagcagctgttgtttgggacggaggaggcgaagggggagggaaagcctttccacctgggcgtgtgaaggaggcgcgttacaaacaacgct

SEQ ID NO: 233606 - DNA, 122 bp, Homo sapiens
gaggctgtttagttaacctcaagttttggggagcccctgaagggctggtcaccacgctgccggggacagggaaagcctctgagcttgagtcagttttggtttccctgctggggtgcaggagt

SEQ ID NO: 233607 - DNA, 122 bp, Homo sapiens
ccctccgtccattcctttagtgctgcgccgacagcggtcaggatctcggctttcttgcttcgagagggactaggtgcctccaccagagcttctgtcgctctgtaacctgcactgtgacctac

SEQ ID NO: 233608 - DNA, 122 bp, Homo sapiens
ggcgcctcgcctgccgggggtccctgtggtttgacgcctggctggcggggggcagtgaggcgggcttgtctgcagactgctgctcttgctggaacagctctgccttgggcaaggacgacttt

SEQ ID NO: 233609 - DNA, 122 bp, Homo sapiens
gtctccgtgacaaagttcactggctgcttctgtaggagctctgggtcgaaggccacaccccgaaagaaagggtggacctggaagtgatgcagataacgtagacgatggagggggttctggca

SEQ ID NO: 233610 - DNA, 122 bp, Homo sapiens
gccctctggtttttggtgctcccagacgtgcgctgagtgcatgagggcctcctcaaagaccgagtgagggtcaccacaagctcttgccaagacagttttaaatatgagattcctccaaggtc

SEQ ID NO: 233611 - DNA, 122 bp, Homo sapiens
tcctgcttcttcagtttgacctcctaagggaagtaagtcctgcagaagtaaccagcctgccgcggcagaatgcagagcaggcaccaactgccctgcaactgcttccataacctgcagatcca

SEQ ID NO: 233612 - DNA, 122 bp, Homo sapiens
gctgggcggggaccggtctccttccgccaccaccttccacgacaggctcgattcgtccctcgcatgctgccctcccagcctggccctgcagcagacacttctgccctgggccccggtctcag

SEQ ID NO: 233613 - DNA, 122 bp, Homo sapiens
gccctgcgtctctcgagctgctggcttctctccgccgacgacccgcaccttcccgcgccccggcccgaagtctatacattttttaaatgtgcatattctttgacacgggaattctacttcta

SEQ ID NO: 233614 - DNA, 122 bp, Homo sapiens
aagcaaaagaaactccaagttactgggttctccagtatgataagtaaaggttgtcaaggtcgtgcagtagaaaagaaacaggcagagctgaatgttagctcagctcttagatagctgttgca

SEQ ID NO: 233615 - DNA, 122 bp, Homo sapiens
taactggcaaatgaccttccagggacatttggtaagggaagaatgcctaaagtgaacacgcgtacaacttcagtaaacacactgcgcatgctcacctcccaagtgctggcacgccactgctc

SEQ ID NO: 233616 - DNA, 122 bp, Homo sapiens
tggcccctggaggctccggcagcgagctctgggaggctgggaggggagtgaggggaggggcgctgactgggccgtccaaagaggagggggcctttaataggctcgcccagcgcctggcttgc

SEQ ID NO: 233617 - DNA, 122 bp, Homo sapiens
gggaagctcttcatgatgacccggatgcgagacaggggcagccagaggagcggctgctgccggcgcttttctttgcccatgaccacctccgccatcttcccgccactgacggtcgcaccagg

SEQ ID NO: 233618 - DNA, 122 bp, Homo sapiens
tataaatgagctcaaataatttatttttctcatttcaattgactcatatggcatgaataacgcactctccagtaataaggatagaggaaggataaacaactgtggaaatttattgcctccaa

SEQ ID NO: 233619 - DNA, 122 bp, Homo sapiens
gggcgcgtggggtgggacctgctggagacccgcaggcggcggcggccaagcagggtcaggcggttggcaccacaggtcgcgccctcggctgcagtcggggcagctccagggggccgcgtacc

SEQ ID NO: 233620 - DNA, 122 bp, Homo sapiens
gcgggcgcgcgcctatggaactgacggtggagttcagcgaagaaggtgccgcagagaattcgcaaacaccaaccgtaaccagagcagctgggggcgcggcggcgagagaagctgcgaagcgc

SEQ ID NO: 233621 - DNA, 122 bp, Homo sapiens
gctggcccctacccggttcagggacacgtgcccctctcctggatccctcccagcagcacccggacacagtccattttcagaatcccccaaggacccccccaggctctgccctgcccctgccc

SEQ ID NO: 233622 - DNA, 122 bp, Homo sapiens
actgctccaccgctgaacttcgggtgccggggaggagaaattgggctgatgtgagctccccgtcacccgccatggagccggctgtgtgtgttcatcagatacagttctcccttaaccttgtc

SEQ ID NO: 233623 - DNA, 122 bp, Homo sapiens
ttcagaagacaacaccttaaaactctcagctgtctttttaaaagtctctctcagagagaacgcacagtaatattaagaagcagtcttttggagtctatatgttgtatttgataatccaagtg

SEQ ID NO: 233624 - DNA, 122 bp, Homo sapiens
ttttggtatttagagcctaggaagcagatcttgggggaggcgggccgggctgtggagacccgacactcccgcgctggccgcgaccctctcgctgtggagcctgtggccggcccgggcgacag

SEQ ID NO: 233625 - DNA, 122 bp, Homo sapiens
ctcaggatgcagggggcggggcctggcgctccacccaatcagagtcgccggggtggggcccggccaactgtttatccgcgggtcacattgccgttcgcctcagtctttggcccctcccgccg

SEQ ID NO: 233626 - DNA, 122 bp, Homo sapiens
ggcgagctgggctaccagcccgagcacatagactcctttacccatgaggcctgccccgttcgcgccctgcttgcaagctgggccacccaggacagcgccacactggacgccctcctggccgc

SEQ ID NO: 233627 - DNA, 122 bp, Homo sapiens
tggctgacggcgccgaggagcccctcagaacctgcaggtggggggagctcccatatcttacgggtgtttcgggcctcacctctccatgcctctcgtcagcctctcccgtctgcgtggtgggg

SEQ ID NO: 233628 - DNA, 122 bp, Homo sapiens
ggagggaagttgaggctggggcacaggaagtctcgatgggaactaaggccacttcctgggcgctctaggaagcttctctcggtggttgtctccgaattaacccattagctaccctgtcctta

SEQ ID NO: 233629 - DNA, 122 bp, Homo sapiens
accgctttaaaccgtttaagcatcaccctccctgggaacgaccggaagaagagctggccccgctttgcttcagataaatgctccaattagctgcctgggaactggcctagcacatgatagga

SEQ ID NO: 233630 - DNA, 122 bp, Homo sapiens
cacgacgagaaagtccgcagccccaaacagtgagtttctgagggcgagtcgggccggggccggcctaggtgggagggagccgagcaccccgaggagccgccaccgctgtcgcccgggggacc

SEQ ID NO: 233631 - DNA, 122 bp, Homo sapiens
cgccacgagcccacttcttatccccaagcgcacctccctctcctcacccgggtttatgcccgttacacagagagaactacacagggggaactatggtcctacaccctcgaggggacagacac

SEQ ID NO: 233632 - DNA, 122 bp, Homo sapiens
ccacacgtgctccgtgaacaccgtgcgcctgtatcaggtaccacacgtgctccacaaacacggtgcacctgcatcaggtaccacacatgctccgcgaacatggtgtggctgtatcaggtacc

SEQ ID NO: 233633 - DNA, 122 bp, Homo sapiens
acatatacggtcattgtctctgctgcttcccactgcagctttatataataaaacaagccgcgtcaaataggctaggctgtaatattaggtaaaatctaatttcagtttggttatcacatagc

SEQ ID NO: 233634 - DNA, 122 bp, Homo sapiens
gaggggggcctcagtacccggcttccgcaattttccaggcgtggaggtgaggggtgcttgcgtgtaaactgtggcaacccccagaatcaggccctggctcctgcactttcggaggtgtctgt

SEQ ID NO: 233635 - DNA, 122 bp, Homo sapiens
gggataaatctcacctgcttcagagggttagcagcatggaatgtgagtgggagtgtgactcgtccagtgtgaagggcacctgcatgggtatggagggcacattctctgagtggccgccttct

SEQ ID NO: 233636 - DNA, 122 bp, Homo sapiens
agtccctataggataggcatgtggtacagtgtgaagctcctgagtggtcaacagctaccccgtgacaacatgccacactccatgtgccactccctcccgcctgcctgctgtgtccttggccc

SEQ ID NO: 233637 - DNA, 122 bp, Homo sapiens
gtgttggacatgatggtggtcgagaccagcaggagacaaacctctgaggacagggccagccgcgggactgacaccctgggatggaacctcaggatgggccaaacccagacaacgggcccatg

SEQ ID NO: 233638 - DNA, 122 bp, Homo sapiens
tgcaagtccagcctgcttgggcgttatcttgaggagtgaaattcaaactctgatgacagccgcctgggggccagctggggctgctcaggtggttctcacagcaagtcccttccatgacctgc

SEQ ID NO: 233639 - DNA, 122 bp, Homo sapiens
acaggcgtgtgggggtgatgggcagggggaccctgttcctgttgtttggctgctctcaggcgttcagctggtcaccctgggagaggggtgagggcaggccctctgctttaactcacttgtgt

SEQ ID NO: 233640 - DNA, 122 bp, Homo sapiens
gaccattcctcgtgccccattctccgtgggatagattctcatggggagtgggggagccttcgggtgtggcagaacggcatgatggaattcataaggtgagcagaaactcaaggaaaactgtc

SEQ ID NO: 233641 - DNA, 122 bp, Homo sapiens
ggccctccgccttgggggtcttctgtttgggaattatctgcctctctggacaagctgcctcgccctgatctgagcctgcgctcactccacacgtcacaaaccacagccctagcagaccccct

SEQ ID NO: 233642 - DNA, 122 bp, Homo sapiens
gtccagtcctttgagcaaaatgccttgattcaatagtactcagttactaccaccagaatccgatatctaaataacattgttgcacaaaatatgaaaatgaataatgtgtaagagaaaaaaat

SEQ ID NO: 233643 - DNA, 122 bp, Homo sapiens
cggagggatgtggcccggaatattggtagggggggcccgggtggcgtcatgcaggtaccccgcgctggggcctcgcctcgccgctcactttccagcgcagcggccgccgcagcggacactcc

SEQ ID NO: 233644 - DNA, 122 bp, Homo sapiens
ggataatccacttgtggctcccatttcaagatctttaaagtagtcatgtctcttaagtcccgtttgctgtagaaggaaacacttaacaaatgccagggattagggtgtggatgttcttgggg

SEQ ID NO: 233645 - DNA, 122 bp, Homo sapiens
gcagaaaagccaggtcacagggcgttcctgtgagggaggacccgggctgtgttcagggtacggagggagagtctatgactcggggcctcggccggccacagaggctggtgtagacctgtcct

SEQ ID NO: 233646 - DNA, 122 bp, Homo sapiens
gggagaggctccaggctgaggagacagaagccaaataccctgctctgggtgtttctccatcgtggcctgctctgcccctcccaaatgcccttttgttttttttttaattttaatttttattt

SEQ ID NO: 233647 - DNA, 122 bp, Homo sapiens
cctactccggtgccgactcccgttcccgtccggaacccaactccggtcccgactccggctcggaccctgactcctccagtccgggtcccagccccagccccagcccagctcctggcagggat

SEQ ID NO: 233648 - DNA, 122 bp, Homo sapiens
tggggcaggcagcggcgctggctgtggaattagatctgttttgaacccagtggagcgcatcgctggggctcggaagtcaccgtccgcgggcaccgggttggcgctgcccgagtggaaccgac

SEQ ID NO: 233649 - DNA, 122 bp, Homo sapiens
ttttctgatgcccaacatatctgagctgctgaacgaagggtagctgctgaaccactcccacggtgacttggaatggcttagccagccggccttgggccacctggctctggcccccctgccca

SEQ ID NO: 233650 - DNA, 122 bp, Homo sapiens
cgaaaagaagcctcgcgcctgtggggaagcagcctttacgcatgactgggactggagtagcgtggagttttaagatgctgaaagcctcttctccgagaaaactcccctaagaaactctctga

SEQ ID NO: 233651 - DNA, 122 bp, Homo sapiens
gggctgcgcggaagaggctgggtgtgataaactataaagaggccctaaactcggatgcaacgtgacgggagttgtagttctttcacctggcgggcgtctgctccggttcagctgcaggaggt

SEQ ID NO: 233652 - DNA, 122 bp, Homo sapiens
aggcaggggcgcgctgacactgtgggctctgccaccaccggctgctaaccagaggctccacggccgctagagaagtggccagtgacccagcctgcctcagtacagctatgaagtcttttgca

SEQ ID NO: 233653 - DNA, 122 bp, Homo sapiens
cagggcgcacgggacatggcacccacggaaaacctcagagccagctgggaaaacagagatcgctctcctggccgggcagctccataccaccctcgaagggggacacaacttccacttactct

SEQ ID NO: 233654 - DNA, 122 bp, Homo sapiens
tctgagtcgccggaccctctcgagtctgactttcactctgacaatcggtccgtggctttacgaatctgaatcggagtccccttgatagctccgctggggaacagcaaactacgaggttcaaa

SEQ ID NO: 233655 - DNA, 122 bp, Homo sapiens
atggaatataaatgacagcaagcataccataagcaactaaattgtgttttctacaaataccgtattattagttactcacattagagcaagttaatttgtcactctgtgcttagaggtatact

SEQ ID NO: 233656 - DNA, 122 bp, Homo sapiens
cgcccgctttcaggcgagggccgcgagccgcagcagctgcaggaggactcgggcagttggcggtcaccgggaggcgtcgtcctgccccgcggcgggccagccgccttcgctgctgccactgc

SEQ ID NO: 233657 - DNA, 122 bp, Homo sapiens
tcagcgcttggggctggcctcagcttgtagacccgagccctgcagaacaaccccccgtggcgcaggagagcagaagaaagggggcctttatgcccttttgagggaagcacacattctgcaag

SEQ ID NO: 233658 - DNA, 122 bp, Homo sapiens
tctggcgcagatgaggaaacagggatttgagggctgcaggaggcagaggagccatcctcccggttctctcagacaggacaggaagcctggagcacccagcttcacagaggccccagcacttc

SEQ ID NO: 233659 - DNA, 122 bp, Homo sapiens
acgttaacggggagatgaattcgccgactctgtcttgcagagggcgtgtgcgtcatcccacgttgcctgggaaaacaagcattaacaagtgtgagcgcgggtctccgtggaaatggtacaga

SEQ ID NO: 233660 - DNA, 122 bp, Homo sapiens
ctgcttaggcagtgcaaggcagagcacagagctgtgggaaatcagagctgatgagaagcccgtcgtctctttcccgttgttctctctccgcggccctcaccccaccgccagccgggcaggct

SEQ ID NO: 233661 - DNA, 122 bp, Homo sapiens
gaggggtaggagagcgagaagaaaagaaggcggtgggatggggggtgataaagacaaactcgcacccccactggagggttcaggaggaaaaaggaatcacaagatggagagaagcgtgcgtg

SEQ ID NO: 233662 - DNA, 122 bp, Homo sapiens
ccgcaactcctgtttgatggcgggtctcaaacgctgggaggcagcagagtcaccggtcagcggcaaggcctggagtctccattcggaaccagcacccgggagcctctgccgcgggtggtcgc

SEQ ID NO: 233663 - DNA, 122 bp, Homo sapiens
tctgtcctctcgaagccctctaaggtcggacagctggagacagatcctcatcctgctgcccggaagcagcccctctgggcctcgctttcctgaccataaagtcgggatgatttcaaaatgta

SEQ ID NO: 233664 - DNA, 122 bp, Homo sapiens
tcaggcatggcgtgctgcaggtccccagccctgcctcgcggggaggcagctgaggccccgcgagaattcgagcgcattgcccctcactgccctgggccgctccgagtgcggggcccgccaag

SEQ ID NO: 233665 - DNA, 122 bp, Homo sapiens
tcaccctggagaccgtcgtggagcacacggcctctgcagctctccttccagagaagcccacgatgtagccagtgagtgcccagaaacaggctcctctaaaaatgcgaggctgcggaggccac

SEQ ID NO: 233666 - DNA, 122 bp, Homo sapiens
ggcataggggcatggaggtgtggtgtggacacaggtgggggatgcgcctggccactcactcgcacaccaggtgacaaccaggaaaggaggccgagggtgcatggctttctttcagtgccccg

SEQ ID NO: 233667 - DNA, 122 bp, Homo sapiens
taaaaacctgcttgtagcaaaggccagacagagctcatatccaagcctgctggtggagggcggtggggggaggggggttggaatcttctgggcagctgtccccgctttaactcaagcaaact

SEQ ID NO: 233668 - DNA, 122 bp, Homo sapiens
gagaaaaaaagaattatgttttcctttgcagtttgcaaaggcaggagaaagcctccgccccggggattcttcatgatgaagttttggatgtgtttatgtgttttaattggattgtgtctgct

SEQ ID NO: 233669 - DNA, 122 bp, Homo sapiens
ctggagcaccgcccctaaaagcgacttcaaagggccggtgtcgacagctgggtttgggtccgcggcctgcagatccaaggcccgagcaggatccaggccgtcggggccgtccgaacgcgggg

SEQ ID NO: 233670 - DNA, 122 bp, Homo sapiens
tgaaaactactcccaaacatcacagggcaggcagaatgcaactacgacccacgtggcagacgggggcggggaccggtcgcgtggccgcggccttggctcttgcgcctgcgcgctgcctcccg

SEQ ID NO: 233671 - DNA, 122 bp, Homo sapiens
acgcgccgccttgagagctgtaataccacaaaaatctgcatcttctactcctgaagctagcgagaccacgaactcaccagaaggaataaactccaaacacgtctgaacatcagaaggaacaa

SEQ ID NO: 233672 - DNA, 122 bp, Homo sapiens
tcgctctctccctaagggttccgcctgtcaccatctgtgcacccactgtggaagggccagcgctaaggtgaatttccatttacttcctgccagcagatggctcctccttttggtctcatctt

SEQ ID NO: 233673 - DNA, 122 bp, Homo sapiens
gaagaccctgctgcccggaagagcctcatgttccgtgggggctgggcggacatacatatacgggctccaggctgaacggctcgggccacttacacaccactgcctgataaccatgctggctg

SEQ ID NO: 233674 - DNA, 122 bp, Homo sapiens
attagctccgtcaaaggtcgagtccgtgacgtcaaagagcatgggccaatcagagcacaccggactgctttttttttttttcccgaacgaccgcagcagggtcacaagggagatgtccgccc

SEQ ID NO: 233675 - DNA, 122 bp, Homo sapiens
cctccataccatcctgaacgccaagacccagacgggcctctctgacagcccagcccggcccggcgcaggccacagtcacccccacagcctcccggccaccttcgagttgcccagtgctcact

SEQ ID NO: 233676 - DNA, 122 bp, Homo sapiens
tcaatttgatgggctaaattagagcctctgattccaaaatcagtctttaatttctgttcacgctacttccaaaatattaatgttattttgtttcaccatatatttggacattcaagtgtttt

SEQ ID NO: 233677 - DNA, 122 bp, Homo sapiens
ttgcgtcacaaagagctctggcgcatgcgtaatttcaagagccagcccacctcccgccggcggattattacacgcttgggttttgggctcagcacccccacccataaacccgccgggctttt

SEQ ID NO: 233678 - DNA, 122 bp, Homo sapiens
tgggcatgtttgtctgtgtgctgtaacctgaagtcaaaccttaagataatggataatcttcggccaatttatgcagagtcagccattcctgttctctttgccttgatgttgtgttgttatca

SEQ ID NO: 233679 - DNA, 122 bp, Homo sapiens
gagaacacgctcttcattatctcggacgccgccaacctgcacgagttccacgcggacctgcgctcatgctttgcaccccagcacatggccatgctgtgtagccccatcctctacggcagcca

SEQ ID NO: 233680 - DNA, 122 bp, Homo sapiens
aacttaaattatataaagtaactacccctgaggagcccggggtagttgaaggccctccagcgccttcggtgttctgtcgcagtgctctacgtgtgaaaccgctttctcccaccctggccgtg

SEQ ID NO: 233681 - DNA, 122 bp, Homo sapiens
gtctgggccaagaggaacttccccgcaagaagtgtcgagttaaggacgctactaagggggcgggatcgccatcgtggaggtgtgcaagcacgtgcctgcgtcccggagacagccagactcaa

SEQ ID NO: 233682 - DNA, 122 bp, Homo sapiens
ggaaccggaagcacagtggtgacgacagctttgacgagggcagcgtgtcagagtctgagtcggagtcagagagcggccaggctgaggaggagaaggaggaggccggtagggtttcttttctg

SEQ ID NO: 233683 - DNA, 122 bp, Homo sapiens
caagagggaaacactcgcattgctgatgaagttccggcgtggaatcctcttacgactctccgaggggtggcagccccggtcactccaaggagaccgaggtgccctgccctgggtcacgcagc

SEQ ID NO: 233684 - DNA, 122 bp, Homo sapiens
aagcgccactaccacttgccaggttatctcttactgcacactgcctcctcgccccgcccccgaacccaagccattggttgccgggcaccgccccattcgtctattgggccaaagaagatgcc

SEQ ID NO: 233685 - DNA, 122 bp, Homo sapiens
ggactaccaccatggaactcagggccgaatacctcagggagaagctgcagcgggacctggcggcggagcatgtggcggtggaggacaacacgaccctcaaccattgcgcctgtagcttctgg

SEQ ID NO: 233686 - DNA, 122 bp, Homo sapiens
ttgtcttcttttggtgctggggtggcctcttgctagagggtggggacttcgcagctcctgcggtctagaggattgctagccttgttcctgtgggcagggctcaggagctgtactacaaccaa

SEQ ID NO: 233687 - DNA, 122 bp, Homo sapiens
gagataatcgaggaagtcgatccgccgagccctattcacctaaaagagcccgaacccacacgcagtttagatgcatctctccaaatttatgctgtgctttaggggaggaacaaccactggtt

SEQ ID NO: 233688 - DNA, 122 bp, Homo sapiens
ctctgggaaaatcctgggattccctggcccaagaagggtttcctcccatcatgtttgagccgggaagctaatggaacatttgaaactaaaccaaacctgaaccaagtctcaaaggcttcgaa

SEQ ID NO: 233689 - DNA, 122 bp, Homo sapiens
gggccttaggacatgaggagacatagcaggctggtcctgaggtacctgcgcctgggtccccgcccatagagctgcctctggaggttctgggaaatgggccgcagatgcatgaagttgcagaa

SEQ ID NO: 233690 - DNA, 122 bp, Homo sapiens
ccacccaccgcctggacaggcagtcatcctgcctctgatgtgaatcaggcccattaaagacgtctgggtttgaagccgcctgtgcatggaaggaaggccccgtctcctctcccccacgccgt

SEQ ID NO: 233691 - DNA, 122 bp, Homo sapiens
atggagctagcccacgtttcatgaattaacatgttggtgatgtggtcagtcccacctctccgatacaagcaagagtcagatttgcagagaccggatgaggacgcgctactgaccggctgcac

SEQ ID NO: 233692 - DNA, 122 bp, Homo sapiens
tttgcccagcctggagggcgtcagtgaaaagcagtacaccatctacatcgcacctggaggcggggcgttcacggtgagagcttctgagggcagtggtagaagaggggagaggagggagggtg

SEQ ID NO: 233693 - DNA, 122 bp, Homo sapiens
cctctctcagatcctggtgtatagcctggaagcaggacgccgcctcttgaagctgggtaacgttctccgtgacttcacgtgtgtcaacctcagcgacagccctcccaacctcatggtcagtg

SEQ ID NO: 233694 - DNA, 122 bp, Homo sapiens
atgtgctcattagacttatttgataactacacaatgtaaatatgtaccaaaacatcacatcgtaccccataaatatgtataattatgtttcaattaaaaataactttttaaaaagctgatat

SEQ ID NO: 233695 - DNA, 122 bp, Homo sapiens
ggccggcagggcttggggggtgccagcgctgcggggcgctccatgcagcgctcccagagccggagtagcctgtctgcctccttcgaggcactggccggctactttccctgcatgaactccct

SEQ ID NO: 233696 - DNA, 122 bp, Homo sapiens
ccacagagttcaaaggtatttcacagataatctcttatttaaaggcaaactttcctgccacgcaagcaggaagccatttactccattttctcagacctaaaaactaaggtctgcaaccaagt

SEQ ID NO: 233697 - DNA, 122 bp, Homo sapiens
catattttctttcctttttctaatttctccttgggccatttccaaaaagccctaataccccgactgatagaaatggataccttgctgtgcactggtactactgtgattcatggaaagctgat

SEQ ID NO: 233698 - DNA, 122 bp, Homo sapiens
atggccggggagcccgggggagcggcgggcgaggtctcctggtgggctgatgggcaggcgcgtcgacgggagcgctgcgggggctcaggcgtccgggtggctccggggggctccaggcgggg

SEQ ID NO: 233699 - DNA, 122 bp, Homo sapiens
agggtatgcatccaggtttttaagatgactttttattttgaagatctgaccattggccttcgatttacaggtatgcagtagggtcactcgagtcacagttttcaatgtgcacatgcgattgt

SEQ ID NO: 233700 - DNA, 122 bp, Homo sapiens
ggcacaacctcgggacccttccggcgcctgcggctgggcggccgtgagtcctgccccgctcgtcgccccgcgctcacctccctgcggccccaagtccccgggacgcaactccgtgcggcgcc

SEQ ID NO: 233701 - DNA, 122 bp, Homo sapiens
cctcccgagtagctgggattgtggatgtgcaccacaacagccagctaatttttacagtagcgatgaggtctcaccatgttggccaggctggtctcaaactcctgacctgaagtgatctgcca

SEQ ID NO: 233702 - DNA, 122 bp, Homo sapiens
ctccatgtcgtcagtcaggtgggtgccccacattcccgtgggtgtgcagaggcttctcaccgcggcttcagtccgcagctccctcacaacacgcggtgcagagcatctttcctgtgctttct

SEQ ID NO: 233703 - DNA, 122 bp, Homo sapiens
caccccctgccagagcattaccgtgagctccgccccctgtcagagcattactgtgagctccgccccatgttagagcattactatgtgagctccgccccctgccagagcattactgtgagctc

SEQ ID NO: 233704 - DNA, 122 bp, Homo sapiens
gcggcatcaccaccaggttcacgccgagaaggagctggaggagagccgcccggctccagccggaccgcttgcccgccatcaccgttgtaatctatgcagcaaacaagctggaacccgctggg

SEQ ID NO: 233705 - DNA, 122 bp, Homo sapiens
gaggagaggagagaggcagagagcggtctcaggctggtgggaggggcgcccacctccccacgccctcccctcccctgctgcaggggctctggagagaaacaataaagagattcacacacaag

SEQ ID NO: 233706 - DNA, 122 bp, Homo sapiens
ttccatttcaagcatagctttcaacatttcgccataaaatacagtgctttcgagcctgagcgacgcagaagacgggtgatttctgcatttccatctgaggtaccgggttcatctcactaggg

SEQ ID NO: 233707 - DNA, 122 bp, Homo sapiens
gctcacccctcccgggccaccctgcgccggctcctcgcagtagcatagcctccggggcagcgagaactttataggtccagtccccaccctgctcaggcccgcccacctgcaccgcccctccc

SEQ ID NO: 233708 - DNA, 122 bp, Homo sapiens
gcctgggcaacatggcacaacctcacctttacaaaaaaattagccgggcgtggtgacatgcgcctgtggtcccagctactcaggaggctgagacaggagaatggcttgagcccaggaggtgg

SEQ ID NO: 233709 - DNA, 122 bp, Homo sapiens
gaaagatagaagtaagacctaaagaggaactttccgcatgttatgggagagcccctggggcgaggaggcgagggcagccttccccaggccaagggagcagccatcgctcttggatctgtttt

SEQ ID NO: 233710 - DNA, 122 bp, Homo sapiens
tattactgcaccacagatgaccccaaaatgttcaggcttaaaacaatcatcatggctgggcggagtggctcacgcctgtaatcccagcactttgggaggccgaggtgggtggattgcttgag

SEQ ID NO: 233711 - DNA, 122 bp, Homo sapiens
ctgcagcacgcgcatctggaggccgtgtgagtgggggaatgagcatgtgcctgaggccagcgcctcagctgagctcccaagctgaccccacaggtcctggactcaggagcccaggaagccct

SEQ ID NO: 233712 - DNA, 122 bp, Homo sapiens
aaagctagaaatagggcaaatgtcccttgactggtgaatggagaaacaaattatagtatacgtacacaatggaacactccttagcaatgaaaatgagtactggccaggcacagtggctcaca

SEQ ID NO: 233713 - DNA, 122 bp, Homo sapiens
cagagaagcaaatttgtattaaggcacttaaggcatcttgccaccactgggtctgggaggcgctgctcagtctgccgacagcatcttctggaattactggtgtggtggaactcaaaaatttt

SEQ ID NO: 233714 - DNA, 122 bp, Homo sapiens
cccctccccccacccgcccccaactcacaactcttttgagtccagaatctcagaatcgggcgttgggctttgccgggtgcttcagatcaatggtaattatttaattttttccagttttattt

SEQ ID NO: 233715 - DNA, 122 bp, Homo sapiens
gacgaggaagctgaggcccagaacgatgaaggaatttacagagctgggattcgaaccccgcgctaccgtcagtccatcccgggctctgtccagccggtaccgcgcgccgccttcttcctccc

SEQ ID NO: 233716 - DNA, 122 bp, Homo sapiens
acggtcacctttcgaggacctgaaaatttttttgtaggtggcaccccgcaacaagccggccgtccttccgggggagcccggagcgagcccggttctcgcctcgtggcgtttctcgctggggc

SEQ ID NO: 233717 - DNA, 122 bp, Homo sapiens
cccgccgcgtccctgagaggcttcggcctcgtccgaccccaggctgaagatcaggtggctcggggccggcaggttacctgcagcagatgcagctgggccacgagacgccgcggcaggtggag

SEQ ID NO: 233718 - DNA, 122 bp, Homo sapiens
cccacctcccgcaggtaggcacccacccagggcccctccttcgggcacctctgtggccggcgcactcacctggcagttggggccagtgtagccctgggggcaggtgcacctgtaggagccgc

SEQ ID NO: 233719 - DNA, 122 bp, Homo sapiens
ctgaagctcatgaatctgcaggtgctttggcttccccttctctctctgctctcaactctacgctttccctccctctgcacatgctgcactctactttgaagtctttgcatgggacattgtgc

SEQ ID NO: 233720 - DNA, 122 bp, Homo sapiens
acttcatagctgatgaggcggacctcacctcagcccttacctggaagatcacgctgaagacgccgctgatctcctcctccatggacactgtgacagagggcaacatggccatcacgatggct

SEQ ID NO: 233721 - DNA, 122 bp, Homo sapiens
ggcaaccacaggttccaagatggtttgcgggggcttcgcgtgttccaagaactgcctgtgcgccctcaacctgctttacaccgtgagtatccccagtccgttcctgctcgcttgggggcttt

SEQ ID NO: 233722 - DNA, 122 bp, Homo sapiens
tgggggacctgtgtgaagcatggggagcagaggccatgccttcaggctcccacttagggacggggcaggggcaagatgggcctgcacactcaaacccactcccagcctcgtcaagggctcag

SEQ ID NO: 233723 - DNA, 122 bp, Homo sapiens
catgcttttggggattattttaatctctggtagatcttcagctctttatgcacagagactcgatctgctttttttgtatctgccactgaggagtgggtactgattccagcttccaagccagg

SEQ ID NO: 233724 - DNA, 122 bp, Homo sapiens
gggaaggactgggcagacgggacagcagcgcatgcagcttcttccagcgaggcatccgcacggggggctctgtctgaacccatcagtcacccggcaggagcagatggagtgagggggcgcgt

SEQ ID NO: 233725 - DNA, 122 bp, Homo sapiens
agaaaatgaaaaagcacattgcaaagaaatatatgtagcatgaccccatactatgagtgtcgaaggtgcattaaacagacatacatatggatgggtggacagaccagtggatgggtgaacac

SEQ ID NO: 233726 - DNA, 122 bp, Homo sapiens
gaagcttcaagtaacttgccttaggtcagaaacttagttggggtttgaagcgcctccaaacgcttgctttttctgtggaaatgtgcgggctgccgagggttttctgcaggactttccgctct

SEQ ID NO: 233727 - DNA, 122 bp, Homo sapiens
tcagtggactccctggggctgaagtagttgctgctgctgggagattgattctcactggcccggctggaggcatgggagcgcgcagagcccatggtagcaggggccacagtgcccccactccc

SEQ ID NO: 233728 - DNA, 122 bp, Homo sapiens
ggcaggcgagaccagttccttccctgaacacagccaagcctggaaagttaacttttccctcggctggacagggaggggaaacactatcacccaccgccggtcgcaggcgtcgggcttggagg

SEQ ID NO: 233729 - DNA, 122 bp, Homo sapiens
gttactatggtaccaactgtttatggtgaaaattaataaatagtccggtgccgtggctcacgcctgtatcccagcactttgggaggccgaggcgggtagattacctgaggtcaggagttcga

SEQ ID NO: 233730 - DNA, 122 bp, Homo sapiens
agccagccgaggtgcgtaacacagctccacaaaaccctgccgcccaccccccgagccctgcgcaggctgcaaagatggctgcagagcaatcgggccagcagggcctggcacgtgcgacctcc

SEQ ID NO: 233731 - DNA, 122 bp, Homo sapiens
tgtctctttccaccctgtgggtctgtaaacttcttaagatcaagaaaattgtcttgcccccgttacatccccaatacatggtcaataaatatttgttattttcaagggctggagttagcagt

SEQ ID NO: 233732 - DNA, 122 bp, Homo sapiens
taacttgggaaagatacttagcttctttagacctcagtttctttatctttaaagtaatggcggtagtaatatttaattaattaattagttttgagatagggccttgctctgttaccgaggct

SEQ ID NO: 233733 - DNA, 122 bp, Homo sapiens
ccctgtggctgactcagcctctcttcttcccatcctacagtatggcggaagaactttctgcgtgtgggccacctggtgctgattgggggccctgatgatggtgttattactccctggcagtc

SEQ ID NO: 233734 - DNA, 122 bp, Homo sapiens
cgcccccggggggccgtgtgggggaactgcctctccgagggccgcgtgggaggggcttcccggaggccggccccgtgggtggggagccagcgtgcgtcccagcgagtcagctccacttgatc

SEQ ID NO: 233735 - DNA, 122 bp, Homo sapiens
ggcttggaggaaagcttgtccgggacctttgagtgtgttggaagctaccttttgatatagcgctcagcgttgcagcctcgttgctgtggcttatccagaacatagcccggccctacgtgttt

SEQ ID NO: 233736 - DNA, 122 bp, Homo sapiens
ctgcggcggcgttggcctctcgcagggcgcctgccagcttgttgttgctgtcctgcagtgcgaaaaactcggcctcccactgtacctcgcccacggagctgcagagacacgagggtcggcag

SEQ ID NO: 233737 - DNA, 122 bp, Homo sapiens
aagccactaaggcatagtaagaaaatcgaacagatgcaaattgtttaattaactcctgttcgctaactacaaatggaaatgtctcttggccccagattgcaccctccaggccactcagcacc

SEQ ID NO: 233738 - DNA, 122 bp, Homo sapiens
gcccgagcgccccctgctgctgtaggtgtgctcacgtgtgtacacgtaggtgagcacacacgtgtttccggcgcccagagccctggaggcgccgagtgcccctttgcaccgataggaaaaca

SEQ ID NO: 233739 - DNA, 122 bp, Homo sapiens
ggatctcagcgaacccttctgaataaatgtctatattaatgaattattaactcagccacccgtgaccttaaacctactagaagcaggagcacccagggcagagcggagagctgctgaatcct

SEQ ID NO: 233740 - DNA, 122 bp, Homo sapiens
taggaaagtgtggagcttcggcactgccaaaatctgggctgggcggatcctggggctggccgggcgctgcgctgccccacagatagccccctcccatccctgacggccagggagatggagct

SEQ ID NO: 233741 - DNA, 122 bp, Homo sapiens
cacctatctggatcttagtttcttcttttataaagttaggcacttgagccccatggtcttcgaggtccctgtcagacccaagtttgatttttctccatcccttgggaacagggcagtccacc

SEQ ID NO: 233742 - DNA, 122 bp, Homo sapiens
agactgcttcgcaggggatctgttcatgatcctcaccttagtgtcaccaacagaggtggccgtgggtgctttccgtagaaagggaaggtgacaggtgaggcaggcaggagctcgggccacct

SEQ ID NO: 233743 - DNA, 122 bp, Homo sapiens
cctgggcggggttcctggagagggcgtgtcgcgagccaaaggctctcacctgggtggtcccgggagtctcgccacgtgggaggggaggagctgagaggccactggagggacgcaccgactgg

SEQ ID NO: 233744 - DNA, 122 bp, Homo sapiens
ctccgcttttctcctcaaaaaaagtccgtttttcctccggagctcctagcagtccctccccggaaatgtgataagaagatgtacctcagattctgaaagacctgtccttggcccttggctgg

SEQ ID NO: 233745 - DNA, 122 bp, Homo sapiens
cgccgccgccgcccggtcaaagccggctttgtgcccgtcccgccgcccccgcggcccaggcgattttaattagcgtctgggtctgcgccgggagatgggaatcaaagcccccgttcttccag

SEQ ID NO: 233746 - DNA, 122 bp, Homo sapiens
tctccctgcagtccttcatattctctcttcctttgcctgctggctagatgcaaaactccacgcaggatggggtcaccagctgggggagtctgagttcctgaatgactgcctggagcagagcc

SEQ ID NO: 233747 - DNA, 122 bp, Homo sapiens
cataacccgccttggtcatctgcccttctgtgttcacaaccgttcagggcacaagttcttcggtctaaccgaatctttccctgctgcggggttaagcccaacctttctttctgaccttgggg

SEQ ID NO: 233748 - DNA, 122 bp, Homo sapiens
ttcgaagatgctcctgatgtggagccgctggagcctacacttagcaacatcatcgagcagcgcagcctgaagtggatcttcgtcgggggcaagggtggtgtgggcaagaccacctgcaggta

SEQ ID NO: 233749 - DNA, 122 bp, Homo sapiens
aggcacctggttttctgggatcccctgcctaacttgtgtgcaattgcaagaaagcatatgcgttcacccggagtcttccttccctctcttgctccgtgggagcacaccacactcactgttct

SEQ ID NO: 233750 - DNA, 122 bp, Homo sapiens
ctcaggagatgtatggtcctcctgcattgcgttttgagtctcctgcaacgggaattctatcgcccaggggtgatgattactttaattacaatgttcaacagacaagcacaaatccacctttg

SEQ ID NO: 233751 - DNA, 122 bp, Homo sapiens
tcagttcctaagcagctgggttatcagtggatacagcgctgctcaccctgtaaaagattgcgggaaaaccggcaggcccttttaaggacttctgctcatttcacagaggtaattattgtttg

SEQ ID NO: 233752 - DNA, 122 bp, Homo sapiens
gcaactcagttgaaagggcaagcactaaaggaggcaaagacttgggcaacaccagagcatcgcctgcactgatcgaaggaggcctgcctcccttgcccaagaagaacccccctctggggcgc

SEQ ID NO: 233753 - DNA, 122 bp, Homo sapiens
agattgcagtaagatcgggtctttatcagaaatgttatcgcttgtcaggacctcagtctccgcgcattacgtcagtttcaagacaccaacactattaatatcaaaggagccttcgcggagga

SEQ ID NO: 233754 - DNA, 122 bp, Homo sapiens
gctggtggagctgccctttgcaggcttctttctttccaagttgcttggaaccagtgccgacgtggacattcaccacctcgcctccctagaccctgaggtgtataagaatttgctctttctga

SEQ ID NO: 233755 - DNA, 122 bp, Homo sapiens
atggctaggaggcaattttccaggtcaggactttatcctcagatggaaaacagagagcatcgcaaaactctcacctgacatgtgatgcacttccctgtagtggcagtggaggaggagattgc

SEQ ID NO: 233756 - DNA, 122 bp, Homo sapiens
gtgttgccaggaaggagccgaatggtccgctaggacggagagcctgtgcctcaggggctccgctccctgcaagaggggctctgcgcagcgccggccaccggagaggcaacggcgccctctgg

SEQ ID NO: 233757 - DNA, 122 bp, Homo sapiens
accacgtccagaagccggcgatgtgggggcaactgaggcaggggccacggcccagccagtcgagcagaactggaaggatcacagcccagccccggctcggaatggcccctcggcaaccaccc

SEQ ID NO: 233758 - DNA, 122 bp, Homo sapiens
ggtgtctagacaggttagtttttaaggactcaccagcccatgagggtattgatcactgttcgggagctctgcttgcctggcaaactttattccaaagtttgccagaatcttgtctaaaattt

SEQ ID NO: 233759 - DNA, 122 bp, Homo sapiens
catgaatattccaccccttggttaaataaatatttaaaggtagctccaaaccccgctgggcgtgatgctctgtggtatgcctgcacttttctttcttcagtacgtacttattcccgtcgcaa

SEQ ID NO: 233760 - DNA, 122 bp, Homo sapiens
ccctcttagagcagacacgacggctttccctcagaattaacactgaacccagatgggggccgagctcgctctcctcactccacccccacaggctcaaccctattaggaccctcaaccttgtt

SEQ ID NO: 233761 - DNA, 122 bp, Homo sapiens
ctgctcgtctttgtattattcacttgctccccactcccaaacagagattttgggggaattcgagcagtaatggtgggacacaaggctgccaaggtccagcctcaaaccacggatctccccga

SEQ ID NO: 233762 - DNA, 122 bp, Homo sapiens
ccccattgctcatgaaactctagtttgtatttccaagctctgtgatcgatgctgggctcacggggaagagtttctgcaatccaaagctcccatcagaatgggagcccttcctgaaccctatt

SEQ ID NO: 233763 - DNA, 122 bp, Homo sapiens
actggctttcataagcttaggattcaccttccaggaaagaaaacaaacaacataggcagccgtgatcaagtccagcctcccatgtttgaagggagctcaaaaactctgcaaagggaggcagc

SEQ ID NO: 233764 - DNA, 122 bp, Homo sapiens
agaaggtgtgagccacaggtgctcctgggtctgaccagcaagtctaacccatgaagatctcgagctccaaaaccattctagagcccaccattttgattgttacacatgtgtttcagatgtat

SEQ ID NO: 233765 - DNA, 122 bp, Homo sapiens
cccgtctctgggttacagaaccctctgcccttctggtattctctcttgccctaggagaggcggtgggtggtgggctccagagatggtcattttggcgatgtcagctacttttaaaatttcaa

SEQ ID NO: 233766 - DNA, 122 bp, Homo sapiens
acccgctgccgggtgtggactctgggaatggcgatgttcccagacggatgccgccatgagcgctcacttgctgtttgccagataaacaaatgagtgaactgatgagtggatgagaatggaca

SEQ ID NO: 233767 - DNA, 122 bp, Homo sapiens
aacatctgatgactgactaaagatgctaggcgtgacaccgttccctccaaaagcagacctcggaatcactgccaaataagtaactagacgtttacaggccatacatgtcttaccactgagat

SEQ ID NO: 233768 - DNA, 122 bp, Homo sapiens
tgcgagccgggtttggggcaacaagggacccgagtggctccaggggtggtgagatcctggcggtcgggacgcccgaattcgagcggctatgggggatgcagggacacctgggcctggcgatc

SEQ ID NO: 233769 - DNA, 122 bp, Homo sapiens
aaaggcttggccccggtgtgctttcggaagtgcctggttaactcatcacttcttgcaaaacgccactcacacccttcccatgagcatctgtaaggcttttctcctggggagagagcacagga

SEQ ID NO: 233770 - DNA, 122 bp, Homo sapiens
gcgagcctaccgccagcagcttctgcccgggcccacgcgccgttccgggtaggcccgcggcgcaggccacttccggcagcggtgcaccatgggacttgcagttcgctggcaaaggttgagtc

SEQ ID NO: 233771 - DNA, 122 bp, Homo sapiens
agcgcaaatctgtccatgtccacttcgagaccttgtaagttaagggcttctactttgggtcgtgtttggtggtccttatgccaccaaaaatgtgccagtgtttaaaagcagctgtgccagtt

SEQ ID NO: 233772 - DNA, 122 bp, Homo sapiens
gcccgccgctggcgtctccacgcagccttccggagctcccattggccggcgtcaacagcgcgcgccgtgattagctagtatttcccggcctcggccaaattcgaagggattggccggggccg

SEQ ID NO: 233773 - DNA, 122 bp, Homo sapiens
tagccctactgagggagccagaggggccctggggagatgcctggcgggcccgtctcctagcgactgacgtcccgccaccccacgggccccttgtgctgggcactgcccacccctgacactgg

SEQ ID NO: 233774 - DNA, 122 bp, Homo sapiens
ctctcccagcggcctccacggccccagcgcaagacctgctgggaattgtagtttcctgcccgccccgcctcaagctcgaaggccccgccttctcgctgcccagccccggggagggaggcggg

SEQ ID NO: 233775 - DNA, 122 bp, Homo sapiens
aggatcccccatgtgtggatgagggggggactttgcttcccagaagcacaaataaaccatcgtgagcgttttctacgacccactgaggtcccagaagcaggttttccccaggtgctttgtgg

SEQ ID NO: 233776 - DNA, 122 bp, Homo sapiens
tccaggcaggttttggggcctcctgtctggtgggaggaggccgcagcgcagcaccctgctcgtcacttgggatggagaccggctttcccgcaatcatgtaccctggatcttttattgggggc

SEQ ID NO: 233777 - DNA, 122 bp, Homo sapiens
gcgtgtagccggagccgtctctgctcattttttgtttcttatgcatggcttcccaggaaccgctcctttatctgcgtgcttggtattctgccaacagttgtctgaatttgtacactaacacc

SEQ ID NO: 233778 - DNA, 122 bp, Homo sapiens
tataggttgcgtgactgtttcaagaaatttaaatattttgtcttaatttttcagtaagttcgttggcacatgttaagactatgctctttggtttgtatatggttgtcataatagtatttgaa

SEQ ID NO: 233779 - DNA, 122 bp, Homo sapiens
cccccagggccctcacctctctggtccgctggtaaacaatcagacttattaaagccaaatcgtaggcagcacttaagggcgggaagtccacacacctgaccccaaatctaacaggcttctgg

SEQ ID NO: 233780 - DNA, 122 bp, Homo sapiens
cccacgcccacgtcactgttcgagcctcttcaaaagttaccagctctcggtctttcccttcgctgaggttaatctaaccgaggaaacagactctcggtcttttccttcgctgaggttaatct

SEQ ID NO: 233781 - DNA, 122 bp, Homo sapiens
ccacaaaccatgaagctctgggcctggcactggacagcagttctttccttgggtgtgaagcgatggctgatctgtttgcagaaaagaaaatcaacaaagaccagcaatttgtactgacctcc

SEQ ID NO: 233782 - DNA, 122 bp, Homo sapiens
gggtgcccgctcgggtgactcagcacggccttgtgggactggctttgtcacctctcttatcggacgcgttgttaaagccttcttgggtgctttgtttctgtgagggagggttgacggtgtgg

SEQ ID NO: 233783 - DNA, 122 bp, Homo sapiens
gtccgggacgtgttggagtgttacgaggggcaggaacccgagtgacacccccgccctgggcggcggtcccagtcgctatctccctcggggtgagcgggccacgccgccgactctccccccgc

SEQ ID NO: 233784 - DNA, 122 bp, Homo sapiens
tccagatttcctcatctgcccacaccttccggtgggcggggacgtgtatggacaaatttgcgggctggggaccatggaagtggaggaaatctacaagcaccaggaagtcaagatgcaagcac

SEQ ID NO: 233785 - DNA, 122 bp, Homo sapiens
tatcttctagtcccccaatgcaatggtttatctttccttcattgagtaattgaccttttgcgacttcagtttttctgaaactttactgctgtatgcaggtagccacaaccaaagaaaagcaa

SEQ ID NO: 233786 - DNA, 122 bp, Homo sapiens
taacgttttcctgggcctgagaaccttccccatgcaattccccagctagtcacacggtggcgacagtgcaccatgagccctctgcttctccctccctttcagccaaagcaaaagccaaacac

SEQ ID NO: 233787 - DNA, 122 bp, Homo sapiens
gcccaccccctgcctgggacggccaggcgctcgggacagggccacccaggcgggtgctcccggatctgccctctcaggcctcccacgccacaggcccccccatcagctgcctgctcagccca

SEQ ID NO: 233788 - DNA, 122 bp, Homo sapiens
acgctgcagcaagtgtgtgttgtgcgcctgagtttcgagctgtgcgtggaattttctgctcgtggccttgtgacggtgctcggaaaatttccgattcttgagtatctcagatttcagatttt

SEQ ID NO: 233789 - DNA, 122 bp, Homo sapiens
ggaggggtgcgcgagcgagcgaagcctggtgtgtcgggtcctggcgaagggaaaaggccccgtcgtctcctgtagtcaccccgagcccagcgccaccatcttgggagacacacggatctcgc

SEQ ID NO: 233790 - DNA, 122 bp, Homo sapiens
tcacaaccaccagcggatgcaaaatgtgtgcctgtgttgagtctgtcttttaatcccgaacgtaattctaaaaagcagcatcagacaagagctttattaatcccttacacgagcaaatgcga

SEQ ID NO: 233791 - DNA, 122 bp, Homo sapiens
tgggcgagaacccccgatccaccctcccagtgtggggcagggaaaaggcagagtgcaaagcgaggtctgattttgcagaagctttttagaaattcgctgtcagagaaactgaaagaccaaac

SEQ ID NO: 233792 - DNA, 122 bp, Homo sapiens
aaggaagtggaacccaagcaatgctgagcaccccggtgcggaccacagagcagaccctggcgccaggaaggagcatgtgttagcgtctcgtcccacctggaattgtaataaatacatctaaa

SEQ ID NO: 233793 - DNA, 122 bp, Homo sapiens
ccagagaacagcaagtacgcccccgtccccttctccccttgccagccccacaggctgctgcgcctcccgggcgtgagcccacgccgtcaggcccacagctgccctcccagccctcttccccg

SEQ ID NO: 233794 - DNA, 122 bp, Homo sapiens
atgttcaatctttttaaatctttcccagcctttatttctcatctgcaaaatgacgataatcgcatttgaaattctccgttttcaaaatgcaggaatttattaaaggatacgtaggctgggga

SEQ ID NO: 233795 - DNA, 122 bp, Homo sapiens
agtaacctgttgcagaaaagtgaaagtatatccgcaacagttggctctgattgcagagagcgcgcttgtgagaactgatggcgggtacgcgcagaaaatctttgcaaaacaggcaagtggga

SEQ ID NO: 233796 - DNA, 122 bp, Homo sapiens
taagggagaatttccctagaaatctgtgataaataagctaacacagccacataacaaagacgttttgttactaatgggctaagactggtttatctgggcatactatttaaaaaaatggatat

SEQ ID NO: 233797 - DNA, 122 bp, Homo sapiens
catctaaatccctacaaataactgtcatcaggtggacttttaagaaaacccccagctactcgggaggctgaggcaggggaatcgcttgaacctgggaggcggaggttgcagcgagctgagat

SEQ ID NO: 233798 - DNA, 122 bp, Homo sapiens
gaggaaattcgcacaataccagttagggagacatactgtgtgtttcccaatgtcactgcccgcatgttcaatgtccctgtatagcaggaggcactgtggctccctctcttctctccagttat

SEQ ID NO: 233799 - DNA, 122 bp, Homo sapiens
ccgcacctgtgcagtaaactgcgccttctgctgctcggcggccaccaggcgctgcaactccgcttcatcggcttcgcccagctccgccattgttcgcctcaggctcgccaccttccgacagc

SEQ ID NO: 233800 - DNA, 122 bp, Homo sapiens
tcactacttgtagccaggcctttggtcaccagatggggatggggagcttcctatgacacacgggactcacacatcacttgccaaggaccacaactgccagggacctcgagcatcaaatgctt

SEQ ID NO: 233801 - DNA, 122 bp, Homo sapiens
taattagaagattggggggatcatctgagatctctctctctctcttgctctgggggtaatcgggtcaaggaaaatgagttttggtgtttttttgttttttggggttttttttccctaaaagc

SEQ ID NO: 233802 - DNA, 122 bp, Homo sapiens
tcgctgactctgccaaacacgccattagggcccgcctgggagggcgctaccctaatgaagcggctctaagtcacctttgaaaggaaatccccgggcccaagccttgacctgcaccggggcca

SEQ ID NO: 233803 - DNA, 122 bp, Homo sapiens
ccctttggcttctcctgtcccgcatcattaccccggcccacagccccatttgcctgcagtcgctgcctttgctcctgagaaggtctgtagcctcgtttcgggcccgtattgagcccccttct

SEQ ID NO: 233804 - DNA, 122 bp, Homo sapiens
gaaagggaaaggtgcatttgctctcaggctccgcctaggacacacacaccaagatcttcccgggctgctggtaaaagccaggatgcaacagcctgagggtcccagagcgaggaagaaggatc

SEQ ID NO: 233805 - DNA, 122 bp, Homo sapiens
gaccctttggggcgctggccaggccggagtagagatggcggccacgcagccagaggaaggcggccctgaattaatctgtcactaaagcttggccgtggcaggcgcagtcatgatttagatga

SEQ ID NO: 233806 - DNA, 122 bp, Homo sapiens
aaagagagctggcaaagggtgcgtgagatgcaggaaacacaggggacagagtgacagaggcgtggtggcagcgttagtgcacttctctggaagcaagactttctgttgtgttttttgttttc

SEQ ID NO: 233807 - DNA, 122 bp, Homo sapiens
cagccccgagggagccctgcgcttgtttctaagaataggtggcttccgggatctggagttcggtttttctaaatacacctcagcccggagactcggaggcaggcaatggggccaagtaggca

SEQ ID NO: 233808 - DNA, 122 bp, Homo sapiens
cggttgccgcgcggcatggtatttatctgtgggttcagtgcgcacagcgttgtccagtctcgaaaccaccctaaaccggcattaaaccccaaccaaaatcccctttaacccttccctagaac

SEQ ID NO: 233809 - DNA, 122 bp, Homo sapiens
ctgcggagtgctcctggcgtgtgacaagtggcttccctcttcttatttctaaaccttgtgcgtgtggattcaggaccacaatttcaactccagggaagggggactgtgccagcaccactcca

SEQ ID NO: 233810 - DNA, 122 bp, Homo sapiens
cggggtgacaggccctgactctgcagagcaggactgtggaaaatggacactgatgctgcccggtggatccaggcagggccgggatgtttgcaggacccacgggacaattagaacgactgggc

SEQ ID NO: 233811 - DNA, 122 bp, Homo sapiens
tgggaccccctggtgacaaccctcacccccgtgccgcctgtctcctttcttccccaggcccgcccagagctgagctccgtcctccggctgctgcccaaatcaggggtcgtggacaaaggatg

SEQ ID NO: 233812 - DNA, 122 bp, Homo sapiens
cactacaccagcaaaccagctgctacaccagtataccagcggccacaccagtaaaccagccgctacaccaataagccagccgctacaacagtaagccacccgctacaccagtaaaccagccg

SEQ ID NO: 233813 - DNA, 122 bp, Homo sapiens
gagcccagatgcactcgtgtggaaattataaaggcagggccaggcaggcgggcggccaatcgccactgggctcgtcacgacagcctccttcagctccaacccggctaattaatccccactca

SEQ ID NO: 233814 - DNA, 122 bp, Homo sapiens
agaaggaaattgaggtgctggagcgtggagactccgccccagccactgccaaggagaacgcggcggccccgagcccagtccgggccccagccccgagtccagccaaggaggagcgcaagaca

SEQ ID NO: 233815 - DNA, 122 bp, Homo sapiens
cacacaaaacaaaatcagcaaagaaaattagcaagggcagaggcccatggggcgatgtcccgaggacaccaggcttgagcttccagaatcctctcccagcggggtcgtgcaggacgcactta

SEQ ID NO: 233816 - DNA, 122 bp, Homo sapiens
ggtggattgagtgagaggccccagccaggagggcgctgtgtggccgggttccaagtgaagcgcagagagatgggcaccaggcgccccttctgtcccggagaaggcgtttgtgagcatttgtc

SEQ ID NO: 233817 - DNA, 122 bp, Homo sapiens
gacagggagggctggggagcaaacgaaggcatcccgagcttcaccgtgcaccaggcactgcgcagccgttcccacatacccagccctgtctccactgcacagtcgatctttaaggaaggcag

SEQ ID NO: 233818 - DNA, 122 bp, Homo sapiens
ggagagagagagagggagggagaggaaaagtgagagagggaaagagagcgcgaacgagggcgcagagcgagctcctgctgcaactctgctccagcacggccagcgccagcgcccgccgtcgg

SEQ ID NO: 233819 - DNA, 122 bp, Homo sapiens
ctagcctgctgcagaattgtattgtgggagtacaggaatgcactctgggtcatatcaacacgttcataaagggaaagttttcttttcagattgagaggggtgaccttatattaattgacagt

SEQ ID NO: 233820 - DNA, 122 bp, Homo sapiens
cgcgacttcactcatcagcctaatgtgtaaggcatggggttttgtggcttgcttttcgtccgtgtttttgtattgctttggcaattctgtccttagagctgcgagtcacacacatccaggca

SEQ ID NO: 233821 - DNA, 122 bp, Homo sapiens
tagcctcttaatcctgccatgctggatcttaatgaggtgcacgggtcccattagacagcccggagccctggcattagcacattagtcacacgctctgtcaggctcacgctgggtcctcagct

SEQ ID NO: 233822 - DNA, 122 bp, Homo sapiens
ggaaggccaggagccggcgtagctgggaccaagggtgccaggggtcgaggccgagcctcacgggctgtcactgccctgcaagcggtgcctcgggggtctggacatacctgggacatgagcct

SEQ ID NO: 233823 - DNA, 122 bp, Homo sapiens
taagtgaatttagtctggaaacacttatggtgatgatcactgcttctctcttctgtcatgcgctactctttgaaacccttaaaattccttcaatccatgtaaccttaatgacatcactcttt

SEQ ID NO: 233824 - DNA, 122 bp, Homo sapiens
gggtggactctcaactctaaattaagagtctatttctaaggaggaagatttcataggccccgaggttctgtatggcctgctcacatttcaagggttgacctaaaagctggaggctttcagaa

SEQ ID NO: 233825 - DNA, 122 bp, Homo sapiens
ctctgattggctacctcagagcaaggggcggggcggcggaggacccgaagggcgcgagagcggaacactgcgtacgcgcacttccggtctttgtggcttgcagctcggggtgggtggctcat

SEQ ID NO: 233826 - DNA, 122 bp, Homo sapiens
aacccacagttttaatcatgcttttgcttggcaagccgatttctctaagccagagtgagccgcaaggagagcccacgggtattcatttcacttactcttttcctgtgccgggtagtttgagg

SEQ ID NO: 233827 - DNA, 122 bp, Homo sapiens
cgggagaacagcatggcccgctgtgcacatcagacccctggtgacgacactgtggtccaccgcagccggagtcaggtctggacacagaggctgccttcgtctttctcacctgtacctgtgat

SEQ ID NO: 233828 - DNA, 122 bp, Homo sapiens
cgcgacggaaacgacacacctgaggggacccggcaggagcactggcacagacagcagacacgcgcttcaggcccacatggcgcaggaagaggcggggctggcggaagaggcggggctggcgg

SEQ ID NO: 233829 - DNA, 122 bp, Homo sapiens
agacggcggcttgggagctggctgtgctgcaggtgttgggtcgggtcgggtcgggacgggcgggagaggacgagacgggtcgggataggttggggcggggcggggcggcactagactcggga

SEQ ID NO: 233830 - DNA, 122 bp, Homo sapiens
atggggcattgtcagctgaagatgtggtgtggaccaggacaggcagaaagaggtcaggcacggtggcttcacgctgataatcctacccgctttgggaggccaaggctggaggattgcttgag

SEQ ID NO: 233831 - DNA, 122 bp, Homo sapiens
accaaaccagagatgctggtgagtgaagagcattcaaatggacatttctagaggaattctcggggtagagtgcaggcatccaaactggtgtttcccaccaacttgctgtgtgcatttgaaga

SEQ ID NO: 233832 - DNA, 122 bp, Homo sapiens
cggctgagtcaggctctggcagtgtctaggccatcggtgactgcagcccctggacggcatcgcccaccacaggccctggaggctgcccccacggccccctgacagggtctctgctggtctgg

SEQ ID NO: 233833 - DNA, 122 bp, Homo sapiens
atcaggaggaaaccacacaaaggtgcagtctcaggtgagagctgagccccagccagatcccgcaggacactctgcagccttaacgatgtcccagagctcatcccacctcgaagcaaggcagc

SEQ ID NO: 233834 - DNA, 122 bp, Homo sapiens
gcaagcaaggatgcccgacgggagcctcgacctgggctgcaggccctggggtccgtacaacgccgacagcagctctgcctgtgacccaggccagcctgacgcatggcccagggcagaacatg

SEQ ID NO: 233835 - DNA, 122 bp, Homo sapiens
tctgaagaccttgcagagtctgactgacatttgtgtattttaagactattctcatgacagcggatattgagtatttccattcaccagctagtgtggaaatatttgaataaaatcaatacagc

SEQ ID NO: 233836 - DNA, 122 bp, Homo sapiens
cctgacttccagatgtccaggtgggcgtgcagcacatccccacccaggggcgagcgctggcggaactgctcctccgacatggcgcacagctccttgcccgccagctcctggaaggccttgcc

SEQ ID NO: 233837 - DNA, 122 bp, Homo sapiens
cgatatttaagattccaggaggcggtgcgttgccacggagacggagcagggctactaggacgcacgcgcgagatagaacctctagtctcgtggagagattgaagatggcggcttctcaggcg

SEQ ID NO: 233838 - DNA, 122 bp, Homo sapiens
gctctggtgtcagatacacagggttttaaatcgaaggtagctgcttgagtggtgggaccacggggtggaaagaacagtgtgggttttagagccaggcacacctgggtttctgtccaggctct

SEQ ID NO: 233839 - DNA, 122 bp, Homo sapiens
caggcgcaggccagaggccaagggagaggcgatccctggggctctgcccgggtctcaggacggcacctcacccgcccgagtcctgctccacaggattctccgggtaagctagggaaggaaga

SEQ ID NO: 233840 - DNA, 122 bp, Homo sapiens
actggagctcgcttgcagacaccttcaaatcgagtggtatttaaagctccctctcaaacacggaaaaaccctgacatcaaactgataccaagagcccactttttctctgtaagttggggcca

SEQ ID NO: 233841 - DNA, 122 bp, Homo sapiens
aacggttccccccagagcctgccgaggcgggaaacggttcccccccagagcctgccgaggcgggaaacggttccccccaagagcctgccgaggcgggaaacggttcccccccagagcctgcc

SEQ ID NO: 233842 - DNA, 122 bp, Homo sapiens
ggtgaatcagacacttgaacatctgtccacttcatggaagacgtttcatctcagaatacacgtactaataaacaacagttggagacaattgtctctgacattcaacataatgctgagctgag

SEQ ID NO: 233843 - DNA, 122 bp, Homo sapiens
gacgtggagctggggatagtgttgatggaaataatgcttccaggcaaccacaagagctggcggggccagatccaccttgttcaaaaccagcaccagggccagtccaagttctccagtcacat

SEQ ID NO: 233844 - DNA, 122 bp, Homo sapiens
tttgcggagagtggacagcaggggattgaggagaccggctgggactgggaaatgggcattcgggtcgcatgcccaccgcagtggcccagagcccctgtccggaccgctaacaagttgcttag

SEQ ID NO: 233845 - DNA, 122 bp, Homo sapiens
agttgagtagctccggggacccgggcagcgagagggcaggggcatccgccggccgggaggcggactcgcactttgcctcaactctgagccccatcccgagcgcaagggagagggcggcggag

SEQ ID NO: 233846 - DNA, 122 bp, Homo sapiens
agtcagagggcggcaccctccccggtctgggccgagttattggctggtggtagcgtcgctcgcccggcagtaccacgtgacggcctcggccgcgggcgtttacactggctctgcctccggca

SEQ ID NO: 233847 - DNA, 122 bp, Homo sapiens
gagtgtctgggaagttgccgggtggggtctcacgctggggccagcgtgggggcttactgccggcaggtgtcatggaaggcttcgagggttcggaaatccctccatgtcgggggaaggccgtc

SEQ ID NO: 233848 - DNA, 122 bp, Homo sapiens
gggaggacagtcaaagagaatggactcaaggccgtcagagcagggctggaacccatgactcgccatgagtttacccgggcatgtaggtcccatttgggacaagggacagaacctttgaaacc

SEQ ID NO: 233849 - DNA, 122 bp, Homo sapiens
aaggcgggcagatcacgaggtaaagagatcgagaccatcctggttaacacggtgtaaccccgtctctactaaaaatacaaaaaattagctgggcgtgatggtgggcggctgtagtcccagct

SEQ ID NO: 233850 - DNA, 122 bp, Homo sapiens
cgactggccagaggtgcccatttctcgggtgacgctgccctctggcggcagcatacctcacgcctggcggcgggaagtagccctctttcaactcacgatctcattttgcctcttagagtccc

SEQ ID NO: 233851 - DNA, 122 bp, Homo sapiens
tcaaggtgctggggcggggccggactggggctggaggcggggccagggcccgggcggaagcggggctggagtccgaaccagcgcagcgcggggcggggcagcgggaaggtagtcggaggcgc

SEQ ID NO: 233852 - DNA, 122 bp, Homo sapiens
gaggcgagggcgggtgccatctttgttgagggccaaagcgggccctagtccgttaatttacgcgggagatggaaatgaatacagccactcaggaatcctcaaagttcctaacctcgtgtttg

SEQ ID NO: 233853 - DNA, 122 bp, Homo sapiens
gaggcttgaaccaaaggcctctgcaatgttgtcacactcatgaggatgaatggtcctttccgcctacacacagaggggcaagggcttcaagctctttctttccttgactgtgttatcagctt

SEQ ID NO: 233854 - DNA, 122 bp, Homo sapiens
agcctttgccaatgagcgagtcaatttcgtagcgctccagccagcgctcgccactgcgcacgatgtagtcatggttgtcgtcatcataaccatggttcaggaccttcttctccttcttgttg

SEQ ID NO: 233855 - DNA, 122 bp, Homo sapiens
atgcaagcaaccttcaccaggactgcagttcacacaggctccagttcagaggcaattatccgacgccatcagatgcctgtagaccttgcagacagtcaaagatatgcaaatccagacgtgcc

SEQ ID NO: 233856 - DNA, 122 bp, Homo sapiens
gccacactggctgggagcttggaccagatgatcctgatgggtttcttctgaataaaattccgggttgtgtttatcttgcagtttaaatcactgggagcttcgagagttctttggctccttcc

SEQ ID NO: 233857 - DNA, 122 bp, Homo sapiens
catctggaagggctgggagttgcttcctgggatggggagctccgaagccaattcagaagacggccccggggtctggcggggaggcccaccgctgcccagagggctcggccggccgggagggg

SEQ ID NO: 233858 - DNA, 122 bp, Homo sapiens
cctaatattggagcatgcatcggaatggcctggaaggcttttaaaagcacactggccaggcgtggtggctcacgcctgtaatcccagcactttgggaggccgaggcgggtggatcacgaggt

SEQ ID NO: 233859 - DNA, 122 bp, Homo sapiens
gtcagtgccaggcacgcagggagcgtcagggacaaggatgcgccctgagggggcgttgcccggagtgctcgggccgccaagggggcgggctggcggtttgtgcgcatgcgccgggcttctgc

SEQ ID NO: 233860 - DNA, 122 bp, Homo sapiens
tctgccactgtcaacatacagtccctccagagaagtacccctcatgttacaaatggggcacgttcaccagactcagcttcaggacaagaccccaggtcattcccaactgaggctccgaggtg

SEQ ID NO: 233861 - DNA, 122 bp, Homo sapiens
tctgcaggctgaaggctaggcgcctcgccactctaggactacaattcccgagaggccttgcgacggaagccatctttgttccccaccaggctaagcgattttccggagggggagtaagatcc

SEQ ID NO: 233862 - DNA, 122 bp, Homo sapiens
gcttggaggaagaggacgagagggcggagcaggatctccctacctctgagctcttagaggcggatgatgggaaaatcgacgctgggaaaacggagcccagttggaagattaacccaatttgg

SEQ ID NO: 233863 - DNA, 122 bp, Homo sapiens
ttggggccctcagcaggagcttttggcaaacctgaaggtatcaatgccttgggacaaggacgtgcaaaagacaagtatgagatgctgaagatgtgctacttctgattcaaaatagtgttcag

SEQ ID NO: 233864 - DNA, 122 bp, Homo sapiens
cctgcctaatgttatgcaacctccttctgatgtatccaccaaaccagtactgaatgtggccgagacgttttcagtaaatcttattacctaccgtaaccctggtgcacaattctctttctgtg

SEQ ID NO: 233865 - DNA, 122 bp, Homo sapiens
cagcctcattttacccagcccctattcaagatggagtcgctctggtttgaacgcctctgacggaaaccttccaaatgtcagagacaaggcaaagtagcttgggtcaccaggtgggcagtggt

SEQ ID NO: 233866 - DNA, 122 bp, Homo sapiens
ctaggccccgcctctacctggtgcccaatgctcgagtgcctcctcgaatcctgcccctcgcgagacccgcccccagcgggcaccgcccctaactgccgacctcagagccccacccccccacc

SEQ ID NO: 233867 - DNA, 122 bp, Homo sapiens
aaagctggtaaactgggtctttgtcatttgctttaaaaaaaaaaaaaaagaaaataaatgcgaatgtgttggtgcattcttcctgagtgggatctggagcttttttgtgtctgtgtatgatt

SEQ ID NO: 233868 - DNA, 122 bp, Homo sapiens
cacggacgccacaaaaaggaacatctacgacaagtacggctcgctgggtctctacgtggccgagcagtttggggaagagaacgtgaacacctacttcgtgctgtccagctggtgggccaagg

SEQ ID NO: 233869 - DNA, 122 bp, Homo sapiens
gtccttaaatacattctaaagtgtgtattggtggtgagtttcgggttctgcccagtcctccgactttccgcttcctttgtgtttcccacgcacaaagccgaaatcgattctgcgacaattag

SEQ ID NO: 233870 - DNA, 122 bp, Homo sapiens
atacacaaactcccataaatactccctttcaatctaacacagaagacggggcaggacggacgcagcagttggggcgtcggaagttctgcagcatggactggaaaacactgtgctgccttcct

SEQ ID NO: 233871 - DNA, 122 bp, Homo sapiens
agatgagcggacttaactggccccaagacacacagttggcatttgtgatcatctggctctcgccgaggactttgccagtggcctaaccttcctgccaagaagctgggagggcgggggttggg

SEQ ID NO: 233872 - DNA, 122 bp, Homo sapiens
acaccacattgcgtgggtaacgccagacttctagacaattttgatgagagaacctggatacgctggttgccggtgaaggactcacccgcttattatggttttttttttcattatttattatt

SEQ ID NO: 233873 - DNA, 122 bp, Homo sapiens
cagaaacacaaactctgcactctcccttgaagttcagaggcgctgctgtgtctgggggtgcgcatcttctcgcaggcccggcgtggggagggagccggctggggaggggaccacctggagcc

SEQ ID NO: 233874 - DNA, 122 bp, Homo sapiens
gtggtgtttccgggaagatggcggctgtcgaagcggctgcagagccggtaacggtggtggcggctgttgggccaaaggcgaaagacgaagaggaggaggaagaggagccgctgccaccgtgc

SEQ ID NO: 233875 - DNA, 122 bp, Homo sapiens
gcagacatgtgagtagcaattcttgcattacagcagcagtttgcggtgcttctgtaacttcgtaaatacctattatttgaacaacaagtcaaataaaaaaccaaatagacctggagtgaact

SEQ ID NO: 233876 - DNA, 122 bp, Homo sapiens
atgcacacacgtgtacataacatgtgcgtgcataaacatgcctgcctagatctacacacacgcatatgcacacatgcaagtacatgcacatggacagtgtgtgcacatacacatgcgtgacg

SEQ ID NO: 233877 - DNA, 122 bp, Homo sapiens
tcgcgagagagagtgggaggcgtggagagtaggcggtgttgcgggccggagctgcggcggcggcggcggcggcggaagccgaggggtgggcagggcgggggcgggccgcggggctgggaggg

SEQ ID NO: 233878 - DNA, 122 bp, Homo sapiens
gggtggggactgacccctgtgagaatccgaggaaatgaacaaatgatccccctaaatgtgcgcataattttttttttcttggctcggggagtgggggcataagtggggctcgggggcctctg

SEQ ID NO: 233879 - DNA, 122 bp, Homo sapiens
atacctactgagactactgctaagcagcacagaaagatacaatacactgtttttatagcacgacacaaagatcatgggtggcacttcacatgacagggttagattcagtcttctgagttttc

SEQ ID NO: 233880 - DNA, 122 bp, Homo sapiens
agcctgggtgacagagtgagaccctctctctctcaaaaaaaaaaaaaaaaaaaaaaaaagcgagaaaaaaagaaagaaagaaaaagaaagaaaaaaaaatactgaggagtgaccctttcctt

SEQ ID NO: 233881 - DNA, 122 bp, Homo sapiens
accctcgtctgggctacggtgtaggcaggcctggggtgagacccggtcagcctcctgacgcggaggctggaggctggtctcctggggccggcacccacgtggcaccatctcttgctctcagc

SEQ ID NO: 233882 - DNA, 122 bp, Homo sapiens
ccgaatcttccgggggggggggggggggggtggctggccacaggcgcctgcgcagtgtgccgctttgcgttgctttaagagggaaaagccaaatacagaaagttggagtttgcgaagacaaa

SEQ ID NO: 233883 - DNA, 122 bp, Homo sapiens
ctgcattttaacaactcccaggagtgttagtggggctggtttgtggactcgcctttgagtcgttggtctccgctcaatcaatattagataaaatgacagtattgggagaaatccagggggct

SEQ ID NO: 233884 - DNA, 122 bp, Homo sapiens
aacagaaaaacggccataaggacaaccactgcaggttacccgagtcagcctgtcagatggcggggcccagtcccgaaaacctctaggggctcagatggtcgagcctgagtcggtgcttgggc

SEQ ID NO: 233885 - DNA, 122 bp, Homo sapiens
ccctcggcctgcacgggtaagaaggcccgtagccgtgcagctttcccgggctggagcgggcgctccccgcgcgctctctctccccacccggccgacaggtctctttgcccgacggggtcggg

SEQ ID NO: 233886 - DNA, 122 bp, Homo sapiens
ggaggctggccctgggacagcaggcggctccgagaacgggtctgaggtggccgcgcagcccgcgggcctgtcgggcccagccgaggtcgggccgggggcggtgggggagcgcacaccccgca

SEQ ID NO: 233887 - DNA, 122 bp, Homo sapiens
acaagctcttggaagttaagttggtacctctcaaaagttttctgcggaagtaccctttgtcgccagagcatcatttccctgtgctggaggaatgggataaagggaggctgccagaaaggtag

SEQ ID NO: 233888 - DNA, 122 bp, Homo sapiens
aagtaagaaatgttcacgtggaatagctgccattaatatgggtgacctcaaggttagtatcgctcagggaatgcctttcattgttctgtattgtttgtttcccttttgtgaaattctgtggc

SEQ ID NO: 233889 - DNA, 122 bp, Homo sapiens
ggcacatctcagcacgggcatataatttgtgtggccctgtgctaggaacctggagtagagcgtgtgctccgagatcttcgcatcttccggatctttgaggggacaaatgacattcttcggct

SEQ ID NO: 233890 - DNA, 122 bp, Homo sapiens
tcccacctaagtgtagatgatattctttctctgtctgaaatagcctatctaaaatacccccggaaaaccacctactttgcttttaaatctcagttcaactaccatctctcccatgcagcact

SEQ ID NO: 233891 - DNA, 122 bp, Homo sapiens
ggtccctgagctcggtgagtggggcgggtagagccaccaggggaatcaacagtggtttctcgtgcccctcagggtcaggagcagtctgatcaaaaggagggcatccactgtccggggccatt

SEQ ID NO: 233892 - DNA, 122 bp, Homo sapiens
acgcggcaccggctggtggcagccacagtcaccaggcaggatgaaggcacctactcctgccgcgtgggcgaggactctgtggacttccggctccgcgtctctggtgagcacgctgtgtgtgc

SEQ ID NO: 233893 - DNA, 122 bp, Homo sapiens
tgaaactgggcacccaaaactcatgggggcacaatcctggggcacctgcaggaggagcttcgcatatttaaataaataaacctagcatgctgaatgcacgtgacaccgactgacttcaggga

SEQ ID NO: 233894 - DNA, 122 bp, Homo sapiens
tctacaccctgagtgctcctccagagactgcactggttctcccttaaatggaaagctttccggtctcatggacagatttttccgagcaggccagggatgatgttttatgctagtcactcctg

SEQ ID NO: 233895 - DNA, 122 bp, Homo sapiens
agttgcaaagtgaaccacgacaaacgctgctgctggtcttggccagtgacggggaccctccgccaagaggaggaagccctgcaatcgggcaggatcagggcgaactttctctccaggtccca

SEQ ID NO: 233896 - DNA, 122 bp, Homo sapiens
agagggcactgctctgcctataaagttatcacccttttattcccttttttttttccgagacggaatcttgctctgtctcccaggctggagtacagtggcacgatctcagctcactgcaagct

SEQ ID NO: 233897 - DNA, 122 bp, Homo sapiens
caccccagacgatgggcggccaggcagagacactcctcacatcctagacagggtggcggccgggcagaggctgtaatcttagcactttgggaggccaaggcaggcggctgggaggtggaggt

SEQ ID NO: 233898 - DNA, 122 bp, Homo sapiens
gcccgggacaccgcgaagcagaggcagtgtttcagggagaggagctgggccgcggcggcccgggcgggcaggagatcctgaacccccttagcctcgtacaggtcccgcaaactcggcagcct

SEQ ID NO: 233899 - DNA, 122 bp, Homo sapiens
gaatttcaatataacatataggcaaaagctgtcatttggagtacataggagctgcagacacgcagaagcacatggacagatgcatctaagtgtccatgttggcattctggattggtaagagg

SEQ ID NO: 233900 - DNA, 122 bp, Homo sapiens
ggggctctgcgtccatcaggggcaaagccacggctgagaccatcagggcctcggggcagccggagcacaggcacaggaaaggtcactggagcctgcattgtcttggcgaggtccgtggctac

SEQ ID NO: 233901 - DNA, 122 bp, Homo sapiens
tcctaaatcctcaacagctattccacttgggttatttaccctcggttcgaaatgcttctacgtctcactttacctacccatcccgcttatagtgcatcccgttccccatccacctctttctt

SEQ ID NO: 233902 - DNA, 122 bp, Homo sapiens
aggagccccagcggtgacttccccactcggggcccggtcggaaaacgcaaagggcctgcgcgcgatgacctccagggcccctcccaggcccagtgtggaactccctaacaccctcgctcgcc

SEQ ID NO: 233903 - DNA, 122 bp, Homo sapiens
acttgagcaggaagtcataggcctggtcggggctgcccggggcgctcatggtgctggccccgcactcccgcctgagccaggcccgcggggttgtgcgcagaggtggtgccgggcctgttctt

SEQ ID NO: 233904 - DNA, 122 bp, Homo sapiens
tcgggccatgtcagactctttttattccattgtacagatgaggactttgagactcagagacgtgaagacatctgcccaaggtcatagggattaacagcttggccagggctaagcacaaatcc

SEQ ID NO: 233905 - DNA, 122 bp, Homo sapiens
gtggctccagaacacatcagggccggggcaatatgtcttgatgctgcctcttcatgtccccgtcacattccagaagtgtcctgagttgtgccatgggatatgtggtgtctgcagcaaccccc

SEQ ID NO: 233906 - DNA, 122 bp, Homo sapiens
gagccatggcgggggggaggagaggcgccatagccaggccagaacaatcgagccgctacacgggtggcttacccccaccccgcccacactcactgctcgtcgcctgcccgtggccacccgta

SEQ ID NO: 233907 - DNA, 122 bp, Homo sapiens
ggcctgactgccgagaaactggaccaggcgccgcggaacctcacccaccgggacttcccccgagcggctccaagtcagtgactgaatcccagtcagctccttacaccactggggccagatga

SEQ ID NO: 233908 - DNA, 122 bp, Homo sapiens
cagggaacaaagccagctaacgctgcagctatgaataaacctgtctctttttcaaaatgccggcctgatttgtactttgagtagaagtggagaaccatctttcatctccacagtgtctacaa

SEQ ID NO: 233909 - DNA, 122 bp, Homo sapiens
gcccttgtaacagagtccaggggaacgggatgggtgcccttgttacggagtccgggggaacgggatggctgcccttgtaacggagtccgggggaacgggatgggtgcccttgtaacggagtc

SEQ ID NO: 233910 - DNA, 122 bp, Homo sapiens
tttttaaaatgaaagataacttgacgcgccaacagctcacagaatcaaagaatttcagcgcgagaagaggtcttaaacatcatttagtctaaaggctttcaaaactttttaaagctgcagcc

SEQ ID NO: 233911 - DNA, 122 bp, Homo sapiens
tcactaaaagggaagtacaaaggctttgttttttcagatcctatcaaattaatactgtcacgtttggaaaatgttgctctgttttgatagatctcttagaaggatgtgtcttatgcaaatag

SEQ ID NO: 233912 - DNA, 122 bp, Homo sapiens
gagtgagctgaggtgggggtgcacgaacgctgcagaggaggttgggatgggagtggccggcgtgaagccactgcctgtcaggtttctccgctggagtcccctgtttgtctctgtcattactc

SEQ ID NO: 233913 - DNA, 122 bp, Homo sapiens
cacgcacgcgcgcgcgcacaaacacctctccctgctgtcaatcatacatgcgcgccatagcgcgcatgcgcactggtggactccagcccccaccgatcctacgccctgtctctgcgtctggg

SEQ ID NO: 233914 - DNA, 122 bp, Homo sapiens
agctcctgaaggcctgtccttaatcaggtgtctctgtctcaggaactgaggctgcgactgcgcccatcaaatggccatatacctgagactggtgataatcgtattcatttgccactaacttg

SEQ ID NO: 233915 - DNA, 122 bp, Homo sapiens
gggagtcacgacgccttgtctttgtacttcaggaatgattacgaatctttgtaggtaaagcggcagaatgccacgtcctctcctggttgccaggacgtgttccttgtggtttaattgccggg

SEQ ID NO: 233916 - DNA, 122 bp, Homo sapiens
aattgtctgtctgcgtgctgtgctctgggattctcttgtctcaatcaacttcaattttaacgtggccgtaacgttaagattaagacctagaaatgaaaacgtacccacctttcttattacaa

SEQ ID NO: 233917 - DNA, 122 bp, Homo sapiens
ctttaaggaaaacaacccttaagggaagcaactgagagctgggtaagaagaaagcaatcacgtgctaaaatcttccggagaacaaaagttagtgaaactatcttagacccctaattcagaac

SEQ ID NO: 233918 - DNA, 122 bp, Homo sapiens
cccctggagtcgggagatgactaagagggagtccctgaggtctttgaagatgtgtacaaccgagttctacatctgaaagccttagaaattcccccaaccctgcagggagcttgggtgggtga

SEQ ID NO: 233919 - DNA, 122 bp, Homo sapiens
gatccgttccctggattgccactgcgagtgatgtggcacacggagtcatcctaaccaacccgttggggccctttgaacaaaggactgcctttactcctgacttttctgacaagggacaacgg

SEQ ID NO: 233920 - DNA, 122 bp, Homo sapiens
cgaggttaaaaaaaaaaggttaaacataaaatggcggcgggctggatcggatcacgtgaccgccatttctttccttcccacccaaaggaaagcccttccttcagagcaagcgcaagacatat

SEQ ID NO: 233921 - DNA, 122 bp, Homo sapiens
ccgtttcaaacacacgcctgtgtccgtgaggagtccgagaggcagagctggagcgtcgcccggaagctgccctctgtggccatgagcgggtgtccagccccttccaaggctgcaccggggag

SEQ ID NO: 233922 - DNA, 122 bp, Homo sapiens
gcagcacgcgcctcaagtcctcttctctaactggatgacttggtcttcactcaacctaaacgtgccgcagaaacttgggtgggtggagggtctgggtgtgaagacctcggtgcctaacaggg

SEQ ID NO: 233923 - DNA, 122 bp, Homo sapiens
acgttctcacgacctcttgccctctgcacagatgggcggggctggagcttccacgagggccggcctttccggggattaaaaacccactgaaaggtctgagcctagctaccaagcttaaatgt

SEQ ID NO: 233924 - DNA, 122 bp, Homo sapiens
agatcacctggggaccttgttaaagtgtggattccgatcaggtggtctgcgcctgagattcgcatttccagcgagctaccaggtgatgcagacgctgctggtccagggaacgcacagtggag

SEQ ID NO: 233925 - DNA, 122 bp, Homo sapiens
cgagaaggtaaccgggcgaccgagggccggggaggggcaggacctctgggggcttggctgcgcggggatgtatcctcagccacctccatctgtgtaacgccccaggtacctcccccagttgc

SEQ ID NO: 233926 - DNA, 122 bp, Homo sapiens
cgagactcaaggggaagcggctcagcccactggctcacggccgccaattcagccggaggccgacccaagcctacactgcccctcacacctgacagaaaagctgcagactcgggggttacccc

SEQ ID NO: 233927 - DNA, 122 bp, Homo sapiens
accacccgaaaacaggtgctaggagagaagctgagaggagcaccggtcacgccccggccccgccctctgccggctctaaagcgcaaggtctctccgcctcgcgccccgcccctgcctcgtcc

SEQ ID NO: 233928 - DNA, 122 bp, Homo sapiens
gcaggtgcacaggtcaggcccgccccgcccctaatgccttctacccccattacccacccccgccccgcccgccagtcctccatagtccgctttttagggaacctgctgagcaaactagctgg

SEQ ID NO: 233929 - DNA, 122 bp, Homo sapiens
ggagggaggcccctgcacggcaaggtggtggccacatgctccagaataggacttgggctccgcactgcagggaacgggacctgggctccgcgctgcggggaaggggacctgggctccgcgct

SEQ ID NO: 233930 - DNA, 122 bp, Homo sapiens
agcgattctcctgcttcagcctcctgagtagctgggattacaggtgcgcaccaccacggccggctaatttttgtattattagagacgaggtttcaccatattggccagtaggtctcgaactt

SEQ ID NO: 233931 - DNA, 122 bp, Homo sapiens
aacgatccacatgccttggcctccgaaattgctgagattacaggcatgagccactgcacccggccctctaatgaacatctttacagagatgtttctatgtaattagggttattttcttagat

SEQ ID NO: 233932 - DNA, 122 bp, Homo sapiens
atctaatcacagtaatcttattacactgaaattaacagttattctttttctttttcgagacggagtctcgctctgtcgcccacgccggagtgcagtgtcatgatctcggctcactgcaagcc

SEQ ID NO: 233933 - DNA, 122 bp, Homo sapiens
tgctcccgggcatcctcctgtccctggctcctcatcctgggagcaacagggctctgaggacgtgaggagccatcgctgtgggaggcagcaggccccgggtggggggcagaggcgcccagcct

SEQ ID NO: 233934 - DNA, 122 bp, Homo sapiens
gagcgccgtcctccagagggtccggagtgtagctgggggttggagcagcagcctcctaggcgatgggacagagcccacagggtccggtatgccacggtttcttcgtcagaccctgggaatcc

SEQ ID NO: 233935 - DNA, 122 bp, Homo sapiens
agggggagggaagaaactagggggagagatgctgtttcttagacaatgatgtctacttcccggctcaccatctgctcctcatcatgagagaagcagtttcctaggaatttagggagagcatt

SEQ ID NO: 233936 - DNA, 122 bp, Homo sapiens
cacctcccatgcaaacactgcccctctgtctctactggagggcagcaagctcaggctggccgggctgggagggccggtgccgagcctgccccctctctccgccctcttcacctcactcctgc

SEQ ID NO: 233937 - DNA, 122 bp, Homo sapiens
gaaggagagaggggggttccactcagcaccggtgcgctctggcagctgcgactgcgggtccggcctccctgcagacctgggcagcagccgcaggtcctcggccaggctgccgatgagcaccc

SEQ ID NO: 233938 - DNA, 122 bp, Homo sapiens
gcaccgagtggacattttggtctttgtccgcgggtcagtacggcccctgggtccacgtggcgcgaaagtaggaggtgggatctgggcgtctcgggtcggtcggaccggggaggttaaagggg

SEQ ID NO: 233939 - DNA, 122 bp, Homo sapiens
taaagaatattgggtaggaattcttattcccattttagagacgtaaacattcaccatccgcggaccatggggaacacagctgacatcaattgcaagtcagtttctgtggtttactgcagcaa

SEQ ID NO: 233940 - DNA, 122 bp, Homo sapiens
gggctgtcctccctgtttttataagtacacgggccccagccttacccagacagcccagcacgctgcccgtagtatcctggggaagggcagcagctgtcatcagtgttatttctgaggtgtgt

SEQ ID NO: 233941 - DNA, 122 bp, Homo sapiens
ggctcggtcttgtaggggccccctcggcgccgcagacacctgaggaccaccggccatcagcgacccaggccccgccccaacgccggccgccggcccactgccccagtcgcgctctcctcagc

SEQ ID NO: 233942 - DNA, 122 bp, Homo sapiens
ggcggcggtcgttccgggagcactccgggctccgatctccggtgtcacagcaaagatccgcgtctttccgatgaatccagccaatgccatccagtacacacgcgcaggaccggaggggccgg

SEQ ID NO: 233943 - DNA, 122 bp, Homo sapiens
ttcccggtttttcatccgagcacttgctgtgggaggaacatttgatcccagcggtcgtggcgtcaggccgcctgctcactggagggaggatttccattagaaaatttcaaattcaaagttgg

SEQ ID NO: 233944 - DNA, 122 bp, Homo sapiens
aatcccagctccacaacttactgctgtgtggccttgggcaagtctctcaacctctctgtgcgacacacatctcatctaaaattccaactctccctgactttccctactgaatttttctctgt

SEQ ID NO: 233945 - DNA, 122 bp, Homo sapiens
gacccaggaattatggacataaatagataatgaaaagaaaatagtcactatgtgagttgacgaatacattaattagcttgattgtagtgataattacaccatgaatagggatatgtaaacac

SEQ ID NO: 233946 - DNA, 122 bp, Homo sapiens
ccttgttcagtagaatcctgttaagtgggtttatcaagaatcctctacacttgatgtctccgcttagtgattttccattcactgaccccgaggaacttcgctccttggctatgaatcctgag

SEQ ID NO: 233947 - DNA, 122 bp, Homo sapiens
catgggcgtggccagcactgggctggggcggggcctctgggtgggcggagctgctcatctcgcctctccttgttcctcgctccctgtcgccctcaggtcgcccacgtccagccccacgccgc

SEQ ID NO: 233948 - DNA, 122 bp, Homo sapiens
cttttgggtacctgaatacaatttcatggatggctagacctgggcactctaaaagatttacgactcattttgttaactataggtgccccggaaatgaattaaagcctcagtaaaataattaa

SEQ ID NO: 233949 - DNA, 122 bp, Homo sapiens
ggcctcccccggaaacgttcccccatcctcgcccggcgcctcactcaccaagggccgcgccggggttctgcactgtcactgcgctgcggttccccgccttagggattctcacacggttccac

SEQ ID NO: 233950 - DNA, 122 bp, Homo sapiens
cggtcttcttcagtctcgtttgctgatttctccttttctccccgcttcttagaatgccctcgggactccgtttttgaacctttactcttctcagtatacactcactgttgatctcatccagt

SEQ ID NO: 233951 - DNA, 122 bp, Homo sapiens
gtatcatagttttttgttttttttttcttgtctacttttcttctgtgagccaccacttttcggcagggttggtttgttcagtacacttcgccaaggtcggctttaaaaatcaaatctagatt

SEQ ID NO: 233952 - DNA, 122 bp, Homo sapiens
gctcatcaaccagcacagtgggtgccggccacagcggcggggagcgggcggtggggggggcggtgctggggcccagggccgggctgctgaggggacctagaccactcttcagaaccccacaa

SEQ ID NO: 233953 - DNA, 122 bp, Homo sapiens
caccaaagggaaacatatccttgactaatgacagcaaagggagaattggagggaagtaaccgaggtttaaatgtggatagtttctgggaaggggcatagggcccactgctctggggaaaagg

SEQ ID NO: 233954 - DNA, 122 bp, Homo sapiens
cgtcccctgtccagcagcaggtcctccagccgcttgcagtgctcccggagctgtttctcgcgcggcaacaggaaggtgagaaccttgttgcgcacgatgccacggtcctcctcctcccttag

SEQ ID NO: 233955 - DNA, 122 bp, Homo sapiens
atccaggaaggccacctcctggcgtgacgccagtggcgtggtaggacagaagcctggccacgtggcctgcagtggttactgctgggccctcttcataagcactggtcccacccgcagtgaag

SEQ ID NO: 233956 - DNA, 122 bp, Homo sapiens
agaacttccctggggtattatgcagagactagacgccttgaattagatgtcacactgcaacgtggttgggtgttaaaaatataaaaaggaggaaacagaataagacctatcatgtggtagct

SEQ ID NO: 233957 - DNA, 122 bp, Homo sapiens
accttgcaaacagacccccgcagtcagcttctcagtcttcacacagaaatcacacctccacgtcagcatcgcccagaatgtatgttcctggggctctgccaagggaacctctgttttcctca

SEQ ID NO: 233958 - DNA, 122 bp, Homo sapiens
gcagtgaactgcatttaaaacctcaggaattgagcgaactctcccagtggctctcctcaccgggatccccttccacgcctcctccccgtgccgcgcctcagtccgcactgctcattggccgc

SEQ ID NO: 233959 - DNA, 122 bp, Homo sapiens
taagagttcagagcatgtgagttgtagtgtgatggaaggaatcgcaaagcctggacctgccgcagaatatttgcatcctctgcaggtttagatgttggcgaacacttgttgggacttcatat

SEQ ID NO: 233960 - DNA, 122 bp, Homo sapiens
tcgccgtctgtcgtcgcggctcagcaggcgctggggaaggcggggtggggacacacaggccgctcccacccaggctttgttcagggagggctcaaaccccccaccgcgcgcgcctttcccat

SEQ ID NO: 233961 - DNA, 122 bp, Homo sapiens
ggctttctttatataggtgggggcatgtcaattgccttaagagaatcaaggcccatccctcgatttttgcataggactgggatgccaacccaaccacatttggaagaggctattttatcaga

SEQ ID NO: 233962 - DNA, 122 bp, Homo sapiens
tggtgctggtgatcatccaggctgagcgctgggcattcccagtctcgggcgatttcttggcgttacttccaggctgagagccatgactaggcgagcttcggccgtgggaccgaagacctccc

SEQ ID NO: 233963 - DNA, 122 bp, Homo sapiens
tactctttcaacatccccttccctctttcatatgagctggagatgaataacctattaccacgcagtagtttctggagtgggggcagcactggctggcagagaggagctgggctgcagttgct

SEQ ID NO: 233964 - DNA, 122 bp, Homo sapiens
ggtgcaggtgggcgccaggccctctgtgggtgggcactggtcctcagcaccgctcaccgccgccgccgggcaggccggggaccagcaggctcctcagccaaccctgtcccttggcccggcct

SEQ ID NO: 233965 - DNA, 122 bp, Homo sapiens
gtggcagctgccccctcccgtccagcgggtatgggccctgctcccccgtggtgggggcggcgcaggagagtggagcgaccctcatctaagttacctctacccgggtctgagcccccggacag

SEQ ID NO: 233966 - DNA, 122 bp, Homo sapiens
tccctggaaggggggatgtcaggaatagccctcactgcatagagcacatcccggcgggagcgttagagctgagggatgcctgtggctgagccgagggagagccggagccaggaaagccactg

SEQ ID NO: 233967 - DNA, 122 bp, Homo sapiens
agctctgaggggtccgcgctggctagttcctgagagagcgttaaaagtagattctcctttcgctccaactttctcggtgtctcaaacactctcctgccttctgggcccattgggcacaccgc

SEQ ID NO: 233968 - DNA, 122 bp, Homo sapiens
gctgtctggcggcaggtggtgccaggtgcccgagcctacctgcgtagatgacaatgccgacgactgcgtccgtgttcctaagggtgcagcccctcagcagcaggttttctttatacagcccg

SEQ ID NO: 233969 - DNA, 122 bp, Homo sapiens
agatcttgcgactggggaggcacatgtgcatcacagcacatttcagcgtactgatggaaacggcccagccctgggctctcctgttgccttagcttgtctcacttggtgttacgccgggacat

SEQ ID NO: 233970 - DNA, 122 bp, Homo sapiens
cccagttttttcccctcacgtggtatatttctttgagacttctcagtgattgtttgttttcggccagggtgaatgatttatcccccctcgatcaccaccggattattaccaaagggttggag

SEQ ID NO: 233971 - DNA, 122 bp, Homo sapiens
actagtcagccacagttcagtgggggcatttttcttttgttaagaggcctaatgagccagcggatgtttgggctcattgcgaaatgaagaacctagagggggattttatttttcttaattaa

SEQ ID NO: 233972 - DNA, 122 bp, Homo sapiens
tgacctcgtgatccgccggcctcggcctcccaaagtgctgggattacaggtgtgaaccaccgcgcctggcctgcacttcttgttagatatcacaaaaagacttgtgtggtagcttctttttt

SEQ ID NO: 233973 - DNA, 122 bp, Homo sapiens
gacaaagaggtttgggaaaatcccaggtggagaaagccccaccctgcccaggaaagttctcgcggtttcactgaaatccttctgagatcctaattgggttcaacattcccctctagtagcat

SEQ ID NO: 233974 - DNA, 122 bp, Homo sapiens
aaaaacaaacaaaaacaacaacaacaacaacaaaaaaaaaaaaagaaaagaaaaaaacctcggagctaatggaaggggcctgccccctgggaagcagcaagcttcctgttgctggtggtaca

SEQ ID NO: 233975 - DNA, 122 bp, Homo sapiens
agccgctgtgacgggtggccagtttccttaatttatgaaggcatcatgtcactgcaaagccgttgcagataaactttgtattttaatttgctttggtgatgattactgtattgacatcatca

SEQ ID NO: 233976 - DNA, 122 bp, Homo sapiens
agagtgtcctgtacacccacgcggcccagcctgctacacacccgggctggagggtatggccgactgctcctaggccacaaacctggacagcatgttgctatactgaacaatgtaggcagttg

SEQ ID NO: 233977 - DNA, 122 bp, Homo sapiens
gcaagtccaccttctggagcactggatgagtcccaacagctctccccaaaacttcagaaacgcccagattctgggaaagatatctgattcatggcaggctggaaggggcccaagggtggctg

SEQ ID NO: 233978 - DNA, 122 bp, Homo sapiens
gagaaattgaacacaacagctgctggcccaggtgctaagcccctcactgcctggggcctgcgggtggcccggtggctccgagttcagggcccactgagctcacgcccacccagaactcgtgc

SEQ ID NO: 233979 - DNA, 122 bp, Homo sapiens
cagctcagtcactcttctcttccccacaattccgaaactatgttgaagttctttaaaggtcggccctcctgaagaactattttcttattctgcctactttgactctgtaaaattcccaaaag

SEQ ID NO: 233980 - DNA, 122 bp, Homo sapiens
gtgaagtagaaaaggtttccaggaaccagatcctaaaggggtcctgcagaaattaatggacggcttttatgtagagcagcctcatgatctgatttgcataactttggcttctgtgtggagaa

SEQ ID NO: 233981 - DNA, 122 bp, Homo sapiens
gtgttccttggcttgtagctgcattactccaatctgttgctgtcatctcatggtcctcttcgtgtctctctcatgatttgtcattggatctagagcccaccctaatcaaatataacgtcatt

SEQ ID NO: 233982 - DNA, 122 bp, Homo sapiens
cgacagaactgccacacctgacactgctcccgacgacccgccggtccctagaggagcccacgacggaactcctgccacgccagacactgctccccaccacccaccagtccctagaggagccc

SEQ ID NO: 233983 - DNA, 122 bp, Homo sapiens
acagacaatttcctcaaataaacacctgatgatctcaattcttcccttcaaactttttaacggattctcagtgtctgcagaatagaatttcttagtgtatcatgtcttaatgatcctctctc

SEQ ID NO: 233984 - DNA, 122 bp, Homo sapiens
cggggcggggtagcttagacacggggcgtccggctaaggccggggacccagggtggtgggcggggtgtcccgcccgcctgtggaccccgcgcagtaactgcgaacatttcgctttcattttg

SEQ ID NO: 233985 - DNA, 122 bp, Homo sapiens
ggtgtcaccccgctttgagcggtgtggctgggcttcccagcgttcgtctgcccgcacccccgcctgcccaactcgggacctgccagggccccaggccccacccccgtctggcctgcagggcc

SEQ ID NO: 233986 - DNA, 122 bp, Homo sapiens
gcctcaaccgagcgtccaagctctttccatttttgctcctgcacttttgtgctctgtacccggctgcccgatactatgagggtgtgagcgggatcccgagaggcctaggtagacgggccccc

SEQ ID NO: 233987 - DNA, 122 bp, Homo sapiens
ctgaagatgctttgccttgccctcttgaggacacgtggcttttacttctaatagtgtctgcgtgttgtggagagagaagaccatgcagctgtggacatctattataattcctgagccccact

SEQ ID NO: 233988 - DNA, 122 bp, Homo sapiens
cgctgcgcctgctcccgctgctcccggcccggccaggagtagggagggcactgcccgagccgcggccccggccctaccaggcctggagccaccaaagccacgagagaggtgggcgccgtcgg

SEQ ID NO: 233989 - DNA, 122 bp, Homo sapiens
ggccatctctctggccaagaccactttcgacgaggccatggctgatctgcacaccctcagcgaggactcctacaaagacagcaccctcatcatgcagctgctgcgagacaacctgacactgt

SEQ ID NO: 233990 - DNA, 122 bp, Homo sapiens
ttcttctgtctggggatcgctcataataatgccaaatggacaggcgtgtgaatgcctccacggtaacgaccagaggcaaaccggcacatacacgtttgtatttctccttcttcagcatgaag

SEQ ID NO: 233991 - DNA, 122 bp, Homo sapiens
gagagtgtgtttcctcctcaggaagggtgcgcctcccagctccacctcctcaaacttctccgtcctacacagcccataggacatgaaggactcagcgcccggggggatgaagtggatgggaa

SEQ ID NO: 233992 - DNA, 122 bp, Homo sapiens
ttcgtccagcgggatctgaagctggtccagggcttcatgccccacttcttcaggctgttccggagcacggtcaagcaagtggacttttcagaggtggagagagccagattcatcatcaatga

SEQ ID NO: 233993 - DNA, 122 bp, Homo sapiens
tcagactccggattccagatcccatacctcagacccggaacccccaacccaaagaccaagcgcaaactccagaccccagaccccggacccaggtggcgggcctgctccgtggcgcaggctcc

SEQ ID NO: 233994 - DNA, 122 bp, Homo sapiens
gacgcgagggacgcccgcggcgcaccgccggcagacgacgtgggcaggcgccctgagctgcgggtccgtgggccctggcccaggccggcacagccctgtccctagtcctgagggattgtctc

SEQ ID NO: 233995 - DNA, 122 bp, Homo sapiens
aggaccagtttgtatttggtgcggagtatcacatcctctccggaccctaacaggatgtgtcgcctgctcgctccaaccccacaaacgccgtctgggctggcactccgacttcttcttccctg

SEQ ID NO: 233996 - DNA, 122 bp, Homo sapiens
ggtctctgtttcaggattccttagtgacacaggtgtaaacccggcatttcaggagatagccggctaagaatctggtcggggaggtgggcggcccttgacatggatctgtcataaattagtgg

SEQ ID NO: 233997 - DNA, 122 bp, Homo sapiens
cacaggtaaagtcaggataataatatctacctcacgggggattcgaggaagtggtgggagcgtaaagccccgtctggtagagtgaatacctgagcaatggccttccggtcccgtcttcagca

SEQ ID NO: 233998 - DNA, 122 bp, Homo sapiens
tggacgtcctccttgccagccccgggctgagtgaggagcttagggagaaagtcccagcgccgcctgcacccgcagacagccgagttacctgggctcttgtgaaacagagagaccaaacgctg

SEQ ID NO: 233999 - DNA, 122 bp, Homo sapiens
cgaactccgcgggcaacccggattgcactgtcccctcccctttcttaaagccaacgcctgcgccccgccccagcgaagcccgaggaccaaaccggagcgctctggctccttcctcaactgtt

SEQ ID NO: 234000 - DNA, 122 bp, Homo sapiens
ctctctctctctgtctgtaccacacagtgcctgaggaaccagcggtcagtgggctgtgagcgtggaggatggacctcatccacacacaccccaaaggagtttctaaggaatggatccttgac

SEQ ID NO: 234001 - DNA, 122 bp, Homo sapiens
tgacttcatgacccacccgcctcggcctcccaaagtgctgggattacaggtgtgagccaccgtgcccagccatgagcggtcttgaaaatgaaaaatggtcttggccacagaaaccaggtatg

SEQ ID NO: 234002 - DNA, 122 bp, Homo sapiens
cccagccggctgctgtcctggggttgtcagcgccagtcagactgctttatgttctgagcgcgtatgacccctttgcagtggaacagaaactaaaagctcgacggaaactcattctgcaacag

SEQ ID NO: 234003 - DNA, 122 bp, Homo sapiens
atattactgacccgctcagtctcaatacttgcactgatgagggccatgtagttcttgcttcgccactcaagactggtcggaagcggcatagacaccggggacagcaccaccagcagcagcag

SEQ ID NO: 234004 - DNA, 122 bp, Homo sapiens
ttctaattttttattctctaggaagctccacagaatagaacctgccattaaatgatagtccggaatattatgatatgggtgttgataaactctgtaaaagtcagtggatgatgtttaagaaa

SEQ ID NO: 234005 - DNA, 122 bp, Homo sapiens
gctgtcagcagccagaggtcatgggaagggggcgggagaaagtttatctctcaccttagccgtggtattggctgtgaacacattgaacttcccagccaggcaatgctatgttcatggagtgg

SEQ ID NO: 234006 - DNA, 122 bp, Homo sapiens
ccaggcacagtacgaggcccttctactaaactctctccctgaagcctgacaaaaacctttcgcactgagggaaactgagggatctgggaattaagccagaagctcacccagctggtcagcaa

SEQ ID NO: 234007 - DNA, 122 bp, Homo sapiens
cgacctcttcgggacttctgtctgagaagggacttccggcaagaggtgcctggaggaggccgagcccaagagctcactgaaggtggggcaacaactcctgctccctctgttcaagtcccttt

SEQ ID NO: 234008 - DNA, 122 bp, Homo sapiens
ggctcagtcccttttgccctgtgagacctgagactccagcctcatgctggccaactcacccgtagtgtgtcctgaaggcagtgacattttaccaatgtccttatagggctctcttgaggaga

SEQ ID NO: 234009 - DNA, 122 bp, Homo sapiens
agcctccttctctgtccccagctggaggaggaacggctctccgtcatcgagagggacaaccgcctgctcctggagaaggtggcctctgtcatgaggaccaggggacagactgacagcaaaaa

SEQ ID NO: 234010 - DNA, 122 bp, Homo sapiens
atctaggggaggtcttctagctcctgtctgccaatgcctacaagtcttcaaggttgcattcgtttcctggaaggcttccttaggaaaatcgcacgcaacaccccacctatgtctttaaagct

SEQ ID NO: 234011 - DNA, 122 bp, Homo sapiens
aactgctggagaagtactaaaacatttccgccaagttgcaataagaaaatttagtgggaacgtctatcactactgaaagttactaggttgggaccaattttcaagcttagcaacattcgaga

SEQ ID NO: 234012 - DNA, 122 bp, Homo sapiens
aaacatttttttgatttaaatgacaatattctaaagttccacgagatggcgacattactccgtgaatgaaacatttttctcttggccttttacgcaatcaacaactatttactgagtatcta

SEQ ID NO: 234013 - DNA, 122 bp, Homo sapiens
gcaggagaatcaggcagggaggttgcagtgagtcgagatggcatcggtacagtccagcctcggctgggcatcagagggagaccgtgcaaaggggagaggcggcagtacagtccagcctcggc

SEQ ID NO: 234014 - DNA, 122 bp, Homo sapiens
cggacaaggcataattagttgttagatgaatggaatagatcagcatttcccaaactctaacgtggatcatcagttctgcaagaagttaatagggcttcctgaacaaatgggtttttaggtca

SEQ ID NO: 234015 - DNA, 122 bp, Homo sapiens
gggagaccccagggcccctttctataacaaataaatcttaacaccctcccacccatcacccgggaatggaacctaggagccatttaacctgcacacacgcatgaggtttaaaattaaatggt

SEQ ID NO: 234016 - DNA, 122 bp, Homo sapiens
aaatccaaaacagaaaaagattaaataaatgctaactactcaatttttgagtggcatgttcgagtctgaggtccgtggccatatgatcacaattcctggctatgctgatgcatttttaattc

SEQ ID NO: 234017 - DNA, 122 bp, Homo sapiens
gcctgccgggcgcccgtcctcgccgcctcttccttcctcctgtcgcccgcccgccgccgccgagattcgcaatccccgccaagtcgggccagcaccccttgattggccacacgggcccgggc

SEQ ID NO: 234018 - DNA, 122 bp, Homo sapiens
gtttggtaaggggccctgggggttggggggacctcagccctgcactctgtaggagtcactcggacagaaaaaacctcggccttccgttctctcccaggagcttgcggcccccacccaccgcg

SEQ ID NO: 234019 - DNA, 122 bp, Homo sapiens
ccgcgcccacatgggtctgtgctacagtctgcggccgctgcttttcgggggcccaggggacgacccctgcgcggcctcggagccgccggtggaggacgcgcagcccgccccggccccggccc

SEQ ID NO: 234020 - DNA, 122 bp, Homo sapiens
ctgataaatgattaccaaagggaacagctcttcctgtcttcctggtttgggacaaatctccgggtctctgttaccagattatctctaagagggagtccactttcaatagtgtgcaattatgt

SEQ ID NO: 234021 - DNA, 122 bp, Homo sapiens
caacttcggttttccgccgggcgctcagacacgagttgctgcgcttcctgcctcttgcgtcgggctgctgctctgctgactgggccgctgccttttcattcaagagaggccgaagcggtgat

SEQ ID NO: 234022 - DNA, 122 bp, Homo sapiens
ggtaagaactgctggtggtaggagctccagcatagcgcacagggcgggcccagagaaaggcgggcccattgttgggggattcggcttccggaggaggggacagcattcaggggtgtaccagg

SEQ ID NO: 234023 - DNA, 122 bp, Homo sapiens
gtagggcaggagaaactgggccaggctgcacttagctcaaggggcctcgaggactctctgcgtctctggagacaagggcactacacgcacttcagaatgaagagttgtaagtcgctgacctg

SEQ ID NO: 234024 - DNA, 122 bp, Homo sapiens
cccctctcagtcctgcagcgaagccaggcccctgctgcccgggccttcctggacgccgtccgactctaccggcagcaccaaggccactttggcgacgacgacgtgaccctaggctcagacgc

SEQ ID NO: 234025 - DNA, 122 bp, Homo sapiens
atgtacttgagtgtgatgataaatcatagggatgtgtttagttgtgtgtgtgcgtacgtgcgtttatccaaattttcatcagggctgttcggtgtatgtacacatgcatgcacatgtccaag

SEQ ID NO: 234026 - DNA, 122 bp, Homo sapiens
tccgctctttgaggagactcattttcctccttatgccttggactctggctgtccaggtggcgtgatcactgtcgacgccgcgtgcacttcgtggtttctaaagaggcacctcccgctttgct

SEQ ID NO: 234027 - DNA, 122 bp, Homo sapiens
atgaagatgtttccagccggattgttctcactcaacgccaggaacaggtccaaggcgaagcgggtgtttgctgagctcagctgctccatggtgaaaactgcaacacagaacagggtcctcat

SEQ ID NO: 234028 - DNA, 122 bp, Homo sapiens
cagagccgccactcacggacccttctccaaagctgctgcggtttgctgatgccgagaccccgaacagaagctgctggccccacgtttgtccccatttatggctgatgctttagccagtcttt

SEQ ID NO: 234029 - DNA, 122 bp, Homo sapiens
gtccttgttggccagcagagggcgcaataggaggcgggccgcacccgaagatggctatagcgctgtgcccgagccagcctgggcgccctctgccgggcagccccgactcggggctcccacag

SEQ ID NO: 234030 - DNA, 122 bp, Homo sapiens
cgaggcgcaggttgagtctacacagaggaacactcatacgccatggtgtgatgcttgctccgcacgatccacttccgggtctgtgggcaactgcgcgaaggaaagcgaccgagcggcccggg

SEQ ID NO: 234031 - DNA, 122 bp, Homo sapiens
tgccagggggcctgaagagggttgcagagccctggaggaggccagggccaggggctgccacgggaagtggaaggcagtggcccccactcctcccagagaggcttctgggaagcctgcacaga

SEQ ID NO: 234032 - DNA, 122 bp, Homo sapiens
ccgcccgcctcggcctcccaaagtgctgggattataggcgtgagccaccgcgcccagccgcgcccggtttttgttgttgtttttgtttctaaaaacagcgtctcgctctgtggcccaggcag

SEQ ID NO: 234033 - DNA, 122 bp, Homo sapiens
agctctcagtcccgtccccgggcctcgctttctcctctcgcctcgctcagctcagccgggcgcaggttcctagcactgacgacagcgagcgatgacctcagcgccgccaaggctgcgagggc

SEQ ID NO: 234034 - DNA, 122 bp, Homo sapiens
aggcaccccagggttccccgaggaggtagccatcccggttgagtgaccgcagccggaccccggggcgatggtaggccccccgctgcgcactcaccagtctacaggctgcccggagtccccgt

SEQ ID NO: 234035 - DNA, 122 bp, Homo sapiens
cagatgcctgggccgactcgaagcccttataaggcgcggagacaccggctctggctgggccgcccgcctccacagccgccgcccagggttctcccgccactgccgcccgcacccccgccccc

SEQ ID NO: 234036 - DNA, 122 bp, Homo sapiens
atttcagggtggcccctcaggcatccaagagccagaggagcaggtgtcacgggatggcagcgagcgaggccaggccaggagaagcaaccgcagcctcctatggtcgccccttcccgacccac

SEQ ID NO: 234037 - DNA, 122 bp, Homo sapiens
tctatcattgtgagtcctcctgagacaccctctcaggtgttccagaagtaactggagagacgttaagggatggtggaggtggcagacccacaatagcacagtgagggaaatccagaaaaaca

SEQ ID NO: 234038 - DNA, 122 bp, Homo sapiens
gcgcgcgctggaaccgcccgccgccgccggaagcagcgagaggggcgcgcccgccgcccgcgcttcccggccccgccctcctgccccgtccgcgccccggccccgccccccggcccaattgc

SEQ ID NO: 234039 - DNA, 122 bp, Homo sapiens
ctaacaagttctcaagtcatagtgatactgctggtccagggaccctactttaagaactaccgacctcagggaaccttcacagtaagtatctgtaatgagtccaatcaatgaaaacttcagtg

SEQ ID NO: 234040 - DNA, 122 bp, Homo sapiens
agccacaggcatctcagacactctccctaaatcatccccatgtccttgatgtactaggttcgtaagtcagtcaggaattttgctgctctgggcttccaagtgtgaccacctttttttttttt

SEQ ID NO: 234041 - DNA, 122 bp, Homo sapiens
aatcctggtacacattttaaaggcatcccctatttaaaaaaagtgaccaacatatttctgcgcgttctttatgtaagaactcagttaataaacttcttttagaaaagctttgtccctcttaa

SEQ ID NO: 234042 - DNA, 122 bp, Homo sapiens
gagcatcagtttccttctgctttgaaagctcctaatgctgtttaagtggcagccctctctcgtgtggctatgctgaggccttggtgctgaatggactgtcttgtctcatagaatgattttaa

SEQ ID NO: 234043 - DNA, 122 bp, Homo sapiens
tggaggtaaggtcggagaggaagtggcagtaagcaccgttagtgcaatttgtggccgacacggacattcagcacagagcctggcacacagagggactctgataataaaggcttgaactgagc

SEQ ID NO: 234044 - DNA, 122 bp, Homo sapiens
atcccggccccgcaccggcccgggggcgcgtcaaggtgactaggcatgcgggagatggggcgggggcttgagctgccgtggggcgcttagttttgagtccgggtggtgcgcctggctttggg

SEQ ID NO: 234045 - DNA, 122 bp, Homo sapiens
cagtaagcatgaacaccttaggaaaaaaaccgaacccatccacacacattttctagtaatcggtttgcatagtggtctttaatgttacagagcttgtcttggggaagataaaatgggacatt

SEQ ID NO: 234046 - DNA, 122 bp, Homo sapiens
gccacgcccccagtcagaggctatcgctgtccattgactccgccccttgccctctggccacgcctcctgagccagtaatgcgagggaaactgttggctctaccctatggcatcaggacagtc

SEQ ID NO: 234047 - DNA, 122 bp, Homo sapiens
ccacccccagacgcagccctgactccggctccagccgccccggcctccagatcctcctcccgccctgtctcaccccggcctgtgctgtcccgtcgcagcccccatgtctcccacaggcctcc

SEQ ID NO: 234048 - DNA, 122 bp, Homo sapiens
tcaaaggtgctctgaagcttacgctccactagtttcacagtaaatcgccccttgcgagggcgctttttttttttttttaatgtgttctctgaatcgctttccccctttaacactgcatgaca

SEQ ID NO: 234049 - DNA, 122 bp, Homo sapiens
cccgctcggggctccgcggctcccctgctccgcgccgcgcccacccgcccccaggactcacggtacgctcccgcgccgctatcttgccatcccctgccgccggctctgtagcctcggccgcc

SEQ ID NO: 234050 - DNA, 122 bp, Homo sapiens
atgcagagtttaccaggtaagtacaattccactcttcatattaatgcagtgaaacataggcggaatcaaagaaatcaatttaccttaatctgagtctgttcgattgacttttcccatatctg

SEQ ID NO: 234051 - DNA, 122 bp, Homo sapiens
ggagaggcgagagagactatgactgccctacggctagagtagccgcgaagagaacacttccggggcggggctatctggccctttcctttccgcgtgtagaatgtggggcgcctgtaaagtta

SEQ ID NO: 234052 - DNA, 122 bp, Homo sapiens
ctgggtgccattagcagcagcgtttctttcgtttactgttcttcgtgagcttcaccacatcgttctgttgttgctgctgctgttttgccaggttgtctttctttgctcggaggaccagctcc

SEQ ID NO: 234053 - DNA, 122 bp, Homo sapiens
atgagaaggtccatccttctcaggatgaaggagtggtccaggaagccctgattggtctgccggggagggaagggctgccttatttggagacctgcaggaatgccacctcccccggcagctcc

SEQ ID NO: 234054 - DNA, 122 bp, Homo sapiens
ttcataaatgaagaaactgagattcaaagaggggaactaccgaaggttacagagcgagttcgtgggtaagcatggtaagaaccctggtctcccggggatcccacagcgattgacggtttata

SEQ ID NO: 234055 - DNA, 122 bp, Homo sapiens
tactttctaataagcctccaaaggacaatggtgattagtatttcctgggtttctctaccccgcagctgaagacctgcagatggatccagcacaaaagggacctgccatgcacactctctgga

SEQ ID NO: 234056 - DNA, 122 bp, Homo sapiens
gtgacgggaacaggaaaggtgaacccggaaatgctgagtcggggtatctgaggtggtgatcgccatcttggagtcttcactggagtccaatcagtccagcctatttttggttatagaaaagg

SEQ ID NO: 234057 - DNA, 122 bp, Homo sapiens
catctttttaggaatctcgctctcactctctacgtagccactctccttcccccatttctgcgtccacccctgaactcctgagcgacagaagccccaggcctccaccagccttgaacccttgc

SEQ ID NO: 234058 - DNA, 122 bp, Homo sapiens
ctcatccttgtccacttgacctgacaaggctcgaatgccttcaagaaaccttccctgggccgggcgcggtggctcacgcctgtaatcccagcactttgggaggccgaggagggcggaccacg

SEQ ID NO: 234059 - DNA, 122 bp, Homo sapiens
ggccggaaggcaggcaggtacaagcaaggagtcggctctacgcgcagagccccaggggagcggcccgtgctgggcatggcagtcccagcagtgcatttgtctagctgccggccgcgggtccg

SEQ ID NO: 234060 - DNA, 122 bp, Homo sapiens
ggcattaggcaaagtgagcgatgaagtcttcccaggtctcccctccctttctgtggtttccgtttcttgtgcacacagtagctgctgtttactgattacgtagccggtgctgtgccaagcct

SEQ ID NO: 234061 - DNA, 122 bp, Homo sapiens
ccaaagccaggctgaccaccttttctaacaatcactgaggaactatgctaacacttcattcgtgactcctgaccttccttagatatgccctgtttaaagaagttttacccttaatgatcatc

SEQ ID NO: 234062 - DNA, 122 bp, Homo sapiens
agaaaaaagaaaggaaggagtctcgccggagcctgctggggaccgcggcccgcgggtggccgccccggatgcctgaaaccgaggagttaaatacagtctccgaagacccgcgcatcgatgtg

SEQ ID NO: 234063 - DNA, 122 bp, Homo sapiens
ccaaggcaggaggggacacacggaacacgccgagggccaaccacgccgccgcgcgctccccggctaggacccacctgctgcaggtactggttaatggtaatgtgcgccatgggagcgccgcc

SEQ ID NO: 234064 - DNA, 122 bp, Homo sapiens
cgaagatgtcgttgacgaaggaattcatgatccccatggccttggatgagatgccggtgtcggggtggacctgcttcagaaccttgtacacatagatagaatagctctccttgcggctgcgc

SEQ ID NO: 234065 - DNA, 122 bp, Homo sapiens
ttctctactttgaatatgtttcatggggaaattttcttcttccttttcatacataaaggacgcttgctgggatccttctgcatggggcttgattttacacactggtcagatgtggtccccac

SEQ ID NO: 234066 - DNA, 122 bp, Homo sapiens
gatggggttatttatattggcacaactctcctttcccacatggttgtggggcatgagaggcgtaggcaagaaagaatgatcaggacatgcttctggcctgtggattatttagacccagcagg

SEQ ID NO: 234067 - DNA, 122 bp, Homo sapiens
catggtctggcagccggagaccaggcctcaccgcagcctcgccacccgtggccgagctcccggcttcccgttcgtccaggccagccgggcaggccccgccccctggtcctccaggaaacgct

SEQ ID NO: 234068 - DNA, 122 bp, Homo sapiens
ctcccggtacccggagcggctctgattcatggtgagcctgctggtcgcgggttagcgaggcggacaggagagggagccgtggctgaatggtctggggagggaggagtgggtttagcagctgt

SEQ ID NO: 234069 - DNA, 122 bp, Homo sapiens
tgcagttggccctccttagctgagagttccacatctgcagattggaccaaccgtggctcacgcctataatcctagcactttggaaagctaagccaggcagatcacttgaggctaggagtttg

SEQ ID NO: 234070 - DNA, 122 bp, Homo sapiens
agctctccaatactacctcctcccccccatttagtctcacacacagtgtgcgtgagagatcgccagtgagtttgtgacaaccgaagctgcagcagtcgccaaacctgttcttcctctcccgg

SEQ ID NO: 234071 - DNA, 122 bp, Homo sapiens
gtcaagagagacggattctgtcaaccgaaaaaaaaaaaaggaagagccagccccgagtggcgcaagaaataagagatcagctgctcagagcttagagcaaaccgtccctgcgtgcaggcccc

SEQ ID NO: 234072 - DNA, 122 bp, Homo sapiens
gcggacctgttggaggaagtgaaatctgagcggggtcctgacgggtgggaactaatctcccggtagcagtggaggttgcaggggggagagaaggaggggaggacccctggggaaggagacca

SEQ ID NO: 234073 - DNA, 122 bp, Homo sapiens
tcagctgacgaggtttccaagaaccccagtccccagggccctagaatgctggctgtggaccgatgggattcttagacccgggtcacctgcgtcaacagccctgggctgggcggagggcagcc

SEQ ID NO: 234074 - DNA, 122 bp, Homo sapiens
ttcgcgcgcgtgggggacgggcgaggggacccctcggcccccaccgcgcaaggggctgcgcggctgcttgggccacttgttattttttgcgcacaggcttggatattgggcgtttagtcagt

SEQ ID NO: 234075 - DNA, 122 bp, Homo sapiens
agcacgcgtacgacggcaaggattacatctccctgaacgaggacctgcgctcctggaccgcggcggacaccgtggctcagatcacccagcgcttctatgaggcagaggaatatgcagaggag

SEQ ID NO: 234076 - DNA, 122 bp, Homo sapiens
atctgaatttttttaagtccaaaatatttgcaattagactcactcatgaccaaattaaatcgagatgcctccatttcacacaataggcatggtcctgagaaactacatgagaaaagaatttt

SEQ ID NO: 234077 - DNA, 122 bp, Homo sapiens
atctgcagggcccgggcaccatgtacccgccgcccgcgttctctgtctgcagggcacgcacgttgagagagagcttgtttgatatctgggcggtttgtttggtttaattttgttgttttccc

SEQ ID NO: 234078 - DNA, 122 bp, Homo sapiens
ccctggccctgaccgagacctgggcgggtgagtgcgggatccggagggaaatggcctctgcggggaggaggtaggggcccgcgcactggggcgcaggacccggggagcagcgcaaggaggag

SEQ ID NO: 234079 - DNA, 122 bp, Homo sapiens
agtcccctgtgtgttgtgggaggaaaaaaaaaagggagccacagatgtcccctcgacaggcgaaagtgccccccaaccgcgcattaccatgcccagagcattgtggacatccctggatcagg

SEQ ID NO: 234080 - DNA, 122 bp, Homo sapiens
ggatgttgatatttcagtaaagtctgagttgtttctggaaggtcaatgcctgagacaaaacgaatcccaaccccccagctgtggcttcatgatgctggccactgggtggccgagcgctttcc

SEQ ID NO: 234081 - DNA, 122 bp, Homo sapiens
ccccccacccccaccttcgcttctctgcagtggtttaagaggccagaggccttcgcagagcgcatgcctagttccccgccccctccgagccgggcgcgcggcgctagctgcggcaccgcagt

SEQ ID NO: 234082 - DNA, 122 bp, Homo sapiens
acacagatacaaatgaaggtgggctgggaactgttcggtccccttctgcctccgggctctcgcgggagcgggcctctccggggcactcgcgtttcccccccagcccccagagggcgctgtgg

SEQ ID NO: 234083 - DNA, 122 bp, Homo sapiens
accacccctagacgccagcaactggccccccacctgccagctctctagcagtgccctccccgccaagcccctgcccctgtgttccggccacccgatgcacccgtcctcacccttctggtctc

SEQ ID NO: 234084 - DNA, 122 bp, Homo sapiens
agatgtgacatcaaatgacatcttctgttgttccccttcctgccagcactgacgcgtcaccggcagtgtgctcagggcttcctgaagggatcggttactctcatgacgcagggaagaagcca

SEQ ID NO: 234085 - DNA, 122 bp, Homo sapiens
cctggacctgcgagaggctcgccggcttataaccaagttctcatgttagattcttgaccccgatttcatcaccaggaggaaaagcagtgctctgtgccccagcctaggccgggccaggggac

SEQ ID NO: 234086 - DNA, 122 bp, Homo sapiens
tcggagcttgcatcatcctcctgaccagggtggaataaccaggaggcaggcgcacgtgaccgtttccatggtgacctcccttagcaaccctgactggtcctgtttatgaacgctggaaaatt

SEQ ID NO: 234087 - DNA, 122 bp, Homo sapiens
ccctttcaagggaggttacaccaaagggctagaaggcgagagcctaggctgctctggcagcgctgcagcagggagctccgggacacttgaactgccgtctaccctgtctctctacaagtccg

SEQ ID NO: 234088 - DNA, 122 bp, Homo sapiens
aggaatgggtctggacccaagatttcttttgggggtgatggaaaagttctaaaattagatcgtggtgatggctgcacaagtaggtaaagatactaaaatcagtaagttgtacactaaaaaca

SEQ ID NO: 234089 - DNA, 122 bp, Homo sapiens
tggtagctatcgtgctttgtcatctccaggttcagtaaacagcagtggtagcactgtgtccgtcttgtggccctgaccaatgtgtgcccctgtgagatcctggagggtggtgggaatagggt

SEQ ID NO: 234090 - DNA, 122 bp, Homo sapiens
ggcggcggcggcgccaactgttttcaaacagtggcggacaaacagggcttggggctggcccgcacgctgcctgatcgtttccgcccgccgctccacctccccgcgggccccgcaccccgaga

SEQ ID NO: 234091 - DNA, 122 bp, Homo sapiens
attctcaggagggtggagggaagggagggtgcagggattggttggggttgccctgtccatcgggctgtgtcgctgacataaaatccagatagaaaagctaagaactctaccggtattctacc

SEQ ID NO: 234092 - DNA, 122 bp, Homo sapiens
aaactactttatgtttaagtagaaaacataaaataataaagataagaatatgactggtcacggtgacttatgcctgtaattccaattatttggaaggcataggcagttgggtcacttgggga

SEQ ID NO: 234093 - DNA, 122 bp, Homo sapiens
cctgagcgaggaccccaaccctaggcgcctctggcgctgggaaaaggtaaccggaagaggcgctcaagctactcggtctacgcttctgcggccgcctaacccggaagcgaaaccctcgagca

SEQ ID NO: 234094 - DNA, 122 bp, Homo sapiens
ggcaggaaggccccaggaggaccctgctgggtctgcctcaaacgctgcctgagcgaagcccggcccaggctccaacccatccctgcgaggcttcgtctggacaagctcaacaggccaggact

SEQ ID NO: 234095 - DNA, 122 bp, Homo sapiens
agagccaggattccctggtatgcaggagttagcaactaatgtgagttgagcccgataagccgggctgccttagagctttcctctgagatctggctaaatccatgctgagcctgtgcttctta

SEQ ID NO: 234096 - DNA, 122 bp, Homo sapiens
agcttgcccggagtttaagaagtggaccttctgaccacgatctgaaacccaatgctgccacgagagatcagttaaatgtaagagaattatgaaatattaatttaaaaatagttaaatgggtg

SEQ ID NO: 234097 - DNA, 122 bp, Homo sapiens
atagttaaaggaataactgatactgatgatatccacaacagttactaaaaagcaagatgacgagaccatcctgactaatacggtgaaaccctgtctctactaaaaatacaaaaattagctgg

SEQ ID NO: 234098 - DNA, 122 bp, Homo sapiens
gggcccggggagttgggggcaggcagtagcgggtccgagtcgctgcaggggagggggcggcggctgcggctgaggtctcccgccccctcgctggctcactcgtggtcctcagtcagctgcag

SEQ ID NO: 234099 - DNA, 122 bp, Homo sapiens
atgtactgggtaatgggaaacatagtaaataggcctttaggagtgcagtgataaggtttccgcagtcccagaattaggtctcagtctttcggtgcacctgtgccacctgatggaccttaacc

SEQ ID NO: 234100 - DNA, 122 bp, Homo sapiens
gatttaactgttagctttttctgtgttttagtaattcgtattgtatgcgtcatttgaaaacgggcctgtaaaatcgtttttttgttttggaacaaattccaggcttttggatgtgttaatct

SEQ ID NO: 234101 - DNA, 122 bp, Homo sapiens
agggaggagccaggagccatttgccttctcattggttgggacctggccctccctcttggccgcgccccctggtttcctgacaccgctccaaccttaaccttaagccccgcccgttcctccga

SEQ ID NO: 234102 - DNA, 122 bp, Homo sapiens
gcgcggcctgcttcctgcagccggcctgagcggccttactgcgggcaggaaggagggccgcgggcttggaggaccctgaggaaagcatgggatgcagaacaggcccacccggcccggcccac

SEQ ID NO: 234103 - DNA, 122 bp, Homo sapiens
aggctgaggcagaagaattccttgaaccctggaggcggaggttgcagtgagccgatatcgcgccactgcactccagcctggacaacagagtgagagtccatctcaaaaaaaaaaagaactaa

SEQ ID NO: 234104 - DNA, 122 bp, Homo sapiens
aggctggtgccaaggcgggccctgccttgcgtgtgccaggcaacactttacagagtgctgcgctgagccggtaaactccagggcaagtccagtcctcctgtgcccaggaccctccggcggcc

SEQ ID NO: 234105 - DNA, 122 bp, Homo sapiens
aggtgacatctagggcctcatagcccttgctggagaggtccttgctggagaggcccttgccggagaggcccaacatgctcacaaccctcggaatgtttgcagcttggcaggactgagtgacc

SEQ ID NO: 234106 - DNA, 122 bp, Homo sapiens
tgttggccccctcaggctcctgtgccttcctgcgtggcctccctagggtgggcatggtgacggggccggtcagtggtggagatgcagggtaactacggtctgatcctgggttcagtctcgtt

SEQ ID NO: 234107 - DNA, 122 bp, Homo sapiens
tggaaaggctggccccggggcatgctcactctcttcagctacagtgggccagtcagcagacgaaagcaggctggtggataatcttatgtcttgctctgtttcggagggacatgcagagtctt

SEQ ID NO: 234108 - DNA, 122 bp, Homo sapiens
catcctcagcctcccgttcaacttgtttattctcccagaaacctccttataacatacttccgtttccccagttttccttatgcttgaaaagtagatccaagataacagtcctagaaacacac

SEQ ID NO: 234109 - DNA, 122 bp, Homo sapiens
ttccgtaggacatgctgctatggaaacgcggtgcagcagccccccagaggcgacgcggcgcgcatgcgaggtcgagcgatccaggcagctactcgggctccatggcctcctccggccgcagt

SEQ ID NO: 234110 - DNA, 122 bp, Homo sapiens
atgcagtgtgttcctgactctgcttaatttgttaatttttgtgttctttttcttccaaaacgattttaggcaggttatataaggacatcaaatacagtggaataacaccaaaattaaaacaa

SEQ ID NO: 234111 - DNA, 122 bp, Homo sapiens
aaccatagacaccgcccccaacagcgactccgacttctgctggtgcggggaggcccgtggcgcatgcgcctggctcagcgtttgtttttaagcacgggcaagaccacgtggtttggagggac

SEQ ID NO: 234112 - DNA, 122 bp, Homo sapiens
ccaggctgcggtgcgtctgcttgtggcggctcaggttcgacgacgtggcgtaggtcttgccgcactcggcgcacgcgtgccggtgcccgccgcccgcctgcgcccccgcgcgccccgcgcgc

SEQ ID NO: 234113 - DNA, 122 bp, Homo sapiens
cctgctgggtccaggtaactcctgtgtccggagcctcccaggatggtgcccctgccatgtcgctggatgtgctggggcggctcctccgtcgtcggggacagcgctgagagctgagactgggg

SEQ ID NO: 234114 - DNA, 122 bp, Homo sapiens
cggcagccgggcaggtcagatgaaacctccgcaggtgccacagttcaacatctacggttccggagggcacgtggcagggaggggaggaggggcagcggaggccggagggcacaggggtcaga

SEQ ID NO: 234115 - DNA, 122 bp, Homo sapiens
ttccggattgttgtgaggattggatgaaataatagaggaatgctattgtgggtgggagaacgcattgtaaaaaactctgttcagatgtaagacaggaatcacaaggagaagggtcctctctc

SEQ ID NO: 234116 - DNA, 122 bp, Homo sapiens
cttccggagcccggggtaggcgagaagcaggcaagggcgcggagggaagaatcgggagggcggccagagcacggtaaatgccccagaagtttggcagattaggccaaccttgtccgctcgcc

SEQ ID NO: 234117 - DNA, 122 bp, Homo sapiens
tccaaaatggcggctctcaggctggcgcgctccgtgctgctggggctttgaggtggtcgccgggggtccgggggaccctttccccgccgcggaagccctagaggatgaatcggggaccctgc

SEQ ID NO: 234118 - DNA, 122 bp, Homo sapiens
cgcagctgggatccctgttttctccccaactctgggcccgtcccccagcgcttttgtgagcgtccactgcccttactgccattaggtctggactcagtgagctccttttattcttttcttcc

SEQ ID NO: 234119 - DNA, 122 bp, Homo sapiens
gccctcagtattgcctgcacaaatatctaccaggtctgcgacgaatagctccagcaacttcgcaccgtgttttccactcagcctaccgacaggcactgtgcagattcaagcggagagatgtc

SEQ ID NO: 234120 - DNA, 122 bp, Homo sapiens
tgccctacccatctcttttggaaactacacggtcttagaattcaattctgtctagctacacgtctttagctctctgagccacaggggtttttggtttgtttcatctataaaagaaagacaat

SEQ ID NO: 234121 - DNA, 122 bp, Homo sapiens
cacagcagggccccgaggctgtgcagagagtgctccctttcctgtcccttatggtcaacacgggctcttcagccgctggccggcaggtgcgggtttgaacagtccatgcaaccattcttgct

SEQ ID NO: 234122 - DNA, 122 bp, Homo sapiens
ctgtcagccggaatgactggaaaacatcaacactcccgggagcatagctggcccctgtagcgtcacttccggtcccacccacctacaaatacccttccgggggaggcggacaccgcttcgcc

SEQ ID NO: 234123 - DNA, 122 bp, Homo sapiens
ctctggttcacggggaagagcgctgtttaggagatggacacgctccacgcagacacgcgtcgggttccggctcacggggaggagcgcgctgtttaggagatggacacgctccacaccacctc

SEQ ID NO: 234124 - DNA, 122 bp, Homo sapiens
cctgaccagggaggccagcctagggccggcctgtgggactcacctggtggtgcagcaggccggtggagtcgcggaaccccttggggcaggcagagcagcggtagggccgctccccggtgtgc

SEQ ID NO: 234125 - DNA, 122 bp, Homo sapiens
tttaagagaaggaatcctagtctactctcctgttcctaaaggctctggggatttgagaagcggcagtgtatgtacctcatctacgttcacaattttcctgacacatggtctggatgacagtt

SEQ ID NO: 234126 - DNA, 122 bp, Homo sapiens
gttttcttcttctctttttggacaccctctcagtttttgttttgtaggcttgaaagccaccgagagtttgcaaccaggggccagtgatagctctgcaaaggagaggcagtggggagcccaac

SEQ ID NO: 234127 - DNA, 122 bp, Homo sapiens
cgggggaagccaatgagaaaatcaggcccagccctagggggcggtgctgtcggtcacatgcgcacctggggcgggtggtggcggcggcgcgggcaccgcgagccggcggaagggagaggggc

SEQ ID NO: 234128 - DNA, 122 bp, Homo sapiens
ctcaacaaatatattagggaggaaactgaggagaagaagccagtgtcccgcaagcggcttcgggattaacactgcatttgttctgagagagaaacttgaagaggaaaagcaaatgagaatag

SEQ ID NO: 234129 - DNA, 122 bp, Homo sapiens
gggaggctaatgcttttttccttcttctaggttggaaaaagactatgttagcaagtgtcacgccatggtatgtggttggttggtctatttcagtctaatctattatgctttctggttaaaaa

SEQ ID NO: 234130 - DNA, 122 bp, Homo sapiens
catacaactcagactaagctttgaggtaaaactactaagataatacttaaaacttcaggccgggcgcggtggctcacgcctgtaatcccagcactttgggaggcagaggcgggcggatcacg

SEQ ID NO: 234131 - DNA, 122 bp, Homo sapiens
aggcggccgcagccgcagacacctgggggccggggctgggggtgggggctccctagcagccgccggagcgttgtccaacacgtgagactcatgtgatgaagccgggggagggcgggcaggtc

SEQ ID NO: 234132 - DNA, 122 bp, Homo sapiens
aagattccagaattataagtaaggacacaagtccactcgcagcagagaaagccctgtgtgcgtgctgataatacagaggatgtttgttgtgtctattagtggggttaattatgttttagctt

SEQ ID NO: 234133 - DNA, 122 bp, Homo sapiens
cctcaagctgctctggctgctgctccttgtcgctgcatatggctcttcgcctgtgctttccgctttggcccccgaaattccgttcctttcctagggacccccttcttctgactccgggcccg

SEQ ID NO: 234134 - DNA, 122 bp, Homo sapiens
agctcacaaaagccttgtagtcagggaaggcagcccaacaaggctgcccacagatacacacgtgtttgtcacctgccccagcaattgcaaatagaatagctcttctcaaggcaacctgtttg

SEQ ID NO: 234135 - DNA, 122 bp, Homo sapiens
gatgtcctacaaagaggattattcacttggaaaaacagaagcttgtcaagctgccacaatcgccagggaagattccatctctctctgatggagataaatggaacgggagacgtggggctgaa

SEQ ID NO: 234136 - DNA, 122 bp, Homo sapiens
tttttcaaagttttagagccatttatttcaacaaagagaaagggtgctaaaagtcaccaccgctctgaaagagaacttgagaaactggaagacttcccccatatcagatgtcacttggggaa

SEQ ID NO: 234137 - DNA, 122 bp, Homo sapiens
cggctgcgtctgtcatgggctgcggcacggtcatcttcgttttgactttcaggtggcaaccgcacggtgccacaggctgtcgctgtcacccaagcacaagtgcagtgacaatcctcgctacg

SEQ ID NO: 234138 - DNA, 122 bp, Homo sapiens
gtttcagagccgcgagtaggccctgaaggccgggagggaccgccagtccccactggaagccgcttccgtgcagcccgggacaggtgcgcggcgcccctcgccttcgcctccgcttctgctct

SEQ ID NO: 234139 - DNA, 122 bp, Homo sapiens
actcaccagggagccaccctggagagatgggaggcgggactcagagccagaggcagggaccgagcctccagaccagactgaggactgactaaacaaggagaggcgaaagcacctccgcatga

SEQ ID NO: 234140 - DNA, 122 bp, Homo sapiens
atggtgagaggcaaatgagatcgtgtgggtaaacttttctccctgctcatctccctggcccgcagtatcagctccccgcagcctgctgcctcctagaagacttcctgagggagggaaagacg

SEQ ID NO: 234141 - DNA, 122 bp, Homo sapiens
acctctcccaagttgccctctctcattgcccactcaccactactagggtcctgtggggtgcgggggtcccgaggaaaagaggtgaaaaggacgacgtggagctggggatagtgttgatggaa

SEQ ID NO: 234142 - DNA, 122 bp, Homo sapiens
tggagcgcaagtaaggatacagcaataagaggagaaaaggttcaaagagtatggatgatacgtctccacataaaggagggctttcaaagaagtcacaaagctggggcatgtcttcaggcagc

SEQ ID NO: 234143 - DNA, 122 bp, Homo sapiens
aggcggcctgtacaaagggcgggcggcccgggcagcggctcccccgggtgcccccggccccgatcccccagcggcagctccgggctcctcagtttgggtccaacatggagaatccggagcga

SEQ ID NO: 234144 - DNA, 122 bp, Homo sapiens
cttgactctaaatgggtttaaaaattcttacttgtgttagcccaagaaagtttctgcagccgtctttttggtttaaacaatcaaatactcaataattctggggctggtgggccaggatatgg

SEQ ID NO: 234145 - DNA, 122 bp, Homo sapiens
aaatagcatcctgtgtccccgcactgcagttgtctggtctctccagcagtttggtacttccggtgagtggcagatgcacctttgagctggggacaggggttgggagaggggagaggcaaagg

SEQ ID NO: 234146 - DNA, 122 bp, Homo sapiens
gaaccccttggcgttagagtttgggctacaccataatggtctcctatcaatactggctctcgctacgtgttaacattagggagtggagagtgtgtttcctcacccagggaaaccgtttaaat

SEQ ID NO: 234147 - DNA, 122 bp, Homo sapiens
aagtggtgtttcaggacccggagcgtggcctgcactgccttgttctgtttgtttgtgcaccggattcatcgtgactcatcctgagtcatccaggcagtatggaagaactttggagttatttt

SEQ ID NO: 234148 - DNA, 122 bp, Homo sapiens
ctgaagccccacaagaaggccctctgcgtccgtcgcgcatctccggcctggcggggcttgcgtggctcacacgtacacgcatttctacggccagggttatctatcaccagacattcttgagg

SEQ ID NO: 234149 - DNA, 122 bp, Homo sapiens
gggcttggtcaccagtgctgccagagagcccacaggctgtggggtgagaggcccctcctccggtgtgctccagagagacccacagaggcaactcaggagtaagatgtgtgagcgcactcgtt

SEQ ID NO: 234150 - DNA, 122 bp, Homo sapiens
gacgaggacttctaggccgggagaccctcgggcctgggggcgggtgctctggggagggtccgctgtgttactggccgccgccagggtcgccaccggcgccctccctccgcgcctccctcccc

SEQ ID NO: 234151 - DNA, 122 bp, Homo sapiens
ccccctgatctgagataattgcgggaccgacccagtcaccagaaaacttcgaagatggaacggccccgcgtggggctacaccaggctctggcctcactgcacgggcggggctggacgtcagt

SEQ ID NO: 234152 - DNA, 122 bp, Homo sapiens
tccctgccctccgtgagctcctgctccagcttcgccagctgttccagcaggtgttcctcccgctccctcaggaactgatgaccctgctcaaactcagccacaatgtactgcctctggtcctg

SEQ ID NO: 234153 - DNA, 122 bp, Homo sapiens
tgaagcagcctttttttttttttttcttggaggaaatactgcagccttctggactgcgtacgctgctccctggagaggctctctcggttccacccaccggctggaaggaggggaagtgaatg

SEQ ID NO: 234154 - DNA, 122 bp, Homo sapiens
acatgagctaggagctcccagcctgtgtgcaccgtggagtgagggaaggtctggccaccacgcagcccaggaccttgtttggtgttcctcctgaggctgccaagctcctggcatctctgaga

SEQ ID NO: 234155 - DNA, 122 bp, Homo sapiens
ttactgaaagtctgaaggggaaagcctagttaggttttatcttagaagtgatttttaaaacgaaacacgcagataagctcgagctttctggagccgattcctaaggccttgcaggtggtaag

SEQ ID NO: 234156 - DNA, 122 bp, Homo sapiens
ccttcccctagcaaatgaggcagcaagagatagttcctgcaggctgttcctgcactacaacgtatgattccacaagagcagacctaagggggaatcagcacttaaatgagagaacagaggtg

SEQ ID NO: 234157 - DNA, 122 bp, Homo sapiens
tcacctgatggagaagctggctgctccggggtctctgggtgtgtgggaagatgtgttcatcgtcacctgatagggaagctggctgctccagggtctctgcgtgtgtgggaggatgtgttcat

SEQ ID NO: 234158 - DNA, 122 bp, Homo sapiens
aggcctagcaggacactgggctgcgggccgggggtcaatggtggcgggcagccggggccccgggctcgggagctgtggcggcagccgcaggccggggcgctcccccgggatgcccagagcac

SEQ ID NO: 234159 - DNA, 122 bp, Homo sapiens
ggaggaggagacacagttggagcagctccgtgggctgactggggcgaggcctcagcagcgcgagcttgagtgcggccgagcctgcggcgccttcccctgcgggtggggacgagcgggccccg

SEQ ID NO: 234160 - DNA, 122 bp, Homo sapiens
ggctggggggtgggcggagccgcggccgggcagttcattatgttggacagggcgcgtctgcgcctccggccgccgcggctcccggggcctccgcctgcagccggcggcggaacgagggcagg

SEQ ID NO: 234161 - DNA, 122 bp, Homo sapiens
agggggcagacacacggggcgtggggcccagaggccaccgggaggactcaggttttattccgagtgtgctaaggagccagggattgtggctgaagcgggaggaacacgctaaggagccaggg

SEQ ID NO: 234162 - DNA, 122 bp, Homo sapiens
acggagtctcctgcgtctgttccctggtctgcactataatgggttataatgatccacgctcgcagggggtgaggattaaacggatctacctacatccagtgcctggaaggggcctggtgcat

SEQ ID NO: 234163 - DNA, 122 bp, Homo sapiens
cggtgagcgagcggacggtggatttctcctgcagtcggtggcaggaaggatgtcatcacgcgctattttgtgaccagcccctggaccacaactcacgtgagcagaagggctttcttctttgc

SEQ ID NO: 234164 - DNA, 122 bp, Homo sapiens
tgtccgcctggtagaagtggatgtaacggtctgttaaccgcgactgactcactcagtatccgtgataagttaaagatgaatcctgaaggggtaggggaaaggagatcttgagttctccagca

SEQ ID NO: 234165 - DNA, 122 bp, Homo sapiens
gcggaccgtgcgggaccggtagggggtcgcgggccggctaggctcccccgcgcccctcctcgtggtatagcctgcatttctaatacaatgctgttatgctaatcaggtgacatcaccgccca

SEQ ID NO: 234166 - DNA, 122 bp, Homo sapiens
acaaggcgacggcgtggtcgtgggggatgactgtttgcgcaggcgtagtgtcaaaagaggcggagtcggcgaggctggactatggggtggagctgagcaggcggcgctcggcccccggccgc

SEQ ID NO: 234167 - DNA, 122 bp, Homo sapiens
cccgaggagccggagcagcagcccgggtgcggggtggagttgcagcccggaggaggtggtcggggttggcaggtggcaggagagtcgcagagctcttgagtggaagacagtgtcggggcaca

SEQ ID NO: 234168 - DNA, 122 bp, Homo sapiens
ggaacatcactggggacttaccgtgtgtagggcttggctctaaactctccacaccttttacgtatttgatccttacaacctgagctggattctgtatgtaccctcattttacagcagggaaa

SEQ ID NO: 234169 - DNA, 122 bp, Homo sapiens
ggctgaggcaggagaactgctcgaacccgggaggcggaggttacagtcagccaaagatcgcgccattgcacttcagcctgggtgacagagcaagactcacacacacacacacacacacacac

SEQ ID NO: 234170 - DNA, 122 bp, Homo sapiens
atgtggactggccccgtcgccactctatggaataagccacacctcacagccgggaggagacgcaggtctgtggcatggatgaggagttccggacatctcagcgtatctgggagggaatgtgc

SEQ ID NO: 234171 - DNA, 122 bp, Homo sapiens
aatgctgaacatatgtgcagagtttgtgtgttcttgatcgggaacgggaggcccaggacacgttttctgtggcagctcgaatgcagctgagggcgcttgcgggccagagcgaccagtcccct

SEQ ID NO: 234172 - DNA, 122 bp, Homo sapiens
agtcatcctcggtggaagactgcgagcggctgctccattcatcgtcctcatcctcctcgtcgatgtatttgaaataaggcacatcgaaggtaggcaagggcagctctcggtctgagagcgcc

SEQ ID NO: 234173 - DNA, 122 bp, Homo sapiens
aagtgagtgggtcctgccttggggcctccacttccggggcctcgagggctgaggctgactcgatgattcctggaaggtgatgatgtcatggtgacatagcagttcccctccccagccaaagt

SEQ ID NO: 234174 - DNA, 122 bp, Homo sapiens
gtctctggagccctgggggaactgtccccaggcaggcactctcagggcccaggaacagggcgggacaagtccgactcacctgtgaggtaaggacggggccaagacccggaaccgaaaagcag

SEQ ID NO: 234175 - DNA, 122 bp, Homo sapiens
gaaggaggagcagacgcacagcgacccagcccggcctccgccaacgcttaaacagccccgcgcccacctccctcagcctaggattgggctcccagaataagcaacagctttacttccacaca

SEQ ID NO: 234176 - DNA, 122 bp, Homo sapiens
tgtatcgtcaggggaaccatgaagaagatgttgaattagttagaggtgaggtttagttaacgagtttggaagcctgaatctccatatggaggcagtgtgaacagatataacccttacataga

SEQ ID NO: 234177 - DNA, 122 bp, Homo sapiens
cagtggactaaactggaccgcgaagggaatagccggaacccgccaggctcagagccctgccgcccctcactcaccccgagcctcggccgccgcgacccggttcacaacatccgcccaacctc

SEQ ID NO: 234178 - DNA, 122 bp, Homo sapiens
gtggctttgtaacatgccactttggctaggctgaattacatttctggtgagggtgggccacggagaaattcttgcaagatttggaaggcaggaaggaagtctcagctattttgtggttcaca

SEQ ID NO: 234179 - DNA, 122 bp, Homo sapiens
gagtggtgtggggagcctgagccaggagggttcacacctgaggtcctatagcagggaccccgtgagagcttgaagccagcttgtgccagctcaggctctaggactctggttgcttctccaca

SEQ ID NO: 234180 - DNA, 122 bp, Homo sapiens
caagtcttattaactttaatttcatcatttgcagtttgcaaatgaggagcagcctggttccggaactggtggctctgatcgctacaccacagtgtagttgctagaaatgcaatgaaagctca

SEQ ID NO: 234181 - DNA, 122 bp, Homo sapiens
ctggaagggcctgcagctactggcctccctcctccttcctccttgcttagcaactgttgtcgtctggtaaatatttgccccaacaggatctggggctggagcactggcgtcagccgaggtag

SEQ ID NO: 234182 - DNA, 122 bp, Homo sapiens
ctctctcgccgtgcactgcctggacctgtgcgggcctgcactccgcaagcctggcacccgcgggcactcttgcaatgcctccagagacccccagagggccctgccgtaggcccttctgaggc

SEQ ID NO: 234183 - DNA, 122 bp, Homo sapiens
agagcagcttcagagataattccttggttctatgatccctgtttaactccaaattacagtcggacttggatacatcatttgtaacattgtaggaaagaaaaaagtcttggttgtgaaaaacg

SEQ ID NO: 234184 - DNA, 122 bp, Homo sapiens
acagcaaaaagaagtagcataaagttctggtaaagtacagcaggccagtatggtcactttcgccccacaatggcatgacatcagagccagcatcccagattaggatcagctattccaatccc

SEQ ID NO: 234185 - DNA, 122 bp, Homo sapiens
tcaggaggtgatgaatttcggctccaaggcctatttttgacagtaaccaggttcacaccccgcttggcactagagccttactgcacctggggtgtgtctccgcgtggtgcagagcgcgcgct

SEQ ID NO: 234186 - DNA, 122 bp, Homo sapiens
tctactcagccctggggtttgttcccacatctgggagccttcccttaaccctagactaggcgtgggacttgattgtctgcttaaacgccctgtccttcttatgtgtaattgtcacatttgtc

SEQ ID NO: 234187 - DNA, 122 bp, Homo sapiens
ttccctcctgggagttgctgctgagtctcttggcttttcgagaccgcaggcaagtcagtccgtcatctcatctggggaaactgtttgcctttttctgatactacgtagccagtccatttaag

SEQ ID NO: 234188 - DNA, 122 bp, Homo sapiens
gaccggcgcatagctaaaagccggcgggccatagggccccgcggaggaggccccagcaggcggaccaggaggccgaagcctcccgacgctcccagcctgttgcttattcattcagagtggga

SEQ ID NO: 234189 - DNA, 122 bp, Homo sapiens
tcattcttttggcaatgaagggctctagaatggctgaatccctaattatgttgcaagcttcgtgaaggaaaagtacacattccctgttcacttctgtgtcaccagtatttaccccaggacct

SEQ ID NO: 234190 - DNA, 122 bp, Homo sapiens
tgagctcacttctgcattggcagaagtcaatttctgagcacccgacaacttctccctcagcggccctgcctgggtttttctcaggtgcccaagtcatgccagcttgcccagccagcatgcga

SEQ ID NO: 234191 - DNA, 122 bp, Homo sapiens
ataggcgccggcacgtcctgaccgagacccggggctggctgggaaatggagtctacgggccggcccacacccagcagcatgccgggagttgtaggcggtaactgctgcaaagccgaagccgg

SEQ ID NO: 234192 - DNA, 122 bp, Homo sapiens
ccgcgtcgccgccaccccagccccagcagccgccgccgacccagccgcagcagcagccgccgccaccccagcagccgccccagccgcagccgcagccgcccggctcgtctgccaccaccccg

SEQ ID NO: 234193 - DNA, 122 bp, Homo sapiens
agctcgtggcggcgtctccctcgcgccgcgcccctgaattccccagggccgagcccgtcacgccggctcctggacctgcaggaccaaaagatccaaagcgcggccgcagcacagccccgaat

SEQ ID NO: 234194 - DNA, 122 bp, Homo sapiens
acaacccttctcacggcacagggagggaggcacacgcccggcggccagcctcacgggggacgaggtcagggtctgccgccctgcatggttcttccggccctgccagcaccaaaacccacaag

SEQ ID NO: 234195 - DNA, 122 bp, Homo sapiens
gctggggcagccacacccccttccctgccaggcttgctttctgcaactgcgcttcctccccgtctctgccagggtagcaggagtccacaacgtgcctgcctctgttcctaatttccatttac

SEQ ID NO: 234196 - DNA, 122 bp, Homo sapiens
ctcacagattgtgtggcattttggaaggtggagtgcctgggcacctagcccaccacttcccgccccaatctggccctgggcacaagccacatggtgctggccatcagcctggcctcttgccc

SEQ ID NO: 234197 - DNA, 122 bp, Homo sapiens
atctatctattcttgacacagatcacacccctctggatgagagtgtccccaagtgagcatcgtcctcacatcacccccatgcttttgaaaggaataaagcaagcctcaattttgcttacttg

SEQ ID NO: 234198 - DNA, 122 bp, Homo sapiens
cgcaccagcggcccattgttcggcctcgccgggccgcgggatttacccttttcaaacagccggttttgtccagggcagttcgagcggaagtttctcactgacaatttgccccaaatagatag

SEQ ID NO: 234199 - DNA, 122 bp, Homo sapiens
tgtgaggtagtcctgcctggcaggagcagtcacggagccgtaaggccaccagagctgtaacgctgcagcttcaaaataaagctgttttcttccacctctggcttgcccttgaattctttcct

SEQ ID NO: 234200 - DNA, 122 bp, Homo sapiens
aggtggggcctggtgggaggtatttgggtcatggggctggatccctcataaatgacttggcgccattctcacgggagagagtgagctctcactcttagttcccgctagaactggttgttgac

SEQ ID NO: 234201 - DNA, 122 bp, Homo sapiens
gagttcagagagtttgggccactgtcctgaggccaggcagctggaaggtggcagaactcccggatccctgcttccaaccaccgcgctgtgtctccaggacacgtcctgtctcactgggtttt

SEQ ID NO: 234202 - DNA, 122 bp, Homo sapiens
atgaactgtcaaacattaaccagaagaggctgcaggaccagacaggcctctatcacaggccgagggatgaggggcaggaatcaaatggccatcaaatccctcagctggggtatggtgcgggg

SEQ ID NO: 234203 - DNA, 122 bp, Homo sapiens
ttcaacactttatacatgaactacttttcctgtcttttcatttgcctgcttttaataaaccgagtgacagatatatcaatgctagtgttatctgtgcatacatatatagaagggtgtgcatt

SEQ ID NO: 234204 - DNA, 122 bp, Homo sapiens
ctggagcagtgcagagtatctcgcatcgggtaagacggacatgtcaaccgtcccattccccgccttgatctccgcgccagagtcatcgttattcttccgatacatactggcaatgcagaact

SEQ ID NO: 234205 - DNA, 122 bp, Homo sapiens
gaaaatgcctgagtcccagcactcgcctctagatgagaacttcctccctactgggctgatcgagtaaagagaaggaaaggtgctgggttcaaaacaaaagaaattaacagcaagcgcggggt

SEQ ID NO: 234206 - DNA, 122 bp, Homo sapiens
gtgagcacatccgggtcccgctggatgcatgcaagaggtggttggtctcgtgggttgggtcgatgatgagaaccttatattttcctgaagagaggtgatgacttaaaaatcatgctcaatag

SEQ ID NO: 234207 - DNA, 122 bp, Homo sapiens
agctggcttcggccggccagacggccttcacgtcgcaggcgccaggctacgcggctgctgcggccctgggccatcaccatcacccgggccacgtcggctcctattccagcgcagccttcaac

SEQ ID NO: 234208 - DNA, 122 bp, Homo sapiens
tcccctgtcccctcccgggcatcctgggtgggggcgggtgccagggcaggtagcgcccgccgcggctgggccccggcgagtgcctaaatataatctgcgggcgggggaggccgcctcccgct

SEQ ID NO: 234209 - DNA, 122 bp, Homo sapiens
caccttgcctccctctggccctcttgctcctggcctggctccggctgcccctccatgcagcgccgccctctgtgcaaggctctgagtggggctgcctggaagaggagcccaaggcctcctca

SEQ ID NO: 234210 - DNA, 122 bp, Homo sapiens
ggtgtgctctgccgcggttctttccagtctctgcgcttttacatgcacacgcacagattgcgagtggaatctcctgggcttttcaaaagaatgttttcaacattaagcgcatgcacacagtg

SEQ ID NO: 234211 - DNA, 122 bp, Homo sapiens
gcaccgaggaaccaggagaaggatacgtgaaacaagagaagaggccctccgcagctcccacgtgcctcagctctggcctccgcttaaccagaagaattctgaaaacagaacttcgtcagaac

SEQ ID NO: 234212 - DNA, 122 bp, Homo sapiens
gtctgccaaggaggccagggctggcgaaggattttcccttgcaaaggaggactctgcacccggagcaacaaggccaggccccagaggcactgtgctgggccgggtgtcacttggcacctttg

SEQ ID NO: 234213 - DNA, 122 bp, Homo sapiens
acgctctttctttcttctcgctggaagactggaggaccagcgaggggctgtttgtggagccggcgggcgggccgtttgtctctccttcctgcgcctctttggtgctgggaggcgggccgcag

SEQ ID NO: 234214 - DNA, 122 bp, Homo sapiens
acctgtctccccacatcctgggcttctttccatcctgtccaattcttgcctaaatcatagcgaaggtgagggaagggagggctctctgcagagctggtgtgggatggggaggagctgctgtg

SEQ ID NO: 234215 - DNA, 122 bp, Homo sapiens
cggcgtggagcttttaacagcaagcaacttctgtatttggagaagtatcgtcctaaaatgcggctgcgtttcaaagattccaacggtcatagaaacaactgttgcattcaataaaattgggg

SEQ ID NO: 234216 - DNA, 122 bp, Homo sapiens
atttcacaactaattttacccccaacccctcccccttttatttttgagactgagtctcaccgcgctggagtgcagtgccgccatcatggctcactgcagtctggaactcctgagcccagcga

SEQ ID NO: 234217 - DNA, 122 bp, Homo sapiens
gtctgtctctataggtttgggtggagcctgagagtctagcaaactgtaggtgctagtaggcggcaaaccctgaagaactccactgccacctgctggcaacaattcacactgcaagccccgcc

SEQ ID NO: 234218 - DNA, 122 bp, Homo sapiens
cgcgggagcctcagactcccatgcagccttcctggccctgggggcggagtcatgtctccccgcccctggttatgtcaccggcctgcgggcggggcggttgggggctcgccttccggtgtcca

SEQ ID NO: 234219 - DNA, 122 bp, Homo sapiens
gcccgcaggacccaggggacccaccctcccgcgagcacgcacgcgcagggcccacctctgcgagttccaaaccctcggccctcgggtcgcctgccctgggcctggccccgcctccaggtccg

SEQ ID NO: 234220 - DNA, 122 bp, Homo sapiens
tggttataagtgccatcttctacagcaaaatcacgtcttaagaacaggaaaaacgttccacgggaatggagagattatctatgcataaacagctggggatcatttctagctttacgtgattc

SEQ ID NO: 234221 - DNA, 122 bp, Homo sapiens
gactttcaagcgttatgtcttcgacacccacaagcgcatggttcagtctccctgagtgtccggtgacctcccccagggcctccttgcccagcccagtccaggctgctgtgccaaatcccaac

SEQ ID NO: 234222 - DNA, 122 bp, Homo sapiens
tttcgaacggcgaattccacaacctccacctcctacgtccggatgcgcactgagggactacgttagcagacgcgtcaaaagtaccagaagctggcccccggcgcatgcgcagagatgttccg

SEQ ID NO: 234223 - DNA, 122 bp, Homo sapiens
tgtggtataaagcaaggtaagtagcgtgatattcactgctttttgtcccacagaagccatcgctgtgtgcggaaatccatgacctggccatgacttctacaacccggaggacttgcctggca

SEQ ID NO: 234224 - DNA, 122 bp, Homo sapiens
ctccacagttagtttcggtgactttgcagcctccctgccccgctgcgcccggctcgcccccgtccctctgctcctgaggccctgagcttggccgtctctgtgccaggactcgggcctgggct

SEQ ID NO: 234225 - DNA, 122 bp, Homo sapiens
ggcgtacccccacccccagcccgggatacttcccacctccccgatcgcgcgatagctgcgcggtagctagcggcagttctcgcgagacccatcaccatggcagcggctgcagcaccggcggc

SEQ ID NO: 234226 - DNA, 122 bp, Homo sapiens
cgcgcctcaatggccactttagaaatacaaacaactttagaaataaagtaaccaaacccccgaaagcggctttgaagaggcgaatgcctggtggcgctttactatggtgtgggccgaggccc

SEQ ID NO: 234227 - DNA, 122 bp, Homo sapiens
gggcagaaggcaggagctttgaaagtggggcttggcgtgaatggcatgcaggggagagggcgatgaagtgcagagtctatgtgacttgcttcggatgtcttatctatcaggtggtctggctg

SEQ ID NO: 234228 - DNA, 122 bp, Homo sapiens
agtaggtaagaggctggggtggaaagaaatgccttctgcataaatctagttagtctgagtcgttttttgacaacttccgggaccagacttcaggcagtgctggaaattgttctctttaccat

SEQ ID NO: 234229 - DNA, 122 bp, Homo sapiens
ttggggccctcagtgctttacttaccagtcctctctgccctcaggcaggagcaggtgctccggctttggactcagggaatctgccaaacattttccgccatccctgaacttcctgttcttcc

SEQ ID NO: 234230 - DNA, 122 bp, Homo sapiens
ctagggaggagtcttggaagcttccatgtcattaattcccatttggtttctcagctctcccgtctctgcataaccaattccttgtgttcaactcttgctatgtaacacactcagagtggttt

SEQ ID NO: 234231 - DNA, 122 bp, Homo sapiens
tttcacttccttctttcaaatctcatgtaaatactaattgaacccaaaccccattcagaacgaagcctgcagtggagtctgtgacacatggtctttcgctttcctcagcagtgcagggagac

SEQ ID NO: 234232 - DNA, 122 bp, Homo sapiens
ttcggagtagatgttgtcctgtgcttccttcccatgtgggactgccatgcaggttgaagacggttttgtgcttttctctgcaaatggctgttctttggactgtgtgaggtgattctgcgtag

SEQ ID NO: 234233 - DNA, 122 bp, Homo sapiens
ctgtggaagccacaagccactggcgtctgcttctgtggagaaacaaacttcagccacccacgggcgcccccgcaagggccgggctgattcctcgagagtggctggcgctgggcctgcacagc

SEQ ID NO: 234234 - DNA, 122 bp, Homo sapiens
ctggaagagagtgtggtgtgatggacgggcagcttcctgtgtgctccaagggatgagcctcgtggggcagagggcccggggccgccgcctggcctgggagtccctccctggtttttattctc

SEQ ID NO: 234235 - DNA, 122 bp, Homo sapiens
cacggggaggcggggagcagaggggtcgatagcacagatgttggctcttccgctgaacagcgggcggcctcaggcacaggactcggccactcagtgcctcagtttcctcatctgtaagacaa

SEQ ID NO: 234236 - DNA, 122 bp, Homo sapiens
gcattcgtggccccccagtcctggtagcgcctatagtcccctggcatcagcaggtactgccgtcctcggtagttggacagctcgtagaggacccaggagccctccagcacgttgagggagtg

SEQ ID NO: 234237 - DNA, 122 bp, Homo sapiens
ttatgttaataccgctcgagctctggaatttgatgtcagtgtggtcaaataaggtggacccgtctctactaatctcttaacttttttttttgttctatagaaataaaactaagcttttcttt

SEQ ID NO: 234238 - DNA, 122 bp, Homo sapiens
gctagtcctgcaaacagtcattctcttgacatctgtgattctctagatattaccagttaacgtccatgcaaggaggaatggatatatgatcagaagaagcatgaaaagatctcctcctctca

SEQ ID NO: 234239 - DNA, 122 bp, Homo sapiens
ggcgctgacaagtccaccaagcctagacgcgttcgacgcccattggactcgctgggtgtccgtcatctcgccactgccagtgggctgagagctcttggcccgcctcggaaagaaacatgaac

SEQ ID NO: 234240 - DNA, 122 bp, Homo sapiens
aacaggcatgccacctctgcaccctggattggtcctggtgttccccgcccagccgcaaaccgaaccgccgctgtcccagtcctaccactagagggcgcggataacttaaactggccggggac

SEQ ID NO: 234241 - DNA, 122 bp, Homo sapiens
tacgaggagcggcgggatgcctgtgtgggtgagcgcgccatggcctgggcatgggtcagccggcagcggtgcttggtcttggcagggctgccagggtgtaaggggggacgtcagagcccaca

SEQ ID NO: 234242 - DNA, 122 bp, Homo sapiens
accatgtgatccgcctgccttggcctcccaaagtgctgggactacaggcatgagccatcacgcccagccactcttggctaaatttctttagtttttgtagagatggggtcttgaactcctgg

SEQ ID NO: 234243 - DNA, 122 bp, Homo sapiens
aagatggcttttccactcacatgtctactgcttgggaggagatgggctaaaagatgaactcggcttgtgtttgaccagagtgcctcaatgtggtctctccagcataaaggactgagggcagc

SEQ ID NO: 234244 - DNA, 122 bp, Homo sapiens
tccggcctctttcttttctgccgagcgctctgagattcatatgtacccagatgatcagcccggcccttctcaccggccagtggccagaggtccctggacacccggagaggggtgggagggca

SEQ ID NO: 234245 - DNA, 122 bp, Homo sapiens
tcctttttctttttttggatgcatattcatgctcttcattattgaatatttctccttcttcgctatttaagatactgaaataaagacatattctattaaaatattttttcagggagatcttc

SEQ ID NO: 234246 - DNA, 122 bp, Homo sapiens
acacacacacacacacaaaccgaatcttgaaaaactagacgttgcccagctaccagcccccgtctggtttccataggaacgcgcaattccgttgcgtagccctctgcgccggtagttgttct

SEQ ID NO: 234247 - DNA, 122 bp, Homo sapiens
tggaaggagcaggtggtggggtcatgagtgcagaggttgcggtacttgcaccaatggcagcggaaggcgctgttgacacaggacaggcacctgcaaggacagagatggtgagaggcaaagag

SEQ ID NO: 234248 - DNA, 122 bp, Homo sapiens
gtcttttggttgagctcgtttttctggagctctctttcaggccagatcctggccacatcccggggttgtgacccacgtgccttggtttcttgccaggtcgtttgctaagcccccgaagcagg

SEQ ID NO: 234249 - DNA, 122 bp, Homo sapiens
gcctccctctgagggccacatggctccgcgggaataaatgcaggacactaggagtggggacgacccacacctgagccaggggcagcagcaaagcatttgagcggcaaggggacagggagaca

SEQ ID NO: 234250 - DNA, 122 bp, Homo sapiens
cattgactttaaaaggccattttccttcgtcttctacaagaagcaagaaacttttttcgacgtaggcttcataccctcccttcggaaactcagtccgctgaccaaagccgcagtgttcaggc

SEQ ID NO: 234251 - DNA, 122 bp, Homo sapiens
gtatctaactaatctgatggggacgtggagaacctttgtatctagctcagggattgtaaacgcaccaatcagcgccctgacaaaacaggccactcgactctaccaatcagcaggatgtgggt

SEQ ID NO: 234252 - DNA, 122 bp, Homo sapiens
agaagccccagggcacccactcactggaaagagatcagaaagcagcctctctcccgaggccgcaggcagccagctccccacttaaaaaggacctggtatcaatttcactttttttgtcctta

SEQ ID NO: 234253 - DNA, 122 bp, Homo sapiens
tttgagcaaagaatgggaggatgcgacccaccaggcaggcaggagccgctgactccaatgcgaaaatagaaactgcttccctgtagcttggatgctattgcagctggcacacagaggctgtt

SEQ ID NO: 234254 - DNA, 122 bp, Homo sapiens
tctgtgccctgcgtgagcccatgtgtgcggggcctttgtgttgcacttcactgagggccccggggtccactgggcacctgctgggctcaaactgcagtgcctgggccactttccatcctgtg

SEQ ID NO: 234255 - DNA, 122 bp, Homo sapiens
gggaggccttggtccttcaggatcacctggctcctcagggctgagcagctgctgaggaggcggcagggctgggagtgccctagtttttccatttatctcgctggggaccactcccgtgcaga

SEQ ID NO: 234256 - DNA, 122 bp, Homo sapiens
caagaaacatatccccagtaacctaaaaatgaaaagagaaatgctgtcgtctttggaaaacgaggcagctgaaagcaacagaccccatcgcaaaggcagcggaggttgcgggccgcacccgc

SEQ ID NO: 234257 - DNA, 122 bp, Homo sapiens
atgcaacgcacctctccgtgggaaggtcgagccctgcggtgcccagctgtggggacagctcggtgctcagtgcttctgatgacagatgctgcatccaacgagccagaaacgcaggcaccgcg

SEQ ID NO: 234258 - DNA, 122 bp, Homo sapiens
gtgtaaataacacatcctcttagaaactttttaactctagttttctttatctcacgtcagcgctgtggtcttggggaggaaaaaaataaagactgtttatctcttattccctgaaggaagtc

SEQ ID NO: 234259 - DNA, 122 bp, Homo sapiens
ccgggagagcccccgccccgggaggaaggggaggaggccgagtgtttcctggcgcattcccggccagcccgagtgactcactcggccaaggaaactcccagggcccgcccaggacccccaag

SEQ ID NO: 234260 - DNA, 122 bp, Homo sapiens
tgttcccaatgactggccaccccctggatgccactgttttctaacgtggcctcagggccacgtgcccagctggggttctgcccctggctgtgctgtttggggagttagtctctttgagcttc

SEQ ID NO: 234261 - DNA, 122 bp, Homo sapiens
gacaaggctaataacagggatttcaagctgtgtttcagcaagccagtcacagagtattcacgtgttaattcactggcgtgttccgcggcataagcaccccctctctgccttcccccagttcc

SEQ ID NO: 234262 - DNA, 122 bp, Homo sapiens
taaattcctccagtcacatgaaattcacagcagaacaaggattcaaaatgggttaggcaccgaaatgtcatttagcaaatcaatgattcccaaaagatagaggtttaggggcggggaaggga

SEQ ID NO: 234263 - DNA, 122 bp, Homo sapiens
gcgcgcgggccacccccagggcagggtggagtctgcgtgtggaaccccagacattgctctcgttccagtgaggaagagtggttctggtcgctggtggtgcaggtgacacacattttcaacaa

SEQ ID NO: 234264 - DNA, 122 bp, Homo sapiens
gtccccgagcagcttccctgggctggccgccactggcagctctgtgccggagccgcctggcggccccaacgcaaccctcaacagctcctgggccagcccgaccgagcccagctccctggagg

SEQ ID NO: 234265 - DNA, 122 bp, Homo sapiens
gacgaggtgactgtgaggactgtggataacctgctggaggtgtctgcccggcacccccagcgcctggaccgccacggcttcgtgtcccgagagttctgccgcacctatgtcctgcctgctga

SEQ ID NO: 234266 - DNA, 122 bp, Homo sapiens
gccttccctccagaagtggggggtctatcctagcagctctggtcactcccaggtggaggccggggagagagctggttgtggacaaagacagatgttccagtgaggtctcctttgaagaatcc

SEQ ID NO: 234267 - DNA, 122 bp, Homo sapiens
ggggcccaaacacatttaaaactggggcactgaggtacttccaggagggctgggggtgtgcggggacgacttctgtccagggctccctccaggagcagtgccaggcagtagccaaggccaca

SEQ ID NO: 234268 - DNA, 122 bp, Homo sapiens
gcaacctccccaggctgtggttgtgacctgaggacgcgtgtgtccccgccctcaggccaccgctacgcgaccctgagtgcaccttcaagaaggccgggcacgtttctgggcgggcgtggggg

SEQ ID NO: 234269 - DNA, 122 bp, Homo sapiens
gttcaataaactagcattgttgcttcgcaaagtgcttttgcttacattattcatttactccggtaactcagtaaggttattcccattttacagaaaataaactcaaatgtcctgtgacttgc

SEQ ID NO: 234270 - DNA, 122 bp, Homo sapiens
ccaagacctccctgcgcctcggagactagtcctgggactcagcgctgattcccaggcacccgcagccaaaccactgcctggcatggatttggcactgctttgcagaggtcccgggcctgggc

SEQ ID NO: 234271 - DNA, 122 bp, Homo sapiens
ggggattggggtctgcccctgcctgctgtgtgacctcaggcaaatcgcctcccctctctgcgcttgcctttagcgcccgcgagtcttgtcttccacgctgaaaaaggcgctttaagtctcct

SEQ ID NO: 234272 - DNA, 122 bp, Homo sapiens
cttctaggcttctgcctttggggtccagagggtaccccatttccggccgagaggtgagtacgtgggaatgcggtggggagtctggtgggcttggccctgacgcgacttcctccgcccccttc

SEQ ID NO: 234273 - DNA, 122 bp, Homo sapiens
tttacgctcagcttcgctgtcggcgtcgctcccgaagagatcctccatatccgccattatcgctcacgtccgctgctgcctcggttaggggcagctcccggcctctctttacggcacggaac

SEQ ID NO: 234274 - DNA, 122 bp, Homo sapiens
ctcccatcgcgagaccggttcccaccgccctgactcccgggcgggccccgccctctccgccgctagccaatcctcgcgttgatgacgtttgggctcgcggccccagcctcccagctctcagg

SEQ ID NO: 234275 - DNA, 122 bp, Homo sapiens
cactggttttctggctgggaaaacagcaggctgagccattgcctgatgtgaatgctccttcgtgctggggctggtattaggggtaggggtgggcttgaggctagagactaatttggttctaa

SEQ ID NO: 234276 - DNA, 122 bp, Homo sapiens
gggcggcggcggcgaaggccccctctgatacagcagaggttgtggtggacgcggcagaaacggcctgctcgattccaggcgcaccccagatggcgtcaacgttgacctttgcattgtggggc

SEQ ID NO: 234277 - DNA, 122 bp, Homo sapiens
cccaccattggatcttctacccccgattaaaggaaaaaaaagtcctgagagccagaagggcgtggacagccctaggacatcagaccacaacagccccccaagtctcccgaacatgagagtgc

SEQ ID NO: 234278 - DNA, 122 bp, Homo sapiens
cagaggtggtggggccccgccacggagggcaccgaggggaggaactggggcttcattttgcggaatgagagtggaggccatgaaaccgaacctcatgcacccccagccacagcagcctcatc

SEQ ID NO: 234279 - DNA, 122 bp, Homo sapiens
aggagactcgcgcggggactgggagggcggcgggcggggagcgcccctcggaggctttgccgcagcgccgattctcctccaaacttctcccctggctcccgcggcgcggggaaggagggcac

SEQ ID NO: 234280 - DNA, 122 bp, Homo sapiens
tcataaatggagaatgaccgtgcctgggcctctgcagttcattaaagaactacacacaagcggtttacctgctccgttcgtagctgcggtggcgagatggtgttctccctcggtcataatca

SEQ ID NO: 234281 - DNA, 122 bp, Homo sapiens
gggctcgcccggtcctgtctccgtccctgaagcggtgcggcgctcaggtgagcgaggtgtcgtcgtcgctgccctcgccgcccgcgccgcccatccgctcctctctgctctcggccaccgcg

SEQ ID NO: 234282 - DNA, 122 bp, Homo sapiens
ccgcccccactcagccctatttccgggataggccccggagcgtcacaggcaccgccctctcgggctaccattggctaccagattcccgaggctccgcccagtcacgtgaagagcgccctggc

SEQ ID NO: 234283 - DNA, 122 bp, Homo sapiens
tggccaagccccctggctgaatgggtggactgagctcccacagcatgacatcagctagggcgggctcccctctcagctgtcccctcccctttcctcccgcctgaaacatgatccagctgaag

SEQ ID NO: 234284 - DNA, 122 bp, Homo sapiens
cgctcctccttcctcacccagcagctgagatgcttctactactccctgcttcagtccctccggggctccccactgctggctgacaaaatccaatctttggcaccagtccatcaggcccgggg

SEQ ID NO: 234285 - DNA, 122 bp, Homo sapiens
gccttaaagggcacatggacctggaacccaaagatatctgatttgtgaaagaaccaccaacggggccacttccatttgtgtaaacaagaggcttgaggccaaaatgtttgggtttgatacaa

SEQ ID NO: 234286 - DNA, 122 bp, Homo sapiens
ggtcagggaggggctctcgggaggtgacattcggccgagaccgagtgacggtgtggaacccgggcgcactgggaggcacgatccaggcggagggagcagccgtgccagggccctgaggtggg

SEQ ID NO: 234287 - DNA, 122 bp, Homo sapiens
atagaagcagggggacaaggttgtttggtggagggggcagctgacagcatttccctccttcggcttcatgcagtagccttgggccttggctgatgagcaggtcttaggtatcatgggaggga

SEQ ID NO: 234288 - DNA, 122 bp, Homo sapiens
gccagccctgtgcaccctgtgtgcctgtccatctggaaggcccagcatgagaggcctggccgtcctcctcactgtggctctggccacgctcctggctcccggggccggagcaccggtacaaa

SEQ ID NO: 234289 - DNA, 122 bp, Homo sapiens
gtcacccgcatttcctagagtgccccagctctaatcggaaggtacggcccacttctgggccgtggagaacgaagccactgggaccgtccggggagtggagtaagctcctccgaagtctttct

SEQ ID NO: 234290 - DNA, 122 bp, Homo sapiens
gcagaagtacctcctggggccaagagcaactcacagccagactgggggtagagcaggggccgaaggtgaggaagaagggcccatggaaccactccggaaccagcactgatgtgcatcttctg

SEQ ID NO: 234291 - DNA, 122 bp, Homo sapiens
tattattattgttattttttgaaatggagtctcgctctcactgaggctggagtgcagtggcgtgatctcggctcactgcagactccacctcctgggttcacagcattctcctgcctcagcct

SEQ ID NO: 234292 - DNA, 122 bp, Homo sapiens
gttttgcttattggtgtgaacagactcctttcacagaacacgcagacattctgtgagcaccggcccagcaagcagtgtcagtggctgcgccgttcctgcttaaatgagcaaggccttcgggt

SEQ ID NO: 234293 - DNA, 122 bp, Homo sapiens
ggcgagctaattgcgggaggtgccctcccctccactttcacttccccaggagagaggaaccggaaccagatgtgcagtgagggacagcagctgggggccatcccccaccccgcctgccgccc

SEQ ID NO: 234294 - DNA, 122 bp, Homo sapiens
aacgtgtatatcaacaaagagaagcggctgcagctgtcccggatgctgaacctgacggaccgacaagtgaaaatttggtttcagaacagaaggatgaaagaaaagaaactgagcagagaccg

SEQ ID NO: 234295 - DNA, 122 bp, Homo sapiens
ccttcctgctttctcaccctctctcttctcaaagcaccagtgatttgtccttttcagaatcgcgaacccatagatatcccctctctctatcggccctttctgcttttccgtcctttttgatc

SEQ ID NO: 234296 - DNA, 122 bp, Homo sapiens
ccggccgggtaacccggagccgtcgtgcggtccctccagaggcctctgacccggctaaggcgccctgagggcgccctccagcccacccctgggagcgtctccctctcgagctgcccctcaac

SEQ ID NO: 234297 - DNA, 122 bp, Homo sapiens
cctgcactaaaaaattaagattgtacctcttcaaagaattatgaatattacgtaagataacgtgtgtgaagtgcctaagcccattcctggcacatactgcaaaccagatatgtgtcgggatt

SEQ ID NO: 234298 - DNA, 122 bp, Homo sapiens
agatgatgttagcatggtcactgagatggtcagcctcccaaggaagggatgcttcagccacggtccaaatgccttcagggacaagcagggcagaggcccgggaggtgtcaaggctggatggg

SEQ ID NO: 234299 - DNA, 122 bp, Homo sapiens
ccacctaagtatctggaatttgtggtctagtaagttttttaagcagtccgcacccagcaccgtacctcccagcctcctttgccgtcttactaaaagtgcatgcttgcttctcttcctgtctc

SEQ ID NO: 234300 - DNA, 122 bp, Homo sapiens
gaggatgtctgtgtgacagactcgggttctcggtggcacaaacctccaagggctctactccggaaagccgtgtcccggacgagagccgcggcgacgaagggaacaggcgtggacagaggagc

SEQ ID NO: 234301 - DNA, 122 bp, Homo sapiens
gttgaaaaggagctgaacagatcatttagggacctctttgtgtctttacattcaccttcccgtcacttctacccactccagaagactaacagaacgagaagatggagagcagaaaatgaaaa

SEQ ID NO: 234302 - DNA, 122 bp, Homo sapiens
aatgtcgctacactgaaacttccacagagacccacggggacgtgtggcctgtcacaccgtcggctgtattggatcaggattatttcttatgaaggtctgctttgccagtacgcagcaggtcc

SEQ ID NO: 234303 - DNA, 122 bp, Homo sapiens
cagacccgagccagcttctttgctttgactgttttcctcttgctgcgtctctttggtcttcggaaggaaatctgttaggtggttaattttaagtgaagggctacctctagcattagcatgcc

SEQ ID NO: 234304 - DNA, 122 bp, Homo sapiens
aggtgtacagtcctgggcatgcgctgtttgagcttcgggggagagcccagcactggtccccggaaaggtgcctagaagaacaaggtgcaggaccccgtggtgagtagcgggctggtggatgg

SEQ ID NO: 234305 - DNA, 122 bp, Homo sapiens
cttagtttccctttccagtgaggaatatctaattcttctacggttaagccgggaaaacagcggctagtttaggagggaagaaaacccttgggcaaacgcccaaagcctgcgtatattccggc

SEQ ID NO: 234306 - DNA, 122 bp, Homo sapiens
gtgctgaggttcaactgtgaaaaacttttcatatctaacaacagtttcgaagaactccaacgtcacagatgtatgctgataggaactgactcctgatgttaccagagttcgcatcataccct

SEQ ID NO: 234307 - DNA, 122 bp, Homo sapiens
ttgggaactggagtctgcaggggtgggcgtggggggcgtgtctgcagaggccattttggacgggcctgcgtggcaagggggaggcgtctgcttccgacacacatgctggggaacgccagcca

SEQ ID NO: 234308 - DNA, 122 bp, Homo sapiens
ctctctgggcaggagtggtaccggcagcaggcgtccagggctgtgaaccaggccatcgggcgagtgatccggcaccgccaggactacggagctgtcttcctctgtgaccacaggtgcgtgca

SEQ ID NO: 234309 - DNA, 122 bp, Homo sapiens
cgtagcaaaattcttaggcacacaggatctttgtctttttttaaaccttgccttggtgagcgagttttctaaagagcgattagtcccattgtggagatgcacccctaccgcccaagcctttg

SEQ ID NO: 234310 - DNA, 122 bp, Homo sapiens
aggcgctggggtgatggggcgagctggagacgcggcctggagcccacgacctgggcttctcgccctgccctactgcttgctggttcgtggccgggccgcgcctcttctgggcagagggcacc

SEQ ID NO: 234311 - DNA, 122 bp, Homo sapiens
tacagtcacctaataagttgccggcgcccgcgcccccattggccgtgcgcgtcacgtgcccgtccagcagaacaataacgcgtaaatcactccgcacgctattaatggtccgatgttttgca

SEQ ID NO: 234312 - DNA, 122 bp, Homo sapiens
gcagctatactccagccacacaggacttctttgagttctttcagtgaccaatctctttctcgcctcagggcctttgtactggcggttccttccgccggacacgtcgggtttcctcgtttttg

SEQ ID NO: 234313 - DNA, 122 bp, Homo sapiens
aagacgctcacggttcctgtcgcaggtccaggttattcggtgccataaaaaggcacacgtcgaccttcactgtttcctgcaaacacagctgggacatcagcccggaaaggaatgtaacctgt

SEQ ID NO: 234314 - DNA, 122 bp, Homo sapiens
ctgccgcctggacccttgtgggagcgcggctggaaaatggcaagggcacggaggccttggcgggagctgtgtggcggcctggggggctgctccctttgtaaccgactccacccacaggaggc

SEQ ID NO: 234315 - DNA, 122 bp, Homo sapiens
aggacttcaatacaggaataaggagtactccaaagatttcttgcactttctggaattaaacgctgtgactttagcttccttcctttggattttaggaggcagaggcatgtattgaggtgggt

SEQ ID NO: 234316 - DNA, 122 bp, Homo sapiens
tacaaggaacaatatcccagggtgggtgtacatcccctgcgctactgggcgtaatgtcatcgtctcccaacgtggatattgggaataatgtcacaggggggtgttcaccgtcttcgatatta

SEQ ID NO: 234317 - DNA, 122 bp, Homo sapiens
gtgtctgtccccacgccctgttcacaagtctgtggggcgagaggctgcaatactccatcccgggtgtctgggctgctcaccaggccggctcaggcttcccacatcctgtaccctgggttggg

SEQ ID NO: 234318 - DNA, 122 bp, Homo sapiens
tgagctgacaagagttctcggagaggacccgacttctgctggggcagtcgcagtaaagcccggagacaggaagggcccgggggcgggggcgggggcgcccccgaacccaagacgccggccag

SEQ ID NO: 234319 - DNA, 122 bp, Homo sapiens
ataaagtctgaagactggatccaggcaaattcatgttctttctttgtaactcactttcttcgtcaacatttctgtgactcaatggatagcatatttccatcaagtagcacgtataacgtgat

SEQ ID NO: 234320 - DNA, 122 bp, Homo sapiens
ggtcagtgcgtccccggcaggtgcgtgtacctgattcagtccgtgcttatcttgcgcatacgggccgttcagtgtcccgctcggagctcgtcgccgccgcagccttgaggctccgacccccg

SEQ ID NO: 234321 - DNA, 122 bp, Homo sapiens
agccttggtgtacagaccacctttcacaaaacgaaatgctatgactgtatcttgatatctcgaactttcaaaatatattttcagtacacccagttgccaaagttttgctgtctcttagagaa

SEQ ID NO: 234322 - DNA, 122 bp, Homo sapiens
gagagagacttgtgtttttgtcattagacaggaaacttgggctcagggagacacactggccgctcctccacacccctccaactctccttcagaactctatctttgccatgagtattcctgaa

SEQ ID NO: 234323 - DNA, 122 bp, Homo sapiens
aagctgcgggggcgcgccctggagcccagagcgacaggggcattacccaccttcccgggacggagatgcccaggaccttgtgttggctcctcctggccagtgggtttgtctgtgcgcactca

SEQ ID NO: 234324 - DNA, 122 bp, Homo sapiens
aaaaatatgccttttctttgataagcagatactttccccattcattaacctgcatcagtacgtaagtttagttttgctcctgtgtgggaatacgcttctcacacattctctcacatagagag

SEQ ID NO: 234325 - DNA, 122 bp, Homo sapiens
tgaagtcagtcccatcaaatataatatatggtggagggtagggtgcgacaaggggtatttcggggagacaaccacagtgaccactgcacctttatagcactcatcacaatttgtaattatgc

SEQ ID NO: 234326 - DNA, 122 bp, Homo sapiens
gctaagaatgtgaggtcactgcaaagttggaaagaaacgttaacaataactcttgcaagccggtataagccagctgcagctcaccaatgatggaaagtctaaatacccattcattttagcaa

SEQ ID NO: 234327 - DNA, 122 bp, Homo sapiens
accccgcctccctcttagcataaacttgtttacttctctcagatcctctactccaaatgtcgggggtaaaagagcttttcagtccaaaaaaagaaaaatggctgaaatccccgagatgcaat

SEQ ID NO: 234328 - DNA, 122 bp, Homo sapiens
ctgccccacacggcggaccgggtggaggaagtcagctgtgctgcttaaccgtggagtctccgtcccggtcctgctcaccagctctgcaaaggccttgtcctccctgcctgattctcggcacc

SEQ ID NO: 234329 - DNA, 122 bp, Homo sapiens
tggggctccgagctcgtcctagagcctcacctggtctccccagacctgcttcccataggacggtactcgtgaaacaccagtttgtccaggaccccatcaggcatcctccttcccgcatccgc

SEQ ID NO: 234330 - DNA, 122 bp, Homo sapiens
atggattgtggactactgggtataaataaaactagaaagaactttgcagaatcatttatacgttgacatttattgcaaatcatcaggagagtggtgtatcaaactgtcattcctaagtttaa

SEQ ID NO: 234331 - DNA, 122 bp, Homo sapiens
aacactatctcacccaaatcaatattaagtcataaatcatgttagtacatgcccttgatacgatgggatgataatggcaatctacctctgtggtcttcctcccagttacccataagcccagt

SEQ ID NO: 234332 - DNA, 122 bp, Homo sapiens
ttggacgtccctacctagacacagcttctcttggggacgctgtggaggaaatcggggtctcgggtgtggctatatactcagggacagaagctagacgcgctccgcagcctgaggtgggccag

SEQ ID NO: 234333 - DNA, 122 bp, Homo sapiens
cgcgcgcagaacgcctgcctccggcgatgcacatgcgtacaccgccgcccgacgcgcatgcgtacaccgccgtccaacgctcctgccagctccgctcctctagtccaagtcctttaggtcct

SEQ ID NO: 234334 - DNA, 122 bp, Homo sapiens
gcagtgctcatatcaggacatgctgttgggtgtctgactgtaaatacacatgtctgtccccgggagagcttcccctttgcctgagtgtgagggagacgaggggcagggaggtaatgccctgg

SEQ ID NO: 234335 - DNA, 122 bp, Homo sapiens
gcctccccgtgtgtactgctcagggcaagttccagcaggcagtcccaccctcacttcccccgagaccagtgtcctcaacaaagccgcgtcttcgctcttgcaccaactctgttttctccaac

SEQ ID NO: 234336 - DNA, 122 bp, Homo sapiens
ataaagaatgaatcaggaagcagaaatagtgacaaaacacttacctcaagttcattcaggcgctggactcttggagtgaaacgaaagctttttacttcacaggcaaatggaggctgccagtc

SEQ ID NO: 234337 - DNA, 122 bp, Homo sapiens
agttggaatattatcttcagagtaatgaagggccatttagagaacttaaaataaacagtccgatttacatttaaaacaatccctctggttgcttaatgagaaagggattattgtatcaacaa

SEQ ID NO: 234338 - DNA, 122 bp, Homo sapiens
gtcccagagctcgccgactccgaacgcccccaggtggcccaagcactctgcagcaaaagccgccagctaggacgtaccattcgaaattgtagggaaagaaaggctttgcataaccaaatact

SEQ ID NO: 234339 - DNA, 122 bp, Homo sapiens
gccccgccgcccggcagctcgggtctcagcggcggctgcaggcgcagtgcgtggggctggcgcccccgctcctgctcttgggtctgtcggaggtgggaaggagggcgggaaggaggaggaaa

SEQ ID NO: 234340 - DNA, 122 bp, Homo sapiens
ttctgtcattgttcgtcttgaggctctggtcctcccaggtttggctggcaggggccttggcgagcggctccccccatgctacccgcttttccatcaggttttgtgtgttgctcgcatccggg

SEQ ID NO: 234341 - DNA, 122 bp, Homo sapiens
gctctctggggctggccgaggcgggagccggctccctctgctggcggggaggtgtggaggcgcagacgggaaccggggtggcgcgcggccctcgcaggcctgcggaggttccaggtgggcgc

SEQ ID NO: 234342 - DNA, 122 bp, Homo sapiens
aaaagcaggagcctttccccaaatgggccagagtaaaatgagacagacaagaaggaagagcggcaatgctctgcagacacgggggcagcaggcgtgcagaccacgacaacaggcccactcat

SEQ ID NO: 234343 - DNA, 122 bp, Homo sapiens
gctttggccacagttaatataggcatttcggaaaggcggagcgagagcctccagggcgggcggcgccaagacgcggattccggaacaccgcgaacaccctggaccgggtcccggagccgcgt

SEQ ID NO: 234344 - DNA, 122 bp, Homo sapiens
tctcttggggtctggatcgagacccctttttccagcaacacaacccgcggggccgcctcccgcccaccctcaggtgcaggagaccccgggccatgcatccttccgggcaggaaaatgtcagc

SEQ ID NO: 234345 - DNA, 122 bp, Homo sapiens
cagcttacaccgcggtccccttatttggatctgcgggaatgtgggctggagaggtcctgccgtggtaccagcctccagcctgcccccaggactgcccctgacccaggcgcgcccgctgctcg

SEQ ID NO: 234346 - DNA, 122 bp, Homo sapiens
cgggtgtctgggcgacacctcctccgcctccgcctgcgctcgcggtggctctcggcttcgcgtttgccattggttgcgcgattcagaaaaggctccaggataaatgaggccgggggcgggct

SEQ ID NO: 234347 - DNA, 122 bp, Homo sapiens
ttttcatcaagatggaaaaagatctttaggagcagaaaaggggagtgctaactgggggagcgagaagggagacgagcaaaagaaacaaaatcttgccacgtggctctgttttgtcagcaaga

SEQ ID NO: 234348 - DNA, 122 bp, Homo sapiens
gcaccttgtactcgctgcctgctttagtagagttggggatccaacaggaaaggggacagacgaggtctcccgcaatttttgcgctcccgttcccaaactgaattgccccttcgagcgccaac

SEQ ID NO: 234349 - DNA, 122 bp, Homo sapiens
ttaaatggggtctctgccaggaactccactgcaggcagccttgcatcctaagtgctgggacggtcaagcaaggcagaggcggaaaaccccttctcattcagatgaaacaaaagccagtcaag

SEQ ID NO: 234350 - DNA, 122 bp, Homo sapiens
ttcccttcttccttccaggtggcatttacaccctacgccccggagcccgggagcacatgccggctcagagaatactatgaccagacagctcagatgtgctgcagcaaatgctcgccgggtga

SEQ ID NO: 234351 - DNA, 122 bp, Homo sapiens
atgtccaaacgagaagaaagagctgattttgtaaagcgtccttcctaaacatccagcgcccgcccggggagacccgataggacgggcggcggcgaaccgggtcctggctggagaaaaggctg

SEQ ID NO: 234352 - DNA, 122 bp, Homo sapiens
ctgcgcgccacgcgctttaggtggatgagggatggcgcaggtgcaggcctgcgcgcctcacgctttatgtacatgagggatgaggcagcacaggaattggcacaacctgaagtcagctctgc

SEQ ID NO: 234353 - DNA, 122 bp, Homo sapiens
ggctgggctcggctggggttctcccaggatctgggcacaggccgcttgctctggctttggcgcccggccgccgcccttatatgcagcctgctcggctgccccgccccggccctcccagctcg

SEQ ID NO: 234354 - DNA, 122 bp, Homo sapiens
gatgaaagccgctactccctggctggctgagctacagctcccgcagcgcgcccaggagtgcgccggagattcggaaacccgcagagacttctcaagtcagcaggaacttggaaaccgctgtt

SEQ ID NO: 234355 - DNA, 122 bp, Homo sapiens
tggctccggacccggcccaagcgcggcgggacctccatccgtagccctctcccccaacgtcgccctcccggggtccttgtctagtctcagcaggcggcaaacggaccccaggcgtctggcgc

SEQ ID NO: 234356 - DNA, 122 bp, Homo sapiens
gaagctctgtagtttaattagattccatttgtcaggttttgcttttgttgcaattggtttcggagtcttcgtcataaaattttgactgttcctatgtccagaatggtattgcctaggttgtc

SEQ ID NO: 234357 - DNA, 122 bp, Homo sapiens
ccgctgctgccgctgcaaacagtgccttgaggagaggaaagcggggaaccgtgttttcgccgcctctgtaaccactgcacacaagaaaaccagcttctgggagagggggatgattgttggga

SEQ ID NO: 234358 - DNA, 122 bp, Homo sapiens
aacaaagccggggctgcagatccctggtgagattccaggctagcatcagcactcctctcccgcacgcaccacagctaaagcacacaagggcaccgctgaacgccaccactcccagctgccag

SEQ ID NO: 234359 - DNA, 122 bp, Homo sapiens
gctcggatctgttcctgccattggcgtgagactcatctgaggggcgtgggtgggggtgggcggcgagccgggggagggcgcgtttccgcgcggctgccagcccaggagaaagttggggcccg

SEQ ID NO: 234360 - DNA, 122 bp, Homo sapiens
ccaaggtggagggcgcgagaagactggcccgtggggtgaggagccccggcccgacctcagcggcgccacaaagccatgaagaggggaaataattttccaaggggctaagagttggactttct

SEQ ID NO: 234361 - DNA, 122 bp, Homo sapiens
tctcttggctggccgacacctccctctcttcaccctaagatatcagaaccggccgtggtccgcccaagaattaaaggctgctggctggttccggaactgttcgaagacccctatacacaacc

SEQ ID NO: 234362 - DNA, 122 bp, Homo sapiens
cctgcagccggagtgggggtcctcggccggtgctggagtctgggtgctggatggcgcagccggcagcagcgcagagatggagagatgaaggcagcggcggggggggggggcggggggggcgg

SEQ ID NO: 234363 - DNA, 122 bp, Homo sapiens
ctcagccaggcacttaattgttgacacaggaaaaaaaaaaaaaagccaacaaaccaactccgcagagctgtgttaaaaatactggactttcatcccttgattggaggtattattacagcatc

SEQ ID NO: 234364 - DNA, 122 bp, Homo sapiens
cttgccacgtcctcactggcacttctggaaaagcagcgtctcagcccccgttcagggcggcgcactacgtaccactactctaacaaaccagtgcctcgaaagctatttcttgcctccggtac

SEQ ID NO: 234365 - DNA, 122 bp, Homo sapiens
gtgctggcttctgtgatacacacagagaaaattaaccctggagtaacgtgctgagggctgcggtacaggaaagcacagaatgggccgtgcgcataacccggatgagcgccttgtgtcccgct

SEQ ID NO: 234366 - DNA, 122 bp, Homo sapiens
aaaggtactgaaaagcaatcccaattggtgactgaggaagtttgtttcccagctctccaccgtgtgatcaaaaagcatttaaatgatgtcccctgcctgcagggaacaccttgaggcatttt

SEQ ID NO: 234367 - DNA, 122 bp, Homo sapiens
gggcgtatactgcatccttatagatggccccatctttgcaggaaattgcatccaagctggcgtttcagctgtgctttcagtaagccattttcaccctttatgaggccagctgctttgggttc

SEQ ID NO: 234368 - DNA, 122 bp, Homo sapiens
aggaggcgggaggggccagggaggctgcacagttgtgataacagtaggcacatcagggaccggggaggtttggggacctgctgcctgaggaaagctcaggttaggggctgaaggcctagggg

SEQ ID NO: 234369 - DNA, 122 bp, Homo sapiens
actcagtaaataatggctattattattatcatcatcatcatgattaccctcaagttcccccgggagagttcctattcaaccttcaaaaccccacattgttgcacccatcctacagagattga

SEQ ID NO: 234370 - DNA, 122 bp, Homo sapiens
cgtgagccagggcgcccgacctgttattgttactattattgctgctgctgttgtgattcccgtgttaagaagagagacagactggggagcagcccaacgctggaggtggaggcggaattcga

SEQ ID NO: 234371 - DNA, 122 bp, Homo sapiens
agcacagatggtataggatactgagtgcccccccagccctctgtgctccccccacgcacacgctgtctatgtcgattaggctgctgtgccgtcggttcccttcttggtctagcagagccttc

SEQ ID NO: 234372 - DNA, 122 bp, Homo sapiens
gagaccccgcccgctagccgggagccagcggcgcagtgcgagttcagcccgctttcttcgcgctccgcgtcaaatctctccagctctgttctcgcatcccggttcgtaaacttgcccagccc

SEQ ID NO: 234373 - DNA, 122 bp, Homo sapiens
ctgcttttacattttaaaaagtccccagtgtatggccactagctccagatgtgttaatagcgccaaagcagctcacaacaggctccttgagttactgaataacagaactcaacaggcagcta

SEQ ID NO: 234374 - DNA, 122 bp, Homo sapiens
gtgatccgtctgcctcagcctcccaaagtgctgggattacaggtgtgagcaacaagcgtccgataaatgtattttgcatgtgagtaggacataaatttggggggccaaaggcggtaagctat

SEQ ID NO: 234375 - DNA, 122 bp, Homo sapiens
acatcttaaagtaattggagaatgaagcaagaactgatttgtgtgccttgaagtatacatcgccgattgcaaccgtgcagtcacacaggaaaccaaactctcgctgagcgtttaactgttgc

SEQ ID NO: 234376 - DNA, 122 bp, Homo sapiens
agatcgggtccggggtgggggtgggcgtaggccggggcgggccgccccttcctcctgccccgccgtggttgtgctcagtctcccacgccgccgtgggtcccactctgcccggcttgggtttg

SEQ ID NO: 234377 - DNA, 122 bp, Homo sapiens
gaggacaccgcgggccgcagcgaggagggacggccgcggggctgcgcgcgagtgtccgagcgggaatgcgggtcacccgtgctgtttatttacgcagctgtgttttctaacactaatacaat

SEQ ID NO: 234378 - DNA, 122 bp, Homo sapiens
ggaaaaataaggaataaaaagtaaacatctggaatatatttttttctttaatttctcaatcgcttggcttcagcttggaatttgatgaggtaaagccagggcctagtcctgttgccatagca

SEQ ID NO: 234379 - DNA, 122 bp, Homo sapiens
attagggtctctcccacagggtttggggttctctctgcagatttgggggagtctctcccgcgggatgagggggggctctccgccgcacccgcctatgatggcccagaggacccgagctcggg

SEQ ID NO: 234380 - DNA, 122 bp, Homo sapiens
tttagacttccttcattgcatggctttgccttccctctgcatagtcctcgcattcagctgcgagagaggatagagtaggcacacttgcttcttaagcaacttggctcaaagtggcatgcgtt

SEQ ID NO: 234381 - DNA, 122 bp, Homo sapiens
gatctcggctcactgccagctcggcctccggggttcccgccattctcctgcctcagcctccggagtaactgggactacaggagcctgccaccgcgcccggctaattttttttttttttggta

SEQ ID NO: 234382 - DNA, 122 bp, Homo sapiens
tgcagatgaagggggcgggccgcgagggcgggcttgatgcagatgagggggcggggcccacgggcgcgggagagcagcggctccgccggcagctgctgggaactggaaggcgcccggtcctt

SEQ ID NO: 234383 - DNA, 122 bp, Homo sapiens
agcagtcttggcaattctgaaccatgtgctattcttactataagtctaaattgggtagttcgagtgaccaaccagtttgttcagctttgctaaaaatatgcccatgtttgcccaaatgacct

SEQ ID NO: 234384 - DNA, 122 bp, Homo sapiens
gaggagggctttggctgggctacagattaaattgaaatgacagattaacgggaaaaaaaacgtatttaattatatacgtatgcacagaagtcccaccaagtatgagattcgaagaaagacgg

SEQ ID NO: 234385 - DNA, 122 bp, Homo sapiens
caaggtcacatgactcataagtggaagctgtctttgcaatcaatttattgtccactgaaacggttatttattttcctctctctctgtgtccttatgtattattcagtaaagttcagcttcct

SEQ ID NO: 234386 - DNA, 122 bp, Homo sapiens
gtgtgagccagcaccccctgcccactttcctgcatggaggcgtgaggccgtatttctatacgtgtcccccacccctccagatggtgaccccagaggaagacgtgcattgggtccgctggccc

SEQ ID NO: 234387 - DNA, 122 bp, Homo sapiens
attctttatctggatgtcatttcgatttttttttcaagtgcagtgaagaattaaagatctcgtccaccaaaaatactccgagtgtgcatttcgggttttaatatggtattgtctgatgggtt

SEQ ID NO: 234388 - DNA, 122 bp, Homo sapiens
tgccctgagaaaggggctcctgggccgacagggaaggtctgcctcctactctggaggggccgcttggggacaggcccgggctgtctcctcacagccacctgcttcctgtcctctgcctgtct

SEQ ID NO: 234389 - DNA, 122 bp, Homo sapiens
atatagagaagtcaagccctggatggtaaacacgtttttgttcttggggacttcatgtgccgtagataattaacacaaggatttctgtggtggaaaaagaggaggcagttatatgaatttat

SEQ ID NO: 234390 - DNA, 122 bp, Homo sapiens
gcggcttggctcttgcgctcagggtccgcggaggtggcggcccagagcgtcaactgggagcgcggggggggagcggcacgagcgtggaggagcggcgggagcgcgaaggggcggagcgagcg

SEQ ID NO: 234391 - DNA, 122 bp, Homo sapiens
gacccctcacctggaaataactcctagagttgttttgaaggtacctcaaatgagataacacgtatggaatgcttggtggaaagaaagatcactatattatagctattgttttttgtcaactt

SEQ ID NO: 234392 - DNA, 122 bp, Homo sapiens
cagggagcttctgtgggacttccctaaaaagatccctctctgaagctgagagaatgaactcgtttcactcaaggggaaaccactctcagaaccaccatctctcactgcttagtgatgtgtcc

SEQ ID NO: 234393 - DNA, 122 bp, Homo sapiens
caaccccacccacccgggagcccaagaaggtggcagtggtccgtactccacccaagtcgccgtcttccgccaagagccgcctgcagacagcccccgtgcccatgccagacctgaagaatgtc

SEQ ID NO: 234394 - DNA, 122 bp, Homo sapiens
cccactagactcaggagcccagctggcttcacccagtggatcccgcaccggggctgcaggcggagctgcttgccaatcccgcgctgtgagccggcactcctcagcccctgggtggtcgatgg

SEQ ID NO: 234395 - DNA, 122 bp, Homo sapiens
ggaatgggcatcacttcatgcagggcatagggtccagtttgaccttgagctaagcagagacgcagctctgggaggtgggctcccaactgttggggccccacagtactagggaatagtcagct

SEQ ID NO: 234396 - DNA, 122 bp, Homo sapiens
gtacatgtgagactgcattatattaatattttgtaaaattaggaggttgaatgacaaaaacgacagccaaggagctgttatgcaaaacaggcttgtagggagaatgcatgaattacttaaag

SEQ ID NO: 234397 - DNA, 122 bp, Homo sapiens
cctcttctgaatggttggaaattgggcatctgttcctttaaacaggaaacatttcttgttcgagtgagtcatctctgttctgctttaggagtaaagtttaccctgcagttccttctgtggtg

SEQ ID NO: 234398 - DNA, 122 bp, Homo sapiens
aatgagtagatagttagctgagacaagatgaactagggagtttctcctagaaaaggtggtcgccgtgttctgattaaaggaaaaaataataccataagttgtaagtagcagcagagagctga

SEQ ID NO: 234399 - DNA, 122 bp, Homo sapiens
cgtcccggacccccagtcggccgcgccccgaggggcgaggcctgcgggccgcactccctccggccccggattcggggctggaagtccctccccgaacccagcagctggcctgggagggagaa

SEQ ID NO: 234400 - DNA, 122 bp, Homo sapiens
tgaatgaatctcagagccaggcgtgtgcgcgggaggccggagcgtgaggactgagggccgcgtggccatcctccttctccggccaccccggagccccccgcccgtcacactcggggcgcgct

SEQ ID NO: 234401 - DNA, 122 bp, Homo sapiens
tttcctgtaaaaggcataccctccaagcattggttcctgggcttgtctttctcctctacccggactcattgagctttctgtagaatgtagcagtggcagcagctacccttctcctcccgctg

SEQ ID NO: 234402 - DNA, 122 bp, Homo sapiens
ttctcactgtcattcccatcacggccagtcagtctctccactccctcctcccgcctggctcgaggacggacgcttctcatcagacacaccaggcagcctacagtctacacagcagcgagcgc

SEQ ID NO: 234403 - DNA, 122 bp, Homo sapiens
caggccccaggcccaccaggacgagcgtctccagctgctgccgcctgagcctgccctccacggccagtagctgcgcctcacactggaacacctgcagctgcagctcatccgccttctcgccc

SEQ ID NO: 234404 - DNA, 122 bp, Homo sapiens
acccatcgcagcgggaggggggtccatgctgtgtgactgggaccactggaccccacccatcgcagcgggaggggggtccatgctgtgtgactgggaccactggatcccacccatcgcagcga

SEQ ID NO: 234405 - DNA, 122 bp, Homo sapiens
cacgaaggcattacaattttgcaagtgagaagcttctcctctaagttgtcatttagtcctcgtcacgtggtaaaaagtatcgcacgcccacagttctacacccgaaagtccggacacctgag

SEQ ID NO: 234406 - DNA, 122 bp, Homo sapiens
cagcttccactggcgcctctggaactcgctgggcgtgcgcgctgcgctctggcgggagggcgcttctctcggctttttatagcttcatggcggaccacgttgagaacaacaacagcctggtc

SEQ ID NO: 234407 - DNA, 122 bp, Homo sapiens
ccgagcgcggcacctcaccagacgcgccttttaccgaactctgggttggcgagtgtggagcgagttggggaggttagagagtctcgcggctccgaaaaggaaaagcatctctttgcctcagt

SEQ ID NO: 234408 - DNA, 122 bp, Homo sapiens
cgccccactcgcctagccacgggttagctcggcgacccctgcagacgccggagcctaagccgctgcccctcagcccacaagaccgaccggcactgactcactgcgcctgcgcggcctcccgc

SEQ ID NO: 234409 - DNA, 122 bp, Homo sapiens
gatttagtaggtctgagatggggccaattaatttgccctcctgataaatgctaggtgtaacggatacggctggttgggcatcacactttgagaaccgctgtgtaatctagcccatgatttcc

SEQ ID NO: 234410 - DNA, 122 bp, Homo sapiens
aagtctgaagtcatgcaatttgacttttcctttctggaaaccagcgagcagaaatgaaaccgaaactgaattgtccgggaaattcgcggtgggggcggagagcgcagggagaagtaagccca

SEQ ID NO: 234411 - DNA, 122 bp, Homo sapiens
ggctgcacaaaggaaggaatccatctacagtccattctcaacacagcatccatggtgatccgatgaagtcagatcaggtctgtccaagaccttccaatggcttcctgtatcactcaggatga

SEQ ID NO: 234412 - DNA, 122 bp, Homo sapiens
cacagtggcagtgccattaactgagagatgggataaaacttgcaagaacaggaagctatgcggagcaagcttcctgaactgtcttacattgtttgtctgattgaattatttaggccttgaat

SEQ ID NO: 234413 - DNA, 122 bp, Homo sapiens
gacgctactccaactgttgaattgaattttcacctttcctttcatccgctgctttgcttgcggagatggatttatttgctttgaaatccgcatatctttctcagactgtggggtgatcccgg

SEQ ID NO: 234414 - DNA, 122 bp, Homo sapiens
cgcctctgctgtcagccaataaggagcgggagacgcgtcgggcctgcgctcaatgggccgcgctggtcccgccccactgtgatcgtgagactgcagacccgctaataaaatccaccccaaca

SEQ ID NO: 234415 - DNA, 122 bp, Homo sapiens
cgattgcaccgcgctctgcagcgaagggacgggccgcagacccagacccagggctgagcccggcagtggaaagtgccccacctggacacctggagggtttactgggaagtgccaagagaaag

SEQ ID NO: 234416 - DNA, 122 bp, Homo sapiens
agcgtgggcatgtgatctgtgagccgtggtccccacggaagcggtgagaacgcacctggccggctcagccacacggcacggtggcctaggccctgctgcgggctctggatccagcggtcacg

SEQ ID NO: 234417 - DNA, 122 bp, Homo sapiens
agaggccgcgggctgagtagagaggggtgaggattccggaaaggaagcatcgtcaggaagcgctgaagttcctactgataaagagggggttgggccaccagcaacttgtcacatgaggagtg

SEQ ID NO: 234418 - DNA, 122 bp, Homo sapiens
aaagctcactgtgtaattagcatttagaagctgaagatccccaactgctccagcctctgccgctgccatgctttgagtccacgcccaccagccttgctctcttcaataaaccacaagcatct

SEQ ID NO: 234419 - DNA, 122 bp, Homo sapiens
gtctggccatcatttatttctaccactgttgcctcacctgcttcatcccctgaagagcctcgaggtggtgccagagttcacttttgctgctattcttgcttgtggttatttgcatcctgttg

SEQ ID NO: 234420 - DNA, 122 bp, Homo sapiens
cgtccccgacaacgcctcgggaaagaacctaaccaacatgcgaggaagtggcgccaggctcgttcttcaagagaagtgacagaactaaccctcagcctgcaatcctgaccagggccgagtcc

SEQ ID NO: 234421 - DNA, 122 bp, Homo sapiens
cccaactgtactctgcccaagctggtccaagcccggatgggtggaaaggtccccgacaggcgtcctgaagtctgccttcgggcctgccacaggctcagcacagcagagtgatgccagaagca

SEQ ID NO: 234422 - DNA, 122 bp, Homo sapiens
agaaagtgcgaagggactggaatggagatcctgagcggtcctgggtgccggggccccgaccggggctgagctggtcccctggtcgggacggctgggcagaggtgccgaggggccgcgggcgg

SEQ ID NO: 234423 - DNA, 122 bp, Homo sapiens
tgacctcctccgcctccagcttgcccttctcgtcccctcggaagtagccgagggccggcccggggccttccaacttgaccaccctggaggctctaggaccggtttcgacggcccctcgaggc

SEQ ID NO: 234424 - DNA, 122 bp, Homo sapiens
acaaaattagattctctaaaaggctaaagagctcccaagcacaggagcgagggaagcacccgttatttttcacagatgagctgcctgaaaacacacttgagaagcaaaagcacagaagaggc

SEQ ID NO: 234425 - DNA, 122 bp, Homo sapiens
caagaatgatataataatgcatttacacgtgccagaggcaagtgatttttcttaatgatacggagttggtcatcctgattgtgaatacttggtaaaggcttttttctgccaaatatgggagg

SEQ ID NO: 234426 - DNA, 122 bp, Homo sapiens
tcactgagctattttggaatagaaatgtggctagttgcctgacctccctcaatggtttcacgtggctttcaaagggaaggaagggcagtgctgacttttggtaaaatgggcgaaagggtcca

SEQ ID NO: 234427 - DNA, 122 bp, Homo sapiens
cgagaacaggacttcttaaacagcaccagcaagaatagtcttacaatgaagtgtgcaccacgggagcgccgcaccagccggcatggaggagcgtggcaatttcaagctgacccctggctgca

SEQ ID NO: 234428 - DNA, 122 bp, Homo sapiens
agggaaaaagagcacatctttgaagtagttttggagcaggaggtatcttccaaattccaacgaagtatcttatatttctaggtgaccctgagaccactggagaagaaataaatgaaggccat

SEQ ID NO: 234429 - DNA, 122 bp, Homo sapiens
ggaggcgcgcgagggcatgcacctgaaggacgtagacttccgcgagtcgctcatggtcttcgccgacccccgcagcccgccctggtacgcgcgcgcctgggtcttctggctcgtgtcggcgg

SEQ ID NO: 234430 - DNA, 122 bp, Homo sapiens
actaatctcgcccctctcaggacctaccgggggcgggtgctacacttaatcaccgggaaacgcagctttccggggcggctgacggcccaccccctccgaccgggctgttctctcccgggccc

SEQ ID NO: 234431 - DNA, 122 bp, Homo sapiens
tctgctgtcacctcgcccatggctgggaatcccactggctactctgtagaaggactgggacggaggccttccaatggcagttttgcagtctgcaacaagtccagtctggacttctctgggtc

SEQ ID NO: 234432 - DNA, 122 bp, Homo sapiens
agccgcccctcaggccgagggtactacttcaaccacatcactaaccccagccagtgggagcggcccagcgggaacagcagcagtggcggcaaaatctggcagggggagcccgccagggtccg

SEQ ID NO: 234433 - DNA, 122 bp, Homo sapiens
gaagaaagatttcttaaaaagagtatcaatgctcccagctgttctcatttcttctgtcaccgcttggttgtgtatcttggaaaaaaaatatacttctggtgggaagactcaaggagagaatc

SEQ ID NO: 234434 - DNA, 122 bp, Homo sapiens
cttaggaaagatctagaacagtgagcagctttgaggaatccacagaactgaagtcattgacgtggtttttatccgatgtctccagtttgtaccactttgtactactgatgctttagaggaca

SEQ ID NO: 234435 - DNA, 122 bp, Homo sapiens
ccgtaaaagacttcgtttcttgagaaaataagattggagtccgtcgtaggaaactggaaccgaattcagagaaagcgattcaccgaaaaggaaatgaccaattgcctgagtttccgaaatgg

SEQ ID NO: 234436 - DNA, 122 bp, Homo sapiens
agttgcacaacgaagcccagagctcaggttagctgtgcaggtttggggatcatcagctttcggaaggcagccgaagccatgggagtggaagagatgaccaagggggagtgggctggatgtga

SEQ ID NO: 234437 - DNA, 122 bp, Homo sapiens
tgtcaaatgcggcaaagggctcagagctcgccgccaaggggcgtggcctccgggccgcggcggcctctgggagttgtagtcccgcctcaacttgtggtggcctctttaaaaaaacaaaaaac

SEQ ID NO: 234438 - DNA, 122 bp, Homo sapiens
tcttcccaaacaaaaatagatgggtcactccctagaagatctcggggagagtctcctatacgtgttgctgtgtagcttccgtaccgcaaaatggcgccattctaatcagaagagttgacaca

SEQ ID NO: 234439 - DNA, 122 bp, Homo sapiens
atcacgtcgaggggcgcgcagatcctgaccaaactaccccatgaggcctgaggagccgcccgaaggtcgcggtgacctggtgcctttttaaataaattgctgaaatttggctggagaacttt

SEQ ID NO: 234440 - DNA, 122 bp, Homo sapiens
atccaggtgaggcagtcataaacctaggctggagtgtgtgtgtgtgtataatcatcctgtcggaacaggcaaaggaatgaactggagtacccatcaatgttgactctccattaaactgctct

SEQ ID NO: 234441 - DNA, 122 bp, Homo sapiens
cgaaaaggaaaaggccaggtaaaatcatctttgtatagagctgaagaataagactgctctcgaagtttatcaggatgttcacatgacaaaactggacccaggctactttagttttgttggga

SEQ ID NO: 234442 - DNA, 122 bp, Homo sapiens
gggcggcggcggggagcccaggaggcgcggcagcagctccaggagaacctggggcaggggcggggcttaggggacgaggttagtacgaagccccaccccgacccgggctgcaccgccccctc

SEQ ID NO: 234443 - DNA, 122 bp, Homo sapiens
gatgactacagcctagatgaaggtataaatgcctattacatctacctcattaaagaacttcgttgtaattcttgggcagtttccagactctgttacagaaacagagggctgtttctttttgt

SEQ ID NO: 234444 - DNA, 122 bp, Homo sapiens
agctctacattttgggtgcatatggggacctttatgtgtaatgatacagatagatattaacgttgttggtaactcttcaggcttagaagcagcagcagaagaatcacggataaatggccaat

SEQ ID NO: 234445 - DNA, 122 bp, Homo sapiens
agcgactttccctggaggggcgggcccttgctggtcgcggggccggacgctgaggcggggcggggcggtcccggttccccgcgggcgggacgtcgggccggtggggagggggcaccctccgc

SEQ ID NO: 234446 - DNA, 122 bp, Homo sapiens
gcatctttagcagtccgggcaagggcatctaagctgacagacacaaaaatgggctttcttcggctggctggtgttcccagccttttatgtggtgcgtctcgggctgtgctgcttaattcatt

SEQ ID NO: 234447 - DNA, 122 bp, Homo sapiens
aggagccactctttagtgtgtgtgctgcaggctcctgtggctgtcacagtacagttattgcggaattaacaggggaacagccatccaagtggagaggcacagaatacttcctgtcctagctc

SEQ ID NO: 234448 - DNA, 122 bp, Homo sapiens
cacagcctgcatggagatgaacagggccggcacgttgaaggtctcaaagaacacctctgccgccttctcccggttcttactcgggttgagcggggcctccgtgaggagcacaggatgctgcg

SEQ ID NO: 234449 - DNA, 122 bp, Homo sapiens
gtcctgacgcatggctcctgctctgccggaagcccccactgtcttcttctctggccatggcggtgggatggatggcaggtcagcctcccagcttccgctaactgaaggtgccccctgttttt

SEQ ID NO: 234450 - DNA, 122 bp, Homo sapiens
taagttctccagagaaatagtaaaagatataaaatcagaaagcaatgaaagctgttctttcgagtgttcttggttgtgcacatataaaactatgtttgtgccatactctagctaatgattgc

SEQ ID NO: 234451 - DNA, 122 bp, Homo sapiens
tgaccaattgtccgtcacaagcagaggattaggacttcggatggagaagacacacatttacgatgcacaaaggtcctgggaggtctcccttggcagttaactctacccaccaggaagatcca

SEQ ID NO: 234452 - DNA, 122 bp, Homo sapiens
cagaggtgcacagactgtagcagaaaagctccagcccttccaaagcttatggcaagatcccgacctgagagagtgctggtggaggctctcctatcggtagaggccctacacccaaccttgcc

SEQ ID NO: 234453 - DNA, 122 bp, Homo sapiens
tttatttttccatatgaactttagaatcaccttgtctggtttgggctgggcggggcgggccgctggcaggctgtgggacaggccagggctatttctgcgctcgcttggagaggactgacagc

SEQ ID NO: 234454 - DNA, 122 bp, Homo sapiens
ttgaaaggtcagattcacatccaagaagccttaggagggcttactcctgaatcctctggccgtgagcattcttaaggggccatgtaatcttttttccctccttctgggtaaaatgctgactg

SEQ ID NO: 234455 - DNA, 122 bp, Homo sapiens
tagctacgtcttttccttcctgttacctaaatcttagcccactggggtgcatctaagaatcgctgtctcccttgccacctgtctttgtcaatctgtatctctgtgtcccctccctccctcct

SEQ ID NO: 234456 - DNA, 122 bp, Homo sapiens
tgtccagtgcataaaccccctctgtgtaaaaataaacacagaaaagtggctgctgagcaacgcagtttcctagcccttggtttagcagtatccccgagtgtcccccacatgcggctcctggc

SEQ ID NO: 234457 - DNA, 122 bp, Homo sapiens
agtctggtctgggacccgcatcctcgcgctgacgcctcctggtgtccccacggtgctggacgcaagagtgaggtggggtgggctcaccctgaggccccagccttccagaaactgtgtagaac

SEQ ID NO: 234458 - DNA, 122 bp, Homo sapiens
ggcagaaagcaaagccctggttgcagaaaggcatgcaaatatgaacccaggtgtctggtgcgccgggagccccggcgacgttaggagcgcactccttgctggggtcaccggagttgcgcttg

SEQ ID NO: 234459 - DNA, 122 bp, Homo sapiens
ctaacactagagccttttaaagccaagcttaacactccctttgtgctttgcagcaagtaacgtgaaacaaatctcttttctcagaaagcaatctccttttgaatcctctgtcagagtaaaaa

SEQ ID NO: 234460 - DNA, 122 bp, Homo sapiens
cattgcactccagcctgggcaatgagtgaaactctgtcttaaaaatatatatatatatatcgagcaaaggctcctacaactcaccttctcagggtaaggggctgtatgtccagtctcttaga

SEQ ID NO: 234461 - DNA, 122 bp, Homo sapiens
gggccggattccgactgtggggagtcgagccccgctagaggcagggaagggcaccgctgccgccactgctctgtcagagctgctcagagccttggtgggttccgtcatccttacttgagctc

SEQ ID NO: 234462 - DNA, 122 bp, Homo sapiens
cagaccaaagcatttaattgctcgtgtgagatcctccagcattgtcttcctctgccctagcgacaggagcccatttattccaaatggtatggctttgtcatagtggaatctgtctggctggg

SEQ ID NO: 234463 - DNA, 122 bp, Homo sapiens
aagtaggctatcatgagaaatgctgggggtgtggagcccttgcaaacacttcccaggatccgaaagcagaaaggatagaggaaaggcattagactaagccatgagagtcatggcaggaagag

SEQ ID NO: 234464 - DNA, 122 bp, Homo sapiens
aggcccaggatctcgactcaaatatggagactccattgcccctgtcccagggctttcacacgtaagtgacctgcagtcacttggacctccattcatcaccaacagaaacttggtttggtgct

SEQ ID NO: 234465 - DNA, 122 bp, Homo sapiens
ctctggggctcgggaggaccttgcgaggggccggggaggcgccaaggccgcggcgagggacgtgcgggggtccagcagcctggggcggggacgcgcgctccgggccgtgcaggtgggggtcc

SEQ ID NO: 234466 - DNA, 122 bp, Homo sapiens
ggcagccgcaggcagtccccgtgccgggcgccgcctcctaccggcttggcctgccgccgacgctcacctccctaagctcgagcgtcccgggccgcgcctccccagccgcgaggctccggaac

SEQ ID NO: 234467 - DNA, 122 bp, Homo sapiens
tactgaggcagtgcatcataacagataagagcagaggttctggagttaaatttggctctccgacttactggttgtatgatgggaggtaacttgttttcttgacctcagttttcttgtccata

SEQ ID NO: 234468 - DNA, 122 bp, Homo sapiens
cgcgtacccaagcctgaaagtgatggcctaggcgggagggacaattacaggcctgcgctccgtcccggggacagaacgccgtcccctgccatccacggctgagtgcccggcgtacacgctgc

SEQ ID NO: 234469 - DNA, 122 bp, Homo sapiens
gccgggggccctcggtcgcccccgacggggcgcgggctcaagggggcgtgggggccgcgccgcactcacataatgcttgttgggcacccgccgcttctgcacgtctagcaccttcacctcca

SEQ ID NO: 234470 - DNA, 122 bp, Homo sapiens
atgttaatttcacaatttagtacactgcaactacgtatttaatacaaagcagcctttgggcggggcggggcggggcggggcggttaacaaaatgcatctcagcaccagcctagagaaacttt

SEQ ID NO: 234471 - DNA, 122 bp, Homo sapiens
gttgagaacccatcagcaaattggtggctctgatgagccctggagctgcaaaatataggccggggtacctcagccggaagggacttcagttagtgacaggttttctgttctgatatggagct

SEQ ID NO: 234472 - DNA, 122 bp, Homo sapiens
cttattagcctgctgggtgataccaatgggtagtgtcacatcatgtcatggggatgttggcgttcatagtcatggagaccttcagttagagtcttctcctcttcttgagtgaattgccctga

SEQ ID NO: 234473 - DNA, 122 bp, Homo sapiens
tgctttgtggggaggacttagcctctcatttggggaggaggaggcggggtctagcggtttcgcggtttgctacagccgactagtgaaagagctgggattccaaatccccggctactttacac

SEQ ID NO: 234474 - DNA, 122 bp, Homo sapiens
cggtttgcccgctgtgcgtccgctggccggctggctaggctgaggtgaacgcgctggccgcgcccaccacgcctacccggtaggactgactgcctctgcatcggcctgtggagcttaagtag

SEQ ID NO: 234475 - DNA, 122 bp, Homo sapiens
ccaccctttggggctctacatcgtgccctgagcagctgtagcttgtgctgtctgctaggccgggagagaatggggctgggaccggctagtgtgcccaagataggccccaccaccattgccac

SEQ ID NO: 234476 - DNA, 122 bp, Homo sapiens
cctggggcaagttttcaaccctgttacagcctccacctggaaacagacttggggttgttgcgggggggcatggtgggagggagaccagcccttcattttgtgtgggagctgggtgaggcctg

SEQ ID NO: 234477 - DNA, 122 bp, Homo sapiens
taagagctcaattgtgcgaatgggggagaggccagcgttcgtgtgctggcccgtggcttacggtgacacctagcttagggccacggccaaccctatagtggtgtttacctgtggcagcagct

SEQ ID NO: 234478 - DNA, 122 bp, Homo sapiens
ccttgggtggtcgatgggactgggcgcatggagcagggggtggcgctcgtcggggaggctcgggcagcacaggagcccatggagtgggtgggaggctcaggcatggcgggctgcaggtcctg

SEQ ID NO: 234479 - DNA, 122 bp, Homo sapiens
cgactcctactgcaatcagtactatgcgatcgtcctagagagtccattcagctgcacttccgcctcagtaggtgtcatggcgcggggcgggtgaatagttccggcgaggcggggccggccgg

SEQ ID NO: 234480 - DNA, 122 bp, Homo sapiens
agaatgtagccccccacatggggccacctgaattcatgtatgaacagcaggacaattcaacgcacctgcagccacttaagacatgccccgtggcaaggcaggtacttagaggatgctgacct

SEQ ID NO: 234481 - DNA, 122 bp, Homo sapiens
ttcttggaccaaccctggagtccggccccgatcgagtggaggtagttgggggaggcgagccgcggccgggggcgggggagggacgaggaactcgcgggccccgcggctgcccgaccccgggc

SEQ ID NO: 234482 - DNA, 122 bp, Homo sapiens
tggtgggcttgcctcgtgtcccgattgtggggtctggggccagagatgtgtgtgcctccccggcccccgaagatcatacgcagtagcgtctccgagggatgccactagcagtgacaggcaga

SEQ ID NO: 234483 - DNA, 122 bp, Homo sapiens
gaaggcggatccctaacgccagctatctccaagagcaacattgccgcagcacttccgggacgtcgtgctgcaaaggacgccgctgttatacgtcacttccacggctcagcgtcaggcaagtt

SEQ ID NO: 234484 - DNA, 122 bp, Homo sapiens
tggggttttctgccttcttcctgttggaccttgggactggccggtcccctctaggggaatcggaggcagaggcgcctcccggagtcccctgcggggcgctctggagcctgtgcacctggagg

SEQ ID NO: 234485 - DNA, 122 bp, Homo sapiens
gggtgtgagccggtgcgaggggtgcgggatgctcttgatgcactgtctgctttgggcctccgggtggccgggaggtggccctgggaagttggtggtggctgaagattggtaagggacactcg

SEQ ID NO: 234486 - DNA, 122 bp, Homo sapiens
cccttccccagaaaagcgggacttgctgttaagggtgaaggaccaaggcaggcgtccctgcgtggtctgacacctttgaaacatgggtgaataatcagagaggtgtccgtgaaatgattaaa

SEQ ID NO: 234487 - DNA, 122 bp, Homo sapiens
ccgcgccgcagtcaggataccacggcaatctggggtcgctttgtaaggagctccgacctccgggcagtgcagggatactcgacggcgcgcgatgtcccggcggctccgcgagcctggcgcgc

SEQ ID NO: 234488 - DNA, 122 bp, Homo sapiens
actccaggtcacagcggctccggagccgcggcacaaccgccaccctccccacccaattcccgggccttgtcacagaccccggcagctcgctccgccccgccgtgcctcacaacatctcccgc

SEQ ID NO: 234489 - DNA, 122 bp, Homo sapiens
acacagaggcagatggagaatgctgggcgcccgggaaagcccaggaaggagcccgggccacgtggaggagaggcaggtgggaggaggcaggagagagcaaggctgcccaggacaatggagcg

SEQ ID NO: 234490 - DNA, 122 bp, Homo sapiens
caaaagacgggaagcaagaaagagatggagacccgccatcgtggccaacgttctggtccacgcacgggattcagcctctgatcaagccccagttcccgcccacgcctctccctccacacctc

SEQ ID NO: 234491 - DNA, 122 bp, Homo sapiens
cgcgcgtcaatccatcagttcgtcaatccgtccttctcacgtccgcccctcccggcccagcgactcctcagctcagcctcttgcagactgcggttgtcaagtgccggggagccgagctctac

SEQ ID NO: 234492 - DNA, 122 bp, Homo sapiens
gctgccccgcaggcctcccttcaatctgtgcttgcacaattctagatgggcgttctccagcggggtctggtggtgtgcactctgctgctccatttgctgtccagttgtttgctaggtgtgtt

SEQ ID NO: 234493 - DNA, 122 bp, Homo sapiens
cactccaggagagaggtcttgtgaggagcttcacgggagcagagcagctcggtctcaggtcgctcgcgtgttcagcctctcccagacttggaagggcgaggccttcaacggtctccccgccc

SEQ ID NO: 234494 - DNA, 122 bp, Homo sapiens
gggggaggtgaaaagggcagaggcaaggatggtggggcccccagcaccctctgttagtgccgcaataaatgctcaatcatgtgccagagttgcatctctttccttgtggttgggggggctgg

SEQ ID NO: 234495 - DNA, 122 bp, Homo sapiens
tcggccggggagtcccagtggcggaggctacgaaacttgggggagtgcacagaagaacttcgggagcgcacgcgggaccagggaccaggctgagactcggggcgccagtccgggcaggggca

SEQ ID NO: 234496 - DNA, 122 bp, Homo sapiens
cataccccttcatttccaagaatgctaatgaactcgaactcggcaggctgggtttctgcgcgggcgtggagctggagcgcatgcgctcgtccgttaccataacgaccagaagacgctgcagc

SEQ ID NO: 234497 - DNA, 122 bp, Homo sapiens
cgggggtgggccacagagagccgcaggggccggctctgggtactgctggggcagggcctccgcgggagctggctcgcggaagctgcggacgccgtcggtaagcagctcgcccagctgccgcc

SEQ ID NO: 234498 - DNA, 122 bp, Homo sapiens
gccccaacctgggctcaggtagcggccagtaaactaggagacagccctaaggctcgcgtccgggccaggcgggtacccctagtactctctccccacacccccatggctctgccgcagccgcc

SEQ ID NO: 234499 - DNA, 122 bp, Homo sapiens
actagcctggtcaacatatgaaaccccatctctactaaaaatacaaaaaatagctggtggcgggcaactgtaatcctaacttcttgggaggccgaggcagaagaatcgtttgaacctgggag

SEQ ID NO: 234500 - DNA, 122 bp, Homo sapiens
gagaatgccagatggggagaacgccatgagcttttgagcttgtgtattttgcgagaggctcgagtgtgaacagtagactacaggccttgagactgagaaggaagctataaaatgtgggccaa

SEQ ID NO: 234501 - DNA, 122 bp, Homo sapiens
gcgccggcgccaggtcctcagcgtctctcctcctcgctcccctccccgccgtttccttagcggccccaggtctcttccacaggcgagtctagagttcgctcctctctggtggcagccgcctt

SEQ ID NO: 234502 - DNA, 122 bp, Homo sapiens
gggatgtcacggcagggctctgaagagcagaaggctgggaggaggtatagcaggaccagacgactgtcaccccagtgggcacggcaggccccgctgggcggcatcttttgcacagacctgaa

SEQ ID NO: 234503 - DNA, 122 bp, Homo sapiens
agactgtaacaacttgaaggcaaggaactgtcttaattttcatcatttaaaagttcatagcgggacacaattcttcaacatttaagcatttgcttgaatgaatgaaaaaggatcaatgttca

SEQ ID NO: 234504 - DNA, 122 bp, Homo sapiens
tgccaaaaaaattttctttgctccgctgattcatactctcaacccccaacctctggcaaccgtgtgcatttttttaatgcgcatattttttatgtctgaaaaatgtcagattcccacagggt

SEQ ID NO: 234505 - DNA, 122 bp, Homo sapiens
cggccgccgcgctcgcctggggcagacactgggtggctgggcggggaatggggctgtgggcgggagggggtgacttggggcggagctgactcctaccagggtgaccggctgtcacctggaag

SEQ ID NO: 234506 - DNA, 122 bp, Homo sapiens
tcggccccgcggcctgggaggccgttgcgcaaggcagggcccgcggctcggggagggatgcgccgggcgttgcctcccgcccgccgccgccgccgccgccagaagccccagaggagctgagg

SEQ ID NO: 234507 - DNA, 122 bp, Homo sapiens
accccttttaactttcttcttattttggctgataggacctacatgggcatcctgagaacacggtcctcgtgccatgcagccatccaatgcacatgcaagcttaccccccaccccccactacc

SEQ ID NO: 234508 - DNA, 122 bp, Homo sapiens
aatgcgcgcgttcctccttttactctgcttcatcaagtagcctgtgtagcgaggcgtgctcgtgattaagtattttctccatcccttggcctctttcatttcctcttcctgtaagtcgcatg

SEQ ID NO: 234509 - DNA, 122 bp, Homo sapiens
ggttacccccataagatggagcactcctttggagcaagagctatggttctgccatcagcccgggagcctccaccgccggggttggtctctgctatgacctcagtacagagggagatggacgc

SEQ ID NO: 234510 - DNA, 122 bp, Homo sapiens
tccttagcgtggaggccagtctggccgggtgctgagctcgtcctgcagaacacgcgtgaacgcctcatccctgagggccccgggaggctggcgccctctgtgggaggtctgaggttggccca

SEQ ID NO: 234511 - DNA, 122 bp, Homo sapiens
agtgctctggagtgaggcttcattggtcccaggtgagcgtttcgttgccagctcgttgcgcgaggtctgaatgcacagtggaaacaacttagggtgggtatgggaaaagaagaaacatattt

SEQ ID NO: 234512 - DNA, 122 bp, Homo sapiens
aggcctgaccccactgagcccaggaaagaatcctcccaggacctctaggacagaaccaggcgggccaggaactcaggaaagggacagttccccaaccccttgcaagagagctgtgcttttca

SEQ ID NO: 234513 - DNA, 122 bp, Homo sapiens
gccggtgcggttcccagaagtccggctgggtttgggccgcgggtgggcttctccaggatgcgctcccttctggcctcttcccggtaggactccgagcccctcacccgcacccgcgatggggc

SEQ ID NO: 234514 - DNA, 122 bp, Homo sapiens
ccggcccctccgctgacgcctcgctacgcgtgccccagtgccctcgcacacacatcaccacgtgtgtgtctcagattaatcagtcactcccgggttagatgacaagagcttccccagatacg

SEQ ID NO: 234515 - DNA, 122 bp, Homo sapiens
attactttaaccccatttcctgacacaactggaaagctggcacagtaaatgaactttagacgctttcattttagcagtcaaaatggctgccattaaccagtggtacttctggcagaattctt

SEQ ID NO: 234516 - DNA, 122 bp, Homo sapiens
cttgaagcagtagaacctcaattcaacaaaaagcactgaggcagcatacttgtcaacatccgggagatgtaggagctttgcctggactccggctctcccagacgtgggtcactacaacattc

SEQ ID NO: 234517 - DNA, 122 bp, Homo sapiens
ctccacgctgcactctccacgccgagcaccccagccccgagtactccacgctgcactccacgccgagcaccccggccctgagcaccccgaccctgagtactccacactgcgtacttcagaga

SEQ ID NO: 234518 - DNA, 122 bp, Homo sapiens
tgtccgccggctggttccggcgccgcttcctgcctggggagccgctccccgcgccgcggccgcctgggccgcatgccagccccgtgccctaccgacggccccgcttccttcgcggctccagc

SEQ ID NO: 234519 - DNA, 122 bp, Homo sapiens
tgcgcgggagaaccgagcaatggggccgcgagggctggaggtccgagtaaaacggggaaccgaacgctttctcttgagcttctggcagccctaccgaccctcgccctctgaggccggggttc

SEQ ID NO: 234520 - DNA, 122 bp, Homo sapiens
acttgtcgtttgcagagcccacttagtgcgcgctagctgggcagggataggggtcctattcggggcgaagggtctggatgcgagcagagaaagcggagggtggaggaacccggggctgcgcc

SEQ ID NO: 234521 - DNA, 122 bp, Homo sapiens
gatgaaatgggaagatatcattgcttcctttttgcacctattgggtatgtacactctggccgaagggagtccttatgtttagtttcaaaatatattactttcctggattctcttcttcactt

SEQ ID NO: 234522 - DNA, 122 bp, Homo sapiens
gcccaaatacatctttctacccaccttccctatcgtcagagaggtggcctgaccccagcacgtgcaagcttgtcaggctgggtaagttccagaaccttctggagccaggattctctttccca

SEQ ID NO: 234523 - DNA, 122 bp, Homo sapiens
ttgtcactctttagccccagtggcggggagtgagcccagcccccaggactggatgctgcgcgtgcatctgtgtgtttgtgcatgggtgagggccacacagctgctgccacgtggctgctctc

SEQ ID NO: 234524 - DNA, 122 bp, Homo sapiens
gggattctttggctccgctgaggggtttgaagccacagggaaggctaggctcccgcacaacgcctcctcgaggggcgtggggacccggccgtgcagcgcggggacagggggccgggggcgca

SEQ ID NO: 234525 - DNA, 122 bp, Homo sapiens
gggattattagcacccttggggagcccccagagaccccgctgattggcctggggacattccggtgctgcagattagtgaccgatggccgtgtcctggctgggacagtgtcctccgagcccac

SEQ ID NO: 234526 - DNA, 122 bp, Homo sapiens
tacacagtcaagtggttcccccttcccctgtctgccggggataagcggggcccagactagcgaggatctgagggtctctgaacgaacttgaacaactacgagttgtccttcgggtccctggg

SEQ ID NO: 234527 - DNA, 122 bp, Homo sapiens
tacctgcagcatcctgaactagggggacgtcactttttactggagttggagtggcagtgacgggcgggaagctgggcgggctgcaggtgggatgggccaggccccggccggctccgagagtg

SEQ ID NO: 234528 - DNA, 122 bp, Homo sapiens
ggttgaccgcagtactgaagcggccaaaaagtggtcttctcctgagcctgatctttcaggcgtttccgaacagatccccaaccctgtgtctgcgtgtaaggcaaggttccctgaacgtgcca

SEQ ID NO: 234529 - DNA, 122 bp, Homo sapiens
ctcgcccttcaccaggaatgacggtttctcttgcacatgcgcttccaggccgcaagtgtccggaaacagaagaatgggagtgtcagtgggggagtgtgaccgtgacggcagaggcaaggtca

SEQ ID NO: 234530 - DNA, 122 bp, Homo sapiens
gataaagtgcagaagggcatatcagggaaggcctcccagaagaagcggcccgtgggcagacgtcgtttgcacaggctcagggaaaaccgtctaatctatgaggcgccgtccgggtgggcaca

SEQ ID NO: 234531 - DNA, 122 bp, Homo sapiens
cagcaaacagtggcaaagtgggattgagggaggaggctctgaaatgaggttttcaacaagcgtcttggacccttagaagtttcaagtgacagcccttattagtggcaccccttaggggctcc

SEQ ID NO: 234532 - DNA, 122 bp, Homo sapiens
aagtgccagaactgagccctgctcagagcagttaaataacctggctgagattgaagcccacgcctgctaggcccccaaaaactgtgctttttctgcagccatgaggacttttaaagagagag

SEQ ID NO: 234533 - DNA, 122 bp, Homo sapiens
tgggaccagcctggagtctcaagccgaaacccctcacgcgggtgggcacacaatgcccggcgtgtcgcctgggcctcctcggaggtgctttaacaggctcttgcgcttttgaacggccctcc

SEQ ID NO: 234534 - DNA, 122 bp, Homo sapiens
agatctggaatgaggcagatgtgcccagggaaagctgatccgccccgacccagggccccccgggtgcccctttgagcgtggaatcgttgccaggtcatggctccctgctatcgaacaccgga

SEQ ID NO: 234535 - DNA, 122 bp, Homo sapiens
ttttatttttggtttgtttgtttttaatctcaaggggaatccggtatgtgaagcagaggacgggacttggccattgtttggaggggaatccggtacctaaaaaacaccccctccccacaaca

SEQ ID NO: 234536 - DNA, 122 bp, Homo sapiens
caccgagcgccgacactcaccgtccacactcggagatgaaaaccaccacgcactgagtgccgacagtcactgtccacactcggagacaaaaacagattctgaaaagtgtcccaacaaacagc

SEQ ID NO: 234537 - DNA, 122 bp, Homo sapiens
gcgcaggcgcgagaaaaccccgagagaggccagtgcctctgtgcatgcgtcagtggcgagcgcaccgcccccacccgcaccccggcttggctttcccccgtgggcgcttttcggcgcatgct

SEQ ID NO: 234538 - DNA, 122 bp, Homo sapiens
ctggttaagccctcagcccagacagcgtccaaatgctgaatgccaacagatgacagaacccgcattcaattcagcttagtgtaggaggtttaaaaaaagatcaatcggccggcacagtagct

SEQ ID NO: 234539 - DNA, 122 bp, Homo sapiens
aaaggggaaggctgcggccgcagagggcacggctgggtaggcgctgggttccagacactgcgctggccagagcgtcctcagggtcactcgcctgggccccggggagaggacccacttgcctg

SEQ ID NO: 234540 - DNA, 122 bp, Homo sapiens
ttctcacactccgcgaaggccagccactcgagtcgccagagtagtcgtcccggtcgccgccgctgcttcaaaggcagccttagcctcgctgcagccccgatttcctcacacacacacaccga

SEQ ID NO: 234541 - DNA, 122 bp, Homo sapiens
acccttcctcctcccctcctgggcccacacattgctttttagggttcagccttctctggtcgctggtggttcctctcttctggcccagtttgacaacactttggggcgagttcgcacctgga

SEQ ID NO: 234542 - DNA, 122 bp, Homo sapiens
ctctgtctcagaaaaaaaaaaagaaagagtgctgcttgattatcataataatatcactgtcgttcatacaaacaggaatgcgattgagtagactgactttgaataggcttttctccagagtc

SEQ ID NO: 234543 - DNA, 122 bp, Homo sapiens
agcacaccggggagcggcccttcacctgcgccgagtgcgggaagaacttcggcaagaagacgcacctggtggcgcactcgcgcgtgcactccggcgagcggcccttcgcctgcgaggagtgc

SEQ ID NO: 234544 - DNA, 122 bp, Homo sapiens
aacgcccccttctacctttctgccctgtaaaattttatgacccagttctcaccggaaaggcgttgtgactgtagtaagtgctgagggttgagaggagagattgagagttgttaggggaactg

SEQ ID NO: 234545 - DNA, 122 bp, Homo sapiens
gctgtattaggttaacctctgggtgggtggctggagactgagtaggtaaggtgagtcacacggatgctccatgcctacatgaccgagcctaataaaatcccttggacacccaggctcaggga

SEQ ID NO: 234546 - DNA, 122 bp, Homo sapiens
cccataatctcagatactcaggaagctgaaacctgattgcttcagcccagtagtttgaggcgatagtgtcctattattgcacctgtgaatagcactgagttccagcctgggcaacatagaga

SEQ ID NO: 234547 - DNA, 122 bp, Homo sapiens
cctcttgcctccacaaaggacagcacatttccagttcagggtgctgtggccgacaccgtgcgtgtggctggggccagtgtcaccgcgaatctcggctgctccacgcccttgctgtgggcttg

SEQ ID NO: 234548 - DNA, 122 bp, Homo sapiens
ccgcacccattccgatcctgggagggtgatccagggctcctctgcaacgctccgcttgtgcggtgactgttccttaggtggacgtggcccaactgctgtgcatttgtttcttttctctgttt

SEQ ID NO: 234549 - DNA, 122 bp, Homo sapiens
acgttcaggcagaagctcctcagtggccacaagtccgctagctccggctacagcccttgccgcacactcgcgtcacctgagcctgtgtaggtgcgccccccaactcctcccccagccaggtc

SEQ ID NO: 234550 - DNA, 122 bp, Homo sapiens
ctattcccctcctgccccttccctcccaccttgcttctggtgtgctgtcctggaattgcacgcgcttcctgaccaccaggctctggcccttgagaagccagcggggctttgtccctgttgct

SEQ ID NO: 234551 - DNA, 122 bp, Homo sapiens
agtactgcttggtgtcatgtcccctatccaccagaaatctcaggcagatacaaacagattcgtgaatgaatattaaagttctagagataatatcaacatccagaagagaaaaagcagctcag

SEQ ID NO: 234552 - DNA, 122 bp, Homo sapiens
ctgtctgtgactcccgaatccctagtgggcgtctcttacagtgtgctctttcagctttgccgtctgcagaaggattatgttaatcagctcgatagaccctctgccttattgcaagggcagtg

SEQ ID NO: 234553 - DNA, 122 bp, Homo sapiens
attgggcgcagcctgggagcacacagaccggccagggccagggccaggactggcatttcccgggctcctggtcccatcctgcccctcccaccgggtcggccctgtccttgtcttgctcagct

SEQ ID NO: 234554 - DNA, 122 bp, Homo sapiens
cccgatggaggcgctggtgggcagagcgcgggcaggcgtgggccaggaggcgggggcggccggaaggggggggccggggccggccgggcctcacgcagctccgccggagagcaggcgaactg

SEQ ID NO: 234555 - DNA, 122 bp, Homo sapiens
ctcaaaggagaggctggggccctggctctcctcccaggagtctgtgggctgaactggacccgagggaggggtgtgccaccggtgggtgtgccacagccagcgcaggaagaatgaggagtttc

SEQ ID NO: 234556 - DNA, 122 bp, Homo sapiens
agcaattctctttccccttccccaccgcagtcgtcaccccgaggtgatctctgctgtcagcgttgatcccctgaagctaggcagaccagaagtaacagagaagaaacttttcttcccagaca

SEQ ID NO: 234557 - DNA, 122 bp, Homo sapiens
gtggtagtaagaggcagagacaaacccttccccaggtgccctgatctggccaagcctgggcgctctgactaccagagtcctgaactcttagaagggagagctgcaaacaaccatggcgggaa

SEQ ID NO: 234558 - DNA, 122 bp, Homo sapiens
acatagctggtagcatttaaaaacaaacaaaaaaccaaactcctagaatcctcttcttctcgtctctatttaatatatcttatttatcatctgaaatcatttgactttcaagttacatcaga

SEQ ID NO: 234559 - DNA, 122 bp, Homo sapiens
ggctccgtcgcgtcgcggagcagctcgggctacagagggggccgcggcaggaccatggagcgaggatcgccgcggagggaggtggcggcggcggcggatcggcgctggggaccaggaggcgg

SEQ ID NO: 234560 - DNA, 122 bp, Homo sapiens
taacggtaggggaagcgaggtgcagaggggtctgggccagagaagcatacgcatcgctgccgagtgaaccacaccggacaaaaaccctcatcccttcccccacctctaggaaccagattggg

SEQ ID NO: 234561 - DNA, 122 bp, Homo sapiens
agagtgcagcatgcagctgactggccgactggtgatgcaccgttccccaggaaatgtggccggtctgtattctacacagttgaggtcgtccgtggaggtgtgagcgccccagcccttcacaa

SEQ ID NO: 234562 - DNA, 122 bp, Homo sapiens
gatggatgtgattctacctctcttgcaccttgcaggtctcaaggatgggaggggcttattcggaggtgaaagactcagatgcatagaggcagggagcccagacaatgtcaggagtccaggaa

SEQ ID NO: 234563 - DNA, 122 bp, Homo sapiens
accctggggccccgagtggtcgatgaggccatggccacctgttcaaaggtaatcaaagtccgtcacttcccttgccatactccatccgacctcctacaccagccgcgcccctcccccatcgc

SEQ ID NO: 234564 - DNA, 122 bp, Homo sapiens
catatgtaggctcagcagagggagagccagggctccagggaggtcagctgggaggctgtccgaatgctatatttttggagccatatggaataaacacccagacacctgggcctcagtccccc

SEQ ID NO: 234565 - DNA, 122 bp, Homo sapiens
tcctacccacctcctcacctactcagggacccgtcccaagtggacccgcgcacaggagcacgggaaaacgagtcctgtggtgacacctcgcctggagactcagagctgcggaaactacaact

SEQ ID NO: 234566 - DNA, 122 bp, Homo sapiens
aaatcgaaatcgagcgcagcgctggtgggccagggctgctgggggacccagggcaccctccgcaggggctggcccaggtgctaagcccctcactgcccggggctggctggctgctccaactg

SEQ ID NO: 234567 - DNA, 122 bp, Homo sapiens
tcctaaacagtatagtgctcatattcatacttcagactttatgtataaatgccactgtcccgcacctattatcctgcacctttttttttttttttttgagacagagtctcgctctgtcaccc

SEQ ID NO: 234568 - DNA, 122 bp, Homo sapiens
ggatgtgagataaggaggtgaaggtacctaggatgactgtcaggcctctggcttgggtcacgagatagtatctgagactcaaggtctagaacagcaagtttgtggggagtaggtatgagaga

SEQ ID NO: 234569 - DNA, 122 bp, Homo sapiens
gaaatccatcctccccacaggggtatctccagaatccaacgagatgaagtgaggtgaaagcgctctgaagggcaggaagctctgctgacacaaaatgtttacccataacacgtggcttagag

SEQ ID NO: 234570 - DNA, 122 bp, Homo sapiens
cagtgcgccgcagactgtgcgggcgggggtccgaggtgccagggtggagtttctctggtgcgcaaggtcatgtttgctgttggctcccttctcaagactgttacctctatgccaggattttc

SEQ ID NO: 234571 - DNA, 122 bp, Homo sapiens
ttaattctatcacaaggtgatagaagcggggctttgggctttatcaaccagacacaaacgcggggggctctgggtgctgttaaccgggcgaattcctgggaactgcgggtatggcttgccac

SEQ ID NO: 234572 - DNA, 122 bp, Homo sapiens
ccccagaaacccgcctcggatacagccgctctgccctgggaggaacaagtgccgtaggcccgacaagcccccatacccagccggagactgtggctccccaccaactcctggcaactggcgcc

SEQ ID NO: 234573 - DNA, 122 bp, Homo sapiens
cctggcccgggcgccgcggtggaaccaccagccccaaccgctgccatgttggcatctgcccggcccgtcccctcggcaacagaaaaaccacttccgcgttcgtcacttccgctgccgggcca

SEQ ID NO: 234574 - DNA, 122 bp, Homo sapiens
atgtgcaccacgaagcgctcctgcaggtgcagcacggggtctgtatccagaagggacacccgggagccccactccacacccacgtgggcgcggcacggggtctgtatccagaagggacaccc

SEQ ID NO: 234575 - DNA, 122 bp, Homo sapiens
tatcgagactcaagactttccagaacgtggcaaagagccctggaagaaatgtcccaggaacgccgcggtcaggaccgaggctccccggggccaggttcagggttcgaggtcccagcctcgca

SEQ ID NO: 234576 - DNA, 122 bp, Homo sapiens
cgcagcctttcaggcactgcccggcccgccgcggtgcaccggcactgaggctggcgaactcgctgtctgtgcacctggcatgcgcaaagacctccccccagcgctcccagttcactgcggag

SEQ ID NO: 234577 - DNA, 122 bp, Homo sapiens
ttcttctgcccctaaacctggaacttagagtggagcaaacagtaaacagtcactgtgtgtcggttaagggaacagagcctcagagccccgacccctggaaacgtttcttttttgtttactaa

SEQ ID NO: 234578 - DNA, 122 bp, Homo sapiens
cacaggcattggtgaggatgggccccagccccaacgtgggagaatccatggaggcgacaccgcacggtccccagcagagacccggggcagtgggccgagtgagataacgggggagaggaagg

SEQ ID NO: 234579 - DNA, 122 bp, Homo sapiens
aacctgggaaacttgaagaccttgtggtccaatcctaggcgagtggggacagcatctagacgcaacggctttctgcgcggtggctgtgggaggcctctgcgggaaggtgggaaggccctcgt

SEQ ID NO: 234580 - DNA, 122 bp, Homo sapiens
gccagggcaattttcacttgcgagcaaataaccagggctctatccgctcctgcagagaagcgttggaggtctcttttctttcttgattgtccctaggagcaatctactgatatccttgccca

SEQ ID NO: 234581 - DNA, 122 bp, Homo sapiens
gcagcgccagtcacagccacagcccaggcccgggtcgggcagccgtggggagcccagctccggtttgcatatacacaatgcacgcccggggctcgtcctatcacgggtgctcccggctgtgc

SEQ ID NO: 234582 - DNA, 122 bp, Homo sapiens
cctgatcacatcccttttataaagcccggggtgacgtctccaagcacaggcccactctgccgcccctccctcctcctcagaccctcctgaagagcatggcaccttgggaggcctctgcctcc

SEQ ID NO: 234583 - DNA, 122 bp, Homo sapiens
tgaagatgtgcacaggctgctgacttacctgcggctgcagagccagcgggactcagaggtcgactttgaacagcagtggaacgctctgaagccgaacacaaacagcagagactcctccaaca

SEQ ID NO: 234584 - DNA, 122 bp, Homo sapiens
gccgggcaccggggctgggggccggggtccccggggtgacgcggggagggacgggtccggcgcgcccactcccgccctcacgcaccgctgtcgccgcagacctgctggaggacctgtccgag

SEQ ID NO: 234585 - DNA, 122 bp, Homo sapiens
ctgcctgggcaccggagtgcatctctcgctctgccctggcatctgcctggcatggagccccggtggccaccacacgagcagtcccaaagccccagggccactgggagtgtttcatgccatcg

SEQ ID NO: 234586 - DNA, 122 bp, Homo sapiens
cgggaatggcgtgcgtcctgcactcccagctgacagtcacacatcgggtcacagcctggccgctgagaggtcaagtcacctctggttactgttttagaatggaggggacaggctcagagaaa

SEQ ID NO: 234587 - DNA, 122 bp, Homo sapiens
actgtctccttggcaaaagaaataatagcaatcatttaatgggaggggaagaaagccagacggcgacagcacactttccctggtgatcttaggttctcataagcacacgggacaacaccggg

SEQ ID NO: 234588 - DNA, 122 bp, Homo sapiens
ggagcggagcgggagcgaccagcgagcgcagccggccgaggtacgggcgcctggcggcgccgcaacagcggcaacagcagcaggaaaaaaaatgagagcgagctagagagcgcgctggagag

SEQ ID NO: 234589 - DNA, 122 bp, Homo sapiens
atcctcctcaaactccttcccaacctggaagtccatgatgtagttcctaaaagtgctcagcgtgcggatgatcatatggtcaccgtcctgcacgatctctttgtctggcttcagcaagttgg

SEQ ID NO: 234590 - DNA, 122 bp, Homo sapiens
ccaacccatggtataattctggacagcagttctttcccctgtgtatgttaggacctgggccgtggcttcagttattgcccctcagtagatgctctgtgatgtctagctctgggtgagaatgg

SEQ ID NO: 234591 - DNA, 122 bp, Homo sapiens
atagttagtaggaggagaaagcagaggcctgagtaaagattcatcttgaagtacacaaagcgtcgtttattcagagaatgtttatttatgttcatgtctcctgagaacataataggagactg

SEQ ID NO: 234592 - DNA, 122 bp, Homo sapiens
tgcacccgctggtgtttgtgagagagcgctggtgtagacgcgaacgcagcgcaggcggcccggcggcgcggcctcaggtcggggcctttccagcgttccagctacaccgagcgcgcgggggc

SEQ ID NO: 234593 - DNA, 122 bp, Homo sapiens
aagagttcgcgcgtgggaaacctcagccctttctttcttcccggcacagcgttgtgctgccgcgcgtcggcgcaggcgggggcgcaaggcccgggtcgtccccctcgcgcggtcgggaaaac

SEQ ID NO: 234594 - DNA, 122 bp, Homo sapiens
gacaaggaaacttctcagtagaggcagaaggagacaagtttagaacaagccctgatttgccggggaagggtcagagggacagaatggagaaagcatttaattctgcaccaggtaaggcagga

SEQ ID NO: 234595 - DNA, 122 bp, Homo sapiens
aagtttgacaattagcaaaaaaagtttgtcagtgagttggacacctccctcgggtagcggcgaaaacgcctagagaatttttaaaataagtctttccaaggccggaaaagtggcggaggaag

SEQ ID NO: 234596 - DNA, 122 bp, Homo sapiens
tcagatccggccaaggatgtctgcagaaacgcctaacatagagactctccctctccaagccgcggctctcgccagacccgagaaggtcctcaagcgagggtgacctcagggccggattggac

SEQ ID NO: 234597 - DNA, 122 bp, Homo sapiens
aggtaaacccaggtgtcctgtttgtcccagcccccaacaccctcagggtgccacgccccccgccccccccacccaagacctgatgtcaggccttccagcccgttgctgattgcctcccctcc

SEQ ID NO: 234598 - DNA, 122 bp, Homo sapiens
cactaagttagttcataatgtgataagtccctattgtgtcagtggtaagggaacaataaccgtccattttccttgcattctgtttatcttccttacaagagagaaaaatctctgtgctttca

SEQ ID NO: 234599 - DNA, 122 bp, Homo sapiens
ctttcccgcatctctgggggtgaggtcggctctcgttcaggcctgcagggtccctggtgccgcagcccctctggttggaaggccccctgcgtgcagccccgtcctccagccccgctcggctc

SEQ ID NO: 234600 - DNA, 122 bp, Homo sapiens
tgtctactgatggtgccgggggtccggctgtttctcttgtctactgatggtgccggggtccggctgtttctgttgtctattgatggtgccgggggtccggctgtttctgttgtctactgatg

SEQ ID NO: 234601 - DNA, 122 bp, Homo sapiens
agcccggtctccccgacacccgcaccgggccgccgcgccggaggctcccgacgccccaggcgggggggtgcttctctgaattcaaaggacacaagcagcagcagctgcggcggcggcgcggg

SEQ ID NO: 234602 - DNA, 122 bp, Homo sapiens
tttctagttcagagacaatctttctcaaacttagtagtgacaaagatattagcaggtatccgggtaagatatcacagagttcctcaccacagtagtaactatgggatttttgcaggagtcca

SEQ ID NO: 234603 - DNA, 122 bp, Homo sapiens
caaatgcaggcccagcgccgtgcccggtcggcagcagcactgagagtgcacttttgactacgtttcttgtggcttgtggtcacaagtatgtctgtggttattcttttcaaactttatttcac

SEQ ID NO: 234604 - DNA, 122 bp, Homo sapiens
aaaggtgaaactaacttgaggtatcagagggccttttttctatcctctgcagaccagacgcggttcacctcgactaccttaaaaatggaattcacaggaagattttagggcctaagacacag

SEQ ID NO: 234605 - DNA, 122 bp, Homo sapiens
aaggagggtcctacggttcctgggaggacgcgaagagccaagagctctgacagctggcgccggggaaaaggccccgaggcggggtccgcatccctggaagggcggcgtccacactcctgcga

SEQ ID NO: 234606 - DNA, 122 bp, Homo sapiens
cactgggcacacacccctttaagatacaggctgagtgtgctcctatgtaactactgcccccgtgtctctcttcagagcagaagagttggctttgctcatctctgtgacccattattccagaa

SEQ ID NO: 234607 - DNA, 122 bp, Homo sapiens
gctccggcgcccagcggctctgctccagtctcgcccttcccggagcgcccagatcagatgcggttacagcgcactagcttcctacttgagaccagaacgggctccggcaactgagcatgctc

SEQ ID NO: 234608 - DNA, 122 bp, Homo sapiens
acaatgaaaaaacaacatcgaccccacctcgccccagcgcagcaacccacccacccatgtcgccctctgcttcgcccaggaaactgaaggggactaggaggaggaagaagagagcgaaggac

SEQ ID NO: 234609 - DNA, 122 bp, Homo sapiens
gacttaatcctggggagtttacagcaggaatggggtgggggagggtgggggtgaggtgggcggatctccaggaaattagcatttaaggcctaattctgagagtgccattagatctccttgtc

SEQ ID NO: 234610 - DNA, 122 bp, Homo sapiens
gggccccgagctgcgcctgtccagccagctgctgcccgagctctgtaccttcgtggtgcgcgtgctgttctacctggggcctgtctacctagctggctacctggggctcagcataacctggt

SEQ ID NO: 234611 - DNA, 122 bp, Homo sapiens
ccctgacacgcaccacctggggctgcccgtccctgtccttgtactgcacggtgaaggagtcgaagcggccctgggggacggtccaggagaggctcagcgagtcaggggaggatcctgtcact

SEQ ID NO: 234612 - DNA, 122 bp, Homo sapiens
gagcagggcaagggtcagcagggcgagggtcccacgtgccacttgccatataattgcagacgctggcattcattcctctccttacatcctgtattaccccttgtcccagtgtttgcctatta

SEQ ID NO: 234613 - DNA, 122 bp, Homo sapiens
gcgctatcagccccgcctgcgcttccagaagcagcgactgctcaacggctatcggcgcttcgacccagcacggggcatggagtacaccctggacctgctgttggaatgtgtgacacagcgtg

SEQ ID NO: 234614 - DNA, 122 bp, Homo sapiens
tctcctgctcctgcacccgaagccgctggctcagagactggagggcctcccgagcagggccgtcacctgggaaaagggcaagaggtactcagaatgtacccatcacctgaagaaagcgtaga

SEQ ID NO: 234615 - DNA, 122 bp, Homo sapiens
gacgtggggactgccgctcacggaatccgggagtcgctaggagagcggcgcagggaaaagcgagcttggtgcagctcttcttgagtagtcgagctacaaggcgcctgaagaccttctgggcc

SEQ ID NO: 234616 - DNA, 122 bp, Homo sapiens
gcgacagattccactttccactcgtccactcctgagtgatcagggacacgaccgcagcctcgaggcctcaccgccagccagctcccgggccccacaagctcagatgaaacctggccacggag

SEQ ID NO: 234617 - DNA, 122 bp, Homo sapiens
gaggacgtagaggagctgacggccagtcagagggaggcagcagagcgggccatgcggcagcgtgaccgggaggctggccggggcctgggccgcatgcgccgtgggctcctgtatggtaggtc

SEQ ID NO: 234618 - DNA, 122 bp, Homo sapiens
aatgaaatgaattgtattataaccatcttggaaaaatagctgctgatctcataaattcatcgagcttcctggttccaaagccctctcttacaataatagtaagtgttgctgtgctcagtaaa

SEQ ID NO: 234619 - DNA, 122 bp, Homo sapiens
tcatttctgggagtggcctctgggtggcagtgttattttcagtttgcactttgctcatcacgtcagttttctaagttaaagttgcaagagactcaatcatctctttcaacagactgagtgtt

SEQ ID NO: 234620 - DNA, 122 bp, Homo sapiens
attgcagacgggagactgcttgtcaattcagggaagtcagcctctttctgccacttaattcgcccatcagtagagatccgactttcccacggttcactgtcacccccattgcacaggtgggg

SEQ ID NO: 234621 - DNA, 122 bp, Homo sapiens
gaggccggggccggggaggaggaggagccgcagcgggagagaaggtcgcgccggcgggagcgctgggccctccgcctccgtcctccgtggccccacccggtccgcatccctcgcctcgcctc

SEQ ID NO: 234622 - DNA, 122 bp, Homo sapiens
cttcttttctccctctccaatgctaacccgtcggaactaacagcaagcattcagaatgagcgtaagtgccctgtgtgcctctctgtgcctctgggagttgggagggaggaatgaggcatgag

SEQ ID NO: 234623 - DNA, 122 bp, Homo sapiens
tgaaattgggcaattatgagcactggggtaaaccagagcccctgctgctgtgacaggccccgcggccagcctgcgtgtgccccggcgtgggatgccgagtgggtctgtggaagagaggcagg

SEQ ID NO: 234624 - DNA, 122 bp, Homo sapiens
actgggattaatttactcagagatctggagtagcaataacttgtgtctttccaaaacccccgcagtcaattaatgagatcaatttaaagtggcagtattgaaagggaaaacccaaacactta

SEQ ID NO: 234625 - DNA, 122 bp, Homo sapiens
tcacctcccaggctcgcggttggacgggcggaagccctgtgagtccagatcgctttgtgtcgggggtggggaaatgggagtgggagtgggggtggagggggaatgcggggggacccagctta

SEQ ID NO: 234626 - DNA, 122 bp, Homo sapiens
gagtcaggcccaccactgggagaggggctgtgctgggcctttgaggccccaaaaaggagccggggctggcagtgcctagtacaagcctggccccagctgggtgctcaggaagtgccagttaa

SEQ ID NO: 234627 - DNA, 122 bp, Homo sapiens
gaacctggaaggttttcacttctgaggtggaagagattgtttctcaaatcttatcaagcacgtcaaacactttggaagtcttcattaggttgccactactttcaaagggcataaaaacataa

SEQ ID NO: 234628 - DNA, 122 bp, Homo sapiens
ggggacatggatttctttaattgctctaaggaaaatactgaacttaagtgggccccatcacgtctgttttctcagaacagtgcctaaatgtagtcatttggggtggggtttgttttagcacg

SEQ ID NO: 234629 - DNA, 122 bp, Homo sapiens
tgcaggggtggaggagcgggtgatacaactagcctaggccatcccagggcacagaacatacggtctagaatcagtgccttgaagagccagggctttctgctgttcaaggaacaggcataagc

SEQ ID NO: 234630 - DNA, 122 bp, Homo sapiens
tgccttaactgatgtttgttaaacaaaacgtctcctggataccttcactatcctcttctacgccctagcagggcatgccttcgttgctttaaattgccctcaaattatttgtgatatattga

SEQ ID NO: 234631 - DNA, 122 bp, Homo sapiens
tcaagtctagacaagcctcctgactctctgggcctcagtttcctctgttaatgtgtatgacgaggaatagtggatggtccttggggcttcacccagcttacccctcattctacgctttcttc

SEQ ID NO: 234632 - DNA, 122 bp, Homo sapiens
tggaatgcggcctgccgtaaagacagaggcgggttgttaagtatactctctactttacggcgtacccgagaacgcccccgcaggggcggtgctttggaggtgaacccgggttgggaggttca

SEQ ID NO: 234633 - DNA, 122 bp, Homo sapiens
agaaggtagaatgggacatactgataggttctaccatctccacatagtggcaagtcataccggccacaaacttttctcatgaagcaccagagagcagaaattcgaggtgaggcctgcaagaa

SEQ ID NO: 234634 - DNA, 122 bp, Homo sapiens
gagcctgaatgcctcttttgtttgcaatgaaataaaatctgcccttttaaaaagcatccacgctgccaaaatcccaggtaaagggggtgtggttgacttgctgctagggaggaattccttaa

SEQ ID NO: 234635 - DNA, 122 bp, Homo sapiens
tgctctcctgccaagataacaccagaggagcagccaactacgtccaccagagtggggagccgtcaatgtgaaaacaatccgcctggatttctcaactggtatttaacttgcaatcactgatt

SEQ ID NO: 234636 - DNA, 122 bp, Homo sapiens
cggcggggggtaaaaagctgtggcgggcagaaagccgcggcggcggtgggggcaaaaagccgggtcgagcaaaaagccacggcggcgggggtgaaaaagccgcggcggtgggggagcaaaaa

SEQ ID NO: 234637 - DNA, 122 bp, Homo sapiens
tctggggctcaagcaatcctctggcctcagcctgctgagtagctgggaccatagctacgccgacatgcttggctaactttacctctccttattggttctgcttctcaggttaaatcctgaca

SEQ ID NO: 234638 - DNA, 122 bp, Homo sapiens
ttacatgcatgaatgaataatgtattttcagtgtaacaaatttattataaaagtgtagttcgactcttcttggtcttggagtttgagagtacagaattacagggaatgaagagaggtataag

SEQ ID NO: 234639 - DNA, 122 bp, Homo sapiens
agctataaagaaatacctgagagtgggtaacttataaagaaaggaggtttaattggctcacggttcatagctgcttctggggaggcctcaggaaagtttcagtcatggtggaaggtgaaggg

SEQ ID NO: 234640 - DNA, 122 bp, Homo sapiens
agccccagcacctagccacgtagctggcgaggtggaccaggaaccgacccagacccctgccgtcacccgacatcactacggagagtgaagcttttttatatttgtccacataaaaccaatca

SEQ ID NO: 234641 - DNA, 122 bp, Homo sapiens
acatcgggcgctgcggccggggacccgctgctgagatagacaggtgagaaagcccggggacgaggggccactccagagttcctgccaccctgggatccccgcccccttgagggcgccccgtc

SEQ ID NO: 234642 - DNA, 122 bp, Homo sapiens
aggaatttattatgttgtgccttgaagctcaacatgtggccatttttgttaaatgtttcccgtaaattttgaaacatctcataaacaacccttctccttcatatgtagaaaccagtaaagga

SEQ ID NO: 234643 - DNA, 122 bp, Homo sapiens
cgccgggggtccagagtcttgggcaaactttgaagggtgccggagccgcttgttgctcctcgcggcggagggagccgcaccgttacgtccccgcggggagagcgaggcggccctcctcggcg

SEQ ID NO: 234644 - DNA, 122 bp, Homo sapiens
atagcctgtcacctacttcttactggaaaatggttccagactcagagaggttactgcagacggcataaaagcattcagacgacaacgttctctccccaacattcattttccttgcaagagaa

SEQ ID NO: 234645 - DNA, 122 bp, Homo sapiens
atccgggccttcatcttccccaggcaggacatggaaccctcttccctgggaaacaggacccgcccaagaagaaaaacttaaactgaatgacatcacagatgtccccaaataaatggccctgc

SEQ ID NO: 234646 - DNA, 122 bp, Homo sapiens
ccccggctgccccagaaacacaactcctggtccaggcggtgcggggccgtggcctggggccgcctgcgggggagatgggacagcggtcaccccaggagaacacgacaggcggggaggaggaa

SEQ ID NO: 234647 - DNA, 122 bp, Homo sapiens
tgtgtttgttaacataactaacttttctttgacttctgtgaagaaaaagatattttacttcggaagacataccagaacaatcttgccagaatctgaatgccaggattagtgaatcatagatc

SEQ ID NO: 234648 - DNA, 122 bp, Homo sapiens
gctcatttaatcctctcaaccaaatccattaaagataaacactaacttttattcccatttcgcatacgaataaatagacctagagaagttaagtaacttgcccttactcaaggacacaaacc

SEQ ID NO: 234649 - DNA, 122 bp, Homo sapiens
cagcggccaagctatgctcattgtgagccccatgcccggacggcgctgcccccaccacagcgaccggcccagtacagggtggatgacaggaacccttcctcgggactcttccagccgggccc

SEQ ID NO: 234650 - DNA, 122 bp, Homo sapiens
actgttgagtgtggagggttttgaagatgtgcagggaatgactgcagtctacaccagaaacgcattaaagagtgactttgtttctgtctttgcagaggaagaagctggagacttggtccagc

SEQ ID NO: 234651 - DNA, 122 bp, Homo sapiens
gattatatagaccgtagggccgatgtatataatctattagggccgcgtcggccttgcaggcgggtctccaagtgaatgagcggcagagtcccatcatgcgcatcagcctgcgtgaaccagtg

SEQ ID NO: 234652 - DNA, 122 bp, Homo sapiens
gggatactgggaggcaggaaggcttttggccaagcagtcatttagcaaatattgattagtcgtcagttacttccagaagtctctgtactcaccaccactttgtgtatgtgatggaacctttg

SEQ ID NO: 234653 - DNA, 122 bp, Homo sapiens
ctctcgctcgctggcgctctcctcgccgcgctcccctccctcccccccaggcgctggctccgcgctctttccagctgtcaaagcgtcagccccggccgcggccccatcgccctggaactcct

SEQ ID NO: 234654 - DNA, 122 bp, Homo sapiens
cttcatagatactgtgagtatgttttcatggcctcctttttttaacttattttacatgtgcgtgcatttggatattgaggaggtgcacattcttattgctttttatagccgatactatttca

SEQ ID NO: 234655 - DNA, 122 bp, Homo sapiens
cgttctctgcgctgccagctcaggtgagccctcgccaaggtgacctcgcaggtgagcaggcgtccactttggggctgctgggtgaagggggtgggtgcccaagaattctgagtaatgaggag

SEQ ID NO: 234656 - DNA, 122 bp, Homo sapiens
ctttgccagcagtcacattgcccaggtgtttaacatgcctctcttgatcctttggtccaccgtgttttggggatagaggattaaagtgaggacctgcactggtacagccttgtatattattt

SEQ ID NO: 234657 - DNA, 122 bp, Homo sapiens
ccgccgggggcttcagacggagcaccaaggtcagaggcgggctggcgagccgcgggtccgcgcccctggagccactagagccacagccgcccgcagctggccaaggagagagcccgtcccac

SEQ ID NO: 234658 - DNA, 122 bp, Homo sapiens
gtcattctggatttatcttggggtcgggagtcaacgatacttcttgtgctgtcgtttctccggccgtgtgaagttaccacctcgtgagtggtcataagttagcgtgtctaaatgcactttga

SEQ ID NO: 234659 - DNA, 122 bp, Homo sapiens
gggcatggggccggcgagctccgggaggttcgcatcctcggggactgggagcccagttatcggacccaggcgaggcccccagcttatgacccgcccccatcgccgtgatcctcggggccggg

SEQ ID NO: 234660 - DNA, 122 bp, Homo sapiens
agacagcctatggctgtagttactgctcccaaagagtgttagaattcccactcccagcttcggggccactcacacaaggtgattgaagtggaaaccagagactctccacaatgccctcctag

SEQ ID NO: 234661 - DNA, 122 bp, Homo sapiens
ccgcgtcgggcgggcggctggaccgagggaggccaggctgggtgcaggtgggcggcgcagcgctgcggggccgggatgcggggcgggggaacctcggctcccgggaagccccgagcctgggg

SEQ ID NO: 234662 - DNA, 122 bp, Homo sapiens
tccctctctctctccccacctctccccttcttccccctccacccagcaacacacacacaacgtctcagtctctgctctgcttggtgaatccactctggtcctgagtgtctctcttcagacca

SEQ ID NO: 234663 - DNA, 122 bp, Homo sapiens
tgcctctctggccctggagccccaaggccagcccaggcctctgctctggcagaacaagtgcggcaggcgggcgtgctggcagagctcggcgtgggtagatggagctcggagggtccggaagg

SEQ ID NO: 234664 - DNA, 122 bp, Homo sapiens
gcctctgcacccacatccaaggtgagtctctcggctgccctgagctggggctggatgggccggaccctccattccggctgcagcttcccgcgcagtgagaaggcagcggtccctgagagccc

SEQ ID NO: 234665 - DNA, 122 bp, Homo sapiens
ggggtcttctctcggggcggcttcccggctttgcggggagtgtggctgaatactgtaatacgatggggtcccccaggaccccctaaacaacaaatgctcaaaggagcgacggattaattggg

SEQ ID NO: 234666 - DNA, 122 bp, Homo sapiens
ttaggctgtcacctttgttcccagcccagagcaatatactgctatcacacggtgcattgtcggtacttgcgcatagcatccaccaacagctactggagttttctttttcttttcttttgtat

SEQ ID NO: 234667 - DNA, 122 bp, Homo sapiens
tgtccccagtccttctgtactctgaaatacttggtttcccagtgtgtccaattaagaaaacgagttttttgaggtttttggagtttctcttgagacagggtcttgctctgtcacccaggctg

SEQ ID NO: 234668 - DNA, 122 bp, Homo sapiens
tgtcctccccacctacccaggtgcttgcccccgccccctctctcagccccttccttttttcggtaactagacgtggatgaatgtaggaccagcatcaccctctgctcgcaccattgttttaa

SEQ ID NO: 234669 - DNA, 122 bp, Homo sapiens
tggatagttctctcataattaatttcaagcttttgtttggcttcacagtttgggcagtgtcgcctgcatctcgggggtcagtgcacagttgagcattccaaagcgatgctgactctgtgttg

SEQ ID NO: 234670 - DNA, 122 bp, Homo sapiens
ccgggggcgcgggtcagccccgctagcagcccaggggccaccaagcacccatgaagcccccgccccagccccaccacatcctcaggacaggccaaggtgagggcacctggggccgagactca

SEQ ID NO: 234671 - DNA, 122 bp, Homo sapiens
acggaggtccgaagctttcggcctcagtgagcggaatgggtgcgctcacgacctggagggcgagatgagatgtccctcggcgtgaagtggccgtgactaccctagcactttgcgttccccgc

SEQ ID NO: 234672 - DNA, 122 bp, Homo sapiens
ggagaggcgccgctgcggctccgcggagctttcgttctttttttaatgcagtttcccttccgccacgtgagtaccgccttttggccaagagtttagccgcgtcctaggggagcagcagggac

SEQ ID NO: 234673 - DNA, 122 bp, Homo sapiens
aactgtttccctatccgtgtaacctggagaggttgattcctacttcataggctactatggcgattactaggggagacagttatctgaagagccaattaaagtacatggccacaaaacagtgg

SEQ ID NO: 234674 - DNA, 122 bp, Homo sapiens
gaccactgggaatccaggcctcctcctcagggactccatctgtaactgaggcacgggccacgctgaactgacatcagcataggctcagctctccccatactgtgggcacctcgaggacagag

SEQ ID NO: 234675 - DNA, 122 bp, Homo sapiens
caccttgtccactgtatatgggttggagggtaaacccatatacagaaaacagcgtatgcccgggaccccggtgaagggttggggaccccaggagggacgtccccacgtgggctcccagctcc

SEQ ID NO: 234676 - DNA, 122 bp, Homo sapiens
gccccgggacacaaggacccgaatcaggagagtctctccagtcggcatggtggctctggccgtccccgaagcgcgtgctggacgtgggggaaacagagatgggcaggcgttggcaggagagc

SEQ ID NO: 234677 - DNA, 122 bp, Homo sapiens
cgtgcgccgtcactggtttctcatggcagccactccaacctgcgtgcgccttccctgatgcgccctgctagtcgctctgcaggactcctgccttgtgcggaagcttccttagggctgcaaag

SEQ ID NO: 234678 - DNA, 122 bp, Homo sapiens
tatttaaccccagacagatgcccgcagacaaaattttggcttgcaagtaaggtatatggccgcaccagtcgacccgccgcttcttcccggtcatttccccgtcctccttctccctcctccgc

SEQ ID NO: 234679 - DNA, 122 bp, Homo sapiens
cgcggaccaacccaaatcgccagaaaggaggggcgtggcttgaagtcccctcctccatcccggggatcacgttttgcctgggggagctgatcgcaagactaggcaacctccagccagtccct

SEQ ID NO: 234680 - DNA, 122 bp, Homo sapiens
gttgaccagacctttcagcgcgatcgtcggttcccagctagccgaaaaacaaatgttccccggaatgagagcatctaggagcaccttgtcctgtttccaagagaatggctcacattgttccc

SEQ ID NO: 234681 - DNA, 122 bp, Homo sapiens
tccctagcgcagaggctgcccgggagcaggaaatgctccaccaggtgaggcccagggggtcgttggcgctgggcaaccggggacgcgtcccttgagagagtttggactggatggcacgagtc

SEQ ID NO: 234682 - DNA, 122 bp, Homo sapiens
aatatgtgtcagtggaatcagagtcccttgcctgtggaaatcctctgtcctcttcctccccgcctgcttcttggcctctgccttgactctaatctctccaactcaatcattttgtgtgatta

SEQ ID NO: 234683 - DNA, 122 bp, Homo sapiens
agcccagatcccggcccgggcggcgcacccacctgacgaggggctccttctcaggcagggcgcgctcctccaagcactcgcacccgcagcagcagcacacggttctcagccagtccctcagc

SEQ ID NO: 234684 - DNA, 122 bp, Homo sapiens
gacttagtttagtgaatctccagagactgggtgtgaacgtgacttttcacccctgggtcacgggtcacttcctgcttcttcttgtaagtaaaagctcttactattccatgggtctggctgta

SEQ ID NO: 234685 - DNA, 122 bp, Homo sapiens
ggaaaaccaggccatgccctccctgggcctcaggactcagagagcgcgacaccggccagacggccagaaaggaggcagggcctggccgtggcatcgccattccttctgacgtcttccagttc

SEQ ID NO: 234686 - DNA, 122 bp, Homo sapiens
ccaatttccccactgcttttgttactgatgaactgaagccctattgttcatccattgccacggtctttttcagtccccacactacgttctgcgttgccagagataatgaatttgcacccaaa

SEQ ID NO: 234687 - DNA, 122 bp, Homo sapiens
agcactggcaggctcagacataggtgctggttagcaggactgcttttctgtttcttgtgtcggctttgtttatttcctctctattttccccctggacttagtaaagtctttccgaaaatacc

SEQ ID NO: 234688 - DNA, 122 bp, Homo sapiens
cacggagacacataaatgcaacacgtgccatgggttatgttcaaaatcacattcaacaagcgcctatgtgactggctatgggaattactgtagatcactggacctgaagactcttaagttta

SEQ ID NO: 234689 - DNA, 122 bp, Homo sapiens
acctccacctttctctcccttcttcctttccactctcctccaaataaaaaggttaagtgacgacatccagcccaaagaacaatgaacaatagatacatacacacacacagctctctcttcca

SEQ ID NO: 234690 - DNA, 122 bp, Homo sapiens
cctaggccttgggatcggggccctgggcttcgggggactagaggctagtaggcgcgaccccgcctggggctctggacgagcagggcggggacgtaaggagagtcctggggcttggagctcgt

SEQ ID NO: 234691 - DNA, 122 bp, Homo sapiens
aatgttgtctaggaagcttttacaacagactggtgaaaattaaaacacttttcaacgcctcgatttagagtaattttcgtgagcgtagagaaggggctgggccaggaccaccaagtagggac

SEQ ID NO: 234692 - DNA, 122 bp, Homo sapiens
agatcatgttgaaactcctttttgtcacatcctccagatcacaatgaaaaggcagattaacgtgattactgaggtccatcaactcatggctcttggttaaatgatacctaccatgaaccaca

SEQ ID NO: 234693 - DNA, 122 bp, Homo sapiens
atggaaactatgtgttttttttttttttttttttttgagacagagtcttgcactgtcacccgggctggagtacaatggtatgatctggggtcactgcaacctccacctcccgggttcaagcg

SEQ ID NO: 234694 - DNA, 122 bp, Homo sapiens
caccctttaacagtgcacaaagcgctggcacacggtccacgtctggtgacgcaggctgcccgaagcgctccaaccattttgcaaacctgggagagcaagaggggctctgcaggtctagccgc

SEQ ID NO: 234695 - DNA, 122 bp, Homo sapiens
ggcccccgcccgtccgggccgcaccccaaggccaaggaaagggaaaattgccaaaagaaccgctcctgacgcaccaagcggtggggtcgcaggatccacggccttttacttctctcccgcag

SEQ ID NO: 234696 - DNA, 122 bp, Homo sapiens
tcctcatcctaagaaaactaagcctctctgtccagtcccccgggatctgttcaacttaagcgccgcctttgggtctactgcttacttgttttttgtttctaattagctcccccattctactg

SEQ ID NO: 234697 - DNA, 122 bp, Homo sapiens
cgctgcccggggacagcaggggtcctgcggttcggttcgaggaccgcgctggaagaggcccggggcttcggaagggccattcccctccctccacgcccgcccagggcctcgctgttctttgt

SEQ ID NO: 234698 - DNA, 122 bp, Homo sapiens
tttaaataccttttttttttggtggggatttttaatacgtttgcaatttgatttaatgtgcgagcaagcctgtctgctacatcatacttcaattctggcttaggtgaggcaaggaacccaat

SEQ ID NO: 234699 - DNA, 122 bp, Homo sapiens
aaagggtattgcgtggtcccgtgcaaggtaagacttgggagcaaaccctgcattcggaagcgttgcgatgtgatatactaatgaggaagtcaggcgctaagccctaagggtttcttatttct

SEQ ID NO: 234700 - DNA, 122 bp, Homo sapiens
aggcaggaaatggcttgaaagatcttcctcccaagatccacaaataaggatgagtggtaccgcaaccctatttagtatctgtgactttttggggtcttaaaagtcatatggagaagagaaaa

SEQ ID NO: 234701 - DNA, 122 bp, Homo sapiens
cccactatccgtcaactgataaacgcataagcaaaagtgggcacttccacaccacggaaccgactccagcggggggagggtgaggtgctgatggcgcggcgatgtgagcagccctgacagcg

SEQ ID NO: 234702 - DNA, 122 bp, Homo sapiens
aagcgggcgagaagggaaacccaagcgggacaaggacttttggggggaggtcaaagggcacgaagttgtgcctgcagctgttaccatagtaaccgaggaccggatgtggcgatcttacggtg

SEQ ID NO: 234703 - DNA, 122 bp, Homo sapiens
gtgactcatgcctgtaacactagcactttgggacgttgagtcgggaggattgcttgaggtcgggaattcaagaccgatctggccaacatagcgagaccctgtctctaaaagaaaaaaaaaaa

SEQ ID NO: 234704 - DNA, 122 bp, Homo sapiens
ttgctatgaacgaacccttaataccagatccagagtggctcacccacacagccgtgcccgcgttccgagggtgctcatgcctcagccttttagatgctcactccctaaaactgcgactacac

SEQ ID NO: 234705 - DNA, 122 bp, Homo sapiens
agatggtagaaaggtgactggggacctggaaagttgttaactctcttagagatgtgcgtgcgcgtgtgcataaatactgatatacatatctattaacttttcaaaaacttcacctactacaa

SEQ ID NO: 234706 - DNA, 122 bp, Homo sapiens
tctctcccagtatactgctgctctctcaggggcatttggatccccgttttgggtcataaacgagctgccgagggaggggtggaatggcgcaatgttactcaccgcaattaataatctcaatt

SEQ ID NO: 234707 - DNA, 122 bp, Homo sapiens
agcgaccgggttaagcctggggggacggtcaggagcagggctgcggagtcctccggcgcgcgtccggcgggcgcagtgaaccggagctgaagcgggcactggcgcccgggcctggactcccg

SEQ ID NO: 234708 - DNA, 122 bp, Homo sapiens
tcagggaaggggctcgggctctccagaaatccggcgtgcaggccgggagctgtccagcctcgctaagagccctgggctagagtttgcccggacttgcctggagctgctgaaaagggaattga

SEQ ID NO: 234709 - DNA, 122 bp, Homo sapiens
gagagctgtaccttcctgccatgcaacagtttctgtggttttaaccagaacgccaaaccacgcaatctgtaggtttgcatttggatgtgattttataccagtgtaacccaagttatatcttc

SEQ ID NO: 234710 - DNA, 122 bp, Homo sapiens
aagctgacgggcaggtccggggagccctcacacagggcgctgtctttagagcaggagcagcgcaggggacactttccctttgggggtctccaggccaccaccacccccgccccagccagcag

SEQ ID NO: 234711 - DNA, 122 bp, Homo sapiens
tgctaaaatggtaatttttttaaagtggaagtgtcagaggcttttaaaccagagcaactccgtcttgaataggggctgagtaaaataaggctttgacctatgggggctgcattcccaggagg

SEQ ID NO: 234712 - DNA, 122 bp, Homo sapiens
tgctagcttctgccggcagccgcagcacattcagagcgttgacagagcaggggctcctctcgctgtccctggaaggagtgcgcacacttccccgtgtgtggcgtggggtgatgcgggagcag

SEQ ID NO: 234713 - DNA, 122 bp, Homo sapiens
cttctagttttttttttttaatctttttaaaaacatttttcagatggagtgtagctccatcgcccaggctggagtgcagaggggcgatctcagctcactgcaacctccacctcccaggttca

SEQ ID NO: 234714 - DNA, 122 bp, Homo sapiens
ggcccacagaagaaaaggcaaccccaggcataaagaggctctcagcagcccctgcccgaacgctcctggcaggcaagggccccatagcaccctggggcctcgagggtcaccgcagacccggc

SEQ ID NO: 234715 - DNA, 122 bp, Homo sapiens
agcgccctgacctggcctgtgctgcattgccttcccttgcgcaggtgggcaggtgtggcccgctttttctagggcccaagggtgacttggaatcttgggggaagcctcggcaaagatgccgt

SEQ ID NO: 234716 - DNA, 122 bp, Homo sapiens
tgtacagtgagggaatactcgggtaagcacagaaacacctgcaaaaacaactcacacattcgccagcagggagtcggtcaaaccaaccaggcccaggctgtggaatgttaggcggcggttaa

SEQ ID NO: 234717 - DNA, 122 bp, Homo sapiens
aacgagctggtcgacttctaccgcaccaccaccatcgccaagaagcggcagatcttcctgcgcgacgaggagcccttgctcaagtcacctggggcctgctttgcccaggcccagtttgactt

SEQ ID NO: 234718 - DNA, 122 bp, Homo sapiens
aacaacagcaacaacaacacccagttggtgctgaggggctgggtgccagcccccgagttccggtgtgctggagcattctttacagcagacatgggacatgagcccgggctggctggctctac

SEQ ID NO: 234719 - DNA, 122 bp, Homo sapiens
aagaaaattggtttctttgcttttaatgctgctttgaaaagatactcagagtttttcatgcgtgacatgtcacatgtttaatgtggacttgctggaagtcagggggtctttagcgtgtgata

SEQ ID NO: 234720 - DNA, 122 bp, Homo sapiens
gcatccttggagagagctgagagctggaggtgagctgggctcgcggtcgcccctctcgcgcgccctctttgagaaccacggcttccaacctccctggaaatggggggaacatggccgaggcg

SEQ ID NO: 234721 - DNA, 122 bp, Homo sapiens
acataataatgaacaaaacagcacagtgagtcacacaagagactgcagagcagaggccaacggctttaacccaaaccccagggaaacctcttgaatgaacagtgttaactgctgagaggtga

SEQ ID NO: 234722 - DNA, 122 bp, Homo sapiens
gggcaggggcagcggcggctggggttgggggtgggtggggagcttttggggaggacaggtcgcagcttggctatggaaggctccaatggctttgggatcgactccattctctcccaccgcgc

SEQ ID NO: 234723 - DNA, 122 bp, Homo sapiens
ataagtacatgttggtgagaaagaggaagaccgtggatggctacatgaatgtgagttctccgcattggtacttgctcttctgattctcatcttcggtaggcctggcatcatacacagcacag

SEQ ID NO: 234724 - DNA, 122 bp, Homo sapiens
taactctgcattaggaatcagaaggatacatttttagtcctaactctgccaccaatcagacgtggccttagacaagtcatctggggacaccaggtcttttcagtggaacacacagcctggcc

SEQ ID NO: 234725 - DNA, 122 bp, Homo sapiens
cgtgggggtgcccgctctgcggtggtcggctgaccctgggatgccctggtcagaataacacggggcccagggtcagatgtgcgtctcggaagaacacggaccatttcttaggataaatatgt

SEQ ID NO: 234726 - DNA, 122 bp, Homo sapiens
taactttttagaaatgttcggctggcagggttgccggcttatgtgctgagtcttttacctcgtttggagatagcgagagcaacgaagagaaaacattaattacccggtattagtattaatac

SEQ ID NO: 234727 - DNA, 122 bp, Homo sapiens
attgtttgtacggacctactgagcagcccgggctcaggacagtgcatgtgggcccctgatcgtggcttatgaggagacatcttacatgacctgaagggcagccttgtttccagaattttcta

SEQ ID NO: 234728 - DNA, 122 bp, Homo sapiens
gtcagcatgcagtatttattaatggatatgagcatattttcttctgtcatgcatctctgtcgcattttcctcctgcctcttccctgcactgctgtaaaatgtacaagtgctcagtcctaaaa

SEQ ID NO: 234729 - DNA, 122 bp, Homo sapiens
ccacgggagccccgccagcccccgccggagcccgagctgcagtgccgcctacaagtggtgcgctggctgcagctgtggcaaccccggatcccgtcctcccgcctcgcacccatcagcgcgga

SEQ ID NO: 234730 - DNA, 122 bp, Homo sapiens
cagggctgtgcccggtaggcctcgggggaaaactgccttgtccacaccagacttggtgcacggccagtcattactgttttctgtagagagtcgcagtcaacaattcagggtacctcaggctg

SEQ ID NO: 234731 - DNA, 122 bp, Homo sapiens
ttctagaagattaatccaccaacatttcaaaatcttgtaaggagctgcgacccgctaggacgggagcctactgcgccctcaaaccccgcggcggctccctccccggagggggcgcgtgaggc

SEQ ID NO: 234732 - DNA, 122 bp, Homo sapiens
acgttaaaacgctctggatggtggcactgggattatggatggggcttatttagctccctccggcttgctactaaggggaggggtcgtcggtgggcctttcggcgccgctgcaagccaccggg

SEQ ID NO: 234733 - DNA, 122 bp, Homo sapiens
caagtaaagagactggtcacattctatagcttcaagcccacaagatgccaaaggtggcaacgtgtgacacagagtgccctcactgtgagacatcactgtacacaattcacattcacacatcc

SEQ ID NO: 234734 - DNA, 122 bp, Homo sapiens
gcgggcgggttcccgggggctgcggctgcccgtgcttccccggtccccacccctgccccccggccccccgacccagctctccggcctcagaggctgtgacaatggactatgactttaaagtg

SEQ ID NO: 234735 - DNA, 122 bp, Homo sapiens
gaggctctctgggcctcagtttctcctcccgagccccgagggcactgtgttgaatttggtcgcctcaggtaggcgctgcatgcgccccctctccacaggcccctcaactcacgcattgccag

SEQ ID NO: 234736 - DNA, 122 bp, Homo sapiens
cacgccccttgtgacatggtttttaatatccaggaggcgggaggatgatattagtcccaacgtcacagaaggtgtacactacccctgtgatattgtccctaacttccagaggggagaggatg

SEQ ID NO: 234737 - DNA, 122 bp, Homo sapiens
gtggcttcgttaagacaaaagccgtataacaactggctgctcagaaccattgctccccagcggcaccgcgttgcgcaaggcaaggcctgagcactgagtggctggtgaaacagaggcagatg

SEQ ID NO: 234738 - DNA, 122 bp, Homo sapiens
gggctgccgcaggcctcaccatgtccttggatgtgtgatgccctacggggacagccaggccgctgtggggccacccccgaaggccactggccactccgacgagcacccggcccagaccaaga

SEQ ID NO: 234739 - DNA, 122 bp, Homo sapiens
actgagcaggatgtgttgtaggatggtgggtagagaccagggaagctgctgaacatcctacgaggcacgggacagccccactatggggagttacttggccccagatgtccttgtgctctgct

SEQ ID NO: 234740 - DNA, 122 bp, Homo sapiens
tcccctgggaagtgtagtcggcgtggggccggaggcatgccgggagtggtagttctcccgcggttggcggggtttcggggacagctcgcggcctttcgggggttctcctggcttgggccatc

SEQ ID NO: 234741 - DNA, 122 bp, Homo sapiens
agacactggggcattggtggaaaaagcacatgctgccactgccactgcccctcaatattacgctgacacctagatgagctcccttcctgcctgtccccacccaacttgtgcatgtgcaggga

SEQ ID NO: 234742 - DNA, 122 bp, Homo sapiens
accatagtaaacctccagaacagaaacacattacttccctctgatggaattttaaatcagcgtaagggattaaacagtattatccagctgatggagagcaacttggaaattatgggaaatgg

SEQ ID NO: 234743 - DNA, 122 bp, Homo sapiens
gaactcctgacctcaggtgatccgcctgcctctgactgcccggcccagtgtaactgttaacggcaacatcgtgtgcagtctccggcttgcattcggtttagtcagccaatcgctaagacgac

SEQ ID NO: 234744 - DNA, 122 bp, Homo sapiens
ccttgcgcacccaggtggtgatgagggcgggcggggcgcggggaacgtgcagccagagaccgtgctaagaccccgaagtcgagccctgggcaggggcggcggcaccgtctgcccctcacccc

SEQ ID NO: 234745 - DNA, 122 bp, Homo sapiens
atacacacacaggtagtgaggaggccggggcgttaatacacacacaggtagcgaggaggccggggcgttaatacacacacaggtagcgaggaggccggggcgttaatacacacacaggtagc

SEQ ID NO: 234746 - DNA, 122 bp, Homo sapiens
gccaagacctggagctgctgcataacaatatctggcatttacacaacgaggcctctgctccggacactgttctgaggcttgacccgtccttaagaacctaggacaaccctgtgcggtgggtt

SEQ ID NO: 234747 - DNA, 122 bp, Homo sapiens
tggtcttcccagggctccaagtggagtgatcactgcacccatggccaggaggtgggggtgcgcggagtgatttttgtaacttccctgagcctcagttttctcatctgaaaagtgggtatcac

SEQ ID NO: 234748 - DNA, 122 bp, Homo sapiens
attatgtgtatagtaccccacaacatatagccaactattcttgaagaaaaagaaaagccccgcctcactttaaaccaggctgcagtgtcccatgctccttgggaagaatgagaggctatgtc

SEQ ID NO: 234749 - DNA, 122 bp, Homo sapiens
gggagcaggcaaagggccggcctgggtcttacctcccttggtccaggcgatgacgggcggcgggttgcccttggcttcacactggaaatccacggtctggccctcaataacgactctgtcct

SEQ ID NO: 234750 - DNA, 122 bp, Homo sapiens
atttctaaatttttctctcttcttggtgtccacttagggctacgcagcttgctcctggcacgggcaccttgaatctcctcctcacacagatggagaccatgcttgatttcctgaacttgtag

SEQ ID NO: 234751 - DNA, 122 bp, Homo sapiens
cacctttcacagagtttatcgtcactttactgtagggagaagtcggtcctagcgcgcctgcgcaggagaggagggctagcgttctgggctcacgctgccggagcaagatgccctaggggaat

SEQ ID NO: 234752 - DNA, 122 bp, Homo sapiens
gtgtctttgcattcctgagaccctcataaatcgattctgcagcttctccggtggatgagtcgtgcccagccacaccctagcaaaataccgtgggtcacacaccacctgcatttctgagttcc

SEQ ID NO: 234753 - DNA, 122 bp, Homo sapiens
agtaccccactcatgaggctcaggttgactcaggagccaccgtgacaataccgaagcatccgctcagaagcagtgaaagacaagcaacaaaaatttgttacttggccattagaggaagcaaa

SEQ ID NO: 234754 - DNA, 122 bp, Homo sapiens
attctgatccaacaggtgagatgcgagaccttgaaatcacagaattaagtggaaatctcccgtccattcccacagaagattctgcagcagcccttccagccagtgccggggttggagaccac

SEQ ID NO: 234755 - DNA, 122 bp, Homo sapiens
gcctcatccaatgacacacagagagccgctgttgactagagagacagtctgtcctggacccgtctgtggggtcattaccctctgcctcctggaagaccaattgcagtacaaattgaaatggg

SEQ ID NO: 234756 - DNA, 122 bp, Homo sapiens
caggccaggccacaacctgaaagcagacatgatctcattgcccaccggcttctctggtgacgtgggaatgctcagagctgcagcagcactgggactccaaaatccaggtgcagacccaccgc

SEQ ID NO: 234757 - DNA, 122 bp, Homo sapiens
gagtgccacctcctcatcctcctgagtcgtgtattgagtgcttactgagcgctccctcctcgtcctcctgagtcgtgtattgagtgcttactgagcgctccctcgtcatcctcctgagtcgt

SEQ ID NO: 234758 - DNA, 122 bp, Homo sapiens
atggactgaaattttcttaaacatgggctgaaatttccctcaaagtgcaaacgagttaaccgctaggtgacgcaaattaattcatttaggccactgagataaattctacccaaaattcagtc

SEQ ID NO: 234759 - DNA, 122 bp, Homo sapiens
gggacgcaggaaccccggcgtccgggcggtgtgcagccgcagacctattccaagtttccacgtagttgcgagagcccaaaaactgtcacgtgcacgtcgctgctgagtgggaggaggtgttt

SEQ ID NO: 234760 - DNA, 122 bp, Homo sapiens
cgacgcatgcacctgctgatggagaatccacgccggtaaacctcaggctgggcgtggcctcggcccggtgcttctgttcccccatagacaccctagagagtggtgccccgcatactcaagga

SEQ ID NO: 234761 - DNA, 122 bp, Homo sapiens
agcgcctccagcaaggactcttggaagaatactgcagagctggctcctgaaggaagctgccgagtcaggctggccctagaagcatgctttctgggttgaatgctttaggttcacctctgcag

SEQ ID NO: 234762 - DNA, 122 bp, Homo sapiens
acagctagggatgtcgacacaaggcccagaaaggtagcctgggctcatacattctcctcccgtggaaaaacgaagggcaaagacctcttcttcttttccctgaagctcaaactgtgatgggc

SEQ ID NO: 234763 - DNA, 122 bp, Homo sapiens
gctgccgctcctgggcctctggatgaagcctccgcatctggtttccatctccctgcgccgcgggactgaagcccggccgacccagatttcccgttcataaatcattactcatctggagccca

SEQ ID NO: 234764 - DNA, 122 bp, Homo sapiens
gctggagggagagcctcattctgactacatcaatgccaacttggtcccagtaagggccaccggtgaggctgtccatgggatctgggatctgctcgggagatgggctggtttgcaggccacac

SEQ ID NO: 234765 - DNA, 122 bp, Homo sapiens
caagggttgaactgactgaagtgagattattcctcgttgtctcggaaggcagagtgtagccgccagtccttccctcatccggaaccttctggtccacatttccttccaagcgttagtcctcg

SEQ ID NO: 234766 - DNA, 122 bp, Homo sapiens
ttggaggactcacagaagttgacctgctcctcccccttgtctgggggctcactcagggtacggacatcacttatgctgagggtagcctcaggccctccccccactggaaccctggagctacc

SEQ ID NO: 234767 - DNA, 122 bp, Homo sapiens
tcgagactgcggcttctcgggcgagagcgcccagtgcgcagccgcattccgagctcgccccgccccaagcccagtctcaggctctctcggcccttgaattacgcctgcgcggaggctttccg

SEQ ID NO: 234768 - DNA, 122 bp, Homo sapiens
aggaccccgcgcatcctgggcctcttgcgcctccccggtcctcagcgcctcctcggccgccgtgcctccccgcaccttttgcgcctcatggggctcccggtgccttctgcccgccgcctcgc

SEQ ID NO: 234769 - DNA, 122 bp, Homo sapiens
tgcctcgttgtcgatgcagtaggtctcatccgtattctccaccagctggtgcacagacagcgtggcgttgtagggctccaccaccgtgtctgacactttgggcgagggcaccacgctgaagg

SEQ ID NO: 234770 - DNA, 122 bp, Homo sapiens
gagccggcaggaagccagctgagcagggtggtgtgttcccgccgggctaacaaaggccgccgggaggtgggggcttctccagccgctccagcggcgggcgggcggcggaagggttaactgca

SEQ ID NO: 234771 - DNA, 122 bp, Homo sapiens
aacatggcgaaaagctttcttgtctccaaggaaacgccacgtaatgagtcaaagctgtggcgcacgcgcagaagtacaagctaccggaagtgatggcgcccctactaaagccttggggttag

SEQ ID NO: 234772 - DNA, 122 bp, Homo sapiens
atccatgatggcagacctggaacaagatttaaaatcagtatcacttaagcacagcttccacgcgactgcatctcacgcgccttaccgacagtcaccgccgatgctgtggttcagtgggcaag

SEQ ID NO: 234773 - DNA, 122 bp, Homo sapiens
gcaggaatgaagcggggccaggtggcaggaaaggcgccagggccctgctccaggacaccgcgcccaggctgctgctgccattgcccttgcatgtttggccagtcccttgcacagcgggtgct

SEQ ID NO: 234774 - DNA, 122 bp, Homo sapiens
cgtcactgcgcagcgcagggtcttcttgaaggtcttaactttttcaaaggagggaaactgcgataaagatccaagaaaaatgtccctggcagagaggaagcccccgaaagcttggcgcagaa

SEQ ID NO: 234775 - DNA, 122 bp, Homo sapiens
gtcaggggtgatggcctacatgggacagcaggacttagtagacaaggccttgcatccttgcggccctgctttctgtctcatccctcttcccttttgtcttggtcagccgcccaaaggctcca

SEQ ID NO: 234776 - DNA, 122 bp, Homo sapiens
cgcaccttgaaagtctgagagctactgccctacagaaagttactagtgccctaaagctggcgctggcactgatgttactgctgctgttggagtacaacttccctatagaaaacaactgccag

SEQ ID NO: 234777 - DNA, 122 bp, Homo sapiens
gggcagcttgaccaggtacggcgtctcctcctcgtccatgtggtagataatcttggtctccgccatggcgcggcggcggcgcggagcccgcgcgctcagggcccggcccggggctcggacgc

SEQ ID NO: 234778 - DNA, 122 bp, Homo sapiens
gccacccgccgacaccggagctggaggagaaccagcaaaatgagacacagaggtgggaggcgcagggccccagctaggtctgtctataccctctgccctcacccgccgctggacccagccca

SEQ ID NO: 234779 - DNA, 122 bp, Homo sapiens
tggccttcctgcgagggcctccgcatgggaacaaaaacaagtcctggcccgggaatggcgcgactgagtcttaacaagggcgcactaattactggaaggcccgggccgggaccccaacctgg

SEQ ID NO: 234780 - DNA, 122 bp, Homo sapiens
ggcaaacacccgcagaacttttcaccccaggagtgataaaagcgtgggcttactatttttcggttgcagtgatctaaggatttgacaaataaatgaagctgggctgcaactagatgaatggc

SEQ ID NO: 234781 - DNA, 122 bp, Homo sapiens
gccccatagccggtttcagaccagccgccccggctccaagccccactacaagccgggaaacgcaaaacggaggcaacctggccaaaggcagaggcaccccccgcaagaccctgaggacccaa

SEQ ID NO: 234782 - DNA, 122 bp, Homo sapiens
atggttgtaccataccctgtacccacagtgagaattccagttccaccacatcctcagcaacgctggttataatcagtcatttcaagtttagccgttctgtttacccgatgacaaatcaggct

SEQ ID NO: 234783 - DNA, 122 bp, Homo sapiens
attcctccggcacagccgatcgcccccgctccggcctcccacacagatggctgtcaaggtcgccataaggcaacctagtccttatggcgataggataaaacggccatattcagattatccgc

SEQ ID NO: 234784 - DNA, 122 bp, Homo sapiens
gagttttaagataagtctattctatattggagatttcttaagaattaaaactgtcaataacgtggctgagggtgacttgatttgttctgcataagattaagtctaatggccaaatattttct

SEQ ID NO: 234785 - DNA, 122 bp, Homo sapiens
ttcccttacgtccccccagcccccacctggggcagtcgctctcccggctgcgtcccttttcgtccatgtcctagcagagactacagagcagtacagaggctctcgctgaaaccagtcccagg

SEQ ID NO: 234786 - DNA, 122 bp, Homo sapiens
atggagaaggagtggaagaaggcccaccactcctcttgtcccagaggaacagaaataagacgaatgataagcaaatgccctgacgatttcaatgacaggtgacacaatcacccaaggaccca

SEQ ID NO: 234787 - DNA, 122 bp, Homo sapiens
tgagcccgccgccccggccgcagccacgcgcagggaggagcccggggcaccatagcacagcgccggcctcacacacaccctcgaggcccctctcgagcccccgcggagccctccgcggccgc

SEQ ID NO: 234788 - DNA, 122 bp, Homo sapiens
tggagcataaagagaggaagagatgagatccacttggataccagcaccccactccagcctcgaggaagcttttacacagtctgccatggttttacacagtttaaaactggaagacagattct

SEQ ID NO: 234789 - DNA, 122 bp, Homo sapiens
caaagtggcgggactggaggggccgagtgggaattagtgggggcagccaggccccaggaacggagtgcggagagattctgtggtccagtgcgggccggagggcggtggaggagccgggggcg

SEQ ID NO: 234790 - DNA, 122 bp, Homo sapiens
ctctcctccacagcccccacctcacctacttccactccctgccagagctagccccactggcgcaggataaacagcccagaggcctctcccacgcagggcctgcctcggttcaggcctgctgg

SEQ ID NO: 234791 - DNA, 122 bp, Homo sapiens
aactagcctttgagctcaaaggggcatttcgtgaggtcgccttttggttcggagagcgcgcggcgatcgggtggagggggcctggcgggaagaaagctggggcggggaaggggcgcgggccg

SEQ ID NO: 234792 - DNA, 122 bp, Homo sapiens
gaggactggcccttctattttattgggctcgaaaaccaagtctgggccattttccgccaccggaactgttgggaacgcggcgggaaagggtgactcggtcgctcccagccttcaccctgcgc

SEQ ID NO: 234793 - DNA, 122 bp, Homo sapiens
taattagatcaaaagaaaagtgagagggggaaggaagagcaggggagggggcgggatccacgggaaggagacctctgcgctggttgcccaactctgggacaggccgcccccagtggaagcca

SEQ ID NO: 234794 - DNA, 122 bp, Homo sapiens
tgaaatttattctactgccttcctttagagttgtttgcagcattcagtcatctcctcatccgtatacccaggtcaacacagaaaggacaggcctgatttctacttttgaggggttctcttgt

SEQ ID NO: 234795 - DNA, 122 bp, Homo sapiens
gtccagcctcgcggggtgagctacgagagggtgggccaacgccggcgaggcggagggagccgcgggcgccaggcgcgggtgaggcagcgactccccctccagccgcgggccccgagcgtcgc

SEQ ID NO: 234796 - DNA, 122 bp, Homo sapiens
ccactgcatcctctgcccgctccatgtgtacgaaggcataatctttcacgatgtcacattcgatgaccggaccatactcctcaaacttggctcgaagctcttggttggtacaagtggggctg

SEQ ID NO: 234797 - DNA, 122 bp, Homo sapiens
aaaaaaaaattatcctagcagcaagtctcgcccccgctcactccagctctatgcttcagacgagcacctgagctgacccaagtcgcctggacgtgaccctgcccccgcctaccggccccaag

SEQ ID NO: 234798 - DNA, 122 bp, Homo sapiens
tcaggtcacagtcacagggaacacagtcgggaaagtctctgtaacccaaggaacactgatcgcaggcccggccaccaaattttgacttgcactggcaatggccggtgaccacatcgcaccga

SEQ ID NO: 234799 - DNA, 122 bp, Homo sapiens
gagggactccgagaggcaaggggaggcagagggtgggcacctacctggccacaggctgagcgcccaggccaccaccaggcccctgggcaggtccatggcccgcggcacggcggctgggtccg

SEQ ID NO: 234800 - DNA, 122 bp, Homo sapiens
gcctccagcccctctccggcgctcgcaggagtacgcagccgactgccaggcgcaccggcccgccccgccccgcgctgcactctacttccagggcggcgccctggcaacccaggacgcgaccg

SEQ ID NO: 234801 - DNA, 122 bp, Homo sapiens
tcttaatcaaggctttctccgtcggggtggatgggttggactttaggctccagcaagccccgccccactcggcgggtcggtgccgccgggtcccaggtgcccgctacttcccagaacctccg

SEQ ID NO: 234802 - DNA, 122 bp, Homo sapiens
gcggagagggcgcaccagcagggacaggcggcggggccggacctcagcacccctctgctccgggccgccgccctccttcgggccccaagtcattccccggcgtgcctcccagctccgacacc

SEQ ID NO: 234803 - DNA, 122 bp, Homo sapiens
gccccgatctccgggccagcgaggaagggaaagtgctctcctggggacgagttcccaagacgccccaccgcccgcagccccggcccagggtaccttccgctccgccgcctccagctgcgcgg

SEQ ID NO: 234804 - DNA, 122 bp, Homo sapiens
aatagtggctgataccatgtgaatgcattctctgcgtcaggtcctgtactcagcactttacgtatgctctcttactcttacaactggaggagaaaggtattataattatccccatcgtatgg

SEQ ID NO: 234805 - DNA, 122 bp, Homo sapiens
gtgagggcagggaaccccctcccccggcatgttgctctaggagggacttagtactgaactcgcctcttgggaacgagatgccagctggaaagagagctctgtgattaagacctctgtaggac

SEQ ID NO: 234806 - DNA, 122 bp, Homo sapiens
aacttacccaaattcatattcacacaaaatgcaaatagcaatacatgtctcaaggacgtgcgataagaattaaataacattctctatgtccagtgactggcctagatatttgccatttctat

SEQ ID NO: 234807 - DNA, 122 bp, Homo sapiens
gtcccaaacaactatcaattacagctactggtaacctatcataagcaatgatgagcactacgaaccatcaacatccatttctaggaaatccgattctgactacactacaaatacagtcaaac

SEQ ID NO: 234808 - DNA, 122 bp, Homo sapiens
gaggagcaggaagaggggcgggggcgggacgggggtgccagggaccggcgccttaggctgcggggacagcagtggcgccggacgcggcggcagtgaggggccggtgaggcgctgggtggggc

SEQ ID NO: 234809 - DNA, 122 bp, Homo sapiens
ccccattatccaggtgtgcataatactaggtgtgcatccccaggtaatctcatccagcaacgttggaatgcacacagtgccgaggagataaaatccctctagtaactgacactttatttatt

SEQ ID NO: 234810 - DNA, 122 bp, Homo sapiens
tgatgtctcacctcccctcttcagaaagagccctaccaccttggtgtgacggatgggggacgggccttgctcctacagatcaaaatctgcgggatttaagtgatcgtcttaatcaacttctt

SEQ ID NO: 234811 - DNA, 122 bp, Homo sapiens
aataaaacaagattcactatcccatcgaagatcatggggagatgtttgctcaggtggtcacgtgatgtgcagaaacagagggagacacaattgaactaaataaagaaagacgtaggctggac

SEQ ID NO: 234812 - DNA, 122 bp, Homo sapiens
tagcaagatgggataatggttatgcttccaactgtaccaaggaaagagttgttttctgagcgttggaatgcccagtgcagcagagaagtaacataaggacttaaacaaatgtaggcttgaga

SEQ ID NO: 234813 - DNA, 122 bp, Homo sapiens
aaagcaatgacttagcattttgggattggcacaaaagtaggaaaacacagcaaagggaatcgcagcctgtctggctattggctgagtcttgcttctgaggattaaattgtcttatgaacttg

SEQ ID NO: 234814 - DNA, 122 bp, Homo sapiens
aggagcaatcagaggagtctgagcctgggtctggggaaatccagccagtgatgtggaaaacgcccaaggctccaaagggcacgaccccagcctgaatccagggagtccgacggagagggaat

SEQ ID NO: 234815 - DNA, 122 bp, Homo sapiens
ttctttctctgcttaagtcatgtcataagtaatgtccatcagatgtaactctgtggatggcgccttcactttagcagagaatctccagtctcaggaagaaaatgaaaagtgtattttcctct

SEQ ID NO: 234816 - DNA, 122 bp, Homo sapiens
tcttatgacaggtacgcagcaatctgtcaaccacttcattatgagactattatggatccccgtgcctgtaggcatgcagtgatagctgtgtggattgctgggggcctctctgggctcatgca

SEQ ID NO: 234817 - DNA, 122 bp, Homo sapiens
cggagcctgcccgcccccgccgcgcactcgcgagcgcagacaccgccgcagctcccggcacgcccgccccgcccgcgcacgcccaccccgcgctccctggtgcccaccctcccccggagccc

SEQ ID NO: 234818 - DNA, 122 bp, Homo sapiens
ccgccccctctagacgagcggagcggggccagggcgagcgggcgagcgagccggagtgagcgtcaagtgaggggccgcgcgcaagtcgcaggcgttcgcagctattttgggccggtcggagg

SEQ ID NO: 234819 - DNA, 122 bp, Homo sapiens
actcttacctaggctctgccagcgtcgtctgcccatcgcctgcaggcagggaagttactccgtcgtagttggttctcggggcccacactttatcaggctcgtgctggagcctgtgtgtccca

SEQ ID NO: 234820 - DNA, 122 bp, Homo sapiens
gcgggcctcccaggcagctcgcccagacccctcccccctcacctctcctcagcgcctcctcgtagctgaggaatccgatccgtgactccttggcacccatgctcccctcatcccctcggcgg

SEQ ID NO: 234821 - DNA, 122 bp, Homo sapiens
tagccttctaacctcagttgaaggaaacatcattcttccaattgctcagacaaaaagtatcgaggtaagtaactgcgactgctccccctcattccctgcattcaatacattaggaaacctga

SEQ ID NO: 234822 - DNA, 122 bp, Homo sapiens
cagcccggctccctagcccccggccaacgctgctctcagttcagggcagctacgtaacaccgcccctagctccgcgccagaaagggctctcgaatcgcaaaagcaaacgtgttcgatttctg

SEQ ID NO: 234823 - DNA, 122 bp, Homo sapiens
catattattcttacctccaccctttcccctgaggaaagagaacgcattctaattgcagcacggcagcatgccaatcaattacatctaacagaccccaacgtacccgttggaacacaggcggt

SEQ ID NO: 234824 - DNA, 122 bp, Homo sapiens
ggcaggggggaaaaagcctcggcagcgggggtgggcaaaaagccgggtcgggcaaacagccgcgggggcgggggggcaaacagccgcgggggcgggggggcaaaaagccgcggcggtggggg

SEQ ID NO: 234825 - DNA, 122 bp, Homo sapiens
ctgactctatggcctgggcggatgccaaacaagaatcacacaaggggatcctctggcccacgaggagccgcaactgcagctcctggtcaggaccatggccagcaccccgggggccggccctc

SEQ ID NO: 234826 - DNA, 122 bp, Homo sapiens
ctcttaagtcaaatacctgaaaagcccctgagctgactaggattgcaacgcgttgtggtccgcaacaaaatgcagcaagacaaccctaaaaaaaaacacctaaaacccctacaacaaccaac

SEQ ID NO: 234827 - DNA, 122 bp, Homo sapiens
cggggcctgaggccctcttgggttttggttcagcgttagttaacggttaacccgccaaggcgggcttccgcccaggcacaggagactcaccgagcttgttcaccttgaaacttgggccacac

SEQ ID NO: 234828 - DNA, 122 bp, Homo sapiens
cattcaagtcaacagataagaaggaactgcaatccaggttcaacatagaatgaatcccatcgagtttatccatttccacagactgaaagaagctagaggcaaaaagaacatactatgttatt

SEQ ID NO: 234829 - DNA, 122 bp, Homo sapiens
aggggattttcataacctgagcaggagggtccagacgtttctttctgatggtggcactagcgatatcacatctcagggagataccacagagtaggagagttggagaaatgtttacgtgagac

SEQ ID NO: 234830 - DNA, 122 bp, Homo sapiens
tgcttgaataatggctgtctaccagttaccagcactaggcgtttctggaggtggctcccccgaagatcacccggctccgtcctgctgctggtcagcgcgcggatctgcagggctaggctgtg

SEQ ID NO: 234831 - DNA, 122 bp, Homo sapiens
gaggatggagtccgtgagcttcccgagagctgagcacgccaaggcccctgaaggacggagcgcccatgagggcacagaagctccacgcccctcccaccaccctacacctcctcttcctgtat

SEQ ID NO: 234832 - DNA, 122 bp, Homo sapiens
ttcacacgatttatccgcgcccactgggtgcactacggtcgggcattggcgacccaggagcgactgacctgccctcatggggcttacggtccttagcaaaaaacagatgtaaaacaactaat

SEQ ID NO: 234833 - DNA, 122 bp, Homo sapiens
gcagagcacgcctccgaccagaggccggatccagaataaagaaggagcctcagactctgccgcaaagacggccgggttcacaggagcccagggcttgaccttcagacgtttgtctgaagaag

SEQ ID NO: 234834 - DNA, 122 bp, Homo sapiens
cccagccgccgcggctttttgcccccaccccgccgcggctttctgcccagcccccgtcgccgcggctttttgccccccgccgtcgcgactttttaccagccgcggctttttgaccccgccgc

SEQ ID NO: 234835 - DNA, 122 bp, Homo sapiens
ctgaagctcagacccttcctggcaccctggtgtccagcactgagctgtggtgagcccatccgggtcctgctggatgcatgaatggggaggggcctgcccagagttgggtcaatgatgagaac

SEQ ID NO: 234836 - DNA, 122 bp, Homo sapiens
gtaaattgtttccagttttggactattataacaactttgtcaatgcatgtctttgcaccacgccaccactattcccattagttaagattccaaaagtccaatagctagaacagatgatatgt

SEQ ID NO: 234837 - DNA, 122 bp, Homo sapiens
acataaaattcaaaacagtatctcttaggaagaagaaggatgaagtatttaaggaggggccgaaggagacctctagaaatagtaatgttggatgttttgctctgggttattgataacatgag

SEQ ID NO: 234838 - DNA, 122 bp, Homo sapiens
tgctctccaggagtccggagcatggtcctgggtcaccgttggtgtagcgtgttggtggaacgtggacgcctagagggaggatggtgggctgtggggtggcagttttatgtttgtgggtttcc

SEQ ID NO: 234839 - DNA, 122 bp, Homo sapiens
aacatctgctagcggatggcccaagactgactgacaggagagctcatttggatgaatggccgttttaggggccctcccgattaaatggaaaggggttatattgtgattcttggccctatcct

SEQ ID NO: 234840 - DNA, 122 bp, Homo sapiens
tctgaacccatatataacagtcgctgtcctcgccgccccatttcaagctgctctcagagacgtggccccaagtgccgaatcgagatttcctccccgtgctgccccaggcaggttcccccaca

SEQ ID NO: 234841 - DNA, 122 bp, Homo sapiens
gcagggtgtacatgcccttgatgctcatgtccacggcttcacctaaggagtccacagcatcgcggtaggtctggatgcaacccacgctcagcgccgtcagctcctgcaccgcgccacccaga

SEQ ID NO: 234842 - DNA, 122 bp, Homo sapiens
ggtcatggctcactgaaatctcaaattcctgggactcaagtgttccttctgctgtcagtccgccaaatacaggcgagggcctcgcgcctggtattttttttctttcttttttttagatggag

SEQ ID NO: 234843 - DNA, 122 bp, Homo sapiens
gtccattggtccactgccctgtttctcctgggtgctgcctctgcctcctcatatcaccagcgtccccactgccactagtctgtagggggattccgggctaggtgctcttcccactcgacttc

SEQ ID NO: 234844 - DNA, 122 bp, Homo sapiens
actgctgaaagataagaaaacatctggttaggagatgccagagggcactgggctcccccacgtcatgacgctttgctcttcagtggtttaaaaagcaagaaagaggattgcggagagaagtc

SEQ ID NO: 234845 - DNA, 122 bp, Homo sapiens
gggacccaccctgagctgtgagcgggtggggctggtgaggcccgggttaaatgaggtcctcgctgcctgctcaggcagagaaagtggcgcctgtggtttctgctgctcctctgtttcccacc

SEQ ID NO: 234846 - DNA, 122 bp, Homo sapiens
tgccacacccttgctcttagaaggcagtcctcttactacagccttgcaggtccagtgatccgggcaccatccgcctcatcccctcactatgctctagccaaggttgactgaatttagttgct

SEQ ID NO: 234847 - DNA, 122 bp, Homo sapiens
tcatctttaaagaggaggaagtggactcccagtccagccatagtccattcgtccggagcacggtcactccggggtggccaggaccaaatgtgcctccttctggcttttgcaccgcaccaact

SEQ ID NO: 234848 - DNA, 122 bp, Homo sapiens
tgagtgggtggtgtaatttcgcctggaagcggaggctggaatgacaggcatcttggccaacgtgttcagcacaaaccagtcaactggcacagagggcccattgtgatcagaccacagactct

SEQ ID NO: 234849 - DNA, 122 bp, Homo sapiens
gccgcaaggagacaaaggccccgccagatccccaaggccgccccttcctctctggctgcacgcctgattggacagttctcacgctagcgccgctgactggatggggctccaggccccacccc

SEQ ID NO: 234850 - DNA, 122 bp, Homo sapiens
tgctctgggtggaagaaccccccagggagaaggtctggcacctgcagaggccctgaagcacgtgtgagcaataaggaggccagcatggctagtgcacaaggagctggggagaggacaggaga

SEQ ID NO: 234851 - DNA, 122 bp, Homo sapiens
caaactctaggactctgaggtgtccttgcagggattaaaactctgactaggtgtcttagtcggcttgggctgccatcacaaaataccatagtcagaatggcttcaacaacagacatttattt

SEQ ID NO: 234852 - DNA, 122 bp, Homo sapiens
tcctcagcatcaaaagctgtggcactacagctttttctctggattgcagcttgatatccccgagtgtgtttgacactatataagtgtatacacagcatggtgtcacatggttcttagagtca

SEQ ID NO: 234853 - DNA, 122 bp, Homo sapiens
ttctgtatactaacaacgaacacatgtaaactgaaatttaaaatacaacaccaggctgggcgtggtggctcatgcctgtagtcccagcactttgggaggccgaggaagatggatcacttgag

SEQ ID NO: 234854 - DNA, 122 bp, Homo sapiens
ctgtgtcactggaggcctccgtagcattgtgtagtgtgctcagaaccactgatctccgtccgcaccgaaggcgggcccggagtgggaggctcggcctggggcggcggcaccggagagggcac

SEQ ID NO: 234855 - DNA, 122 bp, Homo sapiens
gctggcccccggctcccggcccaggctcccccggcccgggcccgcgcctgggctgcgccgcgcttcgcaacgtgtccggcgcgcagtacatgggctcaggctacaccaaggccgtgtaccgg

SEQ ID NO: 234856 - DNA, 122 bp, Homo sapiens
atatatatattctacaagaagtggtctggaagggactggccgacgctggtaatctttccacgtgaacgagaaacccacgctgggcatttctgatccactaaaaactaaagtgtttccaaaag

SEQ ID NO: 234857 - DNA, 122 bp, Homo sapiens
accgtaaaatagttttacagcccttttcatcctttaaattgactgagaatcaacaccagtcgttgctttaaaacaaagctttgaggctttaagtcttacctataaggtgccactacattata

SEQ ID NO: 234858 - DNA, 122 bp, Homo sapiens
gatccttgtgggttcgtgtgatggtggcatggcgattcatgcttgattgagaagacaaaacgtgaacactttaagggcttcttgcacaagtgaagtggttgtggaaatgttttcaaggagga

SEQ ID NO: 234859 - DNA, 122 bp, Homo sapiens
cccgccccaccccggcccgagccccccccgccctctcccccttctctgccgccctcccgccgctcacccagcatcttgctgagcaccgcgttgtgcaggtccgggttctgctgagccagccg

SEQ ID NO: 234860 - DNA, 122 bp, Homo sapiens
agctaattggtctgggtggtggaccgtcccggggggattggtccgagccagaggccggcgcggcgttgggcgcggctggggagctgtgcttctgagagtaggtttccctcgaaagggcgagg

SEQ ID NO: 234861 - DNA, 122 bp, Homo sapiens
agggcgctgctcgggcatggcggaggagcggccgggggcctggttcggcttcggtttctgcggcttcgggcaggagctgggctccggacgcgggcgccaggtgcacagccccagtccgctgc

SEQ ID NO: 234862 - DNA, 122 bp, Homo sapiens
gaaatctagcccaggcatcactagccaaagccgtgagtgccagacacgtgccccagctcacgtctgtagtcctgaggaaggtgactcttgttatcattggtccacccagaggggagcatctt

SEQ ID NO: 234863 - DNA, 122 bp, Homo sapiens
tcactaatttatttatcatttaacatggcattccaagttcaataagaaaagtcatcttgccggaaaaaaaagtgtgtgggagggagcaagtgttggctcaaaatttgctttgcctgactaat

SEQ ID NO: 234864 - DNA, 122 bp, Homo sapiens
ccgccgccgctgagagggggacctctgggaagccgaggggtcccgtcgggtgcggagggacgcaggcgcctctgctccggggcagaggaggtggagcggcagcgcgcgcgggccaggcagga

SEQ ID NO: 234865 - DNA, 122 bp, Homo sapiens
gtcagagagaaaaaaaccaaggcctgaggaagggccttcagagaggagtggtgctgaaggcggagcagtcacactccaaaagagggctcaggttagaaaaccctcacaggaggaaggtggtg

SEQ ID NO: 234866 - DNA, 122 bp, Homo sapiens
ttcaaagttggtgtctgccctaagcgagatccattttgaaaatatacaacaaagctgtgacgtttgggggatgaatacttcacttttctccggctctgaggcatgctccaggctgggccagg

SEQ ID NO: 234867 - DNA, 122 bp, Homo sapiens
cactaaaatataaactccatgaaggtaggaaccttggctctctggttctccaatgtacatcgaaggcgtggcataatgccaggtccacagtagaagcccatacatgcttactgcaggaatta

SEQ ID NO: 234868 - DNA, 122 bp, Homo sapiens
gtacaagggctgggtggggagtttgcaaagccaagttaggataaactgcagcgaccagcccgaagcgtgcgttaccggcactgcagcgttttaccaactgcctggatgggaggaggaaaaag

SEQ ID NO: 234869 - DNA, 122 bp, Homo sapiens
cggtgggtggacgcagagggaggaaggctcagccttggatccttgccacctgaacaacgtcgcctctgcccacgtggaaagcctcgcttgtctggcagccggggttctgaatggttgccgcg

SEQ ID NO: 234870 - DNA, 122 bp, Homo sapiens
agaccagcaaaagtgggacactgttaccactcctcagctacagtggcaagaagaggaagtcgtgttagcaaagcccagtgtgagctggtacccagagaaggggcctctcagaggagctgtag

SEQ ID NO: 234871 - DNA, 122 bp, Homo sapiens
cctccggtccggaggggccttgccgcagccggttcgagcactcgacgaaggagtaagcagcgcctccgcctccgcgccggccgcccccaccccccaggaaggccgaggcaggagaggcagga

SEQ ID NO: 234872 - DNA, 122 bp, Homo sapiens
agctcttcggccttctcggcacccatacgtttgggaacggcagtttcgaggtttgtgagacgtcggcttccgaccggaagtgagaagaggaggaagttggctggttgcaccgatctgggggc

SEQ ID NO: 234873 - DNA, 122 bp, Homo sapiens
agcagtaggagtggaatctggagccgcacacgttgggcctgtgatggacaagcgcggtcacgtaacagataggtagagggatgcagcaacatataaacggtcttcgtaagcaatgccccgag

SEQ ID NO: 234874 - DNA, 122 bp, Homo sapiens
tggactggaccgtccacctttccgggcactaaggcatgacttgtaacggcccagcggagccggcactgtcattgtcccatttcatagaggaggaggctgtagacactccagagcccaagctc

SEQ ID NO: 234875 - DNA, 122 bp, Homo sapiens
cccataaataagtgaaaacatgcaatgcttgcctttctgtgcctagctcaattcacttaacgtaataatctccagttccatccatgttgttggacgtgactgaatatggctgaatagttctc

SEQ ID NO: 234876 - DNA, 122 bp, Homo sapiens
agcaccggtgagtctgctccggccgcttcacggagctgctccgtgctggcggggggctttcggggcacctggcgaacgtttgtttatttccttgcaaaccagtgacatagaggggcagattc

SEQ ID NO: 234877 - DNA, 122 bp, Homo sapiens
atggtccgtcgccagcttcgtgttggggttcgacgtcgtggcctcggctgggcaggcagccggcccgagggaagtactgaggacagcagctccgagtctgtgtgtgtttgtggaccggtgct

SEQ ID NO: 234878 - DNA, 122 bp, Homo sapiens
gagaagtggttcgccctctaccagaatgtgctcttctacttcgagggcgagcagagctgccgcccggcgggcatgtacctcctggagggctgcagctgcgaacgaacgcccgcgccacccag

SEQ ID NO: 234879 - DNA, 122 bp, Homo sapiens
cgcttacccagttgctcgctggtgagaggcactccctgtgggtaggtggacagctgcccccggggccttacacagccatgccaggggacagccaccctggccggtgaccctgacttccaggc

SEQ ID NO: 234880 - DNA, 122 bp, Homo sapiens
cgcagagacctccctcgggctgggagttgtagttcttagcagtggtaagggctggaccctcggggtggagccacagggcttcgactgcatctgaaaatgaagtcattgttactggccaagcg

SEQ ID NO: 234881 - DNA, 122 bp, Homo sapiens
actgaccgctcttctctcctttcccccccgcacagctccatgtccatccgctggccgggccgccccctcggaagccatgcctggatactgatagccatgtttcagctcgccgtggacctgcc

SEQ ID NO: 234882 - DNA, 122 bp, Homo sapiens
ctcggccgcgggcgcccggcgcgctccccttcccgcgccgccccccgcgcgcccctccctcgccatccatcactcggttctccgccaatgtcgacgcggccccgcgccccagccgcctgcgc

SEQ ID NO: 234883 - DNA, 122 bp, Homo sapiens
ctcctgcgcggcagctgctttagaaggtctcgagcctcctgtaccttcccagggatgaaccgggccttccctctggaaggcgagggttcgggccacagtgagcgagggccagggcggtgggc

SEQ ID NO: 234884 - DNA, 122 bp, Homo sapiens
caaagcaaaactagattcttgataataactaacatctaatcttataagtcccttccttaacgtgctttcactgacctgaggtaactcattctgaattccatgtacattgggaatttttaaat

SEQ ID NO: 234885 - DNA, 122 bp, Homo sapiens
aaggcccaaagagatgctttcagttttttaatttcttcccacttatccaaatctggtgtacgaacattacgacagagttctgtaataatattctggagaaagaaaaaaaaataccatgagta

SEQ ID NO: 234886 - DNA, 122 bp, Homo sapiens
gctgggggctgggggccaggggagtgtgcaggccaagaggctgtgcttaaaatagccccacgcatccaccagctcctggcctgggttcaggtggcatgtctataaccagctggcacccagag

SEQ ID NO: 234887 - DNA, 122 bp, Homo sapiens
taagaaacaggtggaaagcacttcacttctctaggcttcatatttctagggtggacagcccgctcctgctccggctctgccctcggcatcaataataactgaactcccacacgtgcacgttt

SEQ ID NO: 234888 - DNA, 122 bp, Homo sapiens
taggcccgggtgtcccctgggctttggggtgtgccaatttgccctgtaaaccagtacccccggcccggagccgcggcgcgccggggcctcgcggactggctgtcttcccgcggacaacctgt

SEQ ID NO: 234889 - DNA, 122 bp, Homo sapiens
ttgggttactgagagaagtgaaacactgcagatacggcagaggtgtttctcccctccctccgcccctagatgtggccttcacacgcaggctgatgcgctcccttcccatccacgcctgctcg

SEQ ID NO: 234890 - DNA, 122 bp, Homo sapiens
tatacaggtttggagttcagtatgtcttctagaactactggcggcagcttctttcgttgacgtgggctacaatggttgctaaaacctgcgtgccagaagccagaggtggggaggcgccattt

SEQ ID NO: 234891 - DNA, 122 bp, Homo sapiens
ccgattagataagcaagctgctggtttcagggcttaccctaccccaggctgtggggcatccggcaaatcacctcccctatgcattccttcatttcctcacctgtgaacggtaggtgcccagt

SEQ ID NO: 234892 - DNA, 122 bp, Homo sapiens
tcattctaacctcctctttgatagtgaaggacttaaagggttccattaatcaagacaaaccgcaggggttatcatgagccttaaacctcacaggaatgtaaaacatactcattaatatctat

SEQ ID NO: 234893 - DNA, 122 bp, Homo sapiens
gttctgattccgcctgctgttcccatggctggggctggctactgcccatgtggcagtcagcgcctgggcctgactcagggaccagccatctggcagggccagttctgggctcacacacctac

SEQ ID NO: 234894 - DNA, 122 bp, Homo sapiens
cgcccagctctgcctctcccggtcctgcctccccggggctcccggcagctcgactcctcccgccctgctttggcgccaggcacgcactgccttttccagctgttcctgcagcttcttcaccg

SEQ ID NO: 234895 - DNA, 122 bp, Homo sapiens
ggccaacatggtgaatccccatctctactaaaaatacaaaaaattagctgggcgtggtggcgtgcacctttaatcccagctgcttgggagactgaggcacaagaattgcttgaactggagag

SEQ ID NO: 234896 - DNA, 122 bp, Homo sapiens
atatagtggtaaaaaattcagctctttaaaagctttttcttctttgtcagaggctctttgcgtattgtcaaaaaagaaacagattggggagcacaccactatcctgttttcaaaccacagaa

SEQ ID NO: 234897 - DNA, 122 bp, Homo sapiens
gcagtgactcctccgcagcgccaacgcactccattttccttccaccctgccggtggggggcgtttgcttgttctcactctgcagccgcagccagtggcgccgctaccaaggtccccgcctcg

SEQ ID NO: 234898 - DNA, 122 bp, Homo sapiens
cccacacccacacgtatgcacagagacccccggagcaggaggcagcagagatgacgaacacgggttctgggctggtgccccctttgtccttcactagctgtgtgaccttggaaaagcctgtc

SEQ ID NO: 234899 - DNA, 122 bp, Homo sapiens
tggcgtcctgcgtgacgtcagtacgctgctgcgaggggctcctggaagaagatgaaggcccgcccctttcccgaagcaccgcccactgacagcgtgttccaatcagaggcggagaggaacaa

SEQ ID NO: 234900 - DNA, 122 bp, Homo sapiens
ggggcaaggggtgtcatgtgttcagactctgagggccagtgctgctgcccagcaggcctacgagcccaaaacaatttcttctggctccaggcagagggaaggcccattttgcagagtcaagc

SEQ ID NO: 234901 - DNA, 122 bp, Homo sapiens
gtgcctgctgcctcttcagagcccacctgggagtgaggatctgatgcttctgcagcagcccggtaatccactgcacaaagttaaacagcctgcgccctctcttctctgcagctggcctccat

SEQ ID NO: 234902 - DNA, 122 bp, Homo sapiens
gcgggcgtccctggtggggccagttgtacgctgcggcggtcggcggagatgagcaggcggcggtgtgcggtcccagggtccagggtcaggtcggctggagacggggaggcagggagaggacc

SEQ ID NO: 234903 - DNA, 122 bp, Homo sapiens
ttgaaagcgattggcatttccatcaggggacccagtaaagaagatccgctctcttccctgcgggtgggcctcatccaacccatcgaggaaggcttcatagaacaaagcggcagaggaaaggc

SEQ ID NO: 234904 - DNA, 122 bp, Homo sapiens
tttccttctgaggaaaagctgggaaccttctcattttgccttatgaaaactaagctgaatcgactgctgccaaacatctattaggcaaaattggcctcttgcccatgatttgactttccagc

SEQ ID NO: 234905 - DNA, 122 bp, Homo sapiens
tgctaagtattctcatgaatccatgacaccatggactgttcacaataactttgccttaatcgtcaccgtaactttgtcgagctaggtattactatacctactgtaaggcatgaggaaatggt

SEQ ID NO: 234906 - DNA, 122 bp, Homo sapiens
cctgaggagagagggacctgggtaagagagcaggcctcaggcaatcctagtccctggccccggaacagcactcccaccctccccctgccctccacaacacaccggccctggcctgggagggg

SEQ ID NO: 234907 - DNA, 122 bp, Homo sapiens
actgggccctgcccagccccggaactctgcgcgatatcaatactggctattttctcttctcgccgtagtgccgttggtttcacatgattgcacttttgtgggtcgcaaggtgatacatacgt

SEQ ID NO: 234908 - DNA, 122 bp, Homo sapiens
agtttactcgttgaataaaaagtgagggctgatcgagaaagtaatggcagtcagggaaggcgaaggaggtaaagaagagattttacaaatgaagtaattcaacagagtgctgacattggtaa

SEQ ID NO: 234909 - DNA, 122 bp, Homo sapiens
attcagcttgggaagatggaaagttctgcggacgatggaggtgatggctgcacatcagtgcgaacgtgctccatgccaccgaactgtgcgcttgaagacggctgagatggtgcattttatgt

SEQ ID NO: 234910 - DNA, 122 bp, Homo sapiens
ggtgagcacagaacaactgaaggaagcgcgggacagacacaagggcgggcctcggtgccacggctggccttgggcagagggaaatgctttgtgtactttctctgggaagcagcagccccagc

SEQ ID NO: 234911 - DNA, 122 bp, Homo sapiens
gccaagtccgggcatgtcggtgcttagccttcctctaacttaactgtgccctcttggaaacgccacctggccaggcttctctggggcgcctggagcactggcccggactgtgcgccttctgg

SEQ ID NO: 234912 - DNA, 122 bp, Homo sapiens
acccccccacacacacactcccacagcaacttaggtgtgattggtgggagaggacagcagcggatgttaaggacagatgccaacctgatcctggagtgaggtgggccatgagaatcctagac

SEQ ID NO: 234913 - DNA, 122 bp, Homo sapiens
agcgaactgagataagacctggggacatctcgactctcactctcccctccttcaccccgtcgaagagaggatctccgttgttcagaaaaataactaagatatcagtttgttcttttgttgta

SEQ ID NO: 234914 - DNA, 122 bp, Homo sapiens
cagagaaactccgctacgctctttagaggcggccacagccttggtgatgagctctgacaccgggggaccagacgccttacgaggcgtacccccagcctttttggccgccttcttctttacag

SEQ ID NO: 234915 - DNA, 122 bp, Homo sapiens
atagtttatatgtgttcattcagatgacaatttttttcacataatctctaaagaatcctccgagcatccttaggttagagaaagagggctcctggtttaaaataagtacttacttaaattaa

SEQ ID NO: 234916 - DNA, 122 bp, Homo sapiens
gcgcgccctgggctgtccttccctgagcagccgggcctagagtcaaggcgcgatgattgccgcgcaagctagggtccacgcggccggggctcctctcccgcctcgggcgcaccagaggccag

SEQ ID NO: 234917 - DNA, 122 bp, Homo sapiens
ggtgcccctcgatcttgctcagcagcaccgggcggctgctctgcggcctggagtggatttcggccgccatgttcgcgcggcgactgctgcggcctcctcggcaggcagcccatcagctgacg

SEQ ID NO: 234918 - DNA, 122 bp, Homo sapiens
cgtgcgcctggctgccccatagagtgcgggtactgcgtgtggcttttgtcttcctggccccgctccctctcctctccccttctccccgctggccaccagtcccgcggtgcctatccctacac

SEQ ID NO: 234919 - DNA, 122 bp, Homo sapiens
acagccttgcttctaccgttttctcggttgttttggaatcgcctttgcaaaagccatgcacggctatagttctgtgatagcacccagggctcatggtctctctctgctgtgtaccaaatgcg

SEQ ID NO: 234920 - DNA, 122 bp, Homo sapiens
ctctccagaagggcacccgaggaagggtctagggcccaagagcaccaaaatcaccaacgccggggattggtaggtagcctgaaaaatctaattcagagaaggatgctccgcgcgcagacatg

SEQ ID NO: 234921 - DNA, 122 bp, Homo sapiens
tgggtttcagagggagccgctgggaacgagcgtggaaagagcagatgccgctgcttcccacgggccgggcgcgccggccgcccgccctccgccccgcctgcagctgccgcctcctcccacgc

SEQ ID NO: 234922 - DNA, 122 bp, Homo sapiens
ccagtcccggacgggacaccatcccatcgcagggtgcactcacacgcgcccacgctcactcgcactgggaccatttagacaagatgatcacctcacatgcacgactttggggtgtgggcggg

SEQ ID NO: 234923 - DNA, 122 bp, Homo sapiens
aaaaagtctgtcttcagcgctcaatgttctgacccttctctaaaggaacagataataagccgtgcccagccgtgggggattagctcaaatggtagagcgctcgcttagcatgcgagaggtag

SEQ ID NO: 234924 - DNA, 122 bp, Homo sapiens
gggtctggcgcttccctcacgtccgggctctcccctcccccatccagccatggattttggcgttaaaggggccctcgctccccaggagccaactgagtctgtgttttgccggggagaaggcg

SEQ ID NO: 234925 - DNA, 122 bp, Homo sapiens
tctacactaaactgcctccagagaaagtgccccagagcagaacaagccttggaatgctgtcgtacccctggcccatcctgagggatgctgctgtacttccctcacagcgacctgtgtggaag

SEQ ID NO: 234926 - DNA, 122 bp, Homo sapiens
ttatctaaaattgccgtcccctctctctccaaaccagcatcccttcacccgctattttcccgcagttcttaccattgcctgacgctacacatgcagagggcctagccgagaagccagccggg

SEQ ID NO: 234927 - DNA, 122 bp, Homo sapiens
ttcctacccgcgcgcggagaggaccgacgtgaagaagctgccaaagtataacaagtactacgcgaagggtaggtagggtggagtcccaggcagcgcgtgacggccggatgcccagacgcgca

SEQ ID NO: 234928 - DNA, 122 bp, Homo sapiens
gctaaggcagcaagggcaggcctgccagaggctctgtttgctgtggtaccaagcaacaggcggcaagggtggcattcagaagagctggctctgcccctccaacccccagcccaggacctggc

SEQ ID NO: 234929 - DNA, 122 bp, Homo sapiens
gcggggcgtggcctctagaggcgtggccttgggcgtgggggcggggttttctggtgggggcggggccgcgcagggccgttcccgccgccggccgcccgcgccccgcccccgtgccgcagctc

SEQ ID NO: 234930 - DNA, 122 bp, Homo sapiens
tggggcctgcgagctggggccgggtggccgcgccgggtcggagtgtggctggagaggggccgccccggaagcggtgctgcgcccaacgtccccttctccccgtaagccccgcaaggagcctg

SEQ ID NO: 234931 - DNA, 122 bp, Homo sapiens
agagtatattatggcaaacacacagatctggggagagctgctccgcaggagacagcaggccgcagcatgggcgaccgcatcttcccagctctagcttatgagacagaaacgacggaaacggg

SEQ ID NO: 234932 - DNA, 122 bp, Homo sapiens
cccttcagtgaggatcctaaatttacatcccgagtgtggccccatcaaagactggagcgacgttcactgaaatgatacaagaccagcaggggcgcagggcgctgcggccctcagaatgcggt

SEQ ID NO: 234933 - DNA, 122 bp, Homo sapiens
agaacaaaacagaccagacatgtcacttttgaaacgaaaatgccacactgagcctctgggcgattcacttgggctttggttcccagtgagtcatagaagtcaaagccaagtggaaagttggt

SEQ ID NO: 234934 - DNA, 122 bp, Homo sapiens
taaaaccgtgagcgcaccggccagtggatgctctgaggagtgttcccgtggagccagcaccgggcagctcggcgaggcacacagcgtcgggatttggagagagacggggccctgtgggatgg

SEQ ID NO: 234935 - DNA, 122 bp, Homo sapiens
atagtagctgtgttaggcatcacactcccaccagaccccatcaaggcctttgcttcaggacgaggagccaattttattactgaaaagctttttaatttatgacagcaatattctttccattc

SEQ ID NO: 234936 - DNA, 122 bp, Homo sapiens
ggagtttagaggaaagggtcccttcatgtgccaagatctgtggctctgcaatggacacctcggccccgtgccgtccgtggtgaagaccctcgcgcgggctcccatcccctgccacacttgga

SEQ ID NO: 234937 - DNA, 122 bp, Homo sapiens
ggaggtgcttctgttcctacccgctgaggggcacagtcaggaggtatttagtcggcctcccgtcgccctcaccgcacacacaagaccaatttgacggttgtttgggggcatccactcctggg

SEQ ID NO: 234938 - DNA, 122 bp, Homo sapiens
cccacacctgaagacgcctcccacgtctgcacccacacctgaagacacctcccacgtccccgcaccccacgtctgcgcccacacctgaagacgcctcccacgtcccgtctgcgccgcacctg

SEQ ID NO: 234939 - DNA, 122 bp, Homo sapiens
tggctagttctctctcgtcatctgctggccgcactcgggaacataccaaacgcggaaacgcgccttagcttgccctgaatacctgcaaaccgagggctcggcgtggtttttaaaggcttggc

SEQ ID NO: 234940 - DNA, 122 bp, Homo sapiens
ttctgcagggagggaaaggctgctccagggctccctcctccatctcactccaggccggctcgccgcccaccctgcctgcggatcccagtactcgctgggagccggccctgcgccttcctatc

SEQ ID NO: 234941 - DNA, 122 bp, Homo sapiens
agatcttattttgttaaccaatgtattcaaaactcctgtatctctacttggcatataatacgtaaacaataagtatttgttgaatgaaggagtgacaatacccattatcactaactctgacc

SEQ ID NO: 234942 - DNA, 122 bp, Homo sapiens
ttatttactgttagcctttgattttcaattacccttaaaaccacgcagtcacattcaggccgtgactaacattttaaaaaaatacaataaaaatctttggctggaacttttattctacttca

SEQ ID NO: 234943 - DNA, 122 bp, Homo sapiens
acactcgggatcgcggcttcccattccagacgcaccaggaaagtcagaagtgggtaccgacggtgacataggtcctgggaaagatgagttgaccttggggccctccacttgaggtggatccc

SEQ ID NO: 234944 - DNA, 122 bp, Homo sapiens
tttgaaatagcctttgctagtgtcatcaggtggagatgaggtccttgggggggtccggtgcggtggccatgtccttgtaagcagaggggacactcagagggaagaggccacatggagacaga

SEQ ID NO: 234945 - DNA, 122 bp, Homo sapiens
aggggcacagaggacactttcatcatctggagaaaatgaagccaatgtacaaagagaaatcgcagagagatggaaagctaaaggcaaccttaaagacaatctttgagcctctggatccatct

SEQ ID NO: 234946 - DNA, 122 bp, Homo sapiens
actgtaagtcttagtttcactttctatgtttgtttatgttaaaccaatttatcctgtatgcgagagctagcttagttttggattggacgtctttagaagctatattagttcagaaggggttg

SEQ ID NO: 234947 - DNA, 122 bp, Homo sapiens
aattaaaatttttccacctttattaaggtataattgacaattaaaaattgtatatatttacggtgtacaacatcgtgttttgatatatgtataccttgtgaagtgatgaccagagtgaagtt

SEQ ID NO: 234948 - DNA, 122 bp, Homo sapiens
gtacacgtgtggctcagtgggggctgcgctctacgagggcctggctgaggagctcaagcccgagggccttggcggtggcagcggccaagcccacgagtgcaaggactgcgagcggatgttcc

SEQ ID NO: 234949 - DNA, 122 bp, Homo sapiens
cttgctttcctggctgggagaacgcaggaattggagaactgagctgtgggctcgaatccgcgcatgacctggagatctggaccaagctccgaggcttaatggggaaagctgagatgtcccca

SEQ ID NO: 234950 - DNA, 122 bp, Homo sapiens
ggggcttcgaggaccctggacagcggctccggggcggcagcgagcggatgaaggggctgccgccgcccgcccggaaagacagcgggtgtgggcgcggcgcttaccaggcagtgccgctgctc

SEQ ID NO: 234951 - DNA, 122 bp, Homo sapiens
cgccctcacccctgtccctggacgcccttttgctgcacccgctcacatctgcagacccaacggatgggatctacttgactgagattcctgaacacaacttactgcccgcccttcccctttcc

SEQ ID NO: 234952 - DNA, 122 bp, Homo sapiens
aatggcagattagcatttcaaataaagtcactctgtccccacatcctggatcagacctatcgatagcagcaaggatacatgctgttgtgtggaatgacttgtgctacagaagtgagggaaat

SEQ ID NO: 234953 - DNA, 122 bp, Homo sapiens
tattattcgttattgttgttaatcgcttccttagtaagcgcctattttgtaaattaaactcgatcatagatatgtaggtaggaaaaacatagtatataaaaggtttgggcgtcgatcagcga

SEQ ID NO: 234954 - DNA, 122 bp, Homo sapiens
cagcggggggcacaggcagcctgcgcgttcaggccgacgcgctcctcctcgtgcgccacgcgtagagcctctagctcgcgctccagctctgccacctggctactcagccaggcccgggcgca

SEQ ID NO: 234955 - DNA, 122 bp, Homo sapiens
ataaggaaactgactcaaatacacggaaaacaggatttagtaaacgtgatttatttggaacgtgatctcagatccacagaggtgagaaaaacaggaaaggagaaagaaaaagtgctgattga

SEQ ID NO: 234956 - DNA, 122 bp, Homo sapiens
tgggggtagataatgagagaagttcttggggaaggaaagtttgtgcatttcagcctgctccgaggggtgttccagcactgtgtctgggttttgcagggtttgtaggctttttgagggccctg

SEQ ID NO: 234957 - DNA, 122 bp, Homo sapiens
tctaacttaaacaactatactaacccctagcttataccatctttcaaaatcagctcagggcgacagatacagaaatttaacgcattatccaggaatgtttgtttaacctaaactgctgttat

SEQ ID NO: 234958 - DNA, 122 bp, Homo sapiens
actaggctgttccatgcaaatgaggaggaggagccagagaagaaggaggtatcggagctgcgctctgagctatgggagaaggaaatgaagcttacagacatccgcttggaggccctcaactc

SEQ ID NO: 234959 - DNA, 122 bp, Homo sapiens
gctcctgccccacctcccacccttttgtcaggggagaaaatgcacgtgccccctcgcgtgcgtgtgcacaccctttggctgccatagtacagaagtggctcagggaagctcaagactatgtc

SEQ ID NO: 234960 - DNA, 122 bp, Homo sapiens
gggcagctcgtgggcgggaaggtgccccggcgggcttcgggctgcagggcacaaccgtcccgcccagggccccggcaacatgccccggcttttccgctcaattgggaaagcaactggagcag

SEQ ID NO: 234961 - DNA, 122 bp, Homo sapiens
aggcggctgcattgataagtcggtggttgaagttgtgcatcccgactctaagtaccagaacgtttggcagtagcacccagaacaggtttgagacaactgcactccagtgtggacgtgccttt

SEQ ID NO: 234962 - DNA, 122 bp, Homo sapiens
tgtcagaaaaatcacttgtgttttggggaaagtaatctccaaaatatctgtgtgcctctgcgtagatatctgttttaaaagctttattaggatccatgccaccatcagtttgatgtagaaac

SEQ ID NO: 234963 - DNA, 122 bp, Homo sapiens
tcccctttaaaaaagaaaaatgttcaaaaaagcatacagcaccaaaggatgccagcctaacgccatgttatcctctgggatagtcacatcttattaaatggttacctccaaagcaacccagc

SEQ ID NO: 234964 - DNA, 122 bp, Homo sapiens
aggagccggggggaggtggtgcgggaaggccgcgtacctgcggggcggcggcaaggcgtgcgctcggcgagacaggtcgtcggcggcgagtgagggacagagtgcagggcgcacaccgcaat

SEQ ID NO: 234965 - DNA, 122 bp, Homo sapiens
tttctatctaaagagagctacacttgagaaggggacttgtgaactcaaccacaatctcctcgagacattcatccagagaccatgtggcacttgattgaaaccccagaatgtcgactgtcttt

SEQ ID NO: 234966 - DNA, 122 bp, Homo sapiens
actacttagagtcttttcgactcagcgtgtgtgcagaagagcatcaaccgggctgtgttgcgaggcagggccttggctgacctctcagtgtttacatagctaagccagttagtgtttgccac

SEQ ID NO: 234967 - DNA, 122 bp, Homo sapiens
aagagagatgaaccacattataaagtaatctttggctgtaaggcattttcatctttccttcgggttggcaaaatattttaaaggtaaaacatgctggtgaaccaggggtgttgatggtgata

SEQ ID NO: 234968 - DNA, 122 bp, Homo sapiens
cggtcacagggactcctccagtggtttaacgtgcagtgtgagtggccttaacacgggacccggacatgctgcctctgggctggggagggacaggaacccgaggcagatccttccaccaaacg

SEQ ID NO: 234969 - DNA, 122 bp, Homo sapiens
cagaacccacagggaatggaatgtcttcctcccaggggccaatataaacagcagggtgcccggctttcctaatttagttgttggtggctctggccagccagagaggtcgtttgaaaatacaa

SEQ ID NO: 234970 - DNA, 122 bp, Homo sapiens
aggaacccagaaggtaggcggggcgggccctgcacagctttccaggacgccctccctcagcgcgaggcctggctttctgtgcctgtggaccactcgtccctttcacgtgccctgggtttgga

SEQ ID NO: 234971 - DNA, 122 bp, Homo sapiens
cggggcgtacgtaccgatcgattttgcgggtgttggtggctcccgtccaggaatggcagtcggggttctggccttgttaatggcgtgttctgctttttctttcagtttccccctttctaggg

SEQ ID NO: 234972 - DNA, 122 bp, Homo sapiens
ccgatcttgggcgcacgctccttctgcccgatcgttgggcgcacgctccttctgcccgatcgttgggcgcatgctccttctgcccgatcgttgggagcacgctcattctgcccgattgttgg

SEQ ID NO: 234973 - DNA, 122 bp, Homo sapiens
aaatgcatggactgactgtctcttcctgcgcattcaacgtaaagactgcccagtgagacccgtgcccacgcaggccggggaaagtgccctccgtgctggacttgggttggccaacagagcca

SEQ ID NO: 234974 - DNA, 122 bp, Homo sapiens
ctttatccgtccctcgctctgcagattccgtggagtgggaggggcgcagtctcttgaaggcgcttgtcaagaaatctgcactgtggtgagtatcccacagtgtctccccggcctaccctgga

SEQ ID NO: 234975 - DNA, 122 bp, Homo sapiens
ggagcccctcgcgggtttgtctgttgctgctggaggcacggcctgaggattttgcggtcccgtttcatctgctgggagtagagacacataaataacgggtctgataagattgagatattgag

SEQ ID NO: 234976 - DNA, 122 bp, Homo sapiens
ctcatatgatccaccacctttggcctcccaaagtgctgggattacaggcgtgagccactgcgcccggcgtaatataaggtgtatatatgtgtgtgtgtgtatatatgtgtatatacacgcgc

SEQ ID NO: 234977 - DNA, 122 bp, Homo sapiens
ccattgtagagtacattcttaatgcaacaaaagagcaaagattctgaaccattaatttatcgttcaatctagattcctgattttgtttataacgtgggctgtatatttgtggagcctatctt

SEQ ID NO: 234978 - DNA, 122 bp, Homo sapiens
cacagaaaggaagaaggactgtgtagttcagtagtgtgtgttctgagaaagccctcacagcgttggtctctagtaatctctggaaataagtgaatcattccagcttgaattatcatgatgca

SEQ ID NO: 234979 - DNA, 122 bp, Homo sapiens
cccagtcactcacagatgatggccatcatggagttgaagttcccgatgttgaagcactcccgggccacatcaatgaagaactccaacatgcgggtccggtgtttcttcttcaccacctggaa

SEQ ID NO: 234980 - DNA, 122 bp, Homo sapiens
gagaatgccacggggcgaacgttcgtggccaagatcgtgccctatgctgccgagggcaagcggcgggtcctgcaggagtacgaggtgctgcggaccctgcaccacgagcggatcatgtccct

SEQ ID NO: 234981 - DNA, 122 bp, Homo sapiens
gccgtttcctgctccgcccccgcctcccgggggactgcggccaccttccctacctgctgccgcctcctgctcgctgaaacaccgtcccccaccccgctgacggagaagattcccactttcct

SEQ ID NO: 234982 - DNA, 122 bp, Homo sapiens
aactcttgtaggagtgaaaaaataatattaggaaaggaagccttcctcacatctccaagtcggtaatgattcaagaataattatttaatagtacattttgggtagtatcatcaactttcctt

SEQ ID NO: 234983 - DNA, 122 bp, Homo sapiens
ctccaccctcgactctagggacagtcttaaactctagggacaatccacctcagtcgtccccgggtcggggccccgtgctccccgggtcgggtcggaggggaccggcgagtgcacacccagcc

SEQ ID NO: 234984 - DNA, 122 bp, Homo sapiens
gagggacttttttgccggtggccgtggaggaatcgtcccgttgagcaatgaccccggtgacgcggctgagggctataaaagcaaaagttgtggcaagtccagccggagttagcgacagggag

SEQ ID NO: 234985 - DNA, 122 bp, Homo sapiens
agtagagcaactctgcccctgaaagggtctggagccttccctcatcactcttcctcaagtcgatgctggacacccactatgtaccaggccgtgtgaggcactggggtaaaccagagacaaga

SEQ ID NO: 234986 - DNA, 122 bp, Homo sapiens
ctgcgcgctccctagaatcttctagaagcgtggctgttcgtgctgttgcctgcctccctgcgcatacattctcatattcttaactaggaaccagctccctggatggggcaaccccagaaatg

SEQ ID NO: 234987 - DNA, 122 bp, Homo sapiens
ctgcgtcccggccacccagataccctgggagtgcgtggcgctccggggaggctgctcctccgcgtggccaggaacaggccaaggaccaaaaccagatgacagctggcatgaaaccgcggggc

SEQ ID NO: 234988 - DNA, 122 bp, Homo sapiens
acattctttgtcaggaccctagcggaggtcgcgctgggtgtcgcctgtgagggggatcctcggtttctgcgcggtctcttgctttttttaggatcttgcgggccctttgggaaaaaggtttc

SEQ ID NO: 234989 - DNA, 122 bp, Homo sapiens
cacctgttgggggcgcaatcctgtgctggagacacagtcacatgtcgggagctagtcacccgctgggggcgctgcctcgagcctcatggctgcccctgcttccgtcatgggcccactcgggc

SEQ ID NO: 234990 - DNA, 122 bp, Homo sapiens
cccgctcccccgcccaggctctcgacagccccggccctgacggcctaagcctgagccccgcgttcagcttctgctcccacccggaccccgcacgacctctataggtcagacggtggcgcccg

SEQ ID NO: 234991 - DNA, 122 bp, Homo sapiens
tcccgacagggctgaaagctgacactgtcacagtttgctccttagccacccccttgtaatcgcgacagaagccagcccagccctctgtgttcccgcagcctcgggaacggcccggcattgtg

SEQ ID NO: 234992 - DNA, 122 bp, Homo sapiens
gcctagttttggtagcgacgaaatcaatccgtacacaaaccacgttccaaacctttcttgcgcagcagccgcgcacccctgggactgacacccggaaggatgcgaggactgggtccccgcat

SEQ ID NO: 234993 - DNA, 122 bp, Homo sapiens
aagttgtaatttatataaggaaattgtaatttatataatcctttaaaaaacttactcatacgaaataacagagaacggggaaataccattaagactgtcatgctcaagtgggggaggggcag

SEQ ID NO: 234994 - DNA, 122 bp, Homo sapiens
aaacccccttggaaggcctccagtcaggcagccctagagactggggagagaggagagggacgccccagcccccagctgtgcagctacgcacctcagcagcacagggtggcagcagagagcca

SEQ ID NO: 234995 - DNA, 122 bp, Homo sapiens
cagtgggaccacgccccggatttgatctagggctggggcgttgcacgaggcagtggcccccgggtaccactcctaatccttccgtcctatccattagcacatttgaacgtcatactcttacg

SEQ ID NO: 234996 - DNA, 122 bp, Homo sapiens
tgttttccacatcgtgtcgtcttttccttagtgaaatttcggcagattgttatgcagaagcggttctgtgtctctgtgtgactgggagacagctgttcatcctaatgaggatgccagcttcg

SEQ ID NO: 234997 - DNA, 122 bp, Homo sapiens
ataaattaaaaataaaatcaagtccccctactgactgaatggatcccctcttgtcctaggcgaccccagagaaacctggaaaactaaattccaggccataatggaaagggaggtcagacacg

SEQ ID NO: 234998 - DNA, 122 bp, Homo sapiens
ccccgggaggaaacctatacgagcatctggcccagggccccagggcggcacttgatgagccgcagtctctgcgacatttaagcctgtcccacctgggtgctgcccgacaccctagacaccct

SEQ ID NO: 234999 - DNA, 122 bp, Homo sapiens
ggtagaaattagcattccaaatcacatcttaaaacccctatagagaaagaagacttgcaacggctttgcatcttctagcctttgttgggaacaaacccaggatggctaagcaggaatgtgtt

SEQ ID NO: 235000 - DNA, 122 bp, Homo sapiens
cgcctgggacgcgcggagtcgagggagctcgggctgggctccgctggcagctccacagttcgcagcagcagctcggctgcgccgagagcgcccgggcggcagcggcagaagttgcggagtgc

SEQ ID NO: 235001 - DNA, 122 bp, Homo sapiens
ccttttccgggagtctccagctggccctcatttgtgtccggagctcaggagttcccaaaccgactcagtcgcaccaagtttccgtcttttggaattggggaaggagtttctttctttctttt

SEQ ID NO: 235002 - DNA, 122 bp, Homo sapiens
gcctaacaagcatggcttgcttctccctggacataactactgagtaattggcaggcaggccggactgacctgcgccacacacagagccagagcccgctgccaatgcttcaggcccaagggct

SEQ ID NO: 235003 - DNA, 122 bp, Homo sapiens
aaaagggggtccaactcttggttgcgatttctttggctgaagcctggactcctagccccacgggctgagggaaggttacggctggtggttggatagacgccagtgcttgccccagagctgca

SEQ ID NO: 235004 - DNA, 122 bp, Homo sapiens
agacgtggacaaaaggcgggactgggaagggatctctcgcttcgacccgcctccgacccgcggagttgccccctgaggactaccagtcccagtgtgcactgcttcttccccggctctcccgc

SEQ ID NO: 235005 - DNA, 122 bp, Homo sapiens
aagggaacctccttacccgcgtcctgtcctcgatctcgtagatccgcagctgcatgggcacgttaaagctgtgcaggatgtttccgccgaacaccaaagagtctacaggggtgtagacggca

SEQ ID NO: 235006 - DNA, 122 bp, Homo sapiens
tcccagtgtttgcaactactgaaaaaaattcattcgaaagggataaagatgtcacagagccggaatttggtttactgtttgatttttattatgggagaaaattttaatttggggataatggt

SEQ ID NO: 235007 - DNA, 122 bp, Homo sapiens
actaaccaattcttcattctcggtggacaccaaatggatggctacaactcaattaaagtccgacactatttaccaggggatagcatcagatcccacgggttaagggttcaatctcacaagac

SEQ ID NO: 235008 - DNA, 122 bp, Homo sapiens
caagcgcggccgggcgggcgagcgcgggcttaccttgctggtcgccgggcgggcgggctgcgcgcgtccgccccactcgcactacacgctgcagctggccccgctctgtttttctgggactc

SEQ ID NO: 235009 - DNA, 122 bp, Homo sapiens
gatgggtggtcctgttcttttcgcggtcctgtttgcgcagagatgaaacggggaacttagcgtatccctaccgctctttttgatgacaggagtaaagggctgttcagactacctaaacaatg

SEQ ID NO: 235010 - DNA, 122 bp, Homo sapiens
gcttcctctcagcccgctctgagctggaagcagcatgtgggacctggccctgatcttcctcgcagcagcctgagtgttctcactaggggtcactctgtgggtcatttgcagccattttttca

SEQ ID NO: 235011 - DNA, 122 bp, Homo sapiens
cccaaaactggcctcattgactacaaccagctggcactgactgctcgacttttccggccacggctcatcatagctggcaccagcgcctatgctcgcctcattgactacgcccgcatgagaga

SEQ ID NO: 235012 - DNA, 122 bp, Homo sapiens
cggcgtcctccagctccagaatgagcgcaggcgagtcccagggcccgtcggccatggtgtcgcggcggggcccggcgccctggaggccgcgcggcaggccgctctcgcagcggcccagcttg

SEQ ID NO: 235013 - DNA, 122 bp, Homo sapiens
tgggccaggcgcgtggggtccggggtgccccgggtaaggctggtccaggggcgtggggtccggggtgccccgggtaaggctggtctaggcgcgtggggtccgcagcgccccaagtaaggctg

SEQ ID NO: 235014 - DNA, 122 bp, Homo sapiens
catagcagataatcctcgggagcagttttccaaggagtaagccttttcacactgatgtgccgttttcactaactggtatttaagagtatctgcgcccctgaccctgtgaccttcttcccacc

SEQ ID NO: 235015 - DNA, 122 bp, Homo sapiens
acacattccaacccgacatctcgttcccgggatctccaaaacctccgtcctaagaccgcccgcatcccaaccctagcctcaggtccccactggtgtcacacagcgttcacaatcaagcaggg

SEQ ID NO: 235016 - DNA, 122 bp, Homo sapiens
tgcgcacagcctagcgttgcttttcaatctgcaattacaaaatcgtggcatgccacttcacgcttctcgccaccaacccaaccacccagcccctagcctggtcaggagcaggaggttccccg

SEQ ID NO: 235017 - DNA, 122 bp, Homo sapiens
cgtgattcgaccaggcccacctgcatccacggaccctaaggtcggctgacctgggacacacggcacatctgcaacgccccttcccggcagcacccacgggtattggaggagtggtaggggat

SEQ ID NO: 235018 - DNA, 122 bp, Homo sapiens
caggtggacagccagcaggacacagggtgtgggtgtggccctcaaaggccaacccaggaacgggccgtgggtgaaaccaactggggccccggggaacagcattccacgcagcgggatcagta

SEQ ID NO: 235019 - DNA, 122 bp, Homo sapiens
agtcgactgcaaatgaaacgcagaggatgggtgcccagaagcacctgcggcagaggcgcacgggaagcccggggcccaggctcatgcaacacgacgctcaccgcggctcgggccgtggggcc

SEQ ID NO: 235020 - DNA, 122 bp, Homo sapiens
tttgctaacatcgtcagcgaccgcggcctccgcgtgttttgtgggcccatcggtgttccccgagaaattccgtgtgtctggcaatgtgtgtcaacaggtgttggcctgaaatttggccgggc

SEQ ID NO: 235021 - DNA, 122 bp, Homo sapiens
caggagccagtgtaggcgccgcaaagcggaaggggcgcgcggataggtgagcagagggcacgcggtgggcagcgaagggggaacgcgcagcagagaggagagggcgtgcaggagtaggagca

SEQ ID NO: 235022 - DNA, 122 bp, Homo sapiens
ttccatcctataccgactagctccacttaacatgtggagaaactgaggtcggagtgggggcgtgaccaggccagcctaaggccgctgcactaatgagaagctgagctctcagatttttgcct

SEQ ID NO: 235023 - DNA, 122 bp, Homo sapiens
gggtgggtaaatcatgttctaaccatctttgccctctggtaatgaatagctaagggcacacgagggaggccaaatgtaaatgttactaagatgctaagactttctggcccggcacagtggtt

SEQ ID NO: 235024 - DNA, 122 bp, Homo sapiens
aaatacagtgtatattttaagcctacggtgcatctcaatttggtctagtcgtatttcaaacgcttaatgggcacatactgctaggtgctactatattgaacagcatagctctaaacaattta

SEQ ID NO: 235025 - DNA, 122 bp, Homo sapiens
catcttctgcaaacaaggaaatcgcaggtggaggtggagcccgtgaactcacagagcacacgaaagctggcagaattggcgggctcgcagagatagaccaggaccattttactgctgaagat

SEQ ID NO: 235026 - DNA, 122 bp, Homo sapiens
cctgacccgcgaaaccccctttcatctcggagccctgacctccttggacctccacccacgcgaaccgtctgtccctgggctagggaatctctctgcctccgccttggagcctcccattaccg

SEQ ID NO: 235027 - DNA, 122 bp, Homo sapiens
aataagagccggaagacacaaaagggttggcagatggtcgggccccacaggcccccctagcgggaagggagatgtggagggtctggagcgtttaggacgcgtttgttgcaaaggtactccgg

SEQ ID NO: 235028 - DNA, 122 bp, Homo sapiens
cctcccagggtctggacagagtcctgtcccagggctgcccgactctgcttgggggttacacgcttgaagcagtgggtgtgtgatcggccacactctcacgtgaaatacgaaggggtttgtgg

SEQ ID NO: 235029 - DNA, 122 bp, Homo sapiens
cactcattcagcaggtcctgctaatgccggagtgttggaccgaggtggagcctcccaatgcggccgggtatgctgggggaaacggagtcagaggtgggctgcacggcaggtcgacttgttca

SEQ ID NO: 235030 - DNA, 122 bp, Homo sapiens
atgtttttgtctgtgttcagagttgatcatggaagtgtcttgtttttgtcttgatctatgcggtcacagagtgacctgacattgatgtcctgtgaaatggtttatgttcaataggagacacc

SEQ ID NO: 235031 - DNA, 122 bp, Homo sapiens
cctgtccagcaggaggcgcggcccggcagctcccgcatgcgcagtgcgctcggtgtcagacggcccggatcccggttaccggcccctcgctcgctgctcgccagcccagactcggccctggc

SEQ ID NO: 235032 - DNA, 122 bp, Homo sapiens
ctcctcatcaaaattgccacctgctctcttcaatgccattccagctgccctgaggctttccggggtgggggcagaggacttgtacaccctgctttacctttccaacagaactcctaaccttc

SEQ ID NO: 235033 - DNA, 122 bp, Homo sapiens
atatccatcatcgctgttaaatttggggtcgatatccgtcatgactgttagatttggggtcgatattcctcatgactgttagactcggggctgatatctgtcatgactgttagactcggggc

SEQ ID NO: 235034 - DNA, 122 bp, Homo sapiens
cctacaggtttcatctcccccacacccagatttacccctatacacacccttacacaccaccgggccaatggccaagccagcaagtttacttagcctcaaaaagggtcacacccccaggtcct

SEQ ID NO: 235035 - DNA, 122 bp, Homo sapiens
ttccctggacgccttacttacgtaaaaactacatttcccatgagcacccacaggcgtgcacgcagcgcagccctccgtcgtcgctcgcgccctttatactcacttccgcccgcgagccactt

SEQ ID NO: 235036 - DNA, 122 bp, Homo sapiens
taaagcagtggttgtacattacccgtgtgttattgtctctaatatctggggccgggggagcggggaagaggataacattccctcaaatttagcaggtggtttgacgcccctcgtggtggtgt

SEQ ID NO: 235037 - DNA, 122 bp, Homo sapiens
tcgggccgggtattagccggggattagacggccgagctgctggcctggtaggggagctgccggggagctgccggccacccgcaggctgggcctgggaggccctcctggtccgcgtgctgctg

SEQ ID NO: 235038 - DNA, 122 bp, Homo sapiens
cgggctctgcccttcagggcagcgggtgttggggatgtccagctcctgagccctcttgcacggaggctctgcacggaggcaagacaaggggttcagctctgtcccttatctgaggtgggagg

SEQ ID NO: 235039 - DNA, 122 bp, Homo sapiens
cgcccgtccccgccccgccccggcccttccgccgccccgccccgggccaccccacctcggcgccatcccgctctacgcttagccccacctcggccccgccccccggtccctccgcaggctcc

SEQ ID NO: 235040 - DNA, 122 bp, Homo sapiens
gtgcctgacccctggcggggaggcgtggtactgctcgaggtaggcgcggactcggggaaccgggagccccccagcctgccgcgaactctgctgggccccagcgtcctcatctcccaaataat

SEQ ID NO: 235041 - DNA, 122 bp, Homo sapiens
tggactgtcccaggctgggtggaactcaaagaccatgctttggagagccacggtaagcgacgaggaatcaaacagaccacaacagtgttcacaagactgcaacgagtctgcttaggactaaa

SEQ ID NO: 235042 - DNA, 122 bp, Homo sapiens
tacctttccgccgccgcggggctgcgggccgcgacgccgctgctgtgtacacccgtatcccggagaccgtaagccccgcgcccattggctctgcgctttggcccgctcccttctgagccgag

SEQ ID NO: 235043 - DNA, 122 bp, Homo sapiens
gtgggcggggcgagaaggtgggcgcggcctttgagcctgtgaccgacttgtggttggctgcgggggcggagcccgcaatggaaagaggcgtggccagttagaaagctcaagtccttagcaac

SEQ ID NO: 235044 - DNA, 122 bp, Homo sapiens
aggttctcctggcaaccggcctttctcgtgcggaagggactcactcctggaggccgccctcggctccgcaccccgcggctgccatctagtggccacaagcagggacgccaggcagtgagtcc

SEQ ID NO: 235045 - DNA, 122 bp, Homo sapiens
ctagagaacatccagtacacacaggaagcagcagcgcgggccaaatggcgctgagacctgcgcacctgtccacggaccgcccactcgccaactctgaccttgggtgagtctctcaaacttga

SEQ ID NO: 235046 - DNA, 122 bp, Homo sapiens
gttaaaaagtccacgatggcagaaatccctggtgctgcatggagaatctccactcaggtgcgtcaccccctagacgttaggaaggtccggggcaggtgtccggtggggtcagggagacacgc

SEQ ID NO: 235047 - DNA, 122 bp, Homo sapiens
tcccaggttggaaaccagtgccccaggcggcgaggagagcggtgccttgcagggatgctgcgggcgggagcaccaaccggggacttaccccgggcgggagaagtccacaccggggtaatggg

SEQ ID NO: 235048 - DNA, 122 bp, Homo sapiens
gttcggcgcccgcccctgcgccagtcttttaaaccggctcggaggcggggctggcgacggcgggaggccccgccccctgccggccccgcccccagctccacttttggtttctctttccgcgg

SEQ ID NO: 235049 - DNA, 122 bp, Homo sapiens
gcttgaattcctacagagggtaatgttgaaacttttaaacaaagtaatctacatctgacccgtacatgaaatggggttattatcaactcattttatgaggttgttactatttgtaaatcaag

SEQ ID NO: 235050 - DNA, 122 bp, Homo sapiens
catggtcttccccatcccgaagtgggatggatttcctcatctgcatacacagcacttcgtcgatataaatggtgttctctttgacctggatctcctcctgcagggcaagctgtctgcgatgc

SEQ ID NO: 235051 - DNA, 122 bp, Homo sapiens
ggggtggctggcaattcgattttaatttcatagcagagcagttgattcatggctctttgtcgctggcgttgactcccgtaatgactttccatcaaaatgaaaagtggagtgacaccactcat

SEQ ID NO: 235052 - DNA, 122 bp, Homo sapiens
ctgaagactgcagtgcacggccaaatagaaatgtgttttgtcggctcagaggctctttttcgtttcctgcttggctagctctctgctgcattccaaatagctgagggacttccagataatca

SEQ ID NO: 235053 - DNA, 122 bp, Homo sapiens
cccctcggcccggcccgcccctgggcccgggctggaagccggaagcgagcaaagtggagccgactcgaactccaccgcggaaaagaaagcctcagaacgttcgttcgctgcgtccccagccg

SEQ ID NO: 235054 - DNA, 122 bp, Homo sapiens
ggcggaagcctccagtctaggggtggctgcagaacccggatctcggagttacacgttctacggagcggggcgccgggagacggcgggcgagaaaacccggcgtccggaagcccgtgctttct

SEQ ID NO: 235055 - DNA, 122 bp, Homo sapiens
cctcaacactgcaacacagacgctgcagtgcatgataaaactgtccacatccgaattgtccggtaaacagcgtggagcctgtctcccattggttgagttctactttagattccataggactt

SEQ ID NO: 235056 - DNA, 122 bp, Homo sapiens
gtgcagaactggcagaggtggtcagcaccgcccaagcggcacccctcccccttcccaccccggactcggcctgggccccctgggggcttatggaaccaggaattcccttttccccagcccta

SEQ ID NO: 235057 - DNA, 122 bp, Homo sapiens
gaaggtctcccatgtgtaagacagtgcgtggaaaggagggagcgtgggtctctgtgcttacgcagttgtgaaggttgtgaggtctccttgaagtgttgtgagcttctccactctttgtgttg

SEQ ID NO: 235058 - DNA, 122 bp, Homo sapiens
attgttattgttaattgtttacctacactttttctcccaaagcaggatgtgcagcctggacgaagcagggaaatgcacccactcttggttttgtctccacaggggtggtcggaatggctcag

SEQ ID NO: 235059 - DNA, 122 bp, Homo sapiens
cattcaaagttaggcgccgttaggacatcagccgccagttcttaccttagacactgtgagcggctcacagtgttccagaccccccttaagggtgaagccccagggtgcccccccttgcagct

SEQ ID NO: 235060 - DNA, 122 bp, Homo sapiens
ccagctctgtgccggtggaggcagcagagggggtgtgggaatgagcgggcgcagcgcctccgcactcacacccctctgggccatgcctgtacctcctgcagcagtcggccgtggtcatccgc

SEQ ID NO: 235061 - DNA, 122 bp, Homo sapiens
accatttgcgggcttgaaggtgcaggcgttcagcggcgccgggtcccactgtgtgtgctacgtgtggcgggcagagagactacatgtgtgaaagggagcggtccggctacgaaacgcaatct

SEQ ID NO: 235062 - DNA, 122 bp, Homo sapiens
ctccatcctaggcttcttttttctaggaacatgaggcccagcctgtccacttgttcttcccggaatgtacactctcgtttatgtttttttgaccttcactccctttttcatcatgtgcattg

SEQ ID NO: 235063 - DNA, 122 bp, Homo sapiens
acattgtaaaggattcccagacatcgtaaacgctttgctccagacattgtagatgctttgcgtgcattattttcttcgcacaatcacgctagggaggtgggttttactaccttttcttaaat

SEQ ID NO: 235064 - DNA, 122 bp, Homo sapiens
agccccggccggggcctgcccagcgctgcgttgaccgccggagcccgcgtgccgctgcagcggagccatcatgaagcggctccctggccaggccgtcctggcagcccgcccgccccgcccgc

SEQ ID NO: 235065 - DNA, 122 bp, Homo sapiens
aagcactgttgtgagttgctcattcattccccatttcacccaccctctttgcttagcatgcgtggtgggggaagggggaatttctaataattttctcagcatgtgttaggttgtttttgcct

SEQ ID NO: 235066 - DNA, 122 bp, Homo sapiens
acagtaatgttgcgggtctgccccgccacgcgtgcagctatcgccgctgccggggcgctgcgggctctgcgaagggcagtgtcaagggaatgctgaagtttagtccagtgggcttgggggat

SEQ ID NO: 235067 - DNA, 122 bp, Homo sapiens
cgcatggtgtgtggtcttctgcaccgggctcccttcattcagcaccacgtttgcagggatcgtgtgcgctggggcctataaccagcacttccttccttctgaggccgaacgatgcaccacat

SEQ ID NO: 235068 - DNA, 122 bp, Homo sapiens
gataacggctagcctgaggagctgctgcgacagtccactacctttttcgagagtgactcccgttgtcccaaggcttcccagagcgaacctgtgcggctgcaggcaccggcgcgtcgagtttc

SEQ ID NO: 235069 - DNA, 122 bp, Homo sapiens
ccacacccactcagaggctagcacaccttagcatatgcaggagttgccatctgtgccctgcggggtggaatgtggcagggaggtcgtcagggtctccggagcaggccttgttagcctagcag

SEQ ID NO: 235070 - DNA, 122 bp, Homo sapiens
ttatatttctgcccaggaaggtgtcaactcaactgtctggtagataaagcaccagggaagcgggggaccccctgctctggctcacttcccaccctactttataaaagaggcccactttctgc

SEQ ID NO: 235071 - DNA, 122 bp, Homo sapiens
caacttcgcatttgacaagcgaggaaacaggaagtagggggcttagatggaaacatggggcgggggatggtatatttaagacttcaaagggcaagtatttttgccaattcaggttccccagt

SEQ ID NO: 235072 - DNA, 122 bp, Homo sapiens
ggcccgccataccgatggtgcagtgttcgccattccagccagggctgcactcgcacttgccgtcgcggcaggtcccatgctcggcacagcgcgggtggcaggcccgctggtcgcaggctgcc

SEQ ID NO: 235073 - DNA, 122 bp, Homo sapiens
aagtacttactttagtaggaaagtacctactttagtgggaaagtacctactaagtactcacgcctggttaaaccttagtaggtactttcccactgagtaagtacttagtaggtactttagta

SEQ ID NO: 235074 - DNA, 122 bp, Homo sapiens
cctggacagccctgtccatgccgtttgtgtgttgggcacagaaatctgcttggatctcagcgggtgagatgctgggagctctgccagaggtggcaggcagacaggcaggcaggcctgggacc

SEQ ID NO: 235075 - DNA, 122 bp, Homo sapiens
tccgcccggatcgcccagctccgcgttagccggagctgcacgcggggctgccggggcggacgctgctctgcctgcatccggaggcggccgccagcggatttgccacccaggtaggggactgc

SEQ ID NO: 235076 - DNA, 122 bp, Homo sapiens
atctcatgagaactcacccactaccacaagagcagcatggaggtaactgcccccatgattcggttatcacccactgggtccccacgttgggattatgggaactacaattcaagatgagattt

SEQ ID NO: 235077 - DNA, 122 bp, Homo sapiens
cccctgagaagtcaggcggggaggggtggccggggtgggcggaggggcccagtcctctatcggtcccccaggggccctgcaagcagaagagccaataaacatgccaggtggatcagcggtga

SEQ ID NO: 235078 - DNA, 122 bp, Homo sapiens
acaccagtcgggtgacgggtgcaccaaaatctcagaaatagccactaaagaacttattcacgtaaccaaacaccacctgctccgcaaaaccattgaaataaacattacaaaaaacaggtcta

SEQ ID NO: 235079 - DNA, 122 bp, Homo sapiens
cagcttaaagcgacgggcgggcggcagggctgccgaggcccctccgctctgcttatggctcggggacagggcagctcaacgttatctgcacgtcatcctgagtcttatcgcagctaagcggg

SEQ ID NO: 235080 - DNA, 122 bp, Homo sapiens
tgggtcttctgtggcagctggggaggaatccccaggggctccagcagccacttctccctccgtgcagctggcacagccccgtgtgtcctcaaagccagggctcagagaagccagctggtggg

SEQ ID NO: 235081 - DNA, 122 bp, Homo sapiens
atttgactgtgactgcctcacttggaaaagctgttccttggtgccccctagtggctcatacgcttttgtttttcaaattaaaatcagaataaaggaagacctgggattgaggagacacaaaa

SEQ ID NO: 235082 - DNA, 122 bp, Homo sapiens
cctccccacttttgcggaaagccgggcctcgccgggagcctgtggggactaagcggagggcgcccgctccccggtgggctgcgttcgagtcccgccgccgggcgcggctttccggggcgcct

SEQ ID NO: 235083 - DNA, 122 bp, Homo sapiens
tacagttaccatttattacaaggaaagaatacagactaacatcagccaagggaagaaacacgtaaggcagagtccaaaagggtaccaaacacagcgcttttgctatactcttccattatttg

SEQ ID NO: 235084 - DNA, 122 bp, Homo sapiens
ccttgttctgtgggctcttaaatgcatttgtatgcatttgtccgtgcagcaaagcgctaacggaaaacagaagccaactctgaactgcttagggtgcaggtactgtccatgaaaaagggaaa

SEQ ID NO: 235085 - DNA, 122 bp, Homo sapiens
gcagcagcccaggcccagcaccagcggtcttccggctcctctgagggctgccacgttgggcgaggggagccatgccaagggtccaggctgctttaggccatctgtgccccactcatctgggg

SEQ ID NO: 235086 - DNA, 122 bp, Homo sapiens
ggctaccccccggacggtgaaggcggcccagctgtggatggtcagatagcccttgtctcccgccgccaatctctggcccctagcagcacggagcagacggcggcagcagcagcagcaggcga

SEQ ID NO: 235087 - DNA, 122 bp, Homo sapiens
caaccactctggtatcttaccctccttacgagcaggtacaaggcgcgttccaggtctctccgccaatacagctgccgacattgttcaagggcctctttatagcgacagacttcatgctcctc

SEQ ID NO: 235088 - DNA, 122 bp, Homo sapiens
tgggaaacactgtagtgacgcccaatcaaaacgccacgtctcggcctcgaggaaatattccgtgtcgggcccgtcctgattggacagttctttcgggttctggccactaggaagctttgttt

SEQ ID NO: 235089 - DNA, 122 bp, Homo sapiens
cttgtgggagaaccatagattctcaccagataaacagaagagcttcgtgttagagaaacccgcctgtctccccacattctcagttttctggagagcagctgaaagccatctgggtggagatt

SEQ ID NO: 235090 - DNA, 122 bp, Homo sapiens
ttgggggagcctgagaggctcgggcgctgggtgcgcgggagggagcgtgcgtgcttggcgcgaaggctcctggcgcaggcgacccggctgccccgccgagcggtggctttccggaggggtgg

SEQ ID NO: 235091 - DNA, 122 bp, Homo sapiens
ccagcctatggagatggctcataggacatagcatttccagggggaaggtgtctaggcagccggcaaggattttgttcaacaaatagaatgaaaagcaaccaagaatcgatgagcagaagtcc

SEQ ID NO: 235092 - DNA, 122 bp, Homo sapiens
ggaggcagggtccaggcggtagcggctccatgtcctcggactccagcagcccagacagcccgggcatccccgaaaggtccccccgctggcctgagggtgcctgcaggcaaccgggggccctg

SEQ ID NO: 235093 - DNA, 122 bp, Homo sapiens
agcgcggcgcggccccgagcggccccgcagcgcccggctccccgccgctcgctctccaggcgccgacccgcctgcgtcgccaccctctcgccgctccctgccgccaccttcctcccgcccgg

SEQ ID NO: 235094 - DNA, 122 bp, Homo sapiens
gaagacctaggggcggggaatttggaagacttcatgaagaactcagataacaaagcccttcggcgcatttttaaaaagtgtgggcggcgagtttgtgcttttaacaacaaagaaacaggcca

SEQ ID NO: 235095 - DNA, 122 bp, Homo sapiens
ctgctccctcctccccgctccttctcccctccccaaaaccccctcccgccccccggcccccgccgccggctccgtcacttccgccccgccgtggccgaaactgacacaaagtagcgggccga

SEQ ID NO: 235096 - DNA, 122 bp, Homo sapiens
ttcggggaccctttccagccattgccctgcacctacccaccagatcgccgccctggtgggcgctcctggccctgtcctccgcgcttagtttgtcattgggcgcccagatccggaaccccagc

SEQ ID NO: 235097 - DNA, 122 bp, Homo sapiens
ggaaccaggcacgggcccgccaccctgtttccagggtctgagcgggtcaccaggtgagcacgccccagagctcaaaactcgtcgctggctgccctgcgtccacccggccgactactggccat

SEQ ID NO: 235098 - DNA, 122 bp, Homo sapiens
aacatgcccttgggacgtgctagggcaggcgatgtcttcacttctgagcactcaccctggcggtccacacttaacaggagttggcccagagagacggaagcaatccatgcaaatcccctctc

SEQ ID NO: 235099 - DNA, 122 bp, Homo sapiens
cacttgtagggttgttgcagggattaaatgagttaatatttgcaaagcacttagaacaatcgctggtacctagtaaacactcaataaatgtataaccatctcctgagtgttggttgtgtgcc

SEQ ID NO: 235100 - DNA, 122 bp, Homo sapiens
ctatccctaccctccaggcagcaggtccctagcctttgcatctcctaggagatgcaggatcgcgctgtcacagtggtcctcttcgcatcctctcccggcaaagagagatgctccggttacca

SEQ ID NO: 235101 - DNA, 122 bp, Homo sapiens
catacgggtcatggaaggggtgctctgcccccggccagggctccccctcctacaggaagccgggggccttgctcctgcaagctgccctttggctggaccgggccccactggccggacctggg

SEQ ID NO: 235102 - DNA, 122 bp, Homo sapiens
cgcccacacgctgcgctgcgtgcagctgccggctggaggcgggcaggacggacgtgccggcggaaccgtgagcctccgacggcctgagaccttcattgttccgcctcccctagccgctcacc

SEQ ID NO: 235103 - DNA, 122 bp, Homo sapiens
ggaaggagccccccgcgtcgactcgaaccgggtgcacgatgtccagtgccgcccggccctcggttgcacgtcctgcagggagagaaccacaaacgcctaggcccagggcagacccgggtcct

SEQ ID NO: 235104 - DNA, 122 bp, Homo sapiens
ctgagcgccccggtggcctggccgccggtgccaggctaggaagcaagtggaggaggggcacgcttcaacaactgctgctctcttgtccggagccccagttgattctgtgacgcacgtgaagt

SEQ ID NO: 235105 - DNA, 122 bp, Homo sapiens
ctgctctgtcgcctgctccatcgctggctcccgatctggctcccgttcccactccccgcccggtgtgctcagcttgctcggggcgtctccctactgaagaattatgttgcataaagcagccg

SEQ ID NO: 235106 - DNA, 122 bp, Homo sapiens
tcatgttatttgctatttgatgggattatttttatttttttcttgctgatttgttgcattcgttgtagattctatatactagtcctttgttggctgcataatttgcaaatattttctcccat

SEQ ID NO: 235107 - DNA, 122 bp, Homo sapiens
gggggagggggggcgacctcggcagcctcggcgcacgaagcgtccgagggcagcgtggggcgggctgcgacctctgcatcggtggactgcatttttaattaaggattcccagcagctctttg

SEQ ID NO: 235108 - DNA, 122 bp, Homo sapiens
tcaccactcagttgaggaactgtctggatttcacaattacatacgatatacatctcttctcggcccagtaaattctgagattctatagactttacttacttcctgaccaaggttcgggggga

SEQ ID NO: 235109 - DNA, 122 bp, Homo sapiens
tttatagccattttcagctctccccactgtcaggagcatagtaaggagcctgggctttatcgccctagcttctgagatgcacagtaagtgtttggatctgggtttcagaaaagtcactgtag

SEQ ID NO: 235110 - DNA, 122 bp, Homo sapiens
atcaaaaaagtaacaactctaggtgagcggcttagtggtggtagaagcccacagctgaaacgctggaaacactgatgcaattcatttgggaatttatttttttctaaagcggaacaaaacct

SEQ ID NO: 235111 - DNA, 122 bp, Homo sapiens
catccccagctccgaatgggacacgttttcccgagataaaagatcccttctgagctcacacgggagccccgggaccatccaatccagcgtggatatccccagcctaaccaacacctgtgctg

SEQ ID NO: 235112 - DNA, 122 bp, Homo sapiens
ggtgaaccgggagcggcgccatgtccccctgcaaacctgcttgctgacctcaggcttggccgtccaccgagccccgtggagcgacgtcactgaccctgtctttgtccccagccctggagcca

SEQ ID NO: 235113 - DNA, 122 bp, Homo sapiens
aaagcacacgggcgcaaacatcctcgctgctaactcagggcaattgtcttcctattttctcgttcctgacccccaagtttcaccggtgggaagtcatcgaagatctcccttttaccaccagc

SEQ ID NO: 235114 - DNA, 122 bp, Homo sapiens
gggcactgtctgccaatgagaccaccaacttgcttgccctaaatggccacatcccctaaacggccctcctgccattgtctgtgctcagaaaaccctcagtttctgcctcttacctgccaggg

SEQ ID NO: 235115 - DNA, 122 bp, Homo sapiens
ggtgagaatggaggacagtcagctgaagaagtcattctatgtgtactttttctttgcttgcgatcaacttcaaaagaggctggtcgggagacaccaatgacaatgtaagaagatgaagattg

SEQ ID NO: 235116 - DNA, 122 bp, Homo sapiens
agacctgcacacagatgtcgacagaaacgttattcatgatcgtcaaaacctggaagtgaccgagacgtccttcggtagatggatagacagataaacagtggtgccgagacgtccttcagtag

SEQ ID NO: 235117 - DNA, 122 bp, Homo sapiens
tgagccaccgcgcccggccaagttttgtattatttttcttaactatgtcttctcaaattgcggaagcgttaggccccacaacatttgacatcaccagtagggatccagtggagaggagggac

SEQ ID NO: 235118 - DNA, 122 bp, Homo sapiens
gtacttagtcaatccaaataattcacacaaaactgaagcaagatgttcaatgatttatggcgctaatttcacaagaaaattatggaatccttctcttcaatagagccacctttttattgtca

SEQ ID NO: 235119 - DNA, 122 bp, Homo sapiens
gcgctcactccgagcacaagcgggcgaacacgcacaacccaaaatccatggcagagcctgcgctcactccgagcacaagcaggcaaacacgcacaacccaaaatccacacgcggagcccgcg

SEQ ID NO: 235120 - DNA, 122 bp, Homo sapiens
ggtccgaccagtgctggggactagatcccggcctccgagtgaaagcagagcgcgtatgaccgatgtcagttgcagagtcaaacagctggagccgcccagtctgaggagcgccaggagatcaa

SEQ ID NO: 235121 - DNA, 122 bp, Homo sapiens
tgtccttaagtctctttagatttttttcacctgggctttcattacaattcttttactttccgtgtttcctgggtaagcttgtttatatatttttagcaaacattcatgtaacactatgtgcc

SEQ ID NO: 235122 - DNA, 122 bp, Homo sapiens
tcatttttaatatggagggttggccaatcaaccatggctttcctcaaacagtgacttgatcggactccatctcactaataggaagcaccacaattagtgtttctagcttaatttttgctcat

SEQ ID NO: 235123 - DNA, 122 bp, Homo sapiens
ccattttccatttgatcaccttgtgttcattaaggaccagctaaaccatctgttgagactcggtagtcgaggacatctgctagatgggggagcaatcaggcatttaatgaggggcctttcta

SEQ ID NO: 235124 - DNA, 122 bp, Homo sapiens
tggatggggttgggaattcgtccggaatcatagggtcgatagtgcattacctgtgcctggcgcttgtcggttggatttgctcagcagatctctgcttcggggccaggaagggtggagctctg

SEQ ID NO: 235125 - DNA, 122 bp, Homo sapiens
cgccgccatgacggggctagcactgctctactccggggtcttcgtggccttctgggcctgcgcgctggccgtgggtgaggccgggtcctggcgggcgggagcagcatcgcggccgagctggc

SEQ ID NO: 235126 - DNA, 122 bp, Homo sapiens
cgcagccgccgccaccgccggctgtggcctccgagttctgctcgagttcggccagcgccacgatgtccatctgcccgctggggcccagtttcttggcggactctacgtcggccttcatctcc

SEQ ID NO: 235127 - DNA, 122 bp, Homo sapiens
ggggcgaaaccactgttggctcatttccgggtgggtccccgtctccaggcaaccatttcgcgtcctgcagattcttgcctgtgccgggagccgcctcctggcgccgcagcccagccgtattc

SEQ ID NO: 235128 - DNA, 122 bp, Homo sapiens
gcagcagcagctcaggaaatggggattgaaaatctatcaagagccacatctcatagttgacgttaaagcttccccgaaggaaggctggttcaaatgcacaccccatgttgccctctggagat

SEQ ID NO: 235129 - DNA, 122 bp, Homo sapiens
ctctcagctgtagggttgtctgagtagggcctggggtggctggagtcttgggcctatagccggcggcagagagcagccttgggaatagcctctaccagggctcccctgaggcgggactgagg

SEQ ID NO: 235130 - DNA, 122 bp, Homo sapiens
atcaggaaatctattgttgctccactgcttagaacccttctaggactctttgttgctcttcgagaatatccttagagtagcctgtaaggcccctccctacttcagctttctgtctccctttt

SEQ ID NO: 235131 - DNA, 122 bp, Homo sapiens
catggcggtgactttggaattctgtccagctgcattcagccatccagcaacaggtcccagcgtgaacaggtcccccggagcgagcgctcgggaatgtctcctggccaggcctggagattgca

SEQ ID NO: 235132 - DNA, 122 bp, Homo sapiens
cctgcagtacgtgaccagtccttggcacagagtcactcagggctcatggtagatgcttagcggtcacagccagtagctgcgcagtgtggcagcagctgagatccatactgcagcctgaaagt

SEQ ID NO: 235133 - DNA, 122 bp, Homo sapiens
cgcccacccactggctctgcagggcgcgcactcccagctggcgcagaaagtgtggggcctcgcgggttgtacggcgactacggcgcctgccaagggcaaaaaaacctctttgccgagggggt

SEQ ID NO: 235134 - DNA, 122 bp, Homo sapiens
ctgttgcaccatttaatccaacagtttgtgatgctctgcttgataaggacgagactgattcgtccaaagatactgaaaaactctcttcccttggagaagagatgagagaagatggtcttagc

SEQ ID NO: 235135 - DNA, 122 bp, Homo sapiens
gggctcgccccggccccacgtcacctggttcaagaatgaccgcagcctggaaggaaaccccgcggtgtacagcactgacctgctgggcgtgtgctccctcaccatccccagcgtatccccga

SEQ ID NO: 235136 - DNA, 122 bp, Homo sapiens
ctttagtgtcaggtgaaagaacagcaacccgccccgcttctccacccctgacaagccttccgaaatgccacgctgaacatggctgccgcgcttcgatgcttcttcacacacacaatatggac

SEQ ID NO: 235137 - DNA, 122 bp, Homo sapiens
cctcccaccaccgtctccaccaactcagacccgggcacggatcagaccacctcccaccaccgtctccaccatctcagacccgggcacggatcagaccgcctcccaccaccgtctccaccatc

SEQ ID NO: 235138 - DNA, 122 bp, Homo sapiens
aacacccgaatcaacttctagtcaaattattgttcacgccgcaatgacccacccctggcccgcgtctgtggaactgacccctggtgtacaggagagttcgctgctgaaagtggtcccaaagg

SEQ ID NO: 235139 - DNA, 122 bp, Homo sapiens
agaggcgaagcccaggggagcccggggccaccgctgaaaaggatggcagctgagcgcaggcgagggagaggcgcgcgtgtccgggacagaccgcggtgggagctcgactccggaaaccggcg

SEQ ID NO: 235140 - DNA, 122 bp, Homo sapiens
tgcaaaagttctctctctggccatcactcctgctaaggacactgggaaggacatggtcaacgtagcagtcgatcaaaaagattccagggaaactgcgcaacagcctggggccgagaagcgaa

SEQ ID NO: 235141 - DNA, 122 bp, Homo sapiens
tcccctatcctggaggtggtaaaactcaaaagacagttgagggtagaagacgaaatggcacgcatctcaaagacagagagcagagaaggtgtgcaggtgcggaaaggactgctagtgtccac

SEQ ID NO: 235142 - DNA, 122 bp, Homo sapiens
aagcagcagccaccatgctgggtccttgaatttgatacagaagccatctgagctttgtctcgagggacccaggcctacaggacttgcagagccagtgggccttcttgctgtcctcatcatcc

SEQ ID NO: 235143 - DNA, 122 bp, Homo sapiens
agcaggcgagggtgaacgcagggtgaaggccattcggccgcccttctggcttcagagtcacgcaatgcacgcgtttctaacgtgcagcaagacgattagtcgactcagcctctccggttttc

SEQ ID NO: 235144 - DNA, 122 bp, Homo sapiens
taggattatgggatcaatcaccaaaagactacatgaaactcaaatcctattttatactgtcgtgtaattagtataattcattatatatgttatatttacattatgtatattacgttattaac

SEQ ID NO: 235145 - DNA, 122 bp, Homo sapiens
tgtgcggcggatataaggtcggtgtagacttggtcgttcaagtgaggcggggtccacactcggtggcccggtgactgggttatcgagtggagccagggcagcccagagatgctggggtcccg

SEQ ID NO: 235146 - DNA, 122 bp, Homo sapiens
gaccgcgagctcaggctgtagctgctgcccggcctgcctggggctgggagccccagacaccgacaccctgaggacgtgtggagctaaggtcatatcatctgaccaggtctggaggctggcgg

SEQ ID NO: 235147 - DNA, 122 bp, Homo sapiens
gaggccggtggggagagtttaacatctctccctggcacttgtgccttgatgtgatggtgccgtcctgctcaacagttttgaatcctctgggaaggcacggggaagatctgctggggacatgt

SEQ ID NO: 235148 - DNA, 122 bp, Homo sapiens
ttataatcatccttgcctgtgttgtccttcccacgttaggtctgtcatgccacgtatgtccgcagtttataacaatctctatcatacattgaaaagttttgaaaacttatccagtgaatccc

SEQ ID NO: 235149 - DNA, 122 bp, Homo sapiens
gcccagtgctccatgaccatttcaggacacagctgaacactcatcttatttctgtacagtcgcctgtgtgccgacacggcttgcatttttccttttcttttggctttcttcctgtaagaatt

SEQ ID NO: 235150 - DNA, 122 bp, Homo sapiens
tactccctgtcttttcctcaatttacctaggtggttccctgtctgacccaaatgctaggccgatttcaacccttctccttggtccggagtttcagactgggatttgaagcctgctgctatcc

SEQ ID NO: 235151 - DNA, 122 bp, Homo sapiens
tgggggtcgtcggctgcattttcaacttggcctaaaagttggagttcaccacactgcaggcgctaggaactctgccgctcggtcaccaacctgagcctctggctagtccgaagaacgcgaaa

SEQ ID NO: 235152 - DNA, 122 bp, Homo sapiens
gaggctgaggcaggaaaattgcttgagctgggtggtgtccagggcgcatcagtgagaccccggggagaagactgtcggcaccaccagcagtgtgtatatagtgctgggaagagggtcagcac

SEQ ID NO: 235153 - DNA, 122 bp, Homo sapiens
ggagctgcgcctccctgatttggagttgcagaaccttgccctgcttttatctcactttaccgcccgagaatggcgccagccggggtggggggggctaaagatttggacccagaccgtgccac

SEQ ID NO: 235154 - DNA, 122 bp, Homo sapiens
ttctgccgcggctttttgtcaccaccgccatggctttttgtggcttttggcccccggcgccgcggctttttactgctttacgcccccgccgccgccacaggtttttcccgccgcggcttctt

SEQ ID NO: 235155 - DNA, 122 bp, Homo sapiens
ctgggacgtagtggagttggcctctttgggctcctgggtgatcagctgttcctcagaggtcgtctcagaggaaggtccagccatggcggaggcagtggccattagatggcacgaccagacaa

SEQ ID NO: 235156 - DNA, 122 bp, Homo sapiens
gcgatggccccctgagcaggcagggagcaggcggcggcaggcgggcaagcgggcgggtgccgcagcccaggcccgggtcgcgcctctttgtttccacgggtagcggcgcagtcccgggcccc

SEQ ID NO: 235157 - DNA, 122 bp, Homo sapiens
agtggatagatcccaggaatgctgctgaacatcttacaatgcatgggacagtccccaccccgccccacagcaaagaagtattagtccccaaatgtcaataggagtacggttgagaaaccctg

SEQ ID NO: 235158 - DNA, 122 bp, Homo sapiens
tggataaataatgcacacctgcatacgtttccataggggccttaaggatgggaccaaaaacgtttggcaggagacggccactctcatgtggtacataccatgtagttcgtgttcctatgttc

SEQ ID NO: 235159 - DNA, 122 bp, Homo sapiens
acggtgtgagtctccacacactactcggtgtgtctgagtgggagctccaagttagttatgcgccctgtctgccattattttcccattttgagttagttttcatatattgtgttatgtaaaag

SEQ ID NO: 235160 - DNA, 122 bp, Homo sapiens
cacttctgtgctattctccattgtggccagcttgaattagcctggtgattaaagaagaggcgtcaacaaaattccaatgaaagtatgagaagggaggatggaatgataaaaaaggagaaaac

SEQ ID NO: 235161 - DNA, 122 bp, Homo sapiens
ctagtgagtctgcgcacacgcactacctccgccccggcagttcctgagtgggtgcgcaggcgcaagaggagcacaccgttgccattgcagaccgtcactccctgaggagcctgagagccggc

SEQ ID NO: 235162 - DNA, 122 bp, Homo sapiens
ttattttttgtgcgtgttcatatcactaatgtcatcttcattttgcagcttctttgctgtcggctttaaagccgcttgccagttgtgcaagtcaggggagcaaacaggagataatatgctca

SEQ ID NO: 235163 - DNA, 122 bp, Homo sapiens
tttttggggggtgggggagcgtggaggatagggtgggctttttcccctccaatgctgcgacgcattaaccctgctgctgttgggacgttctctgctcagcctattggctgagcccgggagcc

SEQ ID NO: 235164 - DNA, 122 bp, Homo sapiens
ggccgtgcctccgtgttcatgtgatttttagggggttctgtttcctccttactcactaatcggagctggctaaggtggaggattctcatgtcctgaaaggtcaggttttaaaacagagttca

SEQ ID NO: 235165 - DNA, 122 bp, Homo sapiens
cctctgcaggggagcctgatttatactcatcccagctcccacccagccccacgcccgccacgtgtgatttccacagccgcaccaaggaagactgtccagcacacagacttttcgtctcccag

SEQ ID NO: 235166 - DNA, 122 bp, Homo sapiens
attcgcctcagttgctgctgtaataaaagtctactttttgctaaaagcgtcgtgtgttcgcgcctttcccgccagggggagcgggcccggggcggaggcggggcccaggtgggagggggacc

SEQ ID NO: 235167 - DNA, 122 bp, Homo sapiens
cagaaaccttggccaattttgctcaccctgtgtttgcccctccgtataggacttggaacacgatagataggtgggtaggtagaaaatggatgggtgggtgggtgggtgtgtggatggatgga

SEQ ID NO: 235168 - DNA, 122 bp, Homo sapiens
ccctaagcctgcgcagcctcagttgcgcgccgagagctctgctgggggctgatggttgtgcgttcttccgggccggccttgactgtcttcgaaaaaacctcgtcggggcaatagttaagtgg

SEQ ID NO: 235169 - DNA, 122 bp, Homo sapiens
gcctgggaggttgagactgcactgagctgtgattgcaccactgcactccaacctgagtgacggagcaagacccatattattatttttttaagtgtccttatcaggacttgtctaccttcctg

SEQ ID NO: 235170 - DNA, 122 bp, Homo sapiens
aaatataacaacagctaagtatttactgaatacctggttgcatgccagaaccattctaagcgctttccatgtttaacttagcagacagtggaaaccccatcaagacagtactattggtcagc

SEQ ID NO: 235171 - DNA, 122 bp, Homo sapiens
ccctttgctttccggtgggcaacaggggtgggtaactgtgttccggactcgcccgcgggccgggcggagccagctacctccaggcgaccctacccaccccgcgattctattcctggagactg

SEQ ID NO: 235172 - DNA, 122 bp, Homo sapiens
gccgtgagggaagagaggtgtccctagggaggtaggctggaccaggaaggagacctggttcgtttcgcccaggctgtcacggcttcaagagcgcctctccgctatttccgtcgctcgacaga

SEQ ID NO: 235173 - DNA, 122 bp, Homo sapiens
cggcagagaacccagagtacctgggtctggacgtgccagtgtgaaccagaaggccaagtccgcagaagccctgatgtgtcctcagggagcagggaaggcctgacttctgctggcatcaagag

SEQ ID NO: 235174 - DNA, 122 bp, Homo sapiens
cgggaggctggactctggtgactgtgtatggttgcatatgctccgttttcctctccctgtcgtgctgggcctttgaaaccggcttctttgctggtggctgcttggtgagccccgaggagacg

SEQ ID NO: 235175 - DNA, 122 bp, Homo sapiens
gttataccttctcgaggttgtcgctccactgtcaggaatccacgagtggagaccttcccacgtgtgtcttagctgtctaggcagtacttcctgcaaccccccccccacaccccgcgcatttt

SEQ ID NO: 235176 - DNA, 122 bp, Homo sapiens
acatgttcttctgatagtcaattagtagcatctccttataagaaaagcagcaaaaatacacgtttgctccagaaattatagggccgaaatggatttacagtgctgttaacatctattaacca

SEQ ID NO: 235177 - DNA, 122 bp, Homo sapiens
tccccgggaccctgcccccccaggaccccgccccccgggatgccgccctccccgggaccccgctgctgcatctgcctctccaggctcggccattccccgggggtcccttcccggtctgtccc

SEQ ID NO: 235178 - DNA, 122 bp, Homo sapiens
tgcggcgcggggctgacgctgccttgggttcgcctacgtccctcgggaattttgtcccggcgtggctcccgtagccagatgcttcgccgctcccgccccgctggctcccaaagcctgttcgg

SEQ ID NO: 235179 - DNA, 122 bp, Homo sapiens
accggggggcggggtgggggtcagtgcccagcggagcagagcccccgacacggttcctcccgttcctagtctgctggttctgggaactccccaagctttcagcccagctcctcagcactggc

SEQ ID NO: 235180 - DNA, 122 bp, Homo sapiens
ttttccaatgcgtttattgcagttcagtgtggtagatggctggagcctatcctggtagctcggcgcacaagtcaagaattaaccctggacagggtgccatccctttgaagggtgcactcacg

SEQ ID NO: 235181 - DNA, 122 bp, Homo sapiens
gtttaccaaagatctcgcgagacctatgtctctcggagcgagaggggcgcggagtttgagcgaggggagtaaactgggaaataaatttatggctagtgtcacctagtggctaggaggggaac

SEQ ID NO: 235182 - DNA, 122 bp, Homo sapiens
ccgggttcaattcccggccaatgcagcaggtacttcttcatttcattatggccttttacccgtcttttacgctgcaaaattatactgcataacctaatagtgcatttaggggcttggccacc

SEQ ID NO: 235183 - DNA, 122 bp, Homo sapiens
cacaagacctcagcagtaaaagattaaatgacaccgtgacagtgagactgtccacctcctcgaactcgcagagggcaacgcattaccacctgagctcccaggtccaagaaatggctgggaag

SEQ ID NO: 235184 - DNA, 122 bp, Homo sapiens
gctcgcttgggttctgttctgcaggccgaccacgtgcccattggtttatttgaccagggtcggtgtgatagctggtgtgtctggggccgggctgggggctgaggaggcggacccggctcctg

SEQ ID NO: 235185 - DNA, 122 bp, Homo sapiens
cgccgcctctgaacaaacttttctttctcttcaagttgaggccggcgctgcaggcagcggcggctgcgcggtgaacgaggcggcctgcgcggcggagtgctgagtcccgatccccggctctg

SEQ ID NO: 235186 - DNA, 122 bp, Homo sapiens
ccaggcttggcgaataataaagcagcagggtttgtttcctctttgatgaaggtcccctcccgtcaaaggctgcaccttaagcctctgcagcttaaggtacaagaaaggctcacgcttgctca

SEQ ID NO: 235187 - DNA, 122 bp, Homo sapiens
gcaatggagctaggcctttcaaaattaccacgctaaatggctggtctaaaggagtcattacggctttttaaaaaatcatctgcctttttccatcatcttggtgagccagtaagtctggtgct

SEQ ID NO: 235188 - DNA, 122 bp, Homo sapiens
aggggatctcgctacggccgatctccctacagtcgatcttacagccggcatcactacagccgatctccctacagggaatctcgctacaggaggtctccctacatccggtcttcccgcagcag

SEQ ID NO: 235189 - DNA, 122 bp, Homo sapiens
gaacttgggtttgctcatggcttcctccttccttttggctgtttaattctttagtttccacgtaatttaggtctttgctttgtttttctatcaaattcctttccttccttccttcttccttt

SEQ ID NO: 235190 - DNA, 122 bp, Homo sapiens
ggcagaattatgcctcacacggaggtgagcccctgaccaagactccaaagtcccacctcccgtcacccagctggggtgcacccagctgggacatcggttgctttcagtgagagagtcaaatg

SEQ ID NO: 235191 - DNA, 122 bp, Homo sapiens
gatatttccattgctcaagacttcttctgtggcactggctcccccactgccccaatagctcggctccagatgataaagctgcatctggttatagcccaatggcttctatgattgaattgagg

SEQ ID NO: 235192 - DNA, 122 bp, Homo sapiens
cttttcctaattcacttaaaggaaacatatggattgcagcgggcctgcttagcactgtaccggcattcagttggcgctcggtaaatggttgttgcttatgtgcatgatagagggtgggaagg

SEQ ID NO: 235193 - DNA, 122 bp, Homo sapiens
ggactggagaaaccacctgggaaccgggcactgtgacaagcaaagggtcagaatcaggtgcgatcgaggaagcacctgaactccttcgagttgcaggatagcacacaagcacccggacctgg

SEQ ID NO: 235194 - DNA, 122 bp, Homo sapiens
ggcatgcaccgccactatgttggacacgccagcgcggccagccgggtcataggtgacctccgaggtgaagtctgtcacagccttgcggaatttctgcactatctcctctgggctgtctgtta

SEQ ID NO: 235195 - DNA, 122 bp, Homo sapiens
cgtgtcctgcccatgctggtcagagatggactgggcctgactctctgtctcacctgctcccgacccctgcagaccttgtggggccggggtgctgccacgccgagccttctgtgttcgcaggt

SEQ ID NO: 235196 - DNA, 122 bp, Homo sapiens
cggactccagacctgcaccgcggaaaactcactaaagctgtctccaaagggctgcgaaggcgaccatgcctctacccaacgtgccactctcagaaaaccaccagaggggccagtgacagaga

SEQ ID NO: 235197 - DNA, 122 bp, Homo sapiens
aggtccacctggtgtgttgcgtcgacaccaccgtgcgcaccaggaaaagccagggagcctcgagatcggtcagaagttcctccagcgacggcaccagccgtgctgcagtcacattggccctg

SEQ ID NO: 235198 - DNA, 122 bp, Homo sapiens
gatgttttctgggcagcagggggcataggctggtgcaagttgccatttctgctgagcttccgggggacagggcccactgccacatttcccctcagtttcccccagatcttacaccaaaggcg

SEQ ID NO: 235199 - DNA, 122 bp, Homo sapiens
tcaaactggagagcggaaggatggaaccttttattctcaggtggagaggattaagctttgcggtgttagcagaaaatgatcgagctccagaaaatgatttggaggtcagattcgattttaaa

SEQ ID NO: 235200 - DNA, 122 bp, Homo sapiens
aaatactgttgctccctgagaaatgtctaaagtgctctgtcactaggctgaacaacctgccgtgccctcccctgcacacacacacactcacaccagtcagcaggcgcgcacacactcacaac

SEQ ID NO: 235201 - DNA, 122 bp, Homo sapiens
catttcaaagacaagactcttaggctcttaagaaaaaaattcctggattgtgaccaggcacggtggctcacgcccataatcccacacattgggaggccgtggctggtggatcacctgaggtc

SEQ ID NO: 235202 - DNA, 122 bp, Homo sapiens
acgtgagtgtcttaacgtctagtgtgcgtgagtgtagggttaagtatgtttagtgtgccccggtacccgaaccctgtatttctgttgtgttaaatgtgtacagtatgtatgagcccgcgcgt

SEQ ID NO: 235203 - DNA, 122 bp, Homo sapiens
ggggttgggtcctagtgggtgtttcttgtccctctcacccagcgagagtccccaaagggacgcttcacctctgcaggatagggtccagaagataatgcctaggaacttgggagaagtccgtg

SEQ ID NO: 235204 - DNA, 122 bp, Homo sapiens
cgttacacatggctgagtgaggaggtgttccctaaaggtttgagtaatgaggccaggcgccgtcactcacgcctgtaatcccatcactttgggaggctgaagtgagcggatcacttcaggag

SEQ ID NO: 235205 - DNA, 122 bp, Homo sapiens
ttttgcttagtaagctcttggaaggtgaggctgcgggtggtgcgtccctccgttccctagcgtgttgcatagagctagatgccagcggggtcctcggtaactgtacgtggcatcggattgaa

SEQ ID NO: 235206 - DNA, 122 bp, Homo sapiens
cttgggtcctatgactgctctgccatgttgctttgccgacctcgcccctgggaaggggaccgggcaaggccacttccagagggttgtgggtgatttttttaagggtctgcgggtcccttggg

SEQ ID NO: 235207 - DNA, 122 bp, Homo sapiens
ggagcccaaatttttttaaaaggtttatcctgaatatacctctgtggctctagaaatgaccgaaatgtcattttagttcaatgaatagtgattgctctaccccttctgacaatctggacccc

SEQ ID NO: 235208 - DNA, 122 bp, Homo sapiens
ttgggggaagaaatggctcagatgaactgtggaaattacagaagttctgaaaactttcaacggctttgcaaattgacactataagcactttgtgtccaatttcacttcagaaactacggcat

SEQ ID NO: 235209 - DNA, 122 bp, Homo sapiens
gggcagaggccgccatggaggagaagaggtattggcctcaacgactccacctccccgccacgtgcccagatccgggatggaaggaccctataaatgcccacaacccagcctccccagaggcc

SEQ ID NO: 235210 - DNA, 122 bp, Homo sapiens
tgagggattccctctctggcggcctctgcagcagcacagccggcctcattcggggcactgcgagtatggatctccaaggaagaggggtccccagcatcgacagacttcgagttctcctgatg

SEQ ID NO: 235211 - DNA, 122 bp, Homo sapiens
gaagccggcgtcccctggggtgtctcccatgacgcaccttatcaccgtcggggtgatctccgcacagaagaacacgctgaggctccccaccgcatgggaggcaaacatgcccacgatggaaa

SEQ ID NO: 235212 - DNA, 122 bp, Homo sapiens
aaaacgaaagctaccaagttttgggagatgggagatggtgctatacggtctttagggttacgtgaagtcaagtaaaatcgcacactggtgagtttcaagagtgagacatttgatgaatacgc

SEQ ID NO: 235213 - DNA, 122 bp, Homo sapiens
ccccgcctcccgggcgggatttgcatgtgtgtggtggccccagacttcctgctccttctacgctgcaggtacgcgcgggccgggcggggcgggcgggcggcgggcgcgccaagacgtgggca

SEQ ID NO: 235214 - DNA, 122 bp, Homo sapiens
cgagcggcagcaagatttactgcaaagagcaaaagaacaaaccttccacggtgtgaaagacgaccgcagtgggctgccactgctggccgccgcagcctgcttttatttccttatctggcccc

SEQ ID NO: 235215 - DNA, 122 bp, Homo sapiens
tcggaattgtcatcttcctcaggcaaatagtttttcaccttagagccagcaaggccaaaccgcccagtcacccgacttcccacagtctcagcaggtacacagggcggggagcctcgggagcg

SEQ ID NO: 235216 - DNA, 122 bp, Homo sapiens
agcgcgggcggagctgctcgacctgctgggagttgtagtcgccttccgaggccttgacttcgtcctgggagtggctcgagccggttaatgggggtgggccgggaatggaccagtcgagacac

SEQ ID NO: 235217 - DNA, 122 bp, Homo sapiens
tgatttaatgtcctccaaatcattctgttgctcttaaaacaaaacaaaacaaatttggagcggaggttacttcagcaaaatgaaaaaaagttgaacttaagtttctatatgcccaatgcaag

SEQ ID NO: 235218 - DNA, 122 bp, Homo sapiens
gggcaacatggcaagactccatctgtaaaaagcaacaacactagattctcagcttttgttcgtttgtttaagacagtctcgctgtgtctcccagactggaatgcaatggtatgatcttggcc

SEQ ID NO: 235219 - DNA, 122 bp, Homo sapiens
cttcacacagaacatttgaatgtacgtttatacactatggagaatatctgacaaatctcacggtgactttaaaaggtactgcattccatcttgctttggaaacaaaccatgtggttattatg

SEQ ID NO: 235220 - DNA, 122 bp, Homo sapiens
tcttcctttcctagatcaatgtcaagcgccatcctccgttttccggccattctcgccgcacgtctaagcagtcatctttcaggatgcagtcccatgtcattgcctcttgtgaccctctcctg

SEQ ID NO: 235221 - DNA, 122 bp, Homo sapiens
cctgcggcctgctggggggtgggtgggcggccagcaggcgaggtcggggctcagaggtcacggggtccagccctcgttttacagatgggtaaactgaggcctcaggcctgtcccccacaccc

SEQ ID NO: 235222 - DNA, 122 bp, Homo sapiens
ccgtggcgcggttgcggatgttctgggcgcggctggcgtagttgagggtgttgagggtctcgtcgaagtcggaggaggaagggctgacgcaggcgatcatcaccgtcttggcgttcccgccc

SEQ ID NO: 235223 - DNA, 122 bp, Homo sapiens
ttgttggatacttttcacatttttaccactggtcttctgcccttattaggtctctttggtcgtcattttttatttcacagccatcactactctgtccagggaataacttctgatctttgata

SEQ ID NO: 235224 - DNA, 122 bp, Homo sapiens
gcaggtagactgctggccctttgtcacatgtgaggatggcccagggttcgccagctgggccggggagatttactacacagccgcagaaaagcacggggagaagagtgatgtgtgatgccaag

SEQ ID NO: 235225 - DNA, 122 bp, Homo sapiens
cgcgccccggaggaacccggccgccgcttccctggggacggccgagcctgcccccgtcggcgcctccccaaaaagaggcccccccgcagtggctcccgaatgtcgggctcgccagcctcggc

SEQ ID NO: 235226 - DNA, 122 bp, Homo sapiens
cctgtgcaggtagagctgaactgccttgatcagcagcagaagcagaatgagcagggaggccgcttggaggattccagagacatcacccaggagtctgctggggctcagcacagagacactca

SEQ ID NO: 235227 - DNA, 122 bp, Homo sapiens
ttcaggctgaacactctatcaggggccgtcaattaatttccagtgatgccacttctcctccggggtgagtttcaggaattctccaaaagtgggggcctcgcaggccgagtgatgaggtgcag

SEQ ID NO: 235228 - DNA, 122 bp, Homo sapiens
ctgtcctacctgccccacctaagcttctaggacctcccgcagccccagccctgagccaggcggcctatcctcagcctggaaggaaaggttcagcctcgaggccattgtccagatgagaaaag

SEQ ID NO: 235229 - DNA, 122 bp, Homo sapiens
tgttccacctcggagggccctgctgggggctccgggtaggggttcagctgagaaaggaagcggccttccgcttctgctctagcaggctctcctgcagctccagtagcctctcctcttgctcc

SEQ ID NO: 235230 - DNA, 122 bp, Homo sapiens
gcgggaagctgcccccttgaatggtccctcctgagccaggagcagtggggagccagtcgacgccagcgatccaaagcccggccttgaaagaggattaaatcaatgctctgatttgcaattca

SEQ ID NO: 235231 - DNA, 122 bp, Homo sapiens
caaaattgaaccccagagctcagctcccaagaaggttaacataatggttttgctactcatcgtaacaacacctcacatcatgccttcagatcactccccagcatcattcttcaaattcaaac

SEQ ID NO: 235232 - DNA, 122 bp, Homo sapiens
gagccccaggtgaaggggcccggaacacctcctgtcacctgagccccaggtgaaggggcccgggaacacctctcacctgaacccgggggtcccatcccaggaagaagggccatctcaggaca

SEQ ID NO: 235233 - DNA, 122 bp, Homo sapiens
acccggctctcagtgctgggtaagctggggccgccgggggaccggggacgagactgcgctcgggtttttgtgcggggctcgggggccgtgaccaagagacccagtacttcgggccaggcacg

SEQ ID NO: 235234 - DNA, 122 bp, Homo sapiens
cctctatctctttctatgtcccctctcctttcccatcatccatgtccttttttgccttatcgcttttattattccttttttctttcctcctcccttggtcaccttttgcctctcattcattt

SEQ ID NO: 235235 - DNA, 122 bp, Homo sapiens
ttcccccagaaagaaggactcagctgtgaggtgggaggctgggggtgccgggggcaggggcgccatacactcagggagccttgcctggtgcatgtgctgctcctgcttccgcagccgctcct

SEQ ID NO: 235236 - DNA, 122 bp, Homo sapiens
attacatcatttgctgctggggtagagaactgggagtacttttcccagccttggctggaccggtgccaaggttattaagtgcaaatcccttaacatgatctccctgtaactgcctcttgtgc

SEQ ID NO: 235237 - DNA, 122 bp, Homo sapiens
ccatctccagcagacccacggtctgtgctcctacctggtatccacgtcgcctgctcctgacgtcagccaccagcaccgccagggctgtatgatggaagcagggaccctccttctgtgcctcc

SEQ ID NO: 235238 - DNA, 122 bp, Homo sapiens
ttaaactttttttcccttctcaatgtatctttaggccaaagtctctaacatttgcttttccgtatcactgaaggatgcaaaaatctggggtaaagaatgttcaagtgaaagaagaaggagtt

SEQ ID NO: 235239 - DNA, 122 bp, Homo sapiens
gagacaagcctatggtatgctgatgagccatggttaatacaattttatctcactaaatgtcgtcaggatttaagggaagaccttcacacagatttttctgtatctacgtgatgatcattttc

SEQ ID NO: 235240 - DNA, 122 bp, Homo sapiens
cagcacaccgcgcttataatctctttcagctgtccttaaaaaggttctatttgtcccctccgccccgctcaggggcgcccggactctggggcccggccttcgcgggctcccgggttcctccc

SEQ ID NO: 235241 - DNA, 122 bp, Homo sapiens
aattcaaaagcccccttcctaggaaagcagcttcgtagcaggcaggaaagggctgcctagcgtgtcctggggtgaggatttggaaagatttgaaagctgttgtggaccagggtagggaaagc

SEQ ID NO: 235242 - DNA, 122 bp, Homo sapiens
acgttcaggtggagcggctgcacctcgggtcgttctaagggatgggctgcgtggtacccacggaattcatgggtccaaaaggtcctggtcacctgtccaaacatccatcccctggcgcatgg

SEQ ID NO: 235243 - DNA, 122 bp, Homo sapiens
ggaaccggaaacaagccagttactttcatactcagggacaccgtccccccctccgccccccgccctccgtaagtgctatttttacatcgaatgccctagtctggaagtaggtaaactgaaac

SEQ ID NO: 235244 - DNA, 122 bp, Homo sapiens
tggcagagcaaaagctgcaacagacactgaggaaggcagagacgctcccggaggtggaggcggagctggcccagagggtggcagcgctttccaaggtagtgccatgagcttcattctggttc

SEQ ID NO: 235245 - DNA, 122 bp, Homo sapiens
tgggcatttgctgacccgagctttggtgagagcttaatccagcattctcaccctgcttttcgcaggagcacagcggtcactcatcttggcaccggcacttctggggaaggtataaatgccac

SEQ ID NO: 235246 - DNA, 122 bp, Homo sapiens
ggcccccttcccggccagacggcgggcaagacagctgggtgtacagcgtcctcgaaaccacgagcaagtgagcagatcctccgaggcaccagggactccagcccatgccatggcggattctg

SEQ ID NO: 235247 - DNA, 122 bp, Homo sapiens
tgattttttcccaagctctaatgcacactcctctaagctgttctacggcatcatcctgcacgaccacttgtgcatctaaaccaacccagccgctgacccccaaaagttggtctgcagttata

SEQ ID NO: 235248 - DNA, 122 bp, Homo sapiens
agcgcctggcacctaagcaggcatttggtaaaactgtgccaaatgagtgagtgcggacagcgtcctagtccttcaccagccccctctcagcagcgcaggcaactggcccagctgtgtctccc

SEQ ID NO: 235249 - DNA, 122 bp, Homo sapiens
acaatgcggcaagcccgccatgatgtccacgtgacaaaagccatgatatacatatgacaacgcctgccatattgtccctgcggcaaaacccaacacgaaaagcacacagcaaagacaaagag

SEQ ID NO: 235250 - DNA, 122 bp, Homo sapiens
aaggcaacatggaggattgcaaagttcctcgtctaagattagcctaggaactcacaaattcgttgtgtgaccttgggcaagtcccctcccttcttggggcttcagagtccccggtttgtaat

SEQ ID NO: 235251 - DNA, 122 bp, Homo sapiens
aatgctgcagtcacaaaagcaggccggccccacacatatctttgcagtgctgggagccaccgctcgtggtcagcaaggtgatctcactgcacaaaactgattacaatcagaaatgctgccag

SEQ ID NO: 235252 - DNA, 122 bp, Homo sapiens
aggggctttcttggaggcacgggggttattgaggggggcaagagaatctcaaccccgatacgtttatgtttcgacttccccgaatttccttgtgcctgcgttttgctgcctgggatccctag

SEQ ID NO: 235253 - DNA, 122 bp, Homo sapiens
ttggtgtctggtgaggatcctctccctggttcagagatggccatcttttcactgtgtcctcgcgtgacagaagggatgagggattactctggggctccttttataagggcactaatcccatt

SEQ ID NO: 235254 - DNA, 122 bp, Homo sapiens
gatgcctagtgtaaggcacatggacgtgctttggtcaaggaataggccgaggcggacatccgggccagagtgactcagcgagtttggggggcaggcacgtactccacttgctatataacctg

SEQ ID NO: 235255 - DNA, 122 bp, Homo sapiens
acttggacagcccttgactctacctacagtatcagggctgtccctggcatgggctctccccgcggtgcgtgccgcccccgccccgggcccccgcacgcctcacctgcgccccccgccgctgg

SEQ ID NO: 235256 - DNA, 122 bp, Homo sapiens
cccccccgctgtcatcagcgctgacgccctggacccacacagcggcggggtttggtttgacgtggctcccaaaggcgagggcggagctggggaaggtgagagcacccaggcatccgcacagg

SEQ ID NO: 235257 - DNA, 122 bp, Homo sapiens
cacgcgcttccgtcactcggcggccgcgggggcgaagcgcgaggccccacacagagcatgcgcatcccccttgacgtttgctgccaccccacggcccaggggaggtagtgccggagacccgg

SEQ ID NO: 235258 - DNA, 122 bp, Homo sapiens
caggccctcgtctgttacataattcgggcgtgaaatcccggaagggggagctcctgagcccgtccagcacccgggattggggtctccccatcacacacccttggtggcagggcctggctggg

SEQ ID NO: 235259 - DNA, 122 bp, Homo sapiens
caattccccagtctgagaagtgatcttaacttcctgcgtggaatcctggaatcaaagactcggcaacctaggatctcagatttaaaagatcagagaatcttaggagaaaagtcacacgcttg

SEQ ID NO: 235260 - DNA, 122 bp, Homo sapiens
cagactcctccccctcaccgtcccaattgtattccctggaagagcagccggaaaagcctccgcctgctcataccaggataggcaagaagctggtttctcctcgcagccggctccctgaggcc

SEQ ID NO: 235261 - DNA, 122 bp, Homo sapiens
ttttttagagatggggtcttgctatgttgcctaggctggagagcagtggatattcaccagcgtgatcccactattgatgagcatgggagttttgacctgctccatttctgtcttggtttacc

SEQ ID NO: 235262 - DNA, 122 bp, Homo sapiens
ccagcttaagctgggctataacctttaaccaggcattgtttgaagtgtcagcagaagggacgctcaaaacagggggacttggggctgctactgctgccgctcagtcaggccccccgagcttg

SEQ ID NO: 235263 - DNA, 122 bp, Homo sapiens
cagaaagccggaagccaacgctggggcagccgtggcgtttaggagagtgacaggcagagccgcccgcgaggtggcccgagacgcagaccggagggcggagggctgggggtgcgaggtaggga

SEQ ID NO: 235264 - DNA, 122 bp, Homo sapiens
cagggccatagcagatgccgaggcccaggaggcaccgagagcgagcgaaggctattagcacgtcatcacctctcaatccccccctctaaacaggacagcccaactgctgttgggaatttggc

SEQ ID NO: 235265 - DNA, 122 bp, Homo sapiens
caggctccactccttggcccgactccatgctgttgcggctctcatctgctgtgggaaactcgctcctcgtggacattttccacgcctctggctggatttctgctcagtagccttcagccagc

SEQ ID NO: 235266 - DNA, 122 bp, Homo sapiens
tcaagtggacggaggatggaacacagagcgcggccgggacaaaggggcaggccagacagccgtgacagagaaactaggcggtccgctcctgggacgcggtctcgggggcgggttcgcccctg

SEQ ID NO: 235267 - DNA, 122 bp, Homo sapiens
ggccctactcacccctcgctccggggtcgcccctgacgcccacccgcggctgaggtcgcacgctccagcctcagtccaccctggaaccctgcatttggcagccacgagagcccatctcccgc

SEQ ID NO: 235268 - DNA, 122 bp, Homo sapiens
tttgttttcctgtccgacgatctcgcgggagttaggcgacaaatcccgcgagcgcagacccggggctggctctgctgctctcgcgatatttgcgcgagcctgcttccttctttcctcccttg

SEQ ID NO: 235269 - DNA, 122 bp, Homo sapiens
gagtagcctgctgttgtgtgtgttgtgaaggatacaaagactgccaagtgttttacccttcgggagctgtaagtgtaggggagggacaggctcgaacacaaataattatggtggaaagtgca

SEQ ID NO: 235270 - DNA, 122 bp, Homo sapiens
taattcccaaaagaattttctaagaccagctctgtgaaacaaagtgtgccactggatgtccgattaaatgaaacaaagattccctataggcaaccttaggggcatgtaacatttgctctcaa

SEQ ID NO: 235271 - DNA, 122 bp, Homo sapiens
agaaagtccataggacgcctctcagtcccctctgaactagttagcatggatctatacaaccgcacaacgatggggattggtgtgtgtgtgtgtgttcaatgttgaaacagatttatctttcc

SEQ ID NO: 235272 - DNA, 122 bp, Homo sapiens
tcgaacccacgcctccgaagagactggagcctaaatccagcgccttagaccgctcggccacgctacctgcacgaaaacttactgtccccgttgtcctcctaagagactagaagtaaggaatg

SEQ ID NO: 235273 - DNA, 122 bp, Homo sapiens
ggcagcgctggaaaaatcgcacgtgcagatcccgcaagaaatccagccgctctccctcaccgctccctgctagcctctcatcctcagtggcttccatgctgctccggaagcgacgtccgcct

SEQ ID NO: 235274 - DNA, 122 bp, Homo sapiens
tactattatgatccccattttacagatgaagaaactgaggcacagagagggggaatgattcgtgcaaggtcacacagctagtcaatgaaggtgcaaggattttaactgaggctgactggtgc

SEQ ID NO: 235275 - DNA, 122 bp, Homo sapiens
ggtgatccacccgcctcggcctcccaaagtgctgggattacaggcgtgagccactgcacacggccttcacagcacttttgagaggcttaaatgacatagtgcatggcactgccatgtgtggt

SEQ ID NO: 235276 - DNA, 122 bp, Homo sapiens
cctaaaatgaatttgtctgatgttggtgacctcggaaccattttctccagttgattagcacggccagccagtcaataatttcaggtcactgttggccttagaggaagagcccaaaggcagca

SEQ ID NO: 235277 - DNA, 122 bp, Homo sapiens
gctgtacactggcagtccccagctgtcatcaaactgacaaatcctgcagagatgcaccctcgaagagatgagagggcaccacctcagtgacacccacctacagaagcgttagctctgagagg

SEQ ID NO: 235278 - DNA, 122 bp, Homo sapiens
tcatcacatcaaagagaaactccacgcccactaacagtcattctctatttcgtttgcatgcggctatccagttgtcctagcaccatttgttgaactatagtttcccccattgttctaatagt

SEQ ID NO: 235279 - DNA, 122 bp, Homo sapiens
ctgaggtccagtgggaatcatccccccagctggggctttgcacagacgccactgtgactccgcagcaccgagaccccacctcccccaggtctcaatcccagcgctcaggcagcccgatttcc

SEQ ID NO: 235280 - DNA, 122 bp, Homo sapiens
cctctttggggccagccgatccagaaatccaagccgggatttagtactcaccaacagcagcgtgttcagccggggcgggggggggggcgtaagcagtatagggtccctcaagggagggggag

SEQ ID NO: 235281 - DNA, 122 bp, Homo sapiens
ttatccacgcagttccctgcgtggcattactgcggcctcaccgagtctgggcggagtttgcgtggcctctgggaccggcagagtccaggggtgctccgggctggctatttcctccctcctcc

SEQ ID NO: 235282 - DNA, 122 bp, Homo sapiens
ctatgaagtgatcgtagggcgttgctggtacaaagtcaaaacctgcatcattgggccctgcgcctctatgtctgtggggagaagggattgttgatgatgtgatagctggaaaacataccatt

SEQ ID NO: 235283 - DNA, 122 bp, Homo sapiens
ccccattccccgtgagcctgtgggaaaccctgtggccgtccccagccagcagccaagctccgcctggaatggccatgtgggctgcagcgccgggcggcctccctctgtctgtaatgaggacg

SEQ ID NO: 235284 - DNA, 122 bp, Homo sapiens
tgtgatcagggaagtcagcccaggtactccagaagttcccagggcgagcacctgagccagcggtgggggcaatggatgggaagacttccaggagcagtaacctacatagctgcaggatgcag

SEQ ID NO: 235285 - DNA, 122 bp, Homo sapiens
ccaggggcggagcgccgggggcggggcctgggcagagggcggagctcctgggttgaggggcgtgcactggggtggagcttgaaatgagggattgttgggacagagtccgcgggtttgaaaaa

SEQ ID NO: 235286 - DNA, 122 bp, Homo sapiens
tcccctaatgaattaccctgttgccttggtcctcttggtcctccaaagaaccattgaccccggagcggcccgtgtgcgacctcgggtagggcgggcttggctgcgccgagtgtggccctgga

SEQ ID NO: 235287 - DNA, 122 bp, Homo sapiens
agcttccccatacccccgcaggagtcagggccaagttggacctgtgcttacaatgactcacgggccttttccccacctgtctacccaacagccaacccaggagttaaacccacagcagcctc

SEQ ID NO: 235288 - DNA, 122 bp, Homo sapiens
accaacatcacactggctggcccacgcaggacaggacagggccaaaacagtaatgggatgcgcgaacctctaaagggttactggaattcgggatgctgtggatttaggggattgctttgggc

SEQ ID NO: 235289 - DNA, 122 bp, Homo sapiens
caacacagttgccaagacagtcgcagcccggctgaggctgtcggtgacggccatgtttaccggcttcagacttcccgcacctgaaggggcggaggcagtgccgtaaagtagcgctgcgggtt

SEQ ID NO: 235290 - DNA, 122 bp, Homo sapiens
acgaaataatcattttagacagagaaaagaaacttagtagagaaacattttagaattacccggctgtgttgcatgaccatttgaggtttgtggttatgcatataaaatgaaaattacctcca

SEQ ID NO: 235291 - DNA, 122 bp, Homo sapiens
gtaaatgcccagtaactgttagcccttatttaatttgagtaacagtagctgccatttatccggaacttactatgggccaggtagtggattctagagctgtctgagttcaaagcccatgtttt

SEQ ID NO: 235292 - DNA, 122 bp, Homo sapiens
cccctaccccaaagcaaacgctggagaacccggaaattgcccagaacgggaaccgactttcgcgccaaccgcgcggccgcgcttgccttttccggtggaagtgacgccatcggcagctgcag

SEQ ID NO: 235293 - DNA, 122 bp, Homo sapiens
ccagtattatagaatataagtgaaaaaatggttctgggaaattttcgatagatttcctggcgaatgtctcgagtttggataaatgactgagttaaaagaatggtccattcttaatttgtgcg

SEQ ID NO: 235294 - DNA, 122 bp, Homo sapiens
ggcagccggccttgtgagcacaaagggagtagaaaagaaatactactcctgtctcaacatcgctcactactgccccaaggttcagcccatcggggacatccccatcattgacaatgaacgct

SEQ ID NO: 235295 - DNA, 122 bp, Homo sapiens
accttgcttcttttgcaattctgcttctcaacatattggcccatctactcccagaaagagcgtgcacttattatattcataaatcccacatgtgcttactgctaatcaccacagattctctt

SEQ ID NO: 235296 - DNA, 122 bp, Homo sapiens
gctgggaatggttgttcacgcctataatccaagcattctgggaggctgaggcaggaggatcgcctgaagccagctggagaacagcccagacaacatagcaagacctcatctctattttaaag

SEQ ID NO: 235297 - DNA, 122 bp, Homo sapiens
cactcatcaattaggtgctaggagctttgtccacatccactgtttgggtgcaggggacaacgctgtggtgaaaccatacaaagccactgctctctggagcttagatgcccaggcagggatgg

SEQ ID NO: 235298 - DNA, 122 bp, Homo sapiens
ttgtgtgctgcgtgcaccttctaggatgagcctggaccctggctggcctcatacttactgcgtaggctgcagacccgcaagtgcttctgcaaggggctttgcttctcctcataacagcggca

SEQ ID NO: 235299 - DNA, 122 bp, Homo sapiens
aactgcttctgtgtgagccctgggtccggaagcgggtagctgggcgactcatcctgcctgcgttttcctagggaaatcggtgtgtttgacccagaaaaaaaaaaaaaaaaaaaaaaaaaaac

SEQ ID NO: 235300 - DNA, 122 bp, Homo sapiens
gaggcctggtctggaaagctcacaacctccacccagatgctttccagcctcggggatattcgtactagcagtgacactagccagcttcctctaggctggctctgatgttggaagacaagcac

SEQ ID NO: 235301 - DNA, 122 bp, Homo sapiens
gggaggggaggggagaggacacagcaggctggtagggcagctttgaatatggctcagaggcgaggcgagcaaggtctgaatcacttctgctccaagtccaggcccacattacttcttatacg

SEQ ID NO: 235302 - DNA, 122 bp, Homo sapiens
ggggagttggtttttgcaaagtggtataaagaaagattgagagagtagaaagaaggaagacgcttctttgaatctcatatggaaattagggggtaagtcagctgtggggcgtatggaacaca

SEQ ID NO: 235303 - DNA, 122 bp, Homo sapiens
cacccctccctccacggacagcctgccgagagcatccagtgggcacgagggacgggttcacgatgccaggactattcgctcctccaaagaccagggcttagcgccggagagcgtatctgcct

SEQ ID NO: 235304 - DNA, 122 bp, Homo sapiens
ctaaaaaccatgtgtggtgattgccatttatcctcttattgacaacctagttcatttccccgagagagtgttttgtgtggtctgaagcacctgccagtctatctctgctgtaccctcccaag

SEQ ID NO: 235305 - DNA, 122 bp, Homo sapiens
cttgtaatacatagttagaggtggtccttttcagtttcaattcatttcctatagataatccggctttctaatttggtagtttgaaagataatgtaaaggctttctaatttggtggtttgaaa

SEQ ID NO: 235306 - DNA, 122 bp, Homo sapiens
tgaactgattcacaccgatgagcagctgccgacagtgacagcgtccagcattcctctgggcgccttcagttagaccgagagagacaggagtgggggtgttttagttatcaaagctggctccc

SEQ ID NO: 235307 - DNA, 122 bp, Homo sapiens
ttgctgggagatgccatgtaaagtttcctgatcaatctggagacccagtgtaccttaaaacgtagtagagaagtacagaaacataaaaagtacattctagacgtagtagagtgtgggtttcc

SEQ ID NO: 235308 - DNA, 122 bp, Homo sapiens
caggctggagtgcagtggcgggatctcggctcactgcagcctatgtcccttgacagtccacgggttaaagagattctcctgcctcagcctccccagtagctggattacaggccccgccacca

SEQ ID NO: 235309 - DNA, 122 bp, Homo sapiens
cttccctgtctccaccccccacattcccgtttgtgagccaagccttgcttttgcaccggccgggctctcttgcctggaaatgcatacccatctcaaacctgggctttaaaatcacctcctct

SEQ ID NO: 235310 - DNA, 122 bp, Homo sapiens
ttctcttgtttaaaacaccacgaccccccaaccctcagacctagtaaggaattcctatgtcgttagttcccctcatgtattgcttctgaggctcttaggccagtgtgtctgggaaagtttca

SEQ ID NO: 235311 - DNA, 122 bp, Homo sapiens
cttctcccctggctgttcgcgatccagcttgggtaggcggggaagcagctggagtgcgaccgccgcggcagccaccctgcaaccgccagtcggaggtgcagtccgtaggccctggcccccgg

SEQ ID NO: 235312 - DNA, 122 bp, Homo sapiens
tttttaagcgtttgtttatggacaaggacagcatttgtgtacgttaccgaaaatcataaccgagcccaactagaaaaaaaggaaataaagccaattccgagttttctggcgcttggcctggt

SEQ ID NO: 235313 - DNA, 122 bp, Homo sapiens
tatttcctcctttcttgcctgattctctctccttcccattttgctccaagataaccatgtcgtatatatatccttccatatttttcttcatacttgaatgattatcctatctgtttttattt

SEQ ID NO: 235314 - DNA, 122 bp, Homo sapiens
actctcacggagaggcggagtctcttccacaccctggaatctgggcgggcctgtgactcacgatggccaatagaatgccctgcaagtgacgtcatgcccttccgagccttgcagcttctgct

SEQ ID NO: 235315 - DNA, 122 bp, Homo sapiens
tcatgcctttgcactccagcctgggtgacagaacaagatgctgtctcagaaaaaacgaaacgaaaaaaaaattgcttgacaaaactgtgtgggaagcagggagaaatggctcaatggatatg

SEQ ID NO: 235316 - DNA, 122 bp, Homo sapiens
gcctaggcgcgcggtgcaatgtgggccagcaaaaggcgaggctggccccgccccttgcaccgcccacgtggccagcgccacctgcctcattgtgcccaggagttctccaaacccgcgctgcg

SEQ ID NO: 235317 - DNA, 122 bp, Homo sapiens
gccccgcctccgtcattcccagcccaaaaaacaaaggactgcattacccagtggcctcctcggtctcgacacatatttgcacatgcgcagaatctctcctacgcccctgcccactcctcagc

SEQ ID NO: 235318 - DNA, 122 bp, Homo sapiens
cccagcaaggagaaagcgagccaaggcaaacgccgacagaagagaacgataaatccgcggcgcactcggcagaacgtacaccgcaccgcataatttagcggggcaatgccgccgggagtcca

SEQ ID NO: 235319 - DNA, 122 bp, Homo sapiens
tgagcggcaagatgggatggcaccatagcaacctcggacacaacctagggactggagttgcgcgtttctacgtaagagccggagctgccgctcaagtccctgtggtggtggaactcccacat

SEQ ID NO: 235320 - DNA, 122 bp, Homo sapiens
gctcacaggagaggtgggcaagagaactggcatgggagccaaggtcatcccagggaggtccgagtcagacaggctcggggccatgaccaaacttctgcagtggatctggtgggatcttgttc

SEQ ID NO: 235321 - DNA, 122 bp, Homo sapiens
gtctcccactcctccagggacccggggtcccctttcgtcagggtcacttctcctgaacgccgggcagaacctaactcctctgactagaaaaagatcagaaaaattgaggccactgacaccct

SEQ ID NO: 235322 - DNA, 122 bp, Homo sapiens
cagcaggctcccacatacattgtcctccagacctgcactagaccagcagtgtgcttgctacggagaaaggccactaggtagcctttccccatgactccggtcccctctgctccgaggtccca

SEQ ID NO: 235323 - DNA, 122 bp, Homo sapiens
gaacactgccggccacagcactgccctgtcacccaaattttccctcacaccctgcgctcccgccaccacaggaagtgacaacatgacgaggggtggtactggagtccaggtgacagttcctg

SEQ ID NO: 235324 - DNA, 122 bp, Homo sapiens
ctaaggattggagcagacaggttgttattcggtgcaagctggtgcttagtgataatccatcgatcatctgattgatcctattgacctcatcgcagagtcagggtgcagctattgatatttga

SEQ ID NO: 235325 - DNA, 122 bp, Homo sapiens
ttgatggtaaattccataaggagagcaattacacaaaagtccttccttcctggagagagccgtggtttgtacttacggaactgacacttcccttgatatgactggtcttgttcatggtgcct

SEQ ID NO: 235326 - DNA, 122 bp, Homo sapiens
caatgctaaacattattaatgaggtattttgcattcttttttaatactaagtctttgaaacgaggagagtatttggctcttacaaatcaactcagtttgaaccagccatgtttcaagtgctc

SEQ ID NO: 235327 - DNA, 122 bp, Homo sapiens
cgacgtggctatatttcaataattggagcaagaattttaggtaggtcaccgcccgcagcccgtcctctctgagcccaagccaccccgtgcacttccgtttagtatgtctactttgagatgca

SEQ ID NO: 235328 - DNA, 122 bp, Homo sapiens
aggagaatgaaacacacacatccacagaaacagagaggcgtaggtggccctgccgttgaccgcagcctctctggacaggcaaggggagttggcgcaggtgaggactcagacgacgtccaccg

SEQ ID NO: 235329 - DNA, 122 bp, Homo sapiens
tctttgatcaaactgaaaagagtacggagcaaagtagaatcctgtcctgaaacgtggaaacgcacaacaaataacaatgaggaggagaaggagattaggatcattttatcagtcccctattt

SEQ ID NO: 235330 - DNA, 122 bp, Homo sapiens
ggcagcccgggagcacaggagtcaaagcaagaccaggagcgggttgctgagaggacgccacgctgactggggatcgagagggtggcttccttcaaacagagaaaggaaaaagccccttgaac

SEQ ID NO: 235331 - DNA, 122 bp, Homo sapiens
cgtctgccacgaggcagagcctgtccgcacacttgccgagcactcatacgctgtttcttccgtagctgaagcttacagaagtcagcctgtacgtgaacatgatggcagttcacctggtaaca

SEQ ID NO: 235332 - DNA, 122 bp, Homo sapiens
tgtgctggtgattttgagtctgcgaattccgggcgtggggaactgccgggagttcaggtacgagatgtgctgcatggccttatccaattccccgaggtcttctccctccaaggtcaatacca

SEQ ID NO: 235333 - DNA, 122 bp, Homo sapiens
gcggtggcggcgacaggagggtccgggcgcggggatgctgcggcctggaggccctcgccccgacctgcaggcggtccctgccccccaggcccagaaaccacaccgaagtcctttcttctttt

SEQ ID NO: 235334 - DNA, 122 bp, Homo sapiens
gcccggccaataattttcaaaataagaaaatctagcagtgcgcatccaacccaaggccctcgcagccagagcagaggcaccagggcggccaggcgaggcgctgcgaggaagctggtgcttct

SEQ ID NO: 235335 - DNA, 122 bp, Homo sapiens
tgtgtagtgattacacttgaattgtgtacttagtgtgtatgtgatcctccagtgttatcccggagatggattgatgtctccattgtatttaaaccaaaatgaactgatacttgttggaatgt

SEQ ID NO: 235336 - DNA, 122 bp, Homo sapiens
gcgccgcgttaacaatgaagcagagttcgaacgtgccggctttcctcagcaagctgtggacgcttgtggaggaaacccacactaacgagttcatcacctggagccaggtacggtcaggccac

SEQ ID NO: 235337 - DNA, 122 bp, Homo sapiens
aaacttggattctttagataaaagttatcttcttttttttcagacagagactcactcttccgcccagactggagtgcagtggtgtgatctcggctcactgcaacctttgcctcccgggttca

SEQ ID NO: 235338 - DNA, 122 bp, Homo sapiens
aagggtagaggggaaatctagtgccctctattttcccattcggtatctaagctgacattccggatgaaaatctccagagggctggagctgaaccataattatccttttttttttctttttaa

SEQ ID NO: 235339 - DNA, 122 bp, Homo sapiens
ccagcgtccaccagggagcaggggcagcagagcccttctccccagacacccttgtgtcttcggaaaatgccaggtccccccccagctgctgttctcgtctttggaggacccggctttactgg

SEQ ID NO: 235340 - DNA, 122 bp, Homo sapiens
gcgcactctccttggaccctggagagacgcttagggatcagttttctcctcctttcttcccgcgatcgcgcggctctctggaagccttcccactctattattgccgaggatccccctcctag

SEQ ID NO: 235341 - DNA, 122 bp, Homo sapiens
ccatcaactgtgagtaccagggtgggattcatatattgttaaccagcatatgacctcccccgccagcccaatcactccctgcctggtccagaaccctgcacacaggaggaatgtgttgctgt

SEQ ID NO: 235342 - DNA, 122 bp, Homo sapiens
aaaatggcctgggagggaaacgggtggcaaatgacttgggaggtggtggttgggcggggccgtgggatgaactgtgctcacgtgaacgacagactgcgacgttcttcagtatttttcaaatg

SEQ ID NO: 235343 - DNA, 122 bp, Homo sapiens
actgttggaccccgcagcgcaggagtggcagggcccgtctgcagtgcaggagtggcagggcgtgtccgcggtgctgaccggttggtcttgggccctggcgctgtgtccccgcacaggtctcg

SEQ ID NO: 235344 - DNA, 122 bp, Homo sapiens
gccactcaaacaagcatttgttgaggatgttgagggtgacaaaggcagcgtttggccagccgctctgacttcctgggcctccaggccgtccaggcacaagctgatctgagaggagacaaaag

SEQ ID NO: 235345 - DNA, 122 bp, Homo sapiens
tttgtttagtgagaacactttacgtccactctctagcaattttcaaaaatacaatatagtcgaccctttaacaacacagggattaggagcaccaacccccaacacagtcaaaaattgaaaca

SEQ ID NO: 235346 - DNA, 122 bp, Homo sapiens
agcgtccactggccaaaccgccgaccctgcccacccgagggccgggcgcaccgccgcccccggcccagctccccagcccagcttcccgccgcccgccgaacctgcagtgttgcgctcccgag

SEQ ID NO: 235347 - DNA, 122 bp, Homo sapiens
ggtgcgggcatgggcgcgggggaggcgggtgcctgcgaaggccgggcggggcggcctagtcgcggccgtttttaggccgcgtcgttgctgcagcaacccgggtggggtggggtgggactcca

SEQ ID NO: 235348 - DNA, 122 bp, Homo sapiens
caggttgggcaagcagagtcctgggcctcagcctccaggtgtccccatgggtcttggttgcggtgcacattcatgccctttgccctctttcatccccatctggctctcccttgcagtgcagg

SEQ ID NO: 235349 - DNA, 122 bp, Homo sapiens
ccacagtttcccagggaggaaacgcagagcctgaactgcaacagagcccgtccagcttcacggcccacgcgcctcactgtgctcggctgcctcgatcaagtctatctacatccacagaacac

SEQ ID NO: 235350 - DNA, 122 bp, Homo sapiens
aggctgtccctggatgatggttaacaggcagaagaggctgtccctggatgatggttaacacgcaggacacaaatgcttagatcacaacacagaggaaacggccatcctcgaacccatccaaa

SEQ ID NO: 235351 - DNA, 122 bp, Homo sapiens
ccactcagacacgcggccctacccctgccagttctgcggcaagcgtttccaccagaagtccgacatgaagaagcacacctacatccacacaggtgagtgagtctcacctgcctgtgccccct

SEQ ID NO: 235352 - DNA, 122 bp, Homo sapiens
cgtcgctgcccctgcagcccagactctggaccttgcattctggttcctgtacactgttgccgtggtcttgagagccctcaggtcatctagcgtgggctgccgcctcctcgtcagcttccagc

SEQ ID NO: 235353 - DNA, 122 bp, Homo sapiens
aggacattgatgttatgtgttcctattatactgtttataataggaaatacagtatttttccgattttaaagtctcaaagcaacaatgagaggaatctaagaagatgagcaagagaggagttg

SEQ ID NO: 235354 - DNA, 122 bp, Homo sapiens
accgcacctcgtccgcgcggccgccagagggcgcccgtcagcgccggagcccgcggcggacgccccagccgagcccagccactgcctggtggagccacagggcacccgcccggaaacaccgc

SEQ ID NO: 235355 - DNA, 122 bp, Homo sapiens
gggttctggtttcccgaatcacttggcaaataaccagcaggtgggcagatgtcttttttgcgttcctacggacgcgtaggcaagttcgatgcgccggagtgaacagccagggtcccatctct

SEQ ID NO: 235356 - DNA, 122 bp, Homo sapiens
tctgtgtagttgagtttggtttacaaaagtagtagaatgtatttatttatgtttaccttacgacatttattcatgatgccaagggtgtgagttttatcctgctgtagacctatattactatt

SEQ ID NO: 235357 - DNA, 122 bp, Homo sapiens
gaaatgaagtccggctcggaaccacacacggattggcgagcgtctgggtgaagggcggagcgagggagagaggtgcttctgtgattggtggagagatatctcagtctggacgcagatttgag

SEQ ID NO: 235358 - DNA, 122 bp, Homo sapiens
aacaatcatgaatgtgctggtgttaaagaaccataaccgtctagtgaattctgaagtcagcgtagcccgaagagacacaggtggctgcaatttaataccggtgtttaccagctgtgtgattt

SEQ ID NO: 235359 - DNA, 122 bp, Homo sapiens
ggggctgggttgtttctggacagaaagtcccatctgtgtccagggggccgcgtctgagttcggggcatccacactggcacgctgttttgctcggagctgggacataacacgtgggctgtgtg

SEQ ID NO: 235360 - DNA, 122 bp, Homo sapiens
aggcctgaagtgttatgttccagttcttggcatgcaaattactcttcatcacttgtttcccgacacaaatgccacctttccagacaatctaaagtaacctcaaaatcatttgctcgcacatc

SEQ ID NO: 235361 - DNA, 122 bp, Homo sapiens
taaacttcttgaaagagcttggaacaaaattgccactggggaccataagactaactgctgcgcagccacagaactgaaagatgaactctgagctgttccacctggcagggaagcaaggctta

SEQ ID NO: 235362 - DNA, 122 bp, Homo sapiens
ctccgaggctaggccgctcccgcaggacgcgtcctccaatcccaggccgcgctcgcagaccgcgcccctccaacggcaggccgctcccgcaagccgcgccctccaatcccaggccgctcccg

SEQ ID NO: 235363 - DNA, 122 bp, Homo sapiens
gcgtgccctgggaggggaacacagcccctgagggcggggaccttgctgggggcccctcagcgtctttctgtgcctctgaattgccaatactgtccttgcatctctgagtctacgtgcacgct

SEQ ID NO: 235364 - DNA, 122 bp, Homo sapiens
ctcatcagggcaaagtttttcgaggtttttgacaactccatgaaacgtcgtgtctacgagcgcttgctctatgtgacctgttcgcagaactgggaagccatggggaaccacttctggatcaa

SEQ ID NO: 235365 - DNA, 122 bp, Homo sapiens
acagttgaccactttcttcatttggcttccaggacatcatgccctcttgactttcttccccgttcattggcatctcagtattctttgctgttttctcaccgccttcttgttgctggaatggg

SEQ ID NO: 235366 - DNA, 122 bp, Homo sapiens
gaactgagtggtccagggcttcaaggctcagagggctccggttgcccccagccctcgttccgtcccctgctccacccagtgctgcttgccatgtcggcatcaggcctgatctgaaagcttcc

SEQ ID NO: 235367 - DNA, 122 bp, Homo sapiens
ggacgtagccccagaggagcgaatctggaccaagcccaagacaggctgaagctactgctgcgctctcacctccggcagtgacagcgagcgccgccgccgctctgcgcggggccagccaggcc

SEQ ID NO: 235368 - DNA, 122 bp, Homo sapiens
aacggctatgaaatcatcaagatttgtggatcatcaataaaagaaacatcctgataaagtcgagaaacagaatatttaaaaagtttaaaatagaattttgaactgtgacactgttacttctt

SEQ ID NO: 235369 - DNA, 122 bp, Homo sapiens
ctcctctcgggcgcagcggtccttcagcccagggcaggttcctccctttcctactcggaacgtggcaaagataccccagtcccagcccctccagctgagagctgttgcccaaggtcgtcgct

SEQ ID NO: 235370 - DNA, 122 bp, Homo sapiens
actctctagcttcctggacaccaacaggcagtgggggtgggggcaggcagtgacctactccgcttgccactggctggtcactgtcttcgccggtggagagacagccgccatggcctggacag

SEQ ID NO: 235371 - DNA, 122 bp, Homo sapiens
aaggtagagaaataaggggaaatgatatttctttaaagaacagagatccctgaatagcaccgggggccgttacagcccatgaggacatctccgagtccttctatatgacactagggaccccc

SEQ ID NO: 235372 - DNA, 122 bp, Homo sapiens
tgtaggagcctcatgtgagtggcagcacacagcgtccgtccttccgtgtttggcttttcccgctgagcccctgcctcaggtccaccccgtgacagcgtgggtccggatcccccaccgtatga

SEQ ID NO: 235373 - DNA, 122 bp, Homo sapiens
cccttctttggcggggagtcccgggcggccgcaaggccgcagggcccgtttgagccccgccgctccacaactttcttgttggtaaatacagggggcatttcttcagatcttaattgattttt

SEQ ID NO: 235374 - DNA, 122 bp, Homo sapiens
cacgtgacattgcagctgtgccgtggcgttggcaagactgtgacacacggcggccccacgcggtgtccactgcacagtcacatggcattgcagcactgccgtggcaatggcaagacctgtga

SEQ ID NO: 235375 - DNA, 122 bp, Homo sapiens
gtaaagatggcgctgagagcacgagcgcactttcgcacacccccattacccacaatgcagcgggaataagggaggctcagtttctgccaggagctaatatggcttccttagttacaccgttc

SEQ ID NO: 235376 - DNA, 122 bp, Homo sapiens
gccacctgggcgactacgtaggcctggtacaggaggcaggagttgcctctgtccccactgcgctttccttaatcgaagagcgggtagatgccggccaagcaaagtgctcgaaagtgtagctg

SEQ ID NO: 235377 - DNA, 122 bp, Homo sapiens
aagtagaaattcttgtttcttaccatagctgtgaagaagacctaacccttaagaaaggtacgtatattaaataaataccttgttctaaaaactaccaattaaaatacaatgattctgcatta

SEQ ID NO: 235378 - DNA, 122 bp, Homo sapiens
gcagcgtgaaatctctcttaagcaaaattaaaattcctcctaaatactaaacagcagaagcggccttttcttttcccccgatttgaacctgtctgccactgcgttattgtttattctcttcc

SEQ ID NO: 235379 - DNA, 122 bp, Homo sapiens
tagcctggagaaaaatcattgccctggctctgggttgcattttccattttaattaaaattcgtatttgtccattctgtccaggtcctggccctgtggtctatgctattttgcatggcaaatg

SEQ ID NO: 235380 - DNA, 122 bp, Homo sapiens
ggggcctctaccacccttcccgcctcagtgcttccggtccgcctgccggaagttttggagcgccggacaagctgaggtccgcgactcgtcgctaagattccccaaaactgagatttcaagaa

SEQ ID NO: 235381 - DNA, 122 bp, Homo sapiens
gcctggagaagatcatttctaagtattagtctcagagtgaacatccaagaaaccctgacgcgaaaatgccagaaaagcccgaaactagaggaggaaggaggccatcattttaaaatccttgt

SEQ ID NO: 235382 - DNA, 122 bp, Homo sapiens
aatgtgtattacaactttgtacgtgaaagattgaaaacaaactcattctttcaacaaatacgtgtgtgcctgataagtgcaaagtagcgtgtaaagctctattaacttggccagaaatctat

SEQ ID NO: 235383 - DNA, 122 bp, Homo sapiens
ggtcatccagccctcccctgagtctttgttggaggctggccgaggggtgtaagcggcgctcggggttctcctgagcgatgaaggctggccgggccttcgctccaacctgatcgttcctagct

SEQ ID NO: 235384 - DNA, 122 bp, Homo sapiens
agaatggcagggggtcctagaactgggggctggaaggcccatttaaaaggtcatccaatacgataatttttagtctggagcacacaagcagagttcaggtgaactccctggaattatttgca

SEQ ID NO: 235385 - DNA, 122 bp, Homo sapiens
aaatcgtggcagggtagtctcaaccatttccaggctctggtcccagacaccaaagcatgccgccccagggttagggccctggcggggccgggagcaccagggactcactgcggcttgtgcgg

SEQ ID NO: 235386 - DNA, 122 bp, Homo sapiens
agaagatataaatccatacctgctaattcactgacagcatagggctgtctgttgtttttgcgcaagttggtgtgaacaaagttcacaatatctggtcgaataggagccttgaatacagcagg

SEQ ID NO: 235387 - DNA, 122 bp, Homo sapiens
ctttgatataaacatattaagtaatacaaagccaacaaatacaaagcttggattgaacctcggtatccaaagagaatactgtgaggaattctgactttgctagtcaaattagctgtcttgct

SEQ ID NO: 235388 - DNA, 122 bp, Homo sapiens
ccaattatccacaaaataacattccaacacacagaaagagcaggctgttccttggccacccgtgggaagaaaggcagaactaagatcactggaatggcctctgtcccctgacatctccagcc

SEQ ID NO: 235389 - DNA, 122 bp, Homo sapiens
gtcgtcggtaagtggcccgggttagcttcctcataaggcatcgtttccgtgggtggggtccgtcagtgcccaggcagctggcactctcagcctttgctgcctgctcacttcgggggagtccg

SEQ ID NO: 235390 - DNA, 122 bp, Homo sapiens
ggactttaggtgaccttttgctgagggtgacgtgagaaccaccagtgagagccaggggggcgggaggggagtcattccaaactggggagagccgtgcacatccagcgtggaagtgggtggca

SEQ ID NO: 235391 - DNA, 122 bp, Homo sapiens
gggatccggtgtaaataattctgagcagctccaggtcctgagcccagcaagcacgtgctgcggcagggcgcggggagggcgcgcttcgcggaggaagattccgggcggcccgaacgtgctcg

SEQ ID NO: 235392 - DNA, 122 bp, Homo sapiens
ggagaatagagagggagtcaccagaaccagcttcctggctcctcttcctattggatggagcgctcctccccagacaacccagaacactgctgcactcacgcccaggacaacctctcggggag

SEQ ID NO: 235393 - DNA, 122 bp, Homo sapiens
ccaatgtcagccgcggggacgagcgcaggccgcgggccgccactgccctagccgcgccgacggggaggcggcctcttatatggaatttggaccccggcgctcccctccaaggctggagtccc

SEQ ID NO: 235394 - DNA, 122 bp, Homo sapiens
agccggacccttgtcctggccccctgcccaggctcctgcgtgctccgctgagcccgaaggcggccaaagccccccagtgacacccccctctcggcagagccgagagactagggcagagaagg

SEQ ID NO: 235395 - DNA, 122 bp, Homo sapiens
caaaatcgcagtcagacttttccttgaagacactctggtagcctcactccttcagctcctcgcggtgtgcggtgtgcctcctctggcttggccctgcagtccctgtgctccttggagctctg

SEQ ID NO: 235396 - DNA, 122 bp, Homo sapiens
cagtctgcacctggtaccggcaaagggaatgccgacggtcgcgcgtcgccgctggactcgcgactagccaagcactccccactagagggcagtcccgtctagctcggttgggacgcggctga

SEQ ID NO: 235397 - DNA, 122 bp, Homo sapiens
cctttccttggttcctttcttattgtgctctgctccgccggccttggtgcgaggtactggcgccttcctgtccatcttggagcctgaaggaacagagcccctgctggcctcttggtcttttc

SEQ ID NO: 235398 - DNA, 122 bp, Homo sapiens
agccaccgtgcccagcccacaaaggtcttaactcagaaacattagctactcattgttagccgtaattagttcttatttagtattttcttctgcatgcaaaacttcagagaaaaaaatgggtt

SEQ ID NO: 235399 - DNA, 122 bp, Homo sapiens
tcagacaccgtcaagctggcgtcctggtgctccctgcagcattctggccgagtggaaatccggcctctgcccctacagaagtcaacgggaacacacgatctcccagcacttagcactcacac

SEQ ID NO: 235400 - DNA, 122 bp, Homo sapiens
ggtccttgcttggcctccgtgggcattttcagtgagggctaaaccagatgccttgtctaccgcaaagggcacttgttggatcagcccgagccatgctaaatcaggcagcttctgagcaggat

SEQ ID NO: 235401 - DNA, 122 bp, Homo sapiens
ctcattgtgtccgccattttggggcgacaggcagaagctgagggcgaggagcctcagccgcggcgcacgccgggaaagggggcggggcgggaacggcggagcaaggcggggaggcggggtgg

SEQ ID NO: 235402 - DNA, 122 bp, Homo sapiens
ataaagaggtggccgatcgcaaacgctgagcacttcaaaactctgggcagagcgcttccgcgcctctcctgctatttcaccctggccacaggctagccgccgaggccggtcatccgctctct

SEQ ID NO: 235403 - DNA, 122 bp, Homo sapiens
tccagcccagcttttccccaaccagtgggttccctgagtccagagcctatgcccctagagcgttttgggcgccgcttcccccttgccccagggaggcgtctagaagagtatggtgccttcta

SEQ ID NO: 235404 - DNA, 122 bp, Homo sapiens
ccggtcgggaggagatcctggagtgccaggtgatgtgggagcctgacagtaagaagaacacgcagatggaccgcttccgggcggctgtgggcgccgcctgcggcctggcgctgggtgagagt

SEQ ID NO: 235405 - DNA, 122 bp, Homo sapiens
ggcgtttaggtgctctgatgtagaaaagggagccagcccgccacctgtgtgatgtgtggccggtgccccacagtttcctgtccagggacttggctgatggtgcttttccctactgagatttg

SEQ ID NO: 235406 - DNA, 122 bp, Homo sapiens
ctgtggccaagggctgaggccacactgagctggaggagaacaggaagctcggcagctacacggacccaaggtcgcaagtgaagaccccctgatagcgtccaggacctacgagagtgcaggag

SEQ ID NO: 235407 - DNA, 122 bp, Homo sapiens
cggtgcgccgggccgcgggcgcgcaaggaggggcgagagggtggggaggggcggggccggcgtcctcgtcacttgataaaacgcctgcgagtctccagagaacaacgggctcattcagcggt

SEQ ID NO: 235408 - DNA, 122 bp, Homo sapiens
ttctcccttatagtcagggctctgccctttactactcactttcttgtttgttgtcttaatcgtgggttacaatgcttctctaagactaacaggaagacacttttatttccattttgtgaata

SEQ ID NO: 235409 - DNA, 122 bp, Homo sapiens
tctgttcactgaatgctggtgtcacctcaccccactgtggggggccagtgaaggccccatcgagtgcattccagatgatgtctctgctgcccccgcctctctctggcagtgaggaagagagt

SEQ ID NO: 235410 - DNA, 122 bp, Homo sapiens
tctcgtgatccacccgcctggacctcccaaagtgctgggattacaaggcatgagccactgcgcctggcagttttgtgaacttgaactgtggactttatctgtcctgattgtgtttctcattc

SEQ ID NO: 235411 - DNA, 122 bp, Homo sapiens
tggatgctgttaaaatacctatccagagaaggatctgcttgtcacagagaaatctcgaggcggcagcctggcactgccactgagtgtccagctctggattgcagttgccttgtctgcctgtt

SEQ ID NO: 235412 - DNA, 122 bp, Homo sapiens
tgtcccatgaactgagcgatggtgtcccgtgaactgagtgggggtgtcccatgaactgagcgggggtgtcctgcgaacttagcgggggtgtcccgtgaactcagtgggggtgtcccgtgaac

SEQ ID NO: 235413 - DNA, 122 bp, Homo sapiens
cgcgtccccgctatccgccctaggttaggtccctacggaaggacgcggagcctctgagggcgggtgagggcagggagagaaatctcgccccggctcggagctcccccgggagccaggacagg

SEQ ID NO: 235414 - DNA, 122 bp, Homo sapiens
atttcctcagccaggaagtttgcttccctcaccaaggtattagctttaaccagctgctctcgcagttttgccaggctttgtcggaagagttcatccctgcagtgtcatagaaaagggaacga

SEQ ID NO: 235415 - DNA, 122 bp, Homo sapiens
actgcgggccggggagaggaactgtcccgagaccaccctctccaccccccacagcccttccgccctcacctgctcctgggacagccagctcccagcgcccggcccgcccggtccccgccccg

SEQ ID NO: 235416 - DNA, 122 bp, Homo sapiens
gccagaccattactccgccccgtccccaccctcaaggagagccgttaaagcctggggctgcgggagaagttgagggattttcgtttataacaactctaccattttgcaggtgaggaaactga

SEQ ID NO: 235417 - DNA, 122 bp, Homo sapiens
ccccgcaaggcgttttcaggcagggcaccccttgtcattcgaatggttctggggtgagcccgggtgccgctgggccgcctggggccccttgccgtgtacctgctccacttccagggtccctt

SEQ ID NO: 235418 - DNA, 122 bp, Homo sapiens
cccggagtcagggagccccacttctgagtcccccagtgtcctgagacttggctccctctgcggtgttcacgtagacctcaccctgtgtggtgcccgtgcagcaaagatgagataacccgagg

SEQ ID NO: 235419 - DNA, 122 bp, Homo sapiens
cgtggaggaggtctcggacaatgcctgactcccgagccgttccccccgtggaggtggtctcggacaatgcacagagactcggtgtggaagacccgcgccattcccacaggcgtgtcctgctc

SEQ ID NO: 235420 - DNA, 122 bp, Homo sapiens
cccgccgccccctttcttaccggcgggcttggcggggcggagggagccgactcgggtggacggcctcccccgcgcccaggcccgggatctccgccgcccagtcctagggctccggcgtctcg

SEQ ID NO: 235421 - DNA, 122 bp, Homo sapiens
gcctccactactccgggggccagctgacggaagtgcgtcactccaccctgcggggagtgccgggagttgtagtcaagtggctactaatcttccaccccgattcatcttttctaaaacaagaa

SEQ ID NO: 235422 - DNA, 122 bp, Homo sapiens
ggggcgaccctgaggggaggcggcccatgtgctgagcggcggcccagaagcctaggcgtccggggaccaacttcctgccgcctgggaactcgagcctcccggtgtcgcgcctcgctcggtcc

SEQ ID NO: 235423 - DNA, 122 bp, Homo sapiens
cacccaggaacccagaagccggctggccaggtagtggaaaggcgcaggcgcaggggcgagcgaagcctcggtggagcggagccgcctgcacctccagagaggcgccatacgggggccgccgc

SEQ ID NO: 235424 - DNA, 122 bp, Homo sapiens
aagtagtttataagctagacagggggaaagatatgtgatctgcttcaggggctgaaagaacgcaggaggcttttccttaagcacgaagttcttccaaggcaggtattgtaaaaggtaccaca

SEQ ID NO: 235425 - DNA, 122 bp, Homo sapiens
atgttaggccttcgtcagtgcactcgacagacggttactgtttgtcaacagaatgcttggcgctgttctagctgctagggataagacggaaggagcccaggagttaaatttttgaaaatttt

SEQ ID NO: 235426 - DNA, 122 bp, Homo sapiens
ggagccccagtgcggcccagtgcctgcacatgataggcacaaggtgaatgagtgcctggacgcatgcagggacttgggtacctgaaatgatgattctgcatatttcatgtagtcttgatgct

SEQ ID NO: 235427 - DNA, 122 bp, Homo sapiens
tgccgaaaagctgaactgtttccttttttggatatggaacttccattagccagctagagccgtttctgcctcacagtgtacccataagaagcatagatgctattctcgtagcacttggcact

SEQ ID NO: 235428 - DNA, 122 bp, Homo sapiens
acctcaagcgatccgcctgcctcggcctcccaaagtgttgggattacaggcatgagccaccgtgcccagcctataacagaatttgaataaagttctagatgaacaatgaaggagcaactaat

SEQ ID NO: 235429 - DNA, 122 bp, Homo sapiens
aactggagcgggtgggagcagcaagcagagccgtgaccttagatcagtggcgcccaagaccgagacagtagcctgccagcaccagttatgactgtgggaggcttcagctcctttccttcagc

SEQ ID NO: 235430 - DNA, 122 bp, Homo sapiens
ctcaactgttgcatggtagcagatttgcaaacatgagtgctgaggggtaccagtacagagcgctgtatgattataaaaaggaaagagaagaagatattgacttgcacttgggtgacatattg

SEQ ID NO: 235431 - DNA, 122 bp, Homo sapiens
cccatgctgcaccctgtacttctctgcagttttaagtcctgacttattagtgtaattactcgcttaacaccagctttttccatgaaacaaggagagagattgtgtctgtcttatcaccagaa

SEQ ID NO: 235432 - DNA, 122 bp, Homo sapiens
ctgggcagtctgactctagagcccagagccctaaacccacactggccctgccgagtgaatcgatgaatgagtgggtgaatgaaggagtgaatgcaggaacccccacacggtaagccacgggc

SEQ ID NO: 235433 - DNA, 122 bp, Homo sapiens
ctcaagtgatccacccgcctcggcctcccaaagtgcggggatcacaggcatgagccaccgcgcccagcccagaaggccttttcaacatccctgaaatataacctgagcaccgctgtctgctt

SEQ ID NO: 235434 - DNA, 122 bp, Homo sapiens
agtcgtaagccacggcgcccaccgaagttacagctttcagaatttgttgagcaggtttcccggttttcacttgaaaatgccccgccaccccgaaaaatatttgttgaactagttggctttta

SEQ ID NO: 235435 - DNA, 122 bp, Homo sapiens
tatgtatgcagagccacatgccctacagcgattcagaagtacttgccacactttcactcacgagggccatatgcaaggagacctgagaactgctctttgaaaggaagctgctttagcatatc

SEQ ID NO: 235436 - DNA, 122 bp, Homo sapiens
ttacacacagcttaatgattatcaaaatgactcttttctgcaaaaaaagaccccaaagtgcgcgtacagctgcaaacccaagagggtcagcatcatttcactgtattctcttcttgattaca

SEQ ID NO: 235437 - DNA, 122 bp, Homo sapiens
taggctgtgaattattaactagacttgaagatcatacatcacataaatgaatctggatgtcgaagctagacttaaactatttaaatctgggagctgtgaaatgaggaaaagtaatctttaat

SEQ ID NO: 235438 - DNA, 122 bp, Homo sapiens
gggaatcccaggtctgaaattacagatgggccatgggagtttttccactacagatatttacgtttataaatcacgttgtcttcttagaaaagtcagaaggaggttaaaacagtcaagccaca

SEQ ID NO: 235439 - DNA, 122 bp, Homo sapiens
cctcccccctgcagcctggcgcgcgcgggccgggccgcaccgctgcgggctccgcgcgcgcgggccatgtccgctttctgcctgggcttggtcggccgcgcttcagcacccgccgagccgga

SEQ ID NO: 235440 - DNA, 122 bp, Homo sapiens
gccccgggttcaccaagccggagcacaagcaggtggggtacctctgcacactggaggcctcgtctgggccagaggggtgcttgccccaaggctggcctctcgagtggagggcccagggcaga

SEQ ID NO: 235441 - DNA, 122 bp, Homo sapiens
ccgatcgcgacggtggatgggccggcggccatcttaggtactggtagagcgactcatttccggaacgcggtcttgggagccggaagagaagcttccggcctcggcgccggatgtgtagctgg

SEQ ID NO: 235442 - DNA, 122 bp, Homo sapiens
atcaggctgcacattcagcatcgacagccctggccagtaggccttctgggctcccagcaacgcctgcattttgcacattggtttgcatgactggtaatgtcccttcacagggccaccctcac

SEQ ID NO: 235443 - DNA, 122 bp, Homo sapiens
tgtatcctatggaatactgacccaccgtggggctgccttctggtcattatgttgtgacctcgggttgacagccacacgtctccaccctcaaagccagcgcaggtgtcagtacacacagttat

SEQ ID NO: 235444 - DNA, 122 bp, Homo sapiens
ctgttaagatttcttgttgttgttttcgcgaggcccgggagaatcagctctcccaccttgcggcaagaaaagatgacttgtcaggcctctgaaacgccgaattctctgccggactgcggagg

SEQ ID NO: 235445 - DNA, 122 bp, Homo sapiens
cccttgagaagtgtccccaacccagttcccgtctcactaccagccaccacctccccagcacggggtcctccgcaggtgatttcatctctgaggcggctttcttatctctggaagagcagtac

SEQ ID NO: 235446 - DNA, 122 bp, Homo sapiens
gaagaaaacagttccgagcgtattacggaacggagtacacctcggagtacgggctccagacgagggaacgcaccggcgttgccacgcccaccttccccgtccagccggaagtggcgcggacg

SEQ ID NO: 235447 - DNA, 122 bp, Homo sapiens
aggcgggagcccgagcaaggtcaaggagggaagtgcgcggtgccacggaccgacacagttcgctctagcatctgacgctcggactccgcgccctcagccggatcccagagcccttccattcg

SEQ ID NO: 235448 - DNA, 122 bp, Homo sapiens
ccccttctccaattctccgggctgagcgccacctgccgtctgactcaggaacagcgggcccgccgcagcttaggggagaaacgtccaaaaacctcgctggccctcagaggtcagggtggcag

SEQ ID NO: 235449 - DNA, 122 bp, Homo sapiens
agaatattagctaccacacttatttgcatatctttttttttttttttttggaaccatgtgcgcctttattagctgagccactacttgagagggatgaagcagaaggagtgggtggcgccgat

SEQ ID NO: 235450 - DNA, 122 bp, Homo sapiens
ctgcagcccgggctggagcactcaccagcgggcagggagggcggcagggcacggcggtggcggtgggtcggcgaccggcgggccgaagactggaagcccgggccgctgaggctccgcagccc

SEQ ID NO: 235451 - DNA, 122 bp, Homo sapiens
caccgccgccaggcgcgggcgggcgggggctgggcggccgcgctggggcggtgcccgccccgccctccccagccgctacccccgcccggctccttacgtaacctcgtggcccccgggccgcg

SEQ ID NO: 235452 - DNA, 122 bp, Homo sapiens
cgccacattccaccttaaaagatcaggtcccctcctccgctgggagctcaggacttggttcggccgaagcatttattcccctttaaagctataagcctgccttttcccattggcgatgggtc

SEQ ID NO: 235453 - DNA, 122 bp, Homo sapiens
acacacaccattccttttcctcctaaccggatcctggattcagtcttcaggcattaaactcgcatgctgagcacgaattgagtttccttttgcagccacagcatgattcttttttttttttt

SEQ ID NO: 235454 - DNA, 122 bp, Homo sapiens
cggaaagcagtgggaggcaatgctgcaccttgccccgtactgggaactccctagagaacgcggtgtttggttgcaggcctttccaaactgattctctagcattcctttaaaatcatctgcta

SEQ ID NO: 235455 - DNA, 122 bp, Homo sapiens
gaaggacatgagtctggtcttcaagcccactcctctttgttgaggccttaaattatacaacgtgtaggcagatgagctggtcttgttcaaaacatccctcccgctggctggggcccctctct

SEQ ID NO: 235456 - DNA, 122 bp, Homo sapiens
ttgaaagccaagctacaagtcctcggtaaatgcacaggtgggattgagaaccactcttcccgtttgttgcactttcctctgattgatccccacgcgtcacctattttacatatacccaccct

SEQ ID NO: 235457 - DNA, 122 bp, Homo sapiens
cgagagctccccggacaaacggctcactctgtcccagatctacgagtggatggtgcgttgcgtgccctacttcaaggataagggcgacagcaacagctctgccggctggaaggtgcgtaccc

SEQ ID NO: 235458 - DNA, 122 bp, Homo sapiens
gattctcactgaaatctcactgccctcctggaaatattaccggatgttttactgtcatagcgaagtgagagtaagctgctcactgaggatcaaagagcttgtgacagacctaagactcaagt

SEQ ID NO: 235459 - DNA, 122 bp, Homo sapiens
cctaactctccggaatgagaacatatctattaatacattcgctagactggggagttgagtcgctcaatgcaaattttctttcaagtgcaaaacagcttaatgggctcggctagcctttggtg

SEQ ID NO: 235460 - DNA, 122 bp, Homo sapiens
gtgtgtgtgtgtgtgtgtgtgtgtgtgtgtgtgtgtgtgtgtgtgtgacagagagaaccacgctttattggcggagccttatgtgccagcgaactgagaaggtccagggtaccttcacctgc

SEQ ID NO: 235461 - DNA, 122 bp, Homo sapiens
cggccggccggttcgctgccttcccattggctgaggcgggagcaggcgagagtctggacgcgggggggccgcccgcgcgcgaggttactcccggtcgccggcgctggggttactggggcatg

SEQ ID NO: 235462 - DNA, 122 bp, Homo sapiens
catagataatgaggtctcaaccacactccagtcagttaattatttattggattcttcttacgtgacaacctcttttaagaaattaattcaggacaacaaataccaaagactaccaatttaca

SEQ ID NO: 235463 - DNA, 122 bp, Homo sapiens
catcatggaagcccctcagaatacgccctccttagcctggagctgaggatgctgggacaccgcctcagccgccaccttggtgtttattgtgagctgcatgggtgacgacccagacaaattct

SEQ ID NO: 235464 - DNA, 122 bp, Homo sapiens
taatgagcagcaagttaggttgatatgaactagataaagggaatttcataggtggttgaacgtcagatgctccactaaatgtatatactttgagggtatgattatatgtgtttaggaaattt

SEQ ID NO: 235465 - DNA, 122 bp, Homo sapiens
cccagactgcttggctgctggtcaccgatagggtctttcctcaaaaacctggagaacagacgcgcccagagacaggccgaaggcagcgcagaccccgcccctcaccgccccaccctctcttc

SEQ ID NO: 235466 - DNA, 122 bp, Homo sapiens
ggcccttccctcttgctaggagataaacgctgcgcaaagccaatcaccaggctgagggggcggaggctgcttggagagtaacgtccccggctctgcctgctctgtgccgggagaggaagctc

SEQ ID NO: 235467 - DNA, 122 bp, Homo sapiens
gagggctcagtgccgtggctgggagcactctgggaaggagacgtgctggcagagagggatcgggatctccgtcactcacatcataggacaggcatttgaggggcctagaggcagggcagggg

SEQ ID NO: 235468 - DNA, 122 bp, Homo sapiens
cctagagcccgtggtgggggtgtccagaaagacccttctcggcaaactttgccagcccgccggggttctcgggcttctctggcttctgcctggggtggcccagggcccaccagagcacagct

SEQ ID NO: 235469 - DNA, 122 bp, Homo sapiens
tatatatgcatgctgtgaaacttgactacacaacataaatcactttttaaattccaggaacgggtagtctgacacggtgattatccttttgaggctgaatccgttattaacttgttatttag

SEQ ID NO: 235470 - DNA, 122 bp, Homo sapiens
gaggagggcttgcgcagcgtgaaagtggggaagacgcagctggagctgggaacgccgctgcggctctgccggctgctctcgaactgggcacaggcagcgaggtcctcagactgagaaggaca

SEQ ID NO: 235471 - DNA, 122 bp, Homo sapiens
gctcatgacaaggtgtggcacgcgagtctggttttaagaacatcaaggcaggagccccctcgccacggagtaacaagggttcagtgagaggacgcagggcccggatgcagggcctaaacaag

SEQ ID NO: 235472 - DNA, 122 bp, Homo sapiens
tgcgaggattgtctggggcccctttaagccggaacaggcagggcggaagtgcgtcaccggcggcacgcccctgcacatggacctcccccgtccccgccatccctgccgatcctgttgctgcc

SEQ ID NO: 235473 - DNA, 122 bp, Homo sapiens
gggcgggcggggctgggttggggctgtgtctgggcttagggcgggggcctgggatgctgccgctgagctgacccgctggacttgggttgtggcagacggatggcgaacgtgcaggtcgccgt

SEQ ID NO: 235474 - DNA, 122 bp, Homo sapiens
cgccgccgccgccgggccgcccccagcgcgggcggaacggaggaggggcccggggcggggcgggccccagtgcgccccccgcggggctccgcgccctctgaccccagtcccagcccccgccc

SEQ ID NO: 235475 - DNA, 122 bp, Homo sapiens
cccaggcctgccgacttctccctggggagcctccctggcccaggccagacatccggcgcccgggagccccctcaggccgtcagcatcaaggaggccgccgggtcctcaaatctgcctgcgcc

SEQ ID NO: 235476 - DNA, 122 bp, Homo sapiens
attggctgctacgtgaacgagacaaacgcaagcaacaaccaatgggagtggcccacggcgcgtctttcccggggaagccgacgcggacgcgggaacccggaaatgcgagggaaggacaagtg

SEQ ID NO: 235477 - DNA, 122 bp, Homo sapiens
tacaaagcacatactttgttacgtgctaggctttgcctcctggcctctagataattaagacggcccagggaataccagcagagaagtgctaattgtatttgggtgttacaaaagcagaccta

SEQ ID NO: 235478 - DNA, 122 bp, Homo sapiens
tgcccttctgtccgcctggtggaaaagccctgcagctttgccaggtggggtgagctggcccgttgtacgcgaaggcagaaaaaacagactaggatttccagcagctgtgcctggagcggcaa

SEQ ID NO: 235479 - DNA, 122 bp, Homo sapiens
cattcctcgcaaatgaatagataggagatatctactatcaggaactacaaacacagtctccgtgctgtgatccgctttcacagggaattttgtctgggattcaagtagcggcaagtaaccct

SEQ ID NO: 235480 - DNA, 122 bp, Homo sapiens
aggagttccaccgacgtgacccaagcagctggtaggagaatctgggctggattcggaaggcgcagctacaggacgcccgctgccccggatcggaaggcgcagcacctcaggccacaatctca

SEQ ID NO: 235481 - DNA, 122 bp, Homo sapiens
cccgcggggccgccaggtgcaattttcgctgggccgacggcgcggagatgggccagagtccggccatccagaagtgcctggagcgcacagcaaggccctgccctcggctccgtgaaggtgag

SEQ ID NO: 235482 - DNA, 122 bp, Homo sapiens
tatgctaaatacttaaatgctttatataaattaattcattcaaaatgactacaagagaaacggggggcttagagagattaagtcacttagcaaaggtttcacagctcaaaagtggcagaaat

SEQ ID NO: 235483 - DNA, 122 bp, Homo sapiens
cacggatcattactgtgtgtgcgcccatgtgtgttcacggatcagtactgtgtgtgtgcacgtgtgtgttcacggatcgttactgtgtgtgcacccgtgtgtgttcacagatcattactgtg

SEQ ID NO: 235484 - DNA, 122 bp, Homo sapiens
tagggagggcagacagggaagcccctgtcgccgccgccggggccctgccactctgcgccacgccttggtcgcacccgggcccagcgggagtccatcgccgtccccaaagtgtgcgctccccg

SEQ ID NO: 235485 - DNA, 122 bp, Homo sapiens
ctcgcttcacagaatcctatggtagacccgggttcaaatccaggcttcgccacttatggccgggagaccttgtagagttgcttgtcgggtctgggcgtcagctttttgtttagtaaaacgga

SEQ ID NO: 235486 - DNA, 122 bp, Homo sapiens
agcaggatatcggccggaggaccacaggcttccagtacgagctggttaggaggcacagggcgtcggacctgcacgagctgtctggtgagtgtcctgcctggggcgggggcggcgggcctcgt

SEQ ID NO: 235487 - DNA, 122 bp, Homo sapiens
tatttccaacccttaactttcctatcaggaatgtccacattagcccagaaagaatgtagtcgaaacatgattgtttcccccatcccccacattttccaccttatctgctgggatccctgcca

SEQ ID NO: 235488 - DNA, 122 bp, Homo sapiens
tcagagaacccctgaggcccaggacccctcatgaacctgtggatgaggaagggccaaccccgtactgagtgtacccattgtttggaaatagagtccctgttgtcaacttctttctcctgtta

SEQ ID NO: 235489 - DNA, 122 bp, Homo sapiens
gttttgggtttttttaaaataatcaaaacatgcagttttccgattcagcttttttcttgacggtaaaatgacatatcagtaaacatgagaagttcaagctagcaagacacaggcagttggaa

SEQ ID NO: 235490 - DNA, 122 bp, Homo sapiens
cttggtgtgggacctccaggacaggcctgcgaactgctgatggtctcacccagggtgacgcgggtgattctggcggcgtgtgaggggtcagaatgattcacagaagggccccgaggatcaag

SEQ ID NO: 235491 - DNA, 122 bp, Homo sapiens
gagttagaaatgaaaacaggaaccttgtcactatgtgaagtaaaaatcatcaggcacccacgtcgctttcaagcagcgactcagacactttcctgcttccccgtgcaaacgggaatataaac

SEQ ID NO: 235492 - DNA, 122 bp, Homo sapiens
gaggtcccaggtgcagccctggaaaggaggggaggggctccgaggggcggccccgggcggcgatctgccccaggctcctgtgtggggttctggggccacgccccttgaaagaaaggggtgtg

SEQ ID NO: 235493 - DNA, 122 bp, Homo sapiens
ggccacaaacagacccacacaatgcagccaactaagctgtaaatgtgccaaagtcatcaacggaggaagggtcgtctttcagccaagggtgccggaacaaagggatgtctacatggaaaaaa

SEQ ID NO: 235494 - DNA, 122 bp, Homo sapiens
ctccaaccccgcagcacagcgtagtccaaatgccagaaacctggcaacaacgatatcgtgcgggagtcggtccgagatgtcccagggaatctgaacgtcttcccagccgctcaggatgtctc

SEQ ID NO: 235495 - DNA, 122 bp, Homo sapiens
tcagcgccaggttccctacgaacgtgccttgtatgaagggcgtgggggtggctgccttttcggctgcaccccatttcccaggactaggggctctctgcacccgacccggtcccggtgcacgg

SEQ ID NO: 235496 - DNA, 122 bp, Homo sapiens
atcttgccacggacaacaccgaccacgggcctgagataggcctgcaggatcgagggtgggcggccacgagcgctcgccttacctgcctggctgtccctgggcttacactggacctcctccac

SEQ ID NO: 235497 - DNA, 122 bp, Homo sapiens
gtggagccggccgagaggaccccagagaccccggctactactccacgtctcccaccttcccgcacccctgccccctagctgcgccctggggtggttacagcaggaagtcccaactctggggt

SEQ ID NO: 235498 - DNA, 122 bp, Homo sapiens
acggctggggctgggccggggctggcaggcggttgctaggctccagcggctcccggccagcggggacgtggaggtgacatttctctgacccacaggactgtgggcgccctgccgagcgtcgc

SEQ ID NO: 235499 - DNA, 122 bp, Homo sapiens
gccaggcgacggtacatcaccaagtgcacgtggtgcttttccttctcctgctctttgtagcgctcctggacttgtaagtgctgcacagcctgggccactgagggcagaaggggatcgggagg

SEQ ID NO: 235500 - DNA, 122 bp, Homo sapiens
ggacgtcgctcggaagccaatcagagagcgtgacgtcagtttggcgcggagtttggcggccggggcttacagtggcgggagttggaggcgataacgatttgtgttgtgagaggcgcaagctg

SEQ ID NO: 235501 - DNA, 122 bp, Homo sapiens
ctttgaaaatctggttctgctgttaactataaaagtttgaaaaccactgtacttgattagcgatgaatttggttaatatctacagactagagccaagaaccttcgcacagttcagagacatg

SEQ ID NO: 235502 - DNA, 122 bp, Homo sapiens
ggtagtcaccacaggagcgggaggagaagtttccagagcagcagttgtaggacatgttgacgggagatgtgagttcagctgagttatagtggaaagattctctgagtttgaatgtcatagtc

SEQ ID NO: 235503 - DNA, 122 bp, Homo sapiens
gcaggcggaccgctgctctcgctcaagttctggcgtggggctgcgctggagcaactggggcgaagttgaactgggacatccttggagatgatttttgaaaaacgagcaagccatgcctggaa

SEQ ID NO: 235504 - DNA, 122 bp, Homo sapiens
gagggcagccccatgcacagccccccaaaccctcccccacgcctgcagccccccgatgtgcgcagtccccaagcccgcacgtgcagttcccacattgcgcgcagctccacctacagcccccc

SEQ ID NO: 235505 - DNA, 122 bp, Homo sapiens
tctgcttacctctggacctactgtttgtcccccagacacctgccttttattcaggttactcgaggcctcacattgtctgctggggtgtaggtgaggcaaggaggatattctcatgcaattgc

SEQ ID NO: 235506 - DNA, 122 bp, Homo sapiens
aactggccattgaaagggtttgctcaccccaaggggactttgtctactgaatcattcagacggctcaagtctgggaagacattggcctctaaaaatcccctgaaatcagtccaaagcccagg

SEQ ID NO: 235507 - DNA, 122 bp, Homo sapiens
ttaggtgctttgcaaatattgaatgaaagaatacgccccatcagtatctcaccgcgcctgcgctagatgccctaggtggggccagccttgacgcgctgcgcctgcgcaatgtctctttgcgg

SEQ ID NO: 235508 - DNA, 122 bp, Homo sapiens
atgcagaatcacacacagaggagagaacaagagtgcgagctgcgcccggtctcctacgtccgagcccccgaccctccagaagagtcctctaaccttgtctgagccccaggtcctctggcctt

SEQ ID NO: 235509 - DNA, 122 bp, Homo sapiens
agggagcggggatgaggaccagtcccggcacctgctgaaggttatgcagagaatggaacccgcgctggcggacaaattgcagcgcacagctgagcagggcggctggcccagcaggaggggct

SEQ ID NO: 235510 - DNA, 122 bp, Homo sapiens
ctgcaggcaacgtgatctgaattacatggaggacaagctccagctgactttccgtaaactcgcattaggattctaataggagacgacaggagcaggtggggataatgagctggcggaagggg

SEQ ID NO: 235511 - DNA, 122 bp, Homo sapiens
atgtctggacacccatcaatatgtagattccaccccacaacaattgtccatattcagacacgttttaaaaatcggttccacatttcaagcatgtgaagctaggttttagctttagtctctac

SEQ ID NO: 235512 - DNA, 122 bp, Homo sapiens
ctctaccgaaggcagccatctccttcactgcctgcccctgcgcccgcggcatcccaggcccgtcttctctggcctccaggcttgcaacagcccaccgaggttgggggtagggggaatgttcc

SEQ ID NO: 235513 - DNA, 122 bp, Homo sapiens
agccaagaaactgtcgcaggatcagcggttgaaatggagaccaggggcagaatccaggaacggttgagaacacagacctcagggtcagagtggtacaaatcctggaccctttccttacgagc

SEQ ID NO: 235514 - DNA, 122 bp, Homo sapiens
cccttccccgcggcgctggatgggttgagggggttggagagggtgctgccagctcggtgtcgtctacacagagaggggacatgcgtgacagccactccgcgctcccctccaggccctgaatg

SEQ ID NO: 235515 - DNA, 122 bp, Homo sapiens
cctgccacggcaaacaaaacatgtacattctgattccctcttctgtttggattgtgctgtcgactggatctggtttgtgatgagctgggggaagaggcatccgcgggcgatttctggctcgg

SEQ ID NO: 235516 - DNA, 122 bp, Homo sapiens
tccattttagaacacttgcatcagaaaaaacaggctcatttctctagcgtgggggcccaccgacctcggctttgtaggaggactcgaagttcagaagttggctgcagttgtaaatttagagc

SEQ ID NO: 235517 - DNA, 122 bp, Homo sapiens
tcgcacccacagctgacccgtgctgagggtccaggctccattggcaaagccggtcaggcacgagggcgactgaggcacgtggatgaggagggcacccaggttctgttcacaactcacttcac

SEQ ID NO: 235518 - DNA, 122 bp, Homo sapiens
ggcgagagagcgctgtcagcctgccaggcgctggggtccgcgcgagcccgagctctcccgcgctgcagctcacaggcagcgaaaaagtcgctctgcggaagccctggagaacttctggaagg

SEQ ID NO: 235519 - DNA, 122 bp, Homo sapiens
tctgggctgtcaggcaggcctgggagggagcctgcctctgtgctctccaagggtgggcgacggacagacagggtgtcccaccccttctgggccaaggacagagggtcagtgtttgcagagac

SEQ ID NO: 235520 - DNA, 122 bp, Homo sapiens
ctttctgaaacagtcaagcagttccgggcacatcaaaggagattatcattcctctggcaccggctttgtttttcgctgcctctaaaagaaacaggtccacttatctccagaatgctttccca

SEQ ID NO: 235521 - DNA, 122 bp, Homo sapiens
ggagccctaaccaataggaggaagtttttaggctgagttgggttgatgtgacatttcatccgatagaggtcaatgtgacaaagggaatttctgcaaatacccatgcatatacacagcctatt

SEQ ID NO: 235522 - DNA, 122 bp, Homo sapiens
tccgggctgggcgagttctggacggaggggcacgtttgggaatcctcttggaagaatttacgtaatcgaatgggctgggactggtggaaaagagttggaccgtccggaaagaagcaggaggg

SEQ ID NO: 235523 - DNA, 122 bp, Homo sapiens
ggcagctccagaggggtcgatcccgcgacaggggaagggggcgtgggcgtcacatggcagcgctgagacttgagtgctggaacagcccagcgaggaaggtcccaaagacagctcttttcacc

SEQ ID NO: 235524 - DNA, 122 bp, Homo sapiens
gacagggtttcaccgtgttagccaggatggtctcgatctcctgactttgtgatccgcccccgtcggcctcccaacagagcaagttttatcttgcccatttgggaattaaagaaatagaagcc

SEQ ID NO: 235525 - DNA, 122 bp, Homo sapiens
tgctggtacagctttgagtcactaggaggtaagaggataactggtaaaccacgaatgaagcgataaaggaggtgtgtctctaccataaatgctaatgtgggcaattcagctgcatttttcac

SEQ ID NO: 235526 - DNA, 122 bp, Homo sapiens
aggaagctggagtcattcactgcaaggggcatcaaaaggcgtccgattgagaggtgacagcgtgctggcagtccttacagccctcgctcgctctgggcgcctcctctgcctgggctcccact

SEQ ID NO: 235527 - DNA, 122 bp, Homo sapiens
tgaaagccaagtctttgggaacctgtactttcacgttaggaggttacagacttattccaacgataagtgctttttgcacacaagtggccttttggaattgatttctgagttctgggacacac

SEQ ID NO: 235528 - DNA, 122 bp, Homo sapiens
ccgccttggcctccaaagtgctgggattacaggcgtgagccaccgcacctggccatattacgtttaattttataacctaaaaatgtgtgggccaggcgcagtggctcacgcctgtaatccca

SEQ ID NO: 235529 - DNA, 122 bp, Homo sapiens
gtcttcagccgccactgaagagcgatctcctggcagcgagactgtcccagcgcctcgggacgcgtccccactgtcgtccagcgcccaggaagtgagcccgacgcctgctctgcggggccaca

SEQ ID NO: 235530 - DNA, 122 bp, Homo sapiens
tccttccctagggagctgaatacacggctgcgggatgacagggacgcctgcgaggccaggcgggcgggcagcagctgcaggaaggctctgacaacagcccgcctgcctgggcccacctgctg

SEQ ID NO: 235531 - DNA, 122 bp, Homo sapiens
gatcatactagaaagaatgtggagaagctgatttttctttttagattcaagatgtaggcacgttgtatacaatctgagggcatcagtgtctctgtctttgccagcagcacgtcaagtgcaat

SEQ ID NO: 235532 - DNA, 122 bp, Homo sapiens
catttacctccctcctttctttttgttccttctccccagatgtggtgaacaattcctctccggcactgggaggcaccttcccgccagccccctggtggccgcctggcccacctcccaccaac

SEQ ID NO: 235533 - DNA, 122 bp, Homo sapiens
tatggatataacaactgtcatattttgatgtcaacagagttttagggataaaatggtacccggccaacatcaagtgactttatagctgcaagaaatgtggtatgtggagaagttctgtatgt

SEQ ID NO: 235534 - DNA, 122 bp, Homo sapiens
agcttataatgtggaagtaaggcatcctgtcatccggccggttagctcagttggttagagcgtggtgctaataacgccaaggtcgcgggttcgatccccgtactggccaagtattctctgtg

SEQ ID NO: 235535 - DNA, 122 bp, Homo sapiens
ttctcagtctccctagccttaacccccagccccggcccctcagcccccacagctgtaccccgagatgaaactcaatcctctgcggcttgcctcttttgtggagccagttgtagcagcgactc

SEQ ID NO: 235536 - DNA, 122 bp, Homo sapiens
gcccccggggctcttcataagctcggcccgagggcgagcagagaaagcgagtgtccctctcgcgccccaggccggtgtacccccgcactccgcgccccggcctagaagctctctctccccgc

SEQ ID NO: 235537 - DNA, 122 bp, Homo sapiens
cacgtggtgtgattgcgaggaatgaagggatcgatgccttgcaagtagaggagaaggggccggatacatcttagttgttatgttatttaatcatcttggcaaccccgggagggaggaaccac

SEQ ID NO: 235538 - DNA, 122 bp, Homo sapiens
gctttttccggactgtgttgcaattaaccatttctcgttggtccgtcctggtgttacaggcgcactggaatgaacgcagacccttctctcctcccggccggggccaggaggaggggtggggc

SEQ ID NO: 235539 - DNA, 122 bp, Homo sapiens
ctgcaagactggcttcttttgcttcctctgggactttccctttaactctgtgtctgccagcgaagctgctcttactttcatttttggctcagctcaggccacaagtgttttctgataagctg

SEQ ID NO: 235540 - DNA, 122 bp, Homo sapiens
aatttctcccctccccctcttctgtacaaccccctcacctgggggtcctgggccgagcttcggagtcccagggccggcagcgttgctccacaggcagctggtattaactccgtgtcggcgta

SEQ ID NO: 235541 - DNA, 122 bp, Homo sapiens
ttctgaggtgtgtggccctggtcttccttgtaatctgtggcactgggcgcattgacccctcggtctgttttctctaatggtctttcttggttgccaggagactgacctcaccccgcttagtg

SEQ ID NO: 235542 - DNA, 122 bp, Homo sapiens
aaaggagagacgagagatcgcaactagatttgagaatcctcgttcttttccccaatcgttcgggcagtaaactccggagccggctacagcgcgcatcctcccttcctcctttcggagaactg

SEQ ID NO: 235543 - DNA, 122 bp, Homo sapiens
ttttccgtcactgaatttttaggtcaagccagttctatcgctgcagaatagataactgaacggcagcgtgacagcctttggggcaggggggccgtctccggataagacacgtttgtcttttt

SEQ ID NO: 235544 - DNA, 122 bp, Homo sapiens
gagagcttctgcactcatcgatatcctcctcacatcgggtgccggagaatcctggtggggcggaagtgggtggggagaggaggccaaggtcatcgagggaggcacagcatggcgccttccct

SEQ ID NO: 235545 - DNA, 122 bp, Homo sapiens
aggccgtgagggcgccccaaggcccccacccaccacccacgtcttacagttcagcttacacggaaccccgaggacctaggccacattcccagcgccaccaactctgggggcccaatgttaca

SEQ ID NO: 235546 - DNA, 122 bp, Homo sapiens
gcaaaacttcaccttcaagagcagctgagatccagaatgtgaagatcttggggtgaggttcgtgagatttgaaaataaacagtcaagtgctgatctggatgatcacagaggaataaagaggg

SEQ ID NO: 235547 - DNA, 122 bp, Homo sapiens
ttctagcctcctgcagaccagagaggacgcacccccacccctaaacactttctggtgaggcggaccctgccccgcagccttcagcagatgagggaagctcccctccgagactctggatagcc

SEQ ID NO: 235548 - DNA, 122 bp, Homo sapiens
atggttcagcccggtattgaggctccttgagctggctggatggttgcgcccgccctaccccggaatgtgggcctttggagcgagcgaagtgggagggaccgacgcaggaggtgtcttgggcc

SEQ ID NO: 235549 - DNA, 122 bp, Homo sapiens
caaacgcagaaatcacttcacctctccactgcgtgcgcctgtctgcgaagcgggtgcgagcgtccatccagttatttggctccttggcaagaggccaacttcgtttctggctaagattctga

SEQ ID NO: 235550 - DNA, 122 bp, Homo sapiens
tcctccgttctggctgcgccagattcatgtaacacgcctaccctgggcttcaatggaagtcgttctccattaacaatcactccagctttccgagatgaatgccctgatagcataccccttgc

SEQ ID NO: 235551 - DNA, 122 bp, Homo sapiens
ctccagcacattcaaggctgccacactgaactgcttggaggcagctgacagaaagctatccgctgagggttaaactcatcgaactaacaaaagcggacatgtcaactgacttaactggggat

SEQ ID NO: 235552 - DNA, 122 bp, Homo sapiens
gggttgacctccccggcgcgcgctgtttgtgtgtcccagttacctaggttctgtagcagacgtggcatcagagaccacgtggccccaacccctcaggggacaccacctgcacgcctcgctca

SEQ ID NO: 235553 - DNA, 122 bp, Homo sapiens
ggccccctcttactactgttgcaccggggactgggcttcaatcagtagcagcaggggatgcgcgctcagacccagcagtcggctctgcccgcctcgccgggctgcaccgagtccgcgggtct

SEQ ID NO: 235554 - DNA, 122 bp, Homo sapiens
gctctgagcatgcccggggcgggcgcccaggggccgcgcggggcgggagtgcagcgcggccgactctaaatcctagtgaggggtgaatggggaggctagaacagccggcccttccctgcagg

SEQ ID NO: 235555 - DNA, 122 bp, Homo sapiens
tggatatacaatttcacattggcatgtgcacacacacttattgtgtgtatacaccctgcacgtccccaacataaaccacttacagcttcagaaaggaaaggagacagaagcagcaacatctc

SEQ ID NO: 235556 - DNA, 122 bp, Homo sapiens
ggacgcgctgccgcccatcgtgctgaggagccaggtgtacagccttgtgcctgacaggaccgtggccgaccggcagctggtgaggggcgtcggtgcgaccgccggaagcccctttcctaact

SEQ ID NO: 235557 - DNA, 122 bp, Homo sapiens
tgtaaatcctgactaacatctctctgtgaccttagacaagtcattatcctatctcagcttcggtttactcacctgtaaaatgagaatgattgttatgaggattatatgcaaaagcacacaca

SEQ ID NO: 235558 - DNA, 122 bp, Homo sapiens
taaatataagactgtattcttctatatactacacatcaatttgtagtggcaccaaagtgtcgcctgctctgcctgagggagcactccccctagtgattttccataggaaataaagttaaact

SEQ ID NO: 235559 - DNA, 122 bp, Homo sapiens
cctgggtgagatacgagttgggggtgcggcctgcagaatttgggtttctggaggagcttacggcgcgctggcggagccccaggcgaacaggagcaccggattcggctccgggagggccaggc

SEQ ID NO: 235560 - DNA, 122 bp, Homo sapiens
aggcagcaccggggcccagggaagggttagagaacaaataacggagccctgtggaggacacgggcggtgaaggaggctggccccgctgctcaaaatctgagccctacagacacctcctacag

SEQ ID NO: 235561 - DNA, 122 bp, Homo sapiens
cacttcagaggtgcctgaacattttagtcatccccgtggctatgtttgcttgggtgacctcgcaccggagcttactcaccaccgtgtgattttgtgaccacataacttttgctcaatgtttt

SEQ ID NO: 235562 - DNA, 122 bp, Homo sapiens
ggggcagaggacggccggggctgtggtgcccaaccggtgctaaactcaagcttgggaggtcgcccacgagaaacagtcgcccttccccacccgcctgctcggcttggcggggagcgggatgt

SEQ ID NO: 235563 - DNA, 122 bp, Homo sapiens
aattattcccacagcaacacttatttcagagaaacaactgatgtcagttatcttagtaaccgctaaaggcacctggtgaaaaaaatgtcaactaaattttaaatattaaaaaattaaagaga

SEQ ID NO: 235564 - DNA, 122 bp, Homo sapiens
ttgtacaccttctccgctgctattgtgaagggcatgtgcagcagagaaaggagggtgagtcgaggcgatatgctgagcatgaagccatacagccccaccactttcaccaggcttcgcaagag

SEQ ID NO: 235565 - DNA, 122 bp, Homo sapiens
gagaagcaagggatcatgttttcagagtgtccgccactagccctaggggaatgtatgactcgctcccaacagagggcaggattctcggggagggccggagtgcgtttctctggacggaggag

SEQ ID NO: 235566 - DNA, 122 bp, Homo sapiens
catccgctctgtcccattgcagaaatagcactcgtgtttaatctgctccaagaaatgtgccgcagggacatgaagaaccggtttcttgggcggcatcctaggaaaagagtgatggctatgcc

SEQ ID NO: 235567 - DNA, 122 bp, Homo sapiens
cattaattattcattaggtacttgaaagctctgcagggattggtggctgagaggcctagtcgactgtttcttagctagaggtacgtgtcacccagtacgcggctggagttttgcataaatta

SEQ ID NO: 235568 - DNA, 122 bp, Homo sapiens
ggacggggccgcaggagcgggccggaggggtccgggtcggagcaggaaggcgccacgcaacgtgctcacgcgaatgccctgtgagtccgcgggccgggcgggaagcggggcagccgccgtcc

SEQ ID NO: 235569 - DNA, 122 bp, Homo sapiens
catgctcagccttttattaaaacaacaacaacggcagcaacagcaaacattttatgtattcggagttatcagtgtcaactaatggcttgtgtgtttttgtctaagaagttcttatctacttg

SEQ ID NO: 235570 - DNA, 122 bp, Homo sapiens
gccctcctgcctgatttcagccctgggttcaagccctgggtggctgcttactaccaaaatcgctcagtagctccaagcctgcctgcagagggttggcaccattaaatgaggtaacgagtcaa

SEQ ID NO: 235571 - DNA, 122 bp, Homo sapiens
cccaaactgtggccaaaataacctatcatgccagtcccccgcatcatggtttgtctaatccgtaggaagcgaccccgctgattttcctttaggtctaggtaatatttcctattgtccctctc

SEQ ID NO: 235572 - DNA, 122 bp, Homo sapiens
tctttcatatctcatcctcaatatgcaaataactaattcatttagcaaatatttattgaacgtccattatgtatgaggcactattgtaagtattggaataagtgcagtgaacaggtcagata

SEQ ID NO: 235573 - DNA, 122 bp, Homo sapiens
gaagcaggttactgtttttgcatttctatcttcaaggaagaattaggttatgaatagttccgtgaatagtcaggaagcgctgtcctccaagttcaagattaaggaaacgtggcatgcacagc

SEQ ID NO: 235574 - DNA, 122 bp, Homo sapiens
tgtactgccccatgaaaacaactgatatcatctctatgtaaaggtgcagtggctcatgcccgtagtcccagctactcagggggctaaggcaggaggactgcttgaacctgggaggtggaggt

SEQ ID NO: 235575 - DNA, 122 bp, Homo sapiens
cactgccgcggattggctgttgcggacccggggcggggcaggtgggagaggctcgttctccgcgggtttcgttgtgtttcgcgccatgtcgtttgctgagagcgggtggcggtcggctctgc

SEQ ID NO: 235576 - DNA, 122 bp, Homo sapiens
aagtaacttgctgaaggtcacaagctaagaagtggtacagctgatcatctctgtatgacccgaagtctgtgttcctttctccactccatggtgcctgtgggtatagctaagcagataccacc

SEQ ID NO: 235577 - DNA, 122 bp, Homo sapiens
aatatatttatcgattaagttgttcgtcttatatggatgcagttcacagtgcccccataacgattacaatagtaacatcaaagatcactgatcacagatcatactagatataataatgaaaa

SEQ ID NO: 235578 - DNA, 122 bp, Homo sapiens
gcgaggagccggtgaggttgttgatgttgttgaggcccgagttgggcatgccaggcacggcgcctgggcccatgctggacggcatggtcatggaggagatggagctgggtgctgagaacatg

SEQ ID NO: 235579 - DNA, 122 bp, Homo sapiens
taatgaattctctgaagcgtgttccaggctccccggtaatgagcaggatgcagaggcctccgtgcagctctgtctcccggcctgcctcggcgaggccctgctgaattagcccagcccctccc

SEQ ID NO: 235580 - DNA, 122 bp, Homo sapiens
tctgctgggtccacaggtgcacactggcattaagaagaatagagctgaattcatctacaccgttgaccctgcccatatttcacatagcaagaacttgccattctgaatagactctgggaaat

SEQ ID NO: 235581 - DNA, 122 bp, Homo sapiens
gggtcaccccaacccaaggaaacaaaggcctggccactgccgcgaaccgcgccccggctccgcccctcacctggggacgcagtgcctggaagcgctcctgccgcacccactccaggacgcgc

SEQ ID NO: 235582 - DNA, 122 bp, Homo sapiens
aatagggtcaggctgaagtctgtggtgggccttggtttgcccctacgtaaaatgggctggcggggtgaggaagggattgatggcagcttgtcttcggggagccagctgggagtggctgggat

SEQ ID NO: 235583 - DNA, 122 bp, Homo sapiens
cggcgttggtcaaagcggagaccacgtgtgccacaccccagagctgcctgcacttacaggcgtttcgagctgatccgggccaggtcaccaggtggaggaacgtcctgggaccagatgacact

SEQ ID NO: 235584 - DNA, 122 bp, Homo sapiens
atcagcaagaaagatttcccttcggcttcctctctggatcctgccagataaggactgccgcgaggcctctccgttccccgcagcggctcctcaggagaacctttcctcctccgcccactgca

SEQ ID NO: 235585 - DNA, 122 bp, Homo sapiens
ggctatccttctccatgtgctgggggtttcttcctccactggggagtttcccaatgctgtcgccttcaggttatccgtgagcaggtcccgtagttaactatctataaaggaatgtctagaat

SEQ ID NO: 235586 - DNA, 122 bp, Homo sapiens
ttctcgatggtcgctgtctcctcggagctgttgggtacacctgtagaaagtctgtcacttcgcacttggaagattgcacagcggccaggcagaggcgctcctcacatcccagatggggtggc

SEQ ID NO: 235587 - DNA, 122 bp, Homo sapiens
tggacaattccaggaagtatcctctgtgtttcatgggacatgccagcagaattgaaccaccgttgcctacaacagtgatcttgatgttgctttttggtattgttactggcttactctctctc

SEQ ID NO: 235588 - DNA, 122 bp, Homo sapiens
ctcaaagtgcagaagggtttgctttgaaaactaaaaagaagagcgaatgaaggtgggcatcggcaacattagcaccatactagctgggggctacaccaggtcacagtggcgtcatgaagcag

SEQ ID NO: 235589 - DNA, 122 bp, Homo sapiens
cggacaccatgcagtcggatgatgtgagtctcctccggttgttcttacacccggggtttgcgcagggaattttgcccattttcggacacttagaaaacgcgtacgcagcgggtctgttgcct

SEQ ID NO: 235590 - DNA, 122 bp, Homo sapiens
gctccgggacttcatcaccctgcgtctgcctcctggcttcccagttaagattggtgagaccgcacggccatttctcctgagcccgtggcgggccgaccggggtttagatgaggtcggggtgg

SEQ ID NO: 235591 - DNA, 122 bp, Homo sapiens
gctgcatgtaactcaaacgcaatggagcttcaaagggtgattggggaacctccccgtagtcggtactgtcctgaatgttccttttccaggaaaggtggggctctttcctgcgtcgccaggac

SEQ ID NO: 235592 - DNA, 122 bp, Homo sapiens
tgagccaccgcgccaggccttatttctctacttctataatatcctgtgcattatctccagcgccttcaaatcatagtcattgaatgatctgttgaatgggtataactctgatgggagcagag

SEQ ID NO: 235593 - DNA, 122 bp, Homo sapiens
ccgaaacaacatgttttgttggtcaaaagaaattgaaagaaaaagtttggataaagacttcggacattatatggctgggcttgcaagactactagacaacaaagttacataattttacatta

SEQ ID NO: 235594 - DNA, 122 bp, Homo sapiens
aattcccaggtcttcgaacaaaaccttatacacaaatgttcacagcggcgtgactcacgacggccaaaaggtggaaaccaaccaaatgtccctccgtggagaaacggatacaccaaatgtgg

SEQ ID NO: 235595 - DNA, 122 bp, Homo sapiens
cccgtgtgtcctcaagccatgcaccggtctcaggccctgacatgacacctgaaatgcagacgaacaggcggtggatgaggtcgtggctgccgtggaacctggaccggatcttctctcttgtg

SEQ ID NO: 235596 - DNA, 122 bp, Homo sapiens
gaactgtgggaaaaaccctgccttcaagggtttccaggccatgggaagcctaggatataacgcaggcaacttcagaatcatcagtccaccttgggatggtcagcccataaggatgaagaaac

SEQ ID NO: 235597 - DNA, 122 bp, Homo sapiens
tgagccaccgcacatggccatgtacaattcttgaagaagctgaaactcatctttctttctcggtataagaaaactcaggatatgtttggacatcccctcccatctgccctcccagcctcctc

SEQ ID NO: 235598 - DNA, 122 bp, Homo sapiens
cacccctagagctcacagggtgttccccacctctcatcttgcattgtgattgtgtgcctgcgaagaaaacaaatgagctagttctttccccttgatctcatggacagcttggggagacagaa

SEQ ID NO: 235599 - DNA, 122 bp, Homo sapiens
catactatcagccacttgtgatgctggggaagttcctctacacaagttcccctggtgccacgatctgcttcacgagtctgggcatgtcctgactcctctgtgtaccccagtgtgtccatctt

SEQ ID NO: 235600 - DNA, 122 bp, Homo sapiens
gtccccaacttggtgcagcgtgtgttgacacggccgaggcagagtggagacaggcagccgcggagtcaaggacaggtagagacaaaaagccccatcagccccctccacttctcgcaggccag

SEQ ID NO: 235601 - DNA, 122 bp, Homo sapiens
gtgacactgcagtaagtaaaccttttttgccgaacacttcataagcacagtcaggtactccgtgggtcatagcccagcggacaatttaagtataaatgatatacaccaagatagacaatctc

SEQ ID NO: 235602 - DNA, 122 bp, Homo sapiens
actaaatctaaagggggaaccctcagagaggggtggcactttagctgctggcatcccccccgcttcccgcccgcacgctctggggcgcagaagggccggtcgtcccgggtcatgggggttgg

SEQ ID NO: 235603 - DNA, 122 bp, Homo sapiens
cgccgcggctccgtcaggccgccattctatccctgtggctaagagaccgaggtattcacacgacttcccaaaggctggtactgaaatgagtctggtactggagagagcccacacttcggggc

SEQ ID NO: 235604 - DNA, 122 bp, Homo sapiens
acgtgcagcgtgcagtggagacttaggtgcatggcacagacacgcatgttacaaggggtgcgaccggcagaaggcttgtgcgcgcgcctgaatacatgacggccgcctgcccgctgccgctt

SEQ ID NO: 235605 - DNA, 122 bp, Homo sapiens
ggcccgtttttccaccgcgttgccatagcaacggcctggccggctgcgccccgggccgcccgccccatcccgcgggcccgccctgagccagtgactccagggaccactcaccgcggccggcg

SEQ ID NO: 235606 - DNA, 122 bp, Homo sapiens
ggagctcagctggagtctaactgagcctgggaacatcaggtataggattttggccattgtcggtagatatttcacctctacagaaagatgccataacctcttatgcgagaagatattatgac

SEQ ID NO: 235607 - DNA, 122 bp, Homo sapiens
agcggcgaccccctaccctcccagcgagttgcgctgggagacgctggcgccagggcctgccggcgcggggaggaaagcaaaatccaactaatggtatatattgtagggtacagaatagagcg

SEQ ID NO: 235608 - DNA, 122 bp, Homo sapiens
agctatgggaagtgccatcagggtggccgcagctgcagagagccacttcacctgagaccacgcccttcctggggcagcctgtatctggtgtctgagtgaggcatggtataaacacctggtca

SEQ ID NO: 235609 - DNA, 122 bp, Homo sapiens
aaaacctttttaaaaatccgactttctgaatgctctcttctccattcccagcttctgccacgtcccgggtcccagagtgtgcctgctcagatcccagaaaacttgcaggaacaggaagaggt

SEQ ID NO: 235610 - DNA, 122 bp, Homo sapiens
gcccgctgttgatgtctgcgcgctcctccctctaggggtcatcactctggaccctcagaccgccagccggagcctggttctctcggaagacaggaagtcagtgaggtacacccggcagaaga

SEQ ID NO: 235611 - DNA, 122 bp, Homo sapiens
ccaaactcagctccgcagagaacaatgggattccagcagaacacagcacccgggcaatggcggaatgtgtgcatcgttgcctccttttccagagccttatcctatcacagccctgttagaga

SEQ ID NO: 235612 - DNA, 122 bp, Homo sapiens
actcacttccacttgtcctgttgtgcacaccgttggatgccaggtgacacttgccaaggtcgtaagtgccacaggacttgcagtgaagggaagggttgattggggaagagggatgaggaagg

SEQ ID NO: 235613 - DNA, 122 bp, Homo sapiens
ggagcgggggagctcggctgggagctacggctgccccttcgcggggggcaaggggctgttcggaagaaggtggggggcctcggccggcaggggcgaggtgcttcgacccagagttggggcct

SEQ ID NO: 235614 - DNA, 122 bp, Homo sapiens
gggactgcgatggagtcaaagaaactgaaaaggtgcctgctgcatcatgctcccttaggccggagacagccccaggaagctccaacacagacaaacaggaagacggagctgggccctggcag

SEQ ID NO: 235615 - DNA, 122 bp, Homo sapiens
actcctcccactttgcacctctgtgctcacaaccccattcccacagatttcttccttgcccgactctttcccaacgccgtgctgcagatgagcctctgggtaccgccctcaacctgctgaga

SEQ ID NO: 235616 - DNA, 122 bp, Homo sapiens
acagataggagtgtaggttttgcttactttgttggattttggtagtactgaagtcttaagcgattgctcagatcttcagaggagttagaaagagcagagaaagatagtacatgttgtagtac

SEQ ID NO: 235617 - DNA, 122 bp, Homo sapiens
tgttgcttcgcctggacaagaaggaaaatgctgatttcctccttgggtagaaagagggagcgagggcaaatggggagtagagagaaaacaggcgagaacaagcactctaattccagtgggct

SEQ ID NO: 235618 - DNA, 122 bp, Homo sapiens
ggagataatgtcaagtagggtgtatgtgtcacagcaatcagaagttaatgcctaccactccgggagaactcatactcctgtggtagtgtttaaggaactgctgacacattcttccagcttta

SEQ ID NO: 235619 - DNA, 122 bp, Homo sapiens
ggtaaaaagtcaggaaaatacctaaaatcatgtcacaaaactggttcactagaaaactaccgtctctcctgttgggcatatgttacatagtttccaatgccaatcccaacccctggacactg

SEQ ID NO: 235620 - DNA, 122 bp, Homo sapiens
gtccaccaccgtggactaactcacatctcagagacacaagcgcacatctatgcccgtgcgcgaactcacttctcagagcactggctcatgggcggtcagctggtgtattcattaccaggggg

SEQ ID NO: 235621 - DNA, 122 bp, Homo sapiens
gagcagctctggttagtgtctgctcaattcctctcccctcgcccaaacgtccctgagttgcggcctcgctcctgaccgaaatccccgcgggttctcctcgcagtgtctactggatcccgcca

SEQ ID NO: 235622 - DNA, 122 bp, Homo sapiens
aagaccaaggcaagagttgggttttcatactaaatgagatttctggtttatttaagatgtcgcccaatccagaaatcataatctcagaacagctgccaaattaggtggcagttctgggtttt

SEQ ID NO: 235623 - DNA, 122 bp, Homo sapiens
tcccacctcccctcaaaaaaacaagccaggcaaccaccgcctgtcctgcctgccccaccccgtgtaggcctctccttgtattgtggccagaagctgctgcagtggccaaaaacccaaaggac

SEQ ID NO: 235624 - DNA, 122 bp, Homo sapiens
cctgcatttctaatacaatgctgttatgctaatcaggtgacatcaccgcccagcacacggcgagtggctcctgataaaattacaaaccggcggccgccgcgggcagctgggaggaggtgtgc

SEQ ID NO: 235625 - DNA, 122 bp, Homo sapiens
attgacacatgcacactcagccacctggtcttcttccatcaatcttaccatttctccagacgcctcccttcattcacacacagctgcactttccccagtcctgccctcacatccatgcacac

SEQ ID NO: 235626 - DNA, 122 bp, Homo sapiens
cttggatgacttctccttagtactgttcattgcctggtcccatagaactttctgtcatagcgacatgttctttacctttgctgttcagcatggtagctactagccacacgtggccgttaagc

SEQ ID NO: 235627 - DNA, 122 bp, Homo sapiens
aaggtgatccaggagcagcagccaccaccgagccctgacagtcactgcctggcccgtccgcgctctgaggagggagagagcaagcttctcgctgctggtgtattacctcggccgagggcctc

SEQ ID NO: 235628 - DNA, 122 bp, Homo sapiens
gttaagaagagaggagggtaaaaggacggaggaggaggaaacagatggggtgaatagaaacggtgtaagaactagaacacagggaggaggactcagggcagagcccagagcccactgcagca

SEQ ID NO: 235629 - DNA, 122 bp, Homo sapiens
ggacatctgacgtcagcgcgcccgggagcgcgggccggggaggcggggagccccccaactcgcaggccggagaaaacacgagtagctaggtgggcggccccaaacctcaactcccggcattg

SEQ ID NO: 235630 - DNA, 122 bp, Homo sapiens
ctcgggatcccagggtttgggtcgtacacactcttatgcccttgcacacagccccatccacgtccacgcacccagagttggggacacctgcacactccatcccacatcccttccctgcacac

SEQ ID NO: 235631 - DNA, 122 bp, Homo sapiens
aagagtcccagggtcattaacggaccatgggctgctgggaaacggcttaggagcagcacccggctggcgctggccggccggcgccggggactttcttccgcctggccagacagatccctgtt

SEQ ID NO: 235632 - DNA, 122 bp, Homo sapiens
tcaggatgacagttaggggtaaagacattgattttcttgtagatactggtgctaaacattcggtagtaaccgccccggtcgcccccttatacaaaaagattattgacatcatcggagccaca

SEQ ID NO: 235633 - DNA, 122 bp, Homo sapiens
cattaaaaaatcaggaaacaacagatgctggagaggatgtggagaaatagaaatgcttaccggagaggagccaagatggccgaataggcacagctccggtctacagctcccagcgtgagcga

SEQ ID NO: 235634 - DNA, 122 bp, Homo sapiens
tatgccttgaagacctaaatgacctttactttttctcactaaatataaaatggtcacctgcgtccagattatacatttatagagagagtttgatttgaggtattcaagcatttagacttagg

SEQ ID NO: 235635 - DNA, 122 bp, Homo sapiens
cgcgccaataattcattttttagctcattagctaacggaggctgtgaacggtgatcctcccggggattggaatgaggggaggtgatctactgccggctgcctgctcttgaactggccttcct

SEQ ID NO: 235636 - DNA, 122 bp, Homo sapiens
cagagggggtgcgcttcgaaggaaagcgggctgcgtgggggcaccgtcgattgcacaggacgcggtcccggctcgcgtagccccgcaggcggcgccagagcgcaagcccgcctcgtgactcc

SEQ ID NO: 235637 - DNA, 122 bp, Homo sapiens
tgcgctttatttcttggacatggctcagaggaggggcagctccagagcacaagggcagggcgagaggcagcacaggccagcaggagagaaagccctgtagcccagatcacacacagtctcac

SEQ ID NO: 235638 - DNA, 122 bp, Homo sapiens
cagctctgggagaagcacgggtgcaccgtgggctggagctgaaccagccaacagggatcccggtgcaacatgacccctccccagctccacaggtggcacttatgagacttgcctcttgcagc

SEQ ID NO: 235639 - DNA, 122 bp, Homo sapiens
tccccagaacggactgggagagcgaggtccgggtttccttctatttatttgcatcgatgtcgctccgagtcttcagcactgggccgcgtatgacagcatcttagtgggtgcggagcgggaca

SEQ ID NO: 235640 - DNA, 122 bp, Homo sapiens
ggtgatcgatcagctgaacaatggtcagatcctggtggagatcccaggtcctcagccaggcggcaggagcccgcgctgcccggctcgggctggctgccagttgacccctctccccgtccctc

SEQ ID NO: 235641 - DNA, 122 bp, Homo sapiens
gccattctcctcgcagatctggtggacagctgcaagccaggagacgagatagtaagtggccggggcaggctgggagggagccaagttgcagagggaactggcagaagcagttgtggctgggc

SEQ ID NO: 235642 - DNA, 122 bp, Homo sapiens
attttctgtccatgccctcatagggcctcagggaaactgctagatttaggtgaagagcaacgtgcaaaactgtctttgatttatgacctgagtctggacttaaaccgagtacgaggcatttg

SEQ ID NO: 235643 - DNA, 122 bp, Homo sapiens
ttcaagtcccagctctgccactggttagctgtgggatctcgggtaagttgctctccctctcggcctcacggacctcctgaataaaaattgagggttagactggatgatctctgaagccatct

SEQ ID NO: 235644 - DNA, 122 bp, Homo sapiens
acgacggggccgcgccggctcttcggcgacagcaaggccggcatctaactccacaccgtccgcgcttgcaccgcgcacccaggcttcgtacccagctcccaggtggggaccgcgcccccgcg

SEQ ID NO: 235645 - DNA, 122 bp, Homo sapiens
gacatctgatggttttataaggggctcttcctccttcactcgccttctctcacctgctgccgtgtaaggtgtgcctgcatccccttctgccatgattgtaagtttcctggagctttcccagc

SEQ ID NO: 235646 - DNA, 122 bp, Homo sapiens
gcaagggccagaagcactgggaatgaagtacttttactcccccgcaagtttcaaaagtttcgaaacccagggtaacccctcggggctgtagccagagggcctcggtggtggggggtaaagga

SEQ ID NO: 235647 - DNA, 122 bp, Homo sapiens
ttatagaattcctttatctcatcccatgcatggccacctcacccaccatctgagttgatgcgtatgggttagaggagctttgtgtgagggcgtggaggcattggggcgattctggcaccagt

SEQ ID NO: 235648 - DNA, 122 bp, Homo sapiens
tgacttcacggcagccaactgagctgctgaacgctgtttttttctacgcagaaaccctcccgactttcacgaggagttgacaggttttcctcttcactcgggctcccttgtcatcgttaaac

SEQ ID NO: 235649 - DNA, 122 bp, Homo sapiens
cgacggcgccaccgcccggacgtggccccaggagccgggagaggccggctgaggcacatgcgtactgggagacggacaaagtcccacaatacctcgcttcgtcactgccaaatcagactcag

SEQ ID NO: 235650 - DNA, 122 bp, Homo sapiens
gcagagctgtgatcatagctcactcaaactcctgtgctcaatcaagagatcctattttagcgtcccgagtagctggaactacaggtgcacatcattacgctcggctaatttttttgttgaga

SEQ ID NO: 235651 - DNA, 122 bp, Homo sapiens
ctggcaaagctgtacatgcatctttcattacaggagagccacaggcatgataagagcttgcgtctgtttttccacaattttagctccttctctacatgagataagactctcgcttagtgcaa

SEQ ID NO: 235652 - DNA, 122 bp, Homo sapiens
gaaggagcagcgccggcggctggaggtgaggcgcgggtcccggcgggagggggctgacggcgagtggccccctgacaaagtctccacctcactcccgaccaggtccaggtgatgcaggggac

SEQ ID NO: 235653 - DNA, 122 bp, Homo sapiens
gcacccacacctaatccctgtgttccttttgaattgctgctgtcaaattaccacaaatgccgtggcttaaaatgacacagggagatttgaccccagaatgtggctatgtgatgacgatggga

SEQ ID NO: 235654 - DNA, 122 bp, Homo sapiens
gaacatgtggaaggccagctgtctcacattttggtaggaggattattccatgggacgagtcgattaaaacttgcttttgaactgcgtgtgctgtgcatggtgccccttccccaccaggtatc

SEQ ID NO: 235655 - DNA, 122 bp, Homo sapiens
cgccaccagtgcggggcctgcgcctcctgctctgctcggcgccggtagcggtcgaagctccggtacttctccagccgctccaggttgctcaagtcgatgtcactgttgggcatcggccccag

SEQ ID NO: 235656 - DNA, 122 bp, Homo sapiens
gggagggggtagaagcaccggaggtgggtggttgggagcgggtccctaggcggttccgcgcggtttttagtagccaagactgtatccctttctgcggcaatcatttcctcctagacttctgt

SEQ ID NO: 235657 - DNA, 122 bp, Homo sapiens
gggggagggggcgtggaccctgcgccagggttcgctggcgcacaggtgtgttcaatgactcggctccggccgagacccgcggactgctgaggagtggtccctgggagactgtcacctgctcc

SEQ ID NO: 235658 - DNA, 122 bp, Homo sapiens
acacagaggtgatgagatcgggtaacccacgggcgcccgagccccagccgcgcaagctcacgattgggccagaagtgaggatgaacaagcatttagcccaatagaaagtcgtagttctcttg

SEQ ID NO: 235659 - DNA, 122 bp, Homo sapiens
tggggcttagagctgcgggcgacggcagaggcggtgctggcagctgcagtggcggcgtcacgatcagctgtcggggttactgctgacgcttctgtcaggtggttgaagattacgttggaaga

SEQ ID NO: 235660 - DNA, 122 bp, Homo sapiens
cacacaagaggcccggcgcaaacacaacaaagcccgcagacattctgtccccacgaagaacggacgccactcgacttcctagcatcttgacgggctatccaagcgcggagtcagtttataag

SEQ ID NO: 235661 - DNA, 122 bp, Homo sapiens
gcttaagagattcagtttaatgccttattagctgtaaaatcaactgctgtttcaactacgcggtgtgaggagcagtgaaaaggcttcggttcttggcgaaactttccctctgggcttctgac

SEQ ID NO: 235662 - DNA, 122 bp, Homo sapiens
aaggcagacctactgctataagcccagggggaacccggcatccacagaggagaaatgactcgtccaaggtggcacagtggcagtgagaaagaagggcaggcacagctgcaccccgtttctcc

SEQ ID NO: 235663 - DNA, 122 bp, Homo sapiens
ggctggggtctcggggcggcagccaagtgaggctgcccacagtggtgatggccgcggcggcggcctcgccacgtgacccggacgggcggaagcggaagtgccggcctggagcccgctctagg

SEQ ID NO: 235664 - DNA, 122 bp, Homo sapiens
tggtgcggagcctgctgcgccgcggggcctcggtgaaccgcaccacgcgcaccaactccacgcccctccgcgccgcctgcttcgagggcctcctggaggtggtgccctacctggtcggcgag

SEQ ID NO: 235665 - DNA, 122 bp, Homo sapiens
actagcacatggggatagatgatataaaacatctgtcacaatagggataagcaaaaacaacgtgcctttgaagattgtgttttaatgatgaggtggggggttctgtctctataataggaatg

SEQ ID NO: 235666 - DNA, 122 bp, Homo sapiens
ggtgtgcggagccctgttttctgggctccggcccccagcccagcccagccgccgcaggagcgctcggccagtaggtgtctctgctcctcgggcggccttgagcagtgcctaacgttgagcgt

SEQ ID NO: 235667 - DNA, 122 bp, Homo sapiens
acgcagtcgggttcagatccggcccccacagagcccaccccggaaatcacgaccatcccacgcctcagagccaggcggctcccagcctctggcaggcttagaccactcctgggtctccgggt

SEQ ID NO: 235668 - DNA, 122 bp, Homo sapiens
cagcaggacacgcatgcagggtcacgggtcagccacccgcaggacacgcatgcagggtcacgggtcagccaccagcaggacatgcacacccatgtgtgcacatgggtaggtgtgctcgaccc

SEQ ID NO: 235669 - DNA, 122 bp, Homo sapiens
ggggctgcgggtgggaaccggggctgcgggcggtacttgcgggccgtacttgcgggccagcgcgagttccgggtgggtgtgggctcggcgggccccgcactcagagccgctggctggccctg

SEQ ID NO: 235670 - DNA, 122 bp, Homo sapiens
gacccacggctccaccctctctcccctggaaaggacaccatgagcactgaaagcatgatccgggacgtggagctggccgaggaggcgctccccaagaagacaggggggccccagggctccag

SEQ ID NO: 235671 - DNA, 122 bp, Homo sapiens
aaaatgcacatccagcagtgtcacttctctgcctaaagttcttgcatagctcccagctcacgggagaaagtccaaatgtcctaatatggccatcaggcccttcgggacctggctatgcctcc

SEQ ID NO: 235672 - DNA, 122 bp, Homo sapiens
atgaacaattttctttcaggcacctccgctgagcttttaaaccaagtcattgggacttagcgtctttctacccggcagggaagggaggagttggcaagaatttggctcacccattccccctg

SEQ ID NO: 235673 - DNA, 122 bp, Homo sapiens
tgggttgtctgtcttgtcttggcttggattctcccagaaggagatcctgagtcaatgattcgggtgcaagtagatttcttctgggagcctttctttaataaagcacttgcacctgagtcatt

SEQ ID NO: 235674 - DNA, 122 bp, Homo sapiens
aaagacagaaagaaaaagggagaaaggggagaaagcgtggaggaaggagaggtgaggacacgagcaagggaggaagggaggatggaacttaattatggtacttatttaagccctttaaaaat

SEQ ID NO: 235675 - DNA, 122 bp, Homo sapiens
taaagcagaggaccgagacaccgggaagttgcgggttgctgatggccagataggtgagcacgttctggaagaggcgcccgcccgggacactactgcctcagtcatgtttcctgcacttggac

SEQ ID NO: 235676 - DNA, 122 bp, Homo sapiens
gaatagctggccttggaaatggcagagctgacagctcaaatctctcagctggaactggcccgacagaagaaagagagtgaggctatggagtggcagcagaaggcccagatggtacaggaaga

SEQ ID NO: 235677 - DNA, 122 bp, Homo sapiens
cctccagcctctgctcctccgacaacgaggactcgtcctacagctcagacgacgaggacccggctctgctgctgcagacctgcctcacccaccccgtgcccaccctcctggcccagcccgag

SEQ ID NO: 235678 - DNA, 122 bp, Homo sapiens
tacttgaaggcagaaatgcagtattttactgttttctattattttcaatgaggggaaaaacggtaaaactctttttgaagtcatcagaccttccatttttggggatgaggaaagagtctcac

SEQ ID NO: 235679 - DNA, 122 bp, Homo sapiens
cgctctgccggccggacgctggcttcaacgcgactccgacttaggttcacgcgccgcttccgcctcccccggccccgccccgaccccgccccggcgttcgccccacgcctcggccctccccg

SEQ ID NO: 235680 - DNA, 122 bp, Homo sapiens
ccaggggcagcacaccgcccgagtccgcgacactgataacacctcctgcgggcaggagggcgccacagccacccctggtcccctagattgtgtgaggctagcatttctgcccgcctcttggc

SEQ ID NO: 235681 - DNA, 122 bp, Homo sapiens
gatggggaagacggaaggcaggtgagagctggaaggcatatcaagagctccatgtattgacgagagtcagaagctccaagaaagatctgagctagaaattaaagtgtgggcatcatgggcat

SEQ ID NO: 235682 - DNA, 122 bp, Homo sapiens
aaaggggtggggtgggggggagtttaatcattgaaccaagcaggctggaggtatttagtccgcaacacctcgctccccaggaggtctgccagcctggactggaagcgtgcaacactccagag

SEQ ID NO: 235683 - DNA, 122 bp, Homo sapiens
agcaattgtctcagccggtgactcaaggaaggaggagattcgtgggcaaaggcctggagacgctgtttgcccggcagccacgtacaggcgcctgcgtcccggcctctgctcgcctcgtgatc

SEQ ID NO: 235684 - DNA, 122 bp, Homo sapiens
caatgggagcccggcctcaggaccttgtctggatgaggggcattgttctctgagtgcccacgtgggcagagaaagtgcatgtggatgttggtgggctgtggagccccctcactgcccatgcc

SEQ ID NO: 235685 - DNA, 122 bp, Homo sapiens
ctaaaagctttttgggttaaggacatggtcattccatgttacagcttattttttcctaatcgaaatccccaaatgatcaatttcctagtcttcttccatgctttttctccactgcactatca

SEQ ID NO: 235686 - DNA, 122 bp, Homo sapiens
tataaaaatataataactgtgatacagtaaaaagactcagcagaagtttcccttgtaactcgcgtggccaaagcagatatcaaataaaagatgaaataaacaggaaatccatagaacgtgaa

SEQ ID NO: 235687 - DNA, 122 bp, Homo sapiens
agttaacacgtcacacagccaggttagcacgtcacactgagaatcacaggttagttaacacgtcacacagtcaagttaacacgtcaaactgaccatcacaggttagttaacacgtcacacag

SEQ ID NO: 235688 - DNA, 122 bp, Homo sapiens
acccgctggcactttcttccctgtcacgaattcagcctggcttcctttggcctgagacagcgtcttcaggcgggtcggctcggacctgcccagtggggcgcccacctgcacccgcacccgca

SEQ ID NO: 235689 - DNA, 122 bp, Homo sapiens
gctagggtctgttaagatctcatagggacccagggccagtgttaaacaagccagagatggcgtaatgatgcagaaggttccctttggtcacactaacaagcagacaggcagacagacccaga

SEQ ID NO: 235690 - DNA, 122 bp, Homo sapiens
gtctcgttggggtcagccttcgccaaggccttcgctggcgcccgaggcagcctcgagggacgagccccaggcactcttgtcggggcttggggctgtgggacctatgcctccccaccaggtcg

SEQ ID NO: 235691 - DNA, 122 bp, Homo sapiens
ggggagcccgtcgaggtgcagagtagcagccggccagggacgctggggtgatgggggtgtcgccgccgccgcttgggggccgccggcgtcccgcaccccggggccccgagccccgcatcttc

SEQ ID NO: 235692 - DNA, 122 bp, Homo sapiens
gagagaaatcaggtagggcttcctgtaggaggtaatggctgacatgaaggaaggcatttacgaacctagactgcgttcacccatttgtgatgaagacatcaagagaaggcagcagttcacac

SEQ ID NO: 235693 - DNA, 122 bp, Homo sapiens
atagaggaggataagaacaaaacacagtgtggcctgtttattgaggagtcccaaacctgccgtacagccttccctgatccctgctcctcaagctgagatctagttcttaattcttggttcat

SEQ ID NO: 235694 - DNA, 122 bp, Homo sapiens
ggggtttccgcttccgggagaggctgaccgtttccgcttccgtccacttggcgagtgagacgctgatgggaggatggacgtactggtgtctgagtgctccgcgcggctgctgcagcaggttt

SEQ ID NO: 235695 - DNA, 122 bp, Homo sapiens
gggcagagggcgatgagtcacagatgactcaggtgctggaggccacagccacgcatggcacgtgacagccaaggagggccaggtctatttctggaccggatagacaggtgacccaggaggct

SEQ ID NO: 235696 - DNA, 122 bp, Homo sapiens
cactggactccagcccaggtgacagaatgagcccgtctcaaaaaatatatatataaaggccgggcgcggtggctcaagcttgtaatcccagcactttgggaggccaaggcgggtggatcacc

SEQ ID NO: 235697 - DNA, 122 bp, Homo sapiens
tgaactctgggcgtggccagagagatttcctttacatgacagcttccggtagggcggggtcggggtcgcgttccgaaaagtggatccacctgccacctggtggcagatgaggaaaatgctat

SEQ ID NO: 235698 - DNA, 122 bp, Homo sapiens
tccttttatagcaagatcccaagctgatcccaaaagcccattcagaaggattttattatgcgagtcaccaaaaatcagttacaggcaagtttgcctttacgttaacagctaaggagcctcca

SEQ ID NO: 235699 - DNA, 122 bp, Homo sapiens
ctaactatagcaataaggtaccatatatttttagtgcttttttctctagtcagtgctttgcggtataataccgcacatcctgtgttgtgaaaaataaacagagctgtcgaataagctctgct

SEQ ID NO: 235700 - DNA, 122 bp, Homo sapiens
gcgcccgctcaggagtgcagattttagagaatgcaagtcagcgtttcaagtgtagaagtgcgggatcatttctatagacaagagttcagggaagtgtactagaatgttagggggttttttgg

SEQ ID NO: 235701 - DNA, 122 bp, Homo sapiens
gggctcctccactgcagtagtcccatgctggggacaaaggtggatcctgttgaggcaagtcgctccccggctcccaacatcagttagacttttgtttgagtttccagcaaacaagcaggctg

SEQ ID NO: 235702 - DNA, 122 bp, Homo sapiens
tacccatacgtagcccggggccctgcattttcctcagcagcagggccaggcccaccgtgacggctccgcaccgacgcacccttctcagggcaagatcgacacagagtgctctccagggccac

SEQ ID NO: 235703 - DNA, 122 bp, Homo sapiens
gcaccatatcccctgcctcccagaatcctcccttggtaccgaggttttagaggccagaagcgagaaaggaaacaagcttgctgggccctcctctggcggactcattatcggggataaattta

SEQ ID NO: 235704 - DNA, 122 bp, Homo sapiens
cgggcgggcgcggggttgggctgaggcgggcggcggcggcggcggcggcggtgggctggccgcggagggggaggagcgggagctgcgcgaggcaggcgggcgggcggaggatggggcagtgc

SEQ ID NO: 235705 - DNA, 122 bp, Homo sapiens
gtgtggagggagaggtgtgggcaggaaccggggctgcgccatggtgctcgtgggccaccgcgagttccgggtgggcgtgggctaggtgggtcccgcacttggagcagccggcggcgccaccg

SEQ ID NO: 235706 - DNA, 122 bp, Homo sapiens
atcgacttacgaaaagctccagcagcaacgtggaaacccaattcctgtgatggagacaaacgcttcctcaaaatttcctaggttcgaagccctcctcgctgccacaaccaagtcctgcgtgt

SEQ ID NO: 235707 - DNA, 122 bp, Homo sapiens
ccttcagagagcacatagctccttcctgctgctctggagtcctgtaagcaggacaacagccgtcgtgataatgccagactcgctcctgctcttagaactgagttgggatcattgccatagag

SEQ ID NO: 235708 - DNA, 122 bp, Homo sapiens
ggcctccaaacagcatttattggccggcttcgcgccacgagacgcgatggacgtgatcgccgccctcatcttctgcggcgaacttctagcgggtgacgctgtccaatcggaaagcgcctttc

SEQ ID NO: 235709 - DNA, 122 bp, Homo sapiens
gtgggaggccaagtccactgcccggaagtcttgtcagccctaagccagggaagcctggagcgtggcctggcgggtctgggtggacaccgtccccactccggactcccagcacaggggaggat

SEQ ID NO: 235710 - DNA, 122 bp, Homo sapiens
ttccaaacaacccagaattaacaccaggggagagagttcaaacttattatttttggtgaacgttccagaaatacaagcacccacagaggtggaattttagaagatgacaaagtcaacactaa

SEQ ID NO: 235711 - DNA, 122 bp, Homo sapiens
gaccccaagaagaaaacactgccgcccgctgattggctgagcggggctggaaacaggcgtcgaccaatcagcagccagccccccgcccgccccgccgcgagcagaagccggttccggccgga

SEQ ID NO: 235712 - DNA, 122 bp, Homo sapiens
gacacacagaaagagaaaacagtggagagagaggagagaggccgagacgcccccaccatgcggcactcaccacaaacacacacagaacaacagcgatgatgatgaaggcagtgcgggcatga

SEQ ID NO: 235713 - DNA, 122 bp, Homo sapiens
gttatgctactttgaccattgttacatggacagcaagtttcagagacaagactgagaccccggtctgtctgcttcagtgccctcgtatcactcattcattcaacaaacattcatcaagtacc

SEQ ID NO: 235714 - DNA, 122 bp, Homo sapiens
ataaattgcatgttatgcgttgtttcacagttcattgataattcttgcctgatggtcatacgatggtgattttaaaaattctcttattctttctacacttattatttgtcattctattataa

SEQ ID NO: 235715 - DNA, 122 bp, Homo sapiens
acaaagcagcaaaaagaaataagatgaaactatgttatcattggctctcctttaaacatacgaaaaactctcagaagagataatgtgctgtagggaaaagctctgtgtgggcacagggtgtg

SEQ ID NO: 235716 - DNA, 122 bp, Homo sapiens
aggagatgggacctatgtagctagataagggggcacaggcctgccaaccagagtaacaagcgtgagtgttagtgatgctcggctccatgtcccctgggcccacctctgagctcaccggcagc

SEQ ID NO: 235717 - DNA, 122 bp, Homo sapiens
gaggagagggaaggagaataatttaaatgaggccagggagcttctgctccctcaattaaacggtgatagacggcctgacaccaccagccctcgaagcctgagatccacaggaaatgttaaaa

SEQ ID NO: 235718 - DNA, 122 bp, Homo sapiens
ggaagggtccggagaggggccacaggctcctggcctttctaagcacaccaagtgcccagtcgcggacccccgggaccaggatgcgctgacgacccggctggcaggcgggtcctcgtgggcga

SEQ ID NO: 235719 - DNA, 122 bp, Homo sapiens
cttggatcgtgcatcccacccccaccaaagggagattggctgaagccaaggacccgggcgcggtctacgtgggatttctctgcaggctgaggggacaagtggctgtgtctaccaggggccca

SEQ ID NO: 235720 - DNA, 122 bp, Homo sapiens
cttggagtcggctcagaatcaggctgctaaaggtccctggagcccctcccccagcgaatccgagcctgcagcttcagcaccagaggctggacagcgccccggccctagggtgcccatggtcg

SEQ ID NO: 235721 - DNA, 122 bp, Homo sapiens
gcttccctccagcctctcctccattccctatgggttctgtgaccactgctggaccaaggacgtggatgaccctcccctagtcactcatccatcccctggctccagagatggtcacatgaccc

SEQ ID NO: 235722 - DNA, 122 bp, Homo sapiens
cccggagtgcggtgcctcgtggctgaagggcagctcttctccccgcagtgcagagcagagcgggcggaggaccccgggcgcgggcgcggacggcacgcggggcatgaacctggagggcggcg

SEQ ID NO: 235723 - DNA, 122 bp, Homo sapiens
aagttttgtgccagaaatggagccggacctggcgacttttactgcccctcaggcgcggggcggcggtcgtcaactacagttcccatcatgccacgatccgcctggagtaattctccacgcct

SEQ ID NO: 235724 - DNA, 122 bp, Homo sapiens
aagcaggaagtttgcaccagagccaagaagagagcttgcagctgccagggaatggcctggcggaggaagcgcagcctcgcccagctcagcagacctgcttcatgacagaggcagctcttctg

SEQ ID NO: 235725 - DNA, 122 bp, Homo sapiens
tcgggggccaggtcggttgggtgggtgggtgtctccacagtctgcgtgcgtgggccagcgcgttcgtcttacccttccctccaccccggcccctctccccttctcccctaacctcctacccc

SEQ ID NO: 235726 - DNA, 122 bp, Homo sapiens
ggttgtctgtgtcccccaatgggacatccctgggtggacaccccccctccccaaccttctcggcgctctcccgtggcccccagggagggtggacaccactttgaagacaccggggttctggg

SEQ ID NO: 235727 - DNA, 122 bp, Homo sapiens
tcaattgccttcatatcaaccctgtggtcctgttctccaatcctgaacatacgccagcgtcgtccatcttctttttcctctgctgctgtgtattcagtaattgagcctttcctaattacttc

SEQ ID NO: 235728 - DNA, 122 bp, Homo sapiens
ttgatgttgacattctatctctgagtaaagcattttattatgagttcctcagattgttgacgtactgattaatgtagaacctgatgacactgaataggaccatgatttatttctaagttaca

SEQ ID NO: 235729 - DNA, 122 bp, Homo sapiens
ttcttgctccctgcagcttttcctgaattccaatcagacacacagggccctgtctgaaatcgtctggacaaatcccccaagacattgatgcctgggagggcaggttaatgatgtggctccgt

SEQ ID NO: 235730 - DNA, 122 bp, Homo sapiens
ccttttcttctcacgtaacatccttaaattgtggtttatgtgcaaaagatttccaaatgtcgatcctcaaatcacctgagacctaaacccacattttcagctttctgctgaacatctctagc

SEQ ID NO: 235731 - DNA, 122 bp, Homo sapiens
ggcggcggcggcggtgagtgaccgcggtggtggcgccggcgggaccgtgagaactcgcggcggctcgcagcctcacaccaaacacccacgacgtcggcactgctgtgattgctgcgggcgcc

SEQ ID NO: 235732 - DNA, 122 bp, Homo sapiens
acgcctggaagaaaccaatgcttgcgggttgctgcaactacagggagcaagtcacctgtgcggggccgagacccccagagtctcgcgctgggaaaagttgtgcggggaggggaggacgtcgg

SEQ ID NO: 235733 - DNA, 122 bp, Homo sapiens
gttacacttttagggtgtaaatcttcgattttttggttctggacttgcattttaaaacttcggattcaggctgtgctgtttctgattacatttggtagtctgccaaatactaaggttttaaa

SEQ ID NO: 235734 - DNA, 122 bp, Homo sapiens
cttggtcaccaggggcactctccactgccagaccctgctctggaccatcaaggcaacagccggggagtgtgggcgatgtccccgcccatcacttctgcaaaacccaggcatctgagcctcac

SEQ ID NO: 235735 - DNA, 122 bp, Homo sapiens
gaaacgctatgcgatagccacgcatccaccacccaggacaggatgtgagggaagcagaggcggcacgttccaaggacgtgctaggtttgcagccatcaggactcgcatatgctactggtaga

SEQ ID NO: 235736 - DNA, 122 bp, Homo sapiens
cgcgaggagccggcacaaaaggcagcgggacaaacacccacctctggccggaacaaaaggcggcagtgccggccgcgtctcccgtccttcccggtcccacggctctccccgtcgccgcggcc

SEQ ID NO: 235737 - DNA, 122 bp, Homo sapiens
gctacaatgagtttcctccagagtttgtataggtctgttaccacaactggcttatttctgcgtggggcgcccgatggggcactctgtgagggcaggtgtgtgagtagaacgccttcaggcaa

SEQ ID NO: 235738 - DNA, 122 bp, Homo sapiens
ttcgaggaccggaaggggcggggcggggccggtcactcaccactccgccgagcaggaccgcgggagcccgccccccactcatgcggcctacgctggtacaggagagttgatctcaaaggcca

SEQ ID NO: 235739 - DNA, 122 bp, Homo sapiens
agggggcggggccgcggcgggggagggggcgggacgagcggccggggtcccgaccccaagcgcggaaggaaaagccgggtaacccaagtaacttggaagacagtttccgctgccgtgcgagt

SEQ ID NO: 235740 - DNA, 122 bp, Homo sapiens
gcggccccccctcagcgcggcatggctcccggttcggtccctcgctcctcgggccgccgccggctcctccgggccgctcccgagccaccttaaaatgacacacgcacacagggacacacaca

SEQ ID NO: 235741 - DNA, 122 bp, Homo sapiens
actggaaagttgtaatcctatggtccgaggggtaggctcgggctgagcaggtccccgagtcgccactgctaagtatggggtattccaggaaggagttcattcttgcattgtccatctgtcac

SEQ ID NO: 235742 - DNA, 122 bp, Homo sapiens
gtaaaaatattgcaaacagatattgttagtctcgtttggtaactgaaagagctctgagaacggaaaagttagagtgacctatccaaatgaaggagcagttcagtgttggtgcaggatattag

SEQ ID NO: 235743 - DNA, 122 bp, Homo sapiens
ccgtgctctgcgcgcctccaccctagcgcttgtcttggctcctagaaccaggggcctggacgctgctcagggcagaggcgccccctctgaggggctggcccctcagccgcactccgagacag

SEQ ID NO: 235744 - DNA, 122 bp, Homo sapiens
gcccctggtcgggattccgagacggggatttaaggttttggaagtggcaccgtgctgcagcggtcacgccaacttcctaggcacactctggtttctctaggtttggagctgcctcagtctgg

SEQ ID NO: 235745 - DNA, 122 bp, Homo sapiens
cccaggtgggggtcggggtggcactcaccacaccaaaggacagctcctggtgcagcggatcgtggggcaggtagtgcaggggcaccgacggggaaagggctgggccaggcgcagaggtggag

SEQ ID NO: 235746 - DNA, 122 bp, Homo sapiens
gccacctctgctccctgtcccctctcttcccagaacccagcagtttggcttgtagcccctcgccatctgagacagttcccagaacccaggttctcagggactcagcagttggagttgggccc

SEQ ID NO: 235747 - DNA, 122 bp, Homo sapiens
cctgtgactggaggaagtgccctgtgaggctgggaccgccctggtggaatatttcttccacgtggctccattccaggcttctgagtttccctggggcagctggcatgtgagcagtgactgct

SEQ ID NO: 235748 - DNA, 122 bp, Homo sapiens
cccgcgcccggcgctccctcgccgaccgccaggcccgagaacgcccgaccccgcggccgacgctaccgggcccagctttcgcaaggaaagggcatctccgaacttcgtcggaggccacagca

SEQ ID NO: 235749 - DNA, 122 bp, Homo sapiens
cccatttccggcctgggggcagggcctcgggttcctgcatcgggcctgagcagaactaggcgcgccgcggcccggcacgcgcaggcgtacagagctccccgggggtgccagttcctctccga

SEQ ID NO: 235750 - DNA, 122 bp, Homo sapiens
cttcacagtccataggaagaggcatgggtcgttgaggcttttgggattctccctactctgcgtctggaagctcagcagttgaaaggggctgcctctggtttacatcgtgtgtctgtctgccc

SEQ ID NO: 235751 - DNA, 122 bp, Homo sapiens
ctccttctccctcctcctcctccaaggcacgctgagatttggagcggaggagctgagccccgcgggaaaagcagaaaagggtcattgccactttaaatgactcaggaagtaaaaggaggcct

SEQ ID NO: 235752 - DNA, 122 bp, Homo sapiens
attcagtcaaccctcacagtccttaaaaccacaaaacccccatgaagcctgtgcggctcccgaggccacatgaccggatcagtgaggctgccagtactcagcatgctgccgttagagggagt

SEQ ID NO: 235753 - DNA, 122 bp, Homo sapiens
cctcagtttcctcctgtgtgtgatgcacaggccggagggcgggatacccctgaaatgccacgacccgattgtcatccaggtcagattccagagcactcactgcacgcctgctccaccctgag

SEQ ID NO: 235754 - DNA, 122 bp, Homo sapiens
gctttccagcctttggtgcttacaggaccgcgctgttccggcttcttcacggctgacattcggctaacgagggattactttggccaaaacctttcaaaggatatgcagaaagatggtaggga

SEQ ID NO: 235755 - DNA, 122 bp, Homo sapiens
gattgttcctgtaccatgtaccttcacagcatattctattccaactatgatcaaaatgaccgaaccacatttttccattaagagctgtgtgcctttgagtaaattaggttacatgtgttccc

SEQ ID NO: 235756 - DNA, 122 bp, Homo sapiens
ttggaaacatcaaagccaaacactctaaaatttgtcctcagacaagaaaaccagcaattacgttgaaaaagtaatgaccgtatactcaccaaatggccagatgtgtcaatagcggtggctat

SEQ ID NO: 235757 - DNA, 122 bp, Homo sapiens
tctctcacagtcttttcattcctttacccttgatactgtggtgcactggcaaaggtgttccgacccttcgcccactccctaattagctaattcagtcttttctctctctgacctatcttcag

SEQ ID NO: 235758 - DNA, 122 bp, Homo sapiens
ttatacctacccctttccaaaaaggatttgaagatataaaataaaagacatgcaataatgcgtgtcaagtaatggatgatggtttggggtataaggacagaaaatttcataagattcaggtt

SEQ ID NO: 235759 - DNA, 122 bp, Homo sapiens
aaagtctagacctgggcccgagaaacagcctcttaagccccccaggtgccttcttcggctcgtttgtgtgcttacctttcctggagctcccgccatcgggagcctcactaagccccgcaaag

SEQ ID NO: 235760 - DNA, 122 bp, Homo sapiens
cgatgatctccaccttgccgtgctggaacacccccacacaggagtaggtggtgcccaggtcgatgcctatggcgattcccttggcagtagccatggttctctgaggcctatggagaaagaat

SEQ ID NO: 235761 - DNA, 122 bp, Homo sapiens
aaactttttaaatgtttaatcattcaccactaggcaaaccgtcataatagcattacagttcgcattatttctgtagtgtctcttatgtaaaaatgctttcatttctgatcttgcaatgaagt

SEQ ID NO: 235762 - DNA, 122 bp, Homo sapiens
tctactgctgcctgcgaaaaaggaaggtggattaaaagaaatcttttttgcaagtctcagcggcccactgtggtctgcagtacaaagaaaggcacactctagaaaaaaagaatttctctctg

SEQ ID NO: 235763 - DNA, 122 bp, Homo sapiens
tgaccttgtgatccgcccgcctcggcctcccaaagtgctgggattacaggcgtgagccaccgtgcccagcctgtcctggttcttaaaggcagttgagattggaaatatttagtttggttttg

SEQ ID NO: 235764 - DNA, 122 bp, Homo sapiens
gagtacatctaaccatgtgatggtatgtaagtttgtatttggaacaatgctctcccacaccgaatgctagtgtacctatagaatatttagggacaaatacataatttttccagaaacagata

SEQ ID NO: 235765 - DNA, 122 bp, Homo sapiens
tatcatatataaatcataagcatattatttggttggttggtgttagttcattccttcaatcggatgatttaaaataaatgtttttcaagtatcctctgtgatgtatcccaaaggttagctta

SEQ ID NO: 235766 - DNA, 122 bp, Homo sapiens
attgggaggggggatggtgctggggaggtggcacatacaccgggggaggcctggccagtgcgcagcgggtgtgcgtgtgtgtgtgtgtgtagtgtgagcgagtgtgggtgtgtgcatgtgga

SEQ ID NO: 235767 - DNA, 122 bp, Homo sapiens
ggttgtcgggccgacagatccgggcggggcaaagccgggcggggaaagctgggctcgtcccgtcccggccccgcccccaccccgggagcccgataccggtttcagagtcctgggcagcgtgc

SEQ ID NO: 235768 - DNA, 122 bp, Homo sapiens
gcagggcacacagaagcaagccagcgacagtctcatctgtgaaatgggcctggagccgggcgttctccgaggctgaggccactagctgatgaccggcctccggcaggagggagccgagccag

SEQ ID NO: 235769 - DNA, 122 bp, Homo sapiens
gacaggaatctgagtggctcctcatgagaaccttccgacggaagtgacgtcgttacgacgcgcgacccctgtagactcgtccctccggaaggctcagtgcataagtgggcagtcgttcaacc

SEQ ID NO: 235770 - DNA, 122 bp, Homo sapiens
catcactaatgtcctgtgagggactttcatttttgggtacggtgcagtgatctgcatcttcgctctctggttcttcaggattgctttaagtggcaccagctattttagcattatcttttgca

SEQ ID NO: 235771 - DNA, 122 bp, Homo sapiens
acttgcttcccactgtaacctctttatattcaataggatccttgggcagggaattttccacgctataaagtcactcccctccagtggagcagcagagtttccagtccacacagactgcttgc

SEQ ID NO: 235772 - DNA, 122 bp, Homo sapiens
ccagccagagatggaaagaacaggcacctaaggccccaagttgctggcatccgtgagctccgagggggagaaggacgaagccgccctgcaccccgctgggctccagggccgcgcgggtgcca

SEQ ID NO: 235773 - DNA, 122 bp, Homo sapiens
gcctgagggggacccgaggtcagtggggtttagccagagtgaaatacacaaatcagaaggcgggaggtgcccgcgcgggcccggaatgtatgtgctcaaatgcctctgtagggtatggtttc

SEQ ID NO: 235774 - DNA, 122 bp, Homo sapiens
aaattgggctgaagggagatgtaaggccttggtgggaaataaatggcactgtgttgttgacggaaaaagatcttggcaggactgttgttgtgagtgttctgtggcttagaaaggaatttcct

SEQ ID NO: 235775 - DNA, 122 bp, Homo sapiens
gagggccccggaccagcgattctagaagccggtccggggccgggcagtccaatagcttctcgcggatttccctccgctggcgcgcagcagcggcgcgtggattcgcgcgcgggctcgggacg

SEQ ID NO: 235776 - DNA, 122 bp, Homo sapiens
cggcgggcggcgccgaggcggcgttgggcaggtccggggatttggggcgcggaggcggagcgcccccggagctcaccaggtgcgccacggccgagcgcacccggtttagcatgctgcctccc

SEQ ID NO: 235777 - DNA, 122 bp, Homo sapiens
aggtgggcgcgtttgacaggcagagaggaggagctgacgcgccagcctccacggtgctggcgtcactgcctctcctgcggcaccacgctgcggagcacttaaaatacccacgtcctacagga

SEQ ID NO: 235778 - DNA, 122 bp, Homo sapiens
cgccgccgccgccgtctctgtctctcatctccctcgcctgagcccggcctcgcctcacagcggctcaacattcaaacttccatcacggctgcagcttctgagaggagagcatcttctaggtt

SEQ ID NO: 235779 - DNA, 122 bp, Homo sapiens
agttctcctacacctccgaaccccacccagggccccagactgcggccgaccctcgctccgcggctcagccccatccagagcccaaggcatgtcgctcggccccaccgccccgaccctcaaaa

SEQ ID NO: 235780 - DNA, 122 bp, Homo sapiens
tggtccctgtattaggggctcctacggactcccagtcatccagatctccccttcaatggccggtttccatgcaactcgacagcctgctgcctgcctccatcctgagcacagcagtcagaggc

SEQ ID NO: 235781 - DNA, 122 bp, Homo sapiens
taacggaaacctttgatgtagttaagcgagtccaggatgaccacgtcgtggcgactcaggcgccgttccacggaggctcgcagagctccacgcaatgccttctcacgggcagaatcgccgta

SEQ ID NO: 235782 - DNA, 122 bp, Homo sapiens
gtatccctactgagtgattttgcatgtgtttccaatgggtagtttgtcttccacattctgcgcaaatttctctacttggggagaaatctggatctcttataaagtgaccaatttaactcaaa

SEQ ID NO: 235783 - DNA, 122 bp, Homo sapiens
taagtccttcatattgtaattttcactgtttatatgcaagaagtgtagtgggtctgctcacgtaggaataaataaaaagccgaacaaactgctcggcagctaccatgtgaaaagaaaagacc

SEQ ID NO: 235784 - DNA, 122 bp, Homo sapiens
gagtcaaagagttttgtcttcaaaaattacataatcgggatttgctaagagtttacttttcggtatggaagactggaaaagagaaagaaatcttaggtttcttgaatgttgggtttgggaat

SEQ ID NO: 235785 - DNA, 122 bp, Homo sapiens
ctggaggctgagtagtaggtgtcatgaggctggaatgctaggggaccaggatttcagccccgggaccgtggggacagctccctactggggaggggcctggatgcctccaacgccaaaatgcg

SEQ ID NO: 235786 - DNA, 122 bp, Homo sapiens
cctgacgccatctctgggcagtgctcctgcatcctccctgtcttccttgggagggcaccacgttgctcttacaagcacagggtcctgaaactgtttacaaggccccactctgccacgttagt

SEQ ID NO: 235787 - DNA, 122 bp, Homo sapiens
tgcacatgtgtcaggacctgcgtgtgctcaatgctgttcgggactatcacatcgggatcccgctcacctatagccagtatccctgtgcacgccagaagggtaccctacagccaggggtggca

SEQ ID NO: 235788 - DNA, 122 bp, Homo sapiens
cgctccatcattattgccggacacagtggggagaaaaggaacccatcatcagataaataccgcactgtcccccaccggggaaggcaccgtcacagctcccgcacagccggtcaccgcaccgt

SEQ ID NO: 235789 - DNA, 122 bp, Homo sapiens
tcgcatctgaaggtagagtctgacaaccctggcatacagtaggcactgaataaatgcccccggatgaacatgcatatactgtgcatccgatgggcacctcctggggggtctgtggggcgagc

SEQ ID NO: 235790 - DNA, 122 bp, Homo sapiens
ggcagaagaagtgcgctaggggcagctgcctgcaccccctgctctgaattcctgcaacagcggtcccaggagaacaagagacaggtcctgacaagcagtagagtcggtgcagcgcgcccggg

SEQ ID NO: 235791 - DNA, 122 bp, Homo sapiens
ggggcttcccaggcagcctcaccagcttcccttcacactgatcccctgtaaacgtgtgtccggcctcgacgtaggaggaacagggagaaactgattttctattcataaaatgtgcgcctctc

SEQ ID NO: 235792 - DNA, 122 bp, Homo sapiens
ctcattgggcaccgggagaaacggagctccaggctttgtccaaggtcacaagggggccagcggccggtcccactcggtccagagcccagcctccaaactgacgggccacacgatggccttac

SEQ ID NO: 235793 - DNA, 122 bp, Homo sapiens
gctctcctgggctgacacggacgcgaggggacctacagtggccttgggcccagcaggcagcgactgcaacgtgactgcccagagtccagcccctggggcccagatctacagaaccgaccaga

SEQ ID NO: 235794 - DNA, 122 bp, Homo sapiens
cgtggaaccacacacatgcacgttgcatccacatgtgtttcatggaaccacgtacgtgcacgttgcatccacatctgtttcacggaatcacgcacatgcacgtcgcatccacgtctgtttcg

SEQ ID NO: 235795 - DNA, 122 bp, Homo sapiens
caagattatacaactctttttctacaagattacactactcatattgtttttattccattccggaattagaaattaactttctaaatatcatttttttctccaaaaaaatcctcttaccagct

SEQ ID NO: 235796 - DNA, 122 bp, Homo sapiens
agagacctagcgcagagcccaggtggaagttccaggttaccccagacctggcctaggactcggcgctctgagccaccgcagccagtcttttatgcatccggcgggagtttcggtttcctttc

SEQ ID NO: 235797 - DNA, 122 bp, Homo sapiens
cacacctgcgggaggggcccagagggcagcgctgctcagcacacacctggggagccttgacgccgtgtgcggctctgcagggttgatcctgcttgcggggcctgcttgctcctgaggctaca

SEQ ID NO: 235798 - DNA, 122 bp, Homo sapiens
gcagtaaacaccctggaaacgtgccctggagccacaccggccctcacagcccaggaggcccgcagcagtgccgcctctcagctggcctgctcctcaccgggggctggccctgccctgataac

SEQ ID NO: 235799 - DNA, 122 bp, Homo sapiens
gcaggatgcatgggaacccgcagagatgacatcagagtagtgatatcacagcctaacatccgatcagagatgcaatgcccaaaaccccagctctcagaggaccagtatccctcacagggtga

SEQ ID NO: 235800 - DNA, 122 bp, Homo sapiens
tgtgatccctcgcgtttcaatccaattcaaaccatgctgcagccaattcgttcgcgcgtgcgtgtgccatcattgtgagtggaggagactgcccgatatgatcccagtcattgcggcgaccc

SEQ ID NO: 235801 - DNA, 122 bp, Homo sapiens
atgggctcacctttggccagaagccaaacttgaggtcagaggtcgggggtggtcagggctcgggctggggcaaggggaggggctgaggtggaggctgccatcctgtgtgaggcagagacagg

SEQ ID NO: 235802 - DNA, 122 bp, Homo sapiens
tccaggaagccttccataaccaaacactgccatcatgctgctgttctcataagtccttcacgaaatgccctgtactctgtcctgcatctgctctaatctccacagccagctgacctcaccca

SEQ ID NO: 235803 - DNA, 122 bp, Homo sapiens
cccagccttgctctggggtagggtgggggcaggcattgcaacgctccgacatttgctgaacgactgggtcacagtagcttggctgattttctgttcctgtcactccctggagatgtgggtct

SEQ ID NO: 235804 - DNA, 122 bp, Homo sapiens
agcctcgtgcctcagacgctaagaatcaggagggcaaagtgaacacacggaggaagtccacggattccgtccccatctctaagtctacactgtcccggtcgctcagcctgcaagccagtgac

SEQ ID NO: 235805 - DNA, 122 bp, Homo sapiens
gcacgacccacttcctcgggctccttccacccttgcagggagcctgacactgagggctggcggcttttctggcgcgggccagggggaggaggagaaaggagctcccgggatcccctcgcccc

SEQ ID NO: 235806 - DNA, 122 bp, Homo sapiens
acaggaagaggttccaccgacggtagaaacccggttcctcctgttcctcatccaccgcagcggcctgagagtcaccccgagcccaggccggtaaccccgctgcagcccctccggcaggccca

SEQ ID NO: 235807 - DNA, 122 bp, Homo sapiens
gtttctcaaccatcactcccaatgtcccccaaaaaattaaagtaaggggccaggagagagcggcaaccccaaacagcagcctctgatcgcagccaaatatcttcatgccttgttcctccatc

SEQ ID NO: 235808 - DNA, 122 bp, Homo sapiens
tacaacccccagggtgcagtgggacaggcgttgccgggtcgcaggtcccgccagtgcgagcgcaacggaggtcgaaggcgttcagactcttagctgaacgcggagctgcggcggctatgctg

SEQ ID NO: 235809 - DNA, 122 bp, Homo sapiens
gtggtgcgcccccagcccagcatacagaggtacccgcaccgccccacccgggctccggtgcgaagccaccgagccgggtccgcagccctactgtgcacctgcatcctcagtccccgagatca

SEQ ID NO: 235810 - DNA, 122 bp, Homo sapiens
tcctgctggagatgcccttcagcccccagctggagagcgagtatgagcaggtgaagaccacgctgaaggaggggctccagaacgccagccaggatgcgaacagctgccaggactcccagagt

SEQ ID NO: 235811 - DNA, 122 bp, Homo sapiens
cgcaggggcggggaggtggtgaggagcaggttggtattcttcttctcttctttacatttccgttgtgctaacaagggacatttacataagcttgactctgccaggagcccttccaacggatg

SEQ ID NO: 235812 - DNA, 122 bp, Homo sapiens
tgtgaggacagagctggctgaagccaggctggggtagacacagggcagtaggttccccaccgtgaccgaccatcccctctaaccgtctgccacacagcgggggctcccgggaggtaggggag

SEQ ID NO: 235813 - DNA, 122 bp, Homo sapiens
gagaacttgtgtttgaaattcacagcattgcctggatccctgctgtctttttgtgcctcccgctaacacacagctgtttttgttcatacatcattttgtgttcaactgcctggttacttcct

SEQ ID NO: 235814 - DNA, 122 bp, Homo sapiens
ggcagccctgtaagaagcagcacttccagaccttctcacgggcaaaccctctgctgggaccgccaagggcccccgcgagacacctgagggtcagcacagcccctccctccctgtgccgtgct

SEQ ID NO: 235815 - DNA, 122 bp, Homo sapiens
acagacacacatacatgcttgtaccccatgacacatttgcatgcctagactatgtacatacgtgcacacacgtgtgtacatgcatgtgagtacatgcacacaaaacacccatgcgtacccac

SEQ ID NO: 235816 - DNA, 122 bp, Homo sapiens
tagggaaaatgagaactctctttgagctcaaaaaaaaaaaaaaaaaaaaaaaaatgaaagcgttaaaaccctgattaagtctgcacaatgatccagagtgtaaggatgggagaaagaataaa

SEQ ID NO: 235817 - DNA, 122 bp, Homo sapiens
ttctcgagtttgtagcattcctggcttggacttgtgggtcccaggatcagcctcattattcggcaggagttacagagagtgggctgaactcccagcaggggcctctaaagggctcagccgct

SEQ ID NO: 235818 - DNA, 122 bp, Homo sapiens
tcttctctttccctttccaactcctgaaagattgccactatttcctctggaactttgtttcgttaccagcaaaatcctcgacatccatacccgtttcctggctttccctctcctttcctctg

SEQ ID NO: 235819 - DNA, 122 bp, Homo sapiens
attttcttggaatcagccccaccagatgacttagggatactataaaaatgaggccatactcgctacctggaagtcaagagacctcagcagcccaggagaaggccatggtgggagcacacgaa

SEQ ID NO: 235820 - DNA, 122 bp, Homo sapiens
gcataggggactaaggggaatgccacagagttgtttgccctagctatcatcctcttaattcgttcactgccacacttgactttagtagaatttttagtaactgtctttatctgccagttcaa

SEQ ID NO: 235821 - DNA, 122 bp, Homo sapiens
tctactaaaaacacaagaattagccagtcatggtggcagtcgcctgtcatcccagctattcgggaggctgaggcaggagaatcacttgaacccgggaggcggaggttgcagtgagccaagat

SEQ ID NO: 235822 - DNA, 122 bp, Homo sapiens
acttggtcatcttcagtcatcgtctcagcgaggttatgactggcatgtctttaaagtagccgctaaacctgattttattaacaagatagctaaataatttttttttttgagacagagtctcg

SEQ ID NO: 235823 - DNA, 122 bp, Homo sapiens
gcctgcgaggtagcccgcatggccctggcactgctggatgctgtgcgctccttccgaatccgccaccggccccaggagcagctgcgcttgcgcattggcatccacacaggtaaggccactga

SEQ ID NO: 235824 - DNA, 122 bp, Homo sapiens
ttttccccaattcttcctgtgcatttgtggttgtccacagaagccctctagccaaggcctcgggcagccctaccaaatgaatatgggcacttgagttttctaggagggctttcctgctgccc

SEQ ID NO: 235825 - DNA, 122 bp, Homo sapiens
tgtactcccgctttggggctgcagggaagctggccgctgtgggcggtctcgggccagccccgccccacctgtccttttcctggagactattagtccagggtttgtccctgcagtgccattgg

SEQ ID NO: 235826 - DNA, 122 bp, Homo sapiens
ctcctgcgccccacgccagggccagaggccgaggaaggcgggctaagtgagggggcgcggcgtggagaaccgccggggccgggagcggtagcgagcgcctagtaccgagcgccagggacggc

SEQ ID NO: 235827 - DNA, 122 bp, Homo sapiens
gggttcattaatcaaacacagaggaggatttgcttggccattgtcaagctgtgagtcagccgcactggagagacgggtttaaggctggcactggcatggggccaggcacgggcaggaggccg

SEQ ID NO: 235828 - DNA, 122 bp, Homo sapiens
ttcgcggtttccagaatgggctccttctggcccaacaataagtgccatttggaatcttctcggccttctctgtgccttccgcgcgtctgggctccccggtaccgtagacccggccccgagct

SEQ ID NO: 235829 - DNA, 122 bp, Homo sapiens
caggagaatcacttgaacccaggaggtcgaggttgcagcgagccactgcactccacctggcgacagagcgagactccatctcaaaaaaaaaaaaaaaaaaaaaagaatgagaaatttaataa

SEQ ID NO: 235830 - DNA, 122 bp, Homo sapiens
ctccggctctaagcctggcaaccccttacctgcagcgtgaagattaaggagcaggcacagcgcagggaagcagactgctctccgcatagtgtttgcattgagaggtggaggagaaactccac

SEQ ID NO: 235831 - DNA, 122 bp, Homo sapiens
agcagcggcaacctgctcgggtctgcttccacgtcgtggaagttttgttctttcgctcttcgcaacgaatcttgctgctgctcactctttgggtccacactgcctttatgagctgtaacact

SEQ ID NO: 235832 - DNA, 122 bp, Homo sapiens
ccaacgggctgagattatcgctggtcaaatactccctggcgcttggctattgtttccccacgggcgggtggggagcctggccctgcctctgagcaagtatccccgcggtgatgccacccgcc

SEQ ID NO: 235833 - DNA, 122 bp, Homo sapiens
tagcaacctagacgcattctctcttagataaataaactgctgcagcttgtgctataataccgattgcaaagaaattgatcctacagaactagaagactgcactggagcaggaggttaaagca

SEQ ID NO: 235834 - DNA, 122 bp, Homo sapiens
gttaattaaacttccaaaaattattaaggaaacatgatctgaccattacagattcatatacggcagcagaggactgagtcaggaaatcaagaatgcatgtttaccataaaattcaacagctt

SEQ ID NO: 235835 - DNA, 122 bp, Homo sapiens
gaaggtgagagtatctttgtttccaccatgtatggtctacaaccacacattttgggccctcgtaattgccccataacatctttctaccttcttctacctgaaatgtcacagtaagaaatgtt

SEQ ID NO: 235836 - DNA, 122 bp, Homo sapiens
gactgagaaaacaggaacccagagttccacaggggcaaggcctcgcagaccagccaagcccgagatgccctgtgctggcagtcatcacagtctggacagcatgtccttccgtgggtgcccag

SEQ ID NO: 235837 - DNA, 122 bp, Homo sapiens
aagtcattgcaaaatcaaaaacaaaaacacatgctgagtctgccaaaaagcttttttccacgacaagttgtttccaaatcttcctgtggtctggccatgtgagccaaactgaattgtagtct

SEQ ID NO: 235838 - DNA, 122 bp, Homo sapiens
ccttcatctggactcttaacccagcccaaacctaagcgtctacagttttgacagctgaggcgggagcacgggaggcggagctggtggcagcgcagcgccccgccccggctccagcatcagcc

SEQ ID NO: 235839 - DNA, 122 bp, Homo sapiens
gaggggaaattggggacccgagttggtggatgacgtagccctcacgtgaccaagagctgacgtgtgcagaagtccttcttgtcctggtcgttgttcccgtctgagtaccagctccccactgc

SEQ ID NO: 235840 - DNA, 122 bp, Homo sapiens
agaagggcggatgtaactggttcttgatttcagaaaacagccaggagcacacatggctgacggggtcagtgcaaggacaggcacatttcccttctgcatcacgtggggactgcgcctcccta

SEQ ID NO: 235841 - DNA, 122 bp, Homo sapiens
aaaagcttcaataatttggaaataattttaaaaacaccagcgcgtgtgacgtcatggcgccgtgcggggtcgcggcggcggcgcagggggcgggcccgtggcgcggggcctgaggaggaagt

SEQ ID NO: 235842 - DNA, 122 bp, Homo sapiens
tacctagtacacgcacagcattttgaaggttccccttggtgatttcattacaatcttcatcgctcttggcctggctgtccccctttcttgtaaattattcttgagttaatagctgttctttg

SEQ ID NO: 235843 - DNA, 122 bp, Homo sapiens
ctgggagaggagtagctggaggccagggcagagcgaccgagagacccttgtgctggagctcgggagaggggccgggagcgggaactgaacatccaccggtcccaggagtctagggcgagcgc

SEQ ID NO: 235844 - DNA, 122 bp, Homo sapiens
caagaagatggcgggatcagtggccgacagcgatgccgtggtggtgagtgtggcagggcgcgcgcgaggcgcccctccccgccgtcccgcactccgccgccgcctgctccagcagtgctggg

SEQ ID NO: 235845 - DNA, 122 bp, Homo sapiens
cgcttttgcgtctgcgcagcgcgccgccttgtgggtaatctcagggtgagacgaggctagcgcgaggtacggctagagcgtcatttccggctcgaatgcccggcagccgtggcggctagagc

SEQ ID NO: 235846 - DNA, 122 bp, Homo sapiens
cccccgccgagcgggcggatcgagttcctctctggctggtgggctgcaagcggcagagcccgcccgcacagcccagcttttttctttctacccagactctcaacttgaccgcgcgttggtct

SEQ ID NO: 235847 - DNA, 122 bp, Homo sapiens
ggcaaggttcacaccaatcccacaagagagctgcagaccccattctactgaaggcaaaaccgaggtgtaacaaagcccattaacccacccgcattcctgcagcagcagaggcagtgccattt

SEQ ID NO: 235848 - DNA, 122 bp, Homo sapiens
gccagctccagagccacggtgctcctgccccggtcctgggactgcgaagaaccagcccggcgaggcgttgcctgacatcgtggtgtctgttgcccccacccactcgcctcagccctggagct

SEQ ID NO: 235849 - DNA, 122 bp, Homo sapiens
ggacctgtggccgaggaacagcatgtatgtccattatgggccatctgttgactgtccctgcggacccggcctccggggcacagccttggaggtttcaaaatggcatccgcttcgctgctgcc

SEQ ID NO: 235850 - DNA, 122 bp, Homo sapiens
cacacacacacacacacacacacacacacacacgctccccacccccacctgcaaagctgccgtttgattagccaacctggcctcggacggcgtttgtgggaaggccttccacttatctgtgt

SEQ ID NO: 235851 - DNA, 122 bp, Homo sapiens
aagcctaaaacagtagatggtgacagaatggtattgttaccagcagggaaatggcaagctcgccccctggtgacaagctggggagacaacagaaaaagcaaatttttttttttttttgagac

SEQ ID NO: 235852 - DNA, 122 bp, Homo sapiens
cagcttgctgctctaactcgtgacgtcactcaaaggcagccctctgcttcagtgaagtaacgctttaaaaaaaaaaaaaaagaaagaaaaagaaaagaaagaaagaaaggaaacacttagac

SEQ ID NO: 235853 - DNA, 122 bp, Homo sapiens
agtgagctacatggtagagggcctgcttttatgtggtggttatacataactctgagattacggcaagaaagtcaaatcgaactgagacagggactaaagttagtgtttacagtatcaatact

SEQ ID NO: 235854 - DNA, 122 bp, Homo sapiens
cttacacaaaatgactattcagagcccatgcaccaagaaacaaggtccgctgagcagtcacgggagattcacttgttccctggaaagttccccccaggtaattttccatatctgaaatttat

SEQ ID NO: 235855 - DNA, 122 bp, Homo sapiens
taaaatttcactgggacccaccattgctctcaattttctccaccttttgttctaattcttcgtccaccaaacaacctttggatagaggttaccaagtgttctaatcccaagaaagaaaaaga

SEQ ID NO: 235856 - DNA, 122 bp, Homo sapiens
agcgggcacagagcaggtgaggcggggcggggcgggccggggtcggggcgggggctccttcgtgggctcagggggctccgcctggctcgcctcccagcgcagccttcttgggctcccctccg

SEQ ID NO: 235857 - DNA, 122 bp, Homo sapiens
tggctaagatagagtcttgctgacaatagagaaaagtggtgagcagtgaaaaagtaaagtcgtggcggttagaaatgttctttgtgctcctttagattggttattcctgctgccattcagcc

SEQ ID NO: 235858 - DNA, 122 bp, Homo sapiens
gagaaacgccatagcagcgctcccagcactgactaatcaacaaggtgcgagcaacgcctgcgcagctctgggagacaccgcctccgcctcccaggcgccgcccgctccgcccccagctcggc

SEQ ID NO: 235859 - DNA, 122 bp, Homo sapiens
gtgcttctgtgataaaaaattactagcacaagtttcctagcctcatatcagagatgtcttcgtggctggcaaaagagataatgaacaggttcttctttctaaacttgctcaactagagcagt

SEQ ID NO: 235860 - DNA, 122 bp, Homo sapiens
cctcacagcgcccaggtccgcggccgggccttgattttttggcggggaccgtcatggcgtcgcagccaaattcgtctgcgaagaagaaagaggagaaggggaagaacatccaggtggtggtg

SEQ ID NO: 235861 - DNA, 122 bp, Homo sapiens
cccgccacatgatcgctgccttcagcaacggtctcccagcccccaaacgtgtaccccagccgaggtcctctgagcacccaggctaagctggcctgtgccttcaggaaacggaccatcggctc

SEQ ID NO: 235862 - DNA, 122 bp, Homo sapiens
caccaagaattctagtttaagaaggtgcgtttgcttgtttccctcttttcttgatccacccgtcagctctttccccgcacctcgttctgagtctccgcaaggctgctgcgcggaagaatgaa

SEQ ID NO: 235863 - DNA, 122 bp, Homo sapiens
ctaagtctggagggcctcaggtgggaggcggctgggggtcagagaccccttggggcccgtcggccagggcagggagcagccaccacgcttcagcctgcgttgctgactcgtgcacgaggcag

SEQ ID NO: 235864 - DNA, 122 bp, Homo sapiens
actcgggtggcaggtgatatggggcatctggtttgcacacttgttttaatttggaatactcggcagctgatatggggcgtctctggtttgcacacttgttttaatttggaatactcgggggc

SEQ ID NO: 235865 - DNA, 122 bp, Homo sapiens
ccctgtctttgataggaaacaccagatgcaacaattagctctgctgtcatctaggaatatcgtagccattgttgttgctgctgtaagctagaaatactgctgctgccatggcagaactgtga

SEQ ID NO: 235866 - DNA, 122 bp, Homo sapiens
gggaggggtggcgggcactaaatatagacttcaaggacttgcccgggcactgattgcccgcgccggccgatcgggcctcaggggagggacgaggctgagagaggggaccctccaactccggc

SEQ ID NO: 235867 - DNA, 122 bp, Homo sapiens
tctgtggccctgaggatggaactgaggtgttggggtatcctgcagccctcccaaggattccggcagaagtgagagcacacgttcctgcctccgccctgctgcacagggcagcctggcaagag

SEQ ID NO: 235868 - DNA, 122 bp, Homo sapiens
tcccgttcccaaactgaattgccccttcgagcgccaacccatcccttcccccttccctggcgtctagtttcacaattgggcgcacgttttaaaaaacagaatctagaattttcttcctcggg

SEQ ID NO: 235869 - DNA, 122 bp, Homo sapiens
ccgcccacctcggcctcccacagtgctgggactccaggcgtgagccaccgcgcccggccacgtgtgtgtgtgtgttttcacccaggtttcacagtggctctcagcaggagagctggtctgac

SEQ ID NO: 235870 - DNA, 122 bp, Homo sapiens
gtatccactaccctggccctggcactgagttagaaatgggaaattcaacaactattaagtcgggtactatacatttgtgcagatagaactaatgccttcagagacaggggaaatatatctat

SEQ ID NO: 235871 - DNA, 122 bp, Homo sapiens
gcccgcggcgtcgggtttgggctggaggtcgccatggggcgaggcagcggcaccttcgagcgtctcctaggtaacgcgtccccacccgacggctcggccttggtcagcccgcagcctccgcc

SEQ ID NO: 235872 - DNA, 122 bp, Homo sapiens
cgcttgtgtgggcccaccacccccggaaacccgaaccttcgacacttaggttccgcttcccgtgcctggcgtcccaccaggctaagcgccgatccgagtagccagtcttcatttactccact

SEQ ID NO: 235873 - DNA, 122 bp, Homo sapiens
gcttgggagcctgttgtgcagttggggaggtcccagagcaccaaggccaagctggggagacgttgtccctatgggcatggccaggcctccggcctcagggaggagagggagacggtgatcat

SEQ ID NO: 235874 - DNA, 122 bp, Homo sapiens
tcctctgattgtgggaccacaggatcgaaagttaaaacagcttctctgagttgcccaatgcgtgaatgtggcggtgggggcaggcggggaggtggagccagttcagcacgaggagggttaac

SEQ ID NO: 235875 - DNA, 122 bp, Homo sapiens
cttgctctgtggacccctgtgcttagtgccggaagggctctgaagtcaggctctcccttccggtgtcagggcaaagcaatgaggctgtggagagtggaaggctgaaccgtggactaacggtg

SEQ ID NO: 235876 - DNA, 122 bp, Homo sapiens
taaatcccttggggcagggccggagacgggagccgctagagctggtcacaaagcagggaacgcaaactcagcctgctggaagccaggcacgagtttgcgaactactactggattctttttcc

SEQ ID NO: 235877 - DNA, 122 bp, Homo sapiens
ccagaaatgaaccattagtggtatggtaggcacagagacctccctgcacacacctacacacgtaatcacctacatacacacacacacacacacacacagacatgatgccccccacacacaca

SEQ ID NO: 235878 - DNA, 122 bp, Homo sapiens
ttgggggcggtggtcgcgctgggccgggacaccttcgcgagtggcccctcgtgcgcccgccgcaggctccccagcctgcccctccagcgccggccgccaggcattcccgggccggctccccc

SEQ ID NO: 235879 - DNA, 122 bp, Homo sapiens
aggtcccactgatgggtgtgtaagaggtagcacccagaagaacggaggctgattgggagtcggaaggagagatgagctctggatggatctgaggtcccctacctggccaactaattgaatgg

SEQ ID NO: 235880 - DNA, 122 bp, Homo sapiens
gatggataagtgttgcctcatgggaaaccactgttacctgctggataataagtgtttcctcgggggtaaccactgttaccctgtgtctaataagtgttgcctcatgggtaaccactgttacc

SEQ ID NO: 235881 - DNA, 122 bp, Homo sapiens
ctttgcgcctcctacctggaaggcgggccagcgattggtaccagttcagacatgggtacacgttgacaggccgccggccgtcgactggcatgttgtgaccattcctggtgctggtcttggta

SEQ ID NO: 235882 - DNA, 122 bp, Homo sapiens
atattgcattatctctttccttctccttcccattaagacggaaaaaacatccgggagagccggtccgtttctcaggcagactaggccattaggtgcctcggagaaaggacccaaggctgctc

SEQ ID NO: 235883 - DNA, 122 bp, Homo sapiens
cgtcacgtgcattgccactgcgctttcggcacgagggatgctgagccctggtgtcagagtcgtaatttaaagcgtgtgtgtatatggactttgtcccttaaggtcgatataaagaatcctcg

SEQ ID NO: 235884 - DNA, 122 bp, Homo sapiens
aatgtccgtggcacaaatggctagaattacattcaaaggctcttctaattgcaagacaaacgatccatatgtctggtgcctcatcagagctcactgagacttgctgacagggcagagaaaaa

SEQ ID NO: 235885 - DNA, 122 bp, Homo sapiens
caagaaggaacacacttgcaaatgaacatgctggctgagttttacacatttgcatagttccgcagatgttaacaactctgcatgtatagaaaacaaccatacattcatccactgttagaaac

SEQ ID NO: 235886 - DNA, 122 bp, Homo sapiens
ttgttaataaggcgaaggcccaaagcgctatgccagggcctgctacttcatttgtttcagcgattaaaccagcacgacagggggctggaggcaggtaaaaagcaggctcttgcgtggcccgg

SEQ ID NO: 235887 - DNA, 122 bp, Homo sapiens
gccaccaaacctggccagggatcatggtttaatgggagtcaagagaagtaaaacagtgcccgagaaagcctatgtatttgaccacatataattgttctggaatggtgggagtgtctcatcaa

SEQ ID NO: 235888 - DNA, 122 bp, Homo sapiens
tgctgcagtcctcgcctgtgtacccgggccagcacacgcagcggccgtccacgcagcgcccgccctcgccacagtcccaggggcagctccgcgtaccacagtcctcgccagtgtagccgggg

SEQ ID NO: 235889 - DNA, 122 bp, Homo sapiens
ccctccatggtggggtccaggctaccccgcacagcatcctgcaaggcaagttccgcaccgcgaccacaggcggccacagccccgccactgagcactcaggggcagccgcggtgcaggagcag

SEQ ID NO: 235890 - DNA, 122 bp, Homo sapiens
caatcctgcagcgaagctgcccagatcattttgtgtttgggcggcggctgagttcccaaacgcgcgcggagaccctgggaaggaggaagtaagcgcgaaagtgcttcccttaagcttctgaa

SEQ ID NO: 235891 - DNA, 122 bp, Homo sapiens
acaaccgcaatctacactgagtagccgcgcgccgaacggcgtgactaagccccgcccacacggcgctcctggcggccaatggaaatggcttacgagacgccttctccacgcgctatacttat

SEQ ID NO: 235892 - DNA, 122 bp, Homo sapiens
gggcaggtggtcaaggcctacgatcacaaagtccaccagcacgtggccctaaagatggtgcggaatgagaagcgcttccaccggcaagcagcggaggagatccgaatcctggaacacctgcg

SEQ ID NO: 235893 - DNA, 122 bp, Homo sapiens
gcccaggttctcaggccccaggcctggggccacgaatggccctacactaggggacacatgcgcgccctgggcctcggcgatttcctcctggtcgttctggccgcaaacttaaacctgccctt

SEQ ID NO: 235894 - DNA, 122 bp, Homo sapiens
ctaaggagaaaaagaaggacagtgagacttggaggttccaacacaaggtgcttctggaagcgttactgaagatgtcccacccaaggggagatggccatggcacttaccatgattgatcttag

SEQ ID NO: 235895 - DNA, 122 bp, Homo sapiens
aggaagatcacaggtgattacagcagatgaccccatctgcctggtgcctgactttattttcgcttccaagttagtagatatctgactggctgcaatgggaacaacataaaatataatgaggt

SEQ ID NO: 235896 - DNA, 122 bp, Homo sapiens
acgggggctccgaggcggggtctgggtgttgaggggcgactggagccatggcggagtcggcgcctgctcgggtaaagaggcaccggcgcgctggctcgagggcgcgttggggatggcggagt

SEQ ID NO: 235897 - DNA, 122 bp, Homo sapiens
attttctatcccgtgggttgcgctggaagagctgagaggccaggctgtggatccttgccacgaacaacaagagagggcaagtccagccgcctgctaggggactagcaggaagcggcacgcct

SEQ ID NO: 235898 - DNA, 122 bp, Homo sapiens
caaggaactcatacgtgttgcccatgcaggccactgtaaggagacttgttacctacatgacgtcaaagaccagggactacagcaacatgaatctgaccttagaggaatctgagagcagaaga

SEQ ID NO: 235899 - DNA, 122 bp, Homo sapiens
tcaatttctagaggaaattcaatacacaggatatagtgatcagaaaagggacatgctttacgctatgaaattacaccaaatgtattctttggccatgattttgggctcagattataaacaat

SEQ ID NO: 235900 - DNA, 122 bp, Homo sapiens
tgaaacaaaccgggagggccgtgaggagaccgccgcgtttctcttccgacgcgggtagggcgtgcttgtcccattcccaggaacccaactcatctgaaacaacagggcacaaccgccggcct

SEQ ID NO: 235901 - DNA, 122 bp, Homo sapiens
cgttcactgctcccaccctggcctaagccactgtgagaccaagttgcaatcccaagaaaccgcatttgctctttctgcttgtcagaagctgacaaagccctgactcagtgactgggggcagc

SEQ ID NO: 235902 - DNA, 122 bp, Homo sapiens
cacacccgtcccgggacccccgccccctcccacgcgcccttcggaccccgccccggaccccgcccacgacccctacccccgtgagaccgcgaggtcccagcccgcagtgccccacccccacc

SEQ ID NO: 235903 - DNA, 122 bp, Homo sapiens
gaagaatgggtgagggatagaaaaacattccaaaccagtacgcggctcagaaaacagatgcggccaatgctcattagagctctggttccctgaccccaaacccttttaagactctgctaaaa

SEQ ID NO: 235904 - DNA, 122 bp, Homo sapiens
gcctggcccttcttccatgcttaccgacatgcgacagagtgtgacctggacagctggaagcgcttaggacatcctaaagctggaagaagggccatgttgctggaagcaacggcgagaaggat

SEQ ID NO: 235905 - DNA, 122 bp, Homo sapiens
gccacgactaatttagtgcaaaccgaaataaatatcggcccacagagatcctttacagaacggtttgccttcagtacgttttcctgttttctactgagtgccggtttctaccgtgaaaatga

SEQ ID NO: 235906 - DNA, 122 bp, Homo sapiens
cgcgggatttcattgactagggcggaggggtgggggtggctaaaatgggtaaccctcggtcgccggcagatgaagtgaacccagcacagcagtgtgttccggctcctctgcaggagtaccag

SEQ ID NO: 235907 - DNA, 122 bp, Homo sapiens
tactctctcccgccgcttagaaataaaacttggctgtattaggagctcggagcaagaaggcgcccaccgagagcgtctgaagcgcgagccaggcgcagttcgcgggacccgggccatgggcc

SEQ ID NO: 235908 - DNA, 122 bp, Homo sapiens
cgccggtagcgtcaaccaagtgcacgacagcccacgggtggctaggcgcgtgggaagagccggagcccgacccccgcccacccggtttcctggcagcgcactgccgcgtaggggcggagccg

SEQ ID NO: 235909 - DNA, 122 bp, Homo sapiens
ggcccccaggaggagccagtaccctagcccagggagccgggttgggcgcggcctggggaccgggcgtgggaagctggcccacagggtcgcccctagcaaggaaccaccagagcgcgcatgcg

SEQ ID NO: 235910 - DNA, 122 bp, Homo sapiens
accgggcccagccctgggctcttactgtccgcttttgctgggacctgttccacaaatgggcgtcttctgccttgggccgtgggggttgggccggaagctgcggacgcctgggaaggggccgc

SEQ ID NO: 235911 - DNA, 122 bp, Homo sapiens
cctagactcagttgaattcagagtgaaagaacatagaagacgacaaagggtataggaaatcgcagcataggcagccctgccttatttttagtgaaaaggattagtactggtagccctgcagt

SEQ ID NO: 235912 - DNA, 122 bp, Homo sapiens
ctcccagattttagaaactgcttggtggtcctcagatgacctcactagctttctcttaggcgcagggaggagtgggaggcaaattatagccgagaaaccaaagctggctgatccgtgctcag

SEQ ID NO: 235913 - DNA, 122 bp, Homo sapiens
cggctgcggcagcagtagctgtcgaatgaggcccggacgccatagtcttagcgagccgcacgcaagcccaacgcagccggaacccgaaacaagactaaccagcgttctcggcgcgacggata

SEQ ID NO: 235914 - DNA, 122 bp, Homo sapiens
gtcaggcacaagaggtttctgcccaggaggcacagaatgaaacttgccggctgttggccccgccccacttcgaagctccgcccaggccaagaagcgcgggggcgggagtgagggggcggttt

SEQ ID NO: 235915 - DNA, 122 bp, Homo sapiens
agaacaggacagttagcatcgttcccacctccagagatcctcacggtggtcatgcagcctcgtgtgctcagaacagtgtgaggtggatgaggcactggtggatgtttgcgtggcaaggatgg

SEQ ID NO: 235916 - DNA, 122 bp, Homo sapiens
gaattaaaaatatccaggaggtttgtacccccctatgtttaatccagtttatagatgctccgtgtttctattcatctagcttcacgagaagcttagttctacgcttttaaataaatctaaga

SEQ ID NO: 235917 - DNA, 122 bp, Homo sapiens
agggtggcaagagggagaggccctcggcaggagtggcctctgggagggacttctgagcaccgccaacacgcccgctttgtgcatccgcaggctcttcgcggccaagtgcagcggctgcatgg

SEQ ID NO: 235918 - DNA, 122 bp, Homo sapiens
gctccgtcctgtgatcttgggtgtgggggtggcaatgaaaagagaggagaatgcccacaacggtctaccctcagagttttgactcaccatgcaatcaagagacttcaacttgctttcaaaga

SEQ ID NO: 235919 - DNA, 122 bp, Homo sapiens
ctcgatctcttgatctcctgatctgcccgcctcagccttccaaagtgctgggattacaggcgcgagccactgcgcccggcctacacacatttcttaaatgagagttccatatccaaacctct

SEQ ID NO: 235920 - DNA, 122 bp, Homo sapiens
attctgggccagggcaagcaggggtctccctgaccccacgctgttcccacgcccagctctcgggctgaaggcgaattaaggaagcctcctgcacaggctctgagagaactgctccaaaccag

SEQ ID NO: 235921 - DNA, 122 bp, Homo sapiens
gagttgaccacaagaaggggcacgtgcgcaatagcgatcctagagagggctctggtatctcggattaacaagggcccagagtcccggccggttctgggtattattaattactattattatta

SEQ ID NO: 235922 - DNA, 122 bp, Homo sapiens
aggcggggccgcggcggcgcgggcgggcgcttctcctaactttagttttggcgtttgaggcgagtttctgtctcagtcgggcgcagccgccgccagggaaaagaaagggaggaaggaaggaa

SEQ ID NO: 235923 - DNA, 122 bp, Homo sapiens
gtcagttttctggagccaccagattagaccaaaaggccggcctgctcaatacatctataacgtcagaggttgctaactggtaataatatttaaactagtttgttgattttttttccccaaaa

SEQ ID NO: 235924 - DNA, 122 bp, Homo sapiens
gtctggtcactccaggagtcgtcgggcgctgaaaagcgattttaaagatctggagtagaccgggcgcggtggcttacgcctgtaatcccaacactttaagaggccgaggtaggagtgatcgc

SEQ ID NO: 235925 - DNA, 122 bp, Homo sapiens
gtcatctcttgaaaagccaaagttctggcagttgctattagaaaccagttcctggctgagcgcggtggctcacgcctgtaatcccagcactttgggaggctgaggtgggcagatcacgaggt

SEQ ID NO: 235926 - DNA, 122 bp, Homo sapiens
tggactaaagaaaaaaggaaaggctagcagtcatccaagtaagtgaaggtgttcatttcacgttcttactgggcagggtctctcttgctgagtagagtttgctagcagaatgcatgtggttt

SEQ ID NO: 235927 - DNA, 122 bp, Homo sapiens
gggccaggaaataacaggggcctcatcagggttggtgctcatccgcctgcggaagaaggccgggtacttcagcttatttctgtagaaattgtcagaaacgttgacactctcgcagcgcacca

SEQ ID NO: 235928 - DNA, 122 bp, Homo sapiens
tgataccagttcgaatcccagtactcagtgtattccacgtcctattcccagggtcctctgcgacatgtttttatacctttagattggtgaaaagaaaactggaaaggcctggggaaacagtg

SEQ ID NO: 235929 - DNA, 122 bp, Homo sapiens
tggccccgcagccgggcggggagcgggtggtggggcgggcggcagagcccgcccctgccgcgcctccgccccctgcgccctctcgcagccgcccgggcctgctgctgcagggcaggcaggca

SEQ ID NO: 235930 - DNA, 122 bp, Homo sapiens
ccaaggctgagaaatggagaaccaattggccggtttgctctctgttgcttcccccccacccggccttcctccgagtggcgaggcaatcctgcacaagagtttgtaaagtgcttaggaagctt

SEQ ID NO: 235931 - DNA, 122 bp, Homo sapiens
gcgacttcccagacttggtggtgttgccgcagtgggcggccacacaacgggccggcatggcggccgtcttcggtgcgcgggagccgggttccctggaccttcgcccttgggcacgctcctcg

SEQ ID NO: 235932 - DNA, 122 bp, Homo sapiens
aaaggaggagttagaaaagggtacagcccaggctgccgggccgggctgggtcgcggggtccgggttccgctccccatctcaccccgccctcaccctaaatcccagcatcccgggatcaccca

SEQ ID NO: 235933 - DNA, 122 bp, Homo sapiens
ggggttggggccctctgggtgactgggagaggaaggcgccggaatggatccagattaaatcggatgctgtatgccctgtggagacatggggtgtacctctaaacgcactgcgttgtaagcaa

SEQ ID NO: 235934 - DNA, 122 bp, Homo sapiens
tggaagatgctgaggacagagagaggacccaagcaggcaactagttggaggacttgtacacgtttccttccagcagtatgtcagagaggtggcagcccactggggacagggctgcctgggtt

SEQ ID NO: 235935 - DNA, 122 bp, Homo sapiens
ggccttttccctcagtcccgggctcctctttggtaaatagatttgtaggtgtctaagtcacgtcccaccctcactccttcccaggagaggagacagggctaggatcccacccgaccgcgggc

SEQ ID NO: 235936 - DNA, 122 bp, Homo sapiens
cttaccacatcctcaaggattacatgctaattggaagataatatactcctccatcaaaaacgaaacagtaaggcaaacattgcagtatggtgaggcagaaataccacttgcctaagggtcag

SEQ ID NO: 235937 - DNA, 122 bp, Homo sapiens
cccacacggtggctccccctcacacagcagctcccccgctacacggcggctcccccgacacggtggctccccacacgtaagcagcagctccccccacacacggccctccccacacacacaca

SEQ ID NO: 235938 - DNA, 122 bp, Homo sapiens
ataaataaataaaacacctggaactcaaaaccagcctagaaagccacaaggccggccccgcgcgtactgcacccccgccgcccgcctgccagcgccccgcgccacatggagcccggagcccg

SEQ ID NO: 235939 - DNA, 122 bp, Homo sapiens
taaatgaggagaatggtattagaaaaaaataccttatatcaattcatagttttccctttacgtaggtgtattgtctttctataataaaactagcatgaggcatacgggcatgtggagcagat

SEQ ID NO: 235940 - DNA, 122 bp, Homo sapiens
acaagcccgcattcgcccgggtcaggagctgctctgtgtgaggagcgctgtctgcgcagccgccttgcacttccccactcctcctcccccctcctactcgtcctccacctccttcctccccc

SEQ ID NO: 235941 - DNA, 122 bp, Homo sapiens
gcacgcatgtgtgtctagaatcaatacggcccagacagcccttcacaaaggggctccaggcgggcgcctccgcggcacagcctccgccccaccgcccgcggcgaattaattgggccctgaaa

SEQ ID NO: 235942 - DNA, 122 bp, Homo sapiens
gccccggctcatggactacaagtcccggcaggccccgcgccgcggcgcatgctaggcgggcgtcccttcgcgagcccggccgagcccgggggcccagttcaccattgtctggccaacagggg

SEQ ID NO: 235943 - DNA, 122 bp, Homo sapiens
gatgggtctccaggcttacatgcccacactactctcatcttttcaggaaggcgagaacaacgacaagttcttcacccaccccaaggatgccaaggcgctggcggcctacctctttgcacaca

SEQ ID NO: 235944 - DNA, 122 bp, Homo sapiens
agcagaatccggcgaagggcaggacctgaagggtttggggaatgccctgaatgtgcagagcgcggggggggggggggggggcggggcggattcagggcgtgcctgtctctgattggctgtgc

SEQ ID NO: 235945 - DNA, 122 bp, Homo sapiens
cctgggttcaagcaatcctcccacctcagcctcctgagtagttacaggcacgcactaccacgcttggcttgaaatttttcaaaagtatgatttacaattgcaccaataggccgagtgcggtg

SEQ ID NO: 235946 - DNA, 122 bp, Homo sapiens
ggctctggggaacagcaggtgggaaggagatcttccttattcctgctccctccacaaacgcgtcctcatccaatccagtggaacccagccgggccaaaaggacacgagaactgcagtctgga

SEQ ID NO: 235947 - DNA, 122 bp, Homo sapiens
ctccgtaatgagagcccggaaccactctttgtgccgcagcttcgcaggtactaacttttgcgggggataccccaagatctctcagcgcccccgggtgggaggctgtggatctgcggcccctt

SEQ ID NO: 235948 - DNA, 122 bp, Homo sapiens
taagcttcctttcagagatccttttagagattatgactatgaagcttacatgcctcaagacgaagaaactatatgaatgacctgaaggtatctgaggtctaagtgagacctcaaatccattc

SEQ ID NO: 235949 - DNA, 122 bp, Homo sapiens
ccgccccccaacaaccgcgtggtcggcttggaaaggcgaactataattcccagggtgcctcgcgaggccacaaagaactacgattcccagagccccccgcggtggggcggggttgagtcgga

SEQ ID NO: 235950 - DNA, 122 bp, Homo sapiens
tttcccttcctgtatccaggcaaggagcagctctcgctgccagccgcctgtctccatcaccgccacacactatgcagaggcaagccctggtgccacaggatccagcctccagccccagcgtg

SEQ ID NO: 235951 - DNA, 122 bp, Homo sapiens
agagttgaggggcatggggcatgcttaaaaaaaaaaatctcagcaaaacagccataatatcgtcaagaaagtttgaacagggctaggtggcacctgcttatgtcccagcaactcgggaggct

SEQ ID NO: 235952 - DNA, 122 bp, Homo sapiens
aggttgtttcagccagggtgtaacctgacccctgtcactctatcttggctgccccttatacggtacagcatctaaatctctgctagaaaatatcctccaccaggaactacatcctgtgggtc

SEQ ID NO: 235953 - DNA, 122 bp, Homo sapiens
cttcgcgcccaagccggcagtgttcagcacgtcgtgggcgcccgtgccctctcagtcgtccgtggtatatcacccgtacggcccccagccccacctcggcgccgacacgcgctacatgcgga

SEQ ID NO: 235954 - DNA, 122 bp, Homo sapiens
acaaaacaaaactcatcttgtttgattgctccttgccgtatgcaaggctccttggtgtaccgtgctggcaaggaagataataaatacttgttgactgaactataatgtaatggttaagtata

SEQ ID NO: 235955 - DNA, 122 bp, Homo sapiens
ccttaataatagagtgggtgctatagtacctgtacaccaccttcaatccactgctgtgagcgaaaatcaggcagcagcactagtagttaactcaatatcagctgcattaataagggtaaaat

SEQ ID NO: 235956 - DNA, 122 bp, Homo sapiens
gccccgagatccccctggtggtcttgcagttgccagggctaaattctgagagcttcacagcgtttcgggctgagcttctgatttgctcattaagttaggatccgtgggacttgatgaggtaa

SEQ ID NO: 235957 - DNA, 122 bp, Homo sapiens
gccctttccctttgcacttctctcctctgtagcaggccgcggggtgagggtgggattaggcggccaattttacaaaactccagggagcgtcgccagcctcgatttcctggggttattcctgg

SEQ ID NO: 235958 - DNA, 122 bp, Homo sapiens
gagggactctcggggcgtggcttgagttgaagcactcctaggccctggggactatgggggcgtggcttggagtgaggcactctgggactgggcctgtgggtgtctgggggcgtggcttagac

SEQ ID NO: 235959 - DNA, 122 bp, Homo sapiens
catcctgctttcaactgtcctttgcccagataaggattagcccatccctcttcattccctcgagccttctgcatctggccctcccagtgcacctgttcaatcccagcccctccctgacctgt

SEQ ID NO: 235960 - DNA, 122 bp, Homo sapiens
gtgggcggtgcacgggctcaggcacaccgggaatgtgccatgggtcctgtgggcggtgcacgggctcaggcacagtggggctgtcagctctggcttgcagggtcaccggcctcactgtcgct

SEQ ID NO: 235961 - DNA, 122 bp, Homo sapiens
ttgagcagacattactcccccctctacccaggagaaaactgaaacacacaggaagtggcgcgctcaaggtcacccagaaaagccagctgccttcacaggacagtcttgagaagtgtggagga

SEQ ID NO: 235962 - DNA, 122 bp, Homo sapiens
tagcagactgctaggaaaaggcctgaggccccagggctgggagtcagggtgcagggtggccggggccatctgtaggtctgagataactagggctgacagcacaggcccttggggaaaggagc

SEQ ID NO: 235963 - DNA, 122 bp, Homo sapiens
gaacgtggggcagacaaactatgcagcatccaaggctggagtgattgggctgacccagaccgcagcccgggagcttggacggttggtcagatgcttgagggtgctggggagcacctgggggg

SEQ ID NO: 235964 - DNA, 122 bp, Homo sapiens
attgccggcccggttgacccctgtgttgtctctgtggctgctctggcctcacccagctcccgggctcacacccccttgctcccaccatagagaccgccagcttccaaatcgtccaagtcctc

SEQ ID NO: 235965 - DNA, 122 bp, Homo sapiens
cattctggggttaccatagttctaaagggaaaggtttggatgaattccttgctagtgttgcggcagttagaagttgatggatgcagactccaggtctcagacacaactcaaattccctgggg

SEQ ID NO: 235966 - DNA, 122 bp, Homo sapiens
ctgcggcggtaaaatgcagcactcgcagagcgcctgcgcggctttcaggccgggcggcggcggcggcggtggctatttatagtaggtgacgtcaccttgaaatagaccgttagggccggccc

SEQ ID NO: 235967 - DNA, 122 bp, Homo sapiens
ttagatgaaaggctggaatgtggctctgggtctgggaacccccccagcttctggacacgccggcttcttctaagcccgggcctctcattggtgatgtctgcggctgggcagccctgactata

SEQ ID NO: 235968 - DNA, 122 bp, Homo sapiens
tagccagacagaacacatggcactgacctatggccagggactcacagttttgtgagaatacgggagcgtatagccacttccttcactgaatgccagtcccagagcagttgcattaggctgga

SEQ ID NO: 235969 - DNA, 122 bp, Homo sapiens
ggcctggccccgacattaacagggccaggaggaaccgctacggccaccaccgccacccgccgaggagccgcccaagcccatttgccgccacagccaaactttgcggctccaaagcgaccgcc

SEQ ID NO: 235970 - DNA, 122 bp, Homo sapiens
gagagagatgccaccgcgcggcgaccggcagggccgcgtcccctctgcgtcctagcacagcgacgccccgcccgccacccgccctacgtcacccacagcccccgacaccgccccctcccccg

SEQ ID NO: 235971 - DNA, 122 bp, Homo sapiens
ggtcagccagtcagaaagtagccttcctaggagctttacattggacagctgctgccccaccgatacatcttggcacacaagagttaggccactgtatctgtcctgtcccacacacttgctcc

SEQ ID NO: 235972 - DNA, 122 bp, Homo sapiens
gcaaaagtcaaatgatgcctctgaggcggagcaccagagagcctacctggaagacacatgcgtggagtggctccacaaatacctggagaaggggaaggagacgctgcttcacctgggtaaga

SEQ ID NO: 235973 - DNA, 122 bp, Homo sapiens
ccagccctgcccggcttgcggccgcgggcgcccgcgggtggcccggacgcagactggccccgggagcttcctggcagctccctggcagctctacaggaggcggctctcgctgtacccagccg

SEQ ID NO: 235974 - DNA, 122 bp, Homo sapiens
cagctgcggcatatttctgggaatgcgaagcacatttgagcgacgtgacattccttacctcgcggcagcaaggcaactgcccacttcctttcgagtcatgttgcatcatctttcagaacagg

SEQ ID NO: 235975 - DNA, 122 bp, Homo sapiens
gagcgcagccctgaacgctcggctgcctgcggcccatcctccgccatcctcggggcccctcgcctgggggtctccctgtcagagccgagtcggtttctcccagagtttgacagccctgctgg

SEQ ID NO: 235976 - DNA, 122 bp, Homo sapiens
acagaaaaactagttctgagcagtttaaatggcttgcccaagcaggtcagcggcggtccccggccaggaagccagcgctgtgtcccgcgtcccggccagccagcggtaccctctccacagca

SEQ ID NO: 235977 - DNA, 122 bp, Homo sapiens
gtcaactctctcggtctccagaagccatcaatacaaaacttcgacactgtatttagttcacgagcagaccggcttgggaggcgccgcagccgcacccgcctggcggagcaggagccgcagcc

SEQ ID NO: 235978 - DNA, 122 bp, Homo sapiens
tggtctagccgggtggtaacagtagatcagctcatgttccccttgcccaccctgagtgcccggttgccagccgcctgaagtgggggccactggtggacacagccctttctctaccctccttc

SEQ ID NO: 235979 - DNA, 122 bp, Homo sapiens
cgggaaggcggcccgggaggcggtggcgacaacaagtggccggactgggcggctaagtcgcgatagccaagcctggaagggaaaggcagagaggccaggacccaaacccgcccccaccccgt

SEQ ID NO: 235980 - DNA, 122 bp, Homo sapiens
gaagacacagcgacccgggcctcacccagggtctgtgtgtggctgttctgcagcgctggacgtctgaggcctgtgtcgtccccacagacgcgcgctgtggacacactggcgcccacacagag

SEQ ID NO: 235981 - DNA, 122 bp, Homo sapiens
aggtgctcagcctgctgtgccgcgtgcacgagctcgaggtggagaacaccgagatgcagtcgcacgcgctgctccgcgacggtgcgctccgccaccgccacgaggccgtgcgccgcctggag

SEQ ID NO: 235982 - DNA, 122 bp, Homo sapiens
agaaaatgaaagcctttccatttccccgtggaaatgcatctaagtccagtattggagctgcgagatacagaatcgtctctgccagtgccctgagcccctcaaaccgaggggaatgcgtgggc

SEQ ID NO: 235983 - DNA, 122 bp, Homo sapiens
ccgacggccgggcggacggacggacggacgccgagcgcagtgccccgcggtgagtgcacgcggcccctcccgcccggactcatccccgtcggtccgcgcctcgcagctcaggactcgggggc

SEQ ID NO: 235984 - DNA, 122 bp, Homo sapiens
cacaaatgctttgatgttcctttgtttcttgatctgtatgctagcaacacaggttcattccgtttgtgaaaattcattgagctgtgctcttatgagctgtgtacttctctacatgtatgtta

SEQ ID NO: 235985 - DNA, 122 bp, Homo sapiens
cagggcagcgcgcgtcctccccggcagctgatcctcgccatgggggacggaaaggctgtccggatttccgtggcggaaatgaaaagctactacctgtattctgagtggtgctcctggctgct

SEQ ID NO: 235986 - DNA, 122 bp, Homo sapiens
gccctccttctgtcagtcctagcatctggtcagggtaccgccgcccgggaggtggaacggcgagcccaccgcccatggccgcgaactcgatctcagcccaccgctaggtggcaggccagccc

SEQ ID NO: 235987 - DNA, 122 bp, Homo sapiens
gagaaacctatgagcaagaatgggcttatgacacatccatttccactccatccctccttccgttgtatgactgcatggagcccctctgacctccagcagtgtcacctgcagcctggtagtga

SEQ ID NO: 235988 - DNA, 122 bp, Homo sapiens
gtctcaaaaagaaaaggtattaatgcatccaggactagccttaccaataaatgtgtggtgcgtggataggccagctggtttaaaggaacaagatcaaggtggacatcgcttgatttcatatg

SEQ ID NO: 235989 - DNA, 122 bp, Homo sapiens
gtagtcggggctaggctggaacaatgcttcctggacagatcaggtcaaaaattcccagtgcgcggggtattcttagagcccacacatcctcttaagagtttagctgatccagccaacagcct

SEQ ID NO: 235990 - DNA, 122 bp, Homo sapiens
gggtggggacggcccgccggaccgaaattcccagactgctgcctcaggcaacgggctttccgactccttggcttcttatgtgaggaaaccacagcgcggccggcatccagagagtcggttag

SEQ ID NO: 235991 - DNA, 122 bp, Homo sapiens
actttaagaactcagtaacctaaagaggagtttgaagaggtatcatgaaacgccgtcctgcggaaacatccaccatccggaccactgagggaccccaggtgagctccccagctccagtcgcc

SEQ ID NO: 235992 - DNA, 122 bp, Homo sapiens
gggggagccattgattttgtgcccaggtggtttacagtgtgaagcttagggagggattaccgggctcgggatttggaagccagcagttccttggtgtcagtctgcacaactaattctaatgt

SEQ ID NO: 235993 - DNA, 122 bp, Homo sapiens
tggagaatgagcccagttcctttcctctctctgtggatttgaaaactctatatttgaggacgctgccaggtgtcttaacaaagagccgcacctcggcgtgtcatccacatgagagagttggc

SEQ ID NO: 235994 - DNA, 122 bp, Homo sapiens
tgcttgtatgtgtgaacgacagtgtgtgagtgtaagtgagggagtgtgtgtgtgtgaggacgtgtgagagcatgtgcgcatgtgccgaaggtgccagctcaggacaaccaagcattacgtgt

SEQ ID NO: 235995 - DNA, 122 bp, Homo sapiens
cttagaagccatcacagcaggaatgaattctggcaagaaacacggagggatgccagcgctcgtgtgaaaggggacacggagcgggatttcccagcctcaaagcttctgcccacaagctacgc

SEQ ID NO: 235996 - DNA, 122 bp, Homo sapiens
ccgaaacccccaaaagaggcacttcctatagcctctcagcaagaaggggatcttgagtggcgtcagagccctcagggtggcacctcaggatctcctctgcgtggaggagggcatggatgcac

SEQ ID NO: 235997 - DNA, 122 bp, Homo sapiens
tctcaggaagcaagcattttgctcttttcctaaaactgcatagctgacttgggaatgaggcggggagagctggtctctcttttctaactcttctggtaggatgtggtaaagactgagctcct

SEQ ID NO: 235998 - DNA, 122 bp, Homo sapiens
caataacccaggggtcagacagggtctgatctagcctgtggggcaagtacggggaagacacgggacctcttggagggggtcagtaggcttgtagggggaaagacgcacacagagactaaagg

SEQ ID NO: 235999 - DNA, 122 bp, Homo sapiens
tcctacctggacaaggtgcacgccctggaggcagccaacagcaagctggaggtgaagctccgtgactagtaccagaagcaggggcacaggccctcccacaactacagccactactacaggac

SEQ ID NO: 236000 - DNA, 122 bp, Homo sapiens
cgggctgggctgtcagggcccggggagagagggggcctcaactcacactgcacgtccacgcggatggacttgatggccggcacccccacgccgttctcagccttgcagtagtagcggccgcc

SEQ ID NO: 236001 - DNA, 122 bp, Homo sapiens
gaaatcgctcttgtgaaaacgagccctgatagtatcttggctcactaattcatgccatgccgctcaaaattaaagcattaaaatttcatagatataataccatttataaatcatgtcataaa

SEQ ID NO: 236002 - DNA, 122 bp, Homo sapiens
gatggggctccttcaccagcggcgtggcatccgttaagagtgtcatggctgggcctccttcgcctccaggggaggtcagagccaccaggcttcctcccccagcccagcttccagagctccat

SEQ ID NO: 236003 - DNA, 122 bp, Homo sapiens
cctcccacgttgctgatgcctttcccagaactggaaggctcaggaggctccggttctgcacgtggatgccttgctttctctgaaaagtgtcctggttttaggggaatccagcagtggtatca

SEQ ID NO: 236004 - DNA, 122 bp, Homo sapiens
aaaaatacagaactttctctctcactacgaaatctgactgcagtaggactgaatcaactgcgttggcaaggctttcctccagccccgtaagcttctgacttctttgggaacccatattgcct

SEQ ID NO: 236005 - DNA, 122 bp, Homo sapiens
ggcctggagaggaagtgtccctgaaagtggttttggggctgcccgcgccagcgaaaagcacgtgtcccatttcctgccggaatggccagaaaaggtctcctccccggctctgccccctctag

SEQ ID NO: 236006 - DNA, 122 bp, Homo sapiens
acgggaaaggtagtttccaggtagggcgccaacagcatcaagctgtgcgcgtgggctctgcgcatgcctcgtccgccggctacgtctgcgtttccgcctttccttttgtttttctcaggttt

SEQ ID NO: 236007 - DNA, 122 bp, Homo sapiens
ggctcccccaccttctccgccgacgcggccggaccaggccctccccaggctcgaggggcccggccctcggcgtcccccaggctctcacccgaagccgccgggctccctccgaggtccccgcg

SEQ ID NO: 236008 - DNA, 122 bp, Homo sapiens
aaaataacgtcaagtggtgcagacaagtggaactgctgcttgtgaagtgggctgtggagtcgtgatgtttgctacgcccggcaccatgtttcagaacctgtagcagcgctcaagagagaatc

SEQ ID NO: 236009 - DNA, 122 bp, Homo sapiens
aaggggatttttacactattaattgtcttcagctgcaagtaacaaaaaacctgactggggcgccttacagattaaagattagctcaaatccaaggtttctggaggtgagggccttctggggg

SEQ ID NO: 236010 - DNA, 122 bp, Homo sapiens
tttccctcagagtccctccttcagaagatggactgaactgccagtgacatacccctaagccgttggggtggtcaagcagggtatgtatgtgatggggagagagcttggatgtgcaggctagg

SEQ ID NO: 236011 - DNA, 122 bp, Homo sapiens
tctcctatctgtttgtttgtctgtctctgcgtctttctctctgcgtgtcaacgtaagactcggtctctggatctctctctctttctgtctcccgcccccacaacctctgtatctctgacagg

SEQ ID NO: 236012 - DNA, 122 bp, Homo sapiens
gcgggctcccggggaagagacgggtgatgaacaatctttacatcgggaaccttagccctgcggtcaccgccgacgacctctggcagctctttggggacaggaagctgccccccaccggacag

SEQ ID NO: 236013 - DNA, 122 bp, Homo sapiens
agaggcctccagtgtcaacaccaagccagcccctgccctcggcaccccagtcccagagttcggccccctcttgacctgcctcagggaggatctggagtctgtctcaagcccactagcctgat

SEQ ID NO: 236014 - DNA, 122 bp, Homo sapiens
ccaagctaagaagcggcttttttttttttccaaagcagcaagccacgcccctcccgcgctcgcgaaatccgagacccgccctttccggaagttttgacactgtgcgccccgagtaatgtgat

SEQ ID NO: 236015 - DNA, 122 bp, Homo sapiens
agattagaactacagattttgttttagaagcctgcatcccagagggtcagagaccaaggccgctcagcttcaggtgaccttggcaaactgaccacagaggaactctgaacttgcagatccca

SEQ ID NO: 236016 - DNA, 122 bp, Homo sapiens
gctcctgaatgggtggaggttccaactgaaattgaagagagcacctgagtttttttccctcgatagataacctgaagcaataggaagaaaactgtctcagaagaggtatggggcaggaaaga

SEQ ID NO: 236017 - DNA, 122 bp, Homo sapiens
cgcagcgactcccctccggttcccatgttgtcgaggcatgctgggagtacaagttccgagcgcacggccaggtgaacgcgccgccgccgccgtcgccgcgcgactccccaccccccctagcc

SEQ ID NO: 236018 - DNA, 122 bp, Homo sapiens
tatgttttccatgtacagtcaagttccatataaggccgtttcagtcagtgagcaaccccacgtactatggtggtcccataagattataaaagagctgaaaaatccccatggcctagtgacat

SEQ ID NO: 236019 - DNA, 122 bp, Homo sapiens
gtgagcaacctgagggcatgctcagctgaccctggacccttcccttcctctgccagccaacgcctgggcttctctaccccagccgggcccagagagtctggccctggcttgcaggtagtctc

SEQ ID NO: 236020 - DNA, 122 bp, Homo sapiens
ctgtgtcagggtgtctctgtgaggatggctaagcccctctgagtgaacttcttgagggatcgcttggtgtcctggcttctctgcccagaaagagtagccaggtcttgagggttaatgcagtc

SEQ ID NO: 236021 - DNA, 122 bp, Homo sapiens
gggataagtcaacagagacccgaccacgaaacctacaaggcccaataattatctccagagcgccgcaatggggcggggcggggcggggcggggggggggggcagacagggaggaggagtggg

SEQ ID NO: 236022 - DNA, 122 bp, Homo sapiens
tggccctctgcaatacttgtcttcatctcaccgcctatgcccccgtgagccgtacccctccgcgctggccttcccattggctgcccgccccttcaggccctgcccccgccggtcccgccgcc

SEQ ID NO: 236023 - DNA, 122 bp, Homo sapiens
tttgatggattcccggaaagaacacccgactgaagggcgtaaacgtgacgcgagcccatgcgcaccacaggagtgtccgtgggcgcatcttctgctcctagcacagcagccacgcgcgtccg

SEQ ID NO: 236024 - DNA, 122 bp, Homo sapiens
ccctcatcctttgcttttctctccccaccccatcctttgcctaaacttccacagggcctccggctccagacgtgccattcccggcttccccgggaacctcccgcttccaccaacaactccgc

SEQ ID NO: 236025 - DNA, 122 bp, Homo sapiens
tcacatatattattggatttcagtcccaaagcagccttaactagtttatattattatccccgttttatagaggaagataccaaggctcaaataaaggagatgtgatggaaattgctagctgt

SEQ ID NO: 236026 - DNA, 122 bp, Homo sapiens
ctgccatggaatcactggagacaaatgtgatcatgtgacaaggtccaggtcctgagctggcgcaagagagcagaactcaggctccacttctaactttctatagtcagacctcagggcacacc

SEQ ID NO: 236027 - DNA, 122 bp, Homo sapiens
aggaatgaggctggaacacagcgctgaggcctgatccagcgcggcagacgggtggatgctcggggctgaagtgggaagatgtttcccagggccaggcaggagctaccggcggggagggacct

SEQ ID NO: 236028 - DNA, 122 bp, Homo sapiens
gcaagctggtccgtaccaagaccctggtggagaactgcttcgtgctcactgacagcacaccgtaccaccagtggtatgagtcccactatgcgctgcccctgggctgcaagaagggagccaaa

SEQ ID NO: 236029 - DNA, 122 bp, Homo sapiens
ctaagccgcccccgcccgcctgctcggacagtttccgttccctcctagtctctgttcgctcgcttaagctgttttgaagccaagtgaagagtgtggtttgcatccaagagaaaacaccacac

SEQ ID NO: 236030 - DNA, 122 bp, Homo sapiens
cgctgctggagggacagcgaaagggcaaagagctggctcatattggaggaaacaaagctccgctggacaaaggatggagcaggcagctccggctgagacctggccctgtcccccgaggaggg

SEQ ID NO: 236031 - DNA, 122 bp, Homo sapiens
cggccgcacaacgcttcagagcctcattaccggctgtggctcgctgaggccacgggcttccggcagccagtggtagccggcggctctcctgaccgcactgctacttcgcattattctgttca

SEQ ID NO: 236032 - DNA, 122 bp, Homo sapiens
gcacctggcacccctgccccaaacccctgcggctcgaacccggctgtccagacgcgccggcgaagttgggctcagtcaaaagaggctcggtggtgagagccctagacttgattcagagcagt

SEQ ID NO: 236033 - DNA, 122 bp, Homo sapiens
aggtctcctcagcctacggtgcggcataatagttctgagcagggccctgggtttgaatctcgactcagtcgttcactagctgtgtgatctcaagcaatgagagcctcgcgtttcccgttcgt

SEQ ID NO: 236034 - DNA, 122 bp, Homo sapiens
gttccctcaccagaactgataaagcagctggcgtgatccatggagaggaagaaagagcagcgtcctgcagtggccacctgagagcagcatgaggcataggagcccccacacccaagccaaga

SEQ ID NO: 236035 - DNA, 122 bp, Homo sapiens
cgcgaaataagctactggcgacctgtccaagcctgtagtcttccggcggactcccgcgaacgccgtcgtcaggattctctctagaaatggacgacagaaactcagccacgccacgcaccacc

SEQ ID NO: 236036 - DNA, 122 bp, Homo sapiens
gtgacgcgtgtggtgagtgtgcgtgagtctggaacgccgtcgccatgggcagtgacgctgcggtgtgtgtgagtcaggctagcagggacctgccccatgcttgtgtttctgctgctctagcc

SEQ ID NO: 236037 - DNA, 122 bp, Homo sapiens
aagaagcaactgaagtctgacaccatgtaaagaggagtgtctaggctgctggagagaccacgtggagaaaaaatatttggccagctgtcagcaatgacagccattccaacagaagcaccaaa

SEQ ID NO: 236038 - DNA, 122 bp, Homo sapiens
gaacgcgaagttaaatgttggtgtctgagcgatgtgctggtggggcagagggggttccagcgtcctcccagagtgaggaggcttttgcaatttctgctgaatgcgtcagtggaggcacaaaa

SEQ ID NO: 236039 - DNA, 122 bp, Homo sapiens
caatgtgggttcattgctataaaaaatgggaaatcaaatagcattagccagctccttgtgcggggcggaggggaaatcaaacagcattttgccttcaaatggccctgtttgttctagcacta

SEQ ID NO: 236040 - DNA, 122 bp, Homo sapiens
tccgtgccctttcgaaagctctggaggggtggccccaaaatgctataggttaagttcgagcgttttcccgctttattaactgaaatgactcgcagcagagtctcagagcgctccctggaggg

SEQ ID NO: 236041 - DNA, 122 bp, Homo sapiens
caaattacgcgcaatggaaacatcttagtcctcagagcaatcctgggtgcaaggcagaggcggctgttatcaggcctattacacaggtttagggtgaaacttgaaaatgtgggcgggaaagt

SEQ ID NO: 236042 - DNA, 122 bp, Homo sapiens
gaaagaagaaaagacaggcccttcctactcctttcagggtttatgtagttatttatttaccgacatgtgtgcagaaagccaaatcggtactttttgtgaaatggaatatagtttagattcaa

SEQ ID NO: 236043 - DNA, 122 bp, Homo sapiens
attaaaaaaaccccattatgtcaggataagtccaagaataaacacaaatgagtaagaattcgttttgttatatattttttggatgcagcatactttggggcagatgtttaaaaattcttcca

SEQ ID NO: 236044 - DNA, 122 bp, Homo sapiens
ccacagatctggaccctaagtgaatgtggttggctgtgaaaagtaaaagtcattctcacacggaagtccttgtcttggggagcttacagtagactaacatctgtaaagttgaacataaactt

SEQ ID NO: 236045 - DNA, 122 bp, Homo sapiens
tgggtattgatatgcccatttcattccatttctaaagacgctgagggtcccattgcactgcgtcaggtaagtctcccagcggtcaacggcaaataaatggcatttgcggttacccttagcat

SEQ ID NO: 236046 - DNA, 122 bp, Homo sapiens
gccagagggaagctccgacgatgccaccgctggaccccacacccggggcctgccgcccgccggcctgcccagcaggctgcaccccagaagtggctttgacagccggtccttccccaggcccc

SEQ ID NO: 236047 - DNA, 122 bp, Homo sapiens
aaatgctttaaatatatcaacgggtgtctagcgtctgtgaagtagtactattttattacccgtattttaccaacaggggaactgagacacagatgatctgcatcttgcctgaagtctcccaa

SEQ ID NO: 236048 - DNA, 122 bp, Homo sapiens
acctcaggtgatccacctgcctcggcctcccaaagtgctgggattacaggtgtgagccaccgtgcacggcccgcaaaacttcttttgatacttctgtgactagtcttcctctctcctccaaa

SEQ ID NO: 236049 - DNA, 122 bp, Homo sapiens
ctcaataattaaaccgaaaaacgttttaaagaagtacaaataagacttgctcgcagatcccgcaatcccatcaatacgaggcgtaaaagccgggtcctccactggctagggccgaggaggca

SEQ ID NO: 236050 - DNA, 122 bp, Homo sapiens
taataactcctttcatattctggtaggccagaattcaagtcagactccacctttgttgttcgatgaacatgaggtttatctgtgctgtgtaccagcagagtgtattctatgtttttccagcc

SEQ ID NO: 236051 - DNA, 122 bp, Homo sapiens
tatcaggcacttctggcaatctggagcggcagccggctgggcggcgaggaaaccgctgcacggatcccgcctcccagcacacgcagtcggcagttgcagcctccaagaccgcggtgccacca

SEQ ID NO: 236052 - DNA, 122 bp, Homo sapiens
cgccggcaccttttcgcccgccacccctgactccctttttccaactcccgggatttctcgcgagacccatacctgccggctttgggattagaagtcgaagcaccgatttacaaatactggcc

SEQ ID NO: 236053 - DNA, 122 bp, Homo sapiens
ttcttctctttatgggggtcggcaaacctttttgggaaagggccagggagttaatattttcgtcgttgaaggccacgtggtctccaactcaatcatccagctttgcccttgaggaagaagca

SEQ ID NO: 236054 - DNA, 122 bp, Homo sapiens
ggaaacctgttgcaggagccaggctgggagacaaaggcgtgggtgaccacaccaatgccccgtgggaggccctgggtgacattttgcctgaacataagaggatgatagttacaccctggttc

SEQ ID NO: 236055 - DNA, 122 bp, Homo sapiens
gcaggacacagatcttcctacccggctgattcggagacgagaccaagctgttgctgaggacgacagccctgctctggtcactccggaggctgaccagtctacacacggctgaagcttgaaga

SEQ ID NO: 236056 - DNA, 122 bp, Homo sapiens
acttccgcaaggaccctttggaaggccgggtgggccgaggtgagagtccccctgccgagccgcgggatccagggcctgctgtgctgggcgcagccggccgggggctgcgggccccgagcccc

SEQ ID NO: 236057 - DNA, 122 bp, Homo sapiens
gctctgcgagatctgggggcggctcggccaagcgagctgagggaagcacctgttgtggaccggggagggagaacagaattgtgagggcccgtgtaaaaggggatctgggctggcttcccagg

SEQ ID NO: 236058 - DNA, 122 bp, Homo sapiens
cccaccagcaaaatgacattagtaggcttaaaactgaagatctaagctggggcggtggctcgtgcctataatcccagcattttgagaagctgaggcaggaggattacttgaggccaggagtt

SEQ ID NO: 236059 - DNA, 122 bp, Homo sapiens
gcgggctgcggggcgggttgccagctaatatttttccaccttgcagcgtggctcgttttccggctacttttggaccctcagtctgtggtcctaggctgctgttccctcaccactgtacacag

SEQ ID NO: 236060 - DNA, 122 bp, Homo sapiens
aaaattttatgtcccccccaccaaacactgagggtgattgcctaaagttacatggctagtcggagcagtcaggacaataattcagttctactgacttaatctaaccaacttccttcatttat

SEQ ID NO: 236061 - DNA, 122 bp, Homo sapiens
tggggaggagatgaagctgatattttcaaaataataggtttttctccaaaaagcaaatgacggattaccatgaaaatatgggtaccttgctgcatttacatcatttgtttcttttttttttt

SEQ ID NO: 236062 - DNA, 122 bp, Homo sapiens
attagccgggtgccctgctggcttgggggctgcagagccacctgcaggtggaccctcagtcgggcacccgctggccccaggcctgggtctccgcaggctgtgggagccgctcagaggcgctc

SEQ ID NO: 236063 - DNA, 122 bp, Homo sapiens
tgtgaactcaactctctgtattttcttgtggtagccttgaggtctcatgccttttgaactcgtgggaggcagtatgaagttggaaaagcatttttttttttttaaatgagatcaactcagtt

SEQ ID NO: 236064 - DNA, 122 bp, Homo sapiens
tacgtgcaggatgtcctgtcgcccatggttcgcgcctttccgctgctgagtagctcttcacgccatggatggatctcagtgtgtttaacactcgcttgaagagcatccaggttatttccaga

SEQ ID NO: 236065 - DNA, 122 bp, Homo sapiens
caagagttcaagaccagcctgggcaacataaggagaagctataacagtcacaaaatttgccgggtttgggtggcactcctgtagtcctaactactctggctgaggtgagaggatggcttgag

SEQ ID NO: 236066 - DNA, 122 bp, Homo sapiens
agggctgggcggagccttgggaaacgggccctggtaatctccgctcagtgagtggcgctgcgaagctgcttctgcccgggaaggaggagaggggcctggaaccgccgagggaaccaccagtt

SEQ ID NO: 236067 - DNA, 122 bp, Homo sapiens
gggagaccgcgaaggcgcggggacgcagagggcgaagcttggtaccctgcagctactgctcgcgaggagtcccagcttaccctcccggatccgctggggctcacctggcacccccggggaca

SEQ ID NO: 236068 - DNA, 122 bp, Homo sapiens
cctactccgcagtgcccggtctgatcaactgtccaagggctgaggagtgcgggcacacggcgtgggactggcgggcagctcgacccgtggtcctggcgtggaatccactaggcgaagccagc

SEQ ID NO: 236069 - DNA, 122 bp, Homo sapiens
aagtatttgtcacagtgcatttctaatttatgatagtaggaatatccaaaaatggcagaacggttaaaagtttttttaaaaaataagtttaggaatctcatatgggagcccgctgcttacca

SEQ ID NO: 236070 - DNA, 122 bp, Homo sapiens
ttctgcagcaggaaggcggctctgctgagccaggaagtgccgggccgaggcaggagaacacgcgtgactgtcacaagacggaggaacggctgaggccagtcgctcatggctgtgggtggaat

SEQ ID NO: 236071 - DNA, 122 bp, Homo sapiens
gcccacgctactatgctttcaggctacaaccactagcacggctgacgatggccctttctgcggagaccgagtcacacatctaccgagctctgcgtactgcttctggcgctgccgcccacctt

SEQ ID NO: 236072 - DNA, 122 bp, Homo sapiens
tgtggactagccagagtagtcagcactgcatttagcaacaaactagtgccatctagtgggcgaagtggagcattcaaacatgcatgttgaaatgctcagacaagagctgagaattaaaacag

SEQ ID NO: 236073 - DNA, 122 bp, Homo sapiens
aggggacacaattaattcgttaaaaagcacgtggtggccgtgaaacgtggctttcgtcaccgaggcttcagcgcttgcccgccgctcagacactgcagaggcaggacagaggcatggcggct

SEQ ID NO: 236074 - DNA, 122 bp, Homo sapiens
ggcactcgccagctgagcccagcgccagtctaggtgagccccacggcggtgagggacgctcgccagacggcccagaggagttagatgacgtcacctccaggaggactcgctttttcattaat

SEQ ID NO: 236075 - DNA, 122 bp, Homo sapiens
tgtctatagagtggttagaagtttgatttgttctgggacccactctcagttaggcctgcccgccctcccaccttgcctgcctgtctgctttcctgccttcctgccctccttccctccctccc

SEQ ID NO: 236076 - DNA, 122 bp, Homo sapiens
gtttgtgagctgcctacattaaatgctttgctcctgaccttctgtgattaaaatctgttccgtttgcagggttcggtgcgcttggatttagtgtattttgttggtacagtaaaaaagagaac

SEQ ID NO: 236077 - DNA, 122 bp, Homo sapiens
ggagcagaaactggagccgtctcactcactcagtaacaactaagagcatgatgtggaagccggcaattaaaccccctccagtgggccgcaaggttccccagccataccccaccatcagctct

SEQ ID NO: 236078 - DNA, 122 bp, Homo sapiens
tgatcctcgtttgggggcgagcgaagaattgacaagaggtctcggcatcccgaccccgcccgccttacctgtagcaccattcctttcgcggatcgtggggcttgatggttgtggagctagta

SEQ ID NO: 236079 - DNA, 122 bp, Homo sapiens
ctgtcccagcaactacttgtcgcgcgagcaacgcccgcctcacgtcgccggctccggctacgccagtcaaaacagccgttagagcttcaccaatcaccggccttcctcgttcccttttcttt

SEQ ID NO: 236080 - DNA, 122 bp, Homo sapiens
gacacccacccggatacatgttaccatcgggtacagccccatgaccaggggacgcacacccggatacatattaccatcgggtacagccccatggccaggggacacacacccagatacatgtt

SEQ ID NO: 236081 - DNA, 122 bp, Homo sapiens
gttaggggcgccaggacgtgggcgtgcaggacgccagagctgggtcagagctcgagccagcggcgcccggagagattcggagatgcaggcggctcggatggccgcgagcttggggcggcagc

SEQ ID NO: 236082 - DNA, 122 bp, Homo sapiens
atgtgctctctgcacatccacaaagcgccccagctacgtcgctgggcagccagttgaccacggccaaacccgtagatggtccagatcatcaaactgaggttaagaacgcataatgaaaaaca

SEQ ID NO: 236083 - DNA, 122 bp, Homo sapiens
tgcttttcttttgtttatctgcctcttgtcaattcggtttctggctccagcggaagagcccgcagaagcgctgaggggactggagacggtctctggcgcccctacacctgctcagtgagcct

SEQ ID NO: 236084 - DNA, 122 bp, Homo sapiens
agctggaggcggccgatgttccccggcgcaggctgagccgactctgacagccgccgcctccggccccccgcacacaccccctccgggcctcacagcgcccccgcccgcccccgcccactgtc

SEQ ID NO: 236085 - DNA, 122 bp, Homo sapiens
acaggcatgatcccggccaagcccttcctttaaccacagctctggagactgtcacttggacgaccagggctgccagggtttccggagggcacggcctcctgactgctcagggcttcctcaag

SEQ ID NO: 236086 - DNA, 122 bp, Homo sapiens
ccagggtaaatttcaacatttatttaggtcagcagttctcaaccagggcagtttaccccccggggaacatctgaaaatctgggaacatttttcattgtcacaactaaggaggggaggaggag

SEQ ID NO: 236087 - DNA, 122 bp, Homo sapiens
ggccacatttgtagatgatattggagagcaacagttattgctcttaaggagcctgcaattcggtagttcaattaggaaatatttgtctttcacaagcatagttggcacagttaatccaattt

SEQ ID NO: 236088 - DNA, 122 bp, Homo sapiens
ccacagcctgagcaggagctggaagcctgggcctgcagccctgggggttgctggtgatgacggactctgccttccttccaccctctgctgtgtgacgtgggcaggccagtgccctctctctg

SEQ ID NO: 236089 - DNA, 122 bp, Homo sapiens
ggagatgtaggggacccccaggggctgagaggcaggggtctatggtggcaggaagcttggcgtgctagagggttgtggttgggctgctggggcccggttggctgcggagccctccggaggag

SEQ ID NO: 236090 - DNA, 122 bp, Homo sapiens
caggctcctcggcgctgggaaactcaggagcttgtgatctctctggttccgacttccagccgccttcccgagccagttaggcgattgcgaccctgccccgccccctgggtcctgcaggcgcc

SEQ ID NO: 236091 - DNA, 122 bp, Homo sapiens
tctgtcacagccccgactggaaaccacggtgtccattaacaactggacggacgcaggagtcgttgtctgggcagacagcggagggttctgcagcaatgaaatggagttgatgaacttcaacg

SEQ ID NO: 236092 - DNA, 122 bp, Homo sapiens
tcatctgtaaaacagggataataacatgtggctcctgggggcatgggggcagcacctcttcggtatccctggggcattgcgggggttgctgtaactgtggggctcgtcggtggcagggctga

SEQ ID NO: 236093 - DNA, 122 bp, Homo sapiens
tatcttggccgccggctcaccctgtgcgcactccattattcccggcaccatctccttccgcgtgacctctgcatttggacaccgtttccatcagactcttttggaagtctctgaagcccacc

SEQ ID NO: 236094 - DNA, 122 bp, Homo sapiens
cccttggctctgtccagaagagaggatgggtccagggagttgtcataaggtagggagctgcgaagtgcagctgctggggagtgaggtcacaatgagcccaatccaagttcttttctgccttc

SEQ ID NO: 236095 - DNA, 122 bp, Homo sapiens
acttagccggcctgactggtcgggcttccggggtcccgctgctccctaggccccttgccccgattcaggctcccaaggtggggcatcagtccggccctcgctggctcactggagaggtggtg

SEQ ID NO: 236096 - DNA, 122 bp, Homo sapiens
agattttatagaatcttcatatctgctttgtaagtgttgaggatcattattgttattgtacgaagtgtctaccacaccctctcattgcactgagagtccgagtaagtttagttagtagatca

SEQ ID NO: 236097 - DNA, 122 bp, Homo sapiens
agaacactgcaagaattcagtgagatgggagcttggagggcaagtgatgaaaatgagacacggcagagactgattatcactaaaagtttaggaaagggaaacaacagtttatctttgggtac

SEQ ID NO: 236098 - DNA, 122 bp, Homo sapiens
gggtacagaagaggtgcagcaccccacgccactcccagccctgtcccaggaagctggaaacgctgggctcaccctggtcctctctgcttgtggtatgagtccccaccacctacctgggtgag

SEQ ID NO: 236099 - DNA, 122 bp, Homo sapiens
ggacgtgcccagcatccaggcagggaagggtgggagagctcttggtctgctgtattatcacggaggggtgcagggggcatgcagatcactctctcatgagaacatcaacagggtcagattag

SEQ ID NO: 236100 - DNA, 122 bp, Homo sapiens
tcagggcgcatgcgcaagatgggccccgcccccacccaccccttccggctccgcccgccgcgtcgccccaaagaagcacctgccagtctctttaaaaggtttattgatcatatacaaaataa

SEQ ID NO: 236101 - DNA, 122 bp, Homo sapiens
agccacagagtcacagggtgagggcggcaaacccatgttcccacagtaagccacgtggaacgacgacgaggggaccccctatgtgtccactccgtagctcccagatccatgcattctgcctg

SEQ ID NO: 236102 - DNA, 122 bp, Homo sapiens
aaaccaacactgacacaaaccaattgtgccctgatcgggaaacaatgaagtatcgggagtcgctgttgaaagtctgtaatttccagcggaattgctgtttagtcatcatattgccgctgaat

SEQ ID NO: 236103 - DNA, 122 bp, Homo sapiens
tcttcagggtttcctgtgggtacactgagaacattgtgttctggctgagaacttatccggcggagcctgctgcatacgtggcccctgggtcctagtgctgcctcttacctagcctcaggcct

SEQ ID NO: 236104 - DNA, 122 bp, Homo sapiens
tactttacagccagagaaggcctagctttcagggacattggcttagtttgttgggtgagacgtgggggtggagaatgggagcactgtctctttgccaaattttccagagaaaccccgggact

SEQ ID NO: 236105 - DNA, 122 bp, Homo sapiens
tgcatcatctgcatcgtcacgtacgtgctgaacttccttcttctcattatcaactacaaacgactagtttacttgaacgaggcctggaagcggcagctgcaacccaagcaggactgacgccc

SEQ ID NO: 236106 - DNA, 122 bp, Homo sapiens
tccgaattactgggctaggcaggaaatgcaatccccaaagagacactgctcggctcccctcgagagagggggtaacagttccctgcccacaccgcccccagatcatcctgggtgtccccccc

SEQ ID NO: 236107 - DNA, 122 bp, Homo sapiens
aagtataataataataataaaaaaagaaaaaaaaaaaaaaaaagagctggatgcgtcagtcgaggacagccacatcgccttcagctttctcgcgccgctcgctcgcgccccccgctcgcgcc

SEQ ID NO: 236108 - DNA, 122 bp, Homo sapiens
gcaggagggggatggagaggagaaggctcctgggtggcatggcgctcctgctcctccaggcgctgcccagccccttgtcagccagggctgaacccccgcaggtaagggggagggggcgtctg

SEQ ID NO: 236109 - DNA, 122 bp, Homo sapiens
tacaaacaggcattgtactgagtgctttacacctatcatcaagtgtgctcctgtaataaccgtatcattatctccatcacatatatgggtcagtgaagtgccatagcttgccagaggccaca

SEQ ID NO: 236110 - DNA, 122 bp, Homo sapiens
cggcctcccggcctgaactcttctcctaccatgatggtgcctgggatgctgtgtggtgcccgtgggcagtggcggaggcagtggccccggctcgttgaaccttgggcactgcccattctgag

SEQ ID NO: 236111 - DNA, 122 bp, Homo sapiens
cccaccagaggtgaggaatgttttggatgcaggaagcagctgagaaaccaaaattcccagcgcgcacattgacaacctcttggaaagggagggaaggcagccactgagcgtcccagggcctg

SEQ ID NO: 236112 - DNA, 122 bp, Homo sapiens
agggaaagtgaatgtcctcccctctgtgtctgtctgtccagatgtctctgctgctgccctcggggcctgcagtggagctgaggagctttatgatgtttcctttgcttaccacagtacttacc

SEQ ID NO: 236113 - DNA, 122 bp, Homo sapiens
ggaaggttcactttcctttaattctacctcatactttttgagtgccttctaggtgtccggcgcgcccccacgtgcttccccagtgttaattcattctctctctagtccatgtcatgttgcct

SEQ ID NO: 236114 - DNA, 122 bp, Homo sapiens
attacaacagcgcaggatggcttggtcaggtccagggccaccaagcaaggttgtggagatcgtggcacaagggagcaagtgtggctgaaatccagccccactgtctgcccaaaagaagaggc

SEQ ID NO: 236115 - DNA, 122 bp, Homo sapiens
aaggccccgtggcagggcccccagggcaggctgctcacagctgctgcagctaaagataggcgtgaagggcacacgccttggggaaagtcgtggggagcggtcctgtctcgggccatggacac

SEQ ID NO: 236116 - DNA, 122 bp, Homo sapiens
cgaagcggggaccgcactatagtgcagccgccgaaggggggaacgctcacgtatggctctcggcttcccagtgagcagcaatagttcctggaaaaccaacgctaagactaccggggtcagta

SEQ ID NO: 236117 - DNA, 122 bp, Homo sapiens
ttggtagagtgcgcactccaaattatcgcagggggcggggcttcaggccaggggcgggaacgtccagagccaggcgctgtcagactttgcacgctctcagcatgacagaagcactggactgg

SEQ ID NO: 236118 - DNA, 122 bp, Homo sapiens
actcaaggactctcggccatgtgtgctgggcgcagggcccgctgtgcaggagcccgtggacggacgtgtgcccttctcccccagcttggataactgaagcccagagagagaccgctccccaa

SEQ ID NO: 236119 - DNA, 122 bp, Homo sapiens
tgcccttgatgtcgctcaggtccgaggggctaatgacgttctcgtggatttctgtaaaaccgaaggcaggacgccatgaggctgggagtcctcgcactgcctgcccagaccactgtctagaa

SEQ ID NO: 236120 - DNA, 122 bp, Homo sapiens
tgtgctcaatttcgctcccggccttagctgccttccggcggggcagggtttgggacctgtcgcctgccatgcctgagcctgcccgccctccgtgggctcctgtgcggcccgagcctccccga

SEQ ID NO: 236121 - DNA, 122 bp, Homo sapiens
aggttgggggtggggtggagtaagctaagaagcaaacttggacctctagaacaaatttcgcgagacctttattacagggcctcagcaaccggatgataccgcgagagaggacgcctgacgta

SEQ ID NO: 236122 - DNA, 122 bp, Homo sapiens
accgccacactccctgaggccagggcatccctgttggcagtcacaagggaactggcaagccgaaatggggtgagaacggagcccgcagagtctcggggtggggagattgggcagagccctgg

SEQ ID NO: 236123 - DNA, 122 bp, Homo sapiens
gtcacccctggacatgattggtattctgcatgactatcattggtagtggtagcatggtatcgtaaaggcaaggatgtaaagagaaacaaactcgggcttcagggtgaaaacctttggctctc

SEQ ID NO: 236124 - DNA, 122 bp, Homo sapiens
tgatgagaagctggttagcaaggggtgtgtcttcagttaggacaaggtctgtgcttcccacgggttctctccacagcaggagggatgcaatcttccctttcctcccctgcacctaccctcaa

SEQ ID NO: 236125 - DNA, 122 bp, Homo sapiens
gacggagcccctgccagacattgcggtagctgagcgatcagcgaggatagggtccaagcgcggcctcttactgcttgtgtggaccggcattggcccgcttgcaacctgaaagagaggaaaca

SEQ ID NO: 236126 - DNA, 122 bp, Homo sapiens
atggccgcccccagtgttccgcgtccgggggtttgtgggagttgccttgacctgcagctccgccaccgcggacccgccttctgccctcagcagcagacgctctgtcccgcccgggcagctct

SEQ ID NO: 236127 - DNA, 122 bp, Homo sapiens
acttgggcagaattaagagtacgcagcaagcgcgggccccacacgctcccggcgggattgcgagcgggacattcccaaccctctggaaggcgctcagccgcctccgctgtagctgggccctg

SEQ ID NO: 236128 - DNA, 122 bp, Homo sapiens
gccatgaggcctgcactttgcagggctgaagtccaaagttcagtcccttcgctaagcacacggataaatatgaaccttggagaatttccccagctccaatgtaaacagaacaggcaggggcc

SEQ ID NO: 236129 - DNA, 122 bp, Homo sapiens
ccgcggcctcccattggccgccagggctggcaggcttcccggctggggctgtgattgccgcgctccagtgtcagtcccggagagaacgccggtggcggggctggtagcccggcagccgcagg

SEQ ID NO: 236130 - DNA, 122 bp, Homo sapiens
cggcgccgacggccctgtgcaggggaagcagatggagttcaagctggaggctcatcgcatcgtcagcatctctctgggcaagatctacaactcgcgggtccagcgcggcggcatcaagctgc

SEQ ID NO: 236131 - DNA, 122 bp, Homo sapiens
tgtctgtcttggattgatttgcgtctgtacctgccactgtgtatctctcgcctccaacggcgtggtttacaaactgtgatgggtcctcacactggggtctggcttgaaacacgacccccacc

SEQ ID NO: 236132 - DNA, 122 bp, Homo sapiens
agaattcacccactgagtcctgggagttagagctctgcagtcgaggggcccgtagggccacgctccctccaggcttcccagaggggctccttcctgcctctcccagctcctgttagacacag

SEQ ID NO: 236133 - DNA, 122 bp, Homo sapiens
gtgtttgtggtggcagctgggactgttgaggtgtgaacgtggaccctgaggtaaagcaggcgcatagagctgtccccgccgtgacctgcggtagccgtagatcccagggactgcgaggcggg

SEQ ID NO: 236134 - DNA, 122 bp, Homo sapiens
atgaaggagacaagctggcccacggggaggtcaatacaatcgatgcggacctcgacgaaacggaagaatctcgcaggttcctgcgtgctgggttccactcaaaatgtttcaggatttagggt

SEQ ID NO: 236135 - DNA, 122 bp, Homo sapiens
agttgcctagcagtacctgcagctcacggcgaggtccgcgtggggctctcccaggagctccgccaggcacctggcggcacccaccacaggtgcactcgactcagggcctggccccgggacca

SEQ ID NO: 236136 - DNA, 122 bp, Homo sapiens
cacaggcttaggagtctatatcacccttcctgtctacacgcagacaggcctgggagtctacgccaccttccctgtctaaatatgcagacttgggagtctataacacccttcctgtctataca

SEQ ID NO: 236137 - DNA, 122 bp, Homo sapiens
gggtcagctctctgctcaaatcctgactctggaatctcctggaaatgcctgtcctttggacgcagcccagccttgagggtcaaagacaggaggagacctcaggaacccacacacggaggatg

SEQ ID NO: 236138 - DNA, 122 bp, Homo sapiens
tcggacgagccccggcctctgacttgcttatatagggctcaggggctatataaagctgcacggtcatcctccccggcgcgaggggctgaaactgagctgcacccccgccccgcaccccagat

SEQ ID NO: 236139 - DNA, 122 bp, Homo sapiens
ttccgagcacacagaggcagcggctgtgtttgagacagagtgtgtttgtcaagagagccccgagccaggccctcggccgccagccctggtgccggcgtcttcctgggcctccgggagccccg

SEQ ID NO: 236140 - DNA, 122 bp, Homo sapiens
gtcacagctaatcagggcagagcaaaggcatggtcctgggggttccaaccttagaccatacggcaatggctttctttaaaaggtgctgtggactgaactatgtcccctcgacatttatatgt

SEQ ID NO: 236141 - DNA, 122 bp, Homo sapiens
ccccacagcgtcccccagtttcctcacttggtatcgaggagacgactctcgcgagaacttcgtggctggctaaccgaagcggtagctctgcaatgacttaagagcagttttgtgcgcttttc

SEQ ID NO: 236142 - DNA, 122 bp, Homo sapiens
taatggggtcggtaagggggactgccctcgggtttcatttcacccgggaggaggtcgcagcgccctcggggacccccagtgtccacggtcggggccggggctgcggcgggtcgagctgggcc

SEQ ID NO: 236143 - DNA, 122 bp, Homo sapiens
gtgatccttgactacatggcagggcccttgttctctccaatcacctgacactgcagtccccgccctctctctgctttctcataaaatctctgctggaccagccactcctagtggggagccca

SEQ ID NO: 236144 - DNA, 122 bp, Homo sapiens
gaagagagtgcggcccagcgcagcctcggcgtttccgccatgcgcctgcagtgctccgcgcgctcttgacgtccggagcccctggagtaggcgcttccggccattcatactgcagtcggtca

SEQ ID NO: 236145 - DNA, 122 bp, Homo sapiens
gatgcatgtgggggctccgtcccatctttttcaactacagatggagctgcggtgggaaaacgtgtgcagatacctcccattttacttttgtgctggggcttttttgggatcagttcctagaa

SEQ ID NO: 236146 - DNA, 122 bp, Homo sapiens
cctcccctgtggtacctcccatgaccgtagtggtatggtcctggagctgcacagtctagtcgttaacccttcattcccaccgctcacgctccccttgtgtgtgcgacaaggactctttcatg

SEQ ID NO: 236147 - DNA, 122 bp, Homo sapiens
aaccacatgccagtttctaggtgctctgtgtagaaggcgggtggataacaggagtgggggcgacagaggagggggagcagggctgctccatgcccagccagatattcttctgccaagaatag

SEQ ID NO: 236148 - DNA, 122 bp, Homo sapiens
tctaagaaacccgtcacaccagagaaagcccggagttcatgtgaccagctcagtgcagcccgggttccagggacgcgggctgtgcttccaaggggagccagggggttgggtgcttttgtgaa

SEQ ID NO: 236149 - DNA, 122 bp, Homo sapiens
tgggtagccactgggggtgcgctaggcccacggggtggcccgcgcccgcgcccagccactcgtggtgcatcagcttctgcacttcgcggtacgcggcccctgcatgcaatcgctccgcggcc

SEQ ID NO: 236150 - DNA, 122 bp, Homo sapiens
ccggccggcgtggggggcagtcacttccctggccagtgtggggggcggtcacttcctcggcgggcgtcgggggatggggggcagtcactcactcactttctgggccggtagtcggggatgct

SEQ ID NO: 236151 - DNA, 122 bp, Homo sapiens
gtccggactttgggcggggggtccggccccaggacagttttaccgcattccgtccactcccgattccttcatggatccggcgtctgcactttacagaggtccaatcacgcggacccagtaag

SEQ ID NO: 236152 - DNA, 122 bp, Homo sapiens
cagggacttgaaccctggaccctcagattaaaagtctgatgctctaccgactgagctatccgggctcccgtagacaacagcttgttctgccgtttcttacataagaatgaggacccttgagt

SEQ ID NO: 236153 - DNA, 122 bp, Homo sapiens
ctgaggagtccccagctccaggagctgcagggctggcagtatgtccctaggaaacaaagtcgtggaagaagagtgcctttggaactcttgtgaatcacctaatctcagaatcatgaggacta

SEQ ID NO: 236154 - DNA, 122 bp, Homo sapiens
tgttttttttttttaagagatggggtctcattgtgttgtccaggctggtgtcaaaactcccggactcaaattatcctcccaccttgacctcaaaaagtgctgggattttaggtgtgaatcac

SEQ ID NO: 236155 - DNA, 122 bp, Homo sapiens
ctggaactacaaaagtacacacagctgctgaaggaagggcactgacaatcgggccaagtgcgatcgtttttgcctttttggttctgcctgataatgtcaggccggctccatctggtgcccag

SEQ ID NO: 236156 - DNA, 122 bp, Homo sapiens
tcccggagtggctctaggcagatggggcagctgaagggtccactgccgtccatgactccgcggccgcccagggcgccgccgattgtgctccggcctgggagggacccgggccgttcgcgccg

SEQ ID NO: 236157 - DNA, 122 bp, Homo sapiens
tcaccttcccgccctccactgggagtaaagcgagctgtgcccagcttctccccgcgctcacggaagcaggtggcggccccaccccacctgacccctcaaaagccccgccccctgttcactcc

SEQ ID NO: 236158 - DNA, 122 bp, Homo sapiens
gtctgccaacagagggaggtgtggggctagtgcactggcctcttctctaccggggaaagacgtgctacaccatctatccagcctggggcccaggaggagccatattcaagggtcctcgttca

SEQ ID NO: 236159 - DNA, 122 bp, Homo sapiens
cggggcgcccccttgggcacctccttgggcgcgggcaggtgcgggatgctgaacgagctccggacggactgcagcgagcggctgggctcgggcgacgagggctggaagtcgatccgggtatt

SEQ ID NO: 236160 - DNA, 122 bp, Homo sapiens
caggtgctgctgcctcccctgcaggtctgcagctctgtattcagggctcacggctggaagcggagcctttatgctatgccctgggtggcacgggagggcaaacaggctccagggctgtgcac

SEQ ID NO: 236161 - DNA, 122 bp, Homo sapiens
tgccttagtctgtttgtgctgctgtaacaaaacacctaaaactgggtaatttataagtaacgtaaatgtattcctcacagctctggagactggaaggtccaagatcaagatactacagattt

SEQ ID NO: 236162 - DNA, 122 bp, Homo sapiens
aactacaggagatgtgggtatttagactccaaagtttatactgagctcagtgcctgggaccgctccagctgcactgcagccaggggggataccagcttcattcctcagagtaaaccaacctt

SEQ ID NO: 236163 - DNA, 122 bp, Homo sapiens
ggccccccttcccttgctcagtgcccaggtcctccgggcccttctcctcgagcccgcagtcggctctcagggaaagggtgccaggccccaggcggcacttttattttggttaagaggaggga

SEQ ID NO: 236164 - DNA, 122 bp, Homo sapiens
ctaaagataccaaggtacagcagtgcttctcaaaccctcagtgtgtgacagaatctcctgcggattgtgatgagatgcaagattcagattcagtaggcctgggataatgagggagacatcct

SEQ ID NO: 236165 - DNA, 122 bp, Homo sapiens
ctatcggattggattttttgagatgctatttacatggatctaaaaacagtggattgaagccggcaggtcagtaaagaagctgtgcaatgcagaaaggaatcaacatcactagcactgatctt

SEQ ID NO: 236166 - DNA, 122 bp, Homo sapiens
ctgtgatgtatagtttgcaatgttgacgggcgtgtggagcggcgggagcctgcgtgcctgcggctctgactacagagtgaaccggaagcacgaaggagaaccgcctcctcacgaacttcatg

SEQ ID NO: 236167 - DNA, 122 bp, Homo sapiens
tgtcctgcatggggtcctgcgtctggctcgcccggtgccgtgctgtggggcccacgccaacggctgacctcatggtcctccgtggcctcgcctaggcttgcggcagccgacgtggcgttgtt

SEQ ID NO: 236168 - DNA, 122 bp, Homo sapiens
ggtggtacaagtgaggggatcctggtctcagcctgtgcataagcagctccctccagcagccgtgcagggacctgcaggcagcagccatgtggacaatggaggcagtaaggagattaggcccc

SEQ ID NO: 236169 - DNA, 122 bp, Homo sapiens
cctccacccaagacagagagggtgggctgctggagcccggcggaggggagcgctcggaggcgccggaggcagcgagaaagccgcgccgagagtgtgcgagggagggtgggggacaggggtga

SEQ ID NO: 236170 - DNA, 122 bp, Homo sapiens
gacgaggcgaacctgggcttagggcgccacctagagccaaaaaagaggaagcgacctggccgcgaagcttcgctaggcaaggatgtcccacagaaacccaaacaagccagacagagaaaact

SEQ ID NO: 236171 - DNA, 122 bp, Homo sapiens
cgttcttttggccgtgatagaaatcgggattctgacaaaacagatacagactggagggctcgttctgccacagacagctttgatgactacccgcctagaaggggtgatgataggtttggaga

SEQ ID NO: 236172 - DNA, 122 bp, Homo sapiens
cggctcattgcaacctcctgcctcatcctcccgagtagctgggactacaggtgcgcaacacgacgcccggctaattttttgtattttttgtagagagagggttttgtcatgttggccaggct

SEQ ID NO: 236173 - DNA, 122 bp, Homo sapiens
tcatcttcactcatcagctgaccacgttgcctcttgtggtgtaaacttgtaccagttttacggtccctctggccagtacacccatgaatttgatggagatgagcagttctacgtggacctgg

SEQ ID NO: 236174 - DNA, 122 bp, Homo sapiens
tgtaccctggcggacggcagcttcctttaactcttagctgggattctctcacctggaggccgaccccgttggggtgccatttccttcctcgtcgaggcagacgatgggcgggaggacctgga

SEQ ID NO: 236175 - DNA, 122 bp, Homo sapiens
atgctgctgaacttgaatttccctttacaaggggaagaaataaaggaaaggagttgctgccgacctgtcactgtttggagattgatgggagttggaactgttctcagtcttgatttgcttta

SEQ ID NO: 236176 - DNA, 122 bp, Homo sapiens
tgtgtgcacatgcatgcatgtgtgtgtgtgcacatgcatgcatgcacgcacatatatctgcgcatacacaaagtaatgtgtgagagaccccagaaatcccagagtgtaagcttttgagaagc

SEQ ID NO: 236177 - DNA, 122 bp, Homo sapiens
ttctcattcatgggcggcgctgggcattctctgccatccttaggggtcctccacagcatgcgggaggccggcgccccagggctctttcaccccccgctgctctcgttcctccacgtgttctc

SEQ ID NO: 236178 - DNA, 122 bp, Homo sapiens
gaggagagactagacgcacgaaactgctagggcagatgggaactcctggcagtggcagcacgaggcaaaggagaggacaagccagacacgcttaaaaggccactgctgtgtcctctgccctg

SEQ ID NO: 236179 - DNA, 122 bp, Homo sapiens
aaggcagaaaactgcggcaactgcagggggtcacgagattggcaagccacgaagatgtcacgcaccaagcaccccaaacagtgatgggcacataatacccggccgagatcagttttcggaat

SEQ ID NO: 236180 - DNA, 122 bp, Homo sapiens
acttaagaagccttaccacgcagtaactaaagctttaggatgactgtattcgaggagtgccgtgtgttgcatgcagctacccgtaggaagacttcgcgcatatcactaataaacctgaagtc

SEQ ID NO: 236181 - DNA, 122 bp, Homo sapiens
gggaggcggcccctttctgcccagccttcctcgccggggtttggcctcggaggagtaccccggcacggtccagcgtgctgccctcgcacaccgatcgagacccagtcaaggttatgctttcc

SEQ ID NO: 236182 - DNA, 122 bp, Homo sapiens
ctcggcacccagcaaggtaggcactctttgcgtctggttttagcggtggggacgcctgggcgtggagagggggtgcggcgtgtcgggtctcatagcttagcggccgagcagaggtttggccc

SEQ ID NO: 236183 - DNA, 122 bp, Homo sapiens
gggtgggggcggtgctgcttttccttggtggaatgccctggcctttttatgcaggacaggcgtcggggctgcacggagtctgggagtgtggggagagggtgctttccaggaacacggcatga

SEQ ID NO: 236184 - DNA, 122 bp, Homo sapiens
gccctgtgagctcgcatggcgcgccctctgggtcctcgcggtcaccttgcattccgagcacggccgtgttatgtatgcctttagttgatgctggccaaaattagacaacttagtggcagacg

SEQ ID NO: 236185 - DNA, 122 bp, Homo sapiens
aggcgggagacttacagctctatccaattagagcgctggattgacaactgccgaatgaggcgcgcagcagagaggagggtgcggcatccgggatctggcgcggcttttgcttgtagctccag

SEQ ID NO: 236186 - DNA, 122 bp, Homo sapiens
cggccaggagtgggcacagtgggcgtcagctgtcccgggagcaggctcatgggggagcatcggcgccccgccgtcgggcaggccagcgtctagttctctggctcgcggccgagtggtcagag

SEQ ID NO: 236187 - DNA, 122 bp, Homo sapiens
ttatttacttacaccctgctttattccagaaaagattggaggctgcttttgtgtaacattcggattcactccatgagatattttgatctaaatgatacccacatgagagaagcatggcaaag

SEQ ID NO: 236188 - DNA, 122 bp, Homo sapiens
aaatgaacaacaaacaaacaaacaaacaaacaaaccatctagttgcatggagatgcctgccggccttccttcactccccgtattcctaaaaggcacctctaacagaggacagagctttagca

SEQ ID NO: 236189 - DNA, 122 bp, Homo sapiens
agaaaagggtgcgatgcccccgcccaggatcgtcgcgaggtttagatgggatttcggatacgcagccgccctaccgcggccctagttagttattgttacttgttacttgacccgcacttggt

SEQ ID NO: 236190 - DNA, 122 bp, Homo sapiens
tccccctccccagctcaggatgtggaatgcacctgccaaccaccacctcacaggctgctgcggggaccaaaggagatgcgggcagggggagggtgtcgtgcgggcaaaggacagggcatccc

SEQ ID NO: 236191 - DNA, 122 bp, Homo sapiens
ctcctcctccgagttcctcatccggggccgtcactcacatccggggccctcactcacatccgggaccctcatccggggctctcacccacatccgggaccctcatgcctgggcggaggagggg

SEQ ID NO: 236192 - DNA, 122 bp, Homo sapiens
agtacaacgatgaaaaagcacttatgtgtttggcattctccgtcatcattctggccggggcgggcagttctaggagttggaactcagtcctggtggaaaaggaagtcgtggagggagggcta

SEQ ID NO: 236193 - DNA, 122 bp, Homo sapiens
cccctcccaccggcagcccagagacaggagctccccagcagtgcccctcaaggccagattcgcaagtaggtgcccgtggagcaaacagagaaaagcgggaacacgcgctcctggaagttgac

SEQ ID NO: 236194 - DNA, 122 bp, Homo sapiens
agggacggaaacaggccgggaagcagtgacacctggggcagtcagtcatccaggagccgccgccacccgccccacccccagtctccgcgggaggtgtttgtcttcgcctatgctcccggctc

SEQ ID NO: 236195 - DNA, 122 bp, Homo sapiens
tttcactctgtgaaaacatcgtgtggataatacataaagggcagagtcaggtgccgggggcgcatgcaggaagtgctcagctggactctgccctcggacaccgcgccactgttacatggaga

SEQ ID NO: 236196 - DNA, 122 bp, Homo sapiens
ctgactcggattttaagctccatgaagacaaggagtgtggtctctcttgctgctgggtcacggacaacccgctgtgtgttaagtggttggcttttcatgatgacttcaattgcacatttctt

SEQ ID NO: 236197 - DNA, 122 bp, Homo sapiens
gaggcagcggcggctagcgcgaggtgagggactcacttgaaggtgaggacgcagagcggccggtaggacttgtggctggtgttctcggccatgcccttgccccagaagtcgttggtgaagat

SEQ ID NO: 236198 - DNA, 122 bp, Homo sapiens
gcagccaccattccttccaagttgaccttctggggctcagggtctccagctagtggctctcggggggtgcttcacagctccctgaaaaatggaagttcttactctggaagtggggactgtgt

SEQ ID NO: 236199 - DNA, 122 bp, Homo sapiens
ttactattgacaacgcctccagaatagctgtctctgtgagtggcataagcaatagccctgcggccaaggtcataggcctcttcagggctaagattaggccgatagccactgtccatgacccc

SEQ ID NO: 236200 - DNA, 122 bp, Homo sapiens
gtcaggaagtagcccttgggtggggaggcagggaagtccttccccagcaggagtttcatgcggaacagacctccagcatatggggtcccttcagggccctcgatggtgacctggaggtcggt

SEQ ID NO: 236201 - DNA, 122 bp, Homo sapiens
ccatcaacgcgagcggctctgatcttgctccagtccccactgctgtcaagggccccgccgcggagtttaaggcagatcctaaatccagcttcagagaggcagctttgtaaattgtaacgcgc

SEQ ID NO: 236202 - DNA, 122 bp, Homo sapiens
cactgcagtctgggcgagagagaaaccctgtctcaaaaaattaaagtctctggattccctcgtgtgctttaggggagtctgtagagcaggtctaggaatgacctaaaagcttgggctggagt

SEQ ID NO: 236203 - DNA, 122 bp, Homo sapiens
cgtgtggcccggtgcccacagggccgggttctgcctgttcctgggggtccgtgtgtcccacgtgcctagacgtgagaggacggaagtcggcagagcttggctccctgttcgcccgactggcg

SEQ ID NO: 236204 - DNA, 122 bp, Homo sapiens
tcagaatctaagcagtttgactccagagttcatgctgttaatatcaatgctcaagagggccgtattagtttcctattgctgccataaaaatttgccacaaattgggtggctgaaaacgacag

SEQ ID NO: 236205 - DNA, 122 bp, Homo sapiens
ttcagaactcatttcaaaactcttttcactgagagtgagcgaacaagcgggctcatgtcccgagcccagtcacatctccagcggtccggtgatggccgtggggctggcgccgagtggcacgg

SEQ ID NO: 236206 - DNA, 122 bp, Homo sapiens
caaagtgaaaattgctctgggcaaagctcgactggcaaggaggactccaattaaagcttgcgtgggggagacaggcccgaactcagccagagctcagctccccttgaacgaaggacgagagg

SEQ ID NO: 236207 - DNA, 122 bp, Homo sapiens
tcaaactcagccgaggtatggaagtcaaccccttccttgcgcagcaggagtcggaggtagcgggagacgtcgcggccggcaatgtccacccgcatgatggagtgaggcatggcaaagccctc

SEQ ID NO: 236208 - DNA, 122 bp, Homo sapiens
attatgtacaggcagatgccccctatagagagcagaccggcagcatacacacagtgttggcggggtcctgatgctaatatgggagaactcctactgtggcaaaccacacaccagcaccaact

SEQ ID NO: 236209 - DNA, 122 bp, Homo sapiens
gtgcggacgctgaacaggcaggcgaagacccgagatgtcctttgcaagggtcccagaactcgccagtggctcagtcctcctcactcccagaacagtgctcctccacacatgcgatggctttt

SEQ ID NO: 236210 - DNA, 122 bp, Homo sapiens
aagaagcaggagctgctggaagccctcaccaagcacttccaggactgaccagaggccgcgcgtccagctgcccttccgcagtgtggccaggctgcctggccttgtcctcagccagttaaaat

SEQ ID NO: 236211 - DNA, 122 bp, Homo sapiens
tttcttctattgttagatttttaaccttgcaattccagttatttaggtcagcaccttttccgcagtctttcccgtgagattgtttcatataagtgtaatacagttagattatcttgtcacaa

SEQ ID NO: 236212 - DNA, 122 bp, Homo sapiens
agcctctccggacacaccctaccccagaactgctcaaagccctcacccgaggtgaagcgacgctccttcttgcagtagaagtcttggtaggaggacatgactatggggacaatgggaacctg

SEQ ID NO: 236213 - DNA, 122 bp, Homo sapiens
attcaggtttgctcttggtgagcctcggaagctccaggcggccgctagagtctcagacgtcgccacccacagacctcttgggttttgccatcttggcataaacagcctcggtcccgacccct

SEQ ID NO: 236214 - DNA, 122 bp, Homo sapiens
aacatgactggccatagcttccactatgagagggagtctgaccttgatttcctcaaggtccggttaaaaattcctggggaagttcattggttcagcatgagtcagagaccatccctgggtca

SEQ ID NO: 236215 - DNA, 122 bp, Homo sapiens
cctctcgggagttgtagtttccgttcaactcccaccttggagcaacagtttagaatcccacgaggcgggggcgaagtgtgagcggggaaactgaggcctggatggggtcaaggggcagctcg

SEQ ID NO: 236216 - DNA, 122 bp, Homo sapiens
gcatggcttgtagggtttagtgaagaggattctctctagcctctattccaggcctggggccgccaggcactcctcaccctggtgctgttgccaccagtgcctggccgagcgggaggggcccg

SEQ ID NO: 236217 - DNA, 122 bp, Homo sapiens
ctcccgggtccccagacattccctgcaccgcaagaggacacaggacaggggtcctgctgtcgctctgtctgcaggtggccctctctgggtggctctgtgggcagccccatgtccctgctgga

SEQ ID NO: 236218 - DNA, 122 bp, Homo sapiens
aacagatttcaagtcataaagtcagctaggaacaggccgaggcagggagaactctccactcggaggaggagctggggtcctcttccatcccgtcttcatcctgcctggctgcgtgacctcgg

SEQ ID NO: 236219 - DNA, 122 bp, Homo sapiens
ataaatctgagctgctggtgaaggttggaaactctggcatgtgaacctatcagaagccttcgtaaggaaatagccactgatgagttcgttgtgacagagggctgcaaaaccctgagacagcc

SEQ ID NO: 236220 - DNA, 122 bp, Homo sapiens
tcacttggccaaggtccctgcactgattatgacagggcccagatggggacctaggcttcccgacccctggctcaaggctctctgaaatacccagagtcctcctaagggaagctgcctccacc

SEQ ID NO: 236221 - DNA, 122 bp, Homo sapiens
gactatgttatgtgctttgtggcataattaaagccactgcctaattagacaagcatctaccgtctgacaaagagaaatcagtaatgcagctaatggagaaagtggtgaggagttgggtttga

SEQ ID NO: 236222 - DNA, 122 bp, Homo sapiens
ttcaaccccatcacacgacaccgcctctgtcacaaggcaaaaaccagcacattactggtccggacatgactgttcaatggaatgggatgaagagcccagaattagaagtacatgagaaactg

SEQ ID NO: 236223 - DNA, 122 bp, Homo sapiens
ggctgggatgatggggcagaggccacatgggtttggctgggatgatgggcagaggccacacgggttcggctgggacgataggcagaagccacatgggttcggctgggacgataggcagaggc

SEQ ID NO: 236224 - DNA, 122 bp, Homo sapiens
ggagcctttgtgcgcgggcccctgcgccccgggcgcagcccccgctttgtgtggcgcgcgcgggtgccccgcagcggcccggcttcctgcagctttgttcccccgagcctggccgcccaggg

SEQ ID NO: 236225 - DNA, 122 bp, Homo sapiens
acggccgccgccaccgccgagggctggagctcgccgcccccatcccccacggcccgcagacgcccggccaagtggcagccgcagccacagacaccaccaccaccaccaccacagcggccgcc

SEQ ID NO: 236226 - DNA, 122 bp, Homo sapiens
attttctttggaataccttggtgggaaaaaattttaagaatatcattttaatgtaccatgcgaggcttaaaacttgttggctagtgcatattgacacaatcttccagattatcactaaaata

SEQ ID NO: 236227 - DNA, 122 bp, Homo sapiens
ccccagcctctcgtgcgcccgctccctcctccttccctccctcccgcggggcttcggcggcggcgctcagcgcaggcaggtccccctgctgccgggtcccatttgttgccggctctgactcg

SEQ ID NO: 236228 - DNA, 122 bp, Homo sapiens
cttcttctctctctgggtctctctcctggtccctctctcggtctgtctctctggtttgctcgctagcttgcgcgcgctcacgctctctcgctctctctctctctctctctctctctctctct

SEQ ID NO: 236229 - DNA, 122 bp, Homo sapiens
gcccgggtacccctcagcggcggggacatccaggtgtccctggatttccagggcacagtgcgggccggaaataggaacacagaggagcccttcgggaggctctcgaggcagtctctttccag

SEQ ID NO: 236230 - DNA, 122 bp, Homo sapiens
tccatctcaaaaaacaacaacaaaaccatcaaacaaacaaaacctaataacttctatgcacgcgcatacacacacacacacacacacacacaaacacacgtatatatattaacctctacagg

SEQ ID NO: 236231 - DNA, 122 bp, Homo sapiens
gcggagcctcccatcctttgggtaagagccccttccccgccccgcgcgggggaagggccccgtttcctgggctcctcctgtgctccagcacgctgcctggggagatcagcctgtaccccggc

SEQ ID NO: 236232 - DNA, 122 bp, Homo sapiens
tctgtcctcagctcctggtgggttctggacttatcctggtggcccaggctgtatacccttcgttctgcccagggcccaggtatgcagcacccaccacccagatatttgggcatccttggtct

SEQ ID NO: 236233 - DNA, 122 bp, Homo sapiens
tgcccggggatgagcagtcacttcagataaacgttgaggtttctgttaccagccgtcctccgggcccagtgtgattagtctactttgctcagcttcctgtaggtgtgttgtgatactctgta

SEQ ID NO: 236234 - DNA, 122 bp, Homo sapiens
gcccgcaatttggcctcctgacttggggtgctccagtctgcaggtggaagttcttcccggcggcttgcaaagaagaaaagcgaggagaagggcactgatttattcagcagggcatttccttg

SEQ ID NO: 236235 - DNA, 122 bp, Homo sapiens
cgatggtctcaggtggtggctggtaataatcatgttgataataatcattgtcccctagtccggaaacagggagaggaggagacagctctggggctgcaagtgacctcgggaaggcaattgac

SEQ ID NO: 236236 - DNA, 122 bp, Homo sapiens
tctttattcagcagtgactttcatttgatgaggtggctctcctctctcacgtcaccctgtcggccaccttgaccaataggtcaagggagacttctgccagctcgcttctgctctgctgatgg

SEQ ID NO: 236237 - DNA, 122 bp, Homo sapiens
agactttgtaccgtgtcccgttcttagtgctcgaatgtcccaacctgaagctgaagaagccgccctggttgcacatgccgtcggccatgactgtgtatgctctggtggtggtgtcttacttc

SEQ ID NO: 236238 - DNA, 122 bp, Homo sapiens
tccgctccggtccggcttcctggctgctattaagatgttgcctgcggccttctgggaagtcgcgtggctggtctcgcgggaagatgtgacggctccgccctctggcccgtagcgtcagcctt

SEQ ID NO: 236239 - DNA, 122 bp, Homo sapiens
acagatgggtctacaaaatgtcaatagaatgtaagaaatgtgatgacagaagtatacacacgcagcacagaggaggatcttcagcccagccaggaagattcagggaaggctccctagaggaa

SEQ ID NO: 236240 - DNA, 122 bp, Homo sapiens
ccttttctctggactgtcttcagttttcctgcactgcgactcaaggatgaggcgcctctacggacagttccgcggcgcacgcagccccaggccattgccgcagcggccccgggagtgcgctg

SEQ ID NO: 236241 - DNA, 122 bp, Homo sapiens
tggggcaaaacacgcccccatctgctgccttttctattgccctgcaacgtcccatctatacgaggtgttggagaaggtgaagaaccctcccattcacgcccgcctaccaacaacaaacgtgc

SEQ ID NO: 236242 - DNA, 122 bp, Homo sapiens
cctcctggagcctcggatccagcagtgttggcacagagaaagaaaatgcacttttctcagcggagggaaggaatctcaacttctgtgtaacgtagggtgaaccggaaaagtaaatatatgaa

SEQ ID NO: 236243 - DNA, 122 bp, Homo sapiens
cttcgagcgcagcagcatcttgggctcacctggctgctccccccgccagctgccgcgcagcggagagtcgagagctctagcacttcctcccgccgagccccagcgcccttttctcctttcct

SEQ ID NO: 236244 - DNA, 122 bp, Homo sapiens
tggccgaccgcgagatgcccgcctggcagtgcaccagcacgcgcccacggcagtccttcacggcatctggggacagggttcaataggttagtgcacgtttctgcagaccccagccccgacca

SEQ ID NO: 236245 - DNA, 122 bp, Homo sapiens
aggagggcaccccagagacagtcccagtttacaagtgttaacccagcatagcattaacagcgttcctttcactttgagaggcgataaactataaggtcacctaccgggaaggctatgactcg

SEQ ID NO: 236246 - DNA, 122 bp, Homo sapiens
ctgggatgcgtggtgcaagcgtggggcctttcagggctggccactaccccaacctgcattcggcaaagcctcaatacacgtgaatttggaactttaaccccctcaacgaacccacatctgac

SEQ ID NO: 236247 - DNA, 122 bp, Homo sapiens
gtcttgtcgctggctgtggacgctctgcacttcatcaccgtccccagctgcgctttgagccggtctaaggttgcccacagtattgacgttgggacccacgaaactggcaatttccatgtgtg

SEQ ID NO: 236248 - DNA, 122 bp, Homo sapiens
cagtgcccgtgcccagctcgcggggcggggcctcaactggagggggccaatgggggtcagcgcggcggaaccgagtggcagaccgaaaagccaatcgagatagagtactgggatgatgggcg

SEQ ID NO: 236249 - DNA, 122 bp, Homo sapiens
cgtgtctgcccctgagaaatccacgtgtgtgcccgagaggtgaggatggagatgccgccacggcaccgcttgtaaccacaaagctcaggagccacatgcatgcccagcaccaggaggaagcc

SEQ ID NO: 236250 - DNA, 122 bp, Homo sapiens
aaaatcagaagaacatttcattctctttttgtttcatgaagcatttctggccagtcacagcggctcacacctataatcccaacacttcgggaggctgaggcaggagaattgcttgaggccag

SEQ ID NO: 236251 - DNA, 122 bp, Homo sapiens
ctcctctcttgagttaacccctgattgtccaggtggcccctgggctctggccctggtgggcggaggcaaagggggagccaggggcggagaaagggttgcccaagtctgggagtgagggaagg

SEQ ID NO: 236252 - DNA, 122 bp, Homo sapiens
ggctccagaattaggaggggacctactcgggtcactctcctggaaacctctccagtctcccggtgctaggtgctgggagcaccaacattcctagaagggcctggccctcacccagccctggg

SEQ ID NO: 236253 - DNA, 122 bp, Homo sapiens
ctcctgggctcaaacaattctctcacctctacttcctgaatagctaggactacattcatacgccaccacacctggctaaccttttaaaatttttttgtagagacaggagctcactatattgc

SEQ ID NO: 236254 - DNA, 122 bp, Homo sapiens
agggagatagggtgatagtacccctaatgtcgcaggggatgtgtacaccccccgtgataccggttgcagtatccaaggggggacagaatgatagtaccccccatatcacatgtggcgttttc

SEQ ID NO: 236255 - DNA, 122 bp, Homo sapiens
gccgccgcgcgctccccggctaggacccacctgctgcaggtactggttaatggtaatgtgcgccatgggagcgccgccgaacggagagcgccaccccctacgcctcaagcgggccagctggc

SEQ ID NO: 236256 - DNA, 122 bp, Homo sapiens
gggctgagggttttacagttttccaaccacagggtgcttgctctaaaattggcccttgtacgggaacagccttctttgtcaacatttggtatatgccaaggtgtggcagtggtattctggaa

SEQ ID NO: 236257 - DNA, 122 bp, Homo sapiens
gtgttattacacatgcatttcatctccattcataatgattggacacttaaacccagccgccgttcctctgccgagtgctgctgtcatccttctagccgagatcccagcagctgtcgagatca

SEQ ID NO: 236258 - DNA, 122 bp, Homo sapiens
aacaccgaggggaggaagcttccacggagcagcttcagcttcagggacagccctggcggacgcgggggagccgggggagccatgaactcgaaaaggagacatccgtgggatactcagaaatc

SEQ ID NO: 236259 - DNA, 122 bp, Homo sapiens
aaaatgagttctccattcatggtcttattttaacagtctagaatatcaggctcaaaattgcgtgtttactctgaatctgtattagtgaagatgactggtggaaatcactgaaagagagaagg

SEQ ID NO: 236260 - DNA, 122 bp, Homo sapiens
gctgggaaaaacgtgtctatctgtgagtttttaatgcagccacaaggtcctgaattcacacgaatctgtttgtactcctttgcttgtgcccacactctaaggcactctcctgtgtcttgcag

SEQ ID NO: 236261 - DNA, 122 bp, Homo sapiens
ccagcccggctccgctcggagacagttcgccgagtgggcggtgtctatgacgttttctgacgtgttacgtcacagtgggcggaagtcgcggccgctgttttgaaatcgggccgcggggggtc

SEQ ID NO: 236262 - DNA, 122 bp, Homo sapiens
gcagcagaagggtgggcagcagtctggatggtttacacagacacggtgagagacgttacccggacgcaaaagagtacacagcgtgtgataccgttccatgtacagtcatacgttgcttaacg

SEQ ID NO: 236263 - DNA, 122 bp, Homo sapiens
tccgaggcaccctggccccagctgcctgctcggacctctgggcttccagaaattacctcccgtttcttccaaggggcttcctgccacctcctgagacccccctcaagagcagatgggaccac

SEQ ID NO: 236264 - DNA, 122 bp, Homo sapiens
actgttcccattactcaaaccccagatgctccaatgacagagcctctgctgagaggctgacgtcagggagaggtggaggagggcagatctcccaacccttggcttccaccagcttcctctca

SEQ ID NO: 236265 - DNA, 122 bp, Homo sapiens
cctgccaaaccagctccaacaccgctgcgccaaaatgtgtctgatcgtggcagtgctgagcgaccaaaggctctgcctgcacaggaaccacccgccccggcccgggcactttgagcagagca

SEQ ID NO: 236266 - DNA, 122 bp, Homo sapiens
ggaccgcctctgtgtcctgcatgtggaggaggccatggtgttctgccgggagctggggtgcggccctgtgctccaggccccccgccgggacgtgggcgtcgtcaggaagtacctggcctgca

SEQ ID NO: 236267 - DNA, 122 bp, Homo sapiens
cataaaagctagacagaagcaatctcagaaactcctttgtgatgtctgcattcaactcaccgagtggaacattcctcttgatagagcagtttggaaacgctctttctgtagaatcagcttgt

SEQ ID NO: 236268 - DNA, 122 bp, Homo sapiens
gctggtgctgggtcgctgtttccacagccacattccggagctgtgaaaggtctgcccagacgtaaatcccagcccctctctgtcagtgctaacagatggcaacctcatggcgagacttgttt

SEQ ID NO: 236269 - DNA, 122 bp, Homo sapiens
tagagggcagagatttcatctgctctgcccaccgctatatagccagccactagaacaggccggaagcgcagaaagagctaagtaagtatgtgttgactgactgacgaacaaatgaatgaagt

SEQ ID NO: 236270 - DNA, 122 bp, Homo sapiens
tgcctccccttggtttctgtgccccatcctgtgtcctacacaacaggacaaaggccaagtcgttctgtgagccaattcagcaaacaaaggcacttctctctccaaggcacagagaagaattt

SEQ ID NO: 236271 - DNA, 122 bp, Homo sapiens
tgcagcacttaagttgttttcacagctcccttagaaagaacctcccttaagctgactgcccgcgaggctcctagatacctctagctcatctgagattccccaggcaggtgacccgaggcgac

SEQ ID NO: 236272 - DNA, 122 bp, Homo sapiens
aagttgtgggtgggaaggggaagagccagcacatggggctttgtgaattccttgttgcagcgtgaaggggatgcttgggagctatttgtcctcaccccatgatctccagttcctctctctgt

SEQ ID NO: 236273 - DNA, 122 bp, Homo sapiens
cacggtgaggactgagatgatgttgtaaggcaccagcacagagctgacctacagctcaatcgtggtgggagggagtaattatccattcagaaaaggggaaactttccgctgcgcctcctgtc

SEQ ID NO: 236274 - DNA, 122 bp, Homo sapiens
tcagctgtctaatccattttgacactgcagtaattagcacactctgtataatattttaaacgcaaattcaaccaaaccaagctattatatatggcgaaatgaatgctgatcaagttatcaat

SEQ ID NO: 236275 - DNA, 122 bp, Homo sapiens
ggaacaaattcatgtacttttacctgaaattccaccatagatctcttctgctatcctagccgcttcttttctatttcctttgacgatatagaaatgggttaggagagccaaaaaaactttaa

SEQ ID NO: 236276 - DNA, 122 bp, Homo sapiens
gacgctggctcacgatgccccagtgatgccgtggttaggacactgctcacgcagctgcagcgcagagcacgggggacgctggctcacgatgccccagtgatgccgtggttaggacgccgttc

SEQ ID NO: 236277 - DNA, 122 bp, Homo sapiens
agaggcccaagttcagacttcagcagcagactagggtcagactttaccaaagtcagaactcgaggttcatgtaagtccttagatcccgctcccaagccctgtctttctcctccctccttctc

SEQ ID NO: 236278 - DNA, 122 bp, Homo sapiens
acctcaagtcaggcccacctcggcctcccagagtgctgggattacaggtgtgagccaccacgcccggccgagatggattagttttggacccacttatatgacatagccattctaagagagaa

SEQ ID NO: 236279 - DNA, 122 bp, Homo sapiens
cgtgcgcacatgcatgaacatgtacacgtgtgtacatgtgtgcacatgtatgcacacatacgcacacgcatgcatgcacacgcatatgcacacacgtacatgcacatacacgcatgcatata

SEQ ID NO: 236280 - DNA, 122 bp, Homo sapiens
cccgctcctcgcctgcccacctcacagcgcggccccgggcaccatccctggccccggccccggccccggctagggctgcgggtcaaggcccacaccctgctgcctcccctgagttgacttgt

SEQ ID NO: 236281 - DNA, 122 bp, Homo sapiens
gccccgggcgggggaggggcggccccacgacaatgaccgcattgaggctgcgcttggcctcgcgcctctcctcgaacagcccagcgtcctctggaccgtttaaaagaaaacataaagaggac

SEQ ID NO: 236282 - DNA, 122 bp, Homo sapiens
aaaaaatggtacaggctaaatagtttcaacagtcccatctcgcagggcctggtcctgggccgggttatacttccagggttttacttgtgtagatgtctacactgcacccacagccacacagt

SEQ ID NO: 236283 - DNA, 122 bp, Homo sapiens
gcccctaaatccagtcgcgcagacctcagctccgggggaccgagttctgggggtgatggccggggggagggggttgggagacacctgagctttggcccgggctgggcgctgttttgctgagt

SEQ ID NO: 236284 - DNA, 122 bp, Homo sapiens
cagatgctttagaggtgattcaatctctcatccctgctcaccagcacgttggctgcatctcgtgttagaatatgaaggccaatgtgagcaatagtcaatgctcttgtctttgttggtgtagc

SEQ ID NO: 236285 - DNA, 122 bp, Homo sapiens
tacaaataacaggaatctccccctggtggtgttttccaagaactgcaggtcctcagaagccgatttagtgcataaatgcatttgcaagaattttcacttctgggtacaagtcaatagttagg

SEQ ID NO: 236286 - DNA, 122 bp, Homo sapiens
tggggtgcggagagtggttagattcctccagacagaaagagcacgcttggctgccagggccggggagagcggggagaggggagcgggagttatcatttcacggacgcgatgtttcgtcccct

SEQ ID NO: 236287 - DNA, 122 bp, Homo sapiens
accacttgctcaaagttaaaggaaagcaaaaggaacacacgtcactggctgctagcttaccgacagcagcctactgtgattcattattctggcaaacatattagagataggaatgttttatt

SEQ ID NO: 236288 - DNA, 122 bp, Homo sapiens
tatcagagagaagggaagggccccatagtccaaacgcccaggaggctccgacctgacccgcggccacgagtgtttgctgcaggacgagaatctggggaagatgcagccaagaaaatggcctg

SEQ ID NO: 236289 - DNA, 122 bp, Homo sapiens
aagggtgagaagctgcagataatggagaaagatcagtgtccaaacatttgggagtggaggcgggaagaagcaatgaagccatagcccgcccagtgtggccactccacagctagagttccctg

SEQ ID NO: 236290 - DNA, 122 bp, Homo sapiens
agagggagggccaaaagctggaccgcgggcagaggtaagaagcgattggtcgtccgattgcgtcacgtgattctcggtgggggggttcccatagaaacgcttttctgcggtccagtctaggg

SEQ ID NO: 236291 - DNA, 122 bp, Homo sapiens
tttcaggagccacggtgttcccctcttccagatgctagtgccaacagtggaagcagcttgcgatatgcctagtccacctacagcctcttaccgagctggcacctgtatcagcgcctggagct

SEQ ID NO: 236292 - DNA, 122 bp, Homo sapiens
aagggggagcactttgcctccccaggctctgacgcggaactttgcaaagtttctccaactcgctttgcagcgggcgggtcaccctgcagggggaccccggggaaggctggctgcggattgga

SEQ ID NO: 236293 - DNA, 122 bp, Homo sapiens
gtgtcgcgctttcagagtccccacagcactttcacttctactattttactttcatcctcacgagtctgtagagccggagtatcattagcaggtttttattgatgaggaaaaggaagacattc

SEQ ID NO: 236294 - DNA, 122 bp, Homo sapiens
ccatgtctttgtctttatgaaaagggggctagatattgaacagagttccattgccttggccgtgagcaccagcgcctcctggtggacgctggacacctcgggaagctcttcatgatgacccg

SEQ ID NO: 236295 - DNA, 122 bp, Homo sapiens
ttttaaccttaaggaaaggtattttcaaaggctagcttaacagcccacaaaaccacctgacgtaagctttagttgataagagaatagtaacttcagattgatacagcaaacttctcatttta

SEQ ID NO: 236296 - DNA, 122 bp, Homo sapiens
cggggtcagtggtgctggagagccgggggccgggggccggggtcagtggtgctggagagccgggggccggggtcagtggtggtgcagagccggggaccggggtcagtggtgctggagagccg

SEQ ID NO: 236297 - DNA, 122 bp, Homo sapiens
cagccgcggaactgggcctggcgctagggtccgtgggcgcctgcagagcgggttcttcctcgtcggttcctttctcccacttcgcgcgcttctcccgcgttcaggcccgttcccatccctaa

SEQ ID NO: 236298 - DNA, 122 bp, Homo sapiens
aactgcagcatctcaggatggggaggatttgcatatccagagctgcaggaaaggacacttcgggcaaagggtactgtgcaaggaaaagagctggaagttctcaactgctgaagtcatcccag

SEQ ID NO: 236299 - DNA, 122 bp, Homo sapiens
tcctccctcctaccgcccgcgcgtcaatccatcagttcgtcaatccgtccttctcacgtccgcccctcccggcccagcgactcctcagctcagcctcttgcagactgcggttgtcaagtgcc

SEQ ID NO: 236300 - DNA, 122 bp, Homo sapiens
tgtcccttcgcccatcctgcaggccagcttggaaactgtgtcccatgctcctcgaaacaccggacctgctccccgccgccctgcggaatgcgcctcctggcgcctcagtgggtggccgggcc

SEQ ID NO: 236301 - DNA, 122 bp, Homo sapiens
atgttggatccaccgaggggagggccatctccgaagcggctgcccatgggggggcctgttcgccggtcgcctgggcgactacctcccctgccccctaagaagtcatccctgaagcctctgtc

SEQ ID NO: 236302 - DNA, 122 bp, Homo sapiens
aaaggtgaagagcgagttcccgcaggcaaattggatgggcgtctggccgccgtggagttccggtgacccattaccccagccatgtcgtctccaggaccacccgatggaaattaacaggcggg

SEQ ID NO: 236303 - DNA, 122 bp, Homo sapiens
gtctccttgggcctctgaatcagtcccagggaaggcggctgattggccttgtttgagtcacgcactctccctctgatggacatctgttattgccacgggaaactggctctgggcatggctgg

SEQ ID NO: 236304 - DNA, 122 bp, Homo sapiens
ggatattaggaataatatcccaggatgggtgtacaccttctgctgtatggggagtcatatcgtcctctcccttcctggctattaggaacaatatcacaaggtgggtgtacacagcctgcgat

SEQ ID NO: 236305 - DNA, 122 bp, Homo sapiens
aagcgccgattttaccgcccggccgaggctcggcgtcctggggggcggagccaggtagagcgactacacgactggtgggaaaacagtggttgcctggatcaacggcaaacgctccggccagt

SEQ ID NO: 236306 - DNA, 122 bp, Homo sapiens
gatggtagtgggctgggccccactgggctgggacagcaggaggatagtcttgaggaggagcgtggggtgctagatgtgtaactacgtcccgaactggttcctgtgtttttctagggcatgtg

SEQ ID NO: 236307 - DNA, 122 bp, Homo sapiens
gtcggcgtggggtgactctagaggcgcggtcggtgtgccctcagggcgtccagtaggatccggggccgcctggtggggagaggccgcggcgccgctgtctcctgtgtcgcctgtcccgctcc

SEQ ID NO: 236308 - DNA, 122 bp, Homo sapiens
ggaggacgctggagcttcaggatagtgtccttccaggtcgtgggaccgccccctcctccccgcactccaccttcccgcaactggatcactcggcggaagcctcaggtgggccccggggtcca

SEQ ID NO: 236309 - DNA, 122 bp, Homo sapiens
cgcaccgttgctggtatatgcgggggtcgtttgtggtgtcatcactgctatcttccaggccgggaggaaggaccgagggtgggcccggcgcgggtgggggtcctgggcaggggcggcggcgc

SEQ ID NO: 236310 - DNA, 122 bp, Homo sapiens
ttaaacaacagaaatttctttcctacagttctggatgctcaaactctgagatgaaggtgtcggtaggtttggtgttacctgaagcctctctccttggcttgcaggcaactgccttctccctg

SEQ ID NO: 236311 - DNA, 122 bp, Homo sapiens
gcgccgtctcacctcaggccgccacctcgcagcgctcgctcctcgccgcggcgcctgggccgactggagcgcagctgaacagccgacagagccgcagccgccttaacaatggagccccgggg

SEQ ID NO: 236312 - DNA, 122 bp, Homo sapiens
ctttggggtttgggtctgaattttcagcatcctctctgaagaatcacccccacccagtgccggcgtgcgcccagccttcccccagccctttccagggcgctgccccctgcctgccctcacta

SEQ ID NO: 236313 - DNA, 122 bp, Homo sapiens
tggcaaacacacagatctggggagagctgctccgcaggagacagcaggccgcagcatgggcgaccgcatcttcccagctctagcttatgagacagaaacgacggaaacggggtcaagggaga

SEQ ID NO: 236314 - DNA, 122 bp, Homo sapiens
ggagtactgggacccagtgaccttgtgcacctttcctgaagcttctgggccccaagtggtcgaatgcagagtgggctggggagtcacagactgtgcttcctgctttcaacctccgttccagg

SEQ ID NO: 236315 - DNA, 122 bp, Homo sapiens
aagtgctgggattacaggcgtgagccatcgcgcccggcctggaagatgtcttatacaaagcgtgagggaactggataatttggtcttacctatcaaaatataaaatgcatatacttttgcgt

SEQ ID NO: 236316 - DNA, 122 bp, Homo sapiens
gcctctcttctccctgtgatggatgaggtgcctgagactcagagaggctcagggcaagtccgggtcacacagtgaatcagaaacagagctaggaagtgtacccaggcctcctgacggcagcc

SEQ ID NO: 236317 - DNA, 122 bp, Homo sapiens
acttctttccaagtagctatcacccagatttagtgtgaaaagtagtgtaattgtaattcacgccatcagggtctatcgctgatagacgatcagctgttctgtagaggggagaggctttcttt

SEQ ID NO: 236318 - DNA, 122 bp, Homo sapiens
ggccttgtctaactgcctttccttctaaagggaatgtttttttctgagataaaataaaaacgagccacatcgtgttttaagcttgtccaaatgagaatggcgtctgagttcgtttcctactc

SEQ ID NO: 236319 - DNA, 122 bp, Homo sapiens
tgatggggtgactgagcccccaaaggggaagagtgggctcaagtgcagagctggctgtgccgcaggcctgtcttgcaaaaccccatgcctctgagggccacctgggcattctggtgtccatc

SEQ ID NO: 236320 - DNA, 122 bp, Homo sapiens
tttacaacaaaactagtttatttgggtgggactatatctgggagtggggagcgcctgagccggaaacaccccccaagcgggcagccggagctctgcactcgctcgctcagccattttcggtt

SEQ ID NO: 236321 - DNA, 122 bp, Homo sapiens
ggtcagacaataaacacagaaaatctaaagcgagtctgaccactggcagtctggagggagcgggtatgtggtgcgtgtgtatgtgtgttatgcgagggggtttactgttttagaggaggcct

SEQ ID NO: 236322 - DNA, 122 bp, Homo sapiens
caccccatccctctggctccgggcctccgcgtcctcccaccacagggtggggactcgttgcggtccctacccagcccatacctgtacgacgtggtcactgctgcagccgcgtccgcgtcgcc

SEQ ID NO: 236323 - DNA, 122 bp, Homo sapiens
taactcatttcaatctagtaaatatgcttcagcaagtagctaatttctcagggatggcttcgcctcgccatttgcatataaagcgcgtcggggcccggccccttctccgagtgcgcgagtcc

SEQ ID NO: 236324 - DNA, 122 bp, Homo sapiens
cgtggaagcagcctgcgggtagaggcgggcaggtagtgagggccgggggcagccgagaggcgcaacccctgcggccccgccctctcccccactcacctttgaaaggacctcccttgatggag

SEQ ID NO: 236325 - DNA, 122 bp, Homo sapiens
tggtcccagaggcgcaggcggcctggccgaggaagtcacgggagatcgagggctgcggggcgagaccgggaccagcgcgaggccgggctgggcggggcgcgcggcgcaacagcgtttggggc

SEQ ID NO: 236326 - DNA, 122 bp, Homo sapiens
gtgaagggtgctgagcagccggggtgcggggtgagatgggcacgaaatcagcacaggcgccggggcaggaccccggcatggggttcggtcccccgccgtccagacgtcacactgcactaacc

SEQ ID NO: 236327 - DNA, 122 bp, Homo sapiens
actcaccaccgcccgacagaatgcagaactgcgagaggaagagcagcacgcgacacaaggcgcggaggcccctcagcgggagcacccctcccgccatcttgccagcgcctgcgcacttccgg

SEQ ID NO: 236328 - DNA, 122 bp, Homo sapiens
gtgagggtggagtgggcgaggcggggtgggggggttgggggggcggcccagagacgcctccggttgctgctccactttctaatcctgagaggcagctgcgtttctgcaacctatgggcaaca

SEQ ID NO: 236329 - DNA, 122 bp, Homo sapiens
cacttctctccagtcgtcaaagtctacagctttcaaaatggggaacataaaaactctccgcgaggactgggacttggaagatgtaagggatttaatttcaagaacctcaactttcccaaaat

SEQ ID NO: 236330 - DNA, 122 bp, Homo sapiens
tgaggacggctcgcgtgagtccacgtgtaatcggcccgggcccagcactggcgggactgacgcagttcttctacctgctttcccaagggcgacactcggctccactccagttgggccgctgg

SEQ ID NO: 236331 - DNA, 122 bp, Homo sapiens
gacagctctgatggcccagaaaagcctttggacagaatcactgcacccttggacattgtccgaccacatgtatgagaatagtgagtgctgaggagttgtgggtagcttggtgacaactcttg

SEQ ID NO: 236332 - DNA, 122 bp, Homo sapiens
ctccctcccatcgcccgttcgctcaggatgtgaggggatgcttagaaattccacagcccacgccagccgccagctgctgagtcacttttgtcaaagagtggcctcggccccactttcccgat

SEQ ID NO: 236333 - DNA, 122 bp, Homo sapiens
agaaattctgttttcttttccacagaattgggggaggccaatttgatcttggagggaaggcgggagagacgccaataaaggggaaagggagcaggttgcccatgttttctgacattgggaga

SEQ ID NO: 236334 - DNA, 122 bp, Homo sapiens
ggagctagggggctttctggaaccctgggcctgcgtgtcagcttgcctcccccacgcaggcgctctccacaccattgaagttcttatcacttgggtctgagcctggggcatttggacggagg

SEQ ID NO: 236335 - DNA, 122 bp, Homo sapiens
ctgctctttgcccgtgtttatggcaactctgtcactcccctgctatttctccctccccctcgcgagttcctgggggaaattcacagaacaaagcaccttgttttgcctttgcagagaatgaa

SEQ ID NO: 236336 - DNA, 122 bp, Homo sapiens
gtgcagtggaaataaagacacctgtagccttgtgatataagtgacacctacagacaggtccgtttggtttttcaggtttacgcacagcccctttgatgacggtgacatacagtgtgacacgg

SEQ ID NO: 236337 - DNA, 122 bp, Homo sapiens
gccccgggatctttgtcatccttcagaaatgccaaccctgtgaagtgaggtctgctctgccgtgggcctgtcggaggaggctgagcagagacttccgtctgggccccgagctttggcagtgc

SEQ ID NO: 236338 - DNA, 122 bp, Homo sapiens
attggtgcccaaacaaagagcattttgctttatgagggcctaggtaagcataaggtgccacgtgtgaatatctactgtgctagaaacagaacatggccaaggagtaaagaattagaaaggta

SEQ ID NO: 236339 - DNA, 122 bp, Homo sapiens
gacgtggagctgatcccaaacactgacacatgggtgcttggagatagagaaagttgtattcgatttggccaaagcaagaaggcaggagagcaagatctctcaacttcagttcaacaaagaag

SEQ ID NO: 236340 - DNA, 122 bp, Homo sapiens
tgttctgcctgtccctgcagcacggagggctgggctttatacctgtgccaaggacaccaacggcagcatcagcaagtccgtgttgtctcccaaataagtggtgttctccaacaagcttttag

SEQ ID NO: 236341 - DNA, 122 bp, Homo sapiens
tgataatgatgaaaaaggctaagtgcgaacgccgggaggggagagctaaaattcaaagggcgaaatatttataatgcctaccgtcggcgaagagaaacagcagccccaaccgaaggcaaaag

SEQ ID NO: 236342 - DNA, 122 bp, Homo sapiens
aacagaaaggcgatttggactagtttccccggacgggatgaggcagcgccggaagtatgacgctcatttctttaagccactagaagctcaccgtgagtccattcacagggccagagttccaa

SEQ ID NO: 236343 - DNA, 122 bp, Homo sapiens
gtcaaagaaaggagtgacagacggcacctggaaaattgggtcactcccaccctaatactgcgctttaccgacaggcttaaaaaatggcggaccaggagattatatcccgcacctggctcgga

SEQ ID NO: 236344 - DNA, 122 bp, Homo sapiens
accctctaatttctcgcaaaactcccggggacccttcttaatgtcagtagccacagtcgccgccgctcctgcgcctagaagccttccacgaccctcaaccccacagagccccgagcaggctc

SEQ ID NO: 236345 - DNA, 122 bp, Homo sapiens
ggctcacactgcagcagaggaggtgtttaggtgaaatgtaaggggaaatgttttgacaggcggagcggcgagacacaggagccatttcccctgagaaggtggcagaaatggatcagggactt

SEQ ID NO: 236346 - DNA, 122 bp, Homo sapiens
aggggacagataataatcagttctcagcgggcttcccgggtcccaaatccccatgtgatgcgtggaagtaaaaagctatcaatgaccaagcatctgaacgcttatcccacctcgccatctgc

SEQ ID NO: 236347 - DNA, 122 bp, Homo sapiens
gggttggcggggggttggtcctgctgtaggatgagcggtgggtgggcgctgggctcccaccggctggcccagtctcttttcggagagcactcctgctgccgcctccagaggccaagggctct

SEQ ID NO: 236348 - DNA, 122 bp, Homo sapiens
tcagaatcataaaatcattagaagcaatgtctgtcctcactgctgcatccgatattcttccggaccactggatcacaaatcaaaccatgtgactcccgcatgagcaggcagagtggagataa

SEQ ID NO: 236349 - DNA, 122 bp, Homo sapiens
ggccgctcagccatcttctggggcatccactagtgaacagggctgatgggacccttgagacggagacgtctaatgccctgctcacctgcgagagctccatgatgggaaatacatggcgggga

SEQ ID NO: 236350 - DNA, 122 bp, Homo sapiens
aatccctggtatctgattccagagtgcagtcccagattgaagtgaagtgcgaactagaatcgaagaaagagatgtttaagagggttggtaatgaagggcaaagagagagagaaaggggtagc

SEQ ID NO: 236351 - DNA, 122 bp, Homo sapiens
agcagcatgggctgtgcccagagccgccgtgccagaagcccacgcttagaaatagagggccgaagaccaaagaggactgcgggttcttgggccaaacgtgaccctctcaaatcccccaactc

SEQ ID NO: 236352 - DNA, 122 bp, Homo sapiens
tctacctataatgtgaagcatctcataaaccactgcctttctgatattggtctctttgttcggttatcctctagaacttatttttgccacaaaattttgcacttaatcacgtgtttagtcat

SEQ ID NO: 236353 - DNA, 122 bp, Homo sapiens
tctggctcggaacagagttaatctcaggagtgagaatatagccctccggtggacgcaactcgcgcctgcggctaacagaatgtctccaggggaggggctctgcgtccgttccgcccaggccc

SEQ ID NO: 236354 - DNA, 122 bp, Homo sapiens
cgcccggccacagacgttatttctgaaggataaattcctagaaatggatttgctagggcacgtaggaggaattccaatttacactcacttgtatgtgtgaggaaactttcagactctactgt

SEQ ID NO: 236355 - DNA, 122 bp, Homo sapiens
ctgcggctcctgcctgggactcggcgccggcgagcccgtgcttgggccgcgggtctcaggcgtcttttgggcagccacattgggtcataagagaatgagctcaagcgactgggtccctgagc

SEQ ID NO: 236356 - DNA, 122 bp, Homo sapiens
aacagcttcttgttttcaggggatgcatatacagccagtccctgaggaaggagtcgattccggcctaaagatttcttcactgagaccaggtcaccccggactccaacatctgtcaattagaa

SEQ ID NO: 236357 - DNA, 122 bp, Homo sapiens
tgtgttataaataaatgaacagggtggggcggggcaaagggaggggctgtcagaggccctcggagagctcattagtggggaaagctccttgactggggacttctgatcttcagccctgattc

SEQ ID NO: 236358 - DNA, 122 bp, Homo sapiens
ggggtccaaccacttctcataaagactgacttaaccttcagcctgtgcctctccttgccccgtgtccttgggcagtccttgatgaatgccacttataaagtcaggcagctggtgttccaatc

SEQ ID NO: 236359 - DNA, 122 bp, Homo sapiens
cctgccggccgagggaaactctgtctcttccaatttggtttgaattgagaccatccatcccggtcgaactgcattccaggcttttttcttgctgatgtcaaaaggctgaatgtggacttcag

SEQ ID NO: 236360 - DNA, 122 bp, Homo sapiens
tggggcccggagaaccaggagcgcgggccggcctccagcgcctctgagcgccgcagggcgcgcagcaggcactgggccagggccgacggcttgcaaacaaggctgcaccctcccggcagtgg

SEQ ID NO: 236361 - DNA, 122 bp, Homo sapiens
ctgagctgtgattggtcaattggagataaacgaggagggggcggggccaggtcagtcccgcgcctccgctcccggaagaaatttccgccggaagtcccgttctctggggagcgggaaccctg

SEQ ID NO: 236362 - DNA, 122 bp, Homo sapiens
tccccagggacctggtgggcagcctgtggctcctccggctgcccaccaggaagtagatgacggggttggcgctgctgcttacggacgaggagaggcgtgacaagctgaagcacaggacctgc

SEQ ID NO: 236363 - DNA, 122 bp, Homo sapiens
gaggtatggtcacactccaactctctaggtccttctaataccagcatctaagggccaagacgccagtctacattcctgactcactcccttcctccaccaaaacatactgaatgtttcctcca

SEQ ID NO: 236364 - DNA, 122 bp, Homo sapiens
gtgatagggcagagcacagattgcaaaaacgcatattaagaaatcactcttggccgggcgcggtggctcatgcctgtaatcccagcactttgggaggccgaggcaggaggatcacttgagcc

SEQ ID NO: 236365 - DNA, 122 bp, Homo sapiens
catcacagaaccaacaggacgatggggttccccttcctgaaatggttcacatccaaagcccgctcagcccagcaggcccatctggacactcagtagcacattaacaaggagtgcctctcatg

SEQ ID NO: 236366 - DNA, 122 bp, Homo sapiens
gtttccaagggagggcccgggaggacggcctggtgtggggtaggggctcagcccagcgggcgctggtagggccggggaggggactccctggagatgaagggagccccaggatacacgagctc

SEQ ID NO: 236367 - DNA, 122 bp, Homo sapiens
ttaattccatttagctgtgggaagactatgctgtggtggaaaccccatggttattccaagcgcatgaccatcaaagagccagattagctgaacgaggagcgaaaggaaactgtgcacttcct

SEQ ID NO: 236368 - DNA, 122 bp, Homo sapiens
tgggatggccaatccctgggaggcagtgtaacttcatctctcaggagaagtgaagaaaggcgaagggacacagggatcatacaggaaacctgcctccaattagctaaaaagcagacagaatt

SEQ ID NO: 236369 - DNA, 122 bp, Homo sapiens
gcaggaggacggttcggggcgccatgaccagcatctcggcgtctgaggagactctgagtccgggtgggtgcgtggggactttagaactgggaccgcggcgacgctgattggcttctctagat

SEQ ID NO: 236370 - DNA, 122 bp, Homo sapiens
ctggccctggacccagtccgaggtgttgagggcggctcccgagcagagaaggggtcttcgcgttcagcagagctccccttgggcagcaactctgctcggagctcagcctgcttaggggttgc

SEQ ID NO: 236371 - DNA, 122 bp, Homo sapiens
gcatcctcgcgagtggggagtgcgaggcctcctcagctccagccagctgggtgaatggggcgcgcacggccccgtaacgccgagcgtggataaaatatgctaggactgcgcttctccggctc

SEQ ID NO: 236372 - DNA, 122 bp, Homo sapiens
aaggaggaggacactggggcggcctgaagggcttggagggcgcgactggagcccaagtgccggagaggaccgacccacagagcgagcagctgaggcggcggctgcgcggaggaggcggctgg

SEQ ID NO: 236373 - DNA, 122 bp, Homo sapiens
tggccccagccccggcgcccccacgcctaagaacagccccttcctctcccggacgccccgcgccacaccggacacagcctcggctccacagcctcagagacaccaagggacactcaccccgg

SEQ ID NO: 236374 - DNA, 122 bp, Homo sapiens
tgcagtcccttgagaggccaggaggagggtgtcttgtccttcagaagtcctgttatgggccgcggtccccctagcacggaaggctctgtcctgatgaatgtgtggaattggctccacgactc

SEQ ID NO: 236375 - DNA, 122 bp, Homo sapiens
tgctcatctctatcatcggcctccatcttcttccagcctttgcaagggtggggctggctgcggggaacccctggggaggggctggggttcttcctgggtggggtcccccatcgggaagactg

SEQ ID NO: 236376 - DNA, 122 bp, Homo sapiens
cctcgggaggcctcacactcccccgccctgccttcagtttccgtacaaaatggtgccccacgttgctcaggctagccgtaggttgcctccagaccatactccaccaaggctgaatgaaagaa

SEQ ID NO: 236377 - DNA, 122 bp, Homo sapiens
aaagggcagctgcaacagctgaagcgtgttcactctgggggcttgagagcgcagaaggctcgggaaagaggtgacaatgacaacaaaattgacgcggacgctccagtcaaaggcatctcccc

SEQ ID NO: 236378 - DNA, 122 bp, Homo sapiens
tttcacatacatcatcaaacccacacacccgactacagtcccatggcctcctcggactcccgggactcgctgccgcctctgctccatctctaaactggggctctgacccacaacggcgcacg

SEQ ID NO: 236379 - DNA, 122 bp, Homo sapiens
cagagcagtttagccttttaaagacaaggggccacgcaatgagaaaaagatacaaaaatgcgtaggctggcagaagcagatcacagccacggagagccagacaagcagggacgaggccatga

SEQ ID NO: 236380 - DNA, 122 bp, Homo sapiens
aagcctcagtctttgttacctaaaaaattgggataaagatacgtacctcctatggcatgtcgcggagattaaaggataatgtgcacacccccgagcccagtgccgggcacacggtggctggt

SEQ ID NO: 236381 - DNA, 122 bp, Homo sapiens
cccatgaaggttgcactgctctctagcacaggcctcagagtcaagtgctgtgccaatctgcgggcacacaccacaggctggctcccgggctctcctgtgtgcctgagctcacaccactgcag

SEQ ID NO: 236382 - DNA, 122 bp, Homo sapiens
agagggaggacacgtattttctgtcatctcatgcatattagaataggtacaaaaaagaaacgcaattgtcatggaattcttggtaactcgctgcaggcagtccttgccttcagaagccaatt

SEQ ID NO: 236383 - DNA, 122 bp, Homo sapiens
actggaatgagtggaagactggccggttcctgatcctgcagacggaaaccatggagaccacggcccacgggctgtttcgtcgcctcacaaaattagccaaagagtataaggtggggagaaac

SEQ ID NO: 236384 - DNA, 122 bp, Homo sapiens
cgcatgctctgactcctttggggtctgaagttcactgccccgcacctgcgccctcagccccgcccagcgcttctgccgtggttccctggtgccgcctcccgcttgccgaagcgcaggccgaa

SEQ ID NO: 236385 - DNA, 122 bp, Homo sapiens
tagcggcgcagcatgaactcctcgtacttgtgcataagcggcgggtcggcgagcagcaagcggatgtcgtgcgggttgagtcgctcgctgcactcggggcagctgatgggcaccctgctctc

SEQ ID NO: 236386 - DNA, 122 bp, Homo sapiens
cctcggtccccgggagggacggggttagggacagaagaacctacccccaagggctcggaccgtcccgggagaggcgagaccagggtcgaagggtccagggctgaggggtccagcggtcccga

SEQ ID NO: 236387 - DNA, 122 bp, Homo sapiens
aagtaatacaaggacatgtcattggaaccgggtttcgagagatgagtgagcagttcctgacgcagacaagagctggaccacgaagtaagttgaggcagaggcagaaaaggcttcctggtcct

SEQ ID NO: 236388 - DNA, 122 bp, Homo sapiens
gaactcagagttcatcaatctgtcatttttattagatcatgagaaggaaatgatcctgggcgtcctaaagagagatgaatatttgaaaaaagtggaggacaagagaataaggtagtattctt

SEQ ID NO: 236389 - DNA, 122 bp, Homo sapiens
ggcctctaatgggattcagagccagaaacataaaggagggaaggccaaatcctctccaatcggacttgaaatcttcactgccccacccttggcagggcctaggcctcctgatcccaaagcca

SEQ ID NO: 236390 - DNA, 122 bp, Homo sapiens
gagagaacagcaggacgcccatcaaatccacaggaacccccgcacaaagagtcagatgcgcgtcccaaccctacctccagggctctgaggaggagcacaggcgctggatgttccctgcaggg

SEQ ID NO: 236391 - DNA, 122 bp, Homo sapiens
aatgttaacaagcagtgggtctcggtgaaaggtatgaggttcactttactaccatttcaacgactttgtaagtttgacatttttcaagataaaaagttaggggtaaaattcctacaaagaaa

SEQ ID NO: 236392 - DNA, 122 bp, Homo sapiens
ctggggccccgcaggggctgaggcagccaggaagcccacagcataggctgtttgtgttggcgggcctccctacctcctcaaagctgcctcagagcccgtgggcctggggggccagggtgtgt

SEQ ID NO: 236393 - DNA, 122 bp, Homo sapiens
catggtcaagacccctctccgaatggcttctcatccctcagacccacaagagaggtgcatcgtaagctcaagacacctgagacaccttaattctcttccccagccctctctctgtcccttga

SEQ ID NO: 236394 - DNA, 122 bp, Homo sapiens
ccctctgccctaaaggagttaacctgttggaatcacatacaaaggattctgactaccaagcgccttgaagttaagttgaactctgaagacagattgcctggctacaaagctcagttccacta

SEQ ID NO: 236395 - DNA, 122 bp, Homo sapiens
caattacacactgtagccattagatggcagtaagaatttagtctatcttttggcataaagcgccaactatttcctggagtttttattcatctagggcttggaggcttcaccctcaagcttct

SEQ ID NO: 236396 - DNA, 122 bp, Homo sapiens
tcctgctggaccagctgagggaagacaccagctccgcaagaaagcttcagggagggtggccgcccctcagcccccacctggagcctggggagccggggtggggactctgctctgaggtgcac

SEQ ID NO: 236397 - DNA, 122 bp, Homo sapiens
tgcaacattatggctgagattttacgtgtgtggaaatcatgaaaactcacaaacccaattcgcgcaacacaaagagaaaagagaactgccctcttttctataagcagctggcccgcacgcgg

SEQ ID NO: 236398 - DNA, 122 bp, Homo sapiens
ggacattgaagcagcagcaggtctggcggacagtggacaagcgggggtccatggtgctgccgtcccctcctctgagacactgaaggggaaagagcctggtgcctggagcagggcagagaagg

SEQ ID NO: 236399 - DNA, 122 bp, Homo sapiens
ccatgtgtccagagctgtttgttttgtttcttctactcaaccgcagtagacaaaccctggcgatgagttccatgtagcagtccttaatcacaagagtgtctccgttttccataaacacggca

SEQ ID NO: 236400 - DNA, 122 bp, Homo sapiens
atacagtgtcaatgttaccagaagtgcctaacacagtctactgtgtaggctaaagtctgccgtgttcgtacagtgactgaaaaggaataatgactatatcctcatttgggtgaatgttacta

SEQ ID NO: 236401 - DNA, 122 bp, Homo sapiens
gtttcctccccttatcccccaaacagaaactccagtaagcagagatctttgttttattcccgatacattccaaatacctaaaactatgcctgctacatagtaagtactcaataaatacttgt

SEQ ID NO: 236402 - DNA, 122 bp, Homo sapiens
tctgagatcttaagtaaaaactgagatctccttatcctttacccagtgctcttttatcatcgtagtatatgtaaatttattgccacttcccttaagtatgttaataatccatgttcataaac

SEQ ID NO: 236403 - DNA, 122 bp, Homo sapiens
gagctccaagatttctgccctaaggtgttcctgttaaaatttcgccatggtaatgtaaatcgatagcttgtctttacaggtgcagtcatccccctgcctaccagatacaaatgcatatctga

SEQ ID NO: 236404 - DNA, 122 bp, Homo sapiens
aggaggcgaccggaagccacttaaagcagagatcgaggtgacaggcgagctggctggactcggagcgcggtcgaggctttctgcgttcgcggcggcggaatggcccgtgcgcggctcgccgc

SEQ ID NO: 236405 - DNA, 122 bp, Homo sapiens
gtttttctgggccccagctgtgggccgtcaaccaaactttgtgaatcgacactggtgactcgacatggaaaatgactctccgtcatccgattcaaacgtcatcagattgcttttggtgtggg

SEQ ID NO: 236406 - DNA, 122 bp, Homo sapiens
gcatctactgggggtaggggggctttcagctgtggctctttggtggggacagcagtggtccgactgcaggaggttgggagctggcaggtgcaccccagaatagttagtaggagaggggaaca

SEQ ID NO: 236407 - DNA, 122 bp, Homo sapiens
ccagggctccaggagaacctgcccggagcggcctgagcagaaaccacccgtggccccgcgcgaggcagaagtccctgctatatggggagcctgagagagacagacagacgtcccagctgtat

SEQ ID NO: 236408 - DNA, 122 bp, Homo sapiens
caggccacctggagcaccaggccacccggagaaccacaccacccggagcaccaggccacccggagaaccacactacctggagaaccaggccacccggagcaccaggccacccggagaaccac

SEQ ID NO: 236409 - DNA, 122 bp, Homo sapiens
gccagcaccaggcattggggggcaggttcccgtctctacaccccagccccaggcggacagcgcgtgcccctcccgctgccccacctgtcacccacctgctggccccgggctgtctctgctcc

SEQ ID NO: 236410 - DNA, 122 bp, Homo sapiens
ttcaggcattgttttgggatatggttagattgacaggcaacgttttggaatatggttagacggggagggaacacggtactgtttaacatcttaagagtatgtgggggtatgtgtatacagaa

SEQ ID NO: 236411 - DNA, 122 bp, Homo sapiens
tactcaggagactgaggcaggagaatcacttgaacccgggaggcagaggttacagtgaaccgagatcacgccactgcagcctgggagatagagtgagattcagtctcggagggaaaaaaaaa

SEQ ID NO: 236412 - DNA, 122 bp, Homo sapiens
ctggtccccggaagcgccctgagagccacttccgggccgctctaggaaggcagcaatgaccgccccactgtggtccgctggcccgaggggcggagccgaggccgcgccaggtcccgccccct

SEQ ID NO: 236413 - DNA, 122 bp, Homo sapiens
ctatttccggtgtattgtatcctcacgtttccggagattgacgttgctcttgtgttctcgcgagaggcgggaaagggcgcagggtttgaaacatggcggacgacgtagaccaggtaagtgta

SEQ ID NO: 236414 - DNA, 122 bp, Homo sapiens
tcaggcctagttccccgagagcgttcagacagtgggggctcaagctcagagccatttgaccgtcatgcacctgctatgttacgggaacggggcactccaccggtggatccaaagttggcctg

SEQ ID NO: 236415 - DNA, 122 bp, Homo sapiens
cacagagaacttcccgttaagcccctttatttaaaggaccctccgcagcacgctctgtcacggaacctgcctggtatcacggcgcatcacgctctgtcacggaacctgcctggtatcacggc

SEQ ID NO: 236416 - DNA, 122 bp, Homo sapiens
gttattcctttttgttgatctatggcaagcagtcatgccactggtgcaggcctgaagccccgttcacttgttccacaagcatttagcaagcacctatatgccaggctttgagtgggagtgtg

SEQ ID NO: 236417 - DNA, 122 bp, Homo sapiens
ttgggggaggggggagggaccggatgggcggggggagggggagggggaggggtgggcggccgaaagccaactgtttgtactgaatggcaagaatgttctagtaaatgtgtaccaaaatgtga

SEQ ID NO: 236418 - DNA, 122 bp, Homo sapiens
cttcggccccggtcccaggagcggggagatgcctgactcgggtcgtggctgacgacccgacggttcgcctgcggccgcctccaacaacggtggaaaccgcacacagggaccgcgggccctcg

SEQ ID NO: 236419 - DNA, 122 bp, Homo sapiens
aaaatccagttatatgttgtctcctggaaacccatacttgacataaagacacaattactacggaagagatggaataaagctgtgcactactaaccctagtgataagactgctggaatggcta

SEQ ID NO: 236420 - DNA, 122 bp, Homo sapiens
ggagtaactgtcaaggggcgacccagctgaaatcaaacaacaaaaacgggaactgtaacccgcctgaaatgggaggaggaaaaggaagggagactcctgtattcatcagtcaacattaatgt

SEQ ID NO: 236421 - DNA, 122 bp, Homo sapiens
gcatgaaaccaagcgtagggcctgcctgaggcagggctctctgggactgcaggggtcccacgcctgtgaggccggctctgaaatgaggcattcttctccttacctcttgggaccccctggtc

SEQ ID NO: 236422 - DNA, 122 bp, Homo sapiens
ttttctcctaccttgaggctgacattgcaggtggtaccctgggctaggtcagagcagctccggccatccagaggcctgggaaggaagcacacggggaagagaatgaagtagcctcctcctgt

SEQ ID NO: 236423 - DNA, 122 bp, Homo sapiens
aggcataaggccgtctgaggttcccctcgggaccttcaggccccagcaccttccccctgacgcacagcctgtgccccatcacttaccctacgtcctctccagggcccaggccgagagcacct

SEQ ID NO: 236424 - DNA, 122 bp, Homo sapiens
tgggcggccgggtctcagggactgggcagtgttgcccggcctggtgaaggcggaccagggcgtggcggaggtccccataacaaatcttgaaataaaacactgcctaaatacctttgagctta

SEQ ID NO: 236425 - DNA, 122 bp, Homo sapiens
cattattccgggtgccaggttgctctttttccagcagccttcaggggactcctggctgggcggagtctgtagaggcgcgcggagtcctgggagagcgtcagatgtatttcctttcccttttt

SEQ ID NO: 236426 - DNA, 122 bp, Homo sapiens
gcgcatcagcatgttggtcatccttctcaactgcgtgaccctgggcatgttccggccatgcgaggacatcgcctgtgactcccagcgctgccggatcctgcaggtgagtgtgtgtgtgtgtg

SEQ ID NO: 236427 - DNA, 122 bp, Homo sapiens
tagagctccaataccctcaattctactggcagaattaggatggacttagagggtcctaaacgtgaccgattcactaaggcgggggggggggggggctacagcttgcagcaacgtgctctgca

SEQ ID NO: 236428 - DNA, 122 bp, Homo sapiens
caggccccgcccctggacacgcccttgccacctttctttttggcaggtaagacgcgcatgcgcgggagaggaggcgtgggggtcgaggctgatgcgctgtctccgtccgccccctactggtg

SEQ ID NO: 236429 - DNA, 122 bp, Homo sapiens
tcccgaaagggcggggccggggctcatcccggaaggaccggtgtctaggtcaccctggagcgctcaccccaccggcacccgtgcccaagcccgcccctgcaaaggcaggtactcgagcacac

SEQ ID NO: 236430 - DNA, 122 bp, Homo sapiens
ggggcgaatccgagggggcggagcagggctcggggtgcggtcgggggcgtggccggggcgcgctgcggccatcttgggggcgggcccggggcggagacgagcccgaaggggcggggcctcgg

SEQ ID NO: 236431 - DNA, 122 bp, Homo sapiens
tgcccatcgaggagacgctggaggacagcccgcaggtgaggcgcgggagctggtgggcgacgagggagagcccagctggccgaccccaggtctggcgcctccgcggctcccgcaggtgcccg

SEQ ID NO: 236432 - DNA, 122 bp, Homo sapiens
gagggctggaggtgacagtttggtgggagccgtgggctgcatggcctgggaggtgcaaaacgtgtcatcgtcgtcctcgagcagtgaggccggggtgaggcaggcctccaggggcgtagtgc

SEQ ID NO: 236433 - DNA, 122 bp, Homo sapiens
ctgaatctggtggttgtaaagcacctggaggaaattttgctgttctttctccagcatctgcgaatttgtaggacgaggttaagagggagcacacaacttccaatgttgtcccaacttctatt

SEQ ID NO: 236434 - DNA, 122 bp, Homo sapiens
ggaaggtctctcacagaaccaaggacgttgccacccttggctgggtgtacttgaccaaagcgagcctgactgaccctggtagtaggcaaagaatttggcctttacgtttgtatagttaatta

SEQ ID NO: 236435 - DNA, 122 bp, Homo sapiens
agaggccccaaaactcaaagcacaactatctgtggctcttttctcaaacagctctctgcccgtattatgaaattctcaggtgggattctggctaaactgagtttcacatgaagggaagattt

SEQ ID NO: 236436 - DNA, 122 bp, Homo sapiens
ccagatgttcagttctcttggcccctctctaccccttactgggatccggttttcattttccggtccttttgccatacacagttacagagatcagtcaaatccataccaccactgagatctca

SEQ ID NO: 236437 - DNA, 122 bp, Homo sapiens
gggtgctcccgggctgccttgtaagcccacacctgtgcctccaggaggcctcggcctcgacggcccgtttctctctgtgttcaggggactgtctacagcccaagtcctggaggaggaggctg

SEQ ID NO: 236438 - DNA, 122 bp, Homo sapiens
acacaaaaagctctatttcttcaaggcattccagtttctttgtaatctgttggattttaccgaagacgtcaggagaagcattataggtcagtgacagtggggccatggagagctatcttccc

SEQ ID NO: 236439 - DNA, 122 bp, Homo sapiens
gggccacggcgctgtgtgggggcttccaggggggtgagggcccccgggcgggcgacgggtcgtgtggtgccacagccagtgcctccccacaatgggcgccccctgctgatgggcacctcccg

SEQ ID NO: 236440 - DNA, 122 bp, Homo sapiens
tcattttcctccctgcaatgcttctgaaatagctaattggatgattcattcctatggatgcgtctgccccattcagaaactgtttatggcagtgaacaaaactaactctctaatgtgtggag

SEQ ID NO: 236441 - DNA, 122 bp, Homo sapiens
gggccttcaacaacctctacagggcagagcaggcctggctgcttccccaggccagctgcacggggaccttccatgtgggttaaatgtccacaccccaggcaaagcctaaagcacacactgga

SEQ ID NO: 236442 - DNA, 122 bp, Homo sapiens
gtcacacactaggatggcaggaataataatgttagtggagccagcacgcactgcagagtacgtgaggatgctgggagactcttgctggtgggaatgcagaatggtacaatttctgagaagac

SEQ ID NO: 236443 - DNA, 122 bp, Homo sapiens
ctatgtggctgggaggccgcagtgcgtccggcggccccgacacaggcccagcgggaaggacgtgctggcgccgcactctctgctctcacccgccatcgttgtccggactgactgtttatccg

SEQ ID NO: 236444 - DNA, 122 bp, Homo sapiens
ggcaggtgcaggtgccatactgcacctttgggaagagcaaaggtggtggggtgagcgggtcgagttatgagaaagttcacagaaacaaaagagggggtatgagagtagaagtgggaggacag

SEQ ID NO: 236445 - DNA, 122 bp, Homo sapiens
gcccgggtggggaggtggggtccgggtgtgcgccgcggcgctggctgcgaaggcagtggccgaggcgggctccctctgggccgtgcccggcctggctaacaaagccgccgcggcctctgttg

SEQ ID NO: 236446 - DNA, 122 bp, Homo sapiens
aaagaatcgatttcaaaattcaagctcaccgctgctcaacaaggcgcgcacgtttctccccgtctggcttcacatgtcccaaacttccagtaacagaaatgaggaagcagcagccttccccg

SEQ ID NO: 236447 - DNA, 122 bp, Homo sapiens
gtggcgcctccacggccggcgccttcctacggaagccgatggggcccaaaacgaactctccgggaagccccgcctccatctggctaagaaccgcccctcgctgaagactgcaagtcctgccg

SEQ ID NO: 236448 - DNA, 122 bp, Homo sapiens
gccattcccaacagagctgaggacgagggtggtggtccacgcccacgtgcatgcctaggacggccacatggcacctgctgtgccaggcccctgaccctggcacttggcacatgggtacctgg

SEQ ID NO: 236449 - DNA, 122 bp, Homo sapiens
ccttttgttcccagccagaagtttgcatgccgggaccgtgacagctgcgggcggggaggacggcggggccgcggggccagcggcgtggtggagaatagaggcggctgcttgtcatgcagccc

SEQ ID NO: 236450 - DNA, 122 bp, Homo sapiens
agtctcagaaaaactgggtgtttatgatgagatgtagcctttcaaaacaacaaccaaaaacggattcattacttcatagaattgattgtggtgttttctgaagtgtttgactctggcatgaa

SEQ ID NO: 236451 - DNA, 122 bp, Homo sapiens
ggtgaagacgcacctgtaggacatgatcatcttgcctgagatgatgggcagcatggtgggcgtctacaacggcaaaaccttcagccaggtggagatcaagccggagatgatcggccactacc

SEQ ID NO: 236452 - DNA, 122 bp, Homo sapiens
tacgcaggacgagctcagggccggctcccagcctcactgcgccccatttcccgccccgcccgacccccaggtttcggctcaccccgggacccggccctagcccctgcccccagcccaggacc

SEQ ID NO: 236453 - DNA, 122 bp, Homo sapiens
aggcgtgagccaccgcgcccggcctctgttgtcttgtcagcaaaatggccctggtgtgaccgaggtcacgcagccagcaagtgtcgtcgggtcccctggagcctcagcttctacctccgctc

SEQ ID NO: 236454 - DNA, 122 bp, Homo sapiens
tctttcttctttctccgggactggcaggctgactcccggttcttgatcattcgctgctgccgcttcagcagctttgcctaggcacccggaaggtcaaaaaagaatgacagatgagttggcag

SEQ ID NO: 236455 - DNA, 122 bp, Homo sapiens
tttcctctctactagtcacaactacccaggaagggaagttttcactcattcctggccatccgccccatgctgggcacttggggcatgctgactgtggtgaatgaaacagacagggtactggt

SEQ ID NO: 236456 - DNA, 122 bp, Homo sapiens
tacttttctccaaacaggctccccggcggtcacgagatttcagcctgtgcagggattgggcgagagttccgcatatggaggcgcccttgctggagcctctcggagtggagcgcgtttccttc

SEQ ID NO: 236457 - DNA, 122 bp, Homo sapiens
tgtgtaatatgcaatgtggtttgactggggccatttaaatcatctgttcccttcacataacgacctttgattgggggcaatcaacttattgtggtgcaaaagtcatcgcggtttttgccatt

SEQ ID NO: 236458 - DNA, 122 bp, Homo sapiens
aagaagggtgcggccgcagtgtaatacaatattttttctactttatcttgttgctacagtcgctatccacaaatgtgaccatttcatgttgtggtgtgaaggcttgcagctttcatgactca

SEQ ID NO: 236459 - DNA, 122 bp, Homo sapiens
accgagaacatgtccgcccggctttcgattgatcattccccgttaggtggccgagccctgcggtgccattccaacttctgcaaccatgcacagtgatcgatatttataattacctttttcct

SEQ ID NO: 236460 - DNA, 122 bp, Homo sapiens
ttccgtcactgtgaagctgcaataggaaatgaaactgtttgcacattatggcaagaagggcgctgttttcgacaggtgtgcaggtttcggcacatggagattgatgtaagttttttatttcc

SEQ ID NO: 236461 - DNA, 122 bp, Homo sapiens
ttaacaaaactccctattttccccaccccatagtagctcagcacccgcaatgtgcacttacgtcgggtgtccccagacaaagccagtggggagctcagcaccatcagtgtcactgtcagcgc

SEQ ID NO: 236462 - DNA, 122 bp, Homo sapiens
aaaaatagatagtgtcactatcactgccattactgcaatttctggtagttctcctgttagcgctattctaaatgtggatgctgctggctccatctacggatcctgtccactgtccaaatatt

SEQ ID NO: 236463 - DNA, 122 bp, Homo sapiens
cactctcccttaggtaaaacccgtgttcctctcacgctcgacccagcgcctttccagctgcggtcgatttgcttctccgcgtgtaagtacagccaccctcaaggtcattgaaaaagtttgct

SEQ ID NO: 236464 - DNA, 122 bp, Homo sapiens
gtcagccccacggggtgcggcttaccaagaagggggtggacacccctgcgtggcaggcaccggcctgtccctgctgccatacccaggtaatgaccgagacaagaatagtctcggtagaaggg

SEQ ID NO: 236465 - DNA, 122 bp, Homo sapiens
tggcaagggggcacttacaataatagaattcaaagtaatcctagaaatcacagattccagcggcaaaatattaaatataaaaatgagcagtttttctgaagagatgagaaaattagctaatt

SEQ ID NO: 236466 - DNA, 122 bp, Homo sapiens
gacattctgtgagccagcaatgtagtttaaatatccacaagagcgccctggttccatcagcgccccttcgtaattggtcatgagacttggacctccttcggggctgggactcgggcaaggga

SEQ ID NO: 236467 - DNA, 122 bp, Homo sapiens
ggctcttgaggcatctccaagtgttttcactgagtcattctttctgcttgagccagtttccgttttgtgtctaccacatgcaagcagatgagccctatgaagttccgttaaataagtccaat

SEQ ID NO: 236468 - DNA, 122 bp, Homo sapiens
acgccattctcctgcctcagcctccggagtagctgggactacaggcgcccgccaccaagccgggctaattttttgtatttttattggagatgggctttcactgtgttagccaggatggtctc

SEQ ID NO: 236469 - DNA, 122 bp, Homo sapiens
agatgcgctcccccagggggccaggcgcctggaaggcgtaaagcaggtcgagtgagcggccgtcgtagaaggccacgcggccccgctcccagtccaggtccacgcgaatgcgccgcggcggg

SEQ ID NO: 236470 - DNA, 122 bp, Homo sapiens
tagcgcggccgccggaaggggcgggtcagcgggcgggcatttcctgccggtgcctagggccgacggggacgctggcactggtggggagctgttggggggtcccgcatctagggctctccttt

SEQ ID NO: 236471 - DNA, 122 bp, Homo sapiens
gttgtgcgcttacagaaccaagaagaggtttcgtgagaaataacaacacagaaggtaaaccgacatggatggaggaaaagggcacatcattagcaatactcgatgacatcacaacccagtgg

SEQ ID NO: 236472 - DNA, 122 bp, Homo sapiens
gggtgtgggggtgtctgtcggagactggacactgtgcaccgagcggggctgggggctggacgtactctcgagggtcgggctccacgcgtgggtcccacggcggcattctgcaggagtggtgc

SEQ ID NO: 236473 - DNA, 122 bp, Homo sapiens
aagcgaagtggggtagaagcggaagccaggggcagaggctgggtcggtccagccagcccgcgagggctcccacgcagcagaggttccactgagaggaagccggggctggcccggccgggaga

SEQ ID NO: 236474 - DNA, 122 bp, Homo sapiens
tgcatgcttgcggctcctccggagctgggtcccgggagactgctaagcggctccgcggcccgtgctcatctgggctctgctgatgcttggaggctgtttccttactcagaacagagtaggtg

SEQ ID NO: 236475 - DNA, 122 bp, Homo sapiens
ggcatgggcctggcagacacatagacccttgctctgtggctctgcctggcagaagccgaccggtgtgagaagagccttctagcagttggagctgtgtaggcaccaaaagggctgttctgtga

SEQ ID NO: 236476 - DNA, 122 bp, Homo sapiens
ggagactcaatcaaggagcccgtattggagctctaaggggactcagagatgcagaaggaacgaacttctaaggggtcttgcaattcctggactggggcgttcctaatgcatcccgggacccc

SEQ ID NO: 236477 - DNA, 122 bp, Homo sapiens
tggagggtggcgagccgtggttgagctttgcatgtgttgttaaggcagggccagcagatacgctgagggggagggatgtgagctgggaaagaaagagcacaggtttttgttgtgaacaacgg

SEQ ID NO: 236478 - DNA, 122 bp, Homo sapiens
ctgggctggggtggggagggcggtgaatgcaaggatattgccgcaggcaggagtccacctcgccctcgtcgggcccggcctggccgtcgcccccatcttcttcgtccacgaacttgttctcg

SEQ ID NO: 236479 - DNA, 122 bp, Homo sapiens
gatcagacgcctcccgcccaccgcggccgcttctccacgcttttgcccagatctctgcaccgcgtggcccggtcttgcctccctgaggaccacactggctgcaacccaaactcgactcttct

SEQ ID NO: 236480 - DNA, 122 bp, Homo sapiens
tcaaccatctttggcgaggccttgcttccttccactcgagtaagtcgcggcttggggccacggaaaggactgggtgagagcccgcaatgtcgttggaaaaaagcagccctccctgcgccccc

SEQ ID NO: 236481 - DNA, 122 bp, Homo sapiens
cttgggagaccccggtggggagggtggctccggggtcacctcgaccgggcctctgttgcccggctatgctcaagttccctgtcgactggcgttctcgatgctatcgtgggacgcggcggcgg

SEQ ID NO: 236482 - DNA, 122 bp, Homo sapiens
catggtattctgatggaagacaacagggatggtcaggaaacgatgattggagctgaaatccgaatgataagaagccagtgaggaaaaatctggatgcatgtccgggctcacacctgcaatcc

SEQ ID NO: 236483 - DNA, 122 bp, Homo sapiens
tgacagcccagtaggagacaaggctcctgcgttctttatttgcaccaaatgcaggatgggcgggatggagatgacagctgccaatgatttcaaaatgaaactggaatcagtccagtgccttt

SEQ ID NO: 236484 - DNA, 122 bp, Homo sapiens
cccgtccccagcggtctgcgcaggcgcattttccgaccgggcccgcgcgctcccagctctcgggttggctgctcggttgctgcctgctcagtgcatcctttttgccattgctggtgccttcc

SEQ ID NO: 236485 - DNA, 122 bp, Homo sapiens
cagtcctgacttcacgcttccacctccagctcaggcgccccctgagcccggctacccctacgcaggacgagctcagggccggctcccagcctcactgcgccccatttcccgccccgcccgac

SEQ ID NO: 236486 - DNA, 122 bp, Homo sapiens
aaattccgacgttaggaaataaatcaaaataactttgctgtgtttagcctcattttgccgcgccgctcggctccgagttaaaaagcaacaggtaccgtggtgtctctcccagaaacacagga

SEQ ID NO: 236487 - DNA, 122 bp, Homo sapiens
tgctcgccacctgcagcgagtccccccgatggatgaggaaccctcagaaccagctcctcccggcgtggactcagaggccacaggctcagccacggtgtcacagtcacacatggcagggtggt

SEQ ID NO: 236488 - DNA, 122 bp, Homo sapiens
tacgcttcaattcctaagctaaattgccaaggttttactagcacgaaagtttaaagtcaacggagagcgtgccctaatccctaaatcgattaggtttattacacggcaccagcgagcaggga

SEQ ID NO: 236489 - DNA, 122 bp, Homo sapiens
ccagactcctgtcttcatgtcctgtcccttaaatgccctccaaaaccgggggcaggtgctcgagagaacttgaccctgattccggattatggggttttctaaactcagtactgtggctgaga

SEQ ID NO: 236490 - DNA, 122 bp, Homo sapiens
tccgcggacgtggccatcgccggggggttgcagctgctgaggctgctgaagcgcggcacacgaggcagggccaggccctcggagcctgtccgcaccgggtcgctggccctcctcacgccgtg

SEQ ID NO: 236491 - DNA, 122 bp, Homo sapiens
tgtccctctgccctcttgcccatctgcccaaacttttgtatttgatctctgttttgatgtcgaaccccaaagcactgtaattggggggggcgggggggggggtggaacctgcggacctgaga

SEQ ID NO: 236492 - DNA, 122 bp, Homo sapiens
cccacaaattttctgcagcgtgatttgtccccagtggcgactcgtagagagttcggggctcgctaccagcccctctcctgattggccttgtgccgcgcgctcgagcgtgcttggcgcctgcg

SEQ ID NO: 236493 - DNA, 122 bp, Homo sapiens
gtgcatggcaggttttccagggaagctcttggaagccacttctctcccgtgctgccctgccggtcccacccccgccccacccctcacctctgctgtacttgggaacaaagccacgtataaga

SEQ ID NO: 236494 - DNA, 122 bp, Homo sapiens
tgtgaaccaaaagccagagaggcccacgcacgagtccggaagtgagggagggaggactttcgtacgcagccgcctcccagctggaacctcatctttagtgctcggccgcgggcggcgtaact

SEQ ID NO: 236495 - DNA, 122 bp, Homo sapiens
tagcgcgagccagcagcctccacatggtcacgggcgtccggcggcgcggagctcccccagcgactccggctgtctcctgcacccaggtaagcagcggcgctccactacctagctgtaatcgg

SEQ ID NO: 236496 - DNA, 122 bp, Homo sapiens
tatgccgtgtttgacctcatggaagggaagtcttatgtgttccgagtgctgtcagcaaaccggcatggcctgagcgaaccttcggagataacgtcccccattcaggcccaggatgtgaccgg

SEQ ID NO: 236497 - DNA, 122 bp, Homo sapiens
gagtagcttggactagaagcacacaccaccataggcgagtgtttgtattttttgtagagacggggtttcaccatgttgcccaggctggtctcaaactcctggcctcaagtgatccgcccacc

SEQ ID NO: 236498 - DNA, 122 bp, Homo sapiens
agggctcaggtacagggaaggtgcgtccatactcatggtatgttcaagaacatgagcgagcgtctctgtgttgtgtgtttgtggctgtgtggctgtatcatgtgaggttgtgtgtggtggga

SEQ ID NO: 236499 - DNA, 122 bp, Homo sapiens
cataggtggggaaaccaagactcagtgagatttaataacctgtccaagttgcacagctaacgagtgaatgtgaatggaatccaccgtggtctgccttaaagactctttcctccacatcacac

SEQ ID NO: 236500 - DNA, 122 bp, Homo sapiens
gtcccttacgggatcttgtcggccggagaccgtctggtatcctggaacttcaccccccagcgtctccaacttgtaccagccagcggttcttaaaactaggcttcaggcagtgcattttcttt

SEQ ID NO: 236501 - DNA, 122 bp, Homo sapiens
gctctacctggtcaccctggcggggaacctactgatcctgggcctggccctggtggaccccgccctgcactcgccaatgtacttcttcctgggggcgctgtccgcggcgcaggcagcctaca

SEQ ID NO: 236502 - DNA, 122 bp, Homo sapiens
taggccctccctactcctgcgcgcggccctcggctgcgcgtttaaaactccgagccctaacgtgaggtgcccccttctgattggctgcgccacaaccaccaatcagcggctgccactcggtt

SEQ ID NO: 236503 - DNA, 122 bp, Homo sapiens
ggcccgcggattcctgcaaggtcgcgaggtgagaggtgcggggaggatagacctcgggctcggcgcacagggtctgggccagacgcacaagcccaaattccctccagcttcttcggctccat

SEQ ID NO: 236504 - DNA, 122 bp, Homo sapiens
ggcttcatctctggaagggtaaggggccatcttccgggttcaccgccgcatccccacccccggcacagcgcctcctggcgactaacatcggtgacttagtgaaaggactaagaaagacccga

SEQ ID NO: 236505 - DNA, 122 bp, Homo sapiens
tttttttttttgagacagagtctttctctgtcaccaggctggactgcagtggcccaatctcggctcattgcaaccgccaactccctggttcaagtgattctcctgcctcagcctcccgagta

SEQ ID NO: 236506 - DNA, 122 bp, Homo sapiens
acaaatatgataattcagctgaattatagtggtggtttcttgatacccaaattcgaatgccggcttcattttggagtaacgactttaccacctccctgcatcccatccacttcagtgttgca

SEQ ID NO: 236507 - DNA, 122 bp, Homo sapiens
gcctgggggtttcggtagggagccacccacagataactcagacagccagattctgggggtcgttcaggttgaaagactggtcgaaattacgcgggcatgagtcagcgcatccctacgcgccc

SEQ ID NO: 236508 - DNA, 122 bp, Homo sapiens
tggttgagacgcttctctcctgccgggactggaaaggtgggccctgtggtcagccggtgccgcagccaaccctgcagtccagaaagcagacgctttgctgatgaacagtgagcagagggccg

SEQ ID NO: 236509 - DNA, 122 bp, Homo sapiens
tagccttttttcagacgttagctcattaattctccagtcattgtgagctgtatagcatgacgaccggttcccctacagctgggctgcatgctgcccattctggaccttctagggttgtggca

SEQ ID NO: 236510 - DNA, 122 bp, Homo sapiens
catctattcatctaggcaccaattacttttttcaataaacacatcagaatttctgcacaacgttttctctttatatgtgtgtgttttctgtctctttttgtatctcaaacccacacacacac

SEQ ID NO: 236511 - DNA, 122 bp, Homo sapiens
ctagagggcgaggtctcggtagagccaggctgtatcagtccgtgacactccagccagaggcgatgccgacggctgccggagaaagccgggcttagagcgccacagttccacgcccgccgccg

SEQ ID NO: 236512 - DNA, 122 bp, Homo sapiens
cattgcccactgtcttgcagtgccctttgcttagctttgccatctgtgcagtttcatttacgagactgaggaaagtgtgttcctggcaatggactcctggcaccttctgccatctcttagag

SEQ ID NO: 236513 - DNA, 122 bp, Homo sapiens
agtgtgtgcctcagcgcctggtgcgtgcggagctagtgacgggtgggcccggctggggcccgtcattccttcagtgaacatcccatgagctctcgctcggtgttgagccctgtggtaggcac

SEQ ID NO: 236514 - DNA, 122 bp, Homo sapiens
catgtgtgttgttctttgacctacagaatacacagatctttcggtttggcctctctcatacgaaaccctaagcacttgaggttcatgaaaaaaattcaacactgattaactttggcactttt

SEQ ID NO: 236515 - DNA, 122 bp, Homo sapiens
cgaggtgggaggagggtgcaaagcaactgagcgcctctcttggctgttgcctatcctgatcgcctgggttgggaagccccagacggtctcctctgaaacgccctgctcctggccggaccggg

SEQ ID NO: 236516 - DNA, 122 bp, Homo sapiens
gctctggggcactagggttggctgggactacaatagagtcactggtgtcctggccccaggcgcggcggtggacctgacgctgctggccaacctgcggctcacggacccccagcgcttcttcc

SEQ ID NO: 236517 - DNA, 122 bp, Homo sapiens
tctgaaacatgggcatattctccgccacctgccccctactctcctcttatcccaggccggcgtcaggaggaggaacgcgcatcagttcccaagcagtaggaagaactggaaggccttgaaag

SEQ ID NO: 236518 - DNA, 122 bp, Homo sapiens
tgctgcccacataatccgacccaaaggcccttggcttcaatgcaaatcccggagctgaatcgccaacaacccagggcccacttcccattacgcaccagtggcaccgtgcctggggccttcgg

SEQ ID NO: 236519 - DNA, 122 bp, Homo sapiens
gctttagaacaaaacatcacttcatttgattttttaaaaaatactaaaagtgtccatgagcgttaaccaaatataatatatgggtcctgtcttttggtgtttggaaaggctcaccagctagt

SEQ ID NO: 236520 - DNA, 122 bp, Homo sapiens
agtcggctccgtttcttcagacaagtccagctcagggtattgactgagtagaggttcctccggacctgggagaagctggggtggcgccagcatctccttacaggtgcctccatcctgtcctt

SEQ ID NO: 236521 - DNA, 122 bp, Homo sapiens
cacgattaatttgattcccaagcaggtgctagcaggggcatgctcacgcgtgcacatgtgcgcgcgcgcgcgtgcacatgtgcgcgcgcgcgcgcgcacacacacacacacacacacacaca

SEQ ID NO: 236522 - DNA, 122 bp, Homo sapiens
tctcctcctcttcttctgcagggctccgcgaagaggtctggcactacacggggcagtggccgcggcgtccttttctgccccgcgccccttcagcccatcctccctgacaagggggcggcgca

SEQ ID NO: 236523 - DNA, 122 bp, Homo sapiens
tttaagcgcccctgacaacagaactatttggttttcccatccatgtttacactgtcatcccggtctctgcagaatcgagcatttgtaagtggatttttatctggcttcttggacaccactta

SEQ ID NO: 236524 - DNA, 122 bp, Homo sapiens
caccagcatcgtggagaagcgcttcccggacttcgtgcgggacttcatgggcgccatgtacggggatcccaccctctgtcccacctgggccactgacgctctggcctctgtgggaatcacac

SEQ ID NO: 236525 - DNA, 122 bp, Homo sapiens
gtttttccccagacagacctacgggtgccagtgccagtacgggtgccagtgccccagcctcgcctcccctgcagctccctcctgggccaggccgaacaccatcgtttcacagtccacttact

SEQ ID NO: 236526 - DNA, 122 bp, Homo sapiens
ggtatgaaagattgaaactggtgcacctgcctagggcacctaccgtaagcttggagcttacgggactgaaagttgctctgggtgagtcagtaagtgagtggtgagtaaatacgaaggcctag

SEQ ID NO: 236527 - DNA, 122 bp, Homo sapiens
tagtgaccttcggttaggcaatgatttttacaccattgataacaccatcaaaattgcaagcggtaaaagacaaacacataaattggaatttatcaaaattaaaaacttgtgtttcaaatgac

SEQ ID NO: 236528 - DNA, 122 bp, Homo sapiens
ccttcccaaatcagccaccgtgggccacggctacgctatgctttattcctaagcgaatctcgcacaaatctcgaggcatattttgtacaaggggacactggccgcgcgcatcgcaatcgcat

SEQ ID NO: 236529 - DNA, 122 bp, Homo sapiens
gaggaagggaggaaggggggcagggaggcaagaagaatgggagggaggaaggacagggagcgggaaggaggaaggcaggccatcaccagtatacaccactctggagaccagctctagccact

SEQ ID NO: 236530 - DNA, 122 bp, Homo sapiens
cacgtgcagtgtgtgtgtgtgtgtgagaacctgggtgaggacagctcctgcagacggctgcggggacttccccaccaggtgacgcagcctcgccgggttttggcatcttgtccttagcagcc

SEQ ID NO: 236531 - DNA, 122 bp, Homo sapiens
gtacccgcccatcttccggccaggatgtgtggtcctggtgagcgattgtcctgtggcgtccgggaccgagtttgtggcccagggttatgtgtgcacttcacacctctgacttttttcagggt

SEQ ID NO: 236532 - DNA, 122 bp, Homo sapiens
tttgggcggcggctgagttcccaaacgcgcgcggagaccctgggaaggaggaagtaagcgcgaaagtgcttcccttaagcttctgaaggttggctgcagttccggctacctgtgtagtccga

SEQ ID NO: 236533 - DNA, 122 bp, Homo sapiens
tctgcaaggggccggggcggacccagtggtcaggggaggtccagagggcgcagtggacgccggccgggccggggacggagcacggaaggccccgccatttgctctcctgccttacctgcatg

SEQ ID NO: 236534 - DNA, 122 bp, Homo sapiens
cagtctccgccccacgtcccgcgtgcccccgggcaccggcaccgggcgccgggcacctaccgtcctcctggtccaacaccatggtcccgacggctccagccggactagcgccgaggatacgg

SEQ ID NO: 236535 - DNA, 122 bp, Homo sapiens
gtgttaacatttagaacagtacttgtaaacctgctcatttctagacaagtccgggactctcgctgcgaacccttcatctatcactgctgatttcctttgacatgaaatatgactttatgaaa

SEQ ID NO: 236536 - DNA, 122 bp, Homo sapiens
ccacgcagtccggcctcgccccgccccacccgcaccctccaaccaatggcgtggctcgatcggctcctatgcaaatctgcagaggcctcggcattcattgagaaaaggagtgagcccgcccc

SEQ ID NO: 236537 - DNA, 122 bp, Homo sapiens
actcactcgttgtctaagcagatgtttccacagtaggtccagcagcatgtatgatttggacgtacacaagtcattattttagtacaccttttctcacagtacttatatggaggctgtaccca

SEQ ID NO: 236538 - DNA, 122 bp, Homo sapiens
gcacaagagcgtcacccccaccgaaggattcttggggtcttgggagaaccttgtacttgacgagggaggcggaacgggcttgatccattcttatgtctaggccccatggaaagaatgactcc

SEQ ID NO: 236539 - DNA, 122 bp, Homo sapiens
tgtctgtcctctcttctgggcacatgtacagtgttcagcaccttcagggtcagccacacacgtgcagtgactgaactatggtaaatgtctgagaaaaagagggagggagagaaggggaggaa

SEQ ID NO: 236540 - DNA, 122 bp, Homo sapiens
cgtccctcacatgacacacacacacatcccccacgcgtgcacacacacacacacactctgcgggtggctgctcacccgccctgacatggggactgtctctccggtgagaaccggctgcagga

SEQ ID NO: 236541 - DNA, 122 bp, Homo sapiens
gactgatgtccctccggctggcagctagcaataccccggattgcaaactctcgaggtctccgcccatttcatggcaggaaatcagcgttttccaagaacgcccagtggcgcgggcacgggcc

SEQ ID NO: 236542 - DNA, 122 bp, Homo sapiens
cttttcctggcagctttcgtggccagctgtttgcggggggctttcccaccggtggatttacgagcagtctgcttggttcgggccattttctttcacccaacgccgaagttttaggccacttc

SEQ ID NO: 236543 - DNA, 122 bp, Homo sapiens
ctttccgcctctcaatcactgctgggctcacccctcccacacaggaggctgggtgtgtggcgacctcagttcaccacgggggaggtgagcatgtggggggacccctggggtcaagccccggg

SEQ ID NO: 236544 - DNA, 122 bp, Homo sapiens
gccagcatcccataccacagaataaagtatcgataccacagtccagccttcaagatgctccgtaatcagggccccacctactgtactagtttcaagtcttgttcttgccttttacaaaatct

SEQ ID NO: 236545 - DNA, 122 bp, Homo sapiens
cttgccgggtgagtggctcggggcggcgagggcgggggcgccaagcgtggaggtaactcccggccgcagctgaagccctcctactcctcctcctcctcctcctcctcctcctcctcctcctc

SEQ ID NO: 236546 - DNA, 122 bp, Homo sapiens
caccctgttccagttgtcccggcttcaactttgggtgccctgcagaatgggcattgatggcgccccacttcacagaggaaaagtaaggaggtaagtgctagaggaacttgcccagagatgac

SEQ ID NO: 236547 - DNA, 122 bp, Homo sapiens
gattttttaggctttctgaggaaaatcagtttctgccacggcggaggtagacccttgccccgccccggtttctgcaggccctttcggatttggggtgccgaatggacctgctaagacgggaa

SEQ ID NO: 236548 - DNA, 122 bp, Homo sapiens
gtgtaattcccccaaaatgggctctgccgcaggagaggctggctccagcgccgggggcttcggaaggagtttctgccacccccactgccgccactgaccgccccgacgccacggccggggcc

SEQ ID NO: 236549 - DNA, 122 bp, Homo sapiens
accgaccagggagcaaatggccagaccccaggggaggggaccgggagggccgggcggccgcgacccccaacctctcggaggaggggctgccgctcgccgctccgctctttgttgtttggggc

SEQ ID NO: 236550 - DNA, 122 bp, Homo sapiens
ttctgcttttgcttcacctcccttacctcttaatcatggtgtattccaacgcatagtcatcgtgcctctttctgtctgcatgctttcccttgaagagctcattctgtctcatggctttaaat

SEQ ID NO: 236551 - DNA, 122 bp, Homo sapiens
caagctggacgggatgagctaaccggactgtcggggccccaggagtggctgaggcggggccgtccaaggcacccacacaagacggcacaactgcctgcgagaaacaggcccggccctgtgga

SEQ ID NO: 236552 - DNA, 122 bp, Homo sapiens
ttatttctctaactggggaaagtcatgtgggaacagatgtagcttgccttggcctctgaccggccctgcctgcgttcctgggtgctctctgctgcttctcatgtgtgccactgtggggactc

SEQ ID NO: 236553 - DNA, 122 bp, Homo sapiens
aacaacagctcacgtagccccttgtgtggtagctgccattctgatttaaaaagagaggtgcggccagtgttcagagcaattaaaagcggtcaaaaatagcagacagctttgtggttggtgca

SEQ ID NO: 236554 - DNA, 122 bp, Homo sapiens
ggtattcttgagagaggagagagccggggagctgggaccatttgggcgcagcccagcccgcgtttgatgccaattgcattgggtaaaggagtgaaataaagattctgagccctggtgattag

SEQ ID NO: 236555 - DNA, 122 bp, Homo sapiens
ctcaaacttcacatcattatttgaaaatactcaagatgtactcccctcagagcaacagtacgagcaacatcccctatcagatgacagcatcaacaccaaattataaatgttctagcctcatt

SEQ ID NO: 236556 - DNA, 122 bp, Homo sapiens
ggtcaggcgcggagagcagataatagcagccacggtgcttcttcccgactgtttgagatccgggccccgaaggcgggcccagaggcgagcgcttcgctaacgtcattgcgcgcgccggaagt

SEQ ID NO: 236557 - DNA, 122 bp, Homo sapiens
aattctgtccacttttactcgtttgtatataccccattcaaaaacagccaacatcagcctcgaaactatgttgtttaaactcaagagcagttttgttccatgcttatattgttgtccatacc

SEQ ID NO: 236558 - DNA, 122 bp, Homo sapiens
ctctcttttagaatgggacagcagcccctgcctcacagggtcctagataaaggaatacagcgcaggtgggaaatgcagctgcaagaagcaaacatttgtgggctcagcctgtgtgtccagtt

SEQ ID NO: 236559 - DNA, 122 bp, Homo sapiens
agcagtggttattgagcccctactgttcagaatacaggaagaccccagcatacattgtgtcgtttcctcttcacacagtagagggggtggtaggatcattttacatgcctgaaaactgaaac

SEQ ID NO: 236560 - DNA, 122 bp, Homo sapiens
taatcctttagctccgccccatcctttgccaggtgaggcagagtggtctggtggcaagggcgctggatgtgggggagtaggaaccgagtcccaaggccacaacctcgctgggtgtccctggg

SEQ ID NO: 236561 - DNA, 122 bp, Homo sapiens
gcagtattcttatctggaatttgagataatagtggcaatgtggccggtggtaacactggccgggtccctttgagaatgaacaaaccggaacacctaataggaactgagtccgtgttaattac

SEQ ID NO: 236562 - DNA, 122 bp, Homo sapiens
tctttaccaggtaagcatccagtgctgcaggccccgggtggcgcgcactgccggggtcctcggcgaagataagaaacagcacacagacagaggacccactggtgccgcaggacctggcacgt

SEQ ID NO: 236563 - DNA, 122 bp, Homo sapiens
aacagaatcgcagattgccagcccttttcccgacccctacggaaagacgagtccaggggccgtcctggcgaggtcaaaacatttagtctggtcttttcaggtgaggacttccccatccaggc

SEQ ID NO: 236564 - DNA, 122 bp, Homo sapiens
tgactcagtcaaactctaagctcatctaaactctgagctcatgctttttagtctgtagatcgatgggtttaggtacagagaattttaggacttttctgcaatgttccatagagaaagtttat

SEQ ID NO: 236565 - DNA, 122 bp, Homo sapiens
atcaggatgctgtgagctacaaagctgatctgaggatgctttgctttgcacaggtaccagcgtggctgccgatctttggctgcaaatctgcagctcctcactcagggtcagagtgagcagaa

SEQ ID NO: 236566 - DNA, 122 bp, Homo sapiens
cgtagacgcggagggccgggtgggggacagcgtagaggcgggggacccggcgggggacggcgtagaagcgggggtcccggcgggggacagcgtagaagccgaaggcccggcgggggacagca

SEQ ID NO: 236567 - DNA, 122 bp, Homo sapiens
tgaatattgctcagtctgcaattgacagtgtaaacaaggtttcacggaagaacagctcggcgatctgcccgggtagctgtgaagtcacagccatgttggccgatggatagtggacactgttc

SEQ ID NO: 236568 - DNA, 122 bp, Homo sapiens
ctcaagtacgtccccgccggctccgagggtgagtgacagccggagaggccaagctggacacgccctgaaaagcgggagactccagtccccgggtttgggggcggtggactccatccgtgtgc

SEQ ID NO: 236569 - DNA, 122 bp, Homo sapiens
cccttatgatggtgaggaaaaggatcacccctttctgcccctacactggccaaagggcaacggggaaacctttgacctctctgcagttcaattagtgttcatcaaatctccaaggctggaag

SEQ ID NO: 236570 - DNA, 122 bp, Homo sapiens
cccactcccagaggtaaatagcaaaaccaggacccggagtgccggcctcccagtcccctgcgcttgcgccaaagcccttgctgtcctcccactgagctggccccggccccgcctcacccgat

SEQ ID NO: 236571 - DNA, 122 bp, Homo sapiens
aaaaaaagaaaaaactcaaactgagccccaagcttccctgtttcacacatggcacaagcccgcacctctcatactttggattgcctttcatccgtccactcctgttttgtgctctggagagc

SEQ ID NO: 236572 - DNA, 122 bp, Homo sapiens
gtggggtgcaaagcacagcgcatggggctggtggcgcccgagagcatcacacaacgcatgcgccagtccgcaggtgtgggcggaggagaaatcgcgtcggcggcaggggatgacgtaaaaag

SEQ ID NO: 236573 - DNA, 122 bp, Homo sapiens
ccctggcagagccctgctcctcacagctcctcagagtggaacaacgtggacccatatgaacgggaccagctccgggtcaagatggaggacggggagttctggtgagcgccccctccccttct

SEQ ID NO: 236574 - DNA, 122 bp, Homo sapiens
aggtgagcgaagttcctatatgattggctgatagcggctaggacgggtgaaggccaagggcggagaattatgggagggattaagactgcaagagctgagtgatggttggttcctgaacaaag

SEQ ID NO: 236575 - DNA, 122 bp, Homo sapiens
gaggctgggcttgcagcagctgctggtgctcccacaggctgcggttctcagtgctcagctcgtccagccgccgctccagctcgtcgatacgctctcgctgggtgtggatgaggctctgctgc

SEQ ID NO: 236576 - DNA, 122 bp, Homo sapiens
ggctgagaatggggcatgaggcaggcagtatgggcgcgctggggccagcctccccttggacgtcccgtggctcaccacctttgcccctgcgagtggtagaacatttgctgaggattaggccc

SEQ ID NO: 236577 - DNA, 122 bp, Homo sapiens
gggctcggaaatgtggccttggggaaagaccccagggattaccggaaggagggatgtccgcggagaagagtccagtgggtggggacgcctggatccccagcagctctgcattcggggtggac

SEQ ID NO: 236578 - DNA, 122 bp, Homo sapiens
tcagccctgccccgtgtgccagacaagcacactctatgtgttcaaaggtgatgcaccgatcgtgccctgtctgatgtttactaaccaacctgactgggtctgtgggtgacaagggcaggccc

SEQ ID NO: 236579 - DNA, 122 bp, Homo sapiens
atgcctgaacctccccgccaccgcagtgagcttctgtgcggccccagcctccccgaggagcgccgccccctgttccaccacgcctagtcccatgcaccacccaagggatgaggagtgcgggc

SEQ ID NO: 236580 - DNA, 122 bp, Homo sapiens
cgccgggcgctcgcagaagggcacaacttaacgaatgctgtgttagccctcagtgggctgcgcttgagatttcatttccgggtgtgacggccccgcgattaagagcggaccgatacgtttcc

SEQ ID NO: 236581 - DNA, 122 bp, Homo sapiens
acgcagctggcgctcccgtccgcgttccagcgcctgtaacagcctgcgtggggcagaggacgggcatgtcagccaaagcaaaatccacaccagctgggtctcctgggaatgattctctattt

SEQ ID NO: 236582 - DNA, 122 bp, Homo sapiens
cctcggaacgatgcggctgttggtacgacacagagggattctgggattaaatagtgcgcgcggggcggggccaggtcgcccgccggccgcacatgcgccgcctcgcctccagcagcgccgcc

SEQ ID NO: 236583 - DNA, 122 bp, Homo sapiens
taatatgatttccatgtatctttcatctctctagatctccctcaatgcctaccagaaaggcgtttcaatgctcaatagaatactcttattcttttgatgccatcttcattatttgtttcaaa

SEQ ID NO: 236584 - DNA, 122 bp, Homo sapiens
agaggaggaacctgtagcgggtgctgggctccaggcctgagatgaggatcttgctctggtcgccgtccacgagcaaggcctggggctgcccattcgtgtcctcatactggaccacgaaggaa

SEQ ID NO: 236585 - DNA, 122 bp, Homo sapiens
ccagtctgtaggaagatagaatcctagtgtttgtaactatcacctaccagaaacagctggcgttaccactttgtgatgtgaaccctttgttatgtttcacttctctgactctcctgagccct

SEQ ID NO: 236586 - DNA, 122 bp, Homo sapiens
ctttgtattgcactctagtgaaaaccagccggaccagcagggggtggcacagaaaagaggcgagaatgtgagattaatagagtgctagcaagacaacagaaaatcccaggcagcagtttcac

SEQ ID NO: 236587 - DNA, 122 bp, Homo sapiens
gtatctatatattcacataaaaactatcaagaatcttactgtcttgccttctcttcctggcgtggaggcaccagcatggtgactgaggtcactgcacattggagagggttggggaaccgcaa

SEQ ID NO: 236588 - DNA, 122 bp, Homo sapiens
gcagccaataggagcaaaccttggaaactagctcccccaatagcagcagttcctggagagcgcgggagcctttcgaccagggtcccaaaggaaagcagtgagtggtgctgtttccctgaagg

SEQ ID NO: 236589 - DNA, 122 bp, Homo sapiens
atgcaaacttttgcacacctggctcaggtggcagcagaccacgtggggacttcttaaatccgaatgtgatgacaggtggtctggggatcttattaaaatgactcagcaggtctgggacacag

SEQ ID NO: 236590 - DNA, 122 bp, Homo sapiens
tccgtgcctgagacccgaggtagggctttggctgtggggaagtcgggttttctccacgtacgccgtcccttctacgtggcattttttccattttcggattctgctcagtcgccctccagttc

SEQ ID NO: 236591 - DNA, 122 bp, Homo sapiens
tgtgagtcagctttcggccgatccctgggaaaaattccttcggtgttgtcaggcagggttcgctagctgcagctttttttttttttttttaaacaattcaaaagggataatcccgctgaatg

SEQ ID NO: 236592 - DNA, 122 bp, Homo sapiens
ccccagctggggagagtggatgacaatagctgctatcactttaccattggaagtgacccccgaatttgcacttctttcatcttggtacagagcacttgagggtgggcgatttcctgggggga

SEQ ID NO: 236593 - DNA, 122 bp, Homo sapiens
gggaggtggatcacttgaggtcaggagttcgagagcagcctggccaacatggtgaaaccccgtgtctacaaaaattagtcgggcatagtggtggtgcacgcctgtaatcccagctactcagg

SEQ ID NO: 236594 - DNA, 122 bp, Homo sapiens
gagtgaacatccattcaataatgtggctcccacctcttctaggttaatacagaggccacccggttcatctcagacctgcctttgtccaccaggggtttaagtaaaaactaccacaagcagca

SEQ ID NO: 236595 - DNA, 122 bp, Homo sapiens
cgttgccgctgaattatggatttaatagcagagaagccttgcaggccgcctgtgctggctcgggaaaccggggcccagccggggcctgtcacggtcctggtgccgccctgcttcctgtcggc

SEQ ID NO: 236596 - DNA, 122 bp, Homo sapiens
atatttaaataaaataaattgatgtaactgaatctcatgtgctcctatttaaaccaaccccgttccccacacatacactctaaaacactcttctgatgaagacgagattcacacaatcctct

SEQ ID NO: 236597 - DNA, 122 bp, Homo sapiens
caattttttaccagattttgcatgtcagtcataatgtatcacctcccgactgcgatcagccgctctccacttcccgcaccttcacttttcaaagattcccaggtgatgccaacctgctctgc

SEQ ID NO: 236598 - DNA, 122 bp, Homo sapiens
gagaagttccgaggcacagtccctctcatccccaggaactcctcgtacgtccaggacctgcgagggaaaagggcgcaaggcccacctgcacccaaaaagggggccttataaatgaagaaagg

SEQ ID NO: 236599 - DNA, 122 bp, Homo sapiens
gagggggatttccagctgctggccggggcctctcacccctacccccgcgtagttcatctgcgacgcaacgccttgtgtcaaagcccagcacaggttctgccgcctctgacctctctgagggt

SEQ ID NO: 236600 - DNA, 122 bp, Homo sapiens
gggggcggagagggaggcagctgcctgcaaaccctggagtggggcttgacgctggggggacggcgtgtgctggttttgctgctttgggggtgaggagaggatgaataatccaaagagggacg

SEQ ID NO: 236601 - DNA, 122 bp, Homo sapiens
cttcgtggccttgaggtctttcagatcactctgaccgagggctatggaatccaggaacttcgggtgagtcaaggggacaggcagttcttctgacccttctgcttggcagataaagccgaggc

SEQ ID NO: 236602 - DNA, 122 bp, Homo sapiens
cactctgcttttcctaaacaacttccaagaaccccggaacatttcttaaagtgtctggaacgaagctttaacctcgcctgctccatcagcctgggacggaaaagacgcgaggggcgaagaag

SEQ ID NO: 236603 - DNA, 122 bp, Homo sapiens
actagggagggggccggaacctcgggacgtgggtatataagacggtgcctgagcgcagagcggctgctgctgctgtgatccaggaccagggcgcaccggctcagcctctcacttgtcagagg

SEQ ID NO: 236604 - DNA, 122 bp, Homo sapiens
aggatggatggggctggagatgagctggtttggccttggggcacagagctgagctgaggccgctgaagctgtaggaagcgccattcttccctgtatctaactggggctgtgatcaagaaggt

SEQ ID NO: 236605 - DNA, 122 bp, Homo sapiens
cgggaacaccggcccccgggccactgcggagcagaacggatgctcgtcctggcatctccccgtttttgtctcttgccgacttgttcggtatcttggcttcacacactagaaagctcacaata

SEQ ID NO: 236606 - DNA, 122 bp, Homo sapiens
agtgccagccagcctcgtggggcccttgggtcatgcttcccaacggggaggggagggcggcggggaactgctgctcgcccatctgtaccaaaaaaagaaagaaaaggccatggaaaggctgg

SEQ ID NO: 236607 - DNA, 122 bp, Homo sapiens
ccgccttctcctcagtttcctgccaatgacgctggggcagccggggcagccggggcagcccggtcaccccgcccccaggcccacactaagggtgtccgcggcctgccctccaggcggaggag

SEQ ID NO: 236608 - DNA, 122 bp, Homo sapiens
cctccagaaaggaaagccgagagaatctagtcctatacaataacaccctctaacaaagatcgctaaaggaagattttagtagatgaatatcttcaataatacatggtcacatacatgtatct

SEQ ID NO: 236609 - DNA, 122 bp, Homo sapiens
ttccttctctcctgacccagagtgaggctggctggggagcctgggtccctctgtccttcccgcggtggcagtggctgatctctgctccggcgtgagaggcgccgccctgcgctaggccggag

SEQ ID NO: 236610 - DNA, 122 bp, Homo sapiens
ccctgcagctccctgagcgcggttcccggctgtgcctgtacgaggatggcacggagctgacggaagattacttccccagtgttcccgacaacgccgagctggtgctgctcaccttgggccag

SEQ ID NO: 236611 - DNA, 122 bp, Homo sapiens
aggctgcctgaaacagccttaatttcaatttactgtctccccaaggatcttgccattctgcggaaagtagaaaactcaatggtcgtttctcctctccgacctctcaccccaggctctctctg

SEQ ID NO: 236612 - DNA, 122 bp, Homo sapiens
ccacaccctaactcctggtcacaacctgaacccctgcttcaggtgtgagaactgatagaccggcgttggaatggaaggagggtgaggcaagctgagtgggattctcgtgtccccagccccgc

SEQ ID NO: 236613 - DNA, 122 bp, Homo sapiens
gtcaaacttcagagtctgattaagccccttgagtgaataaagatactcatatatttcaaacgtaacacaaatgcatgcactatcaatttcatgaacatatcatagccctaaagttaggcaca

SEQ ID NO: 236614 - DNA, 122 bp, Homo sapiens
gttatggaggcagagagagagagagagagggagaattgggcagccacattgggcttggcacgaaggccaatggtaatcgtattccctgctaatgtttgtaaatgagacccgggcacggctgg

SEQ ID NO: 236615 - DNA, 122 bp, Homo sapiens
gccccagggatgctggggaaggattcagcccaacaaatagattcgttgacgtcctctcaacgaatgtgtgcttttaaaaatgtctttaattttgcactccatttcatacaacaggtgcacat

SEQ ID NO: 236616 - DNA, 122 bp, Homo sapiens
agccgggagggtagagaggggctttcctagggacagacggtcccggggcacccaggcctccgcggccgagcgggctgaggcctaagcagggaggccgtcgccttcaggcacaggtaagcgca

SEQ ID NO: 236617 - DNA, 122 bp, Homo sapiens
catgaggatgtagtttctggcgagcaggagtgtggcgatcttggagagcttgcgcaccgacggcccatgcgcgtagggcatgacttcgcgcagcccgtccatggctaggttcaggtcgtgca

SEQ ID NO: 236618 - DNA, 122 bp, Homo sapiens
aacgattcatcaagccctccgtgtgccgggtctggctcaccaacctcatcctctgagctccgggcttctgcctcccagcccaaggaacccacagggtctcagccaacactgggagagtagct

SEQ ID NO: 236619 - DNA, 122 bp, Homo sapiens
agtacaatgaacatcccagatcctccacccagatcaatcccttcttaatattttgccacacgtgctttatcttctccgtccagctactcacaaacatgttttctaaaccatttgaaaatcag

SEQ ID NO: 236620 - DNA, 122 bp, Homo sapiens
aaacgaaatatcgtaacacaaggcgaggcaggcttgtgggaaccggtccccagcgggcggcggcagagcggggaggattggaggggccagggctgggggtggcacgggctcttgggccgctg

SEQ ID NO: 236621 - DNA, 122 bp, Homo sapiens
agatgaggtaaatacaattaaaatgatcatatgaagtagaaatgacctaaattgaggatccgatgagagaatgatagccaggaaggcaacattatgttgacagcatgggaaatctgtgaata

SEQ ID NO: 236622 - DNA, 122 bp, Homo sapiens
acgtgcctccttaagcctcctgacaaaacaacagctatttccagaaaagaccaccatccacgacagggaaggctacggggaaattggagccctcagccaggcctctgagcacaacggctgca

SEQ ID NO: 236623 - DNA, 122 bp, Homo sapiens
agaggagcacttcaccgagaaggccccgcggcagagccgcctggcccagatctcggcggacgtcctggagtggagccggggcctggcgctgccctactcctacctgaaccccgcggccgcag

SEQ ID NO: 236624 - DNA, 122 bp, Homo sapiens
ggctgccctgggctgcggggattcttcccgttcccttggcagaaaggggcataattaatccgcagcgctctcctttcattaagccttcacgtttatacctgaattaacttttcacatccagt

SEQ ID NO: 236625 - DNA, 122 bp, Homo sapiens
attaagcagacggcataaattaataaagaatatattcattcactgagcttctacaaagtgcgaggcattagaaaataaaacagacaaggtcccctattgcaagggacttccagaataaagtc

SEQ ID NO: 236626 - DNA, 122 bp, Homo sapiens
gggtgtccttgtctcctgctatcaggtaatgccaacctcaaccccctggaccagtcaccccgatcagactttgcttgcctgattttaggccaggtcagacatcagaggagagcccagatcct

SEQ ID NO: 236627 - DNA, 122 bp, Homo sapiens
cagcgcccactcgcaggggatccctctcaggccagttgcctctttccttatttgctagttcgacagcgcctagaaaatgcagttggtaaaaactaaaaacttctagaattagaaggcactta

SEQ ID NO: 236628 - DNA, 122 bp, Homo sapiens
gggcgtggccctgcgtgacctgccggggcgtcacgtgagctcccggagtcatgtgaccgccgtcttgacagtgttccacgggcgctgcttcctgcctgggtttggagttgtcaccactttcc

SEQ ID NO: 236629 - DNA, 122 bp, Homo sapiens
agaagctacagggagaagtggagaaatatcaacagctacagaagggtaagggaacagggtcggtatggtctcgcccaatgcacttacaacccaaagccattaccgagataaggtttgttgcc

SEQ ID NO: 236630 - DNA, 122 bp, Homo sapiens
aaggcaggccaggtgcgctgtcctgccctggttccgggctgcgggctgctctggccccaccgcctgcccacactgccactcgcaggcctgggttggggaggcagagtgtttgggaccctcac

SEQ ID NO: 236631 - DNA, 122 bp, Homo sapiens
aacctttaccttctcccaggcacagacaaggcgaggtgaggcagagatggattgcagaaccgcattaagcaaccgcggggtggaggagagtgcagggtgtctccaaaccctgggagggctat

SEQ ID NO: 236632 - DNA, 122 bp, Homo sapiens
ccattgtttctctctgctgccggagctccaggtctacccttcactgctctgtgtcctcagcgtgtgtggcttcgtgacctgaagatactgggaaatccatagctaagatgccaggaccccct

SEQ ID NO: 236633 - DNA, 122 bp, Homo sapiens
cacctcctgtctgtctcctgtgtggtggaggcttcagcccccaacaggtggacggggtgccggccagggtgcccactgcactgtggctttcagctaacggcttggtcatttccacctcaaca

SEQ ID NO: 236634 - DNA, 122 bp, Homo sapiens
gtgtctgtttggcggccagtttggccaatcatcggcagctcggtgggtggtgctcctgggcgattggttggcagaatgagggcgctgcgcaaaaacggagaagccgagcgctcggagctcag

SEQ ID NO: 236635 - DNA, 122 bp, Homo sapiens
gatgagatagctcgcgttatcctgcagcacagagctgcgcctggtcacggcagggtgcaccggctctcgggcttcagacaacagcttatcagtaccttgcccgtgtgcaaggacagtactcc

SEQ ID NO: 236636 - DNA, 122 bp, Homo sapiens
aagcgaatatgtggggcgcgcagacggggaaactgagtcccgcgagagggccggcctgtgcgctgccccgcccgcgccccgccagcaccgccgtgcccgggcgcgcccgccctgccccctcc

SEQ ID NO: 236637 - DNA, 122 bp, Homo sapiens
gcctctgcctcccgttgctctgtgacctgagggtattggacaatttgtagctaagactcccggataccctgaagtcgggaaatggtgagtgtgcggggcagggcgtccggaggctggggagg

SEQ ID NO: 236638 - DNA, 122 bp, Homo sapiens
gaggctctgcctgaatgctcagcttctgcaagctggggtggagagtgtgttcctgcctaccggctcagccagcacaggagcacgtagcctgcaggtgtgggttgtacacaggcttccccctg

SEQ ID NO: 236639 - DNA, 122 bp, Homo sapiens
cgccggggggcctcctgtaggtgccatcgctgtctgtggtgatgagccggtccttctcagcgtcggcaggacagccgttgacctggtgtttccggcgaggcttgggagaacgttttatccgt

SEQ ID NO: 236640 - DNA, 122 bp, Homo sapiens
ttcacacacgtgtggttgtgagggacatctctcttcacacgtgtggattgtaccatggtccgtgttggaattctcacagggaacaaacgaaccgtcaattaccgaggaaaggtttgctgcgt

SEQ ID NO: 236641 - DNA, 122 bp, Homo sapiens
ctgccccgcggcgggaacgcggccgtgagggtgtggggtgtaggtccgccaggcctgcaacggctgccgagggtcgtgggatgcgctcgccgcgtccctgctcaggcggagggagcccggcc

SEQ ID NO: 236642 - DNA, 122 bp, Homo sapiens
aacgccggcagcgcgtgaagttggtgaggcctgggccgcggcatacttccggcctgagtccggcaccgcgggtgagagaccgaggccgagcgtgctcagtaaaggaggcagagccagcgttt

SEQ ID NO: 236643 - DNA, 122 bp, Homo sapiens
gataaaaatgagggtaaggttaacggtgagaaggaaaaaaaaaagtgaacacatttccatcgtcatttctaggagcttttcttaggtttcttcaattcggttttgcattggaatatgatggc

SEQ ID NO: 236644 - DNA, 122 bp, Homo sapiens
acgctctacactcccaccccacggcccccagccaactggataccttcgcagaagtcaccacgctcctggaatcccgcgctgcagctgcagcggcccacaggcaccagccactcgccgtcggc

SEQ ID NO: 236645 - DNA, 122 bp, Homo sapiens
cgtacccagaatttaaaaattctaaaattcttaatggtaactgctgaaaccaacctcgtgcggcaaagatggcgtcaggcgagcttttctgtcgccgccacacgagggagccgccatcagca

SEQ ID NO: 236646 - DNA, 122 bp, Homo sapiens
cgatgctgtgcagggagagcctcgacaccgcggagatgacctgggggagacaagaagagacgctcctgtaatttcacaagaaaccagaaaggcatcacagaactggggacgctgctttgcag

SEQ ID NO: 236647 - DNA, 122 bp, Homo sapiens
acctcgagaccagctttgagtgtctagggaagtcctcgtgggggggtatttactttacagcgaaccacaaatgttaagctacaaagtggcctagaggtaaggaggaccctgaaggccagtcc

SEQ ID NO: 236648 - DNA, 122 bp, Homo sapiens
agatcacactgtattttaaaacctagtttgcacatttgtgattctagagagagacgacgacgaagaagcaggagtggcacaagatctcctaaaaagcctcggtctcctaaaagaaaattgtc

SEQ ID NO: 236649 - DNA, 122 bp, Homo sapiens
ggcgggaagtagatgaaaggacccggggcggggccgaacgcagcttccccaaggtgcaggcgcggtgaaaccatcgagacggagggccagagagtcacggcggtgagagggctgagtgacgg

SEQ ID NO: 236650 - DNA, 122 bp, Homo sapiens
tgcccaggccagccacacctaaagtgttggggtacatggcaacatatccaagcttatgtacgtggcatttgaggtcagggcatggaaaaatacggaggcactgtgtgtatgttatttgtgca

SEQ ID NO: 236651 - DNA, 122 bp, Homo sapiens
ctttaactgagattgttaacaagacccagcgagatcgtgaaaagaagacaccccgcacagcgcctgttccctcgttagcactcacgcagtatcagctattatcatcatgctggctgactttt

SEQ ID NO: 236652 - DNA, 122 bp, Homo sapiens
tgagcttttccctggatttaatgggattctcagaatctgaaacctgcactttggacatgacgacttttatgctgtttgtagtttctataattatttcctttttgtttttccccaaattcttt

SEQ ID NO: 236653 - DNA, 122 bp, Homo sapiens
aggggattgggggttgggcgccaggcgcgtgcgcgtctctgaaacggggacttgggagcgcgcgctgcccctcacttggctgcaactggacccagaactagggaagaggccagggacagatt

SEQ ID NO: 236654 - DNA, 122 bp, Homo sapiens
gtggagccgggaggcagaggaggcaagacgcagaaaagagagcaggtctcgccgcagccacggctggtgtttcatgggtagaaggtctccacccacaccactaaagaacgcctggacaaata

SEQ ID NO: 236655 - DNA, 122 bp, Homo sapiens
atttccatatacccatgccttccttgtgaccctagtaaagatggaactcatcgtaccttccgctcttaaaagtcttggacattgaggcttgcaggtacttgacattcaagtactaggcttga

SEQ ID NO: 236656 - DNA, 122 bp, Homo sapiens
tcctgtctcctcatgaaccagtgatgtcccctcagcccttccatacgcagagcgtgtacccgtttgaggatatttctcctagattttaccacgtctgggtttatcttttcatttggctatct

SEQ ID NO: 236657 - DNA, 122 bp, Homo sapiens
tggctcacagcctcacggggcccaggtgaatcctggtatccaaactgcctgaatcgctgtcggaaaatctctgggtctgggagatggttccaggggatacttgatccctcttcgccatcagg

SEQ ID NO: 236658 - DNA, 122 bp, Homo sapiens
gcctggaggcaggacaaaccaagctgggcaagcaaattggccaggagctgttctggctcccgggaagcctctgcaggagggcggggcccgcacacacacatggctatactcagaggaccccc

SEQ ID NO: 236659 - DNA, 122 bp, Homo sapiens
aggagatcgatcggccccgccccctgcggccccgccccctctccccgctgcgcatcctgccgtaagcctgtagtgggtgggacaagaaagcttctgtcacccaccgcgcctctccgccgagc

SEQ ID NO: 236660 - DNA, 122 bp, Homo sapiens
cactgctttgtctctccactgaggtgataagctgcaggacttaactggaggtgaggtgcacgggggtgggagccgcagaccaggccctgcagtttacatgggcaagtccttcacggcccctc

SEQ ID NO: 236661 - DNA, 122 bp, Homo sapiens
ggagttcttcagaaagcaaaaagctctgtagtgtctgcgtattaagataatagagctatccgaattcacccaacctctctatcacaactctaaagatccaactccttcccaatcaatgcctt

SEQ ID NO: 236662 - DNA, 122 bp, Homo sapiens
gtaagagggtgggttccaagggtggcccaagcccgagtaacaaactttcttatcttccatcgcggcgacctggaggtccgaggcttcgtgctgcggttgaagggtggggaatacgactaaaa

SEQ ID NO: 236663 - DNA, 122 bp, Homo sapiens
ctcggcttccggaaaccttcgggatgcctccatgaccctcggattgggttccagttaccccggcgggagtttggagcttggagcttggagcttggagcttggagcttagagtttggagcttg

SEQ ID NO: 236664 - DNA, 122 bp, Homo sapiens
gaaagaacaaagcttccaccacgtgaaaggagacccgagcgggttgctactgctggctcacgcagcctgcttttattctcttatctggccccacccacgtcctgctgattggtagagcccag

SEQ ID NO: 236665 - DNA, 122 bp, Homo sapiens
cgctctagggccgcaggttggaggggtcggactccgggatctgcaggatgcggcacacggcgcggatcggccgcaccagcttctgggccgaggccgtaggttgcgccatgggacgccgagac

SEQ ID NO: 236666 - DNA, 122 bp, Homo sapiens
aaaggagcacagctccaggaagcagggcggccgaggcgccgctccgtgcgcgctccccggcgggaccccgcgcccctgcacgcccctcccgcagtccctgcccactcggacccccaccggtg

SEQ ID NO: 236667 - DNA, 122 bp, Homo sapiens
aaagagatgctgatggcccgccaggactggggcaagacaactttttttcggtttcctttgcggtcatcaaactttttaggggatgggggaagggatgggaagcggctgggaggaaagggagt

SEQ ID NO: 236668 - DNA, 122 bp, Homo sapiens
gaagggtcactagcaagcaagcctgagaaaacggcgtggatggatccctacctgcctctccgccctggctcctgcctgtcactggaaacatcccgttcccacatggtcacttgaggtctctg

SEQ ID NO: 236669 - DNA, 122 bp, Homo sapiens
gtaagccattattatgtggttaccgttttgtcctcaaggaattttcctgttgctaaatcacgcatacttgaagaattcattattttggtttgataaatgtgtcttttgaaacatgtttttcc

SEQ ID NO: 236670 - DNA, 122 bp, Homo sapiens
actcttctccagcagccctcccttaggtgagccccaggatattctggaagtctctttattcgtaaggctggcatcaccgcctgtgtctgcgaagtgttcaccaaatccaagcgggtggagaa

SEQ ID NO: 236671 - DNA, 122 bp, Homo sapiens
ctgggggaagccaagccaagaccccttgcaggaaggttgatccacctcattggaagctgccgggacccccacatgctgccctcgctgtggtggggtccctgtgcccagagctgctggctcct

SEQ ID NO: 236672 - DNA, 122 bp, Homo sapiens
agtgggtggggacgcctggatccccagcagctctgcattcggggtggacttagctcttcgcgccctgaatcctcagagcccagcgcggtgcagggtgcagcatctctccttagcagcccttt

SEQ ID NO: 236673 - DNA, 122 bp, Homo sapiens
aaaaaacaaaagtagcgcatcggtggtcttcacgacgtacacccagaagcacccgtccatcgaggacgggcctccgtttgtggagccgctgcttaacttcatctggttcctgctgctggctg

SEQ ID NO: 236674 - DNA, 122 bp, Homo sapiens
ctttttttttttttttgagacggagtcttgctctgttgcccaggctggagtgcagtggcgcgatcttggctgactgcagcctctgcctcccgcattcaagcaattctcctgccttagcctcc

SEQ ID NO: 236675 - DNA, 122 bp, Homo sapiens
aggctacaggggcacagcaaggctcttcccttgagaagccactgatgtcactgggtcactcgaggtaagcatgtttgaaagggctgaatcaaagaacaaggcaggaagtccacaaggccaac

SEQ ID NO: 236676 - DNA, 122 bp, Homo sapiens
gccttccttccgctaggtggcggtaggagttcggcggaccgagaggttccgcgcccacttcgcggcccagaggactgagcccggcctccggtgcaaggaaaccccagaggccggaactagaa

SEQ ID NO: 236677 - DNA, 122 bp, Homo sapiens
tcaactgagtaaagagtctccatcataagaaagagttgtataacctgtcttctacctgcacggctgagccctggccaagcaggtcattttagccatctcaatgagcgaggcacttcatggtg

SEQ ID NO: 236678 - DNA, 122 bp, Homo sapiens
cacctatttcctgctggtgtaacagagcaccttctctcactactctggccataccacccccgcgatagaggagcaacacagctgtctctgtgcgctccggatcagcgcttcctagatttcta

SEQ ID NO: 236679 - DNA, 122 bp, Homo sapiens
caaggccgcgtcccagatcctggagaatggggaggaggccccggggcccgacccctctctcgaccgcatgctcagcagcagctcctcggtgtccagccttaactcctccacggtgaggcggg

SEQ ID NO: 236680 - DNA, 122 bp, Homo sapiens
cgcggcgcggctgggactggcccagaggcgtggccgggagcggaggggcgtgtcctgggtcgggggtggggcgagggagagccaggaggcggaagttcccgcgggcggtggggacggcgccc

SEQ ID NO: 236681 - DNA, 122 bp, Homo sapiens
ataataatagtatagtaacgaagtgagcgttatgcggaggcgctgagctaaggcatccaacgtacacgacctgacttctcactcccatttataaagccggtgatacagtcggattctaaccc

SEQ ID NO: 236682 - DNA, 122 bp, Homo sapiens
aatgtggtagatacagagatatgatggcatattattgatcaataaaaggaaaagaggcaacgagcacatgaaaagacgctgaactcattagtcactaggaaaatgcaaatcaaaactacaaa

SEQ ID NO: 236683 - DNA, 122 bp, Homo sapiens
atgcccagtcccaccactgtaagacttcgagtgtcttgatttcaattatctagttcttaccggcagcggtactgggaggattttatagacggttttatttttaaagataataatcaccctgc

SEQ ID NO: 236684 - DNA, 122 bp, Homo sapiens
cgggatgaagaactgcgggatgcgatccggggtgaggacgttggggcaggcgcttgtgggcgggcccggggcgcgacgcttggagaacaggccggaaggcgcccaacgggccgcaggctccg

SEQ ID NO: 236685 - DNA, 122 bp, Homo sapiens
cataaggtcctggtgaggtcctgtcaagggtgctctgccctgtgctttgacaggtgtgtgcggagatgaaaggtaaatagccattcttgagcgtgtcctctgtgccagacactgttttaggt

SEQ ID NO: 236686 - DNA, 122 bp, Homo sapiens
ccttttttatttcgaccttccaaacattctgggagttttcctcctttaggccaactacagcgcagaggagcgctttctcctgctgggtttctccgactggccttccctgcagccggtcctct

SEQ ID NO: 236687 - DNA, 122 bp, Homo sapiens
gagaccatcctggctagcaaggtgaaaccccgtctgtactaaaaacacccaaaaggcggccgggcttggtggcgggctcctgtagtcccagctactcgggaggctgaggcgggagagtggcg

SEQ ID NO: 236688 - DNA, 122 bp, Homo sapiens
gtcactagagattagaccttgacgagaaaagcaattagaaatgaaaagataaaacacacgcgacacctaagtcggtggttccacagtcttgctaagagcacgtcggtaggaataaaaattta

SEQ ID NO: 236689 - DNA, 122 bp, Homo sapiens
cccctccgcccctccgctggccgaggggctgcgagggccgggcggcgaagatgcgtggggcgcggaaggggccgagcccctctttggactgcaagtcccgtctccctggcaacggcctcggc

SEQ ID NO: 236690 - DNA, 122 bp, Homo sapiens
aacgtttactgagcatttacaaagagtcaagcacatatgttatctgtcattctcatagaccgcgtattacacaaacagagatctaggcttttgctcaaggtcacaactataagtggtagaag

SEQ ID NO: 236691 - DNA, 122 bp, Homo sapiens
aatcgctctctgggctgggccaggcaagtgggccgcagaggcctggcttagctttgggaacggaagcacgggaaggggcgcggagaggcaggaagcggcctggggaggctggggtggccggg

SEQ ID NO: 236692 - DNA, 122 bp, Homo sapiens
tgtgtgcgcgcgcgtatttgtgtgtagggagaacttgcagatgattttttttttccctcccgtgctgctggttgtaaacttgattggcattggctgcgcccactgaccccgacgctgagtcc

SEQ ID NO: 236693 - DNA, 122 bp, Homo sapiens
gagccgcccgcagagcaagcgcggggaaccaaggagacgctcctggcactgcaggtacgccgacttcagtctcgcgctcccgcccgcctttcctctcttgaacgtggcagggacgccggggg

SEQ ID NO: 236694 - DNA, 122 bp, Homo sapiens
tatttccatatgaaataagattatgactaggaagatgttgaagaggaaaccagcatttcacggatagaaaaattgtaccaggcactgctaagtgctttacatttagtaattcagttaatagc

SEQ ID NO: 236695 - DNA, 122 bp, Homo sapiens
ctatgtctcaataaataaataaataaataaataaataaataaaaaagcctggtaagaatacggaagtgaagccagcaagtcttgactaatctccaagcaatgtagctgtaaaaggtaggagt

SEQ ID NO: 236696 - DNA, 122 bp, Homo sapiens
tggggggtcttgacggggaacagagggctctgccgccctggagggagggggtccagggcccgtttccacactggagtgggtggaggcaggctttgctgagatccatggcaccgtggggcact

SEQ ID NO: 236697 - DNA, 122 bp, Homo sapiens
tctctagtctgcttattaattgaaagtatggttattaatgaagggaatgtgttagtatctcgacctagataatggagcagagtttggtgcgggtaaagggttacatgtctaggagttcaagg

SEQ ID NO: 236698 - DNA, 122 bp, Homo sapiens
ggatataatctcctggtgtgggtgcgccgtttttgaagcccgtcggaaaagcgcaatattcgggtgggagtgacccgattttccaggtgcgtctgtcacccctgtctttgactaggaaaggg

SEQ ID NO: 236699 - DNA, 122 bp, Homo sapiens
cagactgaggcgcagataggggttcctcgaagccacagaactacatttcccagcaagacccgcgcagcagggcacgcagactgtgtgcgtaagcgaccagatttccgggggagccgggggcg

SEQ ID NO: 236700 - DNA, 122 bp, Homo sapiens
accctgctgtggcttcaggagggggtagtggcaagatgatggtttattcactgattttttcgcttctgatttcggaaacctcagagtttgttagtgcctccatggcatacataggcttcaga

SEQ ID NO: 236701 - DNA, 122 bp, Homo sapiens
ggcgggctgcaggtcccgagccctgccccgcgggaaggcagctaaggcccggtgagaaatcgagtgcagcgccagtgggccgggacccagtacaccctccgcagccactggcccgggtgcta

SEQ ID NO: 236702 - DNA, 122 bp, Homo sapiens
agtcagactgatggcatacttctcaacatcagtaaaagaagcaagaagataatgaactgacgttaaggtgcaagaagaaaataactgacaacctagaaaaaggaaactgaatcaagaagtaa

SEQ ID NO: 236703 - DNA, 122 bp, Homo sapiens
tgtcagcccctagctatggtcgggaatgttcccaggcagcactgacctttcacccccacccgcctcggtgcgatgattggctgtctctgccatccccgcttccgggaccagaagccacctct

SEQ ID NO: 236704 - DNA, 122 bp, Homo sapiens
acttgtcaagcaccataaaccaaaacacaatctgtttaataaggtttccaaatcattagacgtcactcaaatagatactttcagctagacctcactctccaacaactttaagtgtctagtga

SEQ ID NO: 236705 - DNA, 122 bp, Homo sapiens
ccgcgaaggtctgtagcttcactcctgaaaccagcgggaccacgaacccaccgggaggaacgaacaactccagacacaccgccttaagagctgtaacactcaccgcgtaggtccgcagcttc

SEQ ID NO: 236706 - DNA, 122 bp, Homo sapiens
aggtgaaatcataacagaggtgcttacttatgggcgaagtcctttgggggcagggccgctcggatgatgtccagcacgcgaggcaaatagaccttaaactcagacctcacagccacagaaag

SEQ ID NO: 236707 - DNA, 122 bp, Homo sapiens
tcacagggattgtacctggagattcctgttagcactttcaggaagtctgttaagaacttacgtggctttgcccataacattccgctgaaactgatctaattaaggtcaccaagaacctccaa

SEQ ID NO: 236708 - DNA, 122 bp, Homo sapiens
gtaagaaagattacctgacaagagcttataggcattattgcttattaagtctttgaaaaacgttactgctctcagtagcattattttagaagactgggaaaggacagcctctgctcagcttt

SEQ ID NO: 236709 - DNA, 122 bp, Homo sapiens
agagtgagggaagggctccaaagagggaacagcctctgcaaagttactgaggatcaagctcggcatctcccaggccctgacagaaggccaactcctaaggaccattcaaagtaggggagggg

SEQ ID NO: 236710 - DNA, 122 bp, Homo sapiens
accttttatgtagcacataaactttggggaagggagggcagggtggggctgaggaactgacgtggagcggggtatgaagagcttgctttgatttacagcaagtagataaatatttgacttgc

SEQ ID NO: 236711 - DNA, 122 bp, Homo sapiens
ctgagaagagaagtggagcaccaggagactgcctatggtaggtagtgcacaactgttccccggcaagatattgatgatatttgttgtgttttgtggccaggcagaatgttctgtgccttatg

SEQ ID NO: 236712 - DNA, 122 bp, Homo sapiens
taaggtcctctaacaaaataatgccccagtgaatcactagtcttataagttgtttgacttcgttaaagtccttttaaaaatagaggtgttctctagtttcccaataatgtttttatttcaat

SEQ ID NO: 236713 - DNA, 122 bp, Homo sapiens
ggccgccggccgcaccactgtggccgctgcaggggcggggaacgcagtgaaggggcgcggcgcaggtgtcaggttgctggagaggcgggcctacagggcggaaaccaccggcgcgggtgacc

SEQ ID NO: 236714 - DNA, 122 bp, Homo sapiens
aggtgtcagataaaggagggctctcctccggtgtggaggcatcatggccgctaaatcagacgggaggctgaaaatgaagaaaagcagcgacgtggcgttcaccccgctgcagaactcggacc

SEQ ID NO: 236715 - DNA, 122 bp, Homo sapiens
acctctttgtgtgcacatcggggaggccggtggatctgtggccagcgggatgggtgcctgcgggttttcatggatgtcgttctctgtctgttcgtgttggcgtgtctgtaatgtgtgtgtct

SEQ ID NO: 236716 - DNA, 122 bp, Homo sapiens
cacgcctccctctcttctctcccacctgctccccattctgcgatgatgctgaaatccagacgcccgcagacccaggcggtggcagaactcctgggggccggtggagaaggaagcagctggcc

SEQ ID NO: 236717 - DNA, 122 bp, Homo sapiens
gctggctccatttggtttcctttgaccttggggagactctgttacttgggaatcctccatcgttgcagcttcaggatgagggacagaatgtcaagcgtgaagatgctgttctgtcgctttct

SEQ ID NO: 236718 - DNA, 122 bp, Homo sapiens
gctgggcagagccactcatccacggcactggccactcagccaggtattgacagacccacccgcagggcagacaaaagaggcatggcccagccagctgcgggaccctgcaccccccactcact

SEQ ID NO: 236719 - DNA, 122 bp, Homo sapiens
ctgtcctgtgaggaaagtgctgaatgcttggtaggccatggttccaagaggtgtgcactccggagcttccagaagatgagtcatgttcaagatgggtgctgagttctacttatcctgggcag

SEQ ID NO: 236720 - DNA, 122 bp, Homo sapiens
gccgacccgccacttgcccgaagttcggcctgaggagcttggggccctgaggagcgccgacgtaggcagccagccagtcaatcagtcagagggtcacggcggcccctcggctactcagtggc

SEQ ID NO: 236721 - DNA, 122 bp, Homo sapiens
gacctcaggtgatctgcccgccttgccctcccaaagtgctgggattacaggcatgagtcacggcgctaggcccagaggaagcatttaaaccagccccagccaaaggagaattacccatccca

SEQ ID NO: 236722 - DNA, 122 bp, Homo sapiens
gaccctgggaaggcggcttcagtgcccgcttccctgagcaaaggctcgtctggactctgacgcggacccaccgggtggggtgggtctccacgccacccggctgtgcgtggggcaagtcctgc

SEQ ID NO: 236723 - DNA, 122 bp, Homo sapiens
taaactgagcaggcattggatctacgtgcccaatctcaagagggcgaaacaagagttccacgtttgggagtcttcaggacatatgccatcatcaaagctgtggtgtggaagagttcatccag

SEQ ID NO: 236724 - DNA, 122 bp, Homo sapiens
ttccttccccgcctccccaactttcctttctgaatcttccaattccgccccagctggaggcgtgcgggtcctcttgcaaaccagaccaaggatgtcgccccgatccccagatggtggaggct

SEQ ID NO: 236725 - DNA, 122 bp, Homo sapiens
agagcttgactcacctgcggaggcagtgggcggggctgaagctgcaggtctggcagagggcgggctgcggcagcgcctccagtggggagggataattctacctctcccccaagcttttgcca

SEQ ID NO: 236726 - DNA, 122 bp, Homo sapiens
tctgtgtactttggggagggaaagcacagtgattgtaagatttgcattggaattcagtgccgcactgtcacagtggaaagcaacaaggggcaaaactcagcctgggcccacagagaaagcat

SEQ ID NO: 236727 - DNA, 122 bp, Homo sapiens
cagtcaccattcctaataaggggggtggacacaacgccggctgtctcctcctgatcattccgaaaccaccggactttgatctggcctggatagaaatctgtcaccgagcagaccagcaggtt

SEQ ID NO: 236728 - DNA, 122 bp, Homo sapiens
agagggaacatgaaaactgcctttcagcattttaaggatggccagtttgattctcatgtgcgccttcttaaagtgtggtaccaaatctgaacattatcgtccagctgatggatgggaaggat

SEQ ID NO: 236729 - DNA, 122 bp, Homo sapiens
cactggggaagccggggagtggggggctggggtggggtgctggttttgtttgaggtgtttcgggttttgttgaaactgcgaccctccttattggctgtagatttaaatgttgacataccagc

SEQ ID NO: 236730 - DNA, 122 bp, Homo sapiens
ctgtcacctaggctggagtacagaggtgcaaacatggcccattgcagcctcaactttccgcgctcaagtgattctcccacctcagcctcctgagtagctgggagtccaggcctgtgccacca

SEQ ID NO: 236731 - DNA, 122 bp, Homo sapiens
ctttgcgcggaggcagagcacttgcctgtgtggggccctgcccttctcttgagaggcaggcgggccctagctgcagcgtcaaggtctggggattctgtggctctgtagggtgaagggcactg

SEQ ID NO: 236732 - DNA, 122 bp, Homo sapiens
actcaaaggagaactcccattcaatggcctattcttccctggaatacaaccacctgggtacggaatgctacttacactggaacccagtacatacatatattctttatttaaaacttaaaagt

SEQ ID NO: 236733 - DNA, 122 bp, Homo sapiens
tcagttcaacagatgccaccaagtaccaaggatccttactcagttctgaaactgtgactacggagaatatgtcactatttgagaataagaggtcccacctgctccactcttttcaagttttc

SEQ ID NO: 236734 - DNA, 122 bp, Homo sapiens
tcaatgctttaaagagaaatttctatagcagtgctgtccaatagaaatatgtgagtcacacgggtaattttatattttcaatgtagccacattaaaaagagaaaaaaaagataaaattattt

SEQ ID NO: 236735 - DNA, 122 bp, Homo sapiens
gctttgtccaatagaactttctacaatgatagaaatgtcctagagctgggttctccaatacggcagccatgtatggctatttagcacttgagatacagttagtgagactcaggaattgaatt

SEQ ID NO: 236736 - DNA, 122 bp, Homo sapiens
aagcctaccccaaactcagatatccttctagttctttcccttcctccccatacagggtgacggtttttgccaaggctacgcctgtcccaggtcttgtgctatggcaagctccgggtttatcc

SEQ ID NO: 236737 - DNA, 122 bp, Homo sapiens
accacgccagcccacagccactgcaagccccagaccggggctgtggataacgccagcccacggcagccacacgccccagaccaacacgagaagaacgcaggccgacaacatcttcatctatg

SEQ ID NO: 236738 - DNA, 122 bp, Homo sapiens
gagcacctgtttgggaacatctgcacctcctcccttgagggagaaaacgacccagacattcgcgtcaaaggaagtgtcgtctatttccctcaacgcagggcacccgttctaggaatgtttgt

SEQ ID NO: 236739 - DNA, 122 bp, Homo sapiens
gttctaaaagaagggaggaggagaaaaaaggagaggcagtggctgagagaagcgctgaggcgtaaggcaagaaaccgaggttggaaaaggactgatgaggctgaggaaaaacagcgaggcga

SEQ ID NO: 236740 - DNA, 122 bp, Homo sapiens
gatgtgatgtgataatgatgtgataaacctgaatactgtgagcccaacaggtcttccctccgggtccacatgccgacttccctcaccattcttcataaagcatggtttctgtcatgtggtgg

SEQ ID NO: 236741 - DNA, 122 bp, Homo sapiens
agcactggaagctcagtttggccttgccgttttccagcggctctttgggacccttgtccgcgtcctcggatgccgcctgctctctcttctccaccggctggagtctgtccggctgcaggtgt

SEQ ID NO: 236742 - DNA, 122 bp, Homo sapiens
ctttgcctctgtgcttagcttttaagaggcacggaaggacatggcatggtcatgtattagcgctggaaagtaccttagaaataggatccaagcaagcccttattgtaaaggcgaggaactga

SEQ ID NO: 236743 - DNA, 122 bp, Homo sapiens
gggaggcccgagctaccaatggtggcttttctcaactgggccttgattccagcttctgcccgatcccctaccttgcttgcctccttctatcaacaccccattcacaccccaaaggatcaata

SEQ ID NO: 236744 - DNA, 122 bp, Homo sapiens
tcgctagtgtactgtgtgcacttggtgcgggaagccatacgctattgtcaccttttcaaacggggtttcaaaagggtctcaggacttagcccttgggaatggcaggatccaccccacccgta

SEQ ID NO: 236745 - DNA, 122 bp, Homo sapiens
cccccgtcccgcggacgccctccaagccggccacgtggcctccgtcgccccgcctctctgcgctcgccccaagtgccgcacttggcccacggcccctaagcccgcgctggcgcacttgtgcc

SEQ ID NO: 236746 - DNA, 122 bp, Homo sapiens
tagcaggcctgggggtggtccagtgatggttgaatgggtgggccagcccagcgaggggatcgcctgcaatccagtagagatgccctcattttcatggcagggtccccctgtgccagtagaca

SEQ ID NO: 236747 - DNA, 122 bp, Homo sapiens
tccatctacttcatggattattccttctcagtcttctttgttggatcctcttcacctctccgacttaacctggtgcattgctagaagaaaccctgctgagtaagagcaaattgtttttagca

SEQ ID NO: 236748 - DNA, 122 bp, Homo sapiens
tgggatggaaggacacaaaatgagatatgttggtgaagaatcgaagtgtagtgaaccaaacggtaaaactgtaatgtgttgggaatctgagaaaaagtttacaaatagccctaaagaggcaa

SEQ ID NO: 236749 - DNA, 122 bp, Homo sapiens
ggtgacgaggcgggagtgactgggccgtacagttccccgagaactggaggcgaagccgggcggtgggaagggacttcggacgcttcgcgggccctgggttttcactgcgcgtgcgcgaggtt

SEQ ID NO: 236750 - DNA, 122 bp, Homo sapiens
actgcataattagcatttggccttatctagatggtatcctgctgagtccagcctgacatccgcaatactttacagaaggcagggaattttctttctccttgcctttatttatctacataaaa

SEQ ID NO: 236751 - DNA, 122 bp, Homo sapiens
ttaactgacccagggagaaaggtcaggggcagggtcgcgcgggctgctctgggacctcggcgcctcctgagggaagggaggcagggctggagccacccaatccgaggttccactactaatag

SEQ ID NO: 236752 - DNA, 122 bp, Homo sapiens
agattcccgggctgtttgctggtgagaaatctttgctgcagcgaggaccggagtcccccgcgcgcagcccagtggcagaagagggctaggctgagagggaagccaggactgtaggagaggga

SEQ ID NO: 236753 - DNA, 122 bp, Homo sapiens
aaacactcattgctctatttggaactgccttgtagaacatgttcagggttaaagaacatgcgctaagctataaaaagggaaatgtttcataggggaacttccttctggttaacttttgcctt

SEQ ID NO: 236754 - DNA, 122 bp, Homo sapiens
gagtcccggcggctcggcgcggtcttggtctgggtcggtggggttgggccgggagacccgcggccggcggggtccaggctgggggaggccgccgctgccaccaggtccccgaggtagggtag

SEQ ID NO: 236755 - DNA, 122 bp, Homo sapiens
aggcggaagggagtagggaaggaagcgccgcgcgtttccaagatacgcaggcgggctcggcgagagagcacgaagtatctgccccacgcaggaacggcaattttcccttgctcgctcctaga

SEQ ID NO: 236756 - DNA, 122 bp, Homo sapiens
ttctattttctccctcgctattgtaattgtaacgccggccgcacatctgctggataaagacggatggaaatggtaatgagtgttctgctgtgaacaggccccttgttcgggatccaggaatg

SEQ ID NO: 236757 - DNA, 122 bp, Homo sapiens
gggtgctaaccaggggcggtgcggcctggtccggggaggagaacatgcctgccgccggaccgcctttgctgctgctcggtacaccaggatctggaaaaacagcgctgctatttgctgcggcc

SEQ ID NO: 236758 - DNA, 122 bp, Homo sapiens
aggaggcggagcggagccgggtgcggtggagcagcagaggccgagcggagccgtgggcggcgggccgggaccccggggccgggccaaggactggcggggcagccgcgagttcacctgacgcg

SEQ ID NO: 236759 - DNA, 122 bp, Homo sapiens
ggggatcctactgctagccccaaattacagactgggaaagtaaggcctgaacatctgggacgcaaacacagtctgcttcactgagtctctactacaagccttctgtgggggctcccagggga

SEQ ID NO: 236760 - DNA, 122 bp, Homo sapiens
gcacgccttcgagatcatccagctgctcacaggcgacaaccctctgcaggtcctggtgaacgccatcatcaacagtggtccccgggaggactccacactcactgggcgagccaggatcgtga

SEQ ID NO: 236761 - DNA, 122 bp, Homo sapiens
cctgtgcctcccgcagtaagtacttaagaaatacttgtgaaacacatgaataaaggttaacgaagggcaaaggaaacaagcctttattgatgatttttctctgtgcccagtaatacttgggt

SEQ ID NO: 236762 - DNA, 122 bp, Homo sapiens
agtgagtgttacagctcttaaggtagtgcgtctggagttgttcgtttctcccagtgggttcgtgatctcgctggcttcaggagtaaagctgtagaccttcgtggtgagtgttacagctcata

SEQ ID NO: 236763 - DNA, 122 bp, Homo sapiens
ctcttcgccaacctggcagctctgttctggtatgcctacctggcctccttggggaagtgacgaccgctgggagaacatcaggtgcactgtggacgtgggtctgggggtctcacccgcccagc

SEQ ID NO: 236764 - DNA, 122 bp, Homo sapiens
ccaccccgggctgaggccttgtgggtcgcctcaaattcaagcctcatgggcccggcctcccgccctaacggtcgctgaagtgtcctgctctcatacgaacttgtgtctaaaactgtggtctt

SEQ ID NO: 236765 - DNA, 122 bp, Homo sapiens
cgcggtgccagctctgctctcttctggtcaccagggggcgccagaagcaatggtgcatcccgaaagggacggcggccacgtgacaggggggtcacgcgcagggtcgtaggggaccgcctggg

SEQ ID NO: 236766 - DNA, 122 bp, Homo sapiens
cggccgaggcgcttacctggtgcgccggacaagcaagcagagggccaggagcagcagggccgcggcgagggccaggcccgggaggcccaaccgctccagcgaaaagcggcccgtggccgcgg

SEQ ID NO: 236767 - DNA, 122 bp, Homo sapiens
ctgcccgagctttcctgagacagagtgcatcgtgcaccatgtccctgggacagcacagagcggagcccccacacagagcggggtccccgcgtgggcctggggtttccccgtgcgggtggagc

SEQ ID NO: 236768 - DNA, 122 bp, Homo sapiens
ggcgcttccttcaggaaggggtgggatctgctcacccgcccgcccggccccctcctgccgcgccggggcccgcccccgacttattctggggtccccgctgctaggccttcggggagagttga

SEQ ID NO: 236769 - DNA, 122 bp, Homo sapiens
agattgcccccaggctggatgcaggcgacagggaggccctggaacattctgcttacagatcgcgaactgtcaaggcccgaggccccgctttgtgacttggacaggctgctcattgtgggctg

SEQ ID NO: 236770 - DNA, 122 bp, Homo sapiens
gggagagaccagttcctcattgcagctggtagcaaggttgctttcactcagccaggaggacgcattgttacaggtgtggaacttgttgctccgagccctcgcctggcagctcactctggatc

SEQ ID NO: 236771 - DNA, 122 bp, Homo sapiens
ctgccttgggtcaggcctcggctcccccacttgccccgtaccttgggccagcgagcccctcgcccaccccgacccggcttctgttgaaatgcccaccttagggcttttatgaggcttgaatg

SEQ ID NO: 236772 - DNA, 122 bp, Homo sapiens
tgaagggctggtcaccgagtaggctctggcttctgccacagcgcacctgtctgccgctgccgcctcagctgctttggcccagccagcttcagatctggtcttggcgagctctcgccaggacc

SEQ ID NO: 236773 - DNA, 122 bp, Homo sapiens
acctcatgatccacctgccttggcctcccaaagtgctgggattacaggcgtgagccactgcgcccggccagttatgactaaatatttgatagttgctgctaggtaaagaaagtacgctgcta

SEQ ID NO: 236774 - DNA, 122 bp, Homo sapiens
tgaccaccggcctgcctgggatgcactcacataccacgggaggagcccattgcacggcgacgcccagctgctccggatgcaggggaggacaggccagtgagggctgagggtagcgaggcttc

SEQ ID NO: 236775 - DNA, 122 bp, Homo sapiens
atgccaggctcagttctcttaggcactgtagttactgcagagatcaagacagttatggcccgcatgttcatggagcttacattctaaagaagggagacatacagaagttaacaaaaataaga

SEQ ID NO: 236776 - DNA, 122 bp, Homo sapiens
tggagcccgggtcctgcctcacctctccggctcccgcctctcgccctggcgaccaccgtccggttagcgacacctgccagccagcgcctgcgcctccgcctccgcctcccgccggaagtccc

SEQ ID NO: 236777 - DNA, 122 bp, Homo sapiens
tatcattaatcagttcctcgaagacagactgcctctgactctacagacagaagcaagcttcggggtctgaaagcaatgaacggactacagattgtggcgaccccagccaccacatacacact

SEQ ID NO: 236778 - DNA, 122 bp, Homo sapiens
cgtgcacttggcgcacaggcagtccttccagcgacagtagcgtttgtggcccttgagggccgacaccacgccatggttgcgacagcgcgcgcacttgggggtccgcgggtacttctcggctg

SEQ ID NO: 236779 - DNA, 122 bp, Homo sapiens
agggtacccgcacttactgatttccatcctggtggcattttgctaatgccccattgtcagcgttggcactcccacccaggcttccaggctcatctgctctcccatatttggggtgaaaggaa

SEQ ID NO: 236780 - DNA, 122 bp, Homo sapiens
ccagtccccgccgcatcgcggggccccggcgtcagcgcgcgccgcgccccgggaccgccccgcgccggcccccaccccagaaccccgcgcccgcctggcccgtgtcctcccgagccggggcg

SEQ ID NO: 236781 - DNA, 122 bp, Homo sapiens
tccgtggccagcttcacggcggcaccaggtggtgacagctgttggcagagctgtgtgcagcgctctgtgcatgcacttacccctcagacttgagaaatggctttgctccaaagtcgtactct

SEQ ID NO: 236782 - DNA, 122 bp, Homo sapiens
aagcctaagatggcagagccagggcagtggtcagtgtttggcacacgacgaagaccagcccgtccaccaggcctggatctgctgaggccttgagccatgacaggaaaacgaacttatttttg

SEQ ID NO: 236783 - DNA, 122 bp, Homo sapiens
agccctcgctccacggctcgcggcagttccttgaagcccacccaggtggggagcccctggcgcagcccaactctctgcagtctcggggaagctgaggcagagagggaagccccgccccgggt

SEQ ID NO: 236784 - DNA, 122 bp, Homo sapiens
gtgggatttgggtggggggtgggagtggtcatgggggtccgggaggccactggggaggtacgcctgtaaaaggagctggagagagaagtctgggatcccctgtggcctgtttgggggcagag

SEQ ID NO: 236785 - DNA, 122 bp, Homo sapiens
cgagacactgggctgcgggtgcctgtcattaagatgggcacagggtgggagggcttccagcggaccctgaaggaagtcgcctacatcctcctctgctgctggtgtatcaaggaactgctgga

SEQ ID NO: 236786 - DNA, 122 bp, Homo sapiens
tccacaacccaagtcctctctacagctatggactatgctgctaaaatgaggcagaagagacgcggtagttgggaccaggaacctctgggtttaaaacctcagctctgggctcagtcattcac

SEQ ID NO: 236787 - DNA, 122 bp, Homo sapiens
aaaagaacaataccgtaatgttttctgagccacgcagatgtcaggggacggatccaagggcgtctgaaagaagacgtccacgctgctgagtgagaccttcctctgtgctgctgagtgagacc

SEQ ID NO: 236788 - DNA, 122 bp, Homo sapiens
tctttcttgtaatgaaactcttcacctttaggagacctgggcagtcctgtcaggcagcagcgattccgacccgccaagtctcggcctccacattaaccataggatgttgactctagaacctg

SEQ ID NO: 236789 - DNA, 122 bp, Homo sapiens
atagaattgtggaaactcgcacggctgccttcttccccgtttggcatgcttgtgacccagcggatgtctccccaagacccctgacagcagctagtctaggttgattctctcatcttatcggt

SEQ ID NO: 236790 - DNA, 122 bp, Homo sapiens
cagcgagctgcggtagcgcaccccgtggcgccctcccggttactcctggccatcgggccgcgctgacttaacatttaggctgcagtttccatgacaggccttgccccggaatcaacgccttc

SEQ ID NO: 236791 - DNA, 122 bp, Homo sapiens
gttagatttgggatttaccatcgtttctactttcattcatttagtggcttccagccctctcgcggcccagtcttaatccatcgcacttcagagggaattacgagggagttgcggactggcgg

SEQ ID NO: 236792 - DNA, 122 bp, Homo sapiens
ttctctgacggctccctctcttgactcttgtcctgcctttgtcccatccttgcccccgaccgatggctgctattgcaaaagtgatccgagttctgaatttcagcagcatttgatcatttcaa

SEQ ID NO: 236793 - DNA, 122 bp, Homo sapiens
caagacagttcccgtccgcgacagaaaagagaatcgcagaatttgtgcgcccgaagtagacgctgggcctaaagttagttggacatgtaaccaggtgaacttgtaaagggccaggaattcat

SEQ ID NO: 236794 - DNA, 122 bp, Homo sapiens
cggattccaggagctcacctgtttctccctctgcatcctcccttctgccccgccctggaccgaagaagaactgagcattttcaaaggtaatgaacacggcccctaggcggcggggtgggacc

SEQ ID NO: 236795 - DNA, 122 bp, Homo sapiens
ttctttgagtcacttgaaaattcagtgcctggtgcacagccagcgcgcctttgatttcttcgcagtaattgggccattgtccgtgtctctcacctctccccagtgcggcctcagagcgtctt

SEQ ID NO: 236796 - DNA, 122 bp, Homo sapiens
tcaaggctcggggcggtaccgacgggctgaatgacaaatggcagatgccgtgggctttgccgcccgcggcagccaagaggatggctgcgccgaggaggccgcgcgcaggcggggctcgggag

SEQ ID NO: 236797 - DNA, 122 bp, Homo sapiens
ctcaccaaggaaggaattggccagctccacccagccagtcccccatagctccgccctcctcggcgggctaagagttaacagctgcacctgttgaggtatacctccagtcgccggcacctgta

SEQ ID NO: 236798 - DNA, 122 bp, Homo sapiens
actgcacctcgagcccgctggaaaatgagcacagcggcttcaggtcatgggaggccccagcggggggaacgtgtgagctgccaggttcatggggagccctgcacttggggctgagctgcctg

SEQ ID NO: 236799 - DNA, 122 bp, Homo sapiens
tgctgtgctagcaatcagcgagactccgagccaggtgtgggatataatctcgtggtgcgccgttttttaagccggtcggaaaagcgcaatattcgggtgggagtgacccgattttccaggtg

SEQ ID NO: 236800 - DNA, 122 bp, Homo sapiens
ctgtgtttaaactccagatcctccactcattagctgtgtgaccccaggcaagtgaattaccgctctgtgactcagtttcctcacctgtaaaatgcggctgaatctacttgagagactgccat

SEQ ID NO: 236801 - DNA, 122 bp, Homo sapiens
gtttgctctgtcagtgccgtaggaggatgcctgttctccacctacctcgccagcagcctgcgctgcccggcttgccagcttctgggcctgcctaccgctgctggatgagatgccacgtcctg

SEQ ID NO: 236802 - DNA, 122 bp, Homo sapiens
aaactcgaatcctctgattagaatcagaggagaactgagaagaacctgccggcggatgcacgagtgggttagaatggaacttctccccacgaaggcagcacaggcttcgatggagctttttt

SEQ ID NO: 236803 - DNA, 122 bp, Homo sapiens
gttccataagctggggttctaggatgtccattcttagttgagtctcatttcctgtcatatcgacgtcaaaggcccaagaccttcctcctccccttgagcaaacaagccacgccctgcaccaa

SEQ ID NO: 236804 - DNA, 122 bp, Homo sapiens
atttttcacgttagaatttgctcagatttgaataaacgcagagcgaaactagagagcgttcgcgcaggttctagctaccttggtcagaaggaggggctgatgcaactttcctcccagtttct

SEQ ID NO: 236805 - DNA, 122 bp, Homo sapiens
taagctggtgcggagggcgcgaggggagaggggtttgagggacaagcgtgccggaatccacgctgtcagtgaacatcactgggctgtaccagtacgtgtgactaccgaagctcgagccccga

SEQ ID NO: 236806 - DNA, 122 bp, Homo sapiens
tcagggctcgggagatgaccgccaacccccgcccccccaagacacgcccccgcgtcccaacgcagccagtcagagcgcgggacacaactacgcgtccctccccgcaccacgagggcgagtcg

SEQ ID NO: 236807 - DNA, 122 bp, Homo sapiens
tcaggcctatgggggtgtccggacagaggggccgggtgcgtgagccttccggggtgcctccgccaggcttgagcattctgttagtccgggcagagagaacatgcttttctaagtcaaaaacc

SEQ ID NO: 236808 - DNA, 122 bp, Homo sapiens
ttccaggcgccgagttcagctgccttcccacaatccctaagattactttgaagtcacagtcgacttcgcgccggggcaggcgattggctgcagaggttagtgggcgggcatcaaggaccatt

SEQ ID NO: 236809 - DNA, 122 bp, Homo sapiens
atcaagcttgtctggcactgccctaaaacccaaaagaagttggttgatgtgcctcaaactcgggtcccattaagtaattccataccaatacttactttctgtggaaggcgtgcttacatggg

SEQ ID NO: 236810 - DNA, 122 bp, Homo sapiens
taataatgggcggcaacggccctgccgccggccgcagcccaggctatataaggaattacacgtacatttcggaccgaggggctcgctttggttcctgcgttatttttaaaacgacttttaag

SEQ ID NO: 236811 - DNA, 122 bp, Homo sapiens
gttgggggattccgccatcccttgttttgaggcgggaacgcaaccctcgaccgcccactgcgctcccacccacacccagagtaataagctgtgattgcaggctgggtcctcaccgtctgctc

SEQ ID NO: 236812 - DNA, 122 bp, Homo sapiens
ttgagcctgtgagtgagagacagagggcatgggtgacacccacctgtggaagatgtgatacgcaggagtcaagaggacaaggccagctttggcccatctgttggcctcattaatgtgtgtca

SEQ ID NO: 236813 - DNA, 122 bp, Homo sapiens
cgtcgtcccttggcgccctgggagagtcgctgacgggtggactgacggaccgcctgaggacggccggccagggcggtgaaagcgccagccctatggcgcgggtcgcgtgaggcggaaggccg

SEQ ID NO: 236814 - DNA, 122 bp, Homo sapiens
attccatggttttggaggctagatattctcctttgcccttgctggcaagcaaaaattatacgatgaagtgataaaatttgaaccacaacctaaagtattgtctttgttcttgatcaaaacaa

SEQ ID NO: 236815 - DNA, 122 bp, Homo sapiens
cccggcggctcggcgcggtcttggtctgggtcggtggggttgggccgggagacccgcggccggcggggtccaggctgggggaggccgccgctgccaccaggtccccgaggtagggtaggaag

SEQ ID NO: 236816 - DNA, 122 bp, Homo sapiens
agtcgccgcagtggtggctacagactgcgcatgtgacccaggggccggcgacgcaggtgccggagagcgaggaggagggcggcgtggaggagggtacttccgggaccggcgggcgcgcgctg

SEQ ID NO: 236817 - DNA, 122 bp, Homo sapiens
gagcagaccccgctgtggtttgaggttcgtttctgcggctgtgggagccccatgctgctgcgtgggaatgtgggtgccaggctgccgccccctgtgctgggtggggctgtggggccaggtgg

SEQ ID NO: 236818 - DNA, 122 bp, Homo sapiens
gctgagttctgccatcacagatgtgggttcggcagagagaccacctggcaatgaggcacacgtgtccggatggagtgtctgtaagggacgtttgctgatgacttgccgaggctatggtagaa

SEQ ID NO: 236819 - DNA, 122 bp, Homo sapiens
ggatttttccgggaggagaggggaagccgcttctcggcttggcgtgggggcagtggtgcgcggctgggaacctcgctgagcccaagcattggtagggagaccccagcggccagtaaggcggc

SEQ ID NO: 236820 - DNA, 122 bp, Homo sapiens
tgtcaaaccacaaaacaaaagagcgctccacagaagctcagcacatcttcatttggtgggcgctggtgccctttccctgtgggcggcgccagctcctttctcggctgcctgcccagctgctg

SEQ ID NO: 236821 - DNA, 122 bp, Homo sapiens
tttcttgccgccgctcccgccggggctggaaacatcttttttcttcttggtgtccataaccgcgcttcccataactctaaccagaagttgattctgcgaaactcctcgggggttcggtcccc

SEQ ID NO: 236822 - DNA, 122 bp, Homo sapiens
gtgagcacggtgcgctggaaactgcgtgcttgggtctgtggcaggctgaatggaggagggcggagggagtccatggctatgtttgtacttgtctgtgagcccggggtcagatgcgctccatg

SEQ ID NO: 236823 - DNA, 122 bp, Homo sapiens
acaaaacagataatctgatttataaagaagtccagaagtgaggagaagtagtggacatcacgtagcgccataacgttgatctatagatgaggaaactcaggtccagccagacacagtaattt

SEQ ID NO: 236824 - DNA, 122 bp, Homo sapiens
aatttacatttatgtacactgaaaggcccattagacagtactttgatttttgcttttaaccgccaagcactttggaagagctgtggggtcgttgtgtgtcctgcgccctcgccgcttagcct

SEQ ID NO: 236825 - DNA, 122 bp, Homo sapiens
ttatactttttttccagagcctgaaattccttatcaaatttggcttctatcttatcgcatcgcttctgcagctttttgagggccaggactcggcatttcaccgaattaggcaggctctcgat

SEQ ID NO: 236826 - DNA, 122 bp, Homo sapiens
gtgctagctttgtggtgtctgggtcggggaagttactgttagaaagttgccgtcagcgggcgttgttccagctttccatggaaattctgggagctgctcctagtttgcggcggagccttcct

SEQ ID NO: 236827 - DNA, 122 bp, Homo sapiens
cacccggcactgtaggagtcacgtgcagcctttctcaggggactgtcattgaaaaggaaacgtttgatgtctgtgtcagctgtctttgtagttaggaaatagatccaataaagccgtatttt

SEQ ID NO: 236828 - DNA, 122 bp, Homo sapiens
ggtgtgcaaggggtaggtcaactgacaggcccggtggcaagacgccgtatcacccaagaccgagtcaaatgcttcagccgaagcggtccccgaacctccggccaaggccatggtcagcagca

SEQ ID NO: 236829 - DNA, 122 bp, Homo sapiens
atgtggagatagttggccagcgacacccaaaaacacttctgagcgtcttgcacctggccccgcgaaccgctcaccacaaaacaaacctgcacctgggcacttccccagccaagaactcgatt

SEQ ID NO: 236830 - DNA, 122 bp, Homo sapiens
agccctgccttcctgacttcatgcctagcccttgggcccactcctttctcatacatgcttcgcaaatatgccagtttatgattaaataactatgccatgagacctatagacaactataaagc

SEQ ID NO: 236831 - DNA, 122 bp, Homo sapiens
acccgagcttttatttcctggtggctcctttaagaggcagagctcagtgctgggaattcacgtcagtttctgcactgaaactctcaagatcaatgagcaaagagctttctcagttctgcctt

SEQ ID NO: 236832 - DNA, 122 bp, Homo sapiens
aactcgggaggcagcagttgcaaaagcaagcctcaggctgctcaccttctaggatggacacgacgatgagcaattggtcggatttggagaccatggttgcggtgagcggtccgggggcgaag

SEQ ID NO: 236833 - DNA, 122 bp, Homo sapiens
gaagagccggggctccttggctaaagggcagcaccgcagtcaggctcagggtatggcggacggcccagccacaggcaggggaggaggcatggtttacatctgagtaaaaccacttaaacatc

SEQ ID NO: 236834 - DNA, 122 bp, Homo sapiens
tgaaaatactttaatgaaaggacaagttacagaggggtgagcgggtattaagggaacaaacgagatgatgaggcactcagagactagctacagaggaggtgttcaagagataaaaggagaac

SEQ ID NO: 236835 - DNA, 122 bp, Homo sapiens
cctcatcgcccgtattagtgcgccgacctggaaagcggccagggagccctgcttgcggcccgcccccgcccgccgccgcgcgctctggccgctccgggagccgcagaggagggggctgcgcg

SEQ ID NO: 236836 - DNA, 122 bp, Homo sapiens
tttaggtcacatttggcagtttaaacataaacctgcttccaaattaactggctttggagacgtctgtgactcgtgggcacaccctgcccctgagtggagaatctcaccatcagcttctccgg

SEQ ID NO: 236837 - DNA, 122 bp, Homo sapiens
ccacctgcccgggtgctcgaggggcgcctgcggggctggggctggggctggggctggggccgggaccgggagcgccgcctcctgggggggctctgatccgcccctccccacgcggcgccgcc

SEQ ID NO: 236838 - DNA, 122 bp, Homo sapiens
gtctcctcttctggaaaatgggcgcgtgggtggggaggcctccaggcctctggtctctcccgctgagcgccctgcccgcgtgcaggtgctgtccgtgccccaccgccgcctggtgtgctgca

SEQ ID NO: 236839 - DNA, 122 bp, Homo sapiens
gccactcgggaagctgaggtgggaggatttttttgagccattgggggatcgaggctgcagcgaaatgagattgcaccagtgcgctccatctggtggcagagtgaaaccctctcaacaacaac

SEQ ID NO: 236840 - DNA, 122 bp, Homo sapiens
acacccccctccctccctccctccctcccaaccaaaagtctgtaaaaaacaaaacattgacgcgggcagtcctactctctagtgtccccttgtggccaagcctggaacatcacatctgtacg

SEQ ID NO: 236841 - DNA, 122 bp, Homo sapiens
accccggagggaggcggggactcccgtcatgtggagagctctaagcacaataggtgggcccgcggacgtgttggacctctccgcgttggtcaagaagggccagagtgacctcagacccgtca

SEQ ID NO: 236842 - DNA, 122 bp, Homo sapiens
gagcccggcccgcggcagcagaatcacccaagactgagatcctgtggcctgagtcggggccggggaaaccaagcctgcaggactccgggagcagccggtttctgcacacaggtaacatagaa

SEQ ID NO: 236843 - DNA, 122 bp, Homo sapiens
ggagcatgtgctcatgttcgccaagctggcgctgtacccctgtgccagcctgctggccttcgcctccacctgcctgctgagcaggttcagtgtgggcatcttccacctcatgcagatcgccg

SEQ ID NO: 236844 - DNA, 122 bp, Homo sapiens
gtggagctggggtgacgagaggggtcggggcggctgggcgtgcgaaggcggccgggcagccgccgcaggggctggggaggaccagggaggagggtaggacatcacggagttgctccagctct

SEQ ID NO: 236845 - DNA, 122 bp, Homo sapiens
cttaccagacatggttagacctggccctctgtctaatactgtctggtaaaaccgtccatccgctgcctgatcaccgttagaggagagagctgcctgccctgcagctcatcagtgcaaagccg

SEQ ID NO: 236846 - DNA, 122 bp, Homo sapiens
aaggcaaaggagcagccgactgtgcccggaatcatcagatacagggggtgcactctcaggcggatggcctgggccaggaaaaggtgggagagacccggagagagaccaacgcagagcgacca

SEQ ID NO: 236847 - DNA, 122 bp, Homo sapiens
gcctcttcccgagaccctctcaggaggccataaagtccccatagtggaacacagtttctacgtgccctattcaacgtggggacattacgctgacagcgcaaaggcagcgggtgagcggaact

SEQ ID NO: 236848 - DNA, 122 bp, Homo sapiens
gatttcagacttagctttctggttgttcatgtttagatctagcatattctgctaatgacacggtctacctccaactcagcatttattctttttgcttagtttggcatcaagtccacggtttc

SEQ ID NO: 236849 - DNA, 122 bp, Homo sapiens
gggtgacaagtctgtcgtaagtgaaacgtttacaggcactacaggaatgacctggtgcctcgcccacttcattagaattctaattggggtgtgtaggagaggattctataaatggtaaggca

SEQ ID NO: 236850 - DNA, 122 bp, Homo sapiens
atggctatatgtttcttcacctctctcagcttctgttttcttgctttcaaaatgggcatacggaaagatgtttataattagacacagtgcttggcacatagcaaatgcccaatctatgggag

SEQ ID NO: 236851 - DNA, 122 bp, Homo sapiens
tttgggaaggcatgtactgggtttttcttcattcactcaacaaatatttattaagtgccacgatgtgccaagtactgccctgggcacttggaaaaaccacaatgaacaaaacacaaaagtcc

SEQ ID NO: 236852 - DNA, 122 bp, Homo sapiens
cttccttagtccagagatcacaaacctctgaattgggatgtgactctctctgtcattaatcggcaagaatcatggtagaattattgtccctacttacggattctctttcccttatacatccc

SEQ ID NO: 236853 - DNA, 122 bp, Homo sapiens
aggcagggagaaaccagaggagaacattctgccattattctaagaacagtgaggaagagacggtgagaagatttaatgttcatgtattactttaagggtcacaagtgcattcacatctgtta

SEQ ID NO: 236854 - DNA, 122 bp, Homo sapiens
agatgacaggaaaggggagcacaagaagcacgggggatgccacacaggagccgtccagggcgcctctccggggcgcgggcagcgtgcgggcacgggggatgccacacaggagccgtccaggg

SEQ ID NO: 236855 - DNA, 122 bp, Homo sapiens
gtaaggtggtagccgtggggtcttccccgagcttcccgctgccatcacctcctgggaagacggatagcaaagaagccgagggtgtcgagttgccccatggtttgtaaaacactggcatgggc

SEQ ID NO: 236856 - DNA, 122 bp, Homo sapiens
gaccccggagatgcaaagacgatggcagcagcgttaacaactaattacagtagcggcgaccgcgccaaggctttccttcaaccctgattccgcagatatccggaaaactcttaccctccctc

SEQ ID NO: 236857 - DNA, 122 bp, Homo sapiens
attgttcaagggcctctttatagcgacagacttcatgctcctcggccccaaaactgcgaacggtctgcagccctccaacggcttcccgcaccacctgccccgccctggccactgcatcctgg

SEQ ID NO: 236858 - DNA, 122 bp, Homo sapiens
aagcagaagacggactgacggggacaggatcggactgatgcccagtgtctcctccaggcccgcgcaagcagaagacggactgatggggacaggattggactgacccccagtgtctcctccag

SEQ ID NO: 236859 - DNA, 122 bp, Homo sapiens
ggaactcctccccagtgaggttcttttgtttccaagtccaaaagaaggggagcagctccccgtgactgtccagttttccccgataataaaggtaaaatctgccaagtatgatgcccttgcca

SEQ ID NO: 236860 - DNA, 122 bp, Homo sapiens
cagtgtcatcttcatccaaatgcatgaatgcaagatccacagcttccctcttccaatgatcgcacagcctgtctcctttaagatgtccttggttatctctgtaaaacttgaccttaagttct

SEQ ID NO: 236861 - DNA, 122 bp, Homo sapiens
ggccaggcccaggaagaagtttactcatccctcacaaatcagcatgtgaaaagcagctgacgacctcaaaggaaaaccacaaagggaatgaattcatcaaagatccctcagccacagcccca

SEQ ID NO: 236862 - DNA, 122 bp, Homo sapiens
agccggggtaccgcggctcctgcgctctctgctccgggtccgtgagcagccccgacatcccgatcccgcacgcctctccgctacagccgcctacccagagggcgcgctacaaatcccaatgc

SEQ ID NO: 236863 - DNA, 122 bp, Homo sapiens
ccctcctccgaccgactgggactgtccctctcgtaccccccggtcttaggagcctccgcacgggggccagcccacctgccggacctcaggcctccggcacccagggcctccacccaggggac

SEQ ID NO: 236864 - DNA, 122 bp, Homo sapiens
gtgatgaaaaacatcagcttcgacttctctctctttcattctttctcttcctccacttcccggtcaaccatgtttgaatccaactgacagtgataaatgaacagtaggattcttgcattttg

SEQ ID NO: 236865 - DNA, 122 bp, Homo sapiens
aaacacggttcagttgctgggagggtggttagcagggatcgctggctctgtccaaggagtcgtgggactggaacaaagaaacaagagtcgccatgccttaacgttggatgcctaacaaaata

SEQ ID NO: 236866 - DNA, 122 bp, Homo sapiens
ccctgcagatccagtgggccatggaaaattggattctactcacgaacctggcctggagggcgggggtgggatgggggcgggttaccgggaaggggcgcgagtgcgtgctgtttagccctgta

SEQ ID NO: 236867 - DNA, 122 bp, Homo sapiens
gcagcagaggaaagtagttaagaacacaggattggtaacgagactcccatggttcaaacacgggctctcacacttactagctatatcatcttaagcaagttcttcatctctgtctcagtttc

SEQ ID NO: 236868 - DNA, 122 bp, Homo sapiens
cggagggacacgctccgtcctcaccgcacacggagggacacgctccgtcctcaccgcacacggagggacccgctccgtcctcatcatcatactgagggtacacatgccttctcatcccatcc

SEQ ID NO: 236869 - DNA, 122 bp, Homo sapiens
tagtattccgaaaggggttaaaagacacctcctgattgtcattttggttttgtttttaagcggtggtgtctgtggatgggcggcccgtgagactccaactctgtgacactgccggacaggtc

SEQ ID NO: 236870 - DNA, 122 bp, Homo sapiens
aatctagccccgggcacttgccttggagtctgagtgatgcgcgtcgttggagcgcgaagccggtctccctagcctccgcccgacacagcgtctccaggggttttcctccttttcgcgcctct

SEQ ID NO: 236871 - DNA, 122 bp, Homo sapiens
cctacatgtaaattcttgattattcttgtccttccgggcagagctgcctcctgagtcatccgtttgactctttcttactgaaggctgagggttggggggtgcatgggtgctccaaacccaga

SEQ ID NO: 236872 - DNA, 122 bp, Homo sapiens
ttagcctcacaacacagttccacagactttcttctcaatgtactctctatactacactgacgtcttctagcagtctaaccattgtttttcttgccctgactccttctcagcattgaataact

SEQ ID NO: 236873 - DNA, 122 bp, Homo sapiens
ggccgcagaactcacgtggcagctgaaccctcccagctccccagccgcctggcaagaccccgcgtattgataggcttccaccgcccgccgggccccgcctcctactgctccattgggtcctt

SEQ ID NO: 236874 - DNA, 122 bp, Homo sapiens
ttgaggatttataaacttccttatatttggaagaaaaagctatggaaccttaacatagtacgtagtagtatgtagtagaaaactgtttataaacttgattctaactatcatttgcttacaga

SEQ ID NO: 236875 - DNA, 122 bp, Homo sapiens
tcccgctcgggaggctctgcagtcgcgcctggggtcagggccgggggcgaatgtggctcgcgttctaggcctccctgggtgagaaagtggtagactggcaggaaggcggcggaggcggacga

SEQ ID NO: 236876 - DNA, 122 bp, Homo sapiens
cagagttgtttactaattagaaaacctggcaggttttgagtccagaggagtggttagtatcgtgtttttctggtagggatctctgttgaaggaactcagggaagtagtgaggagatggctgt

SEQ ID NO: 236877 - DNA, 122 bp, Homo sapiens
accccagctggcctgggtgccctctgcaagccatttgggtcatctcttgtaattatccatcgtatttgtattaataatatcaccactattattaggaacaatttactgcgtcttcaccggca

SEQ ID NO: 236878 - DNA, 122 bp, Homo sapiens
gtggaaaaagcgggtgctttgactcttagctggaagcgtcaacgggaagctactctaaagcgctttcgctttcactctggtcccggacagtgggggctggttaaatcaagaaagggggttgg

SEQ ID NO: 236879 - DNA, 122 bp, Homo sapiens
ccccgcagccgcggaacaggccctcgccgccggggcctcctgcacccggcgcttcccacccgggaccttcccagcctgtgtctcacactctccgagccccagccctgacctgccccttcgga

SEQ ID NO: 236880 - DNA, 122 bp, Homo sapiens
cagggaggcaggggcgaggggctgcggggggagccgggcggagactgcggcttttggtttcgctttctctgtttcccctccctttgtttgttgagggctgggctttccccaccgccacttgg

SEQ ID NO: 236881 - DNA, 122 bp, Homo sapiens
gtagaaaagacaggtgaaatgtgtttgctccatcttacccataacaggcatcttaagccacgaagttctgaggtgaactgttacacagaaatagataactggagtacaatccaactcaagaa

SEQ ID NO: 236882 - DNA, 122 bp, Homo sapiens
tttcactgaacacggtctaaggcagaggtgctagtccagggctgggaggggagacagacacggcctgagagctctcagcaaaattgctgggccctgggacagagggttggggctcagatgcc

SEQ ID NO: 236883 - DNA, 122 bp, Homo sapiens
gaaactaagcagcaaccaagaatatcataagcctacctgtttccgcccggtttcgaaccgcggacctttcgcgtgttaggcgaacgtgataaccactacactacggaaacaccctctttctg

SEQ ID NO: 236884 - DNA, 122 bp, Homo sapiens
aagattcagggagaatgaatcttgaaagataaacactttgtcttttaggaagttcagctccgatagatgtagaatattaacttgttctgtggctacgcattaagtcaggatttcctttcttg

SEQ ID NO: 236885 - DNA, 122 bp, Homo sapiens
gaaaaagcaaaagctcttttctgtcctgtcagtctcctgtctccttttgctctgtctgtgcgctggtaaagtccaggtcctcatccgtccgctgtcctcattctgcggcctcagcaaaaagc

SEQ ID NO: 236886 - DNA, 122 bp, Homo sapiens
cgtgggctggaactttggccagcctgtcggagtgaaggatgcttttccttcaggtcatggcgatcagtctgtcacgggaaggacgctgaccccggcgctccccaggctgcacggtgtccctc

SEQ ID NO: 236887 - DNA, 122 bp, Homo sapiens
aaactctgtctcaaaaagaaaaagaaaagaaaaaagaaaaagtttattcccagtaaaacacgttcaactctccagatcgtggtgacatttccagcttgatgtggtaacgtgattgtgagctt

SEQ ID NO: 236888 - DNA, 122 bp, Homo sapiens
tatgaggagcgcctctgcccggccgccctgtctgggaagtggggggcgcctctgcccggccgctcttactctgggaggtggggagcgcctctgcccggccgcccatcatctgggatgtgagg

SEQ ID NO: 236889 - DNA, 122 bp, Homo sapiens
tctgaaaaagattactgctcagaaaaatcaaattgcttttccaccagcattgcttttcctcgagagcaagaatttctatacatttggttcactgctatatcccagtgcctacaactgtggct

SEQ ID NO: 236890 - DNA, 122 bp, Homo sapiens
cagcttttcagatctactcctgtgcctgcagtttctaagaataatcccttcaaaatatggcgaagaagtatattttggggtggcacacgctggtctcccatagtcacattttgggtgtgtgt

SEQ ID NO: 236891 - DNA, 122 bp, Homo sapiens
tctatggtcgcggggggcaggcaggaagctgctctggccccgttctcgatgctcgggagccgccaaagcccggcagcccctccctggcaggaagcgagggtgcggcgcaatccggagaggac

SEQ ID NO: 236892 - DNA, 122 bp, Homo sapiens
ttcatgctaagagcttcatgccacacagagatggttgtgatcagagctttgtgaagccatcgtcctcacacagtcctgggagtgaaatccagagtgaagcttggcttatccatcagcaaagg

SEQ ID NO: 236893 - DNA, 122 bp, Homo sapiens
tcggagccaggtaaccatggaaacctcgagaaggctggaaacccccggagttcagggacccgcaggcggccagcgaccccctcacccctcagcgcagcggcccccggggggtccgcacgatg

SEQ ID NO: 236894 - DNA, 122 bp, Homo sapiens
gcttcgttcgctctcacgggacacacgcaggtgtgcaaggacaatgcaagtgcacgcacacgtgtgcagacacgtagtggaagcatccactggctcacacctgtaggacacacacacacaca

SEQ ID NO: 236895 - DNA, 122 bp, Homo sapiens
tcaacactgccgtcgtaatcctgaagacatcatagacaatatgtaaatgaatggcatggccgtgttctagtaaaattttatttgcaaaagtaagcagccggttggtccctggttgaggctga

SEQ ID NO: 236896 - DNA, 122 bp, Homo sapiens
tatagggtggaactggccgtttccactccaatgtcccaccctgtggcctggctcccactacgggcagcttctccttggcgggccacggtgaccaggtctaaagtttcaaatgctggagccag

SEQ ID NO: 236897 - DNA, 122 bp, Homo sapiens
cgtgcgccctcttactcggctccccttggtttcctggggtcctgccccttcaagctggggcgggagcggaggaccccgctctcaggggttgccggaccatgcgttgggggctgcgccctcgc

SEQ ID NO: 236898 - DNA, 122 bp, Homo sapiens
aggtcttagcattgtctatggtcccaccaccaacacaccgcaagaaaacaaactccattacgtctaaacagcggcattaaagggctgcggattttaaagaacaaaatcagtccagtggtgga

SEQ ID NO: 236899 - DNA, 122 bp, Homo sapiens
acagcatccgggacatttctctagacagtctgcagggtgcacacagaaagtacacaaatgcggggccgggggagcctccgcgcacacagagacggggcacaggaacgcactcacgtagtcac

SEQ ID NO: 236900 - DNA, 122 bp, Homo sapiens
gttgctccatgcttgctctggaagggcagagtgccgctcacctccttttagccaaagtaacgcgtgcactgaatggagagagaagacattctgggtgcactttggccatgccaaataacagc

SEQ ID NO: 236901 - DNA, 122 bp, Homo sapiens
tccccgctataggatagctctcacgccaatcttggcttcagtgagccaatgagaatgggacgcccctcgtgaggttgccgcccataaacaaaatgcactcttccttctcccctccgcccccc

SEQ ID NO: 236902 - DNA, 122 bp, Homo sapiens
cttgggcgcccggggaggggaaagtgcggcgctgcgggtgccccgggctgcgggaagcgccgctggcttccctagccccactcactgatggagaaggtgccgggctcttcccggacgactct

SEQ ID NO: 236903 - DNA, 122 bp, Homo sapiens
ggtgaggcagctggtttgcgctggagccccagccacgaggaggcccctgcccaacccttccgcctcaaaactaactcttaagatgatcctcgtggctgagagagggtagaatcatcttcaac

SEQ ID NO: 236904 - DNA, 122 bp, Homo sapiens
aactaaccaatcagaatgggcttgcgatagaggatttccgcccagccaatgaactgcctccgaaacaactttttgtggaaatcccttataaaaaacctctcctgcccttgccttacgggatg

SEQ ID NO: 236905 - DNA, 122 bp, Homo sapiens
tgagccccgagggagcgggggacgaggactcgtgctcctcctcggccccgctgtccccgtcgtcctcgccccggtccatggcctcgggctccggctgccctcctggcaagtgtgtgtgcaac

SEQ ID NO: 236906 - DNA, 122 bp, Homo sapiens
tgggccctgtggcagattgagccaccaagttacactgagaagggagaaatggagagcttgcgggtagaggatggtggggagactcattcatacattaaactaccacatacagagtcagatgt

SEQ ID NO: 236907 - DNA, 122 bp, Homo sapiens
gggcactgattgctccagcttctgcgtcactgcgcgagggaagagggaagaggatccaggcgttagacatgtatagacacaaaaacagctggagattgggcttaaaatacccaccaagctcc

SEQ ID NO: 236908 - DNA, 122 bp, Homo sapiens
agcctgggccgctaggggccgcgggcctggcgggcggggcgggggccggggtcgggggtccggcgagctttaatgcgcgcacaaagcctcatttgcaggtcaatgccgcggcacactcgcct

SEQ ID NO: 236909 - DNA, 122 bp, Homo sapiens
cccattctccatttcacttcctttcttgtgaacacaaaagaactttaagtgatctgttcgcggcattgaaatgccaaccttagttggtactttgaaaactcaaagccttttacaagatgaat

SEQ ID NO: 236910 - DNA, 122 bp, Homo sapiens
cagtcacagaaaagctgtgtaagcaattcaggccactccttgatcttttctccccctaaacgcctggcttctgaaagctcatcattgcttcaagggctatttttctgccatcttttgagaga

SEQ ID NO: 236911 - DNA, 122 bp, Homo sapiens
tataccgatgtctacccactaaaattactaaaactatagccaggaatacttgtttggtttcgtgcccctctcctttacaagggaggtagaaagcaaggtggagagacacccaacagtcactt

SEQ ID NO: 236912 - DNA, 122 bp, Homo sapiens
gagggtcgtcctcacattacggagtccaaaagatggtaaacagatttgggaaagtaccagcgatgtgtctcgttaccagctctgaaagggactcgaccctgggtaatcagccaggaagtaaa

SEQ ID NO: 236913 - DNA, 122 bp, Homo sapiens
acccatgacctgctctcaggaagccttccttgactccataggtgcccatggagactcgcccgagggagcagaacttggcagtttttaatttccgttttcccatctggcggtcgcatgcactc

SEQ ID NO: 236914 - DNA, 122 bp, Homo sapiens
accatgatggtgcctgggatgctgtgtggtgcccgtgggcagtggcggaggcagtggccccggctcgttgaaccttgggcactgcccattctgaggcgcccgctgtgcccggctcgttgaac

SEQ ID NO: 236915 - DNA, 122 bp, Homo sapiens
acttggcaaacatcaagatctcccctgactttccactgtggagggtatttaaggagggcccggcgaagtgggggagcagtggggtttccctcaccttccagggaacttggacagtgtccacc

SEQ ID NO: 236916 - DNA, 122 bp, Homo sapiens
gcaaaagtagagggaggcaaagtcagctgctccttagaggagcctggccatggaggtgagcgtgatctaaatgcaggtgcaatggtcaagaaagtgtttgttttgactgattggcttttaat

SEQ ID NO: 236917 - DNA, 122 bp, Homo sapiens
gccggtgatctagcccgggagcccatcttacagcggtgccaagcagaggggcggcagagacggaggggcagcctctttgggactaactcatgaagaacaagggtgctaagcagaagctgaaa

SEQ ID NO: 236918 - DNA, 122 bp, Homo sapiens
gaagccaaacttgggctctccgaaacaggccgggaaagctgaaagcacagtgacctccttcgctctcccaagccgctgggtcgccgctacgcgccgaggcgattagtcagtgaggtccgcac

SEQ ID NO: 236919 - DNA, 122 bp, Homo sapiens
ggcggcccctcccgggctgggtcccgccccgccctgccctgtccttgaatccaaggcgggcgcagtgcgatcgcgctgcccaggcccgcacccgaccattcctccgtctctctggccgcctc

SEQ ID NO: 236920 - DNA, 122 bp, Homo sapiens
gccttctttttccaattagggaagattttacagtgcctctcaaaaggcagtttaattcagcgagaagaagtcttggatcattaccatgtcagctgcctttgactttttgatgaaaatgtcag

SEQ ID NO: 236921 - DNA, 122 bp, Homo sapiens
cctgcctgcagggcctgcaggcccggctgggaggctcagctggccccggggaccgcctgccgggtctgcccgctctcctgcctgcagggcccgccagcctgagctgctcgctgtcctgcctg

SEQ ID NO: 236922 - DNA, 122 bp, Homo sapiens
aggtagcaggagtaaggggcacaagttgtttttttgtggttttcttttgagacagagtttcgctgtgtcatccaggccggaatacagcgatgtgatcttggctcactgcaacctccacatcc

SEQ ID NO: 236923 - DNA, 122 bp, Homo sapiens
tgggggtgcccggcggcgtccgtgtccccccgcaccctccgtcgtcctccctcccaacctcgcgccctccgccggatcacctgctgttgaagagcctccccacgtacttctttttttttttt

SEQ ID NO: 236924 - DNA, 122 bp, Homo sapiens
accgtccggtactcgctggagctgactgctgcccgctttggcttggatgtggaggccgtgcggaccttgctcaattcagggctggagaagctcttccaggcccggaagcatcggcccaagcc

SEQ ID NO: 236925 - DNA, 122 bp, Homo sapiens
tggagacctctgtaacagtcgtgcggagaagacaaagtcagctgcgtgcgtctcctccggcgccggctctgcaaggagggaggagggggcggggccccacaaccaccgcagcctcttaggtt

SEQ ID NO: 236926 - DNA, 122 bp, Homo sapiens
acactgacagaaacttttctggtcaaaaatgaaaggtcctggtaccatcttccccagaaacgatcaagaagggcaatgggttgacagcccagatatggcaggaccagactgcaatgggtaag

SEQ ID NO: 236927 - DNA, 122 bp, Homo sapiens
gcaacctaaattaaaccaagatcccaaaggccttggtcaaatacattagcaaaagccaaacgagagccaggtgtagtggcacatgcctgtagctccagctacttgtgggcaggagatcactt

SEQ ID NO: 236928 - DNA, 122 bp, Homo sapiens
aaacaattaataaagccacagtgggaggtgagagggagggattcaacccccttgcctccacgagttcaagcagttccagggcccctgggcccagccacacccagatggccctgccctggagg

SEQ ID NO: 236929 - DNA, 122 bp, Homo sapiens
tctaacaagactgggcgggttggctgggcgcagtgattcatgcctgtaattacagcacttcggaaggctggaggccaggagttcaagactaggttggcctggtccctactgaaaaaaaaaaa

SEQ ID NO: 236930 - DNA, 122 bp, Homo sapiens
cttcaaagccaccgttgtaatgacaggggcacagggaggccactcccagatgtggttggccgccagcctcaggcgggaactgcaacaggagcctctttcacgaacctggaaacacaaattgg

SEQ ID NO: 236931 - DNA, 122 bp, Homo sapiens
agatccctgatgtttaggacatagactgttctgcccactcccatacccccaagctgtgtgcgtgttgctccaggaacacgagccaaccatgagtttatggaacggtatgtagcagtgctgct

SEQ ID NO: 236932 - DNA, 122 bp, Homo sapiens
tggacccggtccttgtgttcggagaacagagtcacccaggcctcgaacgcctgcgatggtcggcgtctcttccctaggtgacgcaagacgcggagctcggctgcacgacgctggcgcaagcg

SEQ ID NO: 236933 - DNA, 122 bp, Homo sapiens
gctcctccgcctgcaggaaaactcacaactaaggggccaggagaaagcctctcagggtcccgccccttcagtgaggatcctaaatttacatcccgagtgtggccccatcaaagactggagcg

SEQ ID NO: 236934 - DNA, 122 bp, Homo sapiens
tgctctcaagacagttgctcaagtctgacttcgccttccccaaagcgttggtgagaatagcgccatgtctgagatgcagctgtgactgctcacatggcctgcagcctgtgtctgcgtccctg

SEQ ID NO: 236935 - DNA, 122 bp, Homo sapiens
atgattacagagttaagcttcagcagctgaaagcagctcaaaattattgatatcatcatgcgtagcttgcaccaaacatcatctagggaagaagcttcatctttttccaaacaaatgcatgt

SEQ ID NO: 236936 - DNA, 122 bp, Homo sapiens
cctagcaggaaaattctgaatggtttacaacagtgcacataagttgcaggtggctggggccgtgtgtctatttgatgcttcccagaatgtgtgctgctagtcaccatttccaccattcacat

SEQ ID NO: 236937 - DNA, 122 bp, Homo sapiens
cttccctttcttgttacgctgcaggatctcatttgcctctttcaacgtcacacctttcaacgtcagccaccaccagttccatccttggcgtcatcacctcactgatgaaggtggcgtgctcc

SEQ ID NO: 236938 - DNA, 122 bp, Homo sapiens
aatgtcgccaaactgccgtcttccctcctcggccgctgcgacaaacaccccacaaaatggcggcagcgccgtcgccctagaatcccccgagtcgcctctagcaccacctacgccgcgcgaac

SEQ ID NO: 236939 - DNA, 122 bp, Homo sapiens
ggaactctgagaaggtctccactggcatgaactcctcctggaaggttttcagggctttgtcggcagcttcgtagatgggcatgtcgttgtggcggatgtactcagcgagagagcaggaccag

SEQ ID NO: 236940 - DNA, 122 bp, Homo sapiens
gaggcaaccgggatgtggaaactctcgcgggaagatgcgtcgttgcctcggtaaccgcgtcgcagtcgccgaagatggcggggcgaagtctgtgtctcacggtcagttcaactccaggctcc

SEQ ID NO: 236941 - DNA, 122 bp, Homo sapiens
gccggggaatgcagtgggactgaggtctgcatagggaccctcagggagccagcagcggcccgaagcctcccgacgcctcccccttggggcgcatccccgggagccagggggcaccaaggaag

SEQ ID NO: 236942 - DNA, 122 bp, Homo sapiens
ccactgcatctgacagagcgcggagctgggctgctacagccgcaaccccagggaccagtgcgcacgcctgggccgccctccgggagtcacccagcggccgcggacaactgaataaacacccc

SEQ ID NO: 236943 - DNA, 122 bp, Homo sapiens
tctgagacacaactgggaccttcccctcgcctgggccctggggatgcagggacacggggacgcctgcaggttctgctgcactgttggcctggcaccaccagggggagctccgactgagtccg

SEQ ID NO: 236944 - DNA, 122 bp, Homo sapiens
caaactcctgacctcaagtgatccacccacctcagcctcccaaaatgctggaattataggcgtgagccaccttgccagccaagtggctccatttgtttgcaacttctactatataactatta

SEQ ID NO: 236945 - DNA, 122 bp, Homo sapiens
cccgccccggccgctgctttctggttttggtgccccccagggggcggggcatgggaagagcggccgcggtgcaccgcccacgccgggcgctggcgtcacgtccgggcagctggggcccgacc

SEQ ID NO: 236946 - DNA, 122 bp, Homo sapiens
ggggtccctcccatgcaaggggtctctcccatagccaggtatagaatagatacactgctgcggatgaagagggaaatctcattggactaatacattcccctacaccctgcctggaccctctc

SEQ ID NO: 236947 - DNA, 122 bp, Homo sapiens
agatggggtcttgctattaagttacacagtctggtctgcaacacctgggctcaagggatccgcctcagcctcgcaaagtgctgggattacaggcactggcacccagttcaattccttttttt

SEQ ID NO: 236948 - DNA, 122 bp, Homo sapiens
tccctgctggtcttgcccagaccccaggtgggggtggctgggctcctacctgtggccgggcgctgtgtgcccagacagggccgctgccctcccaggctggcctgctcccagggcactgccat

SEQ ID NO: 236949 - DNA, 122 bp, Homo sapiens
actcagaaatggtccccatgatctttgcctcctggtactcatccccttatgtagtctcctcgccatgagtgtgtgtgggaccattgatgctcttctaaccaacaccatatagcaaaagtgtt

SEQ ID NO: 236950 - DNA, 122 bp, Homo sapiens
tcgctcgcttgctcgctcgcccgcccttgcccgctcgctccccgcccgccgcctccctcgcgcgcccgctccggtcctccggctcccactacagctcattccaatatggcatcctctctgtg

SEQ ID NO: 236951 - DNA, 122 bp, Homo sapiens
agagataatttcatttcaggacttgatattaagatttgaaaaagaattcgtactttggcccggcaaggtccaaatttgctcctgttttacaaatacactggtgcaacctaagtatcctttgg

SEQ ID NO: 236952 - DNA, 122 bp, Homo sapiens
cggcggcccctgcagggcagctgaagccatggaagcctccgcaggtgatgacaaggaccccggggatctccgggcccaccgcccagctgcacccgccgcagtccagagtgccgagtgccagg

SEQ ID NO: 236953 - DNA, 122 bp, Homo sapiens
gccgctcctcgtgagtgaggtcgcggccagggagccgggtggacgcgccgggaagctgcacggtccacgctccgtctgcgcggagagccgggcgcgcgtggcccggcccctgcaggcgcgac

SEQ ID NO: 236954 - DNA, 122 bp, Homo sapiens
gtggctcatgcctgtaattccagcactttgggaagccgaggtgggtggatcaccagcagtcgggagtttgagaccagccagaccaacatggactgaccaactaactaaaaatacaaaattag

SEQ ID NO: 236955 - DNA, 122 bp, Homo sapiens
ttcttctgctttaaagaccagccaccagccacccaccatttcccattatcactccagcatcgtagtttgattacagcaggcatcgattgtttgttatgatttccagttgactcattttagtt

SEQ ID NO: 236956 - DNA, 122 bp, Homo sapiens
cgcccctgacgctgccgtccaatgcgcgcctctcgactctgctccgccccgccccgcccccgtcgccctgcctccctggcgtatttgcgccattggtggatattccggaccgtgatggtggc

SEQ ID NO: 236957 - DNA, 122 bp, Homo sapiens
tgtacaggtttgttatatgggtatactacatgatgctgacatttagggtataattgatcccgttacccaggtagtgtccagtggtggggtgagaaaagcagttcttatctcaccttcatata

SEQ ID NO: 236958 - DNA, 122 bp, Homo sapiens
cgtgaggacagccggcagagacagaaatgatgcttggacgctatggtggccaaagcccagcgcggcaggtccttctgagatgtctgcctgccggggcctgcacggccacacagatcaaacaa

SEQ ID NO: 236959 - DNA, 122 bp, Homo sapiens
cctttggagtgtggatgatgtgtttatttgacataatgaataccaccatccgctttgttccgggaaccaaaaggctatgtgcttgcccaaggaatttctcagttgtttatatgtaaggaaac

SEQ ID NO: 236960 - DNA, 122 bp, Homo sapiens
tttgggacggcgcgtcccaagggtttctggaagttgtaacctgtgctccgagtgcgtaggcgcaggaacccttcgggggaatccctttagcagggagcgtatattgaagagtgcgtgcggag

SEQ ID NO: 236961 - DNA, 122 bp, Homo sapiens
ccaggaccagggtcatgactagctaaaggtcaggacccctgtctgtggtcattgtaccctcggtgccagcgtccaggatggcacagggtcaagggcggttacaactgggcagggtccgggtg

SEQ ID NO: 236962 - DNA, 122 bp, Homo sapiens
caaattcgtgctggtggaggacgaggccaagtgcaaggcgaagagcctgagtccggggctcgcctacacgtcgctgctctccagcttcctgcgctcctgcccggacctgctgcccgactggc

SEQ ID NO: 236963 - DNA, 122 bp, Homo sapiens
ggtgctagagagccgcgcacggtcgccgttacgtattggtgtgccgaccaatcagcgccccgcactggttccgcgctcgaccaatcccaagtcttcttggagaactgcgggcgccaccggcg

SEQ ID NO: 236964 - DNA, 122 bp, Homo sapiens
ttccaattccattgccttccactctttttcaacgcagccgcacccacatctcatcctaaacgaccgcagcagcctctgaaactagtctaaacacgcccagatctgccgacgccgcagacccc

SEQ ID NO: 236965 - DNA, 122 bp, Homo sapiens
cactgtgcaaactgctcaggctgccagagtgtcccctgaagggccttcttatagggtaaacgcacctgacagggataactgaagcacgctccaagaatgaccctgtgtggaagacctgaata

SEQ ID NO: 236966 - DNA, 122 bp, Homo sapiens
ccccggctccatctcgcaggcaggaactcagactctgggcaggttccggagaatcacacccgggcgtgcactcacatttacactcaacgctcatgctctatggagcacccaagggctggggc

SEQ ID NO: 236967 - DNA, 122 bp, Homo sapiens
accaaaaacaataaaccttttatgacttaaccaaggaagcacaaattatctccaaagaggcggaaagcaggccttacaagatccaggaccacccccaaagacagttcaaagaaagcaaagtt

SEQ ID NO: 236968 - DNA, 122 bp, Homo sapiens
agctcttcctgccttctctatcatgcgcaggcccctggcagctcgtggttggcaagagcacgaacccgtggtcagatgcaacgtcctgcctcatgcattttcctcttggtgctttggtcaga

SEQ ID NO: 236969 - DNA, 122 bp, Homo sapiens
cgtggcccgacgtccttcaaggacccaagctgggctggagtgagtaggatgctgttggctcggcgggaggtagaacgcacggagcgcacgggaaagtccaccgtggctcgtaaagagccgag

SEQ ID NO: 236970 - DNA, 122 bp, Homo sapiens
ttggggaaaaaagcatacttaattaactaagacttctcattctaggcttgaccctgtgttcgacatcttttgaatttgtagttgcataggctgctctctgacactggttagtgatctggaag

SEQ ID NO: 236971 - DNA, 122 bp, Homo sapiens
agggccctcactgcgctgtctgctattaagcaaagctgctttttctatgtaacttaagtccgtgcccttccgctgcagcagtggcgccgcacatcccccacccctgcggccacttccgtgtt

SEQ ID NO: 236972 - DNA, 122 bp, Homo sapiens
agcatgtccctaaccagagtgccaacgtccgtgccgccgggacccaggcggccgcatctccggaggcttccgaccagggcaaacttaagcaccaaacgcaggcgaaaagagagtgcgcgggg

SEQ ID NO: 236973 - DNA, 122 bp, Homo sapiens
catgattaagtttattgtttagtaaacagtttgcagacattagccaaggaagagttatggcggcagtttacaaataattgcaattgaattaggcagactgcaatgcaaaagcagtgcaaata

SEQ ID NO: 236974 - DNA, 122 bp, Homo sapiens
aacgctgggcagcagctggatacatgcttagccccagccatcccttaaccccttagcagacgggccctcgggattcaactggtgaccccatggcttgtcctggcctagctgaggggtgtgca

SEQ ID NO: 236975 - DNA, 122 bp, Homo sapiens
agcacaacccgctttcactcttcgaatttgtgcttagctcttttcttgtaccttgcgactcgtgaccaacatgctgtgatgtgtgccgagggaggaattggtaagagtgagacggcgaatcc

SEQ ID NO: 236976 - DNA, 122 bp, Homo sapiens
gtgctgccagaagacaagtgtccttccttaccagcagccagctttcttgccagaaggtgtcgtcagtgagggtggaagacctagcggtccacaacccccagtgagtttcagtgatttcccag

SEQ ID NO: 236977 - DNA, 122 bp, Homo sapiens
tcagctcctgctctcgggtgcattgtgggacagagcctagcagggagggagcagaggccgcggcagcctctcgggttctaatctcccacctgccgctcgccctagatcatgacgtcaccctg

SEQ ID NO: 236978 - DNA, 122 bp, Homo sapiens
ggcataggagtaggccagccagcggaacacgtggtcgtcgggggtgggggtgtgttcctgcgtcttccagggggaccgcaccaggtcgtaggggtacgccaccaccagctcgccgccctgca

SEQ ID NO: 236979 - DNA, 122 bp, Homo sapiens
cggaagggagagaagagaattcaaccaaggacacagagctcccatgactacaaactgatacgtttctaagaacatctatgaacatctatgaagaacatctatgaagtctatgaacgtcgact

SEQ ID NO: 236980 - DNA, 122 bp, Homo sapiens
ggtagtggccaatcatctcgggcttgacctccacctggttgaaggtcttgccgttgtggacgcccaccatgctgcccaccacctcgggcaggatgatcacgtccctcaggtgcgtcttcacc

SEQ ID NO: 236981 - DNA, 122 bp, Homo sapiens
gcttgcgttcctagtcatgtcataatccagctcagacctggacatgacctcagcccaggccgtgcccggtccccctactccgtggttcccccgtgggactcgcattccttcatttttatccc

SEQ ID NO: 236982 - DNA, 122 bp, Homo sapiens
gtcgccctggctaggttttagggtcagtgggatcctccttccactggacccgggagaagacgctcaacagccccctccttcccctccttcctctccttcctctccttcccccctccctgcgc

SEQ ID NO: 236983 - DNA, 122 bp, Homo sapiens
tctagaaactccccatagtctcttgcccccatgcaaaactttacccacagaattgggagccggacctctagccttaaaccagcgtgaaaacgctcggccggaaccacaaggaccatgcctct

SEQ ID NO: 236984 - DNA, 122 bp, Homo sapiens
caaggggacaggggacgcagccaggatctgagcacccggcctcagcatgcaggtgtccttcgtttgctcggagcacagcctcaagggccggggccctgaggatcggctgggccgaccggcgg

SEQ ID NO: 236985 - DNA, 122 bp, Homo sapiens
cgcgaagacacttttccctgggcctatacatttcactctgggaatctcacaatgtggcaccgtctcccccagctacttctctggttttcctcgggattgggatcgatcctactgccccagtc

SEQ ID NO: 236986 - DNA, 122 bp, Homo sapiens
gcttcatctgagagacatttggaagcagcatagtttatggtgaagttctggagtctcgctcggtacaagccagtttccaccatttactagctctgtgatactgggcagtcgttagaaagaat

SEQ ID NO: 236987 - DNA, 122 bp, Homo sapiens
tggtgacagccacccctgcgactgcagaaggcgtgagatgggctccgagtggagaggcctcggggagctcaggacaccctgtcacccgcaggtgcggcctctcccccagccctgcgctcacc

SEQ ID NO: 236988 - DNA, 122 bp, Homo sapiens
tacaaaatataagaccctgcaatgtgatatcatacattgttttatggatacattgaaatgcgatacaaacataaaaagctgcatgaaatgaaacccacccaaatcaggatagtggctgtctc

SEQ ID NO: 236989 - DNA, 122 bp, Homo sapiens
ctctgttgagcaaggatgatgacacctcccacccgcacagagccatcacatggaccacatcgtggcgtgtgtgtaaagggcctgcagcattggcacagggtgagcattctaggaaatgtaag

SEQ ID NO: 236990 - DNA, 122 bp, Homo sapiens
ggggcctctccccccagcgaatctgtcttccagccccacaaatggatgcaaaggacgccgcggggcctccagaccaatgctggccgcgctcctgaatccgctccatcctcatgtcaagtcta

SEQ ID NO: 236991 - DNA, 122 bp, Homo sapiens
cctcagacagggtcaccgcataagactgctgagcaaacacaggagggttatcattgatgtcgtctactatgatgtccacaaatacttcagcatgagcgcccgtcaaggagtcagttgcgcgt

SEQ ID NO: 236992 - DNA, 122 bp, Homo sapiens
aaccctcccgtccggtggaaatgcccgctcccggtggaacccaggacacgtcagctctgtcgggagaggacgaggaaagcttgtccacccaaaccccgaccccctctaggacttcctgggga

SEQ ID NO: 236993 - DNA, 122 bp, Homo sapiens
cactggcgcgcccgcagcggcgctctatttttagcaggcgctgtggcaatataaggaatgcgcggcgcgctaggcgctcggggcgcacgctggcggcgcggtcgctttaaggaggcgccggg

SEQ ID NO: 236994 - DNA, 122 bp, Homo sapiens
ccggcgcacgaagccgggtgactgctgtcccgggagtggggacgtcgcgtgcaccgttggcgagtaagtatcctttgaacgctcctctccagaaaggtgcccttgggcatatgagtgtttgt

SEQ ID NO: 236995 - DNA, 122 bp, Homo sapiens
gggctgtactgaaggcctccagctggccccagccagagtggacactgagctccccatggtcgctaagatcctagctctactgtgtgacctcatcgatggcactggtctgttctgtgacccat

SEQ ID NO: 236996 - DNA, 122 bp, Homo sapiens
aacttgtgaccatctatctgtgtcttctttcgccttgcctctctgtgctgttgactgttgcggcatgtctgcggcaaagaaagaccatgctgcagtcagagaaatcagaggacaccacttca

SEQ ID NO: 236997 - DNA, 122 bp, Homo sapiens
ccgatcggatgtgggtcgcgggtggatgggcgggtcttctatgacatcatcactgttcgccgcgaagagggcgcgcgtcatcagatcaagtcgactcgctcctctccttccaggccctggtg

SEQ ID NO: 236998 - DNA, 122 bp, Homo sapiens
gatgagttagcgggttgccatggcaacaggctggccacgtgaccagggtgctgctgccggcgctctgacgtcagctgccagagggcggggccgcaggagggcggggcgcgagcgagagctgg

SEQ ID NO: 236999 - DNA, 122 bp, Homo sapiens
tctgcctggggcagttgaagtaaaggacgcgaggcggcgctgtcaccgcattctgtgaaccgcagcgctctgggtccctcccgctggtctagtatcatttcagtgaacgtcactctacattt

SEQ ID NO: 237000 - DNA, 122 bp, Homo sapiens
tattgcctttttcatgcattcatccaacatgtatttattgcatttctaccctgtgccaagcgctgatgtggaggcagaggctatagcaatgaataaaacagctaaaaattcctgccctcatg

SEQ ID NO: 237001 - DNA, 122 bp, Homo sapiens
ttgtctccgagcttcctgcaatgaaacaacaagcaacgcactgggggcaggaaacggagccgtcagaggaaagcaccccagagacgctgttccccgtctcccgacactggagaaacaggtgg

SEQ ID NO: 237002 - DNA, 122 bp, Homo sapiens
ctgcagagctggggacatcctcctccaagcttcacaaagcaaaccaagtcccttcctgggcggctgctggacagcctggtgggatggaaatgagctgaggtcagtccctgcacttgaatggg

SEQ ID NO: 237003 - DNA, 122 bp, Homo sapiens
aggttggtagagggcggcaagttttctcaaaaccatagatgtcattagagaattgggcttcgactcactgggacacattcagccttaagtttcaggagggccccaacacctgcttcaccacc

SEQ ID NO: 237004 - DNA, 122 bp, Homo sapiens
ctcaatacaatcacctattgtttatcctgagagagttcttccaaaggcagatgaaagcgtcgtggtgtatcttgggcaaagatgataaaaggaggcaaaaatccaaaagtttgaccacctac

SEQ ID NO: 237005 - DNA, 122 bp, Homo sapiens
cagggcccctccactcacggggactttccacattttgctctttttctctgcctcatgtatcgaaataaaagcaaccgcaaacacatgcctcttctggaatgcgtgctctgtctcaaaaccca

SEQ ID NO: 237006 - DNA, 122 bp, Homo sapiens
tgtgaaatctgtataacaggttactactccattgagcaagaaaacacaggaaacaggattcgaagatttaatgttactgctcatactccaaattatagaatgcttaagataattaaattatc

SEQ ID NO: 237007 - DNA, 122 bp, Homo sapiens
gcggcgggctgaagcgctcctcaagcgcggccagaatgggcgccgaggccgaggaggcaccgagagcgagcaaggcctgtgagggctgccagcatgctgtcacctctcgacagagtcacaaa

SEQ ID NO: 237008 - DNA, 122 bp, Homo sapiens
ctcagtttttcttgcaggtttgttctcagaatttaaaaggaagggagcacaaagggagaacgcccttggcacacacggactcgggtggttcttttctaccgtttgctgttgctacttgggtt

SEQ ID NO: 237009 - DNA, 122 bp, Homo sapiens
tgttttccagaaggcgttgcctccactgaggacctttctggaggacgcaagtcataaaaacgtccccacccttgacccagcagttccacttccggcaatttattctaaggaaaccccaggac

SEQ ID NO: 237010 - DNA, 122 bp, Homo sapiens
aattctttcttttgagctgaaatctgccttcagagtcttgcacccaactgttctaccccacggggacctacagaacagcccaaagcctcttacgcaggacaacccatagcagtttgattaaa

SEQ ID NO: 237011 - DNA, 122 bp, Homo sapiens
cagaaaaagtctctaaaaccatgtttttcaagacgccggatattcagcaacgaagcacagcgatgctgaagggacaggaaaggaagaacggcgctgatttccttccctggcgacctcagggg

SEQ ID NO: 237012 - DNA, 122 bp, Homo sapiens
gctgcaggttgccccaccgagggcatttttccgcaccgagggggcggggggcagaatgcacgccagaaaacctaagtgcgctgggtttaaaatagcaacaacaacaaaaattacaaataacc

SEQ ID NO: 237013 - DNA, 122 bp, Homo sapiens
tcccgcagggaacctggctcggggagggcctccgtgagtcatctgctgagttgtcgcaatcgccacccagaggaaatcaggcaccgggcggggcgggttcctggctgcgctcgcgcgctctg

SEQ ID NO: 237014 - DNA, 122 bp, Homo sapiens
aataaggtcagagataaagaaagagggtcagagagtgctcttctgcttttgtggttttctcgatttctttcagccgtaaatactcagtatgcccaggtgtcattgtagaagatgagaatgga

SEQ ID NO: 237015 - DNA, 122 bp, Homo sapiens
gcgagtggtctgcgggcagcagctcccagaggcagccttggaattccagctcggactgggcgggaaggcgcaggcggcccaggtcgccgacacgctcacgcaccctccctgcctggccgcgc

SEQ ID NO: 237016 - DNA, 122 bp, Homo sapiens
tgagagttcctcgaaacagccactttactcaatcatgtttatacccttagtgttaagtgccggaagaatatgtactaaatgaatgaatggactgggctgaagagcaatgatttaccaacact

SEQ ID NO: 237017 - DNA, 122 bp, Homo sapiens
gacctaagacctgcttgcatccctgacatcagggttggcttctcccatcctgatccctcacgcctgcattacgttcttcctcgtgccctgcactgcgccggaaccattcggttctcatcctc

SEQ ID NO: 237018 - DNA, 122 bp, Homo sapiens
gttttgctgtgatggctctggcttattataactatgaagacctccccaagaccatggagacgctccatctggagtactttgaagaagccatgaactacttgctcagtcatcccgaggttagt

SEQ ID NO: 237019 - DNA, 122 bp, Homo sapiens
ctgaggagcggctggtcgtcgagaggacactgaggggagcacgctggcagatgggcacaccgacatacgccagcacactggcaggccacttactggcgggacgaggcgaagtttggcaggcg

SEQ ID NO: 237020 - DNA, 122 bp, Homo sapiens
cttgcccgatggaggcgctggtgggcagagcgcgggcaggcgtgggccaggaggcgggggcggccggaaggggggggccggggccggccgggcctcacgcagctccgccggagagcaggcga

SEQ ID NO: 237021 - DNA, 122 bp, Homo sapiens
gcgacccaagctcaccaagccggattttaaaggccacgataagcccgcgttttcctttatcgtgtgcctttggcgcgtgcgcaccacgtgacccaggagttcattagttccggcttgaggga

SEQ ID NO: 237022 - DNA, 122 bp, Homo sapiens
acacacacacacacacacacacacacacacacacacccttgctgttggacctctccctcgcgaggctccggcttcaggaccacggagagctctggagcaacagcccgcccgcgaagggatgg

SEQ ID NO: 237023 - DNA, 122 bp, Homo sapiens
ggcaaagctcaaccacacacgcggtgggcatcccgagcacctgcccggccgtatgggacccgcctgcaggcaggacacggccacgcagcctcaggtgctcagaacacgccgggaccccgctg

SEQ ID NO: 237024 - DNA, 122 bp, Homo sapiens
aggtcgtcacaggctccggctcatggcatcaagtggcatccatcataaggtctgctggggcgggctccttgaaattagctggggcagagggtggtacttggtactgaaaggggcctgccggg

SEQ ID NO: 237025 - DNA, 122 bp, Homo sapiens
gggggcgcagagccggccggtgcaggggacgcgtggcccgcccctctctgcagcaacccgcgggaggaaatctgcccccagcccagccccagtccctcagaggagccggctcctcgcccctc

SEQ ID NO: 237026 - DNA, 122 bp, Homo sapiens
ggggtctccacctgggattttggggggccataaccagatgccagtgcggcttgtccactgcgggtctgtggctctggactgagccttccgcagagatgaggctggacaaaccccagtggcga

SEQ ID NO: 237027 - DNA, 122 bp, Homo sapiens
gaaaagggaaaaatgggaaagattttatttaaagcccctggtcattcttgcctttccgcccgcccaccacgacccctcaagccagatgccgtctctagttcgggagcgttggatgaggatgc

SEQ ID NO: 237028 - DNA, 122 bp, Homo sapiens
ggcagcctggaaacagcaatgggtacagactgaaaaaccctgttctctttaactgaaggacgaggaaaaagacagcctagcaagccagaaaacttttagaccataactgctgtgctctaacc

SEQ ID NO: 237029 - DNA, 122 bp, Homo sapiens
gatttggccggccccgcctcacttctaatgagaagcttatgctggcctccatgttccactcgtaagtcccccgtctcctgaacggcagcgcttgtaatttgtctaccttttcttaaatcgtc

SEQ ID NO: 237030 - DNA, 122 bp, Homo sapiens
gaccctccagctgtatccacagttcggccaggaacaggctctgccagaggctagggccagcgctacatagtctgtggttaatggaggtgactagggaggggtgagcacaccagctgctctag

SEQ ID NO: 237031 - DNA, 122 bp, Homo sapiens
gaaaccttctaaacttgaaaccttctaaacttgaaaccttccaaactcaccacttggcggcgttgatccatccgcccgcgcacaaagagaagatcgcggaacttcagagttaaggggagccg

SEQ ID NO: 237032 - DNA, 122 bp, Homo sapiens
gattggctggcaacaaattctcttagctttgcgtgtctaaaaaagtctttatcgtgccttcgtttctcagtaacagttttgacactttattcacatacaatgtaatgtacaatccagcagct

SEQ ID NO: 237033 - DNA, 122 bp, Homo sapiens
ctcctcccgccaggcacatgcgcagaatcatcgtggtgcacggctctccctttgcttcttcggttgcagtcctcttgcttcttgcgcgtgcgtgtagcgcttttgcaaagccgcggaggtga

SEQ ID NO: 237034 - DNA, 122 bp, Homo sapiens
ggggaagaggcgcccgggcagtgggcggggcctgggcgtggggcggagtcgaggtcggggcggggaggtaaaggcggggccagggaggtgtggtgggcgtggtctggggcgggaggagacag

SEQ ID NO: 237035 - DNA, 122 bp, Homo sapiens
tcgcgccccgaggcctgctggggctctcggacggccgggcggggacagagggaaagaaaccgctttgcatgttgggagtagtagtttgtgtaatatcgcgagctgtcctttagttgactgct

SEQ ID NO: 237036 - DNA, 122 bp, Homo sapiens
cccgagagtcccctctccctgggcctgcctgggatttcgggtctggggctggcaacctggcgccccccgcgccggcccactcggaccctctccccggctctcccggcttgtgaggattacag

SEQ ID NO: 237037 - DNA, 122 bp, Homo sapiens
ggagcatgtgtccagtcccaggaagtctgtatcctgaaaccacatgtccctgacacatagcggcccggtagggagcacgtgccctgcagggtggccaccctgatacatagcggcccggtggg

SEQ ID NO: 237038 - DNA, 122 bp, Homo sapiens
ggatatgcttcagaagctcccgcatttctcaccttttacaagtataatgacagaactagacgctgtcctctaaaggaagttgccagagttgctctataaagaatcgcttcctagcttgctgt

SEQ ID NO: 237039 - DNA, 122 bp, Homo sapiens
tccataacttgaatggcattggttgttctataattgctgccaaaatcatcacaagctgtacgtcatcaaggctccctttgcactcccaagaagaactgttcattttaaacaaaagtgtatgt

SEQ ID NO: 237040 - DNA, 122 bp, Homo sapiens
ctgcccaaagtgacaggcgcggcctccgccttagtggctggcccggactcactttgtcggcggagggtcaggactggccctgtagtctgctcataggacctggctgtcacccacaggcaatt

SEQ ID NO: 237041 - DNA, 122 bp, Homo sapiens
cttagcaaatgttccatcctcagacctcatgggggacaactttgtttccagtgctgcagtcgggcctgggaaaaaacagaatgggaaaaaacagaagactttttgttgtcgttgttgttact

SEQ ID NO: 237042 - DNA, 122 bp, Homo sapiens
ggtgctccggacgttctctgtgtatggagtcacacctcacgttttgttaggcagaaggtgcgggtgttatgaaacataagtaagctaatgagaataaacaagaatctttttctctagggcct

SEQ ID NO: 237043 - DNA, 122 bp, Homo sapiens
ccctttgtggtcatatgcactctttacaaaactatagtgtgtgctgctggcctcacactgcgctttatgatcaagtgggatatttactgttgtgaaaatttcttcacagcttctcacttctt

SEQ ID NO: 237044 - DNA, 122 bp, Homo sapiens
ggtgtccctcactctgtctgggctggcactgatgacaacaactatcaactcccttgtgatcgctgcaattattgtgacccggaagctgcaccatccagccaattatttaatttgttcccttg

SEQ ID NO: 237045 - DNA, 122 bp, Homo sapiens
gcggcgcagcccaccttgttgctgaagagccgcgagaggctgcgcatgggcggagggggccgcggggcacctcggagcccgcgcacgtcccagaggcgcagggcgccgtcgtgcgaggcggt

SEQ ID NO: 237046 - DNA, 122 bp, Homo sapiens
ggattcaggatggccttgtaggtcagtgttaactgtattctgactgcgtgggattcaggacggccttggtaataatttcggcctccgagttggtccttgagtaaaacactgccctggtctgc

SEQ ID NO: 237047 - DNA, 122 bp, Homo sapiens
aaagaaagtgtcaagtcagggaaaattctgggaaaggggatgtgggattgggggagggcacgagaaggggagggggcccagccctgctttgggcaatccttgctctgaccactcagacaccg

SEQ ID NO: 237048 - DNA, 122 bp, Homo sapiens
ccgtcatttcccgggaagatgggaacccacaagcctgactgtgcttcctaaggatactagcgtgcgcgcagaccttggggggaaagagggcagcgcggtctccccgacccggactcttccct

SEQ ID NO: 237049 - DNA, 122 bp, Homo sapiens
gctccgcccccgacttccccacggaccgtcacttccggtctcccccaaacctgccaccgacggccacttccgtttccccgatagtatttggggatctcgaagcgatacttccggctcccccc

SEQ ID NO: 237050 - DNA, 122 bp, Homo sapiens
atgactcggccgcagccagctgagcatcgctgtccgccgaggaggcggggtcggctgccgcggcgctgtcactgttctacccggctctcctgcgattgggcccagcggtcggtgccccagcg

SEQ ID NO: 237051 - DNA, 122 bp, Homo sapiens
tcctcccattctagctctttaaacttttaatttaatctaggaggaggattctggtgtgagcgttcccagagatcatgcttctcccaagacaggctcacaatgatctgaaatccttctggagg

SEQ ID NO: 237052 - DNA, 122 bp, Homo sapiens
atcttcaaagcattctctttcccacctgtggcaaccacatgggggtgtgctgggtcttggcgcatcctacacaccccagggcccactctcagttccaggagctgtaaagaataggagataag

SEQ ID NO: 237053 - DNA, 122 bp, Homo sapiens
tttgaaaatgagtcctaccgaggcaagatggcaggtgctgcagccaggaaaatacatttccgtgtgttttaatatttattttcactcactacaactctttcgtggagggagcggaatttaaa

SEQ ID NO: 237054 - DNA, 122 bp, Homo sapiens
tttcttctaaggactgattctcaccccggctttggctctcctaattttagagggtaggtacgggtctccagatatactgcctaccacgctttgctcacccctccaaccggcctcggtgttcc

SEQ ID NO: 237055 - DNA, 122 bp, Homo sapiens
cctgctgaatgggctgagttgcggtgcacgtgaagacctgtggcaaggaggatgccatctcgaacatcaatggatcggtgtgagaaggaggcaatgaggagttcattccagcctgggtgggg

SEQ ID NO: 237056 - DNA, 122 bp, Homo sapiens
tctgtgtagcagaggtaactttgcattcaccaacacccatatcctattcttcctgattcacggctacatctgagtcctttatgtgtggttagtgaatgtggaagtgctgtacacaattccag

SEQ ID NO: 237057 - DNA, 122 bp, Homo sapiens
ttctcccagtcagcctggggtcctcccgggtccccgtggcacctgcccttgcctggcccacgagtaggtgctctgagcgctgcccaggtcacatgtgagctccctggaggcgctgcacacgg

SEQ ID NO: 237058 - DNA, 122 bp, Homo sapiens
ggggacggaggagggagcgggagtcgagcgagagcctgtggaggagtccgcctgctgtagcgtgcgtaagcaaggcagctacgccgggcggctacgctgcggaatcggcgtaggcgcctttg

SEQ ID NO: 237059 - DNA, 122 bp, Homo sapiens
ccgaggggggagttgggggggatctggcagtcccagccctgcaggaagtgtttgtgcatccgccccggcggaacctggctcccaatccccgactgtgagaccgcctgttcttccttccagtc

SEQ ID NO: 237060 - DNA, 122 bp, Homo sapiens
agtgatttgtccatgctgactcagctgctgggatagcactcttactctaattatctacttcgtaggtattatctgccccctagatagtgagctccgtggggctagggggagacagcaatgtt

SEQ ID NO: 237061 - DNA, 122 bp, Homo sapiens
ggtgttgaatggtccccgaggcggcgagggcccggcgttgcttctggggacgccctcctccgtctgtacttactcagaggaggggccccacgcccagaggcgcccgcagtgacctgaaccgc

SEQ ID NO: 237062 - DNA, 122 bp, Homo sapiens
gttttattagtaatacattccactttctgacagttctccacacagcaaggctctttcttacggaagccaatgtagacttctctgcaatttattctatcagatttctgtcctcagaagtgcac

SEQ ID NO: 237063 - DNA, 122 bp, Homo sapiens
caggagaggaatcaacgtctggaagaacctctttttcctgagatggacattcagggaaaccgagggtggagagaagtgcattccttgcttgtgcattcctggctgggatgcctgattctctg

SEQ ID NO: 237064 - DNA, 122 bp, Homo sapiens
cgccagttcccactgtgctcctatttctgtgtctggcgcactccccatgactcgcccccacgaggctgtgcaaatgctgttccctctgcctggaacaccattccctctgttcttctctaatt

SEQ ID NO: 237065 - DNA, 122 bp, Homo sapiens
gcacagttggtatgtttttgcttgctgtatagctttgtttctacatacagcttcctgtgacggttcacaagtaaaagttggtaggtagagaaacttctctaacagacaccagattaaaatac

SEQ ID NO: 237066 - DNA, 122 bp, Homo sapiens
ggggcgcacgcgcggggatggcgcagggctagggctgcgccgggacgccccggggggctccggacccaggacccgccccctgggcgcatttgcatatgcatactccttcctagttaggtcgg

SEQ ID NO: 237067 - DNA, 122 bp, Homo sapiens
acagcctggctttgggtacagcatgtgagatgaagcgctgatcctgtagtcacctattttcgtactgaaacatcgtctttacccacttctcagtttataatgggggaaaacaggcaacgtgt

SEQ ID NO: 237068 - DNA, 122 bp, Homo sapiens
gccccttcctagctcctcgtgacccccgagctccagaggtcaatgtccccatcccagacgcgacttcacggtcacgatgaccgtgtcacatttgcgaccgcaggcatctgccctgcctgggg

SEQ ID NO: 237069 - DNA, 122 bp, Homo sapiens
ggcacgttacgccggtggaggaagccgcgggatgccccccccaggccacccgagagaacgcgtcattcagggctctccctggcctccgaggggcctgttcgtgggaccctaggatcggtgcc

SEQ ID NO: 237070 - DNA, 122 bp, Homo sapiens
ggcggctctcaggctggcgcgctccgtgctgctggggctttgaggtggtcgccgggggtccgggggaccctttccccgccgcggaagccctagaggatgaatcggggaccctgctaaggtct

SEQ ID NO: 237071 - DNA, 122 bp, Homo sapiens
ggggagggcgcttcgctttgttgcttattcataaggccgcggctacggccggggattgggcggtgagtaggtgtgcccgccctggctctgctggcactgacagccgacgccgtcgcccacgc

SEQ ID NO: 237072 - DNA, 122 bp, Homo sapiens
cacatgaagcatttgtcattctctgtaagtacacattggaggagacattgctgctaattccgtattgaagtgggtaataccaccaatgaccaagtaacctcggcaaagcagagacagctaga

SEQ ID NO: 237073 - DNA, 122 bp, Homo sapiens
ctaataagattatgtcacgaacacaagtacctaggatggtgctgagtgacagggctctgtcgtttaatcagaggctgtgccgctcaaaccgcggggccctttgtcccacggagtgaacgacg

SEQ ID NO: 237074 - DNA, 122 bp, Homo sapiens
tttctttcgagtctttttcaaaactgtttttctcacacacaccttgcttcatctctctcccgtactgttgggtttccgttactgttgttgttaatttctgatattcctgaggtgtcctgtgc

SEQ ID NO: 237075 - DNA, 122 bp, Homo sapiens
gcccacacacgaaccgcgcacgcgcgcgttcgccgcgcccccctccctccccgcgcgccccgcctcgcccctctggagctggccgctgttcccagtgtctcgcccacccccgccgggcccgt

SEQ ID NO: 237076 - DNA, 122 bp, Homo sapiens
ctgctctcccatccccttgaggggcaagaatgatttttaattttttaccgtgtaaatacacgagattaacttagagagttggatttttggctagtaaagcagcaagaatataggtgtgtggg

SEQ ID NO: 237077 - DNA, 122 bp, Homo sapiens
tttggagatttcacaaataacagtcatatgagcggtctttgcctggacattatcggttaccgtggagccgcctggcattcctgggtgctcggggctcattctcatgattaagctcaagctct

SEQ ID NO: 237078 - DNA, 122 bp, Homo sapiens
acgcagcctagaaggtccctttggaggactttgcagtcgggagcagtgagcatgcgcagacgccagagggcgctcctggccaggggctgagcaagcccggaggggacagggcggagcctgcg

SEQ ID NO: 237079 - DNA, 122 bp, Homo sapiens
ggcgcccccagagcccatcgccccaaagtcctgcagccaggacgctgtcaccagggccggcgcctctcagttcccactccgcgactccctggccagagcccaggagcagccgggcccaggcc

SEQ ID NO: 237080 - DNA, 122 bp, Homo sapiens
gggaaaccagccgtttactatagttctgaattcaatgccaagttccttctctcaactcaccgggagtgtccagcagagggagtctcaaggaggtacttaataaagagaaaattgtttcattt

SEQ ID NO: 237081 - DNA, 122 bp, Homo sapiens
tgacattgcaaaaacagagaggctatctccttgaggatttaagcgaaggaggctaagactcgtgctaatatgcaccttataaacagtcttgaataggcaaagtgatcagtttttaaaataag

SEQ ID NO: 237082 - DNA, 122 bp, Homo sapiens
cgcgggccccacacgctcccggcgggattgcgagcgggacattcccaaccctctggaaggcgctcagccgcctccgctgtagctgggccctggcccctggccccggctccttcccccaaatt

SEQ ID NO: 237083 - DNA, 122 bp, Homo sapiens
cgcctaagagccgcagggacccacgctgtctgcgctggctccacccgggaacccgccgcacgctgtgttctaggcccgcccaccccaaccttctggtggggagaaataaacggtttagagac

SEQ ID NO: 237084 - DNA, 122 bp, Homo sapiens
ttgggaagtgggcaggagacagcccagggtcggggaggcggaggctgtcctgagcaggggcgcagagtccgggctcctgggggccatgccactggctgggctgtctgaacagcagagtggac

SEQ ID NO: 237085 - DNA, 122 bp, Homo sapiens
ggccatgaagaaataacggtctcagtaacctccatgctcgggatacgactcccgggaagacgtgggtgggtgcggggaatgcggactgatccctcccagcggccgttgggggctggcccaca

SEQ ID NO: 237086 - DNA, 122 bp, Homo sapiens
ctctgctcctcacctgtgatgctggagccctcgccagagcaaccgaacccggatcctctacgctaatagctcccaagccccagctcacctagactctgtccccggttcaaaccctagcccct

SEQ ID NO: 237087 - DNA, 122 bp, Homo sapiens
tcccagttttttgcagtcaaaatgaatttctttcccttggtataacgtgtgtgtgcaaaacgtggttgcatggattctttttcaaggagagagctgagcatgttcataggctgaaaggaaag

SEQ ID NO: 237088 - DNA, 122 bp, Homo sapiens
gcggctgcgtagctgagtctattaataaagaagcagagaacgaggcctcccggggagctccgggcctgagcctcagttccctggggccaaaaacgtctccatgtctgcctctgaaactagag

SEQ ID NO: 237089 - DNA, 122 bp, Homo sapiens
ttcaaaggtcttctaggaaccagtcagcgattagaggccgagtcttcggccacccaaaggcggagtaagaaaccagaagcggatctgattggttgctggaagacgccgcgcccacctcacag

SEQ ID NO: 237090 - DNA, 122 bp, Homo sapiens
ttcctgaaacttactctgtccgtggtgctgaaacattgtaccgagacccgcccagacgggcgctgtcagccgctgaaaaaaaaaatcttccccgaggctgcccaaatcagaactgtgtatct

SEQ ID NO: 237091 - DNA, 122 bp, Homo sapiens
ttgtggcaccctccattctctttgaccacaacaacgcggtgatgaccgatgggctggaagcgcctggtgctggagaccggccaggtcgggcagcggtggccaggagcgctatgatgcaggtg

SEQ ID NO: 237092 - DNA, 122 bp, Homo sapiens
acttcggccccggtcccacgcggctcctttactgcagacttcgcggactacggagccagacgggtggctggacctgctctgggccctggaggattaagaaaagatgttttcaaggtttcagt

SEQ ID NO: 237093 - DNA, 122 bp, Homo sapiens
aaaaggagaaagtggcagggtgacataggagctccggagactgctcttggtccagtttcacgagcttgctttcctagatcaacgaggagaaagtagcaaaggaaataagatgagcagcgtgt

SEQ ID NO: 237094 - DNA, 122 bp, Homo sapiens
ctttgtctcatgaaatacagttagtacaacactccctccccccggccctgcctggtagcacgtgatagggatcagctctctgcaatttgacttgaatagctcaggacctgaactggtacgtt

SEQ ID NO: 237095 - DNA, 122 bp, Homo sapiens
gggagacagaaggttttgtgccctgctgtatcataaagcacacacttagcgctctggagccggacggtggctccaccacttccgcaggcctggaaacttccttctccggaggaccttttact

SEQ ID NO: 237096 - DNA, 122 bp, Homo sapiens
ctgcagcatgaagatggccggtgtcttcagaaggggtctcacctttcctgtcgctgaaatcggggtggctattttatacagaaaaccagccaccggcaatgcttgtctaagtgtgaagcttt

SEQ ID NO: 237097 - DNA, 122 bp, Homo sapiens
ctccattttgcagactggaaagctgagacccctagccaggcagggcgttgtcaaagttcacgcacagagtcagtggcagagcctgggcaaccctctgcccaggccccaccggtctcagctct

SEQ ID NO: 237098 - DNA, 122 bp, Homo sapiens
cggcagctgtttggtcactggcactggcctccactgagagggacatgggtagggaggacacgtcttttgcaaggaaagacagtaaactgagatttggagcccagggaaaggtatctaactta

SEQ ID NO: 237099 - DNA, 122 bp, Homo sapiens
agccgctgacgtgttctcctcgtcctccttctcctcccgcttgatctcgctggcggccgccgtggcacctgctcgccctagccctgcaacaggcctagggtcaggggcctgcgtcggcctcc

SEQ ID NO: 237100 - DNA, 122 bp, Homo sapiens
aaggaccgagattctggggcctctgggctcctttactccagattctagacccggctttcgcgctaccaggccttggataagacactaggccctgtgcctggacactgcacctccccaggcct

SEQ ID NO: 237101 - DNA, 122 bp, Homo sapiens
gcctggggtccctggttgcttacagccacgtgtacttctctttttaccctccgcgggaagcgagggaaggttttaaagagaccgcagctcccggagtccatttcaaactgttttcttatttg

SEQ ID NO: 237102 - DNA, 122 bp, Homo sapiens
tcctgggaaagtgtctggttctcggagaatccttggggcggggtaaaggggcgcgcctggcgcaaaatggttaatacaaagtctgcgcgcgccgcggggccccttgtatgaaaagtgtgcgc

SEQ ID NO: 237103 - DNA, 122 bp, Homo sapiens
aaactatttttggcatgcagaaaagtcgctacaggactaaattagagtcggcgcctgaaacgcagcccgcgttcacagatcccgaaaatgttgaatccgactcgcttcagaacacaggaggc

SEQ ID NO: 237104 - DNA, 122 bp, Homo sapiens
tccgtctgccaggcccacatggtaggcaggcacgcagtgtctcgaagcagtcggcgcacacggttacccttaatgggactgcgctgcctgactcatatgctctgaatctgtcagggccttgt

SEQ ID NO: 237105 - DNA, 122 bp, Homo sapiens
gctggaatgaggcgaacatgtctttgagcccagcagggaggaatcctccagcctattcctcgctggtgcatcaggtcgttggcgggccctgacacacaagtaaggcatgctcttgttcctca

SEQ ID NO: 237106 - DNA, 122 bp, Homo sapiens
cgaagggctggtcggtgccaacgtgcagccaggaggagccctggggatagcaaggaggggcgctgaggtcaccagggcccccacccccagggccccacctccaggaccagcagaaatgggcc

SEQ ID NO: 237107 - DNA, 122 bp, Homo sapiens
agatccccactacaacacttttgacggtcggacatttaactttcaggggacgtgtcagtacgttttgacaaaagactgctcctcccctgcctcgcccttccaggtgctggtgaagaacgacg

SEQ ID NO: 237108 - DNA, 122 bp, Homo sapiens
tcactgccctgcaagcggtgcctcgggggtctggacatacctgggacatgagcctgggggcgctgcgggaccgcgcctcccctcccctccccgcagctggcggccttcgcgggccgaggaat

SEQ ID NO: 237109 - DNA, 122 bp, Homo sapiens
ccagagaccccggctactactccacgtctcccaccttcccgcacccctgccccctagctgcgccctggggtggttacagcaggaagtcccaactctggggtcagaattggcctcaatgacgg

SEQ ID NO: 237110 - DNA, 122 bp, Homo sapiens
cggttatcaaggaataatctcttcagctagcaacaaatgcataactcgatcgcttatatgcgacatgatagggcgttccctaggcaaaatatcaaagatacagggagatgccttttaggccg

SEQ ID NO: 237111 - DNA, 122 bp, Homo sapiens
ttcgctgccctcccggtctcatgaagccgctggtcgtgtttgtccacggcggtcccggcgcgctggcatccttgagaaagatggctacacacacctttctgcaggagagttacttcatgatg

SEQ ID NO: 237112 - DNA, 122 bp, Homo sapiens
tcattcattccgcacgcattcattgaaccggcgacctgggccaggctccttcccaggctccggcatggagcagtgaccaagatcaagtggctccctgagctgatggcgctgcaggggagaga

SEQ ID NO: 237113 - DNA, 122 bp, Homo sapiens
cagagagagagagagagagggagggagagagagagagagagagagagagagagagagagacgaaatagaagctacgaagaagttttctctagacgaacccttctccattcctgagcccagga

SEQ ID NO: 237114 - DNA, 122 bp, Homo sapiens
ccctgtagagccccctggaggtgtagtttcagctcttggtgaggcgcgggcagcaggcagcggggctggagttccttcacagcacgtggatgcatctcccacagcccccatgtgcgtctgca

SEQ ID NO: 237115 - DNA, 122 bp, Homo sapiens
tggatgggcatcggaccaatggcgggctgcgaaacgggaggggcgggcctcacagcggggcggggcgcgcctgtgccgtgtcgcgtgccgagccgcgagccccaggcaggccaggtaacggc

SEQ ID NO: 237116 - DNA, 122 bp, Homo sapiens
ctgtacatactccacagaggacatccaagtgcatgtaagaaaaatgctcctttgggaatacgtggacatattcctttggaaatacactgacaaacctacatacgtgtttaaggtgccttcaa

SEQ ID NO: 237117 - DNA, 122 bp, Homo sapiens
gcccgccaggcgctctacgccgagctccagacgcagctcgataactgccccgagtcagtgcgggaacagttacaggagcagctgagaagggtcagttccaccgccccccctcccccggcccc

SEQ ID NO: 237118 - DNA, 122 bp, Homo sapiens
aagtcgtcatcgacgccgcgccgcttcccccacctcgcaccagacctctgaaattgccctcggagactcggcctctcctataaggacgatcgtcctctcagctggagaacaaggccatgcct

SEQ ID NO: 237119 - DNA, 122 bp, Homo sapiens
cggaacagagcagttgttgtcccagaggatatatcgcatccggtcccagctcattggctccgcggggctacattcactcacactccagcgcccgccagcgctccgagccgcaggaggcattc

SEQ ID NO: 237120 - DNA, 122 bp, Homo sapiens
ggtggctggaagcggaggagcgcaggctgtgtaggagttccccgagcactgggaagggcccggagaggaaagaggtccttccaagcggaggaaacaacgtgaccgacggaagaggcagggtt

SEQ ID NO: 237121 - DNA, 122 bp, Homo sapiens
gccgtcggggccgagtcccgattcgctcccaccccgaagccgcgccaggaccaacgagggcgcagccgtatgccccagcccgctccgcggagcccctcacagccacccccgccccgaccgcg

SEQ ID NO: 237122 - DNA, 122 bp, Homo sapiens
cggtatcaaattccaccagggaggccgtcttggaggctggggcacctcggggaaggacgccggcatcagcaccattctggggtacggggatggatggtcgaccagttggaaagtaattgttt

SEQ ID NO: 237123 - DNA, 122 bp, Homo sapiens
aattttatctcaaggttaactagataacctctctttttaaatacctgatcagttcacagacgactttggccccttctcatataatacatgacttccttttacacaataatgagaatgtgggt

SEQ ID NO: 237124 - DNA, 122 bp, Homo sapiens
ggtggtggcttttgggcaaggacaggtcaattcataaaagatgacgccccaggtctggatcgaattctcctgggagccagaccaaagcaccttcctggactgcaaagtgtggaagccgccgc

SEQ ID NO: 237125 - DNA, 122 bp, Homo sapiens
acacggacagcgtggccctcacagttcggcgcacatgtccacagatgtgtggcttgcctgcgccacagagaatgcacgcttctggtgtgagaatgaggctgtgtgtgacgtgtgaatgctcg

SEQ ID NO: 237126 - DNA, 122 bp, Homo sapiens
ctgagcccctgcgtcagcctctccccctatactcaagctttctggttccagctgggccagcgtgtgggggtgttgggggagtgagggggccaggggctgccctcccctcaccccagctcagc

SEQ ID NO: 237127 - DNA, 122 bp, Homo sapiens
ccgcgcgggaacccttgggggccggggctgcaggcagctgggaaccgcgggcgctaggcgcgcgcacccagcactcggtcccagccgataaatctggggcagcgcgcggtaggagctgcggg

SEQ ID NO: 237128 - DNA, 122 bp, Homo sapiens
ccttctccccgattaatcagcggctacagccgtcgctttgatccccgaaatcaaaccctccgtctgatgggtgacttgatgttatgctaatccaagctgattgagctgagataattacactt

SEQ ID NO: 237129 - DNA, 122 bp, Homo sapiens
acgccgccagccggggctccagggtccaccgcccgggcccggaggactggcgactccctccgaggttgggagcgctccggatttctccaacttcaggtcggtccccacccaccgggccacgt

SEQ ID NO: 237130 - DNA, 122 bp, Homo sapiens
ccgcgggagcagcggctccctggctggagggagaccatgaaatgtgttcgaagaagctgacgcagtttgtgacgctcgcggcttcctgatggggaccggcagcagcggcgcctccgccgagg

SEQ ID NO: 237131 - DNA, 122 bp, Homo sapiens
ttcaacaggcttgtgagcaaaacatttgtacgtatttactaccataatcaaattatctgacgcaaaaagaattttatgctacagtcgcaaacttatcctggaaagaaagaatcactggttca

SEQ ID NO: 237132 - DNA, 122 bp, Homo sapiens
cccacccacatatgatagacagcccctctgttgagatatggaggggacagatactggaatcgggggtgggacttgcagttacttaaaattttttaataaactgtgccctgaaacctaaactg

SEQ ID NO: 237133 - DNA, 122 bp, Homo sapiens
cgccccaggtacgggatggggacccctgggctctgctttcccttctgccactggtttgcccgactggggctgaagatgaaaccctgctcctagctctacattcctttcctcagccaagtaac

SEQ ID NO: 237134 - DNA, 122 bp, Homo sapiens
ctcagtacctcattcaaaagcacttccttactcccacggaaaagaagtaatcccagaatgcgccgctccacgccggtctctatgcagtgcattctgggagatgtagtctttttttttttttt

SEQ ID NO: 237135 - DNA, 122 bp, Homo sapiens
gcagcagccatcacctacctgcgcccctgctccaggacaaccgcgccagccgctcaaccacgctcccgagcatgagccctgcagcaaaacaagcctttatagcggcatcggccgccacaccg

SEQ ID NO: 237136 - DNA, 122 bp, Homo sapiens
tccttgccagccaggctcacgggctccctgttgggtcgacaaaggtgagtccttctcaggcggccttacctgctggcccacctgtactctggctttctgaaaaggtttatgtcccatttagc

SEQ ID NO: 237137 - DNA, 122 bp, Homo sapiens
ctccggggaatgaggagagctcctcttgggatcattgagtgtgatccttgcacacgcactcgtagatggtggaaagagctcaggactcagacagatgcaagttctaatcttggcgggccatg

SEQ ID NO: 237138 - DNA, 122 bp, Homo sapiens
cagacctccttctcctaccccactggagtgcctagaagccaatggtgcacagtgatgatacgaatgtcaatctttgctcggtcagtgaggatgtcgcctgttgagggaaaaatagtagctgt

SEQ ID NO: 237139 - DNA, 122 bp, Homo sapiens
caacgcgcagctggatgggatcatttcggacttcgaaggtgggtgctgggctggctgctgcggccgcggacgtgctggagaggaccctgcgggtgggcctggcgcgggacgggggtgcgctg

SEQ ID NO: 237140 - DNA, 122 bp, Homo sapiens
cgcgaactgggtgtgtctccacgggtcccgccatctcctgccggggctggaggcccgggccgggaaggaaggtaagggctgctagagtcaactttgttcagagccttggaggtttttttttt

SEQ ID NO: 237141 - DNA, 122 bp, Homo sapiens
aggggagacgtggtgagctgggggcgtcccatcacaccatggcgttggtcaagactcttccgtgaagtgccacttaaaagcacaatgtcacgccactgtgtgcctgtcagaatggctaaaat

SEQ ID NO: 237142 - DNA, 122 bp, Homo sapiens
ccaggtaagacggtcaggaactgctctagcaccaacagttctacaatctgctccttggtgcgcacctccggccttagccaccgacagcaaagttcccagagttggctgaaagcctcccgcgg

SEQ ID NO: 237143 - DNA, 122 bp, Homo sapiens
cagtatgatcctatgaggtgggcaaggcccaactgaggaaatggagacctagagacaaagcgaggtcactcaactggagatcactcagcaggggaccaggctggcacagaaaacccaaatac

SEQ ID NO: 237144 - DNA, 122 bp, Homo sapiens
aaaactccccaaactgaaacaactcagatttctccctgcttgttaagaagtgaagcccggcgccggatgtggtggctcacacctgtaatcccagcactttgggaggccgaggagggtggatc

SEQ ID NO: 237145 - DNA, 122 bp, Homo sapiens
ttccccgcagggagaccgaggcacgcagggtcgaaaggactcgtccagggtcgcaggagccgaccacacagggaggcgcagcgcccccggcgggaacagtcagcgggtccagcctggcggac

SEQ ID NO: 237146 - DNA, 122 bp, Homo sapiens
ggtctgactctcaagcacttgcctttttctaacaaactcaccaccagctccttttctgtccgagctgagattctgaagacttagcagatgctgtcaacacttgaaattgtttttttcaagtg

SEQ ID NO: 237147 - DNA, 122 bp, Homo sapiens
aataactgctcccttttcttctctctcaggtgtgacgtatgcagccaaaggctactttgacgccctggtgaagatgggggagctggccagcgagagccagggctccaaagaactcggtgaga

SEQ ID NO: 237148 - DNA, 122 bp, Homo sapiens
atatattgttccacagatttcagatgctccatttcattttttcattctttttcctgaatgcgtttctttttttataatttctattgacctgtcttcagattcactgattctttcctgtgctg

SEQ ID NO: 237149 - DNA, 122 bp, Homo sapiens
gaggcggtcacggaaaaagaaagggaaagtgcgtgggaagaaggaaggagtaagaaaacacgcacagctcacatgagaatggtaaggacaaggaaatttatacgcgaagcctggaagcgccc

SEQ ID NO: 237150 - DNA, 122 bp, Homo sapiens
aagccggccgacggagtttttaaagtgggctgccggccgcgggagctttacactcgcgagcggaccgccacacgggtccggtgcccgctgcgcttccgccccagcgctcctgaggcggccgt

SEQ ID NO: 237151 - DNA, 122 bp, Homo sapiens
aagggcggtgcaagtccccggggtggcggactcgacctggcctgcagccaggctactgcacgaaagcccaaggtcgtgtccggccactgaagggcagggtggtccttgctgacgccaacctg

SEQ ID NO: 237152 - DNA, 122 bp, Homo sapiens
cccttcacgcagctggtgtggctgggagttggcttggaagtttacacacttgagctctatcgattccgaaacttcccgatacatcgtgaggtgtgggcaggagggagacgcgccaggcagca

SEQ ID NO: 237153 - DNA, 122 bp, Homo sapiens
aaaccgttccttcaggccaggaacggcctgaagcctgggggccaggctaccagttctgggcgaagtacacagcctggagtaagaacttcactgatgaccattcagccagtcgaatggtgctt

SEQ ID NO: 237154 - DNA, 122 bp, Homo sapiens
ggcggccccaactccctccgcactccgaaactttcctcccggtgctggactctggcactgcgctgacaggccgtcccctttaggggaggaggctagctggccctgggactcccggctggaga

SEQ ID NO: 237155 - DNA, 122 bp, Homo sapiens
ctgctttgaggatcgttggcttagtggcattggcatccaggctccaccataatcctgagccgtggccacgtgctgccagatcacggcctctgtgcagttcgaatctgcccttcttcttagtc

SEQ ID NO: 237156 - DNA, 122 bp, Homo sapiens
gatgcgagttaatttttattgagaacgtgaatgaatgagggggaatgaatggttagaagacgaatgaatgagtaacaggactctggttagaaaaggaatttcaagagtcaagatctggaagg

SEQ ID NO: 237157 - DNA, 122 bp, Homo sapiens
cccgctggtcccggtcgcctcagcctggcccccggctgccctggcgcccctcctggcccgcgccctgcatctccctagtgacccccctggtgccctgcagcacccacaggcctcccctggga

SEQ ID NO: 237158 - DNA, 122 bp, Homo sapiens
aagcgctgggggcccccgctttggtcgtgggcttcggtgaccacagctagctcctcgcgccggggacacccccacctcggaagagagaacacactgcctagagacccacgggactgggcagc

SEQ ID NO: 237159 - DNA, 122 bp, Homo sapiens
acccaaagcttcaaacccagacctgcctccaaaaatgtgcaggaggttaagactagacaccgcctcaagcaatggctatcagcgtcctggctcagtagtggcagcaaaagctcaactgtttg

SEQ ID NO: 237160 - DNA, 122 bp, Homo sapiens
agagtaataaagttagaagacttgagaagcactaaacgtcgactcgtcttccttggcacccggaaaaccacccccagttgcaaactacacatttatttcaagtccacatggaatatttacca

SEQ ID NO: 237161 - DNA, 122 bp, Homo sapiens
gagtctgggaaatgggctcaccttccagaccctgtaattcagctttgcctccaggagctccggacggagctggcagcagaaagccacttgcacataatgaaacggtgaccatatgctgccta

SEQ ID NO: 237162 - DNA, 122 bp, Homo sapiens
cctcctcctcttcttcttcctcctcctcctcctcttcctcatcactctcctcatcgtcttcgtcatctgtctcagctctggaggcagaagggcacccctgggatgccattccactagggccc

SEQ ID NO: 237163 - DNA, 122 bp, Homo sapiens
ggactcgcacgaggagctctacaagtggttcactagccaggttatccgcaacctccacgtcgtgttcaccatgaacccgtcctcggagggactcaaggaccgggcagctacatcaccagcac

SEQ ID NO: 237164 - DNA, 122 bp, Homo sapiens
tcggggggaagcctttgcaagaaaattgcatacaaggctttgtaacgatcaagtgctaatcgatggaaatgttaaggtagattaacatatatgcagttatattgatcacattggtccaacca

SEQ ID NO: 237165 - DNA, 122 bp, Homo sapiens
ctcattgtcttttggagcatggcttgtgatgccccaaaacaatgacaatagtaatatcaacgatcactgataacagatcaccataacagatataataataacaaaacatttgaaatattgca

SEQ ID NO: 237166 - DNA, 122 bp, Homo sapiens
cttggtgctgcctgccccatgcgaaatggcagcagcctcatccccccgcccactctctgtcgtatttgtctctgcgtcatctgccgtcacttgccacctctaatgtgtgcttgttcatttgc

SEQ ID NO: 237167 - DNA, 122 bp, Homo sapiens
ccttgaccctcagaggtttccaggcccagctcttgggccctggcttcctcctctccctctcgtctttggggggggtccatctcatgcatgtctgttaccatggactccatcatcacggctcc

SEQ ID NO: 237168 - DNA, 122 bp, Homo sapiens
gtagcagcccgctttcccccaaagctctgacttccgggtaggcgggaaagccgggaccagcgccccctcccaccctcaccgatttgggtcgtagcctcgtggacccagcccctgagaaggct

SEQ ID NO: 237169 - DNA, 122 bp, Homo sapiens
cgtcgtggggttaccccgcccgcgccagcgctgcatccctggccgctacccggggagagccggaggatgaattgaacctcgcagccgctgctatctccagtgctcatcacaggtgctttggg

SEQ ID NO: 237170 - DNA, 122 bp, Homo sapiens
cccggcctccgtccctcaggccccgccgcgaccccgcccctctcggcctcccggcccctccgtcctcgggtcccgcccactgggcccccaccagaacctccggccctgaatcctctggcccc

SEQ ID NO: 237171 - DNA, 122 bp, Homo sapiens
caaaacaggaaggggatgattatgaagtcattcctaacagtaatttctatgtatccagaacggcctgcagagataatacttctgtctatcacataagtggaaagaaaaagacatttaaggat

SEQ ID NO: 237172 - DNA, 122 bp, Homo sapiens
gctctcctaacaggaaaaaaacctgtacagcattagtgccagggctcctgccctcccaagcgctgagcccagaaatttggacaaatgagctgcctcttaactgcaaaaaacaattttaaaaa

SEQ ID NO: 237173 - DNA, 122 bp, Homo sapiens
ctggatgggagccaaaattccatttccatgctggctgcctgaaacgggagacagatgacccggcatgaacaagtttcctggaacatcactgggaagccaaaaggacattgtagagatgaggc

SEQ ID NO: 237174 - DNA, 122 bp, Homo sapiens
gttgggtgtgagacggtcagtgccttctcctcattgtgcctttagatgtttcccggtgagcgtgtgctagttatcatgagtgtgttttatttctgcatccagaaaagaattctcaaaagtgt

SEQ ID NO: 237175 - DNA, 122 bp, Homo sapiens
ctcccggcgcacagtcccgcggacggccgcgcgggggcagcacgcggcccggcccccgagcgcccgcggttgactttgcaaaaaattgggggattttccacactcgcttccctcgtcgttcg

SEQ ID NO: 237176 - DNA, 122 bp, Homo sapiens
agcaagtgcataatctgcagtcctttggaagcaacaaaaacaaaaaagagcagattaactcgaaatgcatttaggtcatctggaaattgaattcctgtcagttcttatctttgcataattta

SEQ ID NO: 237177 - DNA, 122 bp, Homo sapiens
ttaacatatgtaagctactataatcagcatccacagcaggtgtgagcacatctttttatccgtgccgactcagcctgtggactcaccggcatgttatccgggatcagacagcttgtttccag

SEQ ID NO: 237178 - DNA, 122 bp, Homo sapiens
gaatcccaaccagcccccagacatgttattagcaacaagggatgtttcttgaaaagtttccgagttggctccaaacttaccatctcaatttctcatttagcttttgccctgccatgcttgat

SEQ ID NO: 237179 - DNA, 122 bp, Homo sapiens
ctggctgcccgcgggcagccactttgaaacccaaaggtttctgcacggccaagcagaggtcggagggagagagccgcagcgcgggcccgcgggccggtggactggtgggtgagacaccgcag

SEQ ID NO: 237180 - DNA, 122 bp, Homo sapiens
gggctctccggcacccacatcctcggctgtggctcaaccctcatttccgggctgtttccgcggaagcccacatcctcctgtctgcagtgagcacggttctcctgctgcggctccgcctcact

SEQ ID NO: 237181 - DNA, 122 bp, Homo sapiens
aggatcttttttcagaactcacaaatgattgttgagaaatgacacacagcagaaaccatacgccaagagccccatgatacagactcagtgcaagtggagaggaaaacactgacacagagagg

SEQ ID NO: 237182 - DNA, 122 bp, Homo sapiens
tgaatcttgtaggccataatccacattatagtaattgtcaagggtttgttttttcccatccgcccccccccccccccccccccccccccccacaaaaaagatacatgaaaagaatctggtta

SEQ ID NO: 237183 - DNA, 122 bp, Homo sapiens
gacggagactcacgactgaaggttgctaaattgcgtttttcttggctactcaggagcgtacgtacctggctgggtcccctgcctccgggtaacctcgctggtggttttcctgagcatttgtg

SEQ ID NO: 237184 - DNA, 122 bp, Homo sapiens
ttgttaaactcaatttgggttcaaaatcctatttccagcctaggcaacatagtgaggccccgtctccacgaaaataaaaaaatattagctgggcatgatggcatgagcctgtagtcccagct

SEQ ID NO: 237185 - DNA, 122 bp, Homo sapiens
gactctagcaaaagccaaattcatgtacatttcactccgtctaaaatgcagtcccggaaacgctccacggtcctctcctgcctctgcacgcaggcaggcagcctggggggctcctgggtgct

SEQ ID NO: 237186 - DNA, 122 bp, Homo sapiens
cggggcggcagggcgcggagctgcggccgcagcgggcaggcgaggagttttgcaaagtgccggccgcggcgcgggaagagggcggggagggcgccgcctgctgggaccgcccctgggtcccg

SEQ ID NO: 237187 - DNA, 122 bp, Homo sapiens
tcctagtcgaatgttatgttaataaatcctaggaaagccttggtactctgaatccaaatccgtaaggaactctcagttcacagaggcaacttgtactcccgtgtcaacgatgagagtcatcg

SEQ ID NO: 237188 - DNA, 122 bp, Homo sapiens
ccgccgctctcgcagcaccgaccgccgccgccggagccggacaataccccgtgcccgcctcgcgctgctgtggccaatgcccgcttgtcttgctggttcgaaccccagcggctgttcaatcg

SEQ ID NO: 237189 - DNA, 122 bp, Homo sapiens
tccccttctcttcccccacctctcctcctccccagtcctatgaaggagtggcttaggaggcggagtctgcacttccctgaggtcctgagacctggtaactaactgggggaggggctggtttt

SEQ ID NO: 237190 - DNA, 122 bp, Homo sapiens
ccaagctttgaccagtagcctcagaccccacagaatgaaggcccttcctccctcttcttgcgatgtccaatgccaacctgcagccccccgcttgttgtcgtgggtctctactttctccttat

SEQ ID NO: 237191 - DNA, 122 bp, Homo sapiens
gagggccggccgggaaagtgggggtcgcctgtggctgagagggccgcatgccgaaggtcccgaccccaggctcacgacaggcagcctggcacgcaggaaggggctttgggatagaacgtagc

SEQ ID NO: 237192 - DNA, 122 bp, Homo sapiens
ggcacaggagctgggggcgccccctggggttaagcgcgctaggccagccctcgccctccccgctgccaaccccaaccccctggcaccgggtgtggaggcagctctgcctctgaaggtggtcc

SEQ ID NO: 237193 - DNA, 122 bp, Homo sapiens
tgcagcgtagagcgttgtaacctagaatattagaacatatgggccaggggcagtcgctcacgcctgtcatcccagcactttgggaggccgaggcgggtggatcacctgaggtcaggggttcg

SEQ ID NO: 237194 - DNA, 122 bp, Homo sapiens
aacgcgcgtcttccgggccgccccgccagccgccggccgcccccgcgcccgccttgcggacggccccagccccttccgcaccctggcccgcgcttacctgcagcctggcacaggcacagaca

SEQ ID NO: 237195 - DNA, 122 bp, Homo sapiens
ccaacagccctgcctttgatttcctttactcctgcattctcgctggggaacccaaatttccgaagtgagacctacttcaagggttgaagggcttgactttccagctttctaacatatcccag

SEQ ID NO: 237196 - DNA, 122 bp, Homo sapiens
ggcccacagatgagcttgcctgactctctccatactcagtggcactcaccacattccaagcgtgccacgtgggcaaggggaagtcacagtggctgcctcctgacttccagaagcttccatga

SEQ ID NO: 237197 - DNA, 122 bp, Homo sapiens
gcacgcccatgcccgccaaggattcagagagctgcagatttccacaaagaggtgtggaggcgattcctgctaccaatacacgaaagtatagtggcaaatcgggatggccctgctgggggcaa

SEQ ID NO: 237198 - DNA, 122 bp, Homo sapiens
tcctctgcgctgctaccagccctgtcacaggtcccggcgctctacctagcgcacctgtcgcgaccaagctgctaacacctactgctcctgcggccccgccccggaccccgcccaccgccgcg

SEQ ID NO: 237199 - DNA, 122 bp, Homo sapiens
aaaacataaaaagtttagaaatgccatatgatgggaggggctgtgctcatttaaaattaccggctggcaacaacatatagtctagcagctttggagctttgatcctggaattaattttgtca

SEQ ID NO: 237200 - DNA, 122 bp, Homo sapiens
aaaacaagtaacacttataaatgaacgtagaattgcagagggtgaaaagagacttctgtccggatcagatttggatttagactgagtgagcctttctgagaatacaacatgtaatctgcatt

SEQ ID NO: 237201 - DNA, 122 bp, Homo sapiens
gtcaggttcttataaccaatggttggcgcctacctgggcaggtcccacacaggggatgaacgaaccaatgggtcccaggcagggcatggacgcgccaatgggagtgtctacaaagcccggga

SEQ ID NO: 237202 - DNA, 122 bp, Homo sapiens
ggagccgggctgggggcaggggctggagccgcgggaccagcgcctgaggtgggtgcggagcgggaggccgggcgggcgggcgcctggggccgccccgccgacatactccgggtcgaggggga

SEQ ID NO: 237203 - DNA, 122 bp, Homo sapiens
aggatataaaagagtaaagagagagtcaacgatggggctggaaagagaaaaattatttcacggcaggaaaccagacccaggtgaggaaagccaagagagcagaaaaggaagaggccagtgaa

SEQ ID NO: 237204 - DNA, 122 bp, Homo sapiens
gcgtctcagcgcctcctgtgtgaagcgggaccgctgcggtacctgccccagggaaggccgcggggagggttacagagcccgtaggcactggcggggatctttatacacccccaaaacacaca

SEQ ID NO: 237205 - DNA, 122 bp, Homo sapiens
gctaaacccccttggtgcacagggcaggccccatgggacgggaatcctgggctcggggcgcggctgcctgggtcccctctggcggcgccagctccaggaggcaggaaacgaggaggccctgg

SEQ ID NO: 237206 - DNA, 122 bp, Homo sapiens
gagatagcagcccttcaaattcaaaagacttaggtcgccctatctacatttaaaatagggcggagggaggaagggaggaggactgcttgggggagaatggttaatttatacattcgcagaag

SEQ ID NO: 237207 - DNA, 122 bp, Homo sapiens
cttatcagccaaacttcacctaacctttggacttgttaagccagtgccttgcagcctaggcgcggggcttttccaccggttctcagttccgctttagtccagagagaagacactacgcttcg

SEQ ID NO: 237208 - DNA, 122 bp, Homo sapiens
ctactcctttaagagggtcacctctgtgtacaggcggcctcctcgtactaagtgtggtggcgttcaaggctccgagacacaggcgcctcccgcgccactccccgggcacaggaactcctact

SEQ ID NO: 237209 - DNA, 122 bp, Homo sapiens
ccctccacgcttccttgaaaatcctgaggcctgtggtctggaaagaggaagttgttgtcccgttgttgcccagctgagtcaagggttatcttgggctccgaacgaaagaactgggggagggg

SEQ ID NO: 237210 - DNA, 122 bp, Homo sapiens
tggccacactaaaggcatcacaggcgctggcacagccgtgcacaccaggtcacacatccacgtcactggaagaagagacagaccatcaggaacgtggagggccaggaagaacccctcaggca

SEQ ID NO: 237211 - DNA, 122 bp, Homo sapiens
ttcctgtgggcgtctccaactccgcaggtgctggacggaagtcagggttctaatcctctgcgcgctctgcgaccttggcaagccctttgcccactctgggcctcaggatccacctcggtaaa

SEQ ID NO: 237212 - DNA, 122 bp, Homo sapiens
attacataattggaagatccgacacgggaacatttttgcccacaggtttgagcagaatctcgtctcggctcccttccccagcctgccttcttcacgggtccgctgggccatcggtgtggtga

SEQ ID NO: 237213 - DNA, 122 bp, Homo sapiens
gcggcgggggcttccggcggcgctctcttctgggtcccccacccctggaccagcgaccgacgaccagccagacagccctttcctgcgaatggacaatgggagaggctggcgcaaccgagaat

SEQ ID NO: 237214 - DNA, 122 bp, Homo sapiens
ctaaagagtgtgggtattgcctgcactgcctggctgaattccaatttgggtaattacattcggctttctggttaccttagcgatcctctcttttgctccaagggtcctcacggtggttgagc

SEQ ID NO: 237215 - DNA, 122 bp, Homo sapiens
gatgttggagtcaagcaacagttctggccctgccatcttcactgaaagctggctcccagccggtgatgggcgagcttctcttcaccggggcgcagttgcttctctctgacgtcgcctctggg

SEQ ID NO: 237216 - DNA, 122 bp, Homo sapiens
cccgccaccctgcccggccgcccagagctctccattgggcgtcgctcccggggtcccgcgcgccggccgtgctgattggccgctggggcttcattcacggcccccctaccgtccgcgtacac

SEQ ID NO: 237217 - DNA, 122 bp, Homo sapiens
ccaggcatgggcccggggtagggcatggcaaggactcagatgtccggagactggaccctccgtgagccgcatggacacacggtcccgtgtcacccgggcccggccaggcacccagatccgtg

SEQ ID NO: 237218 - DNA, 122 bp, Homo sapiens
ggaggaggcttgtgtgaggggcaggtgggccctggtctagccctgggcgcaaccgccagccggctgggcggggagagagcttggagtccagcccggctgggagctgagggccaagcaatggg

SEQ ID NO: 237219 - DNA, 122 bp, Homo sapiens
tgggccaagcgttggcgccagctcatcgagaaaggtgctcccccaggctcacatcgtgcgcgcccccaggccgtcacgagccccctaggtctgggtcctaggagccccggctacttgcatgc

SEQ ID NO: 237220 - DNA, 122 bp, Homo sapiens
cagttaacttcctgccccaacagtaggctcacacagcagggaggacacaaaagaaaacatcgactctaaacccttcagagggaattattttgaaagaaatcaaaattagctccaacaaatat

SEQ ID NO: 237221 - DNA, 122 bp, Homo sapiens
gtaatcagatacactataattgctagtctccaaaatgcttatttctcttcttttggaattcggatacttgtggtgtcatgtttatgatactgtagttaaggcattgtttaaaataagaaaac

SEQ ID NO: 237222 - DNA, 122 bp, Homo sapiens
agctggaagtcagcaccagctggttaaggcagggtcactgcacttcccttgcccaatttacgcccctggagagccctgaccagtttcctgcttcctgtcccaggccccccatgacaagattc

SEQ ID NO: 237223 - DNA, 122 bp, Homo sapiens
gcgcccctgccgcggccggggtctgtggtttgggtccgagagtcccatcccggagcgttccggggatgttctgtgagaggccccgcccgaccacaaatgttgcttcggaaccagcgtcctgg

SEQ ID NO: 237224 - DNA, 122 bp, Homo sapiens
catcttcacatccccttccccaaacatgcgtggttcctgttttgccacatctgtgagaggcgctgggaacggggacttgccttacacctctcggttaacaccctggagactgatggagttca

SEQ ID NO: 237225 - DNA, 122 bp, Homo sapiens
gatcaattagaaattgtactgtgatatccacatatttttgagaaaaattcccaagccaggcgaatgtggattggaataaagacataggcagtgtataccaccatagcaataatggttagtaa

SEQ ID NO: 237226 - DNA, 122 bp, Homo sapiens
tatttgagtaaatgcttggcgtcggcacagctggcttcaagttaatttcagatgctaagccgacaaacacaggctcctgcatcaagaaaaaagagaaaaaacctaaagcagcttcaggtcaa

SEQ ID NO: 237227 - DNA, 122 bp, Homo sapiens
cccgcagctcgcctggaggaggcgcgcgggggtctcggaggcggggacgggaacccggagcggcagcgactccgccgccggcgggaagagggcggggcacccggctccgcggctgcagcgcg

SEQ ID NO: 237228 - DNA, 122 bp, Homo sapiens
cctgaaccccattacacccgggtccctccccctggacctcccagcagctctagtcctccccgcgtgccctagagcagaccggcgccgcgtccctgtacccacaggacccaggtcctgcccca

SEQ ID NO: 237229 - DNA, 122 bp, Homo sapiens
gccaggagcggtggcttatgtctgtaattccagcaccttgggaggcccaggcgggagtatcgcttgagccctggagtttcagaccagcctggaaacccgtctctacaaaaaatacaaaaatt

SEQ ID NO: 237230 - DNA, 122 bp, Homo sapiens
aagctgctcactcattctctagcatggattagatgttatcttaaagcagatcagaggaaacgtcaagtaagtgcataaagtcacaggttgtcacttcttgagatggttacttttataggtca

SEQ ID NO: 237231 - DNA, 122 bp, Homo sapiens
tggagagccagctcggccaccgccgtttctgggctgcccaggccagcaggctcacagtgacggagctcagccacccccgtttctgggctgcccaggccagcaggctcacagtgacggagctc

SEQ ID NO: 237232 - DNA, 122 bp, Homo sapiens
gttattcggcggctggacgagacagtggtgaaccgcatcgcggcgggggaagttatccagcggccagctaatgctatcaaagagatgattgagaactggtacggagggagtcgagccgggct

SEQ ID NO: 237233 - DNA, 122 bp, Homo sapiens
gccgtctcgccagccggccagttccaccgcgtccccagcagggagcccaggggccgcaaacgcaggggcgccacccctgccactgccactaccaacatcttctctggccacccggcaggccc

SEQ ID NO: 237234 - DNA, 122 bp, Homo sapiens
acatcagccctgatggtaaacggcagctttttctgtaacaggaagaagggcacttactgacgggagacccaccatcacaggtcattcaggaggtcaccatcagatctcatctcatggaggct

SEQ ID NO: 237235 - DNA, 122 bp, Homo sapiens
tcgccctggttcatgtcccggagaagcttggcccggcctgtctgtttgtccattccatagcgagctaatatgggcgacaacaatttgcagtgatagttggaaaggcccatcacctttaccag

SEQ ID NO: 237236 - DNA, 122 bp, Homo sapiens
tacagtagacgactctctcaattaaactgcattttcttctttacggatttggctatcaggcgtatttatcccgatttcctcccccctcactcccctttgcaggaacgagtctttgggaacgt

SEQ ID NO: 237237 - DNA, 122 bp, Homo sapiens
tcctactctcctgaggttgtttccaggctgcagagaaatagcctgcacaaggggcccaggcgctgggtgtgggagggtccccaccgagagccagaacatgcaggaactaaaatgttgccttt

SEQ ID NO: 237238 - DNA, 122 bp, Homo sapiens
ggcaaggccggaactcctgggtccctagagacgtgtggccccgcccccgcagcgtcgctccgacacgacggccgccgcgtctccatggaaacggcccaggcatccacccagccgagagcacg

SEQ ID NO: 237239 - DNA, 122 bp, Homo sapiens
atgccacaacaaagcaatgtgctggaatgagtcagcttccaaaatgttggaaaacctccacgtgtcagggtgaccttgaaagtgggaattcatgctcccttgttgcatattccccccagatg

SEQ ID NO: 237240 - DNA, 122 bp, Homo sapiens
cacaaacatcacttgcctctcactgcaatcatggccaccgctgctgctgggggctgttgccgtcaccagtaagaaacacaagcgatgggatttctcagtgcagccaggctcctacaggctac

SEQ ID NO: 237241 - DNA, 122 bp, Homo sapiens
gaggcaccgtcctaaaggccacgccggtggggcctctcaagtgggttgtgcggaacgccccggccggcctagagagaaaacaggtctcatttccatctcagtttgagctctcaggaaccaga

SEQ ID NO: 237242 - DNA, 122 bp, Homo sapiens
agttaagtcgagttgaacatgccagccaggggtaggggtagccagcaggtggaatctgaacgctcaccctctgccttgcagtggggcagaaaaaagtcaatgtgtaggggtgatggtaaaag

SEQ ID NO: 237243 - DNA, 122 bp, Homo sapiens
ctttgtaaagtcagatttgacttgggagttttacttggtgggctgtttctcttactttgacgggtgttgtgaatagtgctgggactgtgtggtttcctgcttggccacactgaagtcctctg

SEQ ID NO: 237244 - DNA, 122 bp, Homo sapiens
tatgggccataaggacacaaagatggcacacacatttgtggaccatctgaattcttataccgagaggggagggggaagggggcgcggcatgacgttagcttgactgtcctgggtcatgtttt

SEQ ID NO: 237245 - DNA, 122 bp, Homo sapiens
acgtcatggacaaaagacgaggatgccagttcgatgtgcgagcagaaggccgcctgcgtgcgctctgcagagcaaccggcccggtttcataaggggccgccggcaggggactgccatggcgc

SEQ ID NO: 237246 - DNA, 122 bp, Homo sapiens
tacctttccacccaataactcaacgctgcgaccgagaaaaccagggacgcgagaggctcgcgtcatcctgcagcgccgacaccacagacactagaaagcgacgcctccggtgggacgactgg

SEQ ID NO: 237247 - DNA, 122 bp, Homo sapiens
tttatgcatttaaaaaatcagatcaattgccccccgggctctgggatggaaggcggtgtgcgcctgcgaaggtcagaggcccagcggcgccagggctcctcggcggagagccgcccgggtcc

SEQ ID NO: 237248 - DNA, 122 bp, Homo sapiens
catgggcagtgccccggcctcacgtgccccgtggttctctgtctctctcctgctcacaggcggtgccctggcctcacgtgccccgtggtgctctgtctcgctcctgctcatgggcagtgccc

SEQ ID NO: 237249 - DNA, 122 bp, Homo sapiens
aacgcccgcataataaagactggaaccctcgttctcagctctcaccaagtggactttttgcggggtgtggcggccgggtctcgaccacagcgtggatcaccggctgtttaggaaactgcagc

SEQ ID NO: 237250 - DNA, 122 bp, Homo sapiens
gacgggctaggaagtgggttggtgttacgattgggccagtgactcattagagggtcagatcgaacagggttgaagctccgttctgccagctgtggctcagacgggtgtcatgcgttggcctt

SEQ ID NO: 237251 - DNA, 122 bp, Homo sapiens
agcagtggagatgattacccaggttcccgggtaacgccagccccacagaggcgtggggagcggctgcaggtgcacctccagggccagcctgaagaggcagcgacctgcacaggggctcctgg

SEQ ID NO: 237252 - DNA, 122 bp, Homo sapiens
ttacaaagaggcctttcaaagagacaaagcgcctctggacaggctgagtgtccctgcacacgtgggcatccgcccagggcatttaaaataacgcgatttgaaaaaacagatttgaagtgatt

SEQ ID NO: 237253 - DNA, 122 bp, Homo sapiens
cagaagatctcgtggctagaggcagatctatgataagccccctgcccaggctgcctataccgactgctgcaggacctctgcctggggggtgcagctggcttgttagccgggagggacaattg

SEQ ID NO: 237254 - DNA, 122 bp, Homo sapiens
cctcggaaaggcctgcctcggccgcgatgaggcacagcgtggtggaatccgggtgcttgtcgaccttgttgaagttgtactccaggatttccacctggtcctctgtggggccgctcgcggtc

SEQ ID NO: 237255 - DNA, 122 bp, Homo sapiens
gtgcttcccagaactactgggctaccagttctgccagacctcagagagggtggtagtggccgaggaagaagtggggcagagggcacaaccctcatgcaggtagcacctccaaactttgcctg

SEQ ID NO: 237256 - DNA, 122 bp, Homo sapiens
ccagaataagaatgagtaactcatggaatcatatggctcctgcctgatccagccttaaatcggccaaactctaactagatccaagaggcaaaacttggaccatctcaaatcaccagagccat

SEQ ID NO: 237257 - DNA, 122 bp, Homo sapiens
agaaagttggaagaggctatggaacagggttccgggagtgtatgagctcaacccctctcccgggagagcgaccccaccaccgcaggccctaatcctctgtcagcagtgcccagcggagctcg

SEQ ID NO: 237258 - DNA, 122 bp, Homo sapiens
gcgtgatggccagaggcctgggggccccccactgggtggccgtgggactgctgacctgggcgaccttggggcttctggtggctggactcgggggtcatgacgacctgcacgacgatctgcaa

SEQ ID NO: 237259 - DNA, 122 bp, Homo sapiens
ccctgacttttatgacctcgggaaggactgagacctaaatggaataggggctgagtgacacgaacagccgctgtagtcagaatataccaagactgggccacaaagaaggaaggaagaagccc

SEQ ID NO: 237260 - DNA, 122 bp, Homo sapiens
gggggcgtccagaccagccccggagcgacctcgtcctcagaggagtgaccccaatcgccacggagcgtccccacccaccaggagaactacgcccctggccagaccctcgccctagcgggccc

SEQ ID NO: 237261 - DNA, 122 bp, Homo sapiens
acagctcgtccccgccccgtaatctcccggctattcggggcccttcgccgagatttctcccggaccagccccgggattggctcctgccgaacttcgccatccaatgggaaccttagtctctt

SEQ ID NO: 237262 - DNA, 122 bp, Homo sapiens
ttgtctttggttctgtttatgtgatcaattacatttattcgtttgtgtatgttgaaccagcgtttcatcccaaagatgcagccgacttgattgtggtggataagctttttgatgtgctgctg

SEQ ID NO: 237263 - DNA, 122 bp, Homo sapiens
gcaccgggcacgaccccgcggcaatgacggggctggcaacgccccccacagcggcacaggcggataaaccctctggggagggagttcagtcccagcgggaggggcccttcccacccgggagc

SEQ ID NO: 237264 - DNA, 122 bp, Homo sapiens
cacgccgcgcccccctcactttgtaatgggccatagtgacagcggcagcggcgtagctggcgccggagaccgcgactggcgggttgggagcagcactgctcatgcgcggaagggggcgcgcg

SEQ ID NO: 237265 - DNA, 122 bp, Homo sapiens
tcagcacaaagcggggccatttcctcccgggtaattgagggagccgcggcccgttcctgccgacgctgcactttgctgattgcgcctgtcaactcggggctgacaactccatttttaaacat

SEQ ID NO: 237266 - DNA, 122 bp, Homo sapiens
aattgcttatatccaagaccgtgaaagggaaatgccggcagctactctaaggttttcattcgttgcagcttacagaatggtccttattgaggacgctaggggacgcaagagagttgtacctt

SEQ ID NO: 237267 - DNA, 122 bp, Homo sapiens
ctaagccattgaaacaaagatgaaaaaatagctttccctaggcaggctgctgctttgtagcgacaggaagagaattttccacttaaagaataattattatagagaaagttaatctttgtata

SEQ ID NO: 237268 - DNA, 122 bp, Homo sapiens
ttcattctgcaaccaccagtcttccacccggtgagttgtcactctaatgtggaacctcctcggtctctgggctcttcccttccaactgggcccacactcctgggtggtggggtggaaaggac

SEQ ID NO: 237269 - DNA, 122 bp, Homo sapiens
gtaacttaacaatctgggtgtcaataacgcctcgtattagtcaagtattaacccagctagcgcctgttaaacccgcgcgatccagctcaggtcaaggaggaagaagtaaaattcccaaaaaa

SEQ ID NO: 237270 - DNA, 122 bp, Homo sapiens
tctagagcccaggggctcagggcccctcagctccatggggcagaagtgggccaatgtctccgccccctcctccccgtcttcctcttcctcctccaggtgccctttccgggggccttccacac

SEQ ID NO: 237271 - DNA, 122 bp, Homo sapiens
attcaacattctttcatttgttcagtaaataaaatttgttctattgcatacctatccaagcgatcagcattacctggaattgtagggaaagtgggatgttggccaaaaagaggacaaaatgc

SEQ ID NO: 237272 - DNA, 122 bp, Homo sapiens
gaaaagcgcttgacaatcatctgtgagttctgcttggccagtgagccgaacttggctgcccgctgcagcaccgagccacggaagctaccctcctcacccttgaggtcatcgctggagctggc

SEQ ID NO: 237273 - DNA, 122 bp, Homo sapiens
ctgcggtaactgggagctgagcactgatgggcaatggggcaagaactgggccatgtgcctcggggtcccagcacacaggccagcccctgagggtaggaacgagagcccagactctggaggca

SEQ ID NO: 237274 - DNA, 122 bp, Homo sapiens
cgtagggtgaggtaaaacagagagaaagaatttttgaggagctccctttctgttgaacgacgtcttttaaggttttataggaaaaaataaacagcactttgaaggcagaaagcagaaggcag

SEQ ID NO: 237275 - DNA, 122 bp, Homo sapiens
cttacttcaaaggcagaataatccggggctgtcaggtagctcaggtagttcttagtaggtcggtatctgcgagtttcctcctccaccagcgctgcagcctaagaaagagaatagggaccagg

SEQ ID NO: 237276 - DNA, 122 bp, Homo sapiens
ccacctggccttgccggagcaccatagcccaaggttactagtggtgagaaggtcgccaggcgcgcacttcgaagctccctgcactctctctcctgcccccgccgttttgtggcagagacggg

SEQ ID NO: 237277 - DNA, 122 bp, Homo sapiens
agctgaagtccaaagagaatgtcatttgcccaaagtctcacaaatatactctgcaaagaacgaagtcaatgttcacccagttaatgtcaattatcttggcttttaccaccactctgctatgt

SEQ ID NO: 237278 - DNA, 122 bp, Homo sapiens
agccgcttgtcttcccagcacattcacaatcgtgatgccatcggagcccagggccttgtccgcacgtggcagcacagcacggcagaggctgcagggctgaagcctgcgcagcggcgctggtg

SEQ ID NO: 237279 - DNA, 122 bp, Homo sapiens
gcgagtagggatttcagctgtagtctttctctctctaaacgggctccaaaccgggaaagtcggcctgcctgaccgctgggacaggtgacaggcaagggcgtggagtctgttctatagtcgct

SEQ ID NO: 237280 - DNA, 122 bp, Homo sapiens
ggtgccaatccttcacgtgacgtgacgtggctcaccacagcctgtgtacatgtgagcagccgcgtgcagaggggaagctctgcctgggcctcagggactgtgacatggagcaggagccgccc

SEQ ID NO: 237281 - DNA, 122 bp, Homo sapiens
gcggccccctctgtcctgggcgctgcccagggaggccaaaagacgggcccagaatggggtcgggagtctcggacccccaggctattggtggatgactgactgacaggacacctcccaacccc

SEQ ID NO: 237282 - DNA, 122 bp, Homo sapiens
tcacccattgtctcccattccctttctgtagctgcttttggggggctggttctgctctgtcggcatctgccccctcatctagccttttctcactgtttttaaatctcttcattctgaataga

SEQ ID NO: 237283 - DNA, 122 bp, Homo sapiens
acatggtgctggagccgccgccgcccgcgccctgacaggccaggccaggccgagccaggccgccgcctccccagtccgcctccgccgccgccgccaccaccgccaccgcccccggcagccgc

SEQ ID NO: 237284 - DNA, 122 bp, Homo sapiens
ttgagtccatcttgctcgagtctacaaagaccggccaatgaccacctacgtgagggaacccgataagcagaacttcatgatgatgatttgattccagcgtcttaaaccaaggccaagaacat

SEQ ID NO: 237285 - DNA, 122 bp, Homo sapiens
ccttatctccaccccagcaagcaccccagagaccttggagatttgtcttgtttctagacacgtgtactccaatgttgtgcggaggaggccttaaatattcgagaagagagtgggaactcctg

SEQ ID NO: 237286 - DNA, 122 bp, Homo sapiens
tccagcatccagctgtgctgtgctgaagaacacaggtttggaaagaagagagaactactacgagcacagcagggtgcccaggccaagagcggcttttaaaattaatgcctggtggcatacta

SEQ ID NO: 237287 - DNA, 122 bp, Homo sapiens
agggccaccctttaactcggcagcttgatgactataatgggcccagttgtctgcgggctgcggggagctaagtccccagattggaggaggctggctctggtcttcgatgcacaggagtggcc

SEQ ID NO: 237288 - DNA, 122 bp, Homo sapiens
gctcagccgacatacctgtgacatccaacggacgcttttttagagcagtgaccactggcccgtctttcctgcgtaacagggggctgctccgtctttcggccactttctgctttagcctggac

SEQ ID NO: 237289 - DNA, 122 bp, Homo sapiens
ctcaggcaatccgctcgtcttggcctcccaaagtgatgggattacaggtgtgagccacggcgcccggccagctgctggatattttgaccacctcaagtacgctgagcacgaaatcagtgcat

SEQ ID NO: 237290 - DNA, 122 bp, Homo sapiens
ataacccggctgatggtagcaaccatcattcactgagcatttagtacccaccagcccccacgctgatctgtctctatgcattctcttattcagtcctcacacaaactcatgagattggcatc

SEQ ID NO: 237291 - DNA, 122 bp, Homo sapiens
tggacagtgaggccaggatggagccaccgatccacaccgagtacttgcgctctgggggtgcgatgatctgcaaagacagccaggcacggcttcagctcacagagcgccccccagtcagctct

SEQ ID NO: 237292 - DNA, 122 bp, Homo sapiens
aaacccttgctgacttgtgaagagcaaaaatcattgcaacggagtagtttgttcagtgcccgcagcaagaacctcccactccgatccacctcaaaaagtaataactgcttcttctggactgt

SEQ ID NO: 237293 - DNA, 122 bp, Homo sapiens
cgatcagtctgacactgggttgggggatccgcctcagagtttctgggcagcgtacagtgacgcggtggaggtcggtaacggctggaaaattgagccttgagcagcgcgtgcttgttgtcata

SEQ ID NO: 237294 - DNA, 122 bp, Homo sapiens
gaccgtgtttcaacctctgacagcttttgatcacaaaagctatcagacataactgtccaccgtggcatttcatacttcatttttggactctgaatcattttctgcacaagaaaatttgcaac

SEQ ID NO: 237295 - DNA, 122 bp, Homo sapiens
ctgatgactgcatttcctctcattatctgagagatctttgggaagccacgtgcaccagctcgttctaggaccccaggcctctaagaatccaggcagaggaagctgggaagctgctgataagc

SEQ ID NO: 237296 - DNA, 122 bp, Homo sapiens
tatgtgtaggaaaatgcccatgaaaaatccttttaactgtccagcgggtcacagtcccgccgaaggactcatccagttcccagaggcgcagggaacaagccacgggccaccccagccccaaa

SEQ ID NO: 237297 - DNA, 122 bp, Homo sapiens
aagatggcgcccacaccaatccttgttaccttccgccctcaagatgaccttagcagttagcgtcaacctccgcactctatgacctttccaaaatgatggtgaacgtaatacgcaccacactc

SEQ ID NO: 237298 - DNA, 122 bp, Homo sapiens
gatgggggggcggggacgggggcgggggcggggctcgtcacgtggagaggcgcgcgggggcgggcggggcgggggcgcgcgcccggctccttaaaggcgcgcgagccgagcggcgaggtgcc

SEQ ID NO: 237299 - DNA, 122 bp, Homo sapiens
ggtgaggctccgacaacgcccaggagcacctgtgatgccgtcattaggaacctacctcgtcgccccgattccatcccctcccgacacctgactgcgcgtgttctcctttgcagttctttcct

SEQ ID NO: 237300 - DNA, 122 bp, Homo sapiens
aaatctggagaatgctgggcttaataacatgtactaggcctctttagtgaaggtcgtctccgagctgttgtatcctaacaggcattctggaggtggagagtaacatacgatgtttcccaaac

SEQ ID NO: 237301 - DNA, 122 bp, Homo sapiens
taggaccctccgagccaggtgcgtgatatactctcgtggtgcgccgttttttaagcccgtcggaaaagcgcagtattcgggtgggagtgacccgattttccaggtgccgtctgtcacccctt

SEQ ID NO: 237302 - DNA, 122 bp, Homo sapiens
gagacccagagctctcatctgctagactgggtccccgtttccagcccttgtcttggctagcggggcatctggaacttccgtgcacctagaatgtggcctcactgttacatgtggacccaccc

SEQ ID NO: 237303 - DNA, 122 bp, Homo sapiens
ccgctgcctcgctttcgcggcgacgtccgggctggaaaaggggcgcagtgagctggggagcggtaccgctgccaccactgccgtcggctccggcccagagggacccctgtcactccgccgac

SEQ ID NO: 237304 - DNA, 122 bp, Homo sapiens
tcctggagctcagcaagggaggggccagcgccagcccgcgtgtgggtggctgggtgggggcgtgggtgggggtccgcctataattatctggggaaatgcatccgcgctctgcttttcgctgc

SEQ ID NO: 237305 - DNA, 122 bp, Homo sapiens
gctgaagtgagacaaaggccgcgccagattccggaagccgccccttcctccctggctgcgcgcctgattggacagttcccaccccagagccctgattggatagtagtgcaggcaccgcgacc

SEQ ID NO: 237306 - DNA, 122 bp, Homo sapiens
caccccggcatgtgggcgcggcggggcggcgcgggcgggacggctacaagagctgttttgcgtccgggccggagtatttgctcagcccgcctgcgccgcttgggacgcctctgcctttccct

SEQ ID NO: 237307 - DNA, 122 bp, Homo sapiens
aatgtgttaatagcccttaaagggtcagtgtatgacgtcaccatagtaacaacaacagtgcgcatgcgtttttttttaaagagccggcgtgctcccggctcggctcagctcgcccccttccg

SEQ ID NO: 237308 - DNA, 122 bp, Homo sapiens
cctttctggcccttttcagctcaggggcttcggggcactgcgtctttcttcctcagctgccgccccaggacgcaccaccttctccaaggaacccctcgggtttcccctccctcggcgcagcg

SEQ ID NO: 237309 - DNA, 122 bp, Homo sapiens
tgcagcccgccatgcccgagcctcccctcttctgtgggctcctgagtggctgagcctcgccgaagagcaccgccacctgctccacggcgcctggtcccatcaaccgcccaagggctgaggtg

SEQ ID NO: 237310 - DNA, 122 bp, Homo sapiens
gaaggccctctggcagctggcgtctggcttcgtgcgccttggccactctgccggtctcggcggaaactagcaactgtgggcacttccaggctcgaaagggctcaaggtcaccggattctgct

SEQ ID NO: 237311 - DNA, 122 bp, Homo sapiens
atcagaaaaacagccttcggctctggagcccactccggcacggcctcaggtgctctaccccgcgggatccagggagtggccgccactcacagttgcccctcctgtccgctccggtccgctcc

SEQ ID NO: 237312 - DNA, 122 bp, Homo sapiens
ctggaacgggaccagaggactgctaagatccaggcaccagacgggtctcaagtgggtgggcgcagggcaggtgcgggcacgctggggaatagggagaaacgccccagccttgtcctgggctc

SEQ ID NO: 237313 - DNA, 122 bp, Homo sapiens
ggggtcgatatcatcatcactgttagactcggggtcaatacccttcatcactgttagactcggggtcgatacccgtcaccactgttagactcggggtcgatacccgtcatcactgttagact

SEQ ID NO: 237314 - DNA, 122 bp, Homo sapiens
atatatacagagagagagagagagagaaagagagagttttttttatgaggaattggctcacgtgattatggacactgagaactcccataatctgctaactataagctggaagcccaggaagg

SEQ ID NO: 237315 - DNA, 122 bp, Homo sapiens
agtttcctgaggtctccccagacatgtggaactgtgaatcaattaaacctcttttctttacgaattaaccagtcttgggcatttcttcatggcagcatgagaacagactaatacagtaactg

SEQ ID NO: 237316 - DNA, 122 bp, Homo sapiens
cagatgtgtcttaatccatatctaccagcccactacaaccagcctaaaactcttatattgcgttagggaaagacccaactctctgcctggcctacaaagccctttatgatctagcctctgcc

SEQ ID NO: 237317 - DNA, 122 bp, Homo sapiens
aagttctcagagtaccttaggaactgctgcagagaagggtggaacatggtgaggaggtgtcggccgcaggactctgagcccaatctctgcttttaaccaatcagtgtcagatgttgtgacct

SEQ ID NO: 237318 - DNA, 122 bp, Homo sapiens
gagggcttaggagagtgtgagaggctggaggcgagagggaggagaagcaggacgaggaatcggactccagtagcagcttatatatggagagcatgggctgggcccagtcctggaaggtgagc

SEQ ID NO: 237319 - DNA, 122 bp, Homo sapiens
acttttgtacaggtgacgtacacagcatgggtgtagtaggggagcgcaaaaggttgcctccggcaggcggaaggccaggaagaaagggagggaagaggatttggagggtaccggcgcatggc

SEQ ID NO: 237320 - DNA, 122 bp, Homo sapiens
agaagtggggcatagcggcccggggaattcttgctagcttccgattggacgaaagcagaacgcctgccccttcgtagacccagcgtacgtacaacgctcacaccaccacgccgtacgctgcg

SEQ ID NO: 237321 - DNA, 122 bp, Homo sapiens
gggaatccggcctagaaaatgtgtgtagggctctttagaaactacagacacttcttcagtcgagactagatactaaagagaaattgtgtagttttattgtatcagacttagtacaggggtgg

SEQ ID NO: 237322 - DNA, 122 bp, Homo sapiens
aaggcatcgcaggcgaaggatcccagggagaggccagggccgtttatcagcgccggccatcgcctcaccaaacaccaggggctgggtgcagcccggctgttgcccctggggcgggccaggcc

SEQ ID NO: 237323 - DNA, 122 bp, Homo sapiens
gcgcaacaggaaaggagagaagaatggcaagggcctacggcatttctccatgaaggtctgcgagaaggtgcagaggaaagggaccacttcctacaacgaagtggcagacgagctggttgcgg

SEQ ID NO: 237324 - DNA, 122 bp, Homo sapiens
ccttctgtaccatccatagcaatagtccttactgtgctctcacctgttagatacaggcatcgcagggttatacataaggataaattggtatcaagacctaaatcgaccaagactccttctca

SEQ ID NO: 237325 - DNA, 122 bp, Homo sapiens
ctgtaatattgtccttaacatccaagaggagagaggatgatgttactcctcatattccagcgggtgtacagtcccctgcgatattgtcctaaatatcaagaaagggagaggatgaagttact

SEQ ID NO: 237326 - DNA, 122 bp, Homo sapiens
ctcggctggtgtagctcttaaagggcccgcgggcgccgggggccgaggccgcccgcggggcgaggagggagaggctgcttccttgcccgccacctcaacgcgccgcagaacctaaagcctac

SEQ ID NO: 237327 - DNA, 122 bp, Homo sapiens
agagatcgccgcttggagatcgcccggcggctgcggtggtggcactgccaggggctgtctcgtcccgagggcaccgcgacccgggacgccccgcgctccccaaggcctcggcacctggggtc

SEQ ID NO: 237328 - DNA, 122 bp, Homo sapiens
cctgggagacctcaggcatcccggggcctggtcggagggtcttcgggccctggagctgggcggtgtctgcagtgcaccgccgtgagtttctctcgggtacaatgtgctggtgtgcagagagg

SEQ ID NO: 237329 - DNA, 122 bp, Homo sapiens
agtattgcatgttctcacttataagtgggagctaaatcttgcgttgggagctaaatcttgcgtagggagctaaatactgggttcacaggaacaaaaagttgggaacaatagacactaggtac

SEQ ID NO: 237330 - DNA, 122 bp, Homo sapiens
atctgtgatgggctcagctggccggggagggcgcaggggcccactgggttcaggaacccacgtttcctcagggatgggtgctccgttccctgcaagcccagctaccacgaagtaatccacca

SEQ ID NO: 237331 - DNA, 122 bp, Homo sapiens
atacataccccgcctgcgctgtctgcgcctgggtctcttcaaccgcagtgagcggtcgcacggctccacatcagggtcgccctgaggctcagccttccccggccccattccgagtgcgcaca

SEQ ID NO: 237332 - DNA, 122 bp, Homo sapiens
ttctttgtaaagttgtaacctgatggtaattagctggcttcattatttttgtagtacaaccgatatgttcattagaattctttgcatttaatgttgatactgtaagggtgtttcgttccctt

SEQ ID NO: 237333 - DNA, 122 bp, Homo sapiens
ggagctcggagcacgtgtttgggtgaggccgggctgagggccgcggtggggccgtccagacgccggctcctgctcccgagcccggctggagcggtccaggaaaggccggacctcacagcggg

SEQ ID NO: 237334 - DNA, 122 bp, Homo sapiens
ctttgttttaaactccggacgggcttttttctcctcctcttgggggggacccagagggagcggcgccccctcccccctccggcgcggaccccgcgtgcgccttgctcgcccgcagccccgag

SEQ ID NO: 237335 - DNA, 122 bp, Homo sapiens
gctttagacatttactgccagatccagagagagggaaaagagctgggagtctgctgcccacgtgcaggagttggaattccctctggaaactctgaaagtccaagttgaccctcggaatcagc

SEQ ID NO: 237336 - DNA, 122 bp, Homo sapiens
ttggtacctagtttagttagatgctgctggcaacctctcatttgcttttttcttttgagacggagtctcactctcccccaggctggagtggagtggcatggtctcggctgactgcaacctct

SEQ ID NO: 237337 - DNA, 122 bp, Homo sapiens
tccctcgctgaggactgagcctggccgactcagggaaccgagttcaatgaaatcctcagacgcataaagcacagggtgccggcccaccgagctgcgctcccttcccgggggtgcccgagaga

SEQ ID NO: 237338 - DNA, 122 bp, Homo sapiens
accaggcgcctccagaacgcgctcccaggaacccagaagtttgctggtgtgtgtttgcggcgcccgcgcacctcgaaactgaaagcgcaactggagggcctggagtctcgccccagccaaag

SEQ ID NO: 237339 - DNA, 122 bp, Homo sapiens
tgtacagccttgtgcctgacaggaccgtggccgaccggcagctggtgaggggcgtcggtgcgaccgccggaagcccctttcctaactcctggaattccctgtcactcagtcactccgccagc

SEQ ID NO: 237340 - DNA, 122 bp, Homo sapiens
acccgcggggccagctttggtcccggcagcctgttgggagacgccgccggggaaaccaggcgccgggtggactccaaaatggcgacctttagcggggccaaacatcgcgagaagttgcgggt

SEQ ID NO: 237341 - DNA, 122 bp, Homo sapiens
attacgcaaaagtttagtatgaacatctctggttatttacaatattcacaaagacttgcacggtaagaatgtaaaaccccaattctgacttctctgtaccatgcagaagtgtgactgcagat

SEQ ID NO: 237342 - DNA, 122 bp, Homo sapiens
taactctgggctcacggtcagcatctgccacctggacaaagggatcagcaggcaacgagacgggagctccagaccttagtgagcagcatggcactgagaaccccgaacccggggagtcctca

SEQ ID NO: 237343 - DNA, 122 bp, Homo sapiens
acgtttatgaaattttcctaggtctgtgtgtgctatacggatgcgcaccatcaccatcaccgcgcagtgggtctcctgttagaggagccggtcacgcacggtgctccgtggattttccactg

SEQ ID NO: 237344 - DNA, 122 bp, Homo sapiens
tttaattatcgacggagctgcactgtctctgataatgaagcctcgagaagacgggagttccggcaactacagggagctcttcctggaaatctgccggagctgcagcgcggtgctctgctgcc

SEQ ID NO: 237345 - DNA, 122 bp, Homo sapiens
aagctcacatggggtccagcccacaggaccatttgagtagctctcccatatcgggtccttcgaagcacatgatttagctttactttttctccttcgtattagaaaagtcaccataataccat

SEQ ID NO: 237346 - DNA, 122 bp, Homo sapiens
tttgatgccgatcctcctttatgggactgcgattggcattatgataattcttctcgaccccggtatgcccctctacctcttcggcatccccaggcatctcggattgcttctgtacgatggag

SEQ ID NO: 237347 - DNA, 122 bp, Homo sapiens
ttgcatccttgtatgttgcatatcttatttgtttgcttggggagtaaaccaaagtaaaaacgtcctttgtcaaattaaggaccttacaagattttctgtgttaatggattggaagtctttac

SEQ ID NO: 237348 - DNA, 122 bp, Homo sapiens
acatgtttataaagggcatcatagttattagactatccattgggagaaagttctgactggcgttcctggctctggctgagaccttacagaagtggaggagacagaggagctggagggcagga

SEQ ID NO: 237349 - DNA, 122 bp, Homo sapiens
actactcctgtcccttcaagacatgaattctccctttgtccagcatctcctccctgcagacgctccctaccccttagtcacttacaagccttcccagtgatcagaccaactgttgagatatt

SEQ ID NO: 237350 - DNA, 122 bp, Homo sapiens
gaaaggtagaagattggtagaggaaaatcttctgttaggggctaaactataagtaacagccgcggggcacccagctgaaggcacaaggtgttaacaagctaagtttgaacatgggcaatgca

SEQ ID NO: 237351 - DNA, 122 bp, Homo sapiens
ctgacttaagagcacttgctctggaccatactgactaatgttgaatgcagatggaccactcgctacctgtgtacacttgggcatgttatttcacatatgatggccttggtttcctcatctgt

SEQ ID NO: 237352 - DNA, 122 bp, Homo sapiens
cttgtaggcttggtttccaaggcaggatttggctggcagctggtcatgggcagctgtccccgaagcttcatcctgccaggccccccatgtggcagaatggtttggtctccctccctctgggg

SEQ ID NO: 237353 - DNA, 122 bp, Homo sapiens
aaagtagagaggatccagcatcacaagtcctggtggatcattacaagaatggacgaccagcgacccaatgtggcaaagccaattgttgcacctggggccacagaagaaattcttgatgcttg

SEQ ID NO: 237354 - DNA, 122 bp, Homo sapiens
acaggacggcagctgctgcactgcgggatgaggctgagggtcatggctgtgaggcctcatcggggagggaaaagggagagggaagcagggctgtctcttttaccaccgtcaatcttttccgt

SEQ ID NO: 237355 - DNA, 122 bp, Homo sapiens
agctcagctctgactcaaaagtttttccatttaccatcaacatggaaacttggctcctcacgtaggtatattatcccccttttgtacatggtcttgttgatccaaactccctttctgtgaaa

SEQ ID NO: 237356 - DNA, 122 bp, Homo sapiens
ccacccccctccccccccaatctagctatttaagggtgggtaattgatctctctttataccgttttccttcctttttctttctaatgtttcttcctttcttttctcttcctctctggcagtc

SEQ ID NO: 237357 - DNA, 122 bp, Homo sapiens
ttaaggctgtctaaagtatgtgatgtcttcatcatagtatgaagtgttgaaaattaataacgagcctagtttaggaaaaagctgcttaaaactgtggctctaagagagtaatcataaaatac

SEQ ID NO: 237358 - DNA, 122 bp, Homo sapiens
cacaggaaatttaccatacatctgtttaggtacagtttcctctttctgtaattacacattcgtgaaagccacacatacgcaaaataaataaaaatatttttgtgtgttgatgtcattctgct

SEQ ID NO: 237359 - DNA, 122 bp, Homo sapiens
ctttttattcagctaggggagtcttttgtggtcattttttcgactgcagactgagaaggacgtggtccacgtgtttttgctttggatgcctttatcttacactcattattttgccagtttgg

SEQ ID NO: 237360 - DNA, 122 bp, Homo sapiens
aagagagaaaaaggattctcttttcaacccttcatattctcggaaggaaaactgaaataccgagttagtatgtcctcaaccctggttaatttcccttgcaaacaaagagggacaggccttgg

SEQ ID NO: 237361 - DNA, 122 bp, Homo sapiens
cccgccccgtctagcctggcccggcctgcgcgagccccgcaagctctgcaggctggctagcgggcagaccccagccccacgtcctgctacccacctacgaaggatccggggatgggcagcgc

SEQ ID NO: 237362 - DNA, 122 bp, Homo sapiens
ccagagaccagatgcacctcttctatcctaatctgtaaacgacttaaaggagccttatctcggggctcttcggcttcatttcatgcttgatttactttaatttgtctgatagggcacaagga

SEQ ID NO: 237363 - DNA, 122 bp, Homo sapiens
tgacagagctccttgaagccagcagtgtctgatcaccaaagcccaggctcttaaacctaacgcctgtgctctcctctcctcctaactcatcccaaggtctgctggatccatgcttttctgtg

SEQ ID NO: 237364 - DNA, 122 bp, Homo sapiens
aggctgggctggtcttagcgtcacagggctgagtggcagccattgagttcgctactgtcccgaaaacagccctgcagtctctcccgtggggttcactacagggcggtgcttgccaccaatcc

SEQ ID NO: 237365 - DNA, 122 bp, Homo sapiens
ggttggggcctgatcagttttggggcatgaggagcgaggagcgagaagccagtttaggagcgtgagaatgctgcttgttcagtctcccggtttttggctccccgcctttggggtccgcctga

SEQ ID NO: 237366 - DNA, 122 bp, Homo sapiens
cagcaggcctgggagagcctcacgcggcttaagcacgggagtcggaatcacttcagagcccgcctgccgctttcttttcaaaattcgggcctttagattggatccaggaaaggaagtcattt

SEQ ID NO: 237367 - DNA, 122 bp, Homo sapiens
ttagcattcttggccctgcctgctattcatcaggtcccactcctctaacagcttgtcattcgaagacccaaaacatcccctgtaaagttagagctgcttacctgaaacagaaggtgtctgga

SEQ ID NO: 237368 - DNA, 122 bp, Homo sapiens
atagagaaagggtctcaaaagggacctaacaaaatgaaggctcttccgaataagcctctccggtttatttttctccatgtattggactaactccctgcaagttgagcctgaagctctgtcta

SEQ ID NO: 237369 - DNA, 122 bp, Homo sapiens
cgagggagagggaggtggcaaggatgactcctagttcctgacttgctcgcggatgtttgtcgaatgaatgatccagtgaccccaaggcagaagtatctcagagagatccccccactcccctc

SEQ ID NO: 237370 - DNA, 122 bp, Homo sapiens
tcagggaggagagggggcaggagagagggagggcaggagacagtcacttggccttaaatgcgcctcaagaaaaagtcggtccctgcaaaaccgcggcgacttttactcgaaaccagaggcgg

SEQ ID NO: 237371 - DNA, 122 bp, Homo sapiens
ggactggctcgggccgcgcccaccggtggtggagcggagggcgcggccaaaggtgcccaacgccgcccacgcgctggactccgctctcaaccacgaggaccgtctgcacttgcaccgagcaa

SEQ ID NO: 237372 - DNA, 122 bp, Homo sapiens
atgggaaggatgggtgaggcagaggtgccaatgcccggcccggtggcctgagcccagatccgccctctgatggggaaccccaggcccacagggacctccctctgcctgaccccagacctcct

SEQ ID NO: 237373 - DNA, 122 bp, Homo sapiens
gtgtcactccggcgtgacctggtcctggggtgtcactccggcgtgacctggttcctggggcgtcactccggcgtgacctcgttcctggggcgtcactctggcgtgacctggtcctggggtgt

SEQ ID NO: 237374 - DNA, 122 bp, Homo sapiens
ctggagtcgctactctcggtttactaccaccgattgccctgggtctgatggagccagtctcgtaatacctgcccagaattttactcacacatccgttggacacctgcataggggaagtggac

SEQ ID NO: 237375 - DNA, 122 bp, Homo sapiens
aaggtcaccagaacaagagctgaaaattcgtatgcatgaccgcctatctaccacgaccgacgccacgccgagtcgattggcaacacagacgagccggtcgaggtccggtcgagattggtagg

SEQ ID NO: 237376 - DNA, 122 bp, Homo sapiens
gaaagagaaacaccatcagaacaccacagtaacaactgttgtagccaattccagtgatttcgtggaatggtgagtaaaattttaagacacaaaatacgtgcatagcctcaaaacatctctcc

SEQ ID NO: 237377 - DNA, 122 bp, Homo sapiens
gtgcccacctgcgccatgggggggctggcccagggcccagagcgtggcgacaacgctgggcgtggtcctgccgtgcaggccccggggctctctctccctgacctcgccttgtgtggggcacg

SEQ ID NO: 237378 - DNA, 122 bp, Homo sapiens
gctgcagccgcgcgggagagattggcggtgctgctgcctgctcctggctcccacccactccgtggggcacacagccccaactgtgaccccttgcagcctgaggcaggggctcctgatccttg

SEQ ID NO: 237379 - DNA, 122 bp, Homo sapiens
ctccctggagtcccggccgggccagcaaggccaaggccactgtccactgtgatgcagcgtcggcgtctgcttctccactggaagaagcaagtttgcagtcagagcgtaaggtgcaactgcac

SEQ ID NO: 237380 - DNA, 122 bp, Homo sapiens
gacagtagtcaaaataaaagaggcacctgccaggtgaccatctctgccgggactcgaacccggaacctctggattagaagtccagcgcgctcgtccattgcgccacagagacctcaccacac

SEQ ID NO: 237381 - DNA, 122 bp, Homo sapiens
tctactttagactgatataagaaacaaatcggggaaaacgcgtcacgtgacgactggccccgcctcttcctctcggtcccatattgaactcgagttggaagaggcgagtccggtctcaaaat

SEQ ID NO: 237382 - DNA, 122 bp, Homo sapiens
gaactcctgacctcaggtgatccgcccgcctcgagcctcccaaagtgctgggatcacaggcgtgagccactgcatccggccttatatgtattatgtcctgctttctgtttgctttggacttc

SEQ ID NO: 237383 - DNA, 122 bp, Homo sapiens
ccggaagctccgccgccccacagtcccgcccgctcggccgcggcctcccggcctggtgcccgctcaccttgagctgccctaccagccgcaggaactgcagtagggaccgagccccgtggccc

SEQ ID NO: 237384 - DNA, 122 bp, Homo sapiens
gaaagtataaaaaatattaccctttactcaacttgcaagcatgattactccagacattttcgcatgtttatttctaggctttttttttctactttggaaaacagagtcaagactgtactgtg

SEQ ID NO: 237385 - DNA, 122 bp, Homo sapiens
aggcttggctgggggaatcaggggtggtggggcaatcagcatcccctccctggcagccttcgtgagactcccccgccccactgggtgtgaggtcccgcagtggggggcaagggagggtgggc

SEQ ID NO: 237386 - DNA, 122 bp, Homo sapiens
tgaaattagtcctagaaaagattcagtaaaaatttcaatataattgagtgtcttcacaaccgcaatactatgtaacaaaaaatagatttataattactatttctgttctaaagatatgatag

SEQ ID NO: 237387 - DNA, 122 bp, Homo sapiens
aaatgcttatgaagcaaaactaaatgcacctgtactgctacatccagattcacatacaaacgacaaagagcttatatccagactgcatgtgtctgtttttgcactgctataaagaaatacct

SEQ ID NO: 237388 - DNA, 122 bp, Homo sapiens
ttacttttatttctctctccttctctttttttctttctttttgagatagtgtctcactcccgttgcccaggccagagtgcagtggcaggatcacagctcactgcagcctccactcaggtgat

SEQ ID NO: 237389 - DNA, 122 bp, Homo sapiens
gtttggaagccagtgtggacatcctgtggtctgcgcgtacacatgtgacaggtacgtgcacgcccacatacaggaacacacagaggcctttggaagccagcatgggcagacaggccctatcc

SEQ ID NO: 237390 - DNA, 122 bp, Homo sapiens
acccagtagggctgcctgaggcagagcgcgacggaaccgagcctacaggccacagcggtacgagaccggcccaatccaaccccgacccctgcaaacttcacgccagccctccagaaaactta

SEQ ID NO: 237391 - DNA, 122 bp, Homo sapiens
ctgctgcagagaggagcctaattgcagtaattaagtggcagcctcagcaggaagcaagcacgtcatcgagtgagtcaggatgagaagccacctggcagaaagccaggggcctggctctgccc

SEQ ID NO: 237392 - DNA, 122 bp, Homo sapiens
atagtcatttagacatgctgattgactacagatcctccctgcttctgttttttttttccacgcaagagaagacaggctgttttcgcaataacttttctcacttctgcccacactggtgactc

SEQ ID NO: 237393 - DNA, 122 bp, Homo sapiens
ctgccccggaaccggaggagtgatctttcagagcaagaagccaaagttcagcctctagtccgttcccttccccgcctcgacggccctggtcgtctccatgaaaactcagtgtgggggatcgt

SEQ ID NO: 237394 - DNA, 122 bp, Homo sapiens
atggggcgggggccgaggacgccgagggaggggcgggcccaagtgtgaagggagtctgggcgataccattttgggcaggggttgagggtgataccaacttaatgggaggcgggtggcagaga

SEQ ID NO: 237395 - DNA, 122 bp, Homo sapiens
ctgggcggcggggcggggagctgggtggctgtgtggctcctaggcaggcaccgcgacccgcgccatcacccggttgccatgggaacgcgcggcaggagcctaggcgacacgagcctgggtgg

SEQ ID NO: 237396 - DNA, 122 bp, Homo sapiens
tagctctcagcagatcgaggagccataagggtgatggtctttccctggagttgggctgctcggtggccccagctctcctccgactgccccgccaaactgcgccttgccccgccagttgatgg

SEQ ID NO: 237397 - DNA, 122 bp, Homo sapiens
ttcctgcctcggcctctcaaagtgttgggattacaggcttgagccactgtgccagccctgcgctccccccccctcctttttttttgcttcctggtagtaactgttcttcctggaagagcaga

SEQ ID NO: 237398 - DNA, 122 bp, Homo sapiens
taaaaaataaagcagaactacctgtccagaaacccattatgagaggtgacagcatgctggcggccctagcagccctcactcgctctcggcgcctcctcggccttggcgcccactctggccgc

SEQ ID NO: 237399 - DNA, 122 bp, Homo sapiens
atacagtgggactaataacagcatctacctgacaagatattatgaagattagggcaaatgcgttaataaatgcaaactgcttaaaatagtgcctggaagtatgtgctggctatcatcatcat

SEQ ID NO: 237400 - DNA, 122 bp, Homo sapiens
gcctggacgccactcccaacagggaaaggtcggggtctcccccgcgcccccagcgccgcccgttccccctgcacccgccgcgcccctcacctgcggcattggcgtcctcctggccctgccgg

SEQ ID NO: 237401 - DNA, 122 bp, Homo sapiens
tctgagcggagaggaggatccgggaagccggctgcggcgggaggagggaatgcgcgtgcgcgctggaccgcctcgtcccgttccgtcccaatcattgtaaacaggcagaggctgggcggggt

SEQ ID NO: 237402 - DNA, 122 bp, Homo sapiens
gaagaaattaaataaaataaggccacagtagttgaagagttagtaactatgctggagagacgggcagggatataatttaaaggttttaagcaggggaatgactcctataataaatatctaag

SEQ ID NO: 237403 - DNA, 122 bp, Homo sapiens
atgtggacaccagaaatgccccgttgtcctctctgctctcccccgtcacaggtcagaggccgggattctctacgttttcgaactccttgccaccaaggctccagtacaggaaccagcaggag

SEQ ID NO: 237404 - DNA, 122 bp, Homo sapiens
cagtagagctggaaagccaggctgggtcctgtccttaccttgtattctggagttcctcgccgaactcttttaatctctgctcccagctctatgaacctttggcttgcagtcccaacacgggc

SEQ ID NO: 237405 - DNA, 122 bp, Homo sapiens
tggtgtaagacagcaggctgtagttcaaggacccaagatagggagatagatttcctctatcgcagtagtgaacagagacaaagtgcttactaggcaagttcacattcacacagaatttgacc

SEQ ID NO: 237406 - DNA, 122 bp, Homo sapiens
cttgcgagtggagatttagagcccgggaatgaggcgccgtgtccttaggaatctcgcgcccggggagcgctgagggaccggggagccgggtggggagcgggcctcggggcgcccggcggcgg

SEQ ID NO: 237407 - DNA, 122 bp, Homo sapiens
gggatattgtaaagactgagatgacacctgttacagtagacatggaaaatatttaccaaacgcatgctgaaggggatattggcaagactgggacgatagccttgtcagaagtggaaaatatc

SEQ ID NO: 237408 - DNA, 122 bp, Homo sapiens
acagagaatgcaacattctgagataggaggaaatgcccagaatagcccaggctttgtctccgtcattcctagaacagcctgcaatgcttggctcaccaatccaagtggcctctgaggtataa

SEQ ID NO: 237409 - DNA, 122 bp, Homo sapiens
ccgcaaagagttaagagccggttcccgagacggcttcggcggctccgggtccccagaccccgctcgccgctcctgattggctgagcgcctgtcagtagtaaagggtatcagatggcaaagtt

SEQ ID NO: 237410 - DNA, 122 bp, Homo sapiens
ggtcacagttcctgcacatttttcttgctctccatgacctagtatctgccaaaatataatcgatgttggaaaaatttttacccccagccccatgtaagtatgttgtatttccccaactagtc

SEQ ID NO: 237411 - DNA, 122 bp, Homo sapiens
ctctggttaatttcagattaccagagatgtcactgaacctggagctggaagagatgtgcacgacttgaaaagatgtacaaaatttggcttgttttgtttggagacagagtcttgctctatcg

SEQ ID NO: 237412 - DNA, 122 bp, Homo sapiens
aggaggagagagtgggtggcagcagggcagggcaaggcagggtggagcagagctggtctgcgatgcatttccccaccaaggtttccaagttcccccaaagcttggggtaccccttgctttgc

SEQ ID NO: 237413 - DNA, 122 bp, Homo sapiens
ttccaaggccagtgttctttcttatgacgcattttctgtcttgggttacaacagcactaacgacaggtagcattgcacacaggcagctgctgggaagtctccgcccccatctctggctagga

SEQ ID NO: 237414 - DNA, 122 bp, Homo sapiens
atatcaataacaggactatttcatcttagatctatcctttatggcttaaaagcactttcacgtacattagctctttaatcctatgaaaggcagggtttgctacccccattttacaggagaag

SEQ ID NO: 237415 - DNA, 122 bp, Homo sapiens
tatttagctttttcagactctgtattagagacaggtaatgagatcccctttgggaatgagcgatgaactggccaaattacagttctaactagataagcgaaagccacagcaggccaggtgaa

SEQ ID NO: 237416 - DNA, 122 bp, Homo sapiens
gagagcgagctgagtggggggtcttcccttcccccatcccgctggccccagacaagccaccgcagaccgcggcgaaatcagttaagctcttgcgtgcaccagttcccggagcagagtctgaa

SEQ ID NO: 237417 - DNA, 122 bp, Homo sapiens
tgaaatacacagtgaacacactgttaatgaacagtgagggaagtgtcagtattgtgtgcgcgtgcatattcatggactgctccctgacttcagaagaaaacaattgcagaatcaaagaggct

SEQ ID NO: 237418 - DNA, 122 bp, Homo sapiens
cttaaccctgcttcgaggtggtttggagaggaagaggaaagctgtgtctttctgcaatatcgtgagggaagccgaggccctgaatcatcaaagagaaggagaagaggactaggcggctgcag

SEQ ID NO: 237419 - DNA, 122 bp, Homo sapiens
aggccaggaaacaagaggtttcgcgaaggactctggagtcccgctgcctggctctgaacccggctctgccccttcctagcttgtgaccattggtaaatgcatctcatgcatctctctctgcc

SEQ ID NO: 237420 - DNA, 122 bp, Homo sapiens
aaactcagaagtccgcgtgggcatttcactcactcactcaacaggtatttattttgggttcgcacttaacccatgattccccgatttgctctggggtcccagggtggggtgggcaactcaag

SEQ ID NO: 237421 - DNA, 122 bp, Homo sapiens
cgcatttttccaaatcaaaggcttcccttcggatctaattatttctcctctacagggctgcgggagggggaggggatgtgagactagggcaacagattaagattgaaagtcctttctcgcag

SEQ ID NO: 237422 - DNA, 122 bp, Homo sapiens
cactgctccaagatctgatgcagtctgaagataggtccaatggaactgttgttattgagtcggctagacagcctgaaatcccctgaaatgcagtgattcattctctggaaatacacctttcc

SEQ ID NO: 237423 - DNA, 122 bp, Homo sapiens
cacacaaacagctagagatgcatagaaagttaaaggcaactgaaactcaccttcccaccccggaaaacatggtaccaaacggaagtgcctccaaagtcgatgtggaagtcggtgaaacaacc

SEQ ID NO: 237424 - DNA, 122 bp, Homo sapiens
gcagttagtgcgaatccctcaagttctcgagggagcctgaaatcactgggttttccaccccgatgcgtccctggaccgtctgacattttcaagacgccctccttggctgcgcctctcctgaa

SEQ ID NO: 237425 - DNA, 122 bp, Homo sapiens
gccgggtgtggtggtgcacacttgtaatctcagctactcgggaggctgaggcaggagaatcgcttgaacccaggagacagagtttacattgagccgagattgccccactgtactccagcctg

SEQ ID NO: 237426 - DNA, 122 bp, Homo sapiens
tggagatttctggagccgccaatccggaggcgggggtgggcggtgcgaaggcggggacagcggggcttgcagggtccgcccggcggcggcagggggcagccgagggctgcgcagtgggggag

SEQ ID NO: 237427 - DNA, 122 bp, Homo sapiens
tcagtcgagtggggccaggcaccctgtcctggggtctctgtgacacagacaggagcagagcgggcagccccaactcaaagtacagtgctcagtgactaggtttgggtctgtattgatgtcta

SEQ ID NO: 237428 - DNA, 122 bp, Homo sapiens
agcactgggacgagcccatctgatttaagaccacctgaatgctgagagggcatgactctgcgttagaactctgcgctactgcccacgcatctcacaaagtctactacgccgcgcgttctcgg

SEQ ID NO: 237429 - DNA, 122 bp, Homo sapiens
atggattgacatagggattagatcatttgaatttttaacccacagcacaagtccttcaatcgttttcaataaacagagggagagggagactctgatgaaccgttgctcacgtgttgaacagt

SEQ ID NO: 237430 - DNA, 122 bp, Homo sapiens
ggagcactggcgctttagtacacaggccagccaggctgactgcagaaggccttgggaggccgggggagctggatgccccagcaatgaatcccacacctcagggactcagtgcggttgaagtg

SEQ ID NO: 237431 - DNA, 122 bp, Homo sapiens
agaccacagcagcggagcccggtccccagccacgaggcgggcggccgcacacccacctgccgagtcgtagcctctgtactccagccgctgcaggcccttgatgagggtttcgaagatctcct

SEQ ID NO: 237432 - DNA, 122 bp, Homo sapiens
tcagcacctcctcggcctcggtgtctgctctggccacacttgaggagcccttcggcccgccgctgcactgtgggagccactctgtgctggcgcaggccagagccagctccctctgcttgcag

SEQ ID NO: 237433 - DNA, 122 bp, Homo sapiens
ataataataacaataataaatggttgtttgacctttgctccctgggtcccttctataggtcgcaggcagcagaaaatgctaattgtgaaagtgagaacgcgcctccatggaatacccccggc

SEQ ID NO: 237434 - DNA, 122 bp, Homo sapiens
gccagagcattcggtcaaagcagggcgccacaaccacagagcaaatgagggaagtggggccgagacacaaacatcctgtcctcatgacatcaaatggctccagcttgagaatcggggtcact

SEQ ID NO: 237435 - DNA, 122 bp, Homo sapiens
tccaagtctaatgtttaagcctagacagctccaaggggacacctgttggctgttctccctcgcacctgcccaggtggctgggcctccgactgtcctctctgcacctcaccccttcctgacac

SEQ ID NO: 237436 - DNA, 122 bp, Homo sapiens
ctcacttgaccttcgactgactcgaggcccagagaagctatatgggttcgttaaagccagcggcggccagctggcgggggtggcagtattggggtgggtacaggggtcagccgactcctagt

SEQ ID NO: 237437 - DNA, 122 bp, Homo sapiens
atatgatcattttcatgataacaggctgccaggttgctctgcaaaattaaatgccacaggcgaatccctatagccttgccagcacagagtttcatctttttatttttatttttgctaatttt

SEQ ID NO: 237438 - DNA, 122 bp, Homo sapiens
gcaggtgtgttgagtccaggttggctggaatataatctatctgaacgcaagagagaagcccgaactaagaagactgaagaggccagatcacagatctcgtaagccaaactaagaagtttggt

SEQ ID NO: 237439 - DNA, 122 bp, Homo sapiens
tggctgcgatgtttgctctttgtctttacggtgtttctgaacttggagttctggaggctgcgcctgccgggccgaggagggggccctttctgcagccgcaggcggaggcccctcgcagcccg

SEQ ID NO: 237440 - DNA, 122 bp, Homo sapiens
gacgttgttcccccgccccaggacacagaagcacacacacacccacaaactcaaagaattcggcacagtagcattgagatttagactgaagagacaggtgaccacgattcgactctagcctc

SEQ ID NO: 237441 - DNA, 122 bp, Homo sapiens
aactccatagatagctcaactgattgagcttacacaattctaactgaaaaattgaagttgcgctagctttctaccagaagggtgccaaaaccattgcacgtagatcagctgcagacaagagc

SEQ ID NO: 237442 - DNA, 122 bp, Homo sapiens
cctatcagaggaagtgacatttaatctgagactgaaggatatggaaaaactagcatgggacgacctgcaagaagaccattccaggaagcagaaccctaagatggaagaagtatgaattcttc

SEQ ID NO: 237443 - DNA, 122 bp, Homo sapiens
ccgcggcgtcctgggccggggatgtgcggcccagccaactggggctacgtgctgggcggccggggccgcggcccggacgagtacgagaagcgctacagcggcgccttccctccgcagctgcg

SEQ ID NO: 237444 - DNA, 122 bp, Homo sapiens
aaaaatcttgccagtagtatccgattagcttagttcataaggccagggtgggctgtggtgcggtatttggtttcacagggcaggtggtgctgatttaggccagtgaccgaaaaaaaaaaaaa

SEQ ID NO: 237445 - DNA, 122 bp, Homo sapiens
acactgacccctagtggccgaccgggccctcgcagcccccgcgcccgccctcgctccgggcggccagagtcgcagtcaagtcgctctttgcacagagcagctctgtgtggactggcgggggt

SEQ ID NO: 237446 - DNA, 122 bp, Homo sapiens
cgttccccttccagagccggtacaggaaggccctggacatggaggagtacagcctgtcgccgtcgtcgccctcctccaacacgtggctccttctctgcctccggtgcctcttcttcacccgc

SEQ ID NO: 237447 - DNA, 122 bp, Homo sapiens
ctcaccccccaactaggcaaaacaaacagcagttactgtcaggagggaggagggctggggcgagtctggtgggttggcccatagctattggcggaagcaaacgaaacagaggcatggggacc

SEQ ID NO: 237448 - DNA, 122 bp, Homo sapiens
acctttcaccttttacatatactttgtttaaaatgatgctgattcatcccaaaggaattccggtgcatgggagctatcttggctctaaccaaaaacactcatgtgccgccctgcgtccaaca

SEQ ID NO: 237449 - DNA, 122 bp, Homo sapiens
cctctccccgggtctggtggagccgcagctgttacccggagaccgaggggcggaaaactgcgcccgctgcccgcccctcccgcgcggcgctgccaccgccgggaacaaaggagacaaagccg

SEQ ID NO: 237450 - DNA, 122 bp, Homo sapiens
tgaggcctggaacaacccggtgggaagccatggagggggtcccctagcggaggctgggcgcgggccagtgcgcgtgcgcggctggaggctcagcgcgcaagcgtgcgcgtgatttggccctg

SEQ ID NO: 237451 - DNA, 122 bp, Homo sapiens
gaacgagtccggcgacccacgctttctgatccccacaagtctaggatctgagtgggaaaccgccgcggagatctcacagaccccgaatagggcctccaccaatgcaccgggagggagtcgga

SEQ ID NO: 237452 - DNA, 122 bp, Homo sapiens
actttttttttttccttttgatgaaattaattatgaacactgcctggggtcattggactccggagatacatgtcaagataaaatatttcagaaacacttatatttaataatttaatacggtg

SEQ ID NO: 237453 - DNA, 122 bp, Homo sapiens
taccttgctcccatccccgctgcagccaggggcatgctcagtcaccccgggcagtgtccccgctgtggccctgtggcaatggccaccaaggttgacaaagaggcttgctgggaggcctacaa

SEQ ID NO: 237454 - DNA, 122 bp, Homo sapiens
gaagggaaattgagggcctcttccagagaattgcctttgaaagatcctgtcattatacaccgaaggcgcccacccgggcctgctcctgaagctagctgtttgcagtgctctcctgtggcacg

SEQ ID NO: 237455 - DNA, 122 bp, Homo sapiens
gagtaagaacaagtaggcttgttcttctactttgcttcagaattcagttaatgccaaaagcgaagatcaagcccatgttgatgtctcgttgctcacctgcatttccagagagtgtgacactc

SEQ ID NO: 237456 - DNA, 122 bp, Homo sapiens
ttccgcccgagggtcgcggggctcagagtccggcaggctccaggcggggcaggggatgtccgcggcccggcaggcgcacgcccacctgtcggccgcgcaggcgcagcagcgggccggcctcc

SEQ ID NO: 237457 - DNA, 122 bp, Homo sapiens
cagcataggccagagtgagtctgaagcacaagtgcaaattctgccttttcccagtctgcccgccctgccagccccggggtgggccatctgcacggcagtccacggggcctgccgacctccgc

SEQ ID NO: 237458 - DNA, 122 bp, Homo sapiens
actttcaactttgctatttatttctgtgtatgtgtgtgtgggcagtgaagctacagccagcggtgatgatgatcaatatctctggctgtttttatagcctatttccatctctcgtgatgtgt

SEQ ID NO: 237459 - DNA, 122 bp, Homo sapiens
ggtgaatatggcccatcaatccggcagcaaacatactttttaaagctaagaatcttctttcgagttggagcagccttttcaactgtcctgcctcagctgggacataacaaaataccatagcc

SEQ ID NO: 237460 - DNA, 122 bp, Homo sapiens
agtgctcaccgagccaggctctttaaggtattatctcatttaatcaccactaccatgtaacggcatagggaggcaaagcttacttccctacactgaggagagtacacgaaagctgctgtgga

SEQ ID NO: 237461 - DNA, 122 bp, Homo sapiens
ccacccggcctctgctgtttactccaggaggcagctcttggaggtcacccaggatgctggcggcagcatggaggaaggggtacaatagagaggggaggcagggctccgggactgggctccga

SEQ ID NO: 237462 - DNA, 122 bp, Homo sapiens
ttgggcgagtgtttcttacagcacctcgatggggaaacgtgattgggtgagtgtttcttacggcagctccatggggaaacgtgattagacgaatatttcctacggaagctcgatgaggaaac

SEQ ID NO: 237463 - DNA, 122 bp, Homo sapiens
cacctcccaggcggggtggcggccgggcagaggggcccctcacttcctagacggggaggccgggcagaggcgccccccacctcccggacagggcagctgccaggcagagacactcctcactt

SEQ ID NO: 237464 - DNA, 122 bp, Homo sapiens
agatcagcatcagtaacgcggaggcccggcaagccctgccgcacagctactactggagcgcgccggctccctatctgggaaacaaagtaagtccacgcttgcttcccgctattctgctttaa

SEQ ID NO: 237465 - DNA, 122 bp, Homo sapiens
aggataaatataaaagtgataggttcaccagggacaaccctgcactttgagctccactcgcgctgcgaatctcgtgctattattgacctgtttacagatgaataaactagggttcagagagg

SEQ ID NO: 237466 - DNA, 122 bp, Homo sapiens
atatagacagtgtatagtttatagtcaaaatataatgtacagccagtccagttcccaaaccgattgtctgggttcaccccttattagctttgccacttgttatctgtgtgacctcaactaaa

SEQ ID NO: 237467 - DNA, 122 bp, Homo sapiens
gtgtgtgggcggggcttgataggcaggggcggtgcgggggcgtgggcagcacaagccgtgcgctcccgggctgcgaggtctggctaggctacgggccacgcgccgccgccgctgccgccgcc

SEQ ID NO: 237468 - DNA, 122 bp, Homo sapiens
ggtgaccatgagggagaaaatgccaaggagccgctcttgatggagggagactaaacgcaacggtggtaccagcctgagtgggtccggaaacgatcaggcaaaccagaaaggctgcaaaggac

SEQ ID NO: 237469 - DNA, 122 bp, Homo sapiens
gttttggaacagaaggtccaaaaacttggttccaacatcaggggtgtgtgactggaaaagcgcgtgtgtgtggtgtgtgttttgtttttgtttttggagaaactgctgcattatgaattgta

SEQ ID NO: 237470 - DNA, 122 bp, Homo sapiens
cactgaattagagcccatcttaatccaatatgacctcttcttgattatatctgcaaagaccgtatttccaaataagatcatatttacaaggttcagggtttagcacttcaacatggcttttt

SEQ ID NO: 237471 - DNA, 122 bp, Homo sapiens
cagggctttcgattaaacaagccaagttttccccccaaaaccaagaggctaggtaaattccgcagccgccggcagctcgaagccgtgcccatttcctctgactttcccgatctctgtcctaa

SEQ ID NO: 237472 - DNA, 122 bp, Homo sapiens
tgtctttatcctagttccacaccttggtgtgggttactgggtgcaggatgaactgtcgctcggaggtgctggaggtgtcggtggaggggcggcaggtggaggaggccatgctggctgtgctg

SEQ ID NO: 237473 - DNA, 122 bp, Homo sapiens
tgagaaccgagcttggtgctagaatctacctgaggttttctagtccagctaccgtttctccgcccacagggcagaatctgggcctgtggcgggacagcaataaaaggaggaattgtagtgct

SEQ ID NO: 237474 - DNA, 122 bp, Homo sapiens
ctggggatgccgccccctcggaagtgcctgaaatctccccacttacccaactagcctcagcgcctcctgtgtgctgcagcagatggcgcgctgcagaccccagcctggtgcctccgcgactc

SEQ ID NO: 237475 - DNA, 122 bp, Homo sapiens
cctccttggtgggagggggacccatgggtggcctaagagcagaaataatgcctggtgctacggaagcaggctgtgggcaggcgggccctgacacgccatcagcatttcttggcatcacgact

SEQ ID NO: 237476 - DNA, 122 bp, Homo sapiens
taaattcaactccacaaccaagagaaacgcctgaatgtttcaaaattacagtgctgaaagcgtttcttttcagatattcatcttaggaagagtctgtggaaggggatttttgttctctttgg

SEQ ID NO: 237477 - DNA, 122 bp, Homo sapiens
cctaggactggactcggtctacgacttcgggtctcgcggttgacgaagccggtgcgggctcgaactgaagtccttcttggttggggaagaaggcatgaagcttttgcactgccccagccggc

SEQ ID NO: 237478 - DNA, 122 bp, Homo sapiens
attataagtaatctagagatgatttaaagtatacagaaggacgtgtgtacataggttatacgcaaataccacaccattagttatcagggacttgagcatctgcagattttggtatcctgggg

SEQ ID NO: 237479 - DNA, 122 bp, Homo sapiens
gcgaggccgaggctgcgtccgctgcggccccgggcggtgggggggccgggcgtggccggtcgcggacactcaccacaccatgccgtaggcgccctcgccgatgtacgagaggttggtgtagc

SEQ ID NO: 237480 - DNA, 122 bp, Homo sapiens
aggaaatatcctctccattgggcaaaagccgaggaaatgactgtaactttccttcatcctcgtcatttacatagggcataccccaagtagagggtatttaaactcccaaaaattctgtaacg

SEQ ID NO: 237481 - DNA, 122 bp, Homo sapiens
tgggcctctgccggcctctgattggatacagtagccagaatgacgactcaatcagtgcttcggttgttgctttgcggcgttttccgcggggaaactgtgtaaagggtggggaaacttgaaag

SEQ ID NO: 237482 - DNA, 122 bp, Homo sapiens
actaaactaaatagtaagctccagactttatttggatttcactgatatccttttaaagaacgttgtctgggatccaatccaggatatcacattgcatttaatcatcatcttcgtagacgctt

SEQ ID NO: 237483 - DNA, 122 bp, Homo sapiens
agggtgaaggtggatgagtcgtggtgtggccgcagagacggctgctcgtctggccggtagcgaaccacaaagttcatcaccgcccgcgcctgggggagaggagggaagaggctgcagggaca

SEQ ID NO: 237484 - DNA, 122 bp, Homo sapiens
ccccccaccgccccctcctccctctcggggccctgctgacagggggaagcttgggcgggacgctgcacaatacgattttctccaggactgatggttctagatccttgctgtccaacagggcc

SEQ ID NO: 237485 - DNA, 122 bp, Homo sapiens
aggatggcacgtgcgtggctgtctcctgtgtgttaagtgccctgagagggcttgtccccacggaagcatggagccggctctcgcgcaggccaactagatggatgtgctggaacaagggccgg

SEQ ID NO: 237486 - DNA, 122 bp, Homo sapiens
gggaaacaggagaaggagcgtgtacttgataattgtatagtcctggtaggtttggaaaaccgctcagcatcccctgaaactgtgaggtccatgaagtaagatgtgatggtcacattcatcac

SEQ ID NO: 237487 - DNA, 122 bp, Homo sapiens
gtctaccttcttagcagacgtgtgccacctccccatgggggaagcaacatctctaaaaaacgaggaagctgaaggtcttaaggcttttgcaaattttgattctctttttttatctccttata

SEQ ID NO: 237488 - DNA, 122 bp, Homo sapiens
ggatttcccaattcctcgccctcggcctccccacggctcccaacaacgcagcaccccacccgagagccaggccttggtcgccgcaactgcagccctcaccatcctgtcaccgggctccgctc

SEQ ID NO: 237489 - DNA, 122 bp, Homo sapiens
tgctctgaagggtatttgcctatgagggaattaactgtacactatttaatccaccagttccggttcattagaaaaatgcagttctcgccggacatggtggctcacacctgtaatcccagcaa

SEQ ID NO: 237490 - DNA, 122 bp, Homo sapiens
ggaccacaggcaggcaccgctgtctaactaatttttgtattctttctagagatagggttccgagatattgcccagtcttaaaccccggactcaagcaatgcgcccctctcggcctccaaagt

SEQ ID NO: 237491 - DNA, 122 bp, Homo sapiens
tatacaatttatcgtgtctccccacccaacccccatctcctagaacccacttccctaacccgaaaatacggggcaagaaacctgtctgtactggtcacaaccctatccctgggcctacaacc

SEQ ID NO: 237492 - DNA, 122 bp, Homo sapiens
ttcaaagtgttgtgttagatcccactctgaactgaacccaaaattacttcccacattttccggcttggtaaattaatcactgtggtatccacaatcaaagattcaatcaagaaacttccaga

SEQ ID NO: 237493 - DNA, 122 bp, Homo sapiens
tccccacgtccctcttctttcccaccccctccgtggctctccagcttcctccccagcccccgcagttcctcggctcccccaaaattgcagccaggggaaggagccttgaaactctccagccc

SEQ ID NO: 237494 - DNA, 122 bp, Homo sapiens
ggtggcggcgccccggccccattacgcaatgcaggttacgcggaccgcgccgcgagcctccgccagccgcccagtgtcgtccgccgccccaaagggcaccagtcctcacctgagacgctagg

SEQ ID NO: 237495 - DNA, 122 bp, Homo sapiens
aggtgcggctgggttgctacagccagagctgggcggtggcgggcgctgctgaaggagtctcgctgagctcgaggaggtggcgcgatggagggactggaaggtgaggcgatgaagggatgagg

SEQ ID NO: 237496 - DNA, 122 bp, Homo sapiens
acagcagcgtctgtgtagtttgcaactaaagaaagttgcttttgaactccataagctgctcgaggtcaggtactgccttgtcctgcatctccagctcctagcctggtacctggcatgtagta

SEQ ID NO: 237497 - DNA, 122 bp, Homo sapiens
taggtatgctcatccttaaccttctaggagaaccggagccttaccatcaaacttcggaaacggaagccagagaaaaaggtagaatggacaagtgacactgtggacaatgaacacatgggccg

SEQ ID NO: 237498 - DNA, 122 bp, Homo sapiens
ccgcggtacccgcatgttgctatggcgacgggaggcagcggccgtctctctccatggcaacgggagggaaaagtttctggcaaacaggaatggggggtcatttcaagagggcgcagggcgct

SEQ ID NO: 237499 - DNA, 122 bp, Homo sapiens
tctttttcccaataactgctgaacagccaacacacctgccaaaataatttgaaagaagcccggcattagagcaaggtctgagcaaagtgcaaactaacaatggggccctaatatgcaagact

SEQ ID NO: 237500 - DNA, 122 bp, Homo sapiens
aagcaggcagtgaagctctcaaagagaaggcactgctcagtccacactgctggtgcccctcgctggccgtcttgacactcaatgaagtgtttaagacacagtgtctgaatctcaactctgac

SEQ ID NO: 237501 - DNA, 122 bp, Homo sapiens
gcctggggcttgggtgatcatcacagggttctctgagaaccaggtgtccaagagcccagccgctttcctgcccctcaccatcccatgaggatgaacttattcccctctgagatctctgattc

SEQ ID NO: 237502 - DNA, 122 bp, Homo sapiens
ggaggaggggagtggagagggggaggaggaggcggggcgggctcccaagccaccccgctgcgctttcactgtcccgcctgcctcaaggcttccccacaagactcccacagcctggaggctgc

SEQ ID NO: 237503 - DNA, 122 bp, Homo sapiens
gggaagcagcctcgggagtgggggaatgggtcagatgcaagcacagaatctcccccatggcggcgtctagtgcctctgttaagatcgcgctctgagaaacaacgctggcattcaaatccagg

SEQ ID NO: 237504 - DNA, 122 bp, Homo sapiens
cagtaaattggggacttaagataacacggccagttcccagatcccgaaatgttggtggaacgtgatgttttggacttccgacatgtcacagaggatcccagggtcaagttctgggttcgtga

SEQ ID NO: 237505 - DNA, 122 bp, Homo sapiens
gacggtcagcctcccgcccggagccgcggggagaggaagcaggtcggggtctccgggacgcgcagacacccagacaccggcggcctcctcccaccaggctggcagtcgctgagccctggcgc

SEQ ID NO: 237506 - DNA, 122 bp, Homo sapiens
tatgcatgagtatttgtgcaacacaagcacaactaagtatgtatatacacatgacgcacacgatgccagggcctagacctcccaagggctgtgctcctgctcccagcagccctctcttagaa

SEQ ID NO: 237507 - DNA, 122 bp, Homo sapiens
acacagaaatgcagggaagaaagtaatttctctccacccctcctagttcccagggggaagcgttcgctttgggtccttctttggctattacatttctgtatgtattttgtttttctacagtg

SEQ ID NO: 237508 - DNA, 122 bp, Homo sapiens
gaaatgtagttgggtgtcggattagaactacaaatcccggtactcaccgcgctgcagccccgaccgtgagggcgctttctggtgaatctgaatctcgtttgtctgtgacatggggaaagctg

SEQ ID NO: 237509 - DNA, 122 bp, Homo sapiens
agagagaaaacatgccccaaatcacacacctagtaagtgatggaaccaaggcagtgtgcccgggtttgaagcaaagcagtggcatgaactcatgtgtgtctacttcagtgtctggaacgtgg

SEQ ID NO: 237510 - DNA, 122 bp, Homo sapiens
agggctggggctgccctttgggaccctggggtgcagagactgaggcttaataacgaatcacgtgccccttggccccagattgatagcaggcgacttgcttttgtgggtgctgagcacccttg

SEQ ID NO: 237511 - DNA, 122 bp, Homo sapiens
ctgtcactgtctggaaattcttcacaatttttgaacaaagggcttgacatttttattttgcgctgagccctgcaaatcatgtagcccatcatgcatacaaggttttcacttggactgttcat

SEQ ID NO: 237512 - DNA, 122 bp, Homo sapiens
aaggaccaatcagagcattaaaaacaggcttttctagcctcccagggaaggctaaggtttcggccctgctgccatctcctcacattttccactgatgtcaccccaggcaaataattggtgga

SEQ ID NO: 237513 - DNA, 122 bp, Homo sapiens
gaggccggcccctccctggcaagcggctcaaggcttggcgacggctcaggggaggctgggcggactagggggccgcgcccctccgaactctcgctgggcctcggtcatgccacctgctttgg

SEQ ID NO: 237514 - DNA, 122 bp, Homo sapiens
ctcccggtgtgcgcttgaagtcgctttgagattgaatggggtggctcgggcaatgacgtgcgtggtaggacatggggaatcctgagccggtaactctgagaagggcccttttctttcctctt

SEQ ID NO: 237515 - DNA, 122 bp, Homo sapiens
ggctccccgcccttgggccagaagctcgaggacaacctgtgtgaccctctgttgccttctcgctttcctctttttccctcttttctccacgtgtggtgacgacgccctctctgcaaacgccc

SEQ ID NO: 237516 - DNA, 122 bp, Homo sapiens
ctggataaagcccataagctgggtctcaggctgggctcagcaaaggactcgccttgcaaccgacaggccattcccacccccacacacaacctcccctgttttcacattcaccatggcatccc

SEQ ID NO: 237517 - DNA, 122 bp, Homo sapiens
agagatctgtgagaagggataagacctcaagacaagtaggaagcagagccttccacggcccgcgccctggcggccccaagtcagcggcggagacggcgcccaccccgctccaacgtggagca

SEQ ID NO: 237518 - DNA, 122 bp, Homo sapiens
aaaggacttcagcagctctgggtccgattcatgtttctgggcatccctttttcctggtcacgtagcagccctccccatccccatttctcttttgcatttaatttcccagaggcggcttttgg

SEQ ID NO: 237519 - DNA, 122 bp, Homo sapiens
tttagcaaaaattcctttctaaaatgtatgagcccgagtaacacattcatttttgtgatacggagtgaaatcaggcatgaatttttcacgtttctttgctcattcattgggcgttaggtgta

SEQ ID NO: 237520 - DNA, 122 bp, Homo sapiens
ttcccccatgccccaaagctgtgcacgccagggtgttgctgtgtctgacctgtcccatctcgagtgagtgcaggcaccagccgccctgctgtgcgatggcatctgatcagcactggtacccg

SEQ ID NO: 237521 - DNA, 122 bp, Homo sapiens
agccgctgggggcggggggcctggcggaggggcagtttcacctctccagcagggcctggccggaaagcttaggcaatggaggctgagcgcacccagcttcctgttgtctgggcctgacccaa

SEQ ID NO: 237522 - DNA, 122 bp, Homo sapiens
gagccagcaggtgcgggcggacaggtggggcgcacctgagtatatgtagggcgtcgggggcgcggcccgcgcgccccgggagcgcgggagggggaggcgggaccggaggggcggccgaggat

SEQ ID NO: 237523 - DNA, 122 bp, Homo sapiens
atcagctacccccgctgtgcttctgttgtgcactgggagacagtctgtagagttcataagcgggagagtgggatggaagattcctgcataaacacgaggccctcagagggacgcagccacag

SEQ ID NO: 237524 - DNA, 122 bp, Homo sapiens
tccctctggccctggtgggccctctgatcctccaacccgccttagcctctcccggtctgacgagcggcgtgggaccctgagtggggcaccagctcccccaactcgccatgatttttcctttg

SEQ ID NO: 237525 - DNA, 122 bp, Homo sapiens
gtggaagcaaaacaaagccatggatgccaggtgttggctctggcacagtgctggctctgccgtttctgtgggattctcgtcctgactcagccactcaatccctgtgtgaccttggacaagtc

SEQ ID NO: 237526 - DNA, 122 bp, Homo sapiens
ccggggcaccgcggggctcagttcagctttcggcgcagatggaggccatcggcagaaacccggagctacagccgagctgagcttacagtgctcggtaaccctcaggcactggaaataatttg

SEQ ID NO: 237527 - DNA, 122 bp, Homo sapiens
agggaggcgaaatgatttctctaaggtgtcgtctgactcacatccacacacatcttccctcggaaaacactcgttctgcctgaattgaaaccagtgtgtctagccctgagccagttagcctc

SEQ ID NO: 237528 - DNA, 122 bp, Homo sapiens
gagggggcggggcctgatcggggcggggtcttcgggggcggagtcggctggggatggagccgctcgggccgagccctccaccgcccaccatcaccgagtccggcccaggctcctagcgcggc

SEQ ID NO: 237529 - DNA, 122 bp, Homo sapiens
gagagaggaaacggtcgacggtggccgatagtggtcctactgtcgtgggactgctctgcgcgctcccggtggggcgcgcctgcgcattatgctggtctccatggcggggcctcggagccaag

SEQ ID NO: 237530 - DNA, 122 bp, Homo sapiens
gagaaaaacgatccttaaaggtaggaggaagccaaagatggcgagaggacgagtggcctccgcaacggatcatcaaatattatggtcctgccacctgggctgaggatggttcatggggttat

SEQ ID NO: 237531 - DNA, 122 bp, Homo sapiens
cttccatgactgttcggatttcctttattttgggggcagttcatccaaacttctattaaacggcaactagttcacttttgagaagtggtttacaagaaacaacaacaacaacaacaaagcag

SEQ ID NO: 237532 - DNA, 122 bp, Homo sapiens
cttcaggacaattcgtgatggcgggggctggttccgccgctgtatcgggggcagggaccccggtggcggggcccacaggccgcgaccttttcgccgaagggctgctggagttcctgcgaccc

SEQ ID NO: 237533 - DNA, 122 bp, Homo sapiens
ctgtgtggctacctcttgttcttttttgactgagtctcactcacagccctgcgaatccttcgggcaagaagcaacaagttgcaggctgcttctacatctgcctaggaagagggtgttaggtg

SEQ ID NO: 237534 - DNA, 122 bp, Homo sapiens
tcactgcccggggtgggcggggccggctggcagctcggagtgtggggcccaccgagcccacgcccacccggaactcgtggtggcccgcaagcgccacgcgcagccccagttcccgcccgtgc

SEQ ID NO: 237535 - DNA, 122 bp, Homo sapiens
ccccaagatcatgccctcgaacagcttctgcccaccgatcgcacgtcccctgggcatgttcgggcagcggtgaccctcagccacatcccccactagcccggtcccgggcaggcgagcgcgct

SEQ ID NO: 237536 - DNA, 122 bp, Homo sapiens
ccagagcgggcaggcgtcccgggagtcttgagcgcggcatggtctctgcggccctaatttcgcagtctctccccagatcaccgcacagcagatcaccacccctggcgcgcagcagaaggttg

SEQ ID NO: 237537 - DNA, 122 bp, Homo sapiens
acaggtcaccttagcggtaaaagcctttctcaggagtgagagctaccaggggagacaaaacgggtttggttttggaacctggaggaagaaggcaaaatgagaagagtccactggcagtgagt

SEQ ID NO: 237538 - DNA, 122 bp, Homo sapiens
gctctgactccaccccttctccggagcctgggaggcggggctgagaaccacagagatggccgggcctccgagcggcccagggcggccggaagtttgcggggcggggcggacgcgggtggcca

SEQ ID NO: 237539 - DNA, 122 bp, Homo sapiens
ggcgacttcctcttcactggccacatgcacttcggggaggcgcggctcggctgtgccccacgcttcaaggacttccagaggatgtacagggatgcccaggagagggggctgaacccttgtga

SEQ ID NO: 237540 - DNA, 122 bp, Homo sapiens
agtgagatcatgtgcacaaggggatgtaagggctagcccctccaaaataattgtatcctgcgttcagccatgatgacatggtcccagagcctcttcaggagttgttgctgtagagtatcgtt

SEQ ID NO: 237541 - DNA, 122 bp, Homo sapiens
tgcgggtcagcctccgactacaagagcctcggcccacaccgggaactcagtgaacgtcagcgggagctggggcaagagcactgactctgagacagcagcctccgctcactatttgaaggcgg

SEQ ID NO: 237542 - DNA, 122 bp, Homo sapiens
aaaacaaaacaaacaaaaatacaactttattggttttaaaaattcaaaagtaatactcaccgtggaaattccaataataaaatatgaagtctcttgcccttccacccctattgcatcctcct

SEQ ID NO: 237543 - DNA, 122 bp, Homo sapiens
ccgaccttccctcatggagttggcttttagcctcacggccggtttctgttgggtgaaagccgcaccttctcctcgaaccagggcccgacattggagccctctccctcgcatccactgcccta

SEQ ID NO: 237544 - DNA, 122 bp, Homo sapiens
acctccacactgcggctgccaggaccgcgctaccagcccgcgcggcctctgccaagggcccgctgatggaggcgagggaattagctgattttgcagaagcagataggaaaagccgctgccat

SEQ ID NO: 237545 - DNA, 122 bp, Homo sapiens
ctactctcacctgcctgtagaagaaacacacaaaacactgagaatgaaacaaaaaccactcgccttttcttggatccagaaacagtcaataccagcatttttggcctctgcttcctagttct

SEQ ID NO: 237546 - DNA, 122 bp, Homo sapiens
ccctcttccgcagtaggagaggccagtggggctgctcaggaagactccctgggcgtgcaccgcgcactgtatcctgcctgagggtgtgggccagggcgctccctggctgtggccgcgtgggg

SEQ ID NO: 237547 - DNA, 122 bp, Homo sapiens
tcctttacacatgtggcttgtcttgccaatagactccaggcttataccttccatttccatcgtattctccagtttccaggatagacgttgctcatcgtctttacctaataaataagtttgtc

SEQ ID NO: 237548 - DNA, 122 bp, Homo sapiens
tgaacaaagttaggcgcccacgtgatcctccgagccaatggccgccccgcctgcgattcccggataaggaaatctgctcacccggaccccactccagccaaagaggtttatttccccttctt

SEQ ID NO: 237549 - DNA, 122 bp, Homo sapiens
cgggggacctccacgtcttcgcagaggacccgatccgctgatctgtggcgccctggcttgcggggagcaagccaaggccaagactttggcctctccaataaaacctagtggctctttgcagg

SEQ ID NO: 237550 - DNA, 122 bp, Homo sapiens
cacattcttcccagcctccagacgccttgtccccatctccatccaccccctccatttccccggcaccagcaccccagcccgctggttcccaggaatgcctgtgctccggtggctgagtgggc

SEQ ID NO: 237551 - DNA, 122 bp, Homo sapiens
agatggattaaagacttacatgtaagacttaaaactataaaaatcctagacaaaagccttcgaaatactcttctagacattggcctaggcaaagaatttatgaccaagtcttcacgagcaat

SEQ ID NO: 237552 - DNA, 122 bp, Homo sapiens
aatctctcaactgtatttgaaatatttgttttgtccggtgccctatttaagtggctaagccgtggtctcagatatgagattgtagagtttcaacttccttttctcttatttttttacttttt

SEQ ID NO: 237553 - DNA, 122 bp, Homo sapiens
tctatgttaattgttacaccccataaatgtgccgttgtttcctaatcattcgttgaagaccgagacctttttgctgaggacaggccccctgactggagtcccacactatctttctctcaaag

SEQ ID NO: 237554 - DNA, 122 bp, Homo sapiens
tttctcagaatatatcttgaattttcaacatttgactttggtacatatgttattctaaaacgagatttaagcaaagttaagaaaagccctacaagtccaaagcaaaatgaaacagacgacct

SEQ ID NO: 237555 - DNA, 122 bp, Homo sapiens
gcggccaacaaaggcccgggcgagccctcggcctgcgcctcggcgcgcgacccgaccacccggggctgccccagctcccaggcgcctgcctgcctcgacccggccccttcccagcggcgcgc

SEQ ID NO: 237556 - DNA, 122 bp, Homo sapiens
cctggggacctcgctgctggtgtcggccgtggggctgggggtggccacagccggaggggccgtcaccatcacgtccgatctctcgctgatcttctgcaactcccgggagctgcggagggtgc

SEQ ID NO: 237557 - DNA, 122 bp, Homo sapiens
ctcactcaccaagggtccagggcgccctgtgtatcccatggggccagggggtccacggagcgccagctaggggagcagggggacagcagagctgagggacaggcagtgggaacccccagccc

SEQ ID NO: 237558 - DNA, 122 bp, Homo sapiens
ggtcctctctcttctactcacatctgctccctgggagtcacaggaacagcagaatgatgacgttggaagggaaggcaggggtcctaactcagtctcctcctttacccaatgaggaacctgag

SEQ ID NO: 237559 - DNA, 122 bp, Homo sapiens
aggaatcacatgtgtaagatacaggtgtgtaagtccttctctgcttggctggggggaatgcgtttgcaggcagagtactaatcatgatccccacagtaaagtaaaacttggggaaagagtag

SEQ ID NO: 237560 - DNA, 122 bp, Homo sapiens
ggtggctccaggcgtgcatggcaagcagggacagctggctttccttctgccccaagggaccggcgagggcggggcgccgtgcccagcttctgccccgagggaccggtgagggcggggcgccg

SEQ ID NO: 237561 - DNA, 122 bp, Homo sapiens
atccaatagacctgaaatggtgttaatacagtagctagtgatttagcaaaagtcattcttcggctttgtagttgcttggctgactctaggacacagtttctggaattgtggtcttaggatca

SEQ ID NO: 237562 - DNA, 122 bp, Homo sapiens
cgactcctgccttcggaatcttagccgctgccactgctgtttcgattcgatgtggctctgcgggcagctgggagggagtggctagtgggtgtggtcaaacgctcgccctggcccagctgctc

SEQ ID NO: 237563 - DNA, 122 bp, Homo sapiens
ccacaggcccacgtttccccagagcttgtacgtcctcacggtgccagagcacagcgccaccggctctgtggtcaccgacagcatccacgtgagtgatgtggacacagtggggctgtggggtc

SEQ ID NO: 237564 - DNA, 122 bp, Homo sapiens
ggcgcgtgtgtgtccaaagagggctgcgcgggcgccaattatgattgggactgggggtgccgaaaatcaggggtggggggcctcgaggaaggggtatggaagaggaagtgggagaggagggc

SEQ ID NO: 237565 - DNA, 122 bp, Homo sapiens
tctcggatcttacccaagaccatcaaggcagtacctctgagtctacaagagtcacagcatcgctgggtttggggtgccccctaatgcagttacagctgcagtgaccaaatatttacatcaca

SEQ ID NO: 237566 - DNA, 122 bp, Homo sapiens
tgcccaggctggtcttgagctgctgagctcaagcaatccaccttcctcagcctcccaaaacgttagaattataggcatgagcaactgcacctggccaggtgtacaaccttctttccaagtga

SEQ ID NO: 237567 - DNA, 122 bp, Homo sapiens
ctgtaaaatataagcaccacttgatacgtcgataaagcaaagctacaaaggagcatactgcgtggataacacccaattgagcatgagttttaatggtaatcttagctgacacttacctaata

SEQ ID NO: 237568 - DNA, 122 bp, Homo sapiens
acacaagtcaatccagggtttgcctagttccctcctaacgccttctctctccacaagatccgctcctcctatgctgactgatttgttggccagatgcaatggctcacacctataatccttgc

SEQ ID NO: 237569 - DNA, 122 bp, Homo sapiens
gttttgaggttgatttaggcaagatctcttttttgtaacagaaactgtactgcttttattcgattgcaaaagcaacccacagcatcgtagaaaatgtagaaaatggagctgaaggaacagaa

SEQ ID NO: 237570 - DNA, 122 bp, Homo sapiens
tattcagtcttattggtcccctactattggcacgatcctgatgtttcacagaaactaattcgttttaaactagtggcaggccagtgggggaccgtatcctgcaagagtcggattttgaaaag

SEQ ID NO: 237571 - DNA, 122 bp, Homo sapiens
gaagcaacgctggtgtccccaccaccaagaaattaccaccttttcttgttttcagtttctcgtgtgcaggcatgcttagaatacagacttgggagactgggagaaagcagggccacgggaga

SEQ ID NO: 237572 - DNA, 122 bp, Homo sapiens
ggagggctccgcccggccaatggggaggcgtccgcccggccaatggggaggcgtccgccgcgccctggccaatggcgacgctcccaccgcctccgtcccccaggttgaaagcggcccgggag

SEQ ID NO: 237573 - DNA, 122 bp, Homo sapiens
caattagagaatcactattttacaacttccagtgtactaacggattcagataagaatcaacggtgtatactaaacaactgaatacaaatttagagggagcagtatattcataatgtctcaaa

SEQ ID NO: 237574 - DNA, 122 bp, Homo sapiens
gatgtacccagatacaaactcacatgcacaggtgacctcacacttgtagctgaagacacacgcacatgccgtcagaagcgcattcagagacacacgctcagctggaaatcacaatctcacca

SEQ ID NO: 237575 - DNA, 122 bp, Homo sapiens
cttttcagaaatgatcatgcgattgtaaaacagtgggaatgcagctgtgtaaactacggccggttctatggatgtttctataattgaagaattgctttttgtcaaaaatacggattcccggt

SEQ ID NO: 237576 - DNA, 122 bp, Homo sapiens
ggcccaagggatcccccacccaggcccttttcagacccatcgtgcgcactgcaatgggtccgctcctgggttctccacggggacttgagggcttgctctagaaaccaagcctcctctgggat

SEQ ID NO: 237577 - DNA, 122 bp, Homo sapiens
cagagtcaattcagtacatcaaacagaagcatggtgccatccggtggcatggggacttcacggagcagtcacagtgtatgaagaccaagttttggaagacagtgagataccacatgccgccc

SEQ ID NO: 237578 - DNA, 122 bp, Homo sapiens
tttgctgaccttgaaactgagagaatgggctaagaaattatattgatgatgattgcatgacggttcatgaagagaccaggatggagccaggataagtggtaagaatgggcatttgggtatca

SEQ ID NO: 237579 - DNA, 122 bp, Homo sapiens
ggtccatcgttccagaatcttccttttcctctcttgacctcaggctgggccctcatggaccgctcgccgacctcagctgttggggaccgggtccctcaatctccgcgtcctgagcggtcggc

SEQ ID NO: 237580 - DNA, 122 bp, Homo sapiens
tcgtattggcttagatttgcaagcggcagttgtctatcaaatctatcaagtcgcccttagcgctcaggaagtacgacaccggaaggggtgggctttgcgaagatggcggcgctggtgagttt

SEQ ID NO: 237581 - DNA, 122 bp, Homo sapiens
gtgaaagggcagagcgtgggtagaatagggccgcgggccgcggcgggctcggctcacccacgcgtcaccctcaggttcaccatccaggacctcctggcccacgccttcttccgcgaggagcg

SEQ ID NO: 237582 - DNA, 122 bp, Homo sapiens
tcaatactcactcctctttctctaaccttagtccagacacacacatgtacaatcagggtccgcattctttgcttgtaccctctgtttccctgctctgttccctcccccaggtttctctctct

SEQ ID NO: 237583 - DNA, 122 bp, Homo sapiens
ggctccgaagaggcggagccctcgttccgcagccaccgctgtctttctacccacagcagccgggtttaccaattagtctcccttaaagggcactgtttatgatcatcaccaacaaatggatg

SEQ ID NO: 237584 - DNA, 122 bp, Homo sapiens
atgctctgattctgtgtcttctcccccaccctcttgcacgtggacttcaggcttcatgtgcgctgtgtcttcaacgccagtgacttcctgcccattcaggcatccattttcccacccccatc

SEQ ID NO: 237585 - DNA, 122 bp, Homo sapiens
aggggcggcgctctttagaagcaggagccggtggggtctaattgcatcactttatttcaccgacctccactctggctcccaccccacaagcctcagagcaggaaacaagcttggctgagatg

SEQ ID NO: 237586 - DNA, 122 bp, Homo sapiens
aaagagaataagccagtgccatattgccacagggcaaaagtaacagagggagtttcatgtcgtcggaaggaagaacttcctaataaatggattcttccccagcttttggggttacttggaga

SEQ ID NO: 237587 - DNA, 122 bp, Homo sapiens
ccctctcaccctcccacttcttagtctacatagctcgttataccactctgtatgcttttgcgtacccatagcttagctcccacttataagtgagaacatatggtatttggtgttccattcct

SEQ ID NO: 237588 - DNA, 122 bp, Homo sapiens
gtgagttcgtggatggagcctaagccgggcggggaccaagcctggagggctgtgaactgccgcgggtttcagaggaggggaggcttctagaaggacgggggagatctcccctaactgcgccc

SEQ ID NO: 237589 - DNA, 122 bp, Homo sapiens
gtccactgggagtattaagttcctctgctgtgaaaaaagcttttggggggatttgactcccgaggggctccaaatggatgtggcttgtaagaaaggtccctggttataagagtgaagtgtgt

SEQ ID NO: 237590 - DNA, 122 bp, Homo sapiens
cagttttgggatgatgaaaacattctggggatggctgggggagatgcttgcacaaccactcgaatgcacttacactgtcgagctgcacgcttaacattggttacgttgacacagtttatgtt

SEQ ID NO: 237591 - DNA, 122 bp, Homo sapiens
ggacgggcggcggactaggcacagagctgcgggagcaggcacagggagtgtggagcctggcggcgggacggcgggatccggtgggagccggagtcccgccgaggggggctggaggtggaggg

SEQ ID NO: 237592 - DNA, 122 bp, Homo sapiens
aacctgggccgggtgggctccctggcgcggacggaggcggggagcgctggcgggggtctccgtctccagccacgggaaggtccgtgggctcccctgcccgggctgggccggtccccgagcag

SEQ ID NO: 237593 - DNA, 122 bp, Homo sapiens
tcaggaggcctggagacagatttcaggattgcggctacttttacttttcttctactttcccgtgttatctaattgtctctgataaatacgctttatatgcagaattggatgaaacgagaaag

SEQ ID NO: 237594 - DNA, 122 bp, Homo sapiens
accctgcctcagatccgggtcagaagacagatgccgcatcccagtgtaaaggaaacagtgcgggctactgggccgggtgaaaatgcaagatgtgaaccaggagctgcacgtcggccacgtgt

SEQ ID NO: 237595 - DNA, 122 bp, Homo sapiens
cggctctcggggcggcctcccttccgcccacgctccagggcttccccggctcccgagctccgagcttccaccacatcggccggctcaggacaggtatgctcatcccgtcactttttaacttt

SEQ ID NO: 237596 - DNA, 122 bp, Homo sapiens
gaagaagccacccggcagggaggccgaacggcccagagctctccgggtaaaacccgcctgcggtgatctgggaagtgtgtctccacctagccctgcgagcagcggccttcctcccgcccgtt

SEQ ID NO: 237597 - DNA, 122 bp, Homo sapiens
aaatgcacgtgcctatcctgtacagaggctaagactgccgcaaggagagccttagggctccgggaaagaggaggtgggcgtccagctggtggcaaaaattagtaggggcaagttcatggctg

SEQ ID NO: 237598 - DNA, 122 bp, Homo sapiens
aagccataacgttctgggagcggaccacctccccagtgctgcggtcttggtccccgaacacggacaaaggcccctccatcttcaacgcaggggtatacgtcgacttccactcacacacaccg

SEQ ID NO: 237599 - DNA, 122 bp, Homo sapiens
tttactaggacagcaccagtgatcaaggtacatagagcaggacagccagtttccacagcacgtgaacagcaattagcttgattctctgcttagacttaatgacaacatggccctttgggtta

SEQ ID NO: 237600 - DNA, 122 bp, Homo sapiens
ctgtgtggccgtgagctgcctgtcgagctcaccggctagcccaggccacagccagcctgtcgtgtccagcctgacgcctactggggcagggcagcaggcttttgtgttctctaaaaatgttt

SEQ ID NO: 237601 - DNA, 122 bp, Homo sapiens
tggaggacaggatgagagacacggtatgtgggcacctctcaagctgtggaaggcaggaagcgggtcctccccacagtccctgaaagaccacagcccatgatgcgctgatgtaaccctgggag

SEQ ID NO: 237602 - DNA, 122 bp, Homo sapiens
aagcccaaacatacactgtatcagatgagcaagactggggtgtctgatggtaagggggctcggccacattgtcacagattctcagcttgcaccaaggtgtgctataagcggcatgattctgg

SEQ ID NO: 237603 - DNA, 122 bp, Homo sapiens
cggtgtaaattgtactgctcttcagaattttctcaggaaagtgccgcttccagcttctgccggaacatgcttgtgggcctcatgcaaagaaaagtgaacatattccccaataggtacaatga

SEQ ID NO: 237604 - DNA, 122 bp, Homo sapiens
ctagagatcctggcgccgagcgacaggtgccggaacaaacaggcgatgagaaatcgcggacgcggaaccatttcttgggcaggacttccggcggaaaagcgggctgtctcggaaactcagag

SEQ ID NO: 237605 - DNA, 122 bp, Homo sapiens
gaaatgacatcgtctgcaggccaacgtctaaacaaccaggagtgggtttttccacccaaccgcagtgcacgcaaagcccctaagccgactgtgagaccgggcggagcctggcgctgcaggaa

SEQ ID NO: 237606 - DNA, 122 bp, Homo sapiens
ttcatctcactacggagtgccagacagtgggcacagttcagtgggtgcacgcaccgtgcgcgagccgaagcagggcgaggcattgcctcactcgggaagcgcaaggggtcagggagttcctt

SEQ ID NO: 237607 - DNA, 122 bp, Homo sapiens
tgtttgcgatgttttagccacaaagatactgttcagtgaaccatttacagttgtgcctcgcgttgtcccactctcagctgtgcatctcactgtcgctctggaagacctagcccagccagttt

SEQ ID NO: 237608 - DNA, 122 bp, Homo sapiens
agggatgccctggactggggatagccaggtgggagtccgtcgctgtgtggcctgtggtctcggagtctgttctcctggagtctcgcatttgcacccccttcttcgcagtccccctcccatag

SEQ ID NO: 237609 - DNA, 122 bp, Homo sapiens
cagagccgccgccgctcggttccttttcccatgatgttttggactccgaatgccgtttctcgccgccggcctccgtccctcctctcctcctcctccaggcccccttttgtgggcagaattcc

SEQ ID NO: 237610 - DNA, 122 bp, Homo sapiens
caccctcacgttgcgttggtgaggtaccgcgaagcagatagcacagatggcctggacgttcgggacctgcagccaaaggcacaggaggcctttcagggacacaacagggaaagtaaagggtt

SEQ ID NO: 237611 - DNA, 122 bp, Homo sapiens
accatctgacacccactgctaagtgtgagaggacccagggggtaattgccgggccgcaggcggccttaggaactccgcttcccgtgaggcttcgcggcggacggcgctggtgcgcaggcgca

SEQ ID NO: 237612 - DNA, 122 bp, Homo sapiens
actcattctctgacctgccgccaattagaaaacaactgttgccaataaacgtggtcgcgccgcctgtgacctcagccgggacggacccgcgggcgggagcctgcggggcgtgaggcggggtg

SEQ ID NO: 237613 - DNA, 122 bp, Homo sapiens
tccggggaaacgggccggggttggtgtttgtaaacttgcctcggtcccggtgggggcagccgcggcggtggggttggcagggtgtgctggggcctggaggaggcgccgcgcggccagggagc

SEQ ID NO: 237614 - DNA, 122 bp, Homo sapiens
tagcgtcctcgccgtttccagccgtgaaggaggcactgagacgacagctgagggtctctccgttaaggctgtcgctgctgtaggggccctcgcccgctgcgtgtttgtgccacccagcgtac

SEQ ID NO: 237615 - DNA, 122 bp, Homo sapiens
cctaaatcgaccaagactccttctcagtacctaaatgtggcttcagcaaactcagaagaacgaaagtcattttgataaaatcatcatagaaggcagacagcttggttttggggatatttggg

SEQ ID NO: 237616 - DNA, 122 bp, Homo sapiens
ccggactaggagcccctcggcttcctaggcaagatgcaggccacacagtctacgtctgtccgttggcgctctcagctcaaacgagtcctacaggccttggtccctgtagggtgcaggccccc

SEQ ID NO: 237617 - DNA, 122 bp, Homo sapiens
tgtatcgaaacatagaaaaggcgtagcaaaaatacagtattgtggaaccactgccatatacgtggtccatccttgactgaacatcatgcggcatgtggctgtatgtatacacatagtttttg

SEQ ID NO: 237618 - DNA, 122 bp, Homo sapiens
ctctattctggcatgttttcttcccaggcgccttgctttaaaatgtgcttgagtttgtcgcggcgggcgggtgaggatctccagttactgcgctgcaatgagctcccagaagacagacgggc

SEQ ID NO: 237619 - DNA, 122 bp, Homo sapiens
tggctgttcgggccccgccgagccatcttcccgttgctatggcagccggcgcggcgagcccgcccattggctgcaagcgaggaggaataaaaggctctcgtgtccttaggtctagtgccctg

SEQ ID NO: 237620 - DNA, 122 bp, Homo sapiens
ttccaagctcgggctctgagccgggccaggcgcgcgcttcctagttctagcagcagagggcgcgcctgtcattggagaaggaaccgcgcggccgcagccccttcctcgccgaccgcgtcacc

SEQ ID NO: 237621 - DNA, 122 bp, Homo sapiens
gatgggggaggtcgcccgctgtcaccaggcaaagctgggggcggttctaagctctgccgacgccccagttcttccaggtgccctacacagcgctcaccatgctgctgactccctgcccaagg

SEQ ID NO: 237622 - DNA, 122 bp, Homo sapiens
gccatgcaatgtctctatatgcttcctgttataaagataagcctctaagtgctcagactacgccattcctattcagatgtgcaaagaaacaggcatgcccttgcagcaacatttaccacaaa

SEQ ID NO: 237623 - DNA, 122 bp, Homo sapiens
gaccttccccaactccaaagtcggtgccattgaatttcagagtttccagctgagcggcggcggcctccactacctccatcgcaccgcgccagaaaccgggtcggcctcaggattggggcccc

SEQ ID NO: 237624 - DNA, 122 bp, Homo sapiens
cctggccgctgggaaggctcccggggaaagtgggattcacaaaataggaactcatttgcgcgcccctctgcaggactgtgatttgttgtgtattagtacatctggctataactattagtagt

SEQ ID NO: 237625 - DNA, 122 bp, Homo sapiens
gcacgtggccagtgggaccggagggttccccggcgtctgtttgtcgccaaggtccgaatccggctccccttaactggaaggaaacatccatgtaggggctcaccaaacaaaacagctgtgtt

SEQ ID NO: 237626 - DNA, 122 bp, Homo sapiens
agaggtcaacggaaagcaaatcccagacgcgggcccacttcttatctcaggagatcgcctcgctagcccagggtaggccttggggtggagatagggataggggtaggggtgagggtggcaag

SEQ ID NO: 237627 - DNA, 122 bp, Homo sapiens
atcaaatgagtgaatatgttaaagtgtcagaagatggactagcactctgtaagctttcatcgaatattagctaaaactacacattctgccagcctcaagttttcctgccaagtccccttaat

SEQ ID NO: 237628 - DNA, 122 bp, Homo sapiens
gttgttttaattaattaattaattttgagacggggtctcactctgtcacccaggctagagcgcagcggtgcgcgatcgcggctcactacagcctcaacctcccaagctcaagggatcctccc

SEQ ID NO: 237629 - DNA, 122 bp, Homo sapiens
gagactgtatgtgtctgctttagcactgtgtcctcagttacaaggacaaagcatagagtacgcgctcagtgaatgctttttgaatgaattataatgatttgcttctgtctgaattacaagag

SEQ ID NO: 237630 - DNA, 122 bp, Homo sapiens
gggaccctgggacgcacacagcgttgtgggtcttgttcccagggaacacagtgagaaacccgaactgggtgcagctggaatacatggacgcggcctcctatcagcccccggacacggcctcc

SEQ ID NO: 237631 - DNA, 122 bp, Homo sapiens
caggatcctgaatatacacggagctagttggggagacagggctgctgctgatgagtaccacgttgccttagtgacaggaaaatgggaaggggccctgagtggacctccaaacactcacttat

SEQ ID NO: 237632 - DNA, 122 bp, Homo sapiens
cacgttttagtcgttgggctttttttttgttttgttttgaatcattcttggggttgaaaacgtagagactgtggtttagatcactcatagaaactggaggcaaaatgcatgacagtaacaat

SEQ ID NO: 237633 - DNA, 122 bp, Homo sapiens
tgtagtcctgtaggtggtaggagatgaaatttcttattctgtcagtgaaagacatttggtcggtgagttctgataaaacagcaggaacataggaaggagggtatggtaccttcccacagtgc

SEQ ID NO: 237634 - DNA, 122 bp, Homo sapiens
gtatctgcgcgtatgagatgcattgtctcttcctctgcagttgagctgaatgaatacctccgaagccgctttgttctccagatgtgaatagctccactataccagcctcgtcttccttccgg

SEQ ID NO: 237635 - DNA, 122 bp, Homo sapiens
gagagcttgttgattttctaagagctttttaaattcaaggacacactggaccttgagactcgctgtaaatgggtccttagcttcctgtagcctcccacaaaattcgagcatttgtagtttaa

SEQ ID NO: 237636 - DNA, 122 bp, Homo sapiens
ccgccgtccgcgagctggagacccgggagagctgggggtgtccttcagaggcctgaaagccggggtcagtggtgtggattccagtccaactctgaaggcctgagcaccagaaacatgcaggc

SEQ ID NO: 237637 - DNA, 122 bp, Homo sapiens
tggagtaccccttaaggatctaggggccacgcacacaaggagtctgtgcagcgaggccctcgctaggacttcagggctggaagggaggggtcagtgttaggcctacaaactactgttgttca

SEQ ID NO: 237638 - DNA, 122 bp, Homo sapiens
gggcacgaagtgggacaaggtcccggtgagaggcacgacactgtcacctgcctcaggccgcgctcggtggggcgggggccaccagctgaggcccctcctgccgcccagacagctcggccccc

SEQ ID NO: 237639 - DNA, 122 bp, Homo sapiens
cccaacatcacaggaagtgtatacccccgtgtgagatggtccttaaaaatattccaaggccgaggaggtgatatgactacatgtatggcagaaagtggacacccccaaggatatcgttccca

SEQ ID NO: 237640 - DNA, 122 bp, Homo sapiens
ttctcctttaacactgctgtgtgcttcctcccgagcattatgctgatactatactgatcacgttcatcaatgccctgctaattactaatggaaactatccagtcatctctggcactcgacac

SEQ ID NO: 237641 - DNA, 122 bp, Homo sapiens
aaccgagtataagaaaatagttgccttggacggaggctggcggggcggggggagcgggggcggggaagtcagagagtgcatgtgcaatgcacaaccccagacggaaattgtaaactaggaaa

SEQ ID NO: 237642 - DNA, 122 bp, Homo sapiens
cggcgccggcgccggcggccgaggaggcggcaggaaccgcagggcgctcggggaagcaaacggagtgtggaaatacgacctgacccgtgagtacccgccctgccccgccgcctaccccaggc

SEQ ID NO: 237643 - DNA, 122 bp, Homo sapiens
ccccacaaaatgcaactctagagaaagctgagtagacgtctatggattcccggcaagacccgagcctttgtccaagacctcatgtcccaatctactagctgcaaaccaccagtagcaagctg

SEQ ID NO: 237644 - DNA, 122 bp, Homo sapiens
tgcacacgctggtcacgcggtcagctattgacacttcctggtgggatccgagtgaggcgacggggtaggggttggcgctcaggcggcgaccatggcgtatcacggcctcactgtgcctctca

SEQ ID NO: 237645 - DNA, 122 bp, Homo sapiens
acaggcgccagcccggcgcgggggtgcggggcctggggccccgggggagtccgcttttcccgagactgtgctgggggccgctccagactcttcagtttgactgctttttacccatatgctcc

SEQ ID NO: 237646 - DNA, 122 bp, Homo sapiens
gttttttcttctttttctcttctagttgattcggcaggtgagttgtttgacactccttagcgaatttcgacttccatggccaccgtcctgctcatactagctagttttaagcaatgacagtc

SEQ ID NO: 237647 - DNA, 122 bp, Homo sapiens
cgcacagctagcgggcccaggtgagccacccgggcacgatgactcaccctagacagttcccgttagccgcgctgcagccaccgggcagccatccagcagcaggtcagatggacgccagagcc

SEQ ID NO: 237648 - DNA, 122 bp, Homo sapiens
atgcagatggcgctgtgaacctcctttaaggagcacgggaaagacaccacgtgagggtgacgatgtgacagcaatcacaaatgcctgctcacgggacggacgagaacccagctgtgcagcgc

SEQ ID NO: 237649 - DNA, 122 bp, Homo sapiens
ctctctcatcctctggtccgccctcactcaagatggctaccagcaagaatggtgcaatggcgtgacagctcggccctggttgccaaggagatgcgagtaccggaaatgcggaattcggggag

SEQ ID NO: 237650 - DNA, 122 bp, Homo sapiens
gccaggatgtcaggccctgtggccccctgggtgccgcggacggcccaacttaaccacctgcgaaaaccacgcccgctgggactctgcagcgccactgtcccagcacggccgccgcctcatgc

SEQ ID NO: 237651 - DNA, 122 bp, Homo sapiens
tacctgaagaatgaagttacgctgcgcgacagccaactcttcagagccgccattgtgcagcgcgcggacgccagacgcacacgccggaagtgacgcagcttcgtgagcgcggagcggggcac

SEQ ID NO: 237652 - DNA, 122 bp, Homo sapiens
tttctggaatgaccagttgaaataactgaggcccaggtcctggtcctggctcagtaatagcgaagtccaggccttagctagcagtgggatccctcagttagcagtgggatcttgggcaaatc

SEQ ID NO: 237653 - DNA, 122 bp, Homo sapiens
agacctggggagcaggagcagtggagccagtcctgccttgcccgcccccgctccatcccccgatgagcatctgtgccagaacccgcaggtgtagatacctaaagccccctagcctgatgctt

SEQ ID NO: 237654 - DNA, 122 bp, Homo sapiens
taaccaaatgtcattttgttctttccccttctcctgggcattatactgggaaactgtttacgcgcatcgaccccgcacacctccaaaaatctccactttccgggctccaagcagctctccgc

SEQ ID NO: 237655 - DNA, 122 bp, Homo sapiens
gttgctgatctctctttcattcatgcattcattcaacaaatatttattgaggctctactacgtccctgatggtctttctctgtgttttctcccagtctctgagtctcagccttgcacccttc

SEQ ID NO: 237656 - DNA, 122 bp, Homo sapiens
cttccctgcctctgtccggtgggaaaagctcagctggtgtgcccgaaaaaacgggctatccggactccgtttatgtcatggcagccaacatttttcagggtattcgaatcgaaaagtcggca

SEQ ID NO: 237657 - DNA, 122 bp, Homo sapiens
aagcctgggcctccagatggatggtcctgggtgcatctggctctgccactaggggctgggcgaggacaaccttcctgaacaagacaagcttgtaaagtgccccctgggctgtccgcaggaga

SEQ ID NO: 237658 - DNA, 122 bp, Homo sapiens
aaggcccccgcaggtgccaccgccctcccgcgccctttgggcgctggggctcccgcccaccggcccacaccgccatccaacgggattccccgtccccgagcccgcccccgccgctcctcctc

SEQ ID NO: 237659 - DNA, 122 bp, Homo sapiens
cgttgagacagtcgccgtgcctcagtttcctcctctgcgaagggcgggaggagtcggacgcgccctagagccccgcgcgttcctggtgtagcctgctgggcccgtgttctttaagttcctct

SEQ ID NO: 237660 - DNA, 122 bp, Homo sapiens
gagcaggctccccagcgtagcgagtccttgttatggaaagggtcgtttcggctcaggatgcgcgctcccggcgtagacctggggataggggtccctgtcgcgctcgccccacccctgcaggg

SEQ ID NO: 237661 - DNA, 122 bp, Homo sapiens
ctcccggtgcaccacttctttccttctggtgttggctggcagcatctgcattctaagcagcggggaaagctttcgagttccttgaccttcatcttgacttgagccgaggttagcattaaaaa

SEQ ID NO: 237662 - DNA, 122 bp, Homo sapiens
catcatggcggcggccagaggcctgcccggctcccggaagcaggctgtgaggggcgggagcgctgctggaacccgagccggagccggagccacagcggggagggtggcctggcggcctggag

SEQ ID NO: 237663 - DNA, 122 bp, Homo sapiens
ccaatccaatatcagacacactaagcaagaagaggaagaagtgcattgggcggtgcagggcgggctgcagggcaatgatccagaggatggtgccatttcccagtgcagagagaaggtagaca

SEQ ID NO: 237664 - DNA, 122 bp, Homo sapiens
aagccaatatatccaaatatcatcaattcaacatgtggcactcataagccaagtgccttacgtggctagaggctactgtaatggacaatgcaggcctacatacaaaagacagcaagagaagc

SEQ ID NO: 237665 - DNA, 122 bp, Homo sapiens
ataagagaataaaagcaagctgcctggaggcatcagtggcaatccggcagggttcccttccgcagggtggaagctttgttttttcgctctttgggtccacacggcctttatgagctgtaaca

SEQ ID NO: 237666 - DNA, 122 bp, Homo sapiens
ctccccccggacgtttctcctccccaccagtgtgtaagctgctgagcacagagctacaggcggaactgagtcgcaccggtcgatctcgagaggtgctggagctggggcaggtgctggataca

SEQ ID NO: 237667 - DNA, 122 bp, Homo sapiens
gctggccgacctcgtgcaccatgtccgccagcacctgcccctcagcgacctctccctcgccgtccagctcttcgccaagaacatcgacgatgagtccctgcccagcagcatccagaccatgt

SEQ ID NO: 237668 - DNA, 122 bp, Homo sapiens
gagagaggcaagaagctaaatccatatcctaagtaaaccttatggcaaaagattttatagcgtggctatcttttccagatgcttgggccacatgtgtgtacacagatttgttaaggtaatat

SEQ ID NO: 237669 - DNA, 122 bp, Homo sapiens
ggcgcgttagggagctccacacatggttcagagagaattctcctgcccaggatcccagcccgccgcccccagcccctggtctgcagttctgcgcgtcccgccccagctcccaggtccagtgt

SEQ ID NO: 237670 - DNA, 122 bp, Homo sapiens
tgagaaaaacaataacgcccccaaaccacacttaatgggtgggtcgcactggctcgttagcgctgaataatcgggcttcaaccacaccgctggggaacaaaaataaacaagggcactgggag

SEQ ID NO: 237671 - DNA, 122 bp, Homo sapiens
cctatcctcctccatcacacctggctacctccaatttagaggtctccaactctccagggccgcggatgggtacctgtctatggcttgttaggaacccgggcagcacagcaggaagtgagcct

SEQ ID NO: 237672 - DNA, 122 bp, Homo sapiens
gcgtgggtccgcgtgcaggaacccgccgggctcagccggacgctagccccctgccgcccccggccccgccagccgcgcccactagcaacgtgctcgcgacctccagtgcccgctcagtgaag

SEQ ID NO: 237673 - DNA, 122 bp, Homo sapiens
ggggactcccctgttggcaactgctcgcaccgagcagtggaatctcagtccgggagtcgacgacttttcgcttctggctagctgctcaagttgagacagtccggctctcagtggggagagaa

SEQ ID NO: 237674 - DNA, 122 bp, Homo sapiens
ctagagccagcttctgcctcgggccgccccggggcgcgggatgggaaggggttaacgcagcgccccgcttacctggggtaaaagccggcacagaacccgagcgcacaggtcgccgcgcgcat

SEQ ID NO: 237675 - DNA, 122 bp, Homo sapiens
tagaagaaaaaagttttactgtgatcaagttactcggcacttaagactacttgtatcttccgtggtacttgatttggcttaacaattaaagaaaaaagtctgagaggggcaagaatgtgtaa

SEQ ID NO: 237676 - DNA, 122 bp, Homo sapiens
tggatccaccccgacctcccgctgttccgggtgtccgagaggcgggcgtcccggcggcggcggaagccccccaagggcgctcagccagcgctggctgtggtgctgttcctgcaggaggagta

SEQ ID NO: 237677 - DNA, 122 bp, Homo sapiens
gtctgatctgaccccaggtccaccaagcactcccccgtcgtgtccaattcgtggaccaggcgctccctggggaagccatgcggtggtcagtgcaagccacacacagcctgggcccagagtct

SEQ ID NO: 237678 - DNA, 122 bp, Homo sapiens
cccgctctggtctcagtggttccagtcagcgagcaggacagaggagcccggaagaggcgccgtgcacttccgggtcgaagagcgcacggcggcggcagaggcggcggcggccgggcctagga

SEQ ID NO: 237679 - DNA, 122 bp, Homo sapiens
gccaagggcagggcagggtctcagctcactttacgtccctctggcctggcacctggtggacgtgccttcataagcaaggttggttgtaaaaatgaatggaacaccataggaatccaaactta

SEQ ID NO: 237680 - DNA, 122 bp, Homo sapiens
gcgctccctgggcgccccctgctgggcgatgcggatggtgaggccaatcgcatcggcggtcgcgcagatttgtgggatcccacttgaaaaaggttggtcatcggactgtggtctagactcac

SEQ ID NO: 237681 - DNA, 122 bp, Homo sapiens
cacagtgagcctgggccgattttagcataagctgggggctccaatctgcttcactgtcagcgcagagtgtctcagccctggatgaggcccaaatccctacacatttggaacctcacctcatt

SEQ ID NO: 237682 - DNA, 122 bp, Homo sapiens
tatttacaaccgtaacagagaaaatggaaaagcaaaagccctttgcattgttcgtaccaccgagatcaagcagcagtcaggtgtctgcggtgaaacctcagaccctgggaggcgattccact

SEQ ID NO: 237683 - DNA, 122 bp, Homo sapiens
ggtgacggttacaggcgagtcctctctttgacatactcaattaagctctgtacacttgagcgtctgtccactcgtaggtgtgcatacttccactgcggatttaaactttcaaagaagtctag

SEQ ID NO: 237684 - DNA, 122 bp, Homo sapiens
tgtaaataacagcgttatgagcagcaattcatccctgctggtggctgtgcagctgtgctacgcgaacgtgaatgggtcctgtgtgaaaatccccttctcgccgggatcccgggtgattctgt

SEQ ID NO: 237685 - DNA, 122 bp, Homo sapiens
tcctccagagtgttgtcctccgtggagagaagctgtatttccaagtggcccacttcacgacggaagtgattctgacagcccagggtcttggcaaaagattatcaagcatctgtgtttctgag

SEQ ID NO: 237686 - DNA, 122 bp, Homo sapiens
ctcactgacttcaagaatgaagccgtggaccgtcacggtgagtgttacagttcttaaaggcggcgtgtctggagtttgttccttctgatattcagatgcgttcggagtttcttccttctggt

SEQ ID NO: 237687 - DNA, 122 bp, Homo sapiens
gagaggggcgctcttagccaagggatacacagggcagcgcggcactacgctgcagttttccggctgcagattctgtttgtcatctgctggaaatgtccacgatggatttaattttaaaaaac

SEQ ID NO: 237688 - DNA, 122 bp, Homo sapiens
ggctgccgacagtgaggtgatttctttgctccctacttaatccttgtcactatctaaattcgttcctcatgtcttcgccttggggcttaatttctttttctctccttccccttcccgcagcc

SEQ ID NO: 237689 - DNA, 122 bp, Homo sapiens
gcagtatttggatatccggtttcctcacgctatttattgaagcgactgtcctttccccatcgtgtattcttgacacaagattagttgacttgcctaagattagttgactgtatatgcatggg

SEQ ID NO: 237690 - DNA, 122 bp, Homo sapiens
gtggggtcaggcgcccttggtcagcttgggcaagtgccctctgttcctagttttggattccgtcaaggggaacggccttgcagttcagcccacggcccttgtcccggcgcccatgccctttg

SEQ ID NO: 237691 - DNA, 122 bp, Homo sapiens
aactcaccgccgccaccgccgcgcagccccgcggccgctgctccatagccctccgacgggcgcccaggggcttcccggctccgtgctctctgcccgtcgtggttccgccttcagccccgcgc

SEQ ID NO: 237692 - DNA, 122 bp, Homo sapiens
caacctacttgactcgcaccactgacccccacaccttgcatagactgagcagatatataacgatggccacctctccatctgattctagactgattctagttcctagaatctcagcatgattc

SEQ ID NO: 237693 - DNA, 122 bp, Homo sapiens
ttgcaggctggtggagagacagagtgcctggggagggcctgaccaaccccttatgtctcacgcagtaggcctggaccttcccaggggaggctgttaggacatgaggctcacagactgcactg

SEQ ID NO: 237694 - DNA, 122 bp, Homo sapiens
accatgcaaaggtagcataatcacttgttccttaaatagggacttgtatgaatgaccccacgagggttcagctgtctcttacttccaaccagtgaaactgacctgcctgtgaagaggcgaac

SEQ ID NO: 237695 - DNA, 122 bp, Homo sapiens
cctccatggggccggctttacagaatgttgccctgtccaacaagccttctatgaacagctcgcactgataggtgccgccccgtcttcccggctggtgcagcctcgccgtcccggggacacct

SEQ ID NO: 237696 - DNA, 122 bp, Homo sapiens
cgcggtaggtagcagccggagaagcggcgcagccgggggatgggcgggcacatggaagggcgggggttgtggccctcgggccggaccacgggaccccagcctcgggggcgagatatctcagt

SEQ ID NO: 237697 - DNA, 122 bp, Homo sapiens
gctctgagctttctgttttggttccctgaacccatatgtcagatgattctccactggagccggggctgccctgttttactactgccgctttgtaagatacattaatagctgacatggcaacc

SEQ ID NO: 237698 - DNA, 122 bp, Homo sapiens
gttctgtaacttcactgtcccacctgggagttacttgtgcctacggagcatgcatttattcgtttatttagagacagggtctcgatctgtcacccaggctggagtgcagtggcataaacaca

SEQ ID NO: 237699 - DNA, 122 bp, Homo sapiens
caagagtgaaacttcgtctcaaaaaaaaaaaaaagaaaagaaaagggctgtgaggccgggcgcggtggctcctggcagtaatcccaggcacatcatgcctgtaatgcagcactcaggcgggc

SEQ ID NO: 237700 - DNA, 122 bp, Homo sapiens
tttcattctttatcctttcctctgctgcaactgactctggtaactaattgctttcagcaacgatctacatactcctatctcttcttcacaaatagatgggaaataaaggtattatagtcttt

SEQ ID NO: 237701 - DNA, 122 bp, Homo sapiens
ccagcacacacccacctcaccccctctccacaaaacagtaacaacaaacctttcacagcacgggcgaactcgctcttctgctgacttactttctactcgggtttctgatcctagtcatgtac

SEQ ID NO: 237702 - DNA, 122 bp, Homo sapiens
ttctacaaatctttcagaggactgcctagtagcaaaggttattcctggacacaggaaagacgggcattacagggaccaaagctctgaaaggtgacttttattaccaacacactggctggaaa

SEQ ID NO: 237703 - DNA, 122 bp, Homo sapiens
aggtggtgtctcccaggctgctgagatcagttaatgagacggtaattgaaggccgccgtgcgccaacagaataatgcacgtcgattgggcagctccaagggacaacccactaccgcttgccc

SEQ ID NO: 237704 - DNA, 122 bp, Homo sapiens
ttctggaggtagtaatccccagaaatcctgaaattcccccttccacctactcatctgcctcgaattgtaaaccattttgaatagaggagtagtgcatccaggaataatgcagccaacagcag

SEQ ID NO: 237705 - DNA, 122 bp, Homo sapiens
gatgtagctctgggtcttcactaccttacttttgagcttcttctcagaaagctttcaaaacgtgtttctttcgttctcctacatctatcccatataattcatgttcattgatttatagattt

SEQ ID NO: 237706 - DNA, 122 bp, Homo sapiens
ttggtgactaatgcatgagactctctggttgtgttccgttcgcactcaaagtcctcgaatcggaccgtaattaagatgaaatgatgaggtcggaggctgcatgctaggtttttgcagcaacg

SEQ ID NO: 237707 - DNA, 122 bp, Homo sapiens
aatttgtctttcatagtattcatctaaaagtgttaagtgggcaccacaaagcatgctcagcgctcctccaggaggaatggaactgctctcttgctcacgcatggtccatttggccataaatt

SEQ ID NO: 237708 - DNA, 122 bp, Homo sapiens
agcccgcgtcattccgccgggctccgccagggcgctccagttccacgtgacgccgagtggcgcccggtcaaagcgatcgcacggaatgttccatcggactgaagctgatggggggaggaccc

SEQ ID NO: 237709 - DNA, 122 bp, Homo sapiens
gctctgctgaaatcgcttctgttcatagtagcttcggaacttgctctggatcaggatggccgcctgggtcatcttcttatagagtgcaaactgcaggggtggggaggagggacaggggctga

SEQ ID NO: 237710 - DNA, 122 bp, Homo sapiens
cgagacggacccggctgccgagggagggtgacgcgcagacaggaacagccttgggtggggcgcgcgcgccgagacctctcgcgcgctttttcctcgccgcccccgggccgggtttggacgcc

SEQ ID NO: 237711 - DNA, 122 bp, Homo sapiens
gaccaactcaaagttctaagcttttttctagtgcttgtatatatttaaagctccgtgctacgtgtgggattgtaactgcaagtgggagtgttgcattcaatctctatctcatctttagctag

SEQ ID NO: 237712 - DNA, 122 bp, Homo sapiens
aacaaattgcaataactgttttgagatttcgtcccctctgaaatgcctcatgaagctatgcgcacaacagctaacttcaaagtaaccccacttcattctttctggctttaagtttttgtctt

SEQ ID NO: 237713 - DNA, 122 bp, Homo sapiens
ctggccgaggctcccggccaccttgacccccggggcgctcggtgcgggccagtctccccgcgggcgcccccaagcccgaccccttccagtagccccattcatctgtcgcgaacgccctccgg

SEQ ID NO: 237714 - DNA, 122 bp, Homo sapiens
agggctgcgcggtcagacagggcggccacctggtacgtgcgctgctgagcgcttgacctgcggccagtctgaattgagatgtgctgtaagcgtaaaatgcataccgattaacaagacttagc

SEQ ID NO: 237715 - DNA, 122 bp, Homo sapiens
atgaccaaactggtctaaggattaaatgatgtgggtgaaaagcacttagtacatattgggcgcacacttcgtaggggcgttcgtcactgcctataaagattctaaacgtgggccaggtgcgg

SEQ ID NO: 237716 - DNA, 122 bp, Homo sapiens
attcaacaagtacatctcacggccgcgccgggtggagctggctgtcatgttgaacttgaccgagagacacatcaagatctggttccaaaaccgccgcatgaagtggaaaaaggaggaggaca

SEQ ID NO: 237717 - DNA, 122 bp, Homo sapiens
ggggtttaggagaacggcgaggagcgggcgcagaagggtggcggggccgccgggtcgttgcgcggcagttgcgtccggcctcttgcgcgcggcgcccgggaaggggcggggccgaggcgggc

SEQ ID NO: 237718 - DNA, 122 bp, Homo sapiens
gtcgggatctcagggctgccctgaggggccgcgcagatctgggggatgtaaaggcccaaacggactcggaatggccggtgcggccgggctctgggaaatgaagggctcgcggtgtctcgcac

SEQ ID NO: 237719 - DNA, 122 bp, Homo sapiens
caagttggttagcctctctgagtgcccacttcctctattcaaatataataaacatgaaagcgtttgtggcgtctgtgccagggaaatcctatccctgtatagtttacttccttcttatgcct

SEQ ID NO: 237720 - DNA, 122 bp, Homo sapiens
gcctgcaagcacatctggaaggggtgtctggatcctgggggcagcgactgtgttctagggcgagagccaccctcgccaggggtgtaggcaggcgagaggagggcctggagctgtgggtcggc

SEQ ID NO: 237721 - DNA, 122 bp, Homo sapiens
ctgcgacctcgacttttctaagagttgcagcgaaagtgccatggctggctgttgctgggtcggttctgataatgtctccatttctgaacccatccctggccagaggaacgtgtgttctggtt

SEQ ID NO: 237722 - DNA, 122 bp, Homo sapiens
ctttcccacctttcttggggatccagaggtcacggaggcctaggaggagcctcttggtgacggtcctaacccacaagcccagccctgcaggaaagggaatcaacctcatcctcctaccgcac

SEQ ID NO: 237723 - DNA, 122 bp, Homo sapiens
tttcactggaaaacagccatttgaggttacgtgacccatgcaatatattgcaccttcaagcgccccaactctctcttcgccctgatattttcagatcctgaaagcatgtgtctagtgcgcgg

SEQ ID NO: 237724 - DNA, 122 bp, Homo sapiens
ttcctggattattcccatcagcatacaaacctactgttagttctcctttcttaaaaaagtcgacctttccttgactttacttcccctaacagctgctccccactttctttctcttctttgca

SEQ ID NO: 237725 - DNA, 122 bp, Homo sapiens
ggggcagcttgtctaccaccccgggcctggagactagttgaggcacgtggccacctgggccgcctctgggctcaaagatcagagaaccagtcctgggcgcagtggcttgttatagaaatctg

SEQ ID NO: 237726 - DNA, 122 bp, Homo sapiens
ttttctccagcgcgaagatctgctggcccgagaaggtcgggcgcgagtgcttcttcttcccgtccttgtccaggacgccgccggccggggctgcaagggaggggaagggagggaggtcagcg

SEQ ID NO: 237727 - DNA, 122 bp, Homo sapiens
cgtggcgcgctgggagcggggactgcgcgcgcctggggatggtgactggggatccaggagcgcggcttgtgggggcgcttggcacggcttcaccctcgctggccccgcaggcggtggcgcct

SEQ ID NO: 237728 - DNA, 122 bp, Homo sapiens
aaaggacagtagtgggccagccaatttctcaagcacactgcagcagccaggaggcgttatcgcttagtgctgtcaaaaaattcactctgcatttggttttgtttctaagtctcatgtcttct

SEQ ID NO: 237729 - DNA, 122 bp, Homo sapiens
actcgctcctcggacgtcacagtggggatgcccgcgactgtgttcaaggcagaggggcaccgggcggggccgccatgtttcctgcaactccaggggaggccacgtgctcagagcagacggga

SEQ ID NO: 237730 - DNA, 122 bp, Homo sapiens
ccccttaagatattaactcccgtctatctgaagataaccaagataatctcttgaggtcctcgctaacactatttttccttgattctatttaatcaacatctccactggtgtttgagtggtag

SEQ ID NO: 237731 - DNA, 122 bp, Homo sapiens
ctgtggagcagggggcggtgctcgtcggggaggcttgggctgcacaggagcccacggaggcgggggaaggctcaggcatggcgggctgcagtcccgaggcctgccccgcgggaaggcagcta

SEQ ID NO: 237732 - DNA, 122 bp, Homo sapiens
ggtgcccccccagtgccaggctggaccggcctcaaggtgctcagcagtgccaggctggaccggcctcgaggcgcccccagtgccaggctggaccgggcctcgaggcgctcagcaggctgtgc

SEQ ID NO: 237733 - DNA, 122 bp, Homo sapiens
ctaatcaccacttaggctgaagtgcactccctaacaacaccacagcctttctcccacttacgggattcttttcccagttggtcctagctaactccaacccctaaaaaatcaagcatgctgaa

SEQ ID NO: 237734 - DNA, 122 bp, Homo sapiens
gccagcagtggaaccgcaaggctctacagggcagatctgcctcccgtgctgtctcagctacgccgagtcgttggctcagggcggaggattttcctattggccgcgttatttgaatggaatgg

SEQ ID NO: 237735 - DNA, 122 bp, Homo sapiens
ggaccctcaagcggcccaccagcctgagccgccacgccagcgcggctggcttccccctgtcgggtgctgcctcctggacactgggccggagccaccggagcccactgacagccgccagcccg

SEQ ID NO: 237736 - DNA, 122 bp, Homo sapiens
ttccatctgtgtgataggtgttatgatagaagtagaatacaaggtgtggtacagacagagcggatctgaagtagtagcctgttgtcttagtctgttttgtgctgctataatggtatttcaca

SEQ ID NO: 237737 - DNA, 122 bp, Homo sapiens
tgcacatttggccactacctcccgctggaatccagccaccatctgtgagatggggcatgacgcggtccagtggagggtgcgtgctggagtctctcccgtctccaccacctttgttacagatg

SEQ ID NO: 237738 - DNA, 122 bp, Homo sapiens
gcctcaggggaacgttgtcaaactagaagctggagcaaatgaagaaagaggtgaaggcgtcgtgaagagctgacagatttacagcgctcagggccataaacgggtccctggcgggaagaagg

SEQ ID NO: 237739 - DNA, 122 bp, Homo sapiens
tctccctcccatcacagctctttttaacaattcctccgttaatttcttctagtggtcacccgcttgtcgcaaaaaaaaaataaataaataaaataaaaaaataaaaaaagaaacttacatag

SEQ ID NO: 237740 - DNA, 122 bp, Homo sapiens
tcccgctttggggccccatgtctttgcaggcacccccgcgtgtatgggtgtgagtgtgcacgtgtgcctgtgcgcgctgcgacgggatttaacctggataccaggccgggagcgcccacggg

SEQ ID NO: 237741 - DNA, 122 bp, Homo sapiens
ctcctaagaaaggccacggcagcactgccaggcccggggaacgcaaggctgccagacacacgtgtgtggggggacaagcacatgcacacacaggctgcacgtgagcatgcacaggcggggac

SEQ ID NO: 237742 - DNA, 122 bp, Homo sapiens
ggccaatcggcgacaagaggctagccggaagcgctcctccctctgcgagagcaatggctccgtccggtttcgagcattttccgctcccttctccctccccctccggttgccgcagggcgggc

SEQ ID NO: 237743 - DNA, 122 bp, Homo sapiens
caggcctccgggtaggtgccgaggactgccgcctgggatggcgcggggcgggctggggtgcgcgggctgggtcccggcgcggggcgggcggcgtggggcgttcggccgcctgcgcctgtcaa

SEQ ID NO: 237744 - DNA, 122 bp, Homo sapiens
gcctcctcgatttctgccacactgcagctctgggagatgccggcaatcaatagcgctttccgagggttcatgtccatccccctgcaccagtcttctaaaagcctcaaagtcatggtgcccga

SEQ ID NO: 237745 - DNA, 122 bp, Homo sapiens
cacacacacacacacggcttgtcgatttctcggtctcgggctttgtctactgactcccgccgtgcaggattgggatgcaatgtttgtgtttttagcacttccacgagcctgcctgctgcctg

SEQ ID NO: 237746 - DNA, 122 bp, Homo sapiens
gccctcacctgtgtcaccctcgaacccgccggccctcacctgtgtcaccctcgaacccgccggccctcacctgtgtcacccctcgaacccgccagccctcacctgtgtcaccctcgaccccg

SEQ ID NO: 237747 - DNA, 122 bp, Homo sapiens
tatccatgatgagaaactagcaaacaggttgctgatccaaaatgtagagatcattgctaccgcatatggccagttaaatggaatttttttttttaaactaaaaagcgaaaaaggagtggctg

SEQ ID NO: 237748 - DNA, 122 bp, Homo sapiens
ctggcccaacactgcacaagatacttaatcctcctgaacctcagtttcttcatctgcgtacgggggatatgaacccccacatgctggactgctctgagaattgagttaatgcgtgtaaaaca

SEQ ID NO: 237749 - DNA, 122 bp, Homo sapiens
atttgtctaatcaagctgtaaccctcgccgctgtggtccacggtttcattccctgaagcccgtgagaccacgaacccttcgatcgagaaaagaccttcaatcgggagaagacttctcgtctc

SEQ ID NO: 237750 - DNA, 122 bp, Homo sapiens
ccggcggggggctcccactcacttgtctttctcggtgccgaagatggaggccagatactccgccatttcccacccgccgccgccgctgccgtcgacactgctgccgacgccgccgaccctgc

SEQ ID NO: 237751 - DNA, 122 bp, Homo sapiens
gcacgcgcgcttcttaaaggagacggctcataaaggattccccactacggtagggcgcaccggaggtatccagcccgcgacaagggccctggtttgagcacagctcttcgacagtatctccc

SEQ ID NO: 237752 - DNA, 122 bp, Homo sapiens
acccctagctgggacccacttgtttcccttctggcttgtagcaagatagttaggggctcccgggccgctttcttggaattctttcaccatccagaacgacggtgaggattctactctaccta

SEQ ID NO: 237753 - DNA, 122 bp, Homo sapiens
cggcccacctgacctacccgatgtccttgactgagatgatggcttcgctcacagtgacgacggaggcccccagctccacgatgatccgcgagatgctcccgtctgggcctcgccgcagctgg

SEQ ID NO: 237754 - DNA, 122 bp, Homo sapiens
tgggcaaaatcacaaccaaccacttggccatctcagctccaggtaatagaaataagtcagcgctgacagaagtgagaaaaatactcaaaatgctctcaagatggttttgaacccttcaaacc

SEQ ID NO: 237755 - DNA, 122 bp, Homo sapiens
tttaaatcccctccctccctctccaggagagagcagccctggagtttgtatgcattcttgcgaggtacaggtgctgactcacttggctacaggtatggcaatcggcttgctctttcatctgg

SEQ ID NO: 237756 - DNA, 122 bp, Homo sapiens
tggtgtctcatgtgcttttggtgtgcattttcctggtgcctggtgatgctgacaatactccgtctttgagaacatcacttgcctgctacacttacccagggcttccacgtctttcaaggggt

SEQ ID NO: 237757 - DNA, 122 bp, Homo sapiens
catggtgcagggagggagtgtccagctgaagacagagtccaaaatctccaggttgtagagcggtgggtctccttcctccagggagcatttatacctcgtccatggagggtgtggacacgtaa

SEQ ID NO: 237758 - DNA, 122 bp, Homo sapiens
aagcccctctgcaaggtccagtatgattttcttggtggtgtctacaatattgtaaagagtcgtaggtcaatatttgggctagcacctctcatgctgtcttgggctgctgggaaagactttaa

SEQ ID NO: 237759 - DNA, 122 bp, Homo sapiens
atctgaaaagattgccattgtgatttaaatgacccactgaagccatcagggaccccaccacggagggaaccgccctaggctctcctcagaatcttctcacgctccctgcaccctgcggcatt

SEQ ID NO: 237760 - DNA, 122 bp, Homo sapiens
tggcccagcaccgacccaccccgcctgcagcaagcccagcaacatcatccccgccgctgccgccatttcacttcattggagacactgaaggccgaggtcgccaccactcctcctaatcgacg

SEQ ID NO: 237761 - DNA, 122 bp, Homo sapiens
aggccgcggagccctcagggcatgcggatgttccgaggatggagaagctgagactcacagcgaggacgggccagggtctccccaagcctcagttcccagagcccttccatccccgggttctc

SEQ ID NO: 237762 - DNA, 122 bp, Homo sapiens
acgcagcctgagccacttgggagcccccagtttccgaggcagaagaacagtgcccaccagcgcagcggggctgcggcccggaaaccctggcggggagccccgagccccggcgggcgcacgcc

SEQ ID NO: 237763 - DNA, 122 bp, Homo sapiens
ggtattaattagcaagtgctgcctaagagggttatttagaacataagtgcttggccagagcgtctgctggtgccgccccaagcgctacacatcttgtacacattatcgacatgtaggagcgg

SEQ ID NO: 237764 - DNA, 122 bp, Homo sapiens
catggaggcactactctccttatgtgaaatcttttcctctatggctgcacaagcatcatccgagggaaatatctctaccatcctccatcagcactgtggcaacactgaaccatccaaaactc

SEQ ID NO: 237765 - DNA, 122 bp, Homo sapiens
cttatgttacctttttagaactgaattggcataacctctcttgaatcttagagactttgacgtattattctgtgaattgtgatttaattatctcatgcttcaggatggttgtttccctttga

SEQ ID NO: 237766 - DNA, 122 bp, Homo sapiens
ttgtgacatttctgtttttatccatagaacacattctattgagcaaagctaatttttatgcgttggtaactagaatgagaaaggctctaagtgggtttcaggggaggaaaaatccctcaaat

SEQ ID NO: 237767 - DNA, 122 bp, Homo sapiens
cgcccagcccctgtgggtccttcctggtgaggtggcggaggatgatgagcagggtgagtgcgcggtggaaccacagcatgtcctcgggcttgctgcctccgatgctgagcacggtggggtcc

SEQ ID NO: 237768 - DNA, 122 bp, Homo sapiens
aaaagactgatgtggccaggcaccgaggcgcacatctgtaatcccagcactttgggaggccgaggcaggtggatcaccagacatgaggagttggagaccagcctggtcaacttggtgaaacc

SEQ ID NO: 237769 - DNA, 122 bp, Homo sapiens
agactaaagtgaatgattgccacagtcattccctccggtggcttctccccaagtacttggcgccagagcgcccaacattgtgcatacatggtcgctcctaattcgtgggcccgggggacatt

SEQ ID NO: 237770 - DNA, 122 bp, Homo sapiens
gccaagcccagctcctgatgctccaggatccaggacgcaaggacctctttctaaacagaacgcagcaaaccctgaggggtggctgaggctggctttccttcaggcccggaagtaaagaaggg

SEQ ID NO: 237771 - DNA, 122 bp, Homo sapiens
accagggtcccactagaactcagaataggggcgtggccttaatgatccaagctcattggtcgatgagaatgatgaatgcgaaaggaggtgtggccaggcagcagcatgtccagagggacctg

SEQ ID NO: 237772 - DNA, 122 bp, Homo sapiens
gagggcttcccagagagaggcaaagtcaccttcgtgggagacacactgatctggcttcagcgccattccacagtacttggagagatggtagagcataaagcatatgcattgttgaatgacag

SEQ ID NO: 237773 - DNA, 122 bp, Homo sapiens
tttggtgtttgttctccgaaaggcgggaaaagcgaactacacctcccgactggccgcgcgcggctgcgcctgcgccctgttacctgtcgccatcttgccccttcagaggcaccgcaaacaaa

SEQ ID NO: 237774 - DNA, 122 bp, Homo sapiens
tgtggcacctagaaaacttcctgaaagttttattttcctcctgattttggcaggtggggccgagagaggctgcctgctttattttctgacctggtttcttggttgcattcctgggtttggga

SEQ ID NO: 237775 - DNA, 122 bp, Homo sapiens
acggaacggcgggcgaaaagcagggcgggaatacgccggtaggaatacgcgggcacgtaacgcgtcacttccggtgctggggcgcgctgcttgcggagggagtttgcccgtatacggtttta

SEQ ID NO: 237776 - DNA, 122 bp, Homo sapiens
ctattaatgcactttcgcagtgttaaataacaccctgcaaggtagttgttattttgtagacgtagacgcaaaggctgaggaaggttacatctcctagccataagggctgtacctaaagccat

SEQ ID NO: 237777 - DNA, 122 bp, Homo sapiens
aagacatttgagccactacattgcagattagaatgctgactgtaataaacaagatcaccacgagcacctgtctcatgaaagccagcaccactcaaacacctttctaggattgtcagctccca

SEQ ID NO: 237778 - DNA, 122 bp, Homo sapiens
aaaaaggtgttccccaggcgatgaaaactttccagtaagttgtcttggaaaaggcaactccgcgtaatagagggacttggggaggtagccgctgcgggaaagggcgatgagtcctggggtgc

SEQ ID NO: 237779 - DNA, 122 bp, Homo sapiens
tacgccgtgggaatgcgtgcaggatcacgcacgtacaccgtgggaacgggcgcaggatcacgcacgtacaccgtgggaacgggtgcaggaccacgcacgtacgccggatcacgcacgtacgc

SEQ ID NO: 237780 - DNA, 122 bp, Homo sapiens
aggcgcagggtaggtcccacgctcaccttgccatcactcttcctccggatcttctggcagcggccgtaggagcctgtgccaatggtgtacaacacttcatagtcctcagcccgggaaggcat

SEQ ID NO: 237781 - DNA, 122 bp, Homo sapiens
tggggggactagttgagttgtctgtggccaggctgtgactcttgcgaggccagtctctggcgcctccccagggtaggcaatggggcggtacccactccctcccagtgctggattggccgggc

SEQ ID NO: 237782 - DNA, 122 bp, Homo sapiens
gaagagacagagaccctgagggtacagagtggttggcacactaacgaagagccaggaggccggtggctgcatggatgtggggaggtgggtgagaagtaataggcaaagaattcagacaaatc

SEQ ID NO: 237783 - DNA, 122 bp, Homo sapiens
acccggaggcctgagttcaaccgctttcgcttccttgcgggccgttcaaccctctgaatacgcagattcatttatttatgttttttaatgtagtaagtgggcagctaaatgaattgcaattt

SEQ ID NO: 237784 - DNA, 122 bp, Homo sapiens
cactaaaatggaaaacaataatttaatgatatgggtcatctaggcaaaattattccactacgtttcgcctatttttgtgaggtttataacatgaagtagagattctgaatactgtaatatca

SEQ ID NO: 237785 - DNA, 122 bp, Homo sapiens
cgcctagaaccggaagagaaaggggctgcggtgcagcacgggaaatagggtcaacaacgccggaaagtactactggaaaagcttccccaggctccgcgaagaaaagttccgaagcccggaag

SEQ ID NO: 237786 - DNA, 122 bp, Homo sapiens
cgtggcagccgctgcactccttccggccctgccgcggcgtcacctcgcgcctgcgcacagcgccccctcccgactaaggacaggaagaaccatagaggcactccgggtactgcggaggaggg

SEQ ID NO: 237787 - DNA, 122 bp, Homo sapiens
atagattgggtgttcccgttgccctctgggaaatgtagtttaagcctaaagctccatgaccgcggtggcttgtgggaaaagtggctcggaaccccaaatcccggttagattgcaggcaccgc

SEQ ID NO: 237788 - DNA, 122 bp, Homo sapiens
ggggagagtcaggggtctcacctgggggtcggccgccgaggctagcaggtcgcagagagccggcaaagcggcgggggcccgaagaacgatctggagctgttccgtggcctggggggaagcta

SEQ ID NO: 237789 - DNA, 122 bp, Homo sapiens
cgccccgtcccgtcccgttcgctgcagcaacaggctcggcggcccctgcggagtgcactgcggggctggctgtttcagttccaggcagccccgtgatgtttgggaggatcttgggtggcagg

SEQ ID NO: 237790 - DNA, 122 bp, Homo sapiens
gggaccggaggctttgtactttcactctgccgaataaagcctacagctttttctctctatcggtccatgtctctatcatttgtcacgggcagccgccacgccaattctttggcgtggctagg

SEQ ID NO: 237791 - DNA, 122 bp, Homo sapiens
cggggagggaggagctgaacgccggggttgcttccgaggagtgttttgtacatctttaggcggaggaggaggagaagcgagaggaggagagacgggaggccgcctcgagggaagggcggccc

SEQ ID NO: 237792 - DNA, 122 bp, Homo sapiens
cagtacccccctgcacctagcccttgcccctccgtctggctttccccactcccgctccggcggagctaaggttaacattagacgaggctgtggctaccggaaagagcgcaggcgcagagcgc

SEQ ID NO: 237793 - DNA, 122 bp, Homo sapiens
ggacttcagagaggctctccagcaggcgcctgggactcggaccaaaatggcaactccaagcgtgctttgggggaccctgccactcccacggaaggtcctcgccgcccacctccccgtcctcc

SEQ ID NO: 237794 - DNA, 122 bp, Homo sapiens
ctgtaagaattaacaagacaagtttacataaagcatctttcgtagcaaacactcagtaggcgctcagtctgtgacagttatcatacatccacatcaacattaaccatagactatacacagac

SEQ ID NO: 237795 - DNA, 122 bp, Homo sapiens
cggcaatgattggtctcgggggaggggtggggggttgcaaacccgaggagcggtggcatccgttgcatgatgcaaaaaaggattgatttcaaaagttgcgagttgcattggcagccgccctt

SEQ ID NO: 237796 - DNA, 122 bp, Homo sapiens
ataaccagggcatcctgagggtctgagttcacggtcaaggctgtgggctactaggtccagcgagtccaggcctcgccccgcccccgagctgccacagccaagatcttcggcagggaattcga

SEQ ID NO: 237797 - DNA, 122 bp, Homo sapiens
tgcagcgtgattggcccgcggctcagggaggcgaccaatgagtgctctcgcggagagcgacggggcaggccaatatggcttcctgcacctggtgacgcttggcgaaactgaggtctcatgga

SEQ ID NO: 237798 - DNA, 122 bp, Homo sapiens
gagcaagcgcaacgggcgttttcgtttgtgacgccagggagcgtgaggacgtggggcttccgtgaatgcgcagtgggtgcgtcggccacgaccttttggccaggttagggagggggcgacgc

SEQ ID NO: 237799 - DNA, 122 bp, Homo sapiens
tcactgagcatagacctgtgcacggggctttgggggagagcaggtcacgtctgtgcacagcgggagaagagcagccctgggcacagagaacggtgtgtagaaaggaattttctcgattgagg

SEQ ID NO: 237800 - DNA, 122 bp, Homo sapiens
cctttcctaacacggtcggccgggtgctttgtgtcagtgctgcagcactggggagccaggcgaggggggcttgggggcatggggccggaaagcaggcagaagcccgtcctgggtggtgctgg

SEQ ID NO: 237801 - DNA, 122 bp, Homo sapiens
ctcagctcctgggcccttatcctgcagctgggtctggaaaccagaggagcttgcaagaggcgaagcctcttatcacaaacatttcctgcctattcccgcctgaccccgcataccatagccct

SEQ ID NO: 237802 - DNA, 122 bp, Homo sapiens
tgaagtactcagttagtactcaatgactttacttgttccaccaaaccaacaggggctgcccgctgatgagaggtgaaatgcgaagggaaagaactcaggattaacccccagggttctggaga

SEQ ID NO: 237803 - DNA, 122 bp, Homo sapiens
gacgcggatttgccatatggttgcgcggagccaggaagaatgggcccctgtgtgtgcgaccgggacgcagcggcgcgggccgtgccagccgggcggagccgggtgcccgacggcgcaggacg

SEQ ID NO: 237804 - DNA, 122 bp, Homo sapiens
gaaacttcggtgtttatctgacgggtggacgccctgccctggaaacggtcctgcctgccccgattcatgcatctcctgccccgcgtctcgtcgtggtcctggcctcccggggtagcgtttga

SEQ ID NO: 237805 - DNA, 122 bp, Homo sapiens
accattacaccagcctggctcagagacagattgtttgcttagaacaaagcctgaccctcccggggaggagagcctgaattgaggggagagaagtatgctctagtattgagtgagaagatggt

SEQ ID NO: 237806 - DNA, 122 bp, Homo sapiens
ttaaggaagagaatgtgatttagcttgcattctaaggaggtaactccggccgcaatgtgacgcacaggctggaaggagcaaagccagggaacaggaccatgatgtcaagagtctactgcact

SEQ ID NO: 237807 - DNA, 122 bp, Homo sapiens
cctcaccatcctctacctgttcaacaacagcctggcctcgctgcccggcgaggcgctcgccgacctgccctcgctcgagttcctgcggctcaacgctaacccctgggcgtgcgactgccgcg

SEQ ID NO: 237808 - DNA, 122 bp, Homo sapiens
acatggtgaaaccccatctctattaaaaatacaaaattagtagccgggagtggtggggtgcgcctataattccagctattcaggaggctgaagcaggagaattgcttgaacccgggaggcag

SEQ ID NO: 237809 - DNA, 122 bp, Homo sapiens
ctgcaaataattgtattattccttatttacgcagcagcggcaaaatttgaggaacactagcgaatgtgtccagagcagctcatactcgctcgccaaaacccaagcgcagcactaaagaaacg

SEQ ID NO: 237810 - DNA, 122 bp, Homo sapiens
atgaattctactcaaacagcatttacaacgcacctactcggcgtccggccttgtgctgcgcgagcgcccaagcccaactcccccacggtctctgctcccgccgcggcgccagcaggcccccc

SEQ ID NO: 237811 - DNA, 122 bp, Homo sapiens
tgtgaggttctgtgagcccgggcccagctgccgtggtgaatataaccgggagggagtgcccgcctctgcccacctgcctggcatctggggttcccgggaggccgggcacctgcaccctcgcc

SEQ ID NO: 237812 - DNA, 122 bp, Homo sapiens
gcctggctcaattcctgctccttttggtctataaagcggactgtggccctggggttcatccgattgagtcaccagtcactggagctttacaggagagagtgggagaggaggctcagagaggt

SEQ ID NO: 237813 - DNA, 122 bp, Homo sapiens
gaggagctggactccctcaagtacagtgacctgcagaacttagccaagagtctgggtctccgggccaacctgagggtacggcgctggcggtgcgggtccctgggcgggcgcggcgggaatag

SEQ ID NO: 237814 - DNA, 122 bp, Homo sapiens
agggccaggcgtattgagcggtcaggggagcgcgcacgcagaacgtcagccagtaagcgccgttcctccgggagatgtggaggaggggggcggcgtggaggaagagggggaagttggcgcat

SEQ ID NO: 237815 - DNA, 122 bp, Homo sapiens
gtggaaacagaagcaaatggatagaacaaggtgcccacccctgaccctaagcctgaacaccgggaccctctgctcatcaccaggacccaggtgccatcctccaggtccttggggccgtgatg

SEQ ID NO: 237816 - DNA, 122 bp, Homo sapiens
ctcccatcagaatctgtcgtaatggaactgagacaacgaagcaagggacagagagagccacggtgttgctccagacgggcatcaggcactcggtgtctgtgtctcacctgcccaatatcggg

SEQ ID NO: 237817 - DNA, 122 bp, Homo sapiens
agcggcggacctatgctggcctgggggggttcggggtgggggttcgggggggtggccccccgcagtgaggaggtgtggagggggcggcgtgtgcgggatcgtggaggtggggccgaggcagc

SEQ ID NO: 237818 - DNA, 122 bp, Homo sapiens
tcgatactcgaaggagaggttgtccgtgttgtcttctctttatttatgatgaaacatacacgggaaacctcttttttagtatcaaatcccaccctggaggcacttcctgttcctgatgcagc

SEQ ID NO: 237819 - DNA, 122 bp, Homo sapiens
actgctcacaccagctccagaagcacgtcctctgacttcactgccgcagctctttccacacggggccgtgattgaccctaaaaattgcagaccagcacatacactggacactgcaggcaagg

SEQ ID NO: 237820 - DNA, 122 bp, Homo sapiens
attaacaactcttgtttctgtaagcctggactttctaagcttttcagccaaactatctcacgcctctgagagtgaacttactctctcaggggtcttaaggcgaggcctgaaactacccaggt

SEQ ID NO: 237821 - DNA, 122 bp, Homo sapiens
tggccgcgcacccagtgcgcccccggggcctcctcttgtcccgaggagcacccccgctcccggtgtcttttggtttcgaccggccgactgggaggggccgtgggacgccattcccataatgc

SEQ ID NO: 237822 - DNA, 122 bp, Homo sapiens
aagagctttttttttttttcagtgagagaatggaatttcagaatcgatgtagaggcggagcggattaggataataataagacctgagaagtagctgagcacaggattaagagaagggagatg

SEQ ID NO: 237823 - DNA, 122 bp, Homo sapiens
gcaccgccagtgtgggcttatgaggaggtgcaggccgggacctcaggctgtgggcaggaccgcaggcagcggctggcaggctccaggcaggctctggaggacccgggatttaggtatttatg

SEQ ID NO: 237824 - DNA, 122 bp, Homo sapiens
acagccagcccaggaccgactgatcgctcagctcccgccaactttaataagtatagccaccgcctgggtgtagactcctgcaaaataattcacttccggtttccagatctcgcgagagaggg

SEQ ID NO: 237825 - DNA, 122 bp, Homo sapiens
acaaggtgtgggccatgactcagattcctgggtgtcctgaacctcctggggcagttcacacgttccctggccactccctcttttcctacatgctggccatggggaaatcaccactgggcact

SEQ ID NO: 237826 - DNA, 122 bp, Homo sapiens
gcgggagttggagttctgaatgcgccaagcccgcggtcgctgtcaaacctctcgccgctacggactacaactcccagagggctctgcgacggccagcacgcccatcaccgcagggcccagcc

SEQ ID NO: 237827 - DNA, 122 bp, Homo sapiens
taaggggaggttgatgctgctggatccagaacgacactttggaaaccactgtgggaggaacgcacgcttctgggtggggaggcaaaacacggtgggacagtggtcagctgtgtgtgtgtgtg

SEQ ID NO: 237828 - DNA, 122 bp, Homo sapiens
ggagacaccgagggtgtgaccgtgtccctggcagtgctgcaggacgaggcgggtaaagtccggccctcttttggggagggtgggggttggactggatccagacctcccaaggagcctggaga

SEQ ID NO: 237829 - DNA, 122 bp, Homo sapiens
ggccgtctgggtgtcactaccgctcctgggcagcccccacttctgcacaccgcttccctccgcactcacgtcccaggcccctcggttccctcgcctggacgcccctcgcccagcaccttccc

SEQ ID NO: 237830 - DNA, 122 bp, Homo sapiens
cgcggaaagatgggtgggtgccgggcagaggtgtggccacctgcgatggggattgacctccgaggggagggggcccttctagacgtcgtgccgtgggataggtaccttctgctccctccccg

SEQ ID NO: 237831 - DNA, 122 bp, Homo sapiens
ggggagggcccttcccgcttctgggcaggtccaaatcctcaccctccctaaggccggcgccgacgctgccagcccggcagagccccctcctgccggccgctctccatccccgtccccggtcg

SEQ ID NO: 237832 - DNA, 122 bp, Homo sapiens
catttttgcgcttcctgggagggaattcctccaagaagaggggtaaatgagaggcccacacgctggatggcaaacacaaacactgtcagatcagatggcaacctttagggttcctttacgat

SEQ ID NO: 237833 - DNA, 122 bp, Homo sapiens
acagcaccttaacagagtgtatacacccgttctggtgcgcaaaagtggggcgatgggtgccggcggccgggccggggagtccgtccgggtaattaactcagctccggcgactgcgacgatga

SEQ ID NO: 237834 - DNA, 122 bp, Homo sapiens
acctcagatgatccacctgcttcggcctcccaaagtgctaggattacaggcatgagccaccgagcccggcctatgtttatatatcttgcactacagccagtgtgtgtagctcaaggacttgc

SEQ ID NO: 237835 - DNA, 122 bp, Homo sapiens
ttaaaaaaagtgatgcatggcgtgtgttttagggaggaaaggagtgtgcattggtaacagcgttttccttaaactgttcattctgtagcgtttactgaaaactgtaaggttttataagcctt

SEQ ID NO: 237836 - DNA, 122 bp, Homo sapiens
aggtgccctggcagattcgagcggccacccccagccgctgagccgagcttctgctgccgccgctgccgctgcgctcccagccgctgcctgcgccctccctgccgccccctcgggtgcgggct

SEQ ID NO: 237837 - DNA, 122 bp, Homo sapiens
ctttggctggtatcaaatactagactacctttcatttccgggtcactgtagatgcgatggcgccgattccaaagactgtggggcggatcaagctaggtgagcggtatgacaagaccagtggg

SEQ ID NO: 237838 - DNA, 122 bp, Homo sapiens
ctctccaggcctcccggctcgggcccgcgtcccggaccccgacctcagaagctccgggctcgctcatcccagctggtcttggcctttctcagagtccactgaacaggtggcttcttgggacc

SEQ ID NO: 237839 - DNA, 122 bp, Homo sapiens
agtggtccaaccacaagcagacagagcttccgttcagttgccatttctggaagtgttctccgaccaagcagacagataccaatacggtgttaaaaatggtgaaaatagcagctcacccatta

SEQ ID NO: 237840 - DNA, 122 bp, Homo sapiens
gttgaatttctcaataagtgcaagggataccaggtaaccagaataaagctactttgtaaccgttacctctaacattacaatagctaaatgttgatagcaaaaaaggagaaataggaatgaaa

SEQ ID NO: 237841 - DNA, 122 bp, Homo sapiens
cagcttttttaaaggggccacgacgcatttggaagggtctccttttgctcctgcagcctgcgtttgctccctaatgtgagcctgaaaagcctaccagaggcatgcagagtcaggcctctggg

SEQ ID NO: 237842 - DNA, 122 bp, Homo sapiens
ccagtgctctcggtcctaccggctcagggcccctgcgaagaatctttttcaagaaattcccgaccgcaggaattccttctgcgctaggaatctccatggagtttgcgctccctctggcacgt

SEQ ID NO: 237843 - DNA, 122 bp, Homo sapiens
gcggtgaccgcaggtctcaccttctcctctccttgcagcaggctgagccactcgcgcacccgccccaggcttccaccttgcaacctctatccctggacagcgaggcctcagtttccccattc

SEQ ID NO: 237844 - DNA, 122 bp, Homo sapiens
gggacccgcatctccctacagggttggcccccagcaaggctcaggacagcaaagcctacacgtccatcctgtacggcaatggcccgggctacgtgttcaactcaggcgtgcgaccagacgtg

SEQ ID NO: 237845 - DNA, 122 bp, Homo sapiens
cgaggcggacggggccccctgcacccctcttccctggcggggagaaaggctgcagcggggcgatttgcatttctatgaaaaccggactacaggggcaactccgccgcagggcaggcgcggcg

SEQ ID NO: 237846 - DNA, 122 bp, Homo sapiens
ctctagtctgaacacagagaacacaaatttgtctattacttcaggaagcccagggggaaccgcgccccgctgaagggctcggggaaggcgcgctcccgcgtcccgccccctcctcccccagc

SEQ ID NO: 237847 - DNA, 122 bp, Homo sapiens
tctcagccactcccttcattgccaggagttgttctaagcaaatcacgacttctatgtttacgccactgagggagcagtagaagacagaatgctcgaacacggttccactttggaacccgcct

SEQ ID NO: 237848 - DNA, 122 bp, Homo sapiens
aggtcagaagtgagatatacccatagatcccagacctcccggaccagattgtgccgcaaacgaaaggccagctcgagctcccacagctctccggaaggcctcccagaactaaagcggaggag

SEQ ID NO: 237849 - DNA, 122 bp, Homo sapiens
acaacaaaggaactttcttttatcctagactgatgagtatttgtggctgattatctcagccggttagaggttaaagttcagtgttaatgaggtcaaagtcataaatgtgaactttaagtgga

SEQ ID NO: 237850 - DNA, 122 bp, Homo sapiens
cattttcacaatgactgtttactcatagttagcacaatattacctttgccgtgataaacccggaggggggagacctggcccctggcccctggacacacctgtcccagaagctgacacatgga

SEQ ID NO: 237851 - DNA, 122 bp, Homo sapiens
acccagacccgaggaagacaagcggccacgtcggatgtaccagtggtggaagatcctgtccggctgcaccgaggctcacatcagaagccggcttcggtttcaccacaaaataaggcatctag

SEQ ID NO: 237852 - DNA, 122 bp, Homo sapiens
ctgcaagaggtttggttaatcattggctttgtcctgtgtagacagtcaaccctccctctacgtcctttgttcctcctatgctgttggtatcccagaaattcttgctcaattcccctcagctt

SEQ ID NO: 237853 - DNA, 122 bp, Homo sapiens
ctcccccaccccgttccagggctcggcgacacccgcgccggccctcaagcccctcccttccgcagcccacaccctgggggtccacccgggctctgcaccccgcccacctccgggcttccggg

SEQ ID NO: 237854 - DNA, 122 bp, Homo sapiens
ctgccatgtcattaaccaggctcctgtgaggacaacagcctgggcctcggcgtcaatcatcgataagaagcctctacagcacccctgccccctaatttatacagaaaccggacccactaatc

SEQ ID NO: 237855 - DNA, 122 bp, Homo sapiens
agaagtatctagggagagccagaggggatgtgatcttagaacaggctttagagtgacagacgtgaagtcattgtcctttgagctacagttcagtttggtggaagagcaaagtgccaggacta

SEQ ID NO: 237856 - DNA, 122 bp, Homo sapiens
ggtctacgctgggattggtgaggtcctctggccccgccccgccagggaggatttccaggccggcccgaccagctcgccctgcatacacttcttggctgtgtgcgctcagcaggacgtgggag

SEQ ID NO: 237857 - DNA, 122 bp, Homo sapiens
cctgcagagcccacccggtgctccacccccagcaccctggccattcgacattgcctgcggcgggagctgccagctttttggaattcctaatcgctcctggccccggtgattggctgctcagc

SEQ ID NO: 237858 - DNA, 122 bp, Homo sapiens
ctattttgaaatatgtgttggccgtgtacagaagaacccggtgggctggccgatgtttgacgctgtcctttttgtttctgtctcgatggcgtgcttccagcattagtcacaggagggagaga

SEQ ID NO: 237859 - DNA, 122 bp, Homo sapiens
ggtggtcggggctagtcagcccggcctgggcatggagcgcggggtggcagagcctctggacgtttggggcgcgcccagtccgagcccccggcgcgcctgaagttgcgagcggcgagcggcga

SEQ ID NO: 237860 - DNA, 122 bp, Homo sapiens
gcgttgtggatgaagtggcagcggggcccgtaggggcaaaagccgatggtgtggaaggtgcggcacagctccgtcttgtacttggggtggcgggtcaggctgcggagctcgtggatgccgtg

SEQ ID NO: 237861 - DNA, 122 bp, Homo sapiens
tgtataacacacacacacacacacacacacacacacacacacacattttgttttccagtccgcactcaagttttgcaagacagtcctgaaaaagaagtttcagtggggagatagaagtgttt

SEQ ID NO: 237862 - DNA, 122 bp, Homo sapiens
tttaatctgtgcctttctccgtggctactgttttaattttttcagcatttatttctcacacgtttttcacattattgacaagtgatgtttctgcatatctgatcatcccatttattcttcag

SEQ ID NO: 237863 - DNA, 122 bp, Homo sapiens
ccaaagatgctgttaaatatcttacaatgcacaggcagccctgcacgactgagaactgcgcggccctaaatgtcaatcctaggattcagaggttgaaaaaccctggtctacacaagagctta

SEQ ID NO: 237864 - DNA, 122 bp, Homo sapiens
ctatggaagagctcaaatgattaaatcaataaaagaatgacaacttatagagctcatttacgtgtctgaatatatcagtttagcccagagtatctgaactcctgggccattgctattcactg

SEQ ID NO: 237865 - DNA, 122 bp, Homo sapiens
ttcttgcccctttcctttcagacaaaacttgcagcacaaagaatgaattcttttgggtttcgcaatccgtttcttccctgggcgtcttaaaatgcagcctcgtctcggaatggcatacagta

SEQ ID NO: 237866 - DNA, 122 bp, Homo sapiens
tgtggacaaacataggcaccttctgttggccgaggctcagagcaggacacaggactccaccggactgggacacctctcacccccaattcagcagatccatctttctgatgctatactgtaaa

SEQ ID NO: 237867 - DNA, 122 bp, Homo sapiens
atgttggcatgcggggcaccttgtgggcgaccccgcctggacggcttcgcggctcccgggcgatcaccctggtgcctgccgcctggcccgggggagcccggtctctaattaggcctgaccgc

SEQ ID NO: 237868 - DNA, 122 bp, Homo sapiens
aagttgtgcctgcagctgttaccatagtaaccgaggaccggatgtggcgatcttacggtgcgacagtcctcttctcaggccctctggcccgagagcctgttgactctgtgacacactctgag

SEQ ID NO: 237869 - DNA, 122 bp, Homo sapiens
ttggattgccatatgaaagggagccacccaccaaacaggaatacctgccaaggactcttacgttggcacaaaataatttctggatttttgtttgtccattatgcatttggggcttggtgtac

SEQ ID NO: 237870 - DNA, 122 bp, Homo sapiens
ctcccggacacaaactcaaagctttatggtgttatctcttgagcgaaatcctggtaacttcgtaaattgcttgcttcagtaccttatcagttaattggactctttgatatgtaagagtcagc

SEQ ID NO: 237871 - DNA, 122 bp, Homo sapiens
atcctccctggagcaggtctcccgaggcttgaagggccagggcacccaacaggtgctgagcgcgccccaccaggtcacccgggagcagggaacaccaaggaacccagagtcgggcctctttc

SEQ ID NO: 237872 - DNA, 122 bp, Homo sapiens
agggagcagtcaggggactacgagtgcagtgcctccaatgacgtggccgcgcccgtggtacggagagtaaaggtcaccgtgaactgtaagtgttctcaccaccacgcgccctgcacgtgcat

SEQ ID NO: 237873 - DNA, 122 bp, Homo sapiens
cagttggctcaaaaactcaaatagggaagttctgacctagtggtatgcgtgttgaaattgcgtatagggacaaacctgattatctgggtatacacagaggcccaggcacctgcaacagaagg

SEQ ID NO: 237874 - DNA, 122 bp, Homo sapiens
aactgggtgaaaggaaggagccagagacaacaggcgctccacagcctgtgacaggttgagcgacaaggcaaccctgttctgcttcccacctcagctgcactaaatggggctgcactgaggga

SEQ ID NO: 237875 - DNA, 122 bp, Homo sapiens
aggagccctggctgttgtttgtgccggaccacgggcttgaagccgcaacaggggcggcggcggcggcggctgcaggaggggaaggggcagagttgagcgctcccgggtacgggagccagagc

SEQ ID NO: 237876 - DNA, 122 bp, Homo sapiens
agacctatggtttccatggtgacagatccggctagtccggactcctggctctttatactgcgcaagcgcactgcgcaagcgcacacaactgatttggataccccgcgccttttggttcaaag

SEQ ID NO: 237877 - DNA, 122 bp, Homo sapiens
ttcaaggcattatctctgcagagctcctatgggagagcatggggaaaaagtgaagacagacgtcttgggaaagaaaatgggtttccctgccaaaactgggagatggtgctggctctcttggc

SEQ ID NO: 237878 - DNA, 122 bp, Homo sapiens
cccgcccctcccgtttcctggggctgggcctgttcccttccctaggacccttgaagtattcgggggaggggcagcttggcgatctccggcttcctggaggagaacgccaggcaggcaagctg

SEQ ID NO: 237879 - DNA, 122 bp, Homo sapiens
tatataatccctagattgtaaaagttgtgactatagcagatatatttttctgtaaagacacgaatgtgctgcttctccgagaaaacaccaaatggcggatgacgccagtgcagagggcgggg

SEQ ID NO: 237880 - DNA, 122 bp, Homo sapiens
ggcgggcccgcactcggagaggctggccggcgccaccggccttgggcagtgagagttaggcgggccagcagctgcggagggtgcacctggtcctctagcagtgccggcccactggcactgcg

SEQ ID NO: 237881 - DNA, 122 bp, Homo sapiens
tggtgttctagcgtcagacatcaggcgatgccgtgcattacccaagacactggacagctccggatcttcccgtctaaccactaatcaagttaaaaagaggaaattaacgctttcttagtagt

SEQ ID NO: 237882 - DNA, 122 bp, Homo sapiens
agtcccagcctcaagaagtttccccaacctctcagaaacttgaagggcaatgccaggtaccgaaaaaccggcccccgccccttatccccggccgacccgtccgccgaggtggctgccctggg

SEQ ID NO: 237883 - DNA, 122 bp, Homo sapiens
tcttacaaggcctgccctgtgattaaccctgtcccaggaagcatatggctggccctgtgacgcctctctctctctttcttcctttgaagacatgccaagaggggctggcagtgcctgatacc

SEQ ID NO: 237884 - DNA, 122 bp, Homo sapiens
gcgccatccccgccatgcgcctcccgcgatgcagctcacacgtcagtctgtccggccggccgcccgctcacgtcctaaagcccccggccgccaggcccgcccgcccgccacccagcgcccat

SEQ ID NO: 237885 - DNA, 122 bp, Homo sapiens
atcaactgtccttctacaaaatactatatcaacccaccacccatcatccaccattcataacgcaccacccatctatccccattcaccatccaccatcaccttccatctacctaccatccacc

SEQ ID NO: 237886 - DNA, 122 bp, Homo sapiens
gctaataacgactctcctgggtcaggttcgcagtccggccggaaggcaaaggaccccgaacgggggctctttcctgggccccagaaaagttcttcggaacaaaaactccccctccaaaggct

SEQ ID NO: 237887 - DNA, 122 bp, Homo sapiens
tcatccaaacaaggccctttggcgtgaataatagctcagcggctccgaagccgtattgatcggctgcaaacccggctccgccgagagctgccagggcttttcctgggggcaggaccagcacc

SEQ ID NO: 237888 - DNA, 122 bp, Homo sapiens
gaggcgagaagagacggatttgcaaaagcaggcgagtcgtgcagaggctcctaaaatgcccggcgtcccgggagcgaactagcggaggaactcctttgccaaaggggtggaaccggcctctg

SEQ ID NO: 237889 - DNA, 122 bp, Homo sapiens
caggtgtagggcggagtggaacaggaaagttctggcttgactgacattgtcatgcactgacgttgcattccttagccttgggagctgtttacacttgactgtctactttgaggggggtttcc

SEQ ID NO: 237890 - DNA, 122 bp, Homo sapiens
acaaaaaaaatcaaatgcatatatactgaaaatgggaaattgtgcagtattatatttattcgagattaaaagtgttaatctaatgtcaaaaaagcaataaaggaattggtttgtagaagtca

SEQ ID NO: 237891 - DNA, 122 bp, Homo sapiens
ttagccttacctgcttgtttttaacacctgggtcttcctgttctgttgtcgcctccccagcgccccctgcaggtgccagaaggaatgggttttttttcccctttcttggtgggccatgagga

SEQ ID NO: 237892 - DNA, 122 bp, Homo sapiens
cttgccctgcctccacttgccttgtgacattctattaccctgttaagtacttgatgtctgcgacccacacctattcgcacacctccccttttgaaaatccctaataaaaacttgctggtttt

SEQ ID NO: 237893 - DNA, 122 bp, Homo sapiens
tgagagagcatgggaccagagtcaaaatgaagatagatctgtttgtaactttcagtgggacgctccagctactctgactggagttttgctcctggctcacttgcatgccctatccctctttt

SEQ ID NO: 237894 - DNA, 122 bp, Homo sapiens
ggggcaagtccccgccggctcggaccccagggaggtggaggcaggcaccgtccccttgtccgggtgaccctgtgtggcctccctgctaagcccgcagcctgggctggcaacagcctcgatcg

SEQ ID NO: 237895 - DNA, 122 bp, Homo sapiens
ctcccagacgccgttcccagggcggtccgcaggcaaggcctgggggaacaggcggctgggcgcctgtcgcgggggaggttcgaccccgacggggacgccgctcggggagaggggtgggaagc

SEQ ID NO: 237896 - DNA, 122 bp, Homo sapiens
aggcgttgagccgtaaatcagcaccacttcccgcccagggcgttctgggtccccgcccaccggcaagtcacatgagccaccaaaatggtggtgttcgggtatgaggctgggactaagccaag

SEQ ID NO: 237897 - DNA, 122 bp, Homo sapiens
aggaaaaaaatcttcaagtgggtgtgagggtgtttctaattcaaaatatgtagatttctccgcatggaagaagtagtaaagattttcttaacatgctcctgtgttcatgcttggagacaaga

SEQ ID NO: 237898 - DNA, 122 bp, Homo sapiens
tgtaagtcaagctatgccaatcactatccctgcagtttctctaagctacaatatctctagcggtagaaagtaaattatgcttcttgtcattaccttttgggagtaaagttaaagtaaaaaat

SEQ ID NO: 237899 - DNA, 122 bp, Homo sapiens
cagcagagtcaaacccttaaccaccttgtggtgcttttctgctcctcccattacaaacagcggggcccctgcaggcctgcacactgtagcctctctctcggaggcgtcctactccctgaaat

SEQ ID NO: 237900 - DNA, 122 bp, Homo sapiens
ccactggcccggttcaacgaatatctattaagtatccactctataccagacactgctttacgctccagggatagagcagggaacaaaacagacaaaaccagtcccacgcagttgacagttgt

SEQ ID NO: 237901 - DNA, 122 bp, Homo sapiens
tttcctctttgagtttctcctgagcactgtgtcaagggggcttcagaacccagtcaaggacgcaggtgcagggactctataggtcagatggcagacctctgggcctcagaagaggaagtcac

SEQ ID NO: 237902 - DNA, 122 bp, Homo sapiens
ccgggagtcttgcagttcccctggcagtcctggtgctgttgctttggggtgctccctggacgcacgggcggcggagcaacgttcgcgtcatcacggacgagaactggagagaactgctggaa

SEQ ID NO: 237903 - DNA, 122 bp, Homo sapiens
cctgcgcgccgcgtccgctgtccgcgcctgcgcgcctctctccccgcccaacccacgacgcgggcgctcctcactctcgcaacggtcacgcagaccccgcctctgcgaacccggccaagtcc

SEQ ID NO: 237904 - DNA, 122 bp, Homo sapiens
gaatttacttttcactgttggctttaatttgatattaaagactctgaaaagagacccaatcgaaaagggaggacagtgactcccagttgaataatggccaggtccagagaggcagtggcgtg

SEQ ID NO: 237905 - DNA, 122 bp, Homo sapiens
ctgctaacgaaactcttcttagtcaaatgaggaaccaaaagcagaagtggccccccaggacgtggttttgtaactgggggagggcttctcgctccctgcggcccctctgtttgtcatggccc

SEQ ID NO: 237906 - DNA, 122 bp, Homo sapiens
acaaagtctacacaacggaacgaagctgcatctaagtcttattctagaattctttgtgaccgggccagctcttccatcagcctgtggagtgtatgcacacaggcatgcagaactcactggaa

SEQ ID NO: 237907 - DNA, 122 bp, Homo sapiens
gattttccccaattcctctgtccaggcggaaaggaactttacagatttaggaaaatgccccgctcatcttaaagatgtgtaagggagcatcggtgagaaaaaaatgttcttgcccaaggtca

SEQ ID NO: 237908 - DNA, 122 bp, Homo sapiens
acgtttttgtggttggccttcaccgattggctggagtttgtcgtccctccctcctcgtcacgcctctggctccacccctttgcacacaagatggcggcgcccagcggagtaggggctgcgct

SEQ ID NO: 237909 - DNA, 122 bp, Homo sapiens
ccccgcagcgtcgtggctagagtagggtctggagagagctcccactgtggcgagtcctgtcgttggattcccgcggcgccccgtaaggctccgccccggcggtgctaccaaaccctgttcga

SEQ ID NO: 237910 - DNA, 122 bp, Homo sapiens
gctgattgtgcactgggctggagtgcatatgccacccatttgtcttgcagtctggctgggcgctctgccctgctcatgggaagccttctctcattgctgaatgccaagcaggctggataatc

SEQ ID NO: 237911 - DNA, 122 bp, Homo sapiens
acgttaagggttgaatttttgtgtcaacaggcacctcgggaggtcgcctagacaactgagcggagcaactgagataacccccgctacgtgtggagtgacctagtccattaacttgccccagc

SEQ ID NO: 237912 - DNA, 122 bp, Homo sapiens
ggcactgtatagcacctgagcatgttttgatttggtctttcttgttgaggggccttgttacgttataccctggtgtctagactttggcccaaaacctttgagatggagagccggtgtctgtg

SEQ ID NO: 237913 - DNA, 122 bp, Homo sapiens
gaggagctttctcctctcacctcaaggactgttatttatttgtctgcgctactctttcgacgtttccattctcttggtcctcaagatgtgaatcacccattttttccgtaggggggaagacg

SEQ ID NO: 237914 - DNA, 122 bp, Homo sapiens
gtgaagctgccaaatttatcagagaaggaacaggcatctctcgcatggagccgtgggcctcggcgttaaggcactcttcagctacaggtggcagcccgtttagctcttcttaaggtcttgtg

SEQ ID NO: 237915 - DNA, 122 bp, Homo sapiens
agaaactgaagtcgaatttttagttgaattgcgtgctctgtgtttggcggtggtgtggcccgttcttttggaggtccacaccacaggtatgaggcctgtgggccctgaggaagcgcgatccc

SEQ ID NO: 237916 - DNA, 122 bp, Homo sapiens
catttatagtttgctgggacagatgtgtgaagttcactctgtttttttgagacagagtttcgctcttgttgcccaggcgcaatcttggctcgctgcaacctccacctcacaggttgaagcaa

SEQ ID NO: 237917 - DNA, 122 bp, Homo sapiens
atcacagtaccatgtggcatgcgagtgtcgtggtaatgctccccgaccaaaccaccaaaccgagggttgggctgcttattctcgctgcccaataatgagatgcagataaactaggaaagaaa

SEQ ID NO: 237918 - DNA, 122 bp, Homo sapiens
atctctttatcagcactgtcattctctgtggccaggctggtccccactccaggggggacgcgttacagtgcccgtcaggtaggggagagggaacaaccctatgtgaacctcgaacctgccag

SEQ ID NO: 237919 - DNA, 122 bp, Homo sapiens
tgatcctgggccccacccccaacagccccgagattcctttcattcccctgtaaaatggagcgaagagcacctggcatgtctcatgcaaagagctgctataaaactcaaaggaaataatattc

SEQ ID NO: 237920 - DNA, 122 bp, Homo sapiens
cggggtctgatcgctgcgggtcggattcccttgggcctgaaagtgaggatgagcgacaaccgtgggcggggcctgcgctggggaaggtggggcctgggcggggcggagggggctcgggcccg

SEQ ID NO: 237921 - DNA, 122 bp, Homo sapiens
cgtattcacttgagcttgagaaccactgatctatgctattgtttcttgaacttgactgcacgttggaatcacctgggaaacttaaaaaaaaaatgcttatgcatgagtccgagtcccagaaa

SEQ ID NO: 237922 - DNA, 122 bp, Homo sapiens
ccctcgatcggaaccggcagctgcagcccggagccaaacttgaggcttggcttttcgcaccgagccaaagtttctctcgctgttgtttttccaggcctgcctctgggacaggctcctccgag

SEQ ID NO: 237923 - DNA, 122 bp, Homo sapiens
atactgtaatccccataatactcacatttgcataactctagataatttatgaagcattttcgcagatactgtgcagatctcacactgacacgggggtgggttggctgtgaaagggctcaact

SEQ ID NO: 237924 - DNA, 122 bp, Homo sapiens
ccaggagcccttgggagggcctacggagggagcggccccaggcgctttctagagcgtgagcggtgggggagcaggcgcagggtggcacgagcggaggcggggcccgggcgtggggcacggct

SEQ ID NO: 237925 - DNA, 122 bp, Homo sapiens
ccctctatatccccgcccccgcctctgatccccgcaccgtccggcccccacctcagaaaccgtctctcgaggcgaccctcgccgcaattctcagaacctcgcatggttccctccgccttcct

SEQ ID NO: 237926 - DNA, 122 bp, Homo sapiens
tggcgcaggtacagacgcctggcgaactgcagctctggggtggccaggtcctggcaatggcggcgggtggcctggtccgggtctggccgcagccggtagcccaggatgggcgccaggccgtg

SEQ ID NO: 237927 - DNA, 122 bp, Homo sapiens
caggctgagccggctgcggctagggctgcgaagagttaacgagggaccgagccccagcgccgcgggctccccgcatgctccctccgccctcccgtccccaccctctcgttttggcaagggat

SEQ ID NO: 237928 - DNA, 122 bp, Homo sapiens
cggagacgggagccacgccgggtacgctgccggtcgctcaagagcagcacggccccgccccgccccgcccacgcccttggggccacgcccactcccggaagcagtcctcaggtagcgcctcc

SEQ ID NO: 237929 - DNA, 122 bp, Homo sapiens
gttaaaaccctatctctccagtttcgtcattgctcacactttcatagctgttattatattcgctctttgaaaaccacagaatgggttgttagaagtcatagatcttccgccacccccactgt

SEQ ID NO: 237930 - DNA, 122 bp, Homo sapiens
gcgcttacacccgggagcgtcgggcgggagaactagtgcatgctggctggggatggcggacgcaaagccggaggcaaggccgcgcacgcgcaaacgcgggcgcgccgccgggccgtgctagt

SEQ ID NO: 237931 - DNA, 122 bp, Homo sapiens
ctaggcggccgcggggaggtcccaactactccaagttggggcgcggggttcctctgggcacgtaccttgggggccggcccgggtcccctagtccgagttgctcgagctcccgcggcacggtc

SEQ ID NO: 237932 - DNA, 122 bp, Homo sapiens
gtggtaatttgcagggtcatggctcaggggcaccgcagtctgcacctccgtccctggatccgtgcgtttgctgtgtggcctcgcagtaaatgcttccatctgcgtggcatttatggaccctg

SEQ ID NO: 237933 - DNA, 122 bp, Homo sapiens
gggagatgagctcgcacctcacttggtgccacagaggtggcgacctgccctgcaagagaccgcctctcagcagggctgattcttccccatcggtaggaattctcgaaaaatactctaagcca

SEQ ID NO: 237934 - DNA, 122 bp, Homo sapiens
tccaatcctctagctccctggaggcttagcggacagcgactggggatcccgggaaggagacgggaggcagggaagttagtatggatcctgggcagcgagattcagggaggatgccgtagggt

SEQ ID NO: 237935 - DNA, 122 bp, Homo sapiens
acttacctgtaatccccaaaatgacctcctggagtgaagcaatcaaagccaagaagggagcgccgagaaaacagaagttgccaatcagaactgccctcgctgagatgcccggttacagtcat

SEQ ID NO: 237936 - DNA, 122 bp, Homo sapiens
tctcgctgacgtcagggcctcaggattcccgcgggtgggaggtcctgggaaagttgtggccgcgaggtacttggaggcggtggtctctgggacagcagggccgcagaacgcgctgagctggg

SEQ ID NO: 237937 - DNA, 122 bp, Homo sapiens
ctccctgtcactagaaggtgggccctgccataggaggattctgcagaaccctcaaggacccgcggagcaggacggcaccttcttcccatgaccacccatttggatgtgtttttcaccccttt

SEQ ID NO: 237938 - DNA, 122 bp, Homo sapiens
tgtgtttcccctggggcatgctcctgtttactggtcccatgccaggttgactcattgcctcgttcatgggtggaattaagatgcctacctggggaataaatagagcaaggctgggtgctcac

SEQ ID NO: 237939 - DNA, 122 bp, Homo sapiens
aatactagccagagctcctccttgtcttggcagcctactagggacctggggaagcaaaaacgaaagctgggcaacatgcctgctttagaatgttttccttctacttacacatcttccacagg

SEQ ID NO: 237940 - DNA, 122 bp, Homo sapiens
gctaggctagttttcaggccccactccccggcctgggagcttttgtgatttaggagaatgcgtatttactgcaagtctcactcacagatgggccttactcaggtggtcatgtatcctgggta

SEQ ID NO: 237941 - DNA, 122 bp, Homo sapiens
ccgcccggggcaggagccccggcttcaggtaggggcctaggagggccccagaaatgaagccgaagcattggcggatgagactaacgagatctgtgacgactcgtatctgttcaagtggaaca

SEQ ID NO: 237942 - DNA, 122 bp, Homo sapiens
aggaagcgtccagcgccaacggtgcgcgccgcgggccgggcgggtagagggaagtttcgccgcgcctgcagctcagcgctgtggcttgtggctctcgctgctataagaagccagagaagggc

SEQ ID NO: 237943 - DNA, 122 bp, Homo sapiens
acggcccgcggcggggaatattctaccggacggccctcggtggaggaatattctccctgacggcccgcggtggaggaatattgtaccggacagcccgcggtggaggaatattctaccggaca

SEQ ID NO: 237944 - DNA, 122 bp, Homo sapiens
ctgggactcctgggcctggggcctcactgatgccatctgccttggagtgggacctggtaccggcacccagcaagaagagggcagggtccctttaagcccagcctcactccctcggcctgttg

SEQ ID NO: 237945 - DNA, 122 bp, Homo sapiens
cagttattttcagtaatcataaaacttacatgtttaaggtttcaataagacacagacacacgccttctcgagatcgaaaattcttgtgtttaaaaccagaagccaactgctcccaaatgtac

SEQ ID NO: 237946 - DNA, 122 bp, Homo sapiens
ctaagacagctcgagatttcaagtgtccacacttctagtttagacatttggcaaccaattcggaacagccgggccgcgaggggcccccaggtctttggcggcgtcgttgggaggccgcggag

SEQ ID NO: 237947 - DNA, 122 bp, Homo sapiens
gcgcttcttactttagaagttctcttcattttacttgtatattggacgtgtccctccctccgcatccccctcctggaaggtaagcttcctggagaacaggggctcctcctggtcccccgcga

SEQ ID NO: 237948 - DNA, 122 bp, Homo sapiens
atgggaaatagagtagggtgcttgtcctgggaccagctgtgggccccggaggctgacttccggtgcactcctgcgcgtgtgcacctctctctgtgtgcgtgttcgcgcatgcgcgccgccgc

SEQ ID NO: 237949 - DNA, 122 bp, Homo sapiens
tggcattttggtcccctggggcctttacgctagactcctagtgtgataaacggtaaagaacgggtaaccctcttccatccttcccctttcaatggtgcatccagttcctaataccctttgga

SEQ ID NO: 237950 - DNA, 122 bp, Homo sapiens
tgaaagggacgcaaagtacattttcaaacagaataattcaaaacatatggaacagaggaccgaagtaatgtacagttggtttttatggcttaatcatgatcatgttaatgcacaccagtagc

SEQ ID NO: 237951 - DNA, 122 bp, Homo sapiens
aaagagacaaaagagagagacagagacggaacagagcacacagagacaaacgcggggttgcggagagaaacacctactcagacaggagaaccagagagacagttacagactcagagatagag

SEQ ID NO: 237952 - DNA, 122 bp, Homo sapiens
cattcaagctcatccctaaaaggcctggaaagggaaactctgtgctctctggacatatctcgttcaggctggacaccacaggataacttccatcctggagcatgtggccaggaacaattcca

SEQ ID NO: 237953 - DNA, 122 bp, Homo sapiens
tttcaactttctttcttggcaataaggacaaacaattgattttaggggccaaaaagtagtcgttaaaccaatataaatcgtgctttcgtttgtagtgaaggcaaaaggctttgacgctccca

SEQ ID NO: 237954 - DNA, 122 bp, Homo sapiens
gccagcacactctgacctcagtatcactttacccgcctgtggggcaccggcgaggaatcacggtaaatgtgtcggccgtcaagcccagggcggaggtaaaggtgctcacggaggtccgccgt

SEQ ID NO: 237955 - DNA, 122 bp, Homo sapiens
tcctcttctctcagtctgtgatttggggagttaacccctccgctgccctctgctggtgaacgttccgcgtgccgcttgctgcctgaagccgcggaatccactggggagaagagagttaaggc

SEQ ID NO: 237956 - DNA, 122 bp, Homo sapiens
aggcgcgcggcccggggccgaacagttctgcgtgctcccgcgcacgcccggctgaccagacgtcggtcacgtgatcccggccccgcctgtcgctgttggtcagcttcacagccggtggaggc

SEQ ID NO: 237957 - DNA, 122 bp, Homo sapiens
gtcctccgcgggctcgtacacgtcgctgaaggcgccgcggcccacgtgcccgtggaacggcgtagcgaagttctcccctgccatagtccttcgctgcgttccatgcgcgtgcgcagggcgtg

SEQ ID NO: 237958 - DNA, 122 bp, Homo sapiens
gacataaacaaaacaaacccgaggcagcatggagaggggccgtggcccctgcagcggaaccggacccagtccctgagccgcccctacacccacaggtgagcgccgccacccgctgctcggaa

SEQ ID NO: 237959 - DNA, 122 bp, Homo sapiens
gctcggcccagcttgtcagcagccttcctgggaacgctgtggaaatgtgtggaggggccgcgtggcttcctgctgcctgggacgacattactgcatctgcatttgaggtgtggggcccagag

SEQ ID NO: 237960 - DNA, 122 bp, Homo sapiens
aaaggtgggcggcgagaggctagctatcgccccactctgcttcttatgagcgtgacttggcgcgttagcatccctggaaatgaccataaaaatcagacccagggttcacacctttggctagc

SEQ ID NO: 237961 - DNA, 122 bp, Homo sapiens
gtctcaccgtggtccccagtgttttgggattgaggaggggttcggcttcactctcttcagcgcctggggccttcatcctgagccgcagttggagccacggtccctgctgctgagatgtgaga

SEQ ID NO: 237962 - DNA, 122 bp, Homo sapiens
ctgactattaactgattcacttttcatgacccagcctcggaagtcacataggctcctttccgatgtagtcacaagtctagtcagcttcaagggcagggaacatagattccatctcttggtag

SEQ ID NO: 237963 - DNA, 122 bp, Homo sapiens
acaaaaaccccaaacaaaccacaaaacctgtttccaagttcagtgggacactcttcccaacgcaccctgacttcaggtatgtaagagttaagaaacaagaaagaaacacgaaaagcagctta

SEQ ID NO: 237964 - DNA, 122 bp, Homo sapiens
ggactctcacatgtgtgacatacatgaacaggcgaaacggacacgcacggcccccacacacgtgagctgggtcccccagggcccgtcggagcccttctgcctgggacctgcctcatccccgg

SEQ ID NO: 237965 - DNA, 122 bp, Homo sapiens
ggcccagctcacagaaccactcaggatcccaagaagcccagttttccgcaaacactgccccgggagacccagatttccctgctgggacaccaaaaccggccaggctgcagtgcgcatcgtgg

SEQ ID NO: 237966 - DNA, 122 bp, Homo sapiens
gaacataaattcacacagggacagttcctcctaggccacgcacaaggggtcgcatcctgccgtcctccctcagaaattaattgagctctcttgccgccgtaaacgaacagtgcatctggaaa

SEQ ID NO: 237967 - DNA, 122 bp, Homo sapiens
acgagcccggggttgcggggagcaactccaaacgcagaagagtggtccttgggtcttcgccggcgccaagcctcccgggcttcacgcgtaccccaggctgcggaggagcgcgggcatgacgc

SEQ ID NO: 237968 - DNA, 122 bp, Homo sapiens
cgcacacatcgaaggtctcactccacagcttgctatctctccgtttcgtgctcgagggggcggcatttctggaccagggtcggggggcgaggatgtcagggcggctctcactgcggaagcta

SEQ ID NO: 237969 - DNA, 122 bp, Homo sapiens
agcttcactcctgaagccagcaagaccatgagcccaccgggaggaaggaacaactccagacgtgctgccttaagaactgtaacactcaccgcgcagcttcactcctgagccagcgagaccat

SEQ ID NO: 237970 - DNA, 122 bp, Homo sapiens
tgggatggatgatggggacagcatctcatcaaatgctgaagccgccaaggctctcgggtccgcacccagggtgccctcaccgtacgccgaccgtgtggggaacacgctctctggaagctgag

SEQ ID NO: 237971 - DNA, 122 bp, Homo sapiens
acctacaaatcccaagattccatttatcaaaatgttttttcctggctagaaatgtgcttccgtttcctcctgtggttctctgtaattcagtgatcaccaaagccagaaaccttagagccatt

SEQ ID NO: 237972 - DNA, 122 bp, Homo sapiens
aagcttttctgggtgtggacaacatcggagaaaataacccctgtgccccctcgcagagagcgctgcgagaggtccagctgagtttccggcttgaagacgtggttccattggcaatgtgggca

SEQ ID NO: 237973 - DNA, 122 bp, Homo sapiens
cacgcgccttccccgcgccctgcacacgctgctcctgcacccgcacccgcagggcaccggcgccctgcatctgcacacgcgccctgcacacacacccttgccccgcacccgcaacgcacctg

SEQ ID NO: 237974 - DNA, 122 bp, Homo sapiens
gaagagaaaaataaggagagaaggtgccaagtcaacttcctcagtacaaatccaaagccccggtcacctaatgagctccaaggggctgttggctacaggatgtaaacatttatgtaagagtc

SEQ ID NO: 237975 - DNA, 122 bp, Homo sapiens
cgtgatccgccctcctcgggctcccaaagtgctgggattacaggcgtgagccaccgcgcccggcctaaaatatactgttttagggacaggcacagtggctcacgcctataaacccactctgg

SEQ ID NO: 237976 - DNA, 122 bp, Homo sapiens
ggaacgcacacctccaaggggccccattaccgcccccaacaaataaatgtagaatctacacggacagtggatatgttcacgtgactctttttaagttatcaaagttaatgctcttttttttt

SEQ ID NO: 237977 - DNA, 122 bp, Homo sapiens
ggcggctgcggctgggctggctccctccgaggggccgggaggcggcagtgagcctggccccgcgccaccccccgccgccggcggccaatccccacccgggctggggggagggcgatgcaaat

SEQ ID NO: 237978 - DNA, 122 bp, Homo sapiens
gtgggagaagcggaggagccgccagggctggggccaggctctgcccactggggttccgcccgttgtcgccctccgcctcctgggctctagcccttgcctttcttgactctaagtctactctg

SEQ ID NO: 237979 - DNA, 122 bp, Homo sapiens
gacggggggaagccaggcaggagagtcctggagggggacggtggccccgtgtacagcctgcgcagctgccagagttcctgaggagaccgaggcgcagacacccccctgaggccatctgacaa

SEQ ID NO: 237980 - DNA, 122 bp, Homo sapiens
ccttaggaagctccaacccttggctctaccggactgcgggcatctttcccgagcactgcacggaagaaaagaaaattggcacttatttcagggtggcccctcaggcatccaagagccagagg

SEQ ID NO: 237981 - DNA, 122 bp, Homo sapiens
ggccaagcgatggccgctctctcctctcccctcctcagagggggcagatagaaactgggacggattcaagtcacatgcacgcggatagcagtaagccacacacctgccacttagccagaatg

SEQ ID NO: 237982 - DNA, 122 bp, Homo sapiens
cggtctagaacacctgctaggcgcagatctaggacccgatcaccagtacgacgcaggtctcgtagtagatcaccagccaggagaagtggcaggtcacgctctagaaccccagctagacgtgg

SEQ ID NO: 237983 - DNA, 122 bp, Homo sapiens
gtgggagcggccctaatggacggtgggagccaggagggttagacgccgggacttaccgagcggctccctcatgccgcctcgcgccgccaccgccgccgctccggccggccggggaccagcgc

SEQ ID NO: 237984 - DNA, 122 bp, Homo sapiens
cttatttactgatggagctttttgcacacctcttttggagatagcatttgtcatgtcctgcggctgtgcagggttgggtggccgggggctagggtattttctctcatttacatacctccctc

SEQ ID NO: 237985 - DNA, 122 bp, Homo sapiens
ctcacctcccacgtggaaccccacgcctgcaggggccagattccggatgctgaccgctcgcgcgcctagggccccgaaatacaagtcccagcaagccgcgggcgaaccacgcccacttccgg

SEQ ID NO: 237986 - DNA, 122 bp, Homo sapiens
ccgcctctgcagggcacaggacgctggaggcccagaacagctcaggtgctcccgctgggccggcccgggccgggcgcttcctgggagggggaccaaactcccggccttcagctcttgccctc

SEQ ID NO: 237987 - DNA, 122 bp, Homo sapiens
tccgggacgcattactagggcgacggccggacgcctccgcgttacgggatgaattaacggcgggttccgcacggaggttgtgacccctacggagccccagcttgcccacgcaccccactcgg

SEQ ID NO: 237988 - DNA, 122 bp, Homo sapiens
agattacaaggacccgtgtaaagccggtaagtggctctccaggttgggacggtggcgcgccgggggccgctgcgctgggtttcccatgggtggcggtgggagctcacctgtttccttccctc

SEQ ID NO: 237989 - DNA, 122 bp, Homo sapiens
ggagccatttcctttaaagagggcaggatactaagggggcgaccaggtggggtccgggggcgcctcaagctcctcaaggctcgccgagcactgctccgtcctactaagtgtcctgccgcccg

SEQ ID NO: 237990 - DNA, 122 bp, Homo sapiens
agccacggaacgcggctcctcttccttctggatatggctgtctcagatggccagaggcctcggaaaggcttccggtttcccggcaggcccgagtggggctgaacttccggcctcaggacgca

SEQ ID NO: 237991 - DNA, 122 bp, Homo sapiens
tacttatttaaaagcctcttttgtcggtgttgaaatggtccaagctcccaaaccctgtgccgggctatgagcgtggaaccagccgaactgcaatgagcatcactgcagcagcaaaaggcagt

SEQ ID NO: 237992 - DNA, 122 bp, Homo sapiens
tagtgtctctaaaatgggtgttctcatctataaatagggacaataaaagcatcttctggccgggcacggtggctcacgcctgtaatcccagcactttgggaggttgaggcgggcagatcacc

SEQ ID NO: 237993 - DNA, 122 bp, Homo sapiens
ctgtggaaataggactctttcccatgcgactgggtgatgaggcgcgaccgggtgacgaggcgcgaccgggtgacgaggcgcgaccgggtgacgaggcgcgaatgggtgacgaggcgcgattg

SEQ ID NO: 237994 - DNA, 122 bp, Homo sapiens
cccgtcgctctgctcagtaccaaaatgacagcgccaatgtggcagccatctttgtacagacgggaagtctcggcgcgagttcccgccccctcgtctagttggaaaccgaggaggcggtctcc

SEQ ID NO: 237995 - DNA, 122 bp, Homo sapiens
ataaaatgttggttcccacctaacttcacatttgtcttcaactgagtatttcgtgttttgcgtctgagattttggggggagtagtggtgaatgtgaatttcggaggggcgagagggagggtt

SEQ ID NO: 237996 - DNA, 122 bp, Homo sapiens
tctttgcccctacaaacaaacagcagtacttgccagaaccattcttgggattcaggagctcgggcgactgccttggcctctggccgcacccaggagggtggggttggatctgtgtagttgcc

SEQ ID NO: 237997 - DNA, 122 bp, Homo sapiens
agcatgtttgtaaaccggagaagatctgtggaagtctgatcgagatggtgaaaggctaagcgcaagaagaaaaaggagctgaatctgtgagaatcagtgtttagtctggcaaacagaattct

SEQ ID NO: 237998 - DNA, 122 bp, Homo sapiens
cgggccacaagagcgaaactccgtctcaaaaaaaaaagcaaaagatactaccaagccctgcggagcaaggtacctcacacttcatgagcgagttaagatgggtttcacaatttttcaagcaa

SEQ ID NO: 237999 - DNA, 122 bp, Homo sapiens
ttttaaaagaaagcaccacacttcaccaaactactctgagtgtgttagttcagaatgcagcgctgagataatggcggaaggcattagtaggtaacagacatttcgctcagtaggctgataaa

SEQ ID NO: 238000 - DNA, 122 bp, Homo sapiens
aagcgcttgatttacattggaaaaaagccccctcagccgtgaaaacaaaatctttgaacgcgtgatcattgcgagggcggctgatatcctaatacgtgcattgttctcggcctggcccaggc

SEQ ID NO: 238001 - DNA, 122 bp, Homo sapiens
accttgagtagaggccaagcaaactatcgagcccgtccaaaacgccatatttgtaactgacgtcatcctcatgttgcctttcctctctgtgattgaggaaccaatcagttgggtgtagcaga

SEQ ID NO: 238002 - DNA, 122 bp, Homo sapiens
aaactggttcttggaaaggggctgcagaagacctcccgaggtggatgttactgagccgcccggcgagcaccagccgtgacaggtccgggcccggccgcgcggagccgcgggagaactgccct

SEQ ID NO: 238003 - DNA, 122 bp, Homo sapiens
gcctgcggcgcgctgggtggcgacgagtcggcctcggcgttgatcagcaccaggtgtgtgcgaacagtggccgcggcggggtggagccttggtgagccccgcccccccgcgcggccccgccc

SEQ ID NO: 238004 - DNA, 122 bp, Homo sapiens
acgccggctagcgaggccttttgttctctgggctggggctcgccggctccagccttagggcgggaagagaggcgcggggggaggggaaggctggcgcctgcgcaaagccgggggcgggggca

SEQ ID NO: 238005 - DNA, 122 bp, Homo sapiens
tgtgcggttcactcggctcagatggtaactaatccctctccagagaggcaaaggcggaggcggtcgatacccgctcaatggctgaacacagtctggaatgtttttgacaggtttctcctcaa

SEQ ID NO: 238006 - DNA, 122 bp, Homo sapiens
agcagtaatgctggggcaagatccgaggccgcggagaagttgccagacaagtgccgaggccgccctgcgcgcccaaggcagggccaggcgggagcgggtctcacgcccaggtctgactgcaa

SEQ ID NO: 238007 - DNA, 122 bp, Homo sapiens
tcctgggccaggaccttggcctggggctagggtactgagtgaccctagaatcaagggtggcgtgggcttaagcagttgccagacgttccttggtactttgcaggcagaccatgtggaccctg

SEQ ID NO: 238008 - DNA, 122 bp, Homo sapiens
cggaggtcggaggagggaggcgaggcctgcgcgggacggtgccgcgcggatggcagaggacgcccgtgggtgtcgcccccacgccggctgctccgggccccccgccccgcccccactcctgc

SEQ ID NO: 238009 - DNA, 122 bp, Homo sapiens
caggtgattgactgcctgtcattagcgcggtggctcacgcctgccattgcctgttgtccccgtcctctgtggccctcttggcttctgtatcactgtcacgcgtagcagggccaggcttgctg

SEQ ID NO: 238010 - DNA, 122 bp, Homo sapiens
ccacaacaggcctcagggctggattttccttctttaactcatgtactttgagggtgtctgcgtacatttcaagccctgatgccagcttttcagtgcattacagagagcattgagccacgctt

SEQ ID NO: 238011 - DNA, 122 bp, Homo sapiens
acacagcagcgaagaggagcagccgactgacacgcacaacaactcggatctcaggagcatcgcaccgagctggagaagccagacacgagccgctgcacaccgtatgattccatggcattctg

SEQ ID NO: 238012 - DNA, 122 bp, Homo sapiens
attataccaagcagtttgcggtgtggcaggcggccagaaaagcgtttctttaaacgccgccgtctcacaattaggcagcaagaggatttgacacgccgtggcggcctgacaggcggcttcct

SEQ ID NO: 238013 - DNA, 122 bp, Homo sapiens
caaacacctaagtatacctagaaaaattcagttggagttgctagatttctaatcctcttccgaattgtatagacttgtaatacttccacaatgtgatgaatgttacccactctattccaatt

SEQ ID NO: 238014 - DNA, 122 bp, Homo sapiens
cagccagctcagccttgggcctgcttctttctggctgtgactttgccccttgtggatacacgtcccctaatcttcagcccaacggagcagtggagccgtcgcctgtccctcgggcactcctt

SEQ ID NO: 238015 - DNA, 122 bp, Homo sapiens
ccccctccccccaggcctgatgagcaggtctcgagcctccatccatcgggggagcatccccgcgatgtcctatgcccccttcagaggtacgtggtggggggagggggagggccatatggggg

SEQ ID NO: 238016 - DNA, 122 bp, Homo sapiens
tcttatctgccgatgtcaccttctccgcgctttaagatggctttgtctgcgggcaggagccggggacctccccagggcagaaagtggtggcgctgccagcagcgggaggggcgtcaggggac

SEQ ID NO: 238017 - DNA, 122 bp, Homo sapiens
gctgggtgtactcttcgtcctttcgtcggagattaaacctgagggtcagcgttgtaggcgcgctcttgagctcggagtgctgtggcctgagcgggtcaattagtacacgcgggaatcgctgg

SEQ ID NO: 238018 - DNA, 122 bp, Homo sapiens
tagacacaaagcgccgtttctttttcttagagcagggaacctgacgcagggctctgcagccgctgcgggcttgccgaccgtcgcctggttgtaatcaccatgacttatgggtcttggctggt

SEQ ID NO: 238019 - DNA, 122 bp, Homo sapiens
atgagcacaagaaaaatatgctcaaatactgttatctttctagcaagatcccttttctcacgttattgagttgtggcaacactgttgtaatcctttctttttattctggaaattagagtgat

SEQ ID NO: 238020 - DNA, 122 bp, Homo sapiens
ggtctacccctttatcaatcctccatctgcctccaggtagaaactctgccatgggaagaccgtctgcctccttgtttctgtcctgtgggaattttgcttgttacacagcagaatagcaagaa

SEQ ID NO: 238021 - DNA, 122 bp, Homo sapiens
gctactgcagacacctgtaaggtgaaaaaggcccacaggagtgcgggacggaggccacagcgatctggttaagagcaaatacgggtcatttcggatagaagaatttcccagttgtgtgagtt

SEQ ID NO: 238022 - DNA, 122 bp, Homo sapiens
gacagatggcagttaaagggccacaaagctgccctaattataacttctcccccaggcagccgagagcgtcgtcaatcacttcagtgactcagtccagcccctgtccagctcctgggaagggg

SEQ ID NO: 238023 - DNA, 122 bp, Homo sapiens
ctccccacttaccttaaaaagatctgtttttcgtagggaaaatagaaaaaaatccctccccgtggtgtggtgtgcgaaatagtccacgtccccggaccctgccaagatgctaagcaccaata

SEQ ID NO: 238024 - DNA, 122 bp, Homo sapiens
aacgggcctgcgtttttggttgccttggtacagaagacggcaaaggtattggggatcacacggaaactgcatgcagcctcccggcctcagagttccggaaaggtggagtggatgaatcggac

SEQ ID NO: 238025 - DNA, 122 bp, Homo sapiens
ccaggcagtgctcgtgcctatagcaacagcatcgtccgcagtagccgcactactcttgaccgcatggaggtgagcttctggccacattcacccccgggcataccctgcctgcacacattcac

SEQ ID NO: 238026 - DNA, 122 bp, Homo sapiens
gcttggaacccgaaaagtctcggtgctcctggctacctcgcacagcggtgcccgcccggccgtcagtaccatggacagcagcgctgcccccacgaacgccagcaattgcactgatgccttgg

SEQ ID NO: 238027 - DNA, 122 bp, Homo sapiens
tcctcatcaggccagaagggaatctgtgaaatgggctttgaaacctgccttgcctttctccgcccggtcccagcgggggtccgatcggcatcaaggcttcacccactcccagagccttcggg

SEQ ID NO: 238028 - DNA, 122 bp, Homo sapiens
cggctgttcggcttggctacagggctcggctgttcggcttggctacatggctcggctgcgcggctcggctctgttcggctcggctcggctgctgggctcggctgttcggctcagctgcgcgg

SEQ ID NO: 238029 - DNA, 122 bp, Homo sapiens
gccaaggcaacccgtgggatttttcttccctaccgcgctgagtaaccatgtggtggcaggcgaggccccgccgggactaaagagccggcaagcgcggggcccaggcagcagctggtgtcgcc

SEQ ID NO: 238030 - DNA, 122 bp, Homo sapiens
gagggtcactaccgcaagttcctctactgcccggccggactcgacgccacttctcctccgcgcaggcgcacttggcggagctctacggccgcgcagaagacccaatattcctcgaggcgaac

SEQ ID NO: 238031 - DNA, 122 bp, Homo sapiens
gagtacggttctctgcagggtagcccggctcgggggtggcgaaggcggtgaatggagacccggggggggcgggggcggggccgcggcgggcggggcggggcggggcgagtcgggccgaggcc

SEQ ID NO: 238032 - DNA, 122 bp, Homo sapiens
ggggccgggcgcggggggcgggcagaggcggggcgtggtggcctgggctgtgctcgtcgccgcgctcgtggaccggggccgggcggactcggggaccggcggaggacgccgggcgcgcccgg

SEQ ID NO: 238033 - DNA, 122 bp, Homo sapiens
atgttcggagtttctttcttctggtgggttcgtggtctcacgagtgaagctgcggaccttcgcggtgagtgttacagctcttaaggtggcacgtctggagatgttcgttcctcccagtgggt

SEQ ID NO: 238034 - DNA, 122 bp, Homo sapiens
tgtaaagctgaaggaagcaattccagggaccggagctttggacccagtcagtatagtgagcgagcagatctgtgaaaatatgtgtgagccgcaacagagtccagcctccacggccctttcaa

SEQ ID NO: 238035 - DNA, 122 bp, Homo sapiens
ggccaccactcagactaaaaagtttgggttggacgggcaccggcaccaccacgctctccccgcagttcctctggcccccagccgctgtccgggcccgcaccacctgctgaggggccagggag

SEQ ID NO: 238036 - DNA, 122 bp, Homo sapiens
cagcaagtgggttaacacaggatttcaatttcttatcttctgctaacttccagcagactccgtaagcacccacccttccagacaaattctcttctcctgtctcaatccttctttttggatct

SEQ ID NO: 238037 - DNA, 122 bp, Homo sapiens
gagcctcttctaccagcgctggcccgtggatgtcagcaacagaatccacacatcagcccacgttatgtccatggggctcctgcacttttacaaatccaggagctgttctgacttagagaatg

SEQ ID NO: 238038 - DNA, 122 bp, Homo sapiens
ggtggatgctgctagttgccggggaacttggtttctgttctccccgcagcggccttaaagcgcgcagcgtccccggcacgctgattggctgccggcggcgcctatccggggctggccagcca

SEQ ID NO: 238039 - DNA, 122 bp, Homo sapiens
agcagaggccgcagcggctggtgagctacttcatcaagaagaaactgagcaaggcctgagcgctgccctgcacctccgcagacctgctgtgatgacttgccattaaaagcattgtccaaaat

SEQ ID NO: 238040 - DNA, 122 bp, Homo sapiens
tgacctcgtgatccgccctcctcggcctcccaaagtgctgggattacagacgtgagccaccgcgcctagcctgaaacagactttaaatgaaagctgattattggacacctcaagttagtttt

SEQ ID NO: 238041 - DNA, 122 bp, Homo sapiens
ccctccaggcgctgggtaactccgggctgcagtgcttctgcacattaacaccatttgttccgtggaacgtgctttatttccacaccacacgcagagcttattaccccgccagcagctcaggg

SEQ ID NO: 238042 - DNA, 122 bp, Homo sapiens
gagtatgagagggtgccctgtagtgctgggttaggggaaccctcatcccagcagacacaacggtaaaaaacattggagtaggggagagggagaaagtgggagaagaggagggagtccccagg

SEQ ID NO: 238043 - DNA, 122 bp, Homo sapiens
ataatttgggaacacagggttataagttgagccagaagctagacatagtcagtgttttaacgtagcaaccctattagatcctaggaggattcattcaagttttatatatttatttttatttt

SEQ ID NO: 238044 - DNA, 122 bp, Homo sapiens
tcccagaagccccagcctgggtagatgatctccagacactgagcagaatactatattgcccgggtcccttgaccccccaaatgagtgatgtggggatacccagcccctagatattaaatctg

SEQ ID NO: 238045 - DNA, 122 bp, Homo sapiens
gcaggggacgtttgtagtgttttactggctcctcggctttgaaagcagcgttatcttttccgaattcctgtaaccctcgttactgtgacatttagtgtcaccgcaaacccagaaaattctga

SEQ ID NO: 238046 - DNA, 122 bp, Homo sapiens
tcagcacgcacgcacagcaggtgggggcccgccctgcccacagcgtgaaaacaggagccccggccagccacggctgggcagggccagaagcgcctcctccaggatcctccccgcgctggccc

SEQ ID NO: 238047 - DNA, 122 bp, Homo sapiens
ttctcgctgcctgttgtacatgccgtaggtgtagaggaaagtgcagagacttgtacctaccgttctgggtcccccacttgaaagccccctggctccacctgtgcacccgcttccttcccctt

SEQ ID NO: 238048 - DNA, 122 bp, Homo sapiens
cccccagcgccggcccggccggagcacccgcatcctgatcccctccgcggcgcccgcccgcggctctctgctcgcattgacattccgctcgtgtcgctttaaaaattcaatctgctcgggca

SEQ ID NO: 238049 - DNA, 122 bp, Homo sapiens
gggccaaaatatttctatgacctgttactattatcggtcgtgccaagaagcatattttgtcgaacttaattttgaattcgctatactggatattgtttcctgactgcgctgagagaaggaaa

SEQ ID NO: 238050 - DNA, 122 bp, Homo sapiens
ttcggtgactgatgatctaagtttcccgaggtttctcagagcctctctggttctttcaatcggggatgtctgcagagggcagaaagaaaacaggcgttagaaacctgaggtcaaagatgtgt

SEQ ID NO: 238051 - DNA, 122 bp, Homo sapiens
ccctcctcaccagccagccatacaaacctgggaggctgggcaggccaggcagctgccccacgggagcagacacgtccatctgcagggtccccagcctggtgttcagtcactctgcattatta

SEQ ID NO: 238052 - DNA, 122 bp, Homo sapiens
cgcctctgatctgcaaagaaggagaaagcgtgcaggtaaaatcacacacaggtcaaatcgcgcatccgtgactccacacggccaggtgattctgtcttgagtagactctttgcttcgctcct

SEQ ID NO: 238053 - DNA, 122 bp, Homo sapiens
cttcggtgacggacaggtccgcatctggggacagagggacacacgtcagaagacacgggtcgttcccagactctccaagtgggacaggcgacacatttagaaggacagcgaccagcttctgc

SEQ ID NO: 238054 - DNA, 122 bp, Homo sapiens
tcaattacatgtttgtgtcctttatctcaatatcaccttgcttcttggatgagcttcgcacggagtaggactgttttgagggcctgatttgtgtgttatctcacatggcagtgctgcatgag

SEQ ID NO: 238055 - DNA, 122 bp, Homo sapiens
ccacagccctgcttcggctctcagggcggtcacctgggatgggggcatccaggagtccagcgtcagccgtcaaggctcatgatctaaccgcctctgcaggaagggccgtccgggatgcctgg

SEQ ID NO: 238056 - DNA, 122 bp, Homo sapiens
gcagtgatagatcatcaggcaaaaatgaacatagaaaagtttacatttcacagaggccagcgggaggctactgtattaatcaaggtgagagaggatgcttgtctgaaggggacagtagcaga

SEQ ID NO: 238057 - DNA, 122 bp, Homo sapiens
gtctgcctcctacgctcatgccttgggaactgccagggagctagttcagaaatcggcctgcggcccccactgtcccattccaaggaggaggctctccacactgtcccacagcactgccttct

SEQ ID NO: 238058 - DNA, 122 bp, Homo sapiens
cgggctcctccagcgcccgacgggggcctggggcgagctagtctgcagaggggctgcaggcgaccgggccggggcggggaacgggatccgggagaggcagacgaacctggggcgcgccgcct

SEQ ID NO: 238059 - DNA, 122 bp, Homo sapiens
gacctttcaaaggtgaacgttttacagttcctggcttggcctctgaatgtgggaaaaattcgttcctccgcttcccatcgaattctcgtcgaaaacaactttgtggtcgcgtgcacggtatt

SEQ ID NO: 238060 - DNA, 122 bp, Homo sapiens
ctcgcgggcgccgtctccacggcacttgggtttcagggccatggaatcgcaagcccttttcgcactgcattatgggatctgtagtgagacatgccttgcgttggctctttcctcctgctggg

SEQ ID NO: 238061 - DNA, 122 bp, Homo sapiens
tctgtgaatgctacgatgagctgggcaatcgctaccagctgcccatctactgcctgtcaccgccggtgaacctgctgctggagcacacggaggaggagagcctggagccccccgagcctcca

SEQ ID NO: 238062 - DNA, 122 bp, Homo sapiens
tgtgagcagggagacggggcccacctcaccttctcattgaaccaggcctccgcgtccttgcggttctgctctgcaagggcttcgtactccgctcgcatgttgttcaacaaaaccgcgaggtc

SEQ ID NO: 238063 - DNA, 122 bp, Homo sapiens
tgagccttcgggatgatacctcttttgtcttcaccctcactgacaaggacactggagtcacgcgatatggcatctgtgttaacttctaccgctccttccaaaagcgaatctctaaggagaag

SEQ ID NO: 238064 - DNA, 122 bp, Homo sapiens
ttttggagtgggggccggcccacgccgaaggcacctaatgcggtgggggaggggaggaggcgtttctcagggatcgggaacctgcaatggcctggacgtcccccacccctggatggctctcg

SEQ ID NO: 238065 - DNA, 122 bp, Homo sapiens
cacgcacaagctgccacttccttacccacacagccgatggtcaccaccccatccttgtagcgctcttgggttgggccagttggctccattgctgaatcagtctgctgctccaccaggactgc

SEQ ID NO: 238066 - DNA, 122 bp, Homo sapiens
aggtctgcaggcagcccgacctgtcgttgtgcatgcagcaggccgagtgcttctcgtgctcgcgccctgcgcgaatgaagctgtgcacctgcggatcctggcatatgcaaggcgaaaacttg

SEQ ID NO: 238067 - DNA, 122 bp, Homo sapiens
attttaataaataaagactaaagaatatgtcacacacttttaacctgtaggcctatgtttcgcactaatgtgaaatactctaacactgttattctcccatttgactttatattcaaaggttt

SEQ ID NO: 238068 - DNA, 122 bp, Homo sapiens
agcccctcactgcccccgggctgggggcgcaggccggctgctcggagtgcgggggcctgccgagcccacgcccacccggaactcacgctggcctgcaagtgtgcgcccaaccctggttccca

SEQ ID NO: 238069 - DNA, 122 bp, Homo sapiens
acctcaagtgatccgcttgccttagcctcccaaagtgttgggattacaggcgtgagccaccgtgcctggccttattttttcgattaatctttctgagggggactttcctgggctcaagtggt

SEQ ID NO: 238070 - DNA, 122 bp, Homo sapiens
gctgcttctgggggatgcgcctcgtctcactctaccgagtgtcattgaagccgatgccttcgaggggctgctccagctcatttattcagggcgtctccgcctgccactggatgctcttcctg

SEQ ID NO: 238071 - DNA, 122 bp, Homo sapiens
taagagtgtcctttcctaataaatactgaaatacagagagatactacagaacaattaaaacgtcaagagccataaggtaaccatgagaggatggcttatcccttaattcttgattttttatc

SEQ ID NO: 238072 - DNA, 122 bp, Homo sapiens
caggcgaggggaggtgaaagtcgttagtgtggacggcccgcgtggctgagtgggctgaaacgctggtttcctgattagcgcgttcatgtttctctgactgcctttttcttctgaaggtcccg

SEQ ID NO: 238073 - DNA, 122 bp, Homo sapiens
ggggggaagtgggggagagggcagggggcctccgagtgggagtggggttgctgcccggtgcggccgctccgagcccaccccagcgatggccgaaaccgggactgccccccccaccgtccccg

SEQ ID NO: 238074 - DNA, 122 bp, Homo sapiens
ggtcaaatagagcagccacggattaagcaaacgcccctccgcgtatggtgggggctgcagcgcccgtagctccacgctccgccccgccgccgctgattgtcccgcgccttgtgacgtcacac

SEQ ID NO: 238075 - DNA, 122 bp, Homo sapiens
catgtcctcctcgacactcagggagagccaggtaactcggccttttcggagctaaggctgcgggttcaaatttctccaccacaccaggtctccgggggtggagcgagcaaccaaacgcgacg

SEQ ID NO: 238076 - DNA, 122 bp, Homo sapiens
gggaaaggtcagagggggcaccgtgcggacaaatctggatgttttgctgttgctcacttccgggtgtcttttctcactgttgcttccccgtgtgcgcagaagtccatcgtcttcactaaata

SEQ ID NO: 238077 - DNA, 122 bp, Homo sapiens
aacactggagagcctgggggaggggggccgagggagatcgatagggtcgtcgagtctacgcggaattgaataattacaggatggaggggaatgagtcaacaacaatgacattcaaatgcaac

SEQ ID NO: 238078 - DNA, 122 bp, Homo sapiens
agaacaggacgcaccggaccaacgccgcccaggccacccaagaggccagccaatcccgaccgcccatgcaaataaggttcacaggcgcccaatccgggccgtgttcatttcagcattgcgct

SEQ ID NO: 238079 - DNA, 122 bp, Homo sapiens
gagaagcagctgctggtggaggccatcgacgtgcccgcaggcactgccaccctcggccgccgcctggtaaacatcaccatcatcaaggagcaaggtgggtctgggtggggagagtggggaag

SEQ ID NO: 238080 - DNA, 122 bp, Homo sapiens
gagacattgaatccctacactgatctcagtagaaatctcaggtagggcttcaacattcgtcgacaaaggactctgtgggcatcagagcaacagccttggtgcatgtccaagctccatcaatc

SEQ ID NO: 238081 - DNA, 122 bp, Homo sapiens
gcaaagtcccaggaccaccacacactcactctgggaatctgggagaccttctttaagggtcgtaagtggtcaattccattcctaccctttgtggtcatatgcactctttacaaaactatagt

SEQ ID NO: 238082 - DNA, 122 bp, Homo sapiens
cacccccagctctacatgccccacctgcacctacaggatccacacacattgcagagtttccgggacaaccccagggttagacctgtcatgcctcccgtcagtccccatgtcgtcatctcaca

SEQ ID NO: 238083 - DNA, 122 bp, Homo sapiens
attgacaatttggggtcctgagattgaaacaggagtcaaaaccagagcccagggtagctgcggcccccggaccacgacgcccacttccccacacctcctgctgtccccctctccgcaggtcc

SEQ ID NO: 238084 - DNA, 122 bp, Homo sapiens
tgtcgtggccgctgaggctgttgtggccgttcgtctgggtcctcccagccttgctttcttcgcggagcctgcggagaagccccgtcactcccgtgaggctcgacttcctagtctgtaaaacg

SEQ ID NO: 238085 - DNA, 122 bp, Homo sapiens
aaagcctttgccaatctcctaatttataattagtgactacatgctatagcacttttgttgcgtctcttatagaaattaatccagtatacctcattctgtagaactcttgactgtcttctctg

SEQ ID NO: 238086 - DNA, 122 bp, Homo sapiens
cagggccagagccaaggccagagccagggcccgggcagcggggacacgtaccggcccaagcggcccaccacgctcaacctctttccgcaggtgccgcggtctcaggtgaggcgccaacgtgg

SEQ ID NO: 238087 - DNA, 122 bp, Homo sapiens
ctggctgaccacgacgtggtccccgaggacaagtttcaggtgggctccccgcccgccccccgctgcccccaggccctgtgagccagggatagtccccggggaagttccaggaggaccccgcc

SEQ ID NO: 238088 - DNA, 122 bp, Homo sapiens
gccggaggccgcggtggacattgtggccggagcggtggtctgtctgcccactgttagcaccgggttagagacgaggggaagggaggggtgggcggacacagacgaggggtgggcgaggtaag

SEQ ID NO: 238089 - DNA, 122 bp, Homo sapiens
gctgtagggagcccttcttggctcgctcacgtaacgcacctatgcaacaactggccaatacgctttccaaagctcctgactcccactccgtacattctttggtggtgtttctttgagacaga

SEQ ID NO: 238090 - DNA, 122 bp, Homo sapiens
caaagtgcccctgacgggctggacaggcctagtgtgcaccatccttcaacactgtcctgacgtcatcatctaacagctcttctaagactgctttccagattcaaggagcagggtgggccagc

SEQ ID NO: 238091 - DNA, 122 bp, Homo sapiens
ggggacgccttcttttccctcaccctcaggtgagagtgaaggcgcctcctgccaagttctcgttttctcattcgctttttttttttttttatggggcatcctgagtgtaaaaaatatgactt

SEQ ID NO: 238092 - DNA, 122 bp, Homo sapiens
gtcccgggcccagcgcccaggcccgggcggcgcattggcccctcctcccctcgcgcgccgcgcgcattgttgtcctttagcgattggttgttggaccagaaacagctgtgcagagccgtgcc

SEQ ID NO: 238093 - DNA, 122 bp, Homo sapiens
gcactttctgagccactaaaatactccttaagggagcctgaagactaacaaatgagcacacgagcaacatggaggttccagatcacaatgggagaaggaagctacaacaaacagggcatgga

SEQ ID NO: 238094 - DNA, 122 bp, Homo sapiens
gagggcagcggggacgccggtggccgccgccgcccgccagttgacccccggcgattggcgcgccagctgctgctgctgctttggctgctggaggctccgctgctgctgggggtccgggccca

SEQ ID NO: 238095 - DNA, 122 bp, Homo sapiens
aaaaaaaaaaatcacaaaataacaattgaagaggaaaacaaaactggccatgggaaggcgcgtctgaagctgccacatctgggttggtgtgggcggcagctacctaggtgctgaggcaagag

SEQ ID NO: 238096 - DNA, 122 bp, Homo sapiens
catgctcagaacacgctcagctctgctctgtgtcagcttcctgagtagccccacccatgacgccttcgtaggcaagcgggggctttccaagtcctcattcatgctgctttccggtgcaagaa

SEQ ID NO: 238097 - DNA, 122 bp, Homo sapiens
gggccaggggcaccatttacggagctggggaacagcaggagctcgttttgttagcaggtgcgaggcgccgggcatttaaaggcggcctgacgggaccggccgaggcggaagaacggacaggg

SEQ ID NO: 238098 - DNA, 122 bp, Homo sapiens
ttttttttccttctcactctttcatttatgacacattctccacataatcaaacctttccccgcatttcctttactcttttcagtctcccagaatgtgcccttactgttggatttgccttgta

SEQ ID NO: 238099 - DNA, 122 bp, Homo sapiens
gaccagcctggccaatatggcgaaaccctgtctccactaaaaattcaaaaattagtcagccgtagtagcacatgcctgtaatcccagctactaaggaggctgaggcaagagaatcgcttgaa

SEQ ID NO: 238100 - DNA, 122 bp, Homo sapiens
aaaccccagattcagactcccagggctgcttagggggagcgctggggcagagccaggcctcggcgggcggggtgggccgggctgggccgcgcttccgggatgggtcagcgcccggagcccgc

SEQ ID NO: 238101 - DNA, 122 bp, Homo sapiens
tggaggcttcagcaggtcttcaacgccatggccggcagttcctcaaagctaaagctggtgcgtgaatgagctgatcatgatgacagctttataacatgcacctgacagatggcacgttgaca

SEQ ID NO: 238102 - DNA, 122 bp, Homo sapiens
gcctagttcccattggctcgatgtcctgtgacgtaagtcatgggaacccaatggaagaggcggaatgagaagggctcacgcttggcttccagtttaggaaagtttccccaaattcccccagt

SEQ ID NO: 238103 - DNA, 122 bp, Homo sapiens
ttccatataatatcaaggaacgagttactggttacctcagtggcacctagaggatacttacgaatttgtgtgcagatattcaaaggttagctgagctcgattcagactgctgtaatttgtga

SEQ ID NO: 238104 - DNA, 122 bp, Homo sapiens
ggggtccctgctgaggaggccatagtgctggcgaaccgcggactccgggtgcctttcggccgtgaagtctggctggatcccctgcatgacctggtgttgcaggtgcagcccggggaccgctg

SEQ ID NO: 238105 - DNA, 122 bp, Homo sapiens
gtttggtttcaggatgaaacttccacctcagatcatcaggttagattctcctaagtagagcgcacgttggatccctcgcatgcgcagttcacaataggttcacgctcctgtgataatctgct

SEQ ID NO: 238106 - DNA, 122 bp, Homo sapiens
tgggatccgcccgcctcggcctcccaaagcgctgggatttcaggcatgagccaccgcgcccggccgagaaataacactttgagagttgtgaggaaacttttggtgatggatatattcattat

SEQ ID NO: 238107 - DNA, 122 bp, Homo sapiens
agccattgtcaccaagtgcacacacaggactcgtccggcacaggagacagggctaagtgacgtgattttcctacaaaactcttgacttttacgtttcccagctataccataaattgcacaca

SEQ ID NO: 238108 - DNA, 122 bp, Homo sapiens
tagtaccttctctgcccaggagggcgagctgtgagaactacaccatggctcacccccctgcgggaatggggcacagaaaagacacaggccaccagattcaggactctggcaggaaccattca

SEQ ID NO: 238109 - DNA, 122 bp, Homo sapiens
ggcaccgcccgggcctggctatcgggaagctccgcccagacggccgcctcctccctggcgcgggcctcttccctaggaggagctcgttagcttgtttttccatcggtattctttgtccccag

SEQ ID NO: 238110 - DNA, 122 bp, Homo sapiens
gagacagggcgagactcacaagcccacagtacacttggcaagtgataaataggacgtgtgcgtggctcatgctgcggcagagggcagggagagcttcaccaggatgaccccagagtcggttc

SEQ ID NO: 238111 - DNA, 122 bp, Homo sapiens
tgcggctcgatctgctaagagtcaccagagcatgcaaggttgtgggggcagcaggcttcacgcagagctggaaatgccggccaacgctttacccaccaacgccttgttcgccaatgccttgc

SEQ ID NO: 238112 - DNA, 122 bp, Homo sapiens
gcggcgctggcacacgaccgagcggctgcgcacgcctgcatcgcagctgcggctgcagagcgaccagttccctacaacccagctgtaagagatgaaggggtctgagcaagtaagcagggcag

SEQ ID NO: 238113 - DNA, 122 bp, Homo sapiens
gacgcagtagtgcaggatgattggattacgcaaaacgagacagatgccatctgtgagccacgcgtaagctgctaagtgccaaaatgaacatccttattaaacgatggagttctcataccatt

SEQ ID NO: 238114 - DNA, 122 bp, Homo sapiens
gcgtagccactgggccgtcgaagagcgcaggaggccggtgggccgggccgggccgcgcggcgcagccatgcctggctttacgtgctgcgtgccaggctgctacaacaactcgcaccgggaca

SEQ ID NO: 238115 - DNA, 122 bp, Homo sapiens
cgtccccctaattcctcgtccccattaccccccttcaccgcctccgttttgcctccggatcgcaaaagtgacccgagctttaaccagtggagagagatcagggaacaattcactgtccctat

SEQ ID NO: 238116 - DNA, 122 bp, Homo sapiens
gcaagtagcacgagaacacagtgactcacagaagcttgattaagaccactgcaagagccacgtgtaccctccctctcataaatatggacagaataaaaggaatgttgccaaaacatagttcc

SEQ ID NO: 238117 - DNA, 122 bp, Homo sapiens
ttcactctctgaatcattagcccaaagcagtaagtgcagcaggcctggccccacaccttccggaagagccacggtgtgaggctggcatccctggggcacgacacaaccaggatgtagacgaa

SEQ ID NO: 238118 - DNA, 122 bp, Homo sapiens
gcatgctttgcagccattaaaagttatgttcggtcttagggtggagaaagatttccaatgcggggcaccaaacccagaagccattagggaaaagctgacagatttgacaccataaatattaa

SEQ ID NO: 238119 - DNA, 122 bp, Homo sapiens
ttccgctttgcgctcccaggctccttccacctcctgccagctcccttcctcctccaggtgcgcaccccctaccattagccccgctgcgcgcttgcgctctacgcccaagggagccgggctgc

SEQ ID NO: 238120 - DNA, 122 bp, Homo sapiens
ggggagggcgagctctgggtttctggatgcccgcaacgtccacgccagagcccagaaagccgagagcagcccaatgcccgcacctcggcatgggagaccctcccgcctccctgcgtgcttga

SEQ ID NO: 238121 - DNA, 122 bp, Homo sapiens
aacttcggaggcgaaagatttcatgtggatcttaaaaagggcaaaacctaccccaaaggccgtaaaccgccctcccctcccccgccagagaacttcccggcgcagagcttccgcagcctgct

SEQ ID NO: 238122 - DNA, 122 bp, Homo sapiens
ccatctctttctgaatgtaatgggaggtcctgtcttttcagcttgcaaggaaggagggtccgaggcaactccgctgttgcacatttagggacccctgaacttaaatgacagaatgccctgac

SEQ ID NO: 238123 - DNA, 122 bp, Homo sapiens
agtgaggtgccccagaggcctctgctgggactctgagcagccacctccagctttagacctcggtccttcctgcccacctccaactttagaccttggtccttcctgcccacctccagctttag

SEQ ID NO: 238124 - DNA, 122 bp, Homo sapiens
gacttatgagggtgcccatggtcttgattccagaagctgcaagaacctgtgcaacttgaccgtgtggctctcctcccgcttcccttctgcccccctccagccttgaagtccattgttctctg

SEQ ID NO: 238125 - DNA, 122 bp, Homo sapiens
atccacggttccagggtgctaactcccacagtgcttctgtacccgcggtgctctcatagccgcagtgctcccgtaccctcccatacccacggtgctcccgtacccatggcgctcccataccc

SEQ ID NO: 238126 - DNA, 122 bp, Homo sapiens
acctgaaaaagaattcagaaggatagttattaagctaatcaggaaggcacctgagaaaggcgaagcccagtgtaaggaaatcaaaaatatgatacaaaaagtgaagggagaaatagtcaatg

SEQ ID NO: 238127 - DNA, 122 bp, Homo sapiens
aaagtggaggagaccatcgccgtgcgatgcctggctaagaatctccttggagctgagaaccgagagctgaagctggtggctcccagtgagttcctcaacagtcaggacaactcatcagctga

SEQ ID NO: 238128 - DNA, 122 bp, Homo sapiens
accaccgccggatggccgcggatagctgccgggagtttccgtcttggtctccttggttaccgcgttacctcggtacccatagcaaccagaaagctgggttctgccactgtccgccggcagag

SEQ ID NO: 238129 - DNA, 122 bp, Homo sapiens
cagccacgcccagaggaggaaacctaatgagggcagggcggtgtttccgttttccttggccgggttcagcaccctacactcaataagcgtgggctttctagcaggactggacactcaggcgg

SEQ ID NO: 238130 - DNA, 122 bp, Homo sapiens
tgtttctgtgtgtctctgtcctccagatgtacggggaccctctatgcaccgaacccaatacgttcattccccgtatgatcgtcctggttggaaccctcggttctgcatcatctcggggaacc

SEQ ID NO: 238131 - DNA, 122 bp, Homo sapiens
ggccgaggtccgggcagggtctgctggcagaaggttgtgctgggccgggcccaccttccccggctagagggccgagctgggcgccgcagaccccgcgtacccaggccgcccggtactgcccg

SEQ ID NO: 238132 - DNA, 122 bp, Homo sapiens
aaaggccaatgaagcgctggaactggagagtctctcgcgtgtctgggagggtgttttgcgcggggcggggtggagcagagccggaagcgggaggggagcgtcaaacaggaaaagaagggaag

SEQ ID NO: 238133 - DNA, 122 bp, Homo sapiens
gttgccccagaagagcaaggcttcagctcagaagctgaggtggatcatgaagttggagagcgtctgctaactgcctcacctgctgctgagtggcaaagttgttgttgaatggagagctaagg

SEQ ID NO: 238134 - DNA, 122 bp, Homo sapiens
ttccactggcagacaagcatgcgcgcattgtgcattgcgggcgcagattaaaatgctgtgcgacctgcaaagaaacaatgtgaagtgtatacctagagccgctgcgcttcgcaggcgcgggg

SEQ ID NO: 238135 - DNA, 122 bp, Homo sapiens
ctcaggtgatccacccaccttggcctcccaaagtgctgtgattacaggcatgagccaccgcgcccggctggctagaccattgctaatggctcaagagttcagttctagcaattgtgctgacc

SEQ ID NO: 238136 - DNA, 122 bp, Homo sapiens
ctccttgtggcccacagcccatcactcaaccccagccccaccatcccctgcttcctaagccgttcctcatgccagaagaaaaggcaatgcctttgtcccacagcctctgccttgtgtcatgt

SEQ ID NO: 238137 - DNA, 122 bp, Homo sapiens
gctacaggtgtaggatgttgtggtttctaacaacttacatgtgttctctaaacaatacctcgagtgtctttttgtttctggcctgtgtggtttcctgcatttccggcagctgatcctatgta

SEQ ID NO: 238138 - DNA, 122 bp, Homo sapiens
cagctgaggccccgcccccccatccctgggagaaccgggctggtcactctggggtcggggcggggcacacctgtgcccggagtctgaggtcactcaccggctgaccctggtggtggtgcggg

SEQ ID NO: 238139 - DNA, 122 bp, Homo sapiens
atatatggtgacttaacttacaaacagacatttaactctggaagactttctttagtaatacgacatatcgccatcaacaaatacaacttagaatactgagtacattatgccagttaccatca

SEQ ID NO: 238140 - DNA, 122 bp, Homo sapiens
gtctcaggcccacttctcctgcgggagcggcggccccagcggagcccctgtgcgccacggcgaacgtgataggaatgcaatcttccgccccttcagactctggcaccccgtagcctttcctc

SEQ ID NO: 238141 - DNA, 122 bp, Homo sapiens
aacttcttaccccgcccccgcgtctggcctaaccgtcgcttaccttggtttccacagcgacgccatcagggggcgtggcaaagggacgcgcggggcagagacctcctttggattggtggatg

SEQ ID NO: 238142 - DNA, 122 bp, Homo sapiens
agcgcttccctaggccagggatttgggagtggcttggtttgatagctccaccttgggtctcgcataggagaatagtcaggccatgagccagggccgcagtcatctgcaggcttgactgtgac

SEQ ID NO: 238143 - DNA, 122 bp, Homo sapiens
tttacttgtattagaacccatttacaactatttacatataggtctgtctcctccattagacgacaagcttcttctttttttttttttttttagatggagtcttgctccgttgcccaggctgg

SEQ ID NO: 238144 - DNA, 122 bp, Homo sapiens
ccggctgcccacgaagggtggcggcattggctgtgtggttccgtcgctctgaggctgcgtcgatcagcacaagctgggccttgctgcagaaacggggaagcctgaggtgtttctgatgggtg

SEQ ID NO: 238145 - DNA, 122 bp, Homo sapiens
gggctacagtctgtgggagcttgggggttgcttgtcctctgtgtgtcccagtgtctttgtcggtgagatgggacaatgatagcacactctcacaggtgctgggggctgacaaatgtcaggtc

SEQ ID NO: 238146 - DNA, 122 bp, Homo sapiens
cgcgggctcctggcccaaacagaatgtgtttgctttcacaccgggacggcaagcggagtccgcctcagtgagcagcgagctgcgcagtccggacgggtgtcgcccccagagactcgccagcc

SEQ ID NO: 238147 - DNA, 122 bp, Homo sapiens
tgcgcgcgcgcgcgcttccgcagcgtgcgtgcgtgcgagtgtgcgtgtgagcgaggtgcgcgcgcacgacgcccaaaggcgggaactcctgtcccgcccgctgcctcattggtccgaccttt

SEQ ID NO: 238148 - DNA, 122 bp, Homo sapiens
gtcacagagaagcggggcctttcgaacacctgtgctcaagagggggcgggcttggagacccgagagggctgcaggaagaaagagcctggaccctaggatcctccctgaaacagcgggatggc

SEQ ID NO: 238149 - DNA, 122 bp, Homo sapiens
gagtgcgccggagattcggaaacccgcagagacttctcaagtcagcaggaacttggaaaccgctgttccctccaaacggcttcaaacactcgcgctccttcctttacccaacctaattttaa

SEQ ID NO: 238150 - DNA, 122 bp, Homo sapiens
cccaggaccctcccggccgaccgcggcgcccatggccccctctcctgcaggtgctgaccgcggtgctgatgcgggagcaacttcccgcgctgcgagcccagacccttcctggcctgcggggg

SEQ ID NO: 238151 - DNA, 122 bp, Homo sapiens
ctataaaattgtatttagttcattgaacaaacctcaagctcctcatccagtaccaccaggcgtttatccttgtcaatcttcactaaaataaaaatcaagtatgagtaagctgggattctaat

SEQ ID NO: 238152 - DNA, 122 bp, Homo sapiens
ctggcctggcggttacaccactgcggtttgttggccccagggagcgcctcccttacataacgcctgacataactgccctaaaacacacgcatggcaactcccacatagcaccacacatgctg

SEQ ID NO: 238153 - DNA, 122 bp, Homo sapiens
atgcctccataggccactttttaaatacgcggggctaagggccaacgacaagattgtcatcgaggacaataagtcgatggcgctgcctggtcactggcttggtcagaaaacacatgccaggg

SEQ ID NO: 238154 - DNA, 122 bp, Homo sapiens
cttctgatcaaacagcgagcgacatcggcaccaataattgacgagaccggctggaaatcacgcagaaagggagcccactgagaccgcaggggctgacaaatcactgctaataatcctgttag

SEQ ID NO: 238155 - DNA, 122 bp, Homo sapiens
gacaatccccggctgagcgcttggccagagtttctgtgatgctagaatctggactgcctgcgacctctccgggactcggacaccagccctcgcctcctggtgatcttttaggtcctgcagag

SEQ ID NO: 238156 - DNA, 122 bp, Homo sapiens
cgaacgatagttgtacagggaggatcatttaccaccaactactgtcataactaagaaaggcgatgacgggaccaggacgatgtcttctttccaaccatctatccgctaaacggtcaggcact

SEQ ID NO: 238157 - DNA, 122 bp, Homo sapiens
ctcatctatcgcctgccctccacctggccagtccctgcgggcatctaactgctaagcctccgctcagccaacacccagttggtcagtctggtcacagtccagcaaaaagagggactgccact

SEQ ID NO: 238158 - DNA, 122 bp, Homo sapiens
ggcggggcctgtgatgggggcgggccctacggcgggcggggcggggttcgggtgcgaggccggtcctgcaggcggcagccagagctgcgcgccgcggcggcggaagatggctgcggccgagg

SEQ ID NO: 238159 - DNA, 122 bp, Homo sapiens
ggcatctgaagtggtattctatggggttttgttgttgtctcatgtaatctgctgcgtgtgcgtctgtgtgtgtgtgttccaagtgcccttccagtagtctcaatgacctccagtgatgctaa

SEQ ID NO: 238160 - DNA, 122 bp, Homo sapiens
ctgggaagcctctcctaaaatttagaaggggacctaaaggagccaatttgagcgccgtggcgccagcagacagggagtcccggataacgccaacttcagtaccttggacagagtcctgccct

SEQ ID NO: 238161 - DNA, 122 bp, Homo sapiens
ccagtggaggcgcctccttcttgggcggggggcgcgatgcggccttcgggggctgcccggcgcggcccccctgcgccctcccgcccgcgcgccgaccagccttcttgcccgcggccgacgcc

SEQ ID NO: 238162 - DNA, 122 bp, Homo sapiens
catgaattcgacctgctgtagaggtgtaggttttttcaggttctctcatcagcaacccaccggaaggtaagtgtggggaatgcaccagttagttcccactgtccgggctgatggagctctga

SEQ ID NO: 238163 - DNA, 122 bp, Homo sapiens
ccgcccggaggacgttggcgtttacgtgtggaagagcggaagagttttgcttttcgtgcgcgccttcgaaaactgcctgccgctgtctgaggagtccacccgaaacctcccctcctccgccg

SEQ ID NO: 238164 - DNA, 122 bp, Homo sapiens
tggcggtgagtgttacagtttttaaaggcagcgtgtcccaagtttgtttcttctgatgctcgcatgtgttcggagtttcttccttctggcagattcgtgatctcgctgacttcaggagtgaa

SEQ ID NO: 238165 - DNA, 122 bp, Homo sapiens
gtggggactccggcggcaccgtgactcaggcccggaggaggggcgcgcggtgacacgaggcgccccaaactcaggccgcctcagaggatcgccagggccagcggccagaccaggatccgacc

SEQ ID NO: 238166 - DNA, 122 bp, Homo sapiens
atgaaacccggccggaacgctggaggctggaagggatgcaggaattttctccgcgcgctgcgaatacggcatatgcaaaacttaggacccagggcaggccgggctttggagacgagtcagtc

SEQ ID NO: 238167 - DNA, 122 bp, Homo sapiens
gggggacggtggagccttaagataatgcggaccctgaagatggtaacactgcactttcaccgtacgtttttaatgtttggatgctgaaaggctggctgcatataggacggcggaccctgaag

SEQ ID NO: 238168 - DNA, 122 bp, Homo sapiens
gttgagctggtgagggcgttcgcacccccataggttccctagcatctgatctgtcacctccggaaagggaaggccaacagtccaggcagctggtcataaaacgagcaacagcagtggctggc

SEQ ID NO: 238169 - DNA, 122 bp, Homo sapiens
tttttttttttttttgcagccaatacaagtctattgttgcctctattatgcgccagttaccgagcctttactcacgctcacgtttaactgacactggcgctttttacaatgcagcagcacga

SEQ ID NO: 238170 - DNA, 122 bp, Homo sapiens
gggtaaagggagcctgtgagagcagtgagggcgcgtcccacccagcagaacccagaaaaccgctttcacctcccgattcttacatgtgcggggggtttcccagccccaggcctctcccccgt

SEQ ID NO: 238171 - DNA, 122 bp, Homo sapiens
aaaataataataataaaacgaagactaaaatgaatgcatcccaccagttgcaatgggcatcgagccagaattacagcaagcactggcgctgcaggggtaagaaacaatggattttaattggt

SEQ ID NO: 238172 - DNA, 122 bp, Homo sapiens
ggctctccagctttctgttaaacaaaaggctctttaacatttgatttcatttcagaataacgttcttacttcatgattctataattggtataagctatacagtctctggaaaggcatttctt

SEQ ID NO: 238173 - DNA, 122 bp, Homo sapiens
gcagcttcacgtacttcgtacgacaggagcgcacttgttctctgtccgagaacttcgtcccgagagaacctcaggaactcgccgggccacaccccctgtccagggaaggaacacgcccccgg

SEQ ID NO: 238174 - DNA, 122 bp, Homo sapiens
tttccctgctgccatgccctttggcaggcagccgtccccacgcccggaaagccccagcttcggctcagcccacagcacaagggcatatccttctgcctgcgcaggccagggtgctcgacgcc

SEQ ID NO: 238175 - DNA, 122 bp, Homo sapiens
gtttgaattccctaacctgccattttctctcctttttgttctgcttctgcgcctactgtccgttactttctttccatcttgaaaataagtcttccttcacaaaggtattcctttcacctaaa

SEQ ID NO: 238176 - DNA, 122 bp, Homo sapiens
ttcctcaccaggactaggtgagtgtgaacaagctcttccaaagatccgcccgcagggccacgagccttccttcctgcggccacactttgcagccctcctctgggactagtcttcagaacgaa

SEQ ID NO: 238177 - DNA, 122 bp, Homo sapiens
gaagagaccagtcctcaggattcacatgtgtcatcttctgctggtggtccatttctgccacgttttgtggttgggtttaattcaggagggaagctattacgaagaaacatggcaacaactaa

SEQ ID NO: 238178 - DNA, 122 bp, Homo sapiens
gtaacgaactcgaccaggagcggaaggcgcgctatgccatccagcagaaattgaaaggtgcggaagccgggaaacaaagataggaggggtgctgggtgccggccgtgctgtcgactgaatga

SEQ ID NO: 238179 - DNA, 122 bp, Homo sapiens
ttggcctcaaaggtccttctgtccagcatagccgggtccaataaccctccatcccgcgtccgcgcttacccaatacaagccgggctacgtccgagggtaacaacatgatcaaaaccacagca

SEQ ID NO: 238180 - DNA, 122 bp, Homo sapiens
ggcacactcctccaacaaaagcagcccctgcttcctgttcgactcccctgacccccacatcgactctgcctcagggcggcctccatgccttgcccagagcagctgcagccatcatttcgcac

SEQ ID NO: 238181 - DNA, 122 bp, Homo sapiens
tcaggagggggctgcgacccgcagcgacctgtggacccgcccgctctccgcccgggggctcggacctccgcctctctgggtgcccggacctcaacccctccgggtgtccagcagccccgggg

SEQ ID NO: 238182 - DNA, 122 bp, Homo sapiens
tctctacctacaggatcatgggctagcgggtgctcaatcacagcagccagcgttggaaggcgccttgcaaagtattaacagcactatcaaactttaattgcgtagttcggaaccagatatgt

SEQ ID NO: 238183 - DNA, 122 bp, Homo sapiens
tcccaacttgtgctggcagcagttaagaaactcctttcaaatccggctgtcttgcgcctgcgcattcaagcaaagcgctcataggcggggtggggggggtggggggggttggggggtggggg

SEQ ID NO: 238184 - DNA, 122 bp, Homo sapiens
tcctaataccaacccactcccttccaaggcacagctactgctatcacagtggcttacatgcgatagactaattatatataattatatcttcttcctaagggtgaactgctaggatgtgagaa

SEQ ID NO: 238185 - DNA, 122 bp, Homo sapiens
tgtcaaagctgatgagcccaaagaacacaatgctgacgtacatgttgacgtagaagagcacggcagagaccctgcacacaaacacgttcagctgccagggaccaaggcctgagtcaccaagg

SEQ ID NO: 238186 - DNA, 122 bp, Homo sapiens
ggggaggggagctgaagagtggttccaaaagtgacctgagccctgttaccagtgcagggtcgcagccattcatttctccagttagccagggagcaaacagaaattgaatgctgggcatggta

SEQ ID NO: 238187 - DNA, 122 bp, Homo sapiens
ttggtccaatttcccaggaaccgctctgagcccggcgaggcggcgctcagtaaaatgacccgaaaacgatccccgactaagcggctctttatcccacagcaaaacggctttcttaagaccca

SEQ ID NO: 238188 - DNA, 122 bp, Homo sapiens
ggcactgggcagctgaggcaccgggactcagggaaatcaagcgcctgacgctgtctcacgcgatcgcaccaaaccaaggaagcagccagtgcctcccgtcaggccccgcggagcgaagcacc

SEQ ID NO: 238189 - DNA, 122 bp, Homo sapiens
atggtaaatccatgcagtgggttaccaggctaccgtgaaatgggaacgagtagagccgtccgaggtacactgttgtgggaagtcagcgcaaaggggaagagtacctttgtgtaaaaggagta

SEQ ID NO: 238190 - DNA, 122 bp, Homo sapiens
ccttggttcccctcacccctcatactttaagtcagtgccttgtctctcacgcacaaaaagcgtctggtacttcggtggcaaggagtgcagtgacagatggaggtatcctgtgtaccattata

SEQ ID NO: 238191 - DNA, 122 bp, Homo sapiens
ccagcagtgccagcccaccggcgctgtgctcgatttctcaccgtgccttagctgccttcccgcagggcaggattcgggacctacagcccgccatgcctgagcctcgcaacccctccatgagc

SEQ ID NO: 238192 - DNA, 122 bp, Homo sapiens
gcccagagctggcatcaggccatcaggccgggaaggtcgtcgcaggccccagagtgcgggcgcggggggcgcgcgcccacaggacgcccggggttgggtaggcaggagagaagggcgccagc

SEQ ID NO: 238193 - DNA, 122 bp, Homo sapiens
cccgcttttttgtgacggtccctttggcacgctcttgagtgagagtggaacagcccaggtcgggagcagagtctgttcccattgggttttcttgggcatgagctttggctcagtcttttgac

SEQ ID NO: 238194 - DNA, 122 bp, Homo sapiens
ggtgatcactcagtaagtactgttgtccctttggtctgtttctggcagcgattagctgtgcgcattctttgagaggagcgacggagggaacagaagagggtactagtgaagaactaaggtgc

SEQ ID NO: 238195 - DNA, 122 bp, Homo sapiens
aagatgaagagggtgggaaacccacaggggcaaatggaacagtccatgcagccggggtgacgggggagcgctcggaggaaggacgctatgcagagaaagcccccctggctcttctctctcaa

SEQ ID NO: 238196 - DNA, 122 bp, Homo sapiens
tttttcatttgcttagattctgtgtacttatcattcatttaactctcccccacatatgtgcgtttgtgttcaagacatttgaatgcattagatatttgatccattttatcttcttgagaaaa

SEQ ID NO: 238197 - DNA, 122 bp, Homo sapiens
gctctggtacttgttatagaacagggagccgttgtacaccacgtggcccgtgcccgcccacggctggggcagcaggtgctggataaagttctggcctttgatgaagtctcccagggtacgga

SEQ ID NO: 238198 - DNA, 122 bp, Homo sapiens
gctgcgattacagacctgagccactgcacccggctaagcgttcctttttttaaaaaaaatcggccgggcgcggtggctcatgcctgtaatcccagcactttgggaggccgaggcgggcggat

SEQ ID NO: 238199 - DNA, 122 bp, Homo sapiens
tttgttggagaaactgggtagtctgtccagtagaggtatttgtttacttttgacagataacgcattcatgtgttataacattcaaaaggtacaacatagtaaagagtggaaaacttcctccc

SEQ ID NO: 238200 - DNA, 122 bp, Homo sapiens
aagggcaaatctcaaaggcccttaaatggattggaaagccaaatggcaatttccttgcctcgggctggattaaaccaaggcaatcacatttccatctgctctttcaataattttatcaatac

SEQ ID NO: 238201 - DNA, 122 bp, Homo sapiens
aacgcggcccgaagcccaggacctggtagatgggcgcaggcgggcggtcggccgtgtcctcgccgcgggtcaccatcgcctcgcgcacggccgccagcccattgagcacgaccaccggcgtc

SEQ ID NO: 238202 - DNA, 122 bp, Homo sapiens
cattcattcactcattaattcattcagcaaatccttcttgaatccctgctgcaactcaggcgctgttctaggcagggaactgagggctcagttttggacaaagacaaaaatctctgccctct

SEQ ID NO: 238203 - DNA, 122 bp, Homo sapiens
tgtggtgagcagccctgaaagcaagcccagacccagccattctccgtccctaagctgacacggagcccctgattttaatttacctggctttgctagttacgaatatatctctcacctcctaa

SEQ ID NO: 238204 - DNA, 122 bp, Homo sapiens
gacgtgatgctcttcggaccccgccggccgcagcttcccgggaggtcgccgcagcgcagccggtgactgcttggtcgcccgcaactgccactcccccgggattgagactcctttagggaggg

SEQ ID NO: 238205 - DNA, 122 bp, Homo sapiens
gttcagaaaccagaacagttccagattctctccatgtgtctgtggtcccaccacctcctccgcaagggaccctgaaagctgtctgggacctaggacaacttcttgggatgagtacggccatt

SEQ ID NO: 238206 - DNA, 122 bp, Homo sapiens
tacctttcagtaaccctctccccaagggaaccactgatctcaatgctgcaactataagcacgttatgcagaaagcagtaggtcattgcccccaaggaaggaattacctgtctgcttccatcg

SEQ ID NO: 238207 - DNA, 122 bp, Homo sapiens
gcggcaccgcgcccagagcggcctctccccacgcccggggcgcgccggctcagggaggctcggggccgcccatgcagacttttggcctggcgcgatcccccaagaacccctccagggccggc

SEQ ID NO: 238208 - DNA, 122 bp, Homo sapiens
tcatcttgaagtcagggtgtgtggggggtggaaaggggtggggagggagagagagcgcaacggaaattggctggactgatctgcaccgctggctctgcactgctagtagccttgtgatggag

SEQ ID NO: 238209 - DNA, 122 bp, Homo sapiens
ggttgcggtcagccgagatcatgccactgcactccagcctggctgcaggagttcagtcagcgtggtgggaaatattattaaaattatagaaagaagcacaccttcttggaaggccgggaggt

SEQ ID NO: 238210 - DNA, 122 bp, Homo sapiens
caggctgtcagttgcctcctcaagctgcaggctcggtaagtcatcaagcaaagctggcatcgagaacaatattcttttcctttgtgccggtcacaagcagcatgaggacatccagggcagca

SEQ ID NO: 238211 - DNA, 122 bp, Homo sapiens
ctaactcatatctcattttcttttctccatcaccctggcagctcttccacacagccagagcggctgcttgatgcgtagtgctggctttggtgcttctacagtggttttgctagcttttagct

SEQ ID NO: 238212 - DNA, 122 bp, Homo sapiens
catgtacacaccgtgcactcacacactcacatacaccttttatatgtgcatataaacacacgcacatactctctcacacataatcccgcaatacacctcacacacacctgtgcactcacaca

SEQ ID NO: 238213 - DNA, 122 bp, Homo sapiens
ggagtggctttaacagatgtttgcatccataaacaggcttgcttcaggtgcttcccttcacgagaaatgaaatctgtgttctcccccaaagaccagcctccggtggtagcgacaggattgtc

SEQ ID NO: 238214 - DNA, 122 bp, Homo sapiens
cagctttccgcccgcaggtggcagcagcgggctccgaagcctgtctctgcaggtagcagccgcttcacagctttcaggccggtgctcagcggaggctggtgcatctccactaggaatccaca

SEQ ID NO: 238215 - DNA, 122 bp, Homo sapiens
gggagtcgagccgggctcacttaagggctacgacttaacgggccgcgtcactcaatggcgcggacacgcctctttgcccgggcagaggcatgtacagcgcatgcccacaacggcggaggccg

SEQ ID NO: 238216 - DNA, 122 bp, Homo sapiens
aaatgtagaagctcaaatccctatagcaaattccatattctatgtcattcttaatgcttccgtctctctggttgaatctagattggatacaatcagtgatgcacatttaccagacagaggat

SEQ ID NO: 238217 - DNA, 122 bp, Homo sapiens
ctctgcccccaggccctacagtggagcctcgtccccagagtcccgctccaagcccatccccgttgccctacagtggagccctgccctggagctctgctccgtcgccctaaagtgtagccccg

SEQ ID NO: 238218 - DNA, 122 bp, Homo sapiens
tcttccaagtgccaaacagctcagctgtcactcggtcaccacaacttctgagggacaacccgcactttcaaagtccctcaaagttaaacggaaattctcccaaaggattcttccgtccaccc

SEQ ID NO: 238219 - DNA, 122 bp, Homo sapiens
cccacccgcccagggcgccgccctccctgcccctgagcaaagtgacacaactccctcgggcgaggcgctccaccaagctggagctgaagtctccctaaggcccatcgggcaggcggaaaaag

SEQ ID NO: 238220 - DNA, 122 bp, Homo sapiens
ctctctggccctttagagaaaagcgtgctagcccttgctctaagagtttcagtgaagagacgcaagatgcagaaatgaacctaattgtgtggtcttccgtgctggggaagccgaggagaaat

SEQ ID NO: 238221 - DNA, 122 bp, Homo sapiens
ttaggactgctttcagccaaactgtgttaagagtcaggtcgtcctgttactgaaatgcaccgtgcctcttccctctgacgcacgcgtttccgtgagacttagttctgttctgctcttttaca

SEQ ID NO: 238222 - DNA, 122 bp, Homo sapiens
tgaggtcgtagctgtagcgccagagtggcttgtcattgatggagactgtctgcagctggccgtcagcatcatactcataggagtagcgagtggtattggcgtagggtcctaccttcagctcc

SEQ ID NO: 238223 - DNA, 122 bp, Homo sapiens
tcaattatcacagtcgcagaatcttgaggtccatcttggaatggtgcagtcagcctgaaccgtgggatcaagttcagggacatgagaacaatctcagaaacttctggccagtcctaggtctg

SEQ ID NO: 238224 - DNA, 122 bp, Homo sapiens
ttttcattaaaagctgatacctctgccgcgggggagggggcccggagggaagggcggcgccggcccagacccaggcaaggaaatcgggaggaaatgaacagatttcccaagcccgcctcggt

SEQ ID NO: 238225 - DNA, 122 bp, Homo sapiens
ggaacctgcattctgtggatatctcttccaaatgcatgatgaagaagttctcatcaacagcgcaaggcaatacagaagtggacacagggacattagaaagacatgaaagtcatcacattgga

SEQ ID NO: 238226 - DNA, 122 bp, Homo sapiens
gaacaattgtctgtataacacatccatgtagccccccagcttttgactgctagtttacagcgatggctgcaagtcttgcttcaggttggtcatagaaacacaactacctattcaatttaaaa

SEQ ID NO: 238227 - DNA, 122 bp, Homo sapiens
agatgtgcgggggcagctcgcccaggtggcgccggctgtactgctccatggtggcaggctcgtacagcccggcgatgggctggtaggggttcacggaggccaggatggagccgatgtaggtc

SEQ ID NO: 238228 - DNA, 122 bp, Homo sapiens
ggttggaaaacccatctgcttgggttcaaatcccagctcttaaagcccagcacagtggcacgcacctgtagtcccagcttcttggaaggttgaggcagaagaatggctcaggttcaggggaa

SEQ ID NO: 238229 - DNA, 122 bp, Homo sapiens
gtgctaaggagattggcggtgccagaagctaaattctagggcgctgcgcagccagagatgcgtcgggagctctaggaggggcggaggggcatctccagcgcggtggaggctcgtcctggaag

SEQ ID NO: 238230 - DNA, 122 bp, Homo sapiens
tctgactgccctcaggatcagtccacacgtttagcttggcatgcacaaccctttcagtctcgtttcttgtcatctcccacgtcctttgtgtgctttatcacaggctttggcctgaacactcc

SEQ ID NO: 238231 - DNA, 122 bp, Homo sapiens
taaaccatcagttccgtggcggagtaaattgaacgttgttctccgatcaaacaggagcttcgggtccacctgtttggaagcacccaggcggcttggaggggtccggccttcgggcgcgaccc

SEQ ID NO: 238232 - DNA, 122 bp, Homo sapiens
ttcacatggcttatctgtctccagtccctcagtagtttgaatgaatgggcttgcttgtttcgtgtgttgtgtcctggcttgtgtgtttgtccagaaaagttgtttctcctcctttctttcct

SEQ ID NO: 238233 - DNA, 122 bp, Homo sapiens
tatttttagtagagactgggtttcaccatgttagttaggctggtctcgaatccctgagttcgtgatccacaccccttagcctcccaaagtgctgggattacaggcgtgagccaccgcgcccg

SEQ ID NO: 238234 - DNA, 122 bp, Homo sapiens
attcattttatttccagaactctccgaccataaattattcaaagagtaagccaacccgagcggggcggccgcgcgccttccccacgcgcgccgggctggctctggccgctcagctcacccga

SEQ ID NO: 238235 - DNA, 122 bp, Homo sapiens
gcagatgagagttttactgagtatctccttgtgccaggcaccctgttgttgctggggaagcggaagggagagacaatcgttaatcggctaaatttctgccttctgagagctcagaatcaaga

SEQ ID NO: 238236 - DNA, 122 bp, Homo sapiens
gcctgccaacgaggcctcggttgaatacctgcaagaggtggcccggatccgcctctgcctcgacagagctgcagatttcctctcggagcctgagggaggcccaggcaagtcttctctgcctt

SEQ ID NO: 238237 - DNA, 122 bp, Homo sapiens
cctgatgggtgcagggcgggggtctctgggtcggggttttctttggaaagctggaccggccgtgccctgcgtgtgggagctggctcgtggggcttggaggtgtgtgtgggagggacggtggc

SEQ ID NO: 238238 - DNA, 122 bp, Homo sapiens
tctaaaaggaaggaggggtgctactcactacggatcttttggaagaagtacgaaagtatccgacaatcattgaatgaacccagtttgggtccgaaaaacaaagaaactcttcagttcggctg

SEQ ID NO: 238239 - DNA, 122 bp, Homo sapiens
attaacttggcaaagccatacagcattgagcttgggaactaggatccaaggccaggggtgcgtaacttttcagtccacaattccggcctttacaccaggcagtattccaaagttaccacatc

SEQ ID NO: 238240 - DNA, 122 bp, Homo sapiens
cttgagatcctgagaataaatgcaaaatcgcgcttccgctgcatgtggaagtgagcggggcggcagctagcttgccccgtgagtttttaacacagctcgatatgatgtttagtataattgca

SEQ ID NO: 238241 - DNA, 122 bp, Homo sapiens
atattctcacggttttctcaggaccttctgtccagccttcgccttcttggccttggtgtccgctgcttgggcattgctccgtcagtggcagacaccttgcttggcacatacttgacactcag

SEQ ID NO: 238242 - DNA, 122 bp, Homo sapiens
cgtgtaatccgatcccttctgactcacaagccctgagtgacagttctgatttggttcaaccgcgggagggaggggaaagagaaagaaagaaacccccagccgtacgcctctcctggcatcca

SEQ ID NO: 238243 - DNA, 122 bp, Homo sapiens
ggcgccaccttgggccggcgcgccccggagccaggagaacggagcgggtgcacggcgcggcgctgggggttatcaatctctcggatcgataagttgccacttggagaggggagggctacgtc

SEQ ID NO: 238244 - DNA, 122 bp, Homo sapiens
agtggaccccgctcgccgtcccgtctgtcagtctcggttttagctccttcgggcgcagggcgctcgcctcccggccgggccaccccaccctccaatccccgaggccgacccgacccctgcac

SEQ ID NO: 238245 - DNA, 122 bp, Homo sapiens
cgagagcagggcgcttgctttcgtttcagccttttaatttcacttgcagtcagccgtccccgcaccccctcgggcgcgccctcaagtgtgccgagtgtggagtcctctctgccgccgatgcc

SEQ ID NO: 238246 - DNA, 122 bp, Homo sapiens
cagtcccacagctgtggttttaagcactaatattttacaggtaagaagctccatctcccacggcagattgcaaccgtcagggttgttagattcgtgcggaccggacgatgcgtctaaaggaa

SEQ ID NO: 238247 - DNA, 122 bp, Homo sapiens
tagggaagggaccatggagctccgaactacccctcagctgaaagtggtggggcagggccgcggcaatggagacccggggggtgggatggagaaggacggtccggaatgggacctttgacagc

SEQ ID NO: 238248 - DNA, 122 bp, Homo sapiens
cttgtgggacgcccgcggtcggatgccctccgtccgctccctcctccgcctcttggccgccgcggcggcctgtggcgccttcgccttcctgggctattgtatttacctcaaccggaagcggc

SEQ ID NO: 238249 - DNA, 122 bp, Homo sapiens
agcccccagcacctggggcctatccatagcaagtgtcggggaaactgctgcatgttactgcgtcccatctgcacggcctggctatgaggggccctcagctcagcactcagtgagaccaactc

SEQ ID NO: 238250 - DNA, 122 bp, Homo sapiens
aagaagatggcactggcaaaggcatgggggtcaaaatcacctcccaggatgtcaatcacacgaccagaatagtgagggattaatgtctcacctgaaagaggcatgaaaaataacacaagaat

SEQ ID NO: 238251 - DNA, 122 bp, Homo sapiens
caagtcatcagccagatttcctgactgacacataggtatgatcagtgcaggagagacctgcgcaccacaggctgcaaactggaggttctgttctcatggcagtttgggcagtaacttttgag

SEQ ID NO: 238252 - DNA, 122 bp, Homo sapiens
gctacgcaggagggagcacccaggtttccaagcatttctcacccagccctgaagtgtgcccgctaggaggccacgtggcaggccctgggcgtgctgcctttgaagaccccaggctcaccttt

SEQ ID NO: 238253 - DNA, 122 bp, Homo sapiens
gcgttcctcgactaggaaagggtatacacttgagtcactaagcacactgggccccggaggcggggtcatcgagctgcccagagccaacaaaccccaaggtggacactgccccggcgcccctt

SEQ ID NO: 238254 - DNA, 122 bp, Homo sapiens
cctagatcctgatccagctcttggaatgtcatccaccctacaggccactgctttgctctacgacctattaaaatattttcgtattactgttgctggagactcatttcaaatatagcagtttt

SEQ ID NO: 238255 - DNA, 122 bp, Homo sapiens
acaatgaaggacaatcaggaatagcacttaggtctgaggagaaatggagctagaaggagccgtttcatagctcagtgtaacacagagttatttggggtttaactgaaacgccttccttcatc

SEQ ID NO: 238256 - DNA, 122 bp, Homo sapiens
gaagagacccgggtcgcctccggagcttcaaaaacatgtgaggagggaagagtgtgcagacggaacttcagccgctgcctctgttctcagcgtcagtgccgccactgcccccgccagagccc

SEQ ID NO: 238257 - DNA, 122 bp, Homo sapiens
aaaggaaaaaacaggtttgggtagggggatactctttcaggctctccagatttccagccacgacttacgctcagaaaaaataacgtccaccttaattatctctccaaccctgtttttccctg

SEQ ID NO: 238258 - DNA, 122 bp, Homo sapiens
gcagctagaccagatagtgcccagatcatctggggacgcacgagttcaggtctgaggctacgcaaggtcacaggagactcagtgtgatcacaggctgccatatgtgttcaccagtagtaaca

SEQ ID NO: 238259 - DNA, 122 bp, Homo sapiens
gcgcttggcgcgcaggcggatcttgttgcgatggtgctcgatctcagacttgtgccgcagcgcggtctgaatctgaggaagggtgagggagagaaagacagccatagaggtcccgggaagct

SEQ ID NO: 238260 - DNA, 122 bp, Homo sapiens
gcaggcacctccaggcctggctggcagcgccctgggagtggtcccctggtacctctgcggcggaaagagggtaacaacaggcttcctatctgaggctaacccctaggtcgacgtaccaggtc

SEQ ID NO: 238261 - DNA, 122 bp, Homo sapiens
cacccactaaacccccgctcctgagtcctgggaacaccagagcaccgggcagagaatccccgggcgatgccaacaggaagccagagtgaccagtcccttccgccaacccagtgtgtgtgtgt

SEQ ID NO: 238262 - DNA, 122 bp, Homo sapiens
atttcagcacaggactggaccgggcaatacccccacagtgcatttcattttgtcatgggacgggatggtgtgatgctccccacagtgcatttcattgtaaggacattccctggaggctggtg

SEQ ID NO: 238263 - DNA, 122 bp, Homo sapiens
gggactgtcctaagacgggcggggcgcgctgcgctagggactgtcataaaaggggcgggacgcgccgcggtcgggatgacgtgagctgggggcgctcgtcgctgcagccggcggctagcggg

SEQ ID NO: 238264 - DNA, 122 bp, Homo sapiens
gccccatgttttcagggctgtgtgaggtctctggtgtctctcaggaccctgtccttcctccgtaacccagagtagcaattggcggccccaggcaatggacagagccccatcccgggcactca

SEQ ID NO: 238265 - DNA, 122 bp, Homo sapiens
cgacgcggtcgccaaggcaacgccggccccagcgcccgcggctgaaacgaagccgctgcccgagcccgagcgccagcgcacacgccctccttgcagccccccgcagccccggccggccgcgc

SEQ ID NO: 238266 - DNA, 122 bp, Homo sapiens
tgcgctggacaagcgagagctggacggaaacggtgggaggccgtaggcggcggctgggggcgcgggacccgcgcgcgggcgcggaggcgggcggggaggccccgcagcccgcgccgccgcca

SEQ ID NO: 238267 - DNA, 122 bp, Homo sapiens
cggccgagctgagaggaagctgtgggaggcgcagcgctcgcgggcgcgggaattggcgctcggcgctcgccgtagctcggcctgggacgcggtcacggagcgcccgggacggcgaccaaagg

SEQ ID NO: 238268 - DNA, 122 bp, Homo sapiens
tgccctagatttaggagagcaaatatcaggagggtgctacttctttggtcacaatccagccgggcgtggtggctcattcctgtaatcccagcactttgggaggctgaggcaggtggatcact

SEQ ID NO: 238269 - DNA, 122 bp, Homo sapiens
gtctttaggattagattaagtggctgttggtaacaaagattagtggagaagctgtataatcgtacactggttttcacttttgaaaggaatccctgtcaaatggtttagtgcttaatgctgtt

SEQ ID NO: 238270 - DNA, 122 bp, Homo sapiens
cctggacccagcaggcccatctagctccagggccactccatcttcccacctgccaaggctcggtgttacctgtgggtcacagccaggccagtggggcccctgtccctagggggtgggtgtgt

SEQ ID NO: 238271 - DNA, 122 bp, Homo sapiens
gcccctagaatccctggaggaagcacggcatttcggcctcagacttctagcctccggagccgtgagaggataaatatctgttgcattcaaccaccattttgtggtcatttgtttcagcggcc

SEQ ID NO: 238272 - DNA, 122 bp, Homo sapiens
ggtttgagatccagaggtccgcccagccaatcagagatgaagcccagagctgcccttccccggcagtgctcccctgtctcggcgtggtgacacgctagcactggtgttcatgattttgggca

SEQ ID NO: 238273 - DNA, 122 bp, Homo sapiens
atcccctcccaggggcttgggtgtggagggtctctgctgagtgtgcgccctactcgggggcgggtctcagttcagaaacagaccctacatctccttctggggaggtgtgtgggggcgacccc

SEQ ID NO: 238274 - DNA, 122 bp, Homo sapiens
gagaaccggaatgactggcctttttatgaaattttgacacctgtcaagaaacctggccctcgcagccctcatcttggctcccactctgtactgggaagagtctgcacgctgtgtggcattgt

SEQ ID NO: 238275 - DNA, 122 bp, Homo sapiens
caagatgagactatggatcccgcatgcctgaattcactaaagccaagggtctgtaagccacgctgctcttccgagacttccattcctttctgattggcacacgtgcagctcatgacaatctg

SEQ ID NO: 238276 - DNA, 122 bp, Homo sapiens
cgcagtggagtgaagacctgggcactctttcctcttttatacgcccaagattagtctaatcgctgcctccctgccctgggcagccatgacctcaacccagggtgtaccctgtgcttcgtgta

SEQ ID NO: 238277 - DNA, 122 bp, Homo sapiens
taacaagtcaatgcttttgttttttagtgcgttcaagattcaacttcacccgtaacccaccgccatggccgaggaagggtgagcccaggggccggggttggagttggggtcggggtgcggct

SEQ ID NO: 238278 - DNA, 122 bp, Homo sapiens
gggagaagcagctggccaagaaggagcagtccaaggagctgcagatgtgggtcctctcgccgcagccctcaacatggagctagtgcttacggggtcccgtggctggtcgggctctttttgca

SEQ ID NO: 238279 - DNA, 122 bp, Homo sapiens
agagaagcaccttgcctttgctggtgtttttcccgcagcaggtgggtgggactgagccaacggtctcttggcatcaacaaagcatcaacaaatctctctccagctccacttgtgctgagcta

SEQ ID NO: 238280 - DNA, 122 bp, Homo sapiens
cgtttagtccccgtggagtcagccccgagccttcctagtcctggaacaagggctccaggtcgcggccgcgggaagccgccaagagggcggggagtagggattccctccagctccgcagggca

SEQ ID NO: 238281 - DNA, 122 bp, Homo sapiens
ttttctgctttctgtccttgtatttgtcatgatcttattcgccttcgaagaggctggagtcgtgccctgagctgcccgtggagaattcggtgacttcgttccctcctactttgaggaccagc

SEQ ID NO: 238282 - DNA, 122 bp, Homo sapiens
agaatacacatgtggctcacgttttatttcagaggattgcctcctttttaaactctcaatcggcctgctcaaaggaccagaattcagaaagggcataaaatctggaattttaaaataattgt

SEQ ID NO: 238283 - DNA, 122 bp, Homo sapiens
gcaagaggggccctcccagggaagctacattttctcctctgctaccagccttctttctttcgcccacccctcccccatcccgccctgggacagctaccttgccggtcagtatctgagttctg

SEQ ID NO: 238284 - DNA, 122 bp, Homo sapiens
cttttcctttcctgatactgaaattgatacatgcaggagggggattacggggagggtctccggagaatctccaacccatctgtgcactgggagaacaagatggagccaagggaagctgtggc

SEQ ID NO: 238285 - DNA, 122 bp, Homo sapiens
agtgtgagctcaggccatttcacactgccttcgttgagtctgtttggtgctgagaagccacgggaatgagggatgggcagggggccaaggcctgggtggcagacatgcttcttgcatgtcct

SEQ ID NO: 238286 - DNA, 122 bp, Homo sapiens
atcccgtggctaggagtcagcgacatatggggagcacatctggttcgagaccaacgtgtccggggacttctgctacgttggggagcagtactgtgtagccaggatgctggtgagtgctcgta

SEQ ID NO: 238287 - DNA, 122 bp, Homo sapiens
tgacatagaaagtaagcatcgtgccttatagagaattcctagaaggggtaggggacttaccggacagcagtctcctcagtagcctccccaaagagtatgtctcaatcaagatagtcaatgct

SEQ ID NO: 238288 - DNA, 122 bp, Homo sapiens
tctcccgctagggtgctagtgaacaatgagctaattctgatggagctggcgcggagccagcgccccagccttgctgccactgtgcagccgcctaggagccagactgcttactcggcaggaat

SEQ ID NO: 238289 - DNA, 122 bp, Homo sapiens
gcggtcgcaggtggagggtggcctgttaacccttcactcccaggccagtggacggacttgcgtgtggcgcagatccaacggagaaggcagcggctcctttaaacaaggcggagaaggttaag

SEQ ID NO: 238290 - DNA, 122 bp, Homo sapiens
cgcaggagctgccggccctcgcgcgcccctcgcgggccccccgggccccccgcccgcccgcggctgctgccgtcagagctgcctgcgtcaatgctgcttggtgacacacacagctttttttc

SEQ ID NO: 238291 - DNA, 122 bp, Homo sapiens
tgggctcctggttggggtggggagggccaggacagccagcgtgttcactcctcccacagacggttctacaaaccctcgtggaaactttctgtgcggctggccctgtgcttggtgctgtggga

SEQ ID NO: 238292 - DNA, 122 bp, Homo sapiens
atttctgtcctctgtgccgtgtaggaggacaggggccattacaccaacgatgaacgataacgccgttaataattcagccgctgccgctgatactcggtcgacaaggagccttttcctcctaa

SEQ ID NO: 238293 - DNA, 122 bp, Homo sapiens
agggaattaagttctaccagttagatgtactttcatgagacatggatggcagaggtgggccggggccatcttccatcttttgactcttgctactgtcaagattgtcttggaggtgttaagat

SEQ ID NO: 238294 - DNA, 122 bp, Homo sapiens
gcccccctctcctcccatgcccttgcttaatcattactcttcttgggtctcccaacacaacgtgtaaatcttctcattgcctctccctgttaccctggaattcaagctccttctcttcccaa

SEQ ID NO: 238295 - DNA, 122 bp, Homo sapiens
ggaaagttcaaggttgggcatctgcatctgatgagggcctcaggctacttccactcactgcggaaggccaaggggaatcgtgtgtagaaatcacatggtgagggagaaagaaagagagagag

SEQ ID NO: 238296 - DNA, 122 bp, Homo sapiens
cgagttaatataactgaagtgcttagaacaggactggacacatggtaagcgctccaaaaacgttcatcgccatcgtagaggggaaagataacccagggagctgtggttcctgcctgtgaact

SEQ ID NO: 238297 - DNA, 122 bp, Homo sapiens
gtgcccagcccgccgccggggcccgtggagctgtgtgtgggtgactgttcagccgacttccgcacgcagtcggagcaggtctacagctttgtggtgcgtggctgccggccctaccccttcct

SEQ ID NO: 238298 - DNA, 122 bp, Homo sapiens
gacacgggtcccagatgtaggagataaggaagatgtggccacaatttgagaagatcctgtcgtattcctggacttggaaagagtagatggggatgtgattccagatgaggcagggcagagac

SEQ ID NO: 238299 - DNA, 122 bp, Homo sapiens
tgcgcgtaatcacgcacgtacgtacaccacgcacgtacgcaggaggcccgtattcagccacgcctatacaccgccaaatcgctaggaagccacgtattcacgaagccacgcagtgacgtcgc

SEQ ID NO: 238300 - DNA, 122 bp, Homo sapiens
ccctccaccgacgtcaggccgttgctcagggcgagaatctcgctgttctctgacctccaacgcgcaagtcagtggcgtcacatccggccccgtgacttccctgggttcacagcaggggtgga

SEQ ID NO: 238301 - DNA, 122 bp, Homo sapiens
cccgcgaccccgcgaccccggccggactgccgagcgcggggggagtcactgcgctggccccgcggcccagcccgaggactcggttattgaaagggtccccctcatgggacccgcctggccgc

SEQ ID NO: 238302 - DNA, 122 bp, Homo sapiens
attgcagataatatatatctaacatctagtaccaagttcctagcacagaatatttgctaacgaaattattgtttgtattcatgtgtgttcttaattcatgttagtttgataattgctaagta

SEQ ID NO: 238303 - DNA, 122 bp, Homo sapiens
aaactcttatcaggtggtaatatcaaaaaccaacatcaaaatgaaaaacgcccctaacatcgaaaacttttttccatacttcaacagtaagtatggaaaattattactttcggtaattgtat

SEQ ID NO: 238304 - DNA, 122 bp, Homo sapiens
agatgcggattccttgagggcagagtcacatctgacgcccctttcccatggggcacagcacgcatgcgcgatgggcactccgggtgcgtcagctgattacctgatttcatctgggcagatgt

SEQ ID NO: 238305 - DNA, 122 bp, Homo sapiens
ttcattttctgatagagacaaaggagacatgttttatccatggacccaaaactccggcgccggtcacggactgggaagacagccttcccttggtgtttaatcattgcagggacgcctctcta

SEQ ID NO: 238306 - DNA, 122 bp, Homo sapiens
attactgtagggggcttttgccttgtttcatttttttttttttttcctcccagaaagcggcgtggagcttttaacagcaagcaacttctgtatttggagaagtatcgtcctaaaatgcggct

SEQ ID NO: 238307 - DNA, 122 bp, Homo sapiens
gaaaaacatcattctcggagctccggaaaaacatcccctcggagctcccgctgtcagatccgggtctccagggctcatattcagtaacagaagccgcaccttcacggcccactgcgcaattc

SEQ ID NO: 238308 - DNA, 122 bp, Homo sapiens
ccattttgttgggccgaggctcaggcaggagaattggcgcgtcctccctctttctctttccgtcagccattggctacctcctccaaagcacagagtcttattggctacggaaattcaccttc

SEQ ID NO: 238309 - DNA, 122 bp, Homo sapiens
cttacggagcctgcacaggaacctcctgcacaacccgtgcgctgaaggtggggtacaggccgggtctggcatgcctccagtacacagtcatgacaccaggaacatgtattgagcacttagta

SEQ ID NO: 238310 - DNA, 122 bp, Homo sapiens
gcacacgtgtgatctcgtcttcagtgtgccgctcagttccctgaatccgtgtgcacactgcgtatgtgtacgcgcagcatgctatactgaactcaacaagatcttggctgtacataaatatt

SEQ ID NO: 238311 - DNA, 122 bp, Homo sapiens
cgcctcctggtcgcgcggcgctccctgggctcccagcagcagcggcggcggcggcgcctccgagacacagaccagggtttgttcaaaatcacgcgcccagccccattccaccgccgcatccc

SEQ ID NO: 238312 - DNA, 122 bp, Homo sapiens
taggccacaagtccctggaaggcctcagtgggctttctgagctaacagtcaccaaggagccggcatctcactccttcccccaccagcccagccctcactgcctgaccctcccctcgccctgc

SEQ ID NO: 238313 - DNA, 122 bp, Homo sapiens
gcgcagatcctgcaggggccagcggtccagggcggaccctccctcgccctgggcgcggggcgagcttctggctgtcacttgccgctgcagtttcagggaaactcagctggccgcttaccctg

SEQ ID NO: 238314 - DNA, 122 bp, Homo sapiens
tagttggaccacagaaaatggggaaggagggtaggttgtttagaagcctctggttgctaacggaaaccgaggcacgtggactgcaattatgcattttcattggtcctcaggatcacgcgaca

SEQ ID NO: 238315 - DNA, 122 bp, Homo sapiens
tgtaccacacatcattaacacaaaattaacatggtggtatgagctgggaaggttagctatcgcttcattttgcgcgtaaaacagaggcttagccctgggaaatggaagtttaaagcctcctg

SEQ ID NO: 238316 - DNA, 122 bp, Homo sapiens
gaacaggggtgagagaaaagaggcaaccgggaaaacccagcggtcgcctggaattctcgacggtgataactgaaagttctgaggtgataactgaaagttctgagccgcagagatgttcattt

SEQ ID NO: 238317 - DNA, 122 bp, Homo sapiens
ttttgtcacctgcagcaacacacacagttattgtcattcctgggttcagtactgtaagcccggacccatcttccccactccctttgcacccgagcttcccatttctctgccctgttcaggtc

SEQ ID NO: 238318 - DNA, 122 bp, Homo sapiens
acctcgtgattcacccgcctcggcctcccaaagtgctgggattacaggtgtgagccaccgcgcctggccaaaaatttttaattttaattttgaatgggtaataaagtcctatgatttgaaaa

SEQ ID NO: 238319 - DNA, 122 bp, Homo sapiens
gtagatcctggcccggcacactgagagcggcaggccccgccggaggggccagcgcaggaccggggagaatggagctcagccagtgcctagccctgggtttatttccagtttcctgctggaga

SEQ ID NO: 238320 - DNA, 122 bp, Homo sapiens
gcgcacccactcgagtgccgccctctttccccccattccgtgacgtcatccagccgctcgcgcgcctcgcgttagaatcactagctaggcagccttactgcgcgccggaagtttgggccacc

SEQ ID NO: 238321 - DNA, 122 bp, Homo sapiens
attaagactgcatgagactgcattctgcaccaagtgcacacgggagcacacatgtgcctgcgtgtgtacgcaaacacacacagagtgcatggagatctcaaccgatgaggctgggtgaacgc

SEQ ID NO: 238322 - DNA, 122 bp, Homo sapiens
acagataaatcttgatgcaaacgcctccctgttttctccacctagccgactatctctatccggagcagctgaaaatgactgttgtgaagctgatttcccaccgggagtgtcagcagccccac

SEQ ID NO: 238323 - DNA, 122 bp, Homo sapiens
ggaggtggccagcgctcccgccgctgccgcctcgcgcactctccagcgggtagaagtgcgcgccaggcaggttcactgagctcaccaagagctgctcccctaactgcatgctttgcaaagcg

SEQ ID NO: 238324 - DNA, 122 bp, Homo sapiens
gggcctgtgaagcaggctctgagttcccgaccttctctactggcaggcggtaagaggatccgtcggagttctggtgactgtgcagtgcattgctttgccatgggaagaggagctgtgtctcc

SEQ ID NO: 238325 - DNA, 122 bp, Homo sapiens
gtggggccaggggcttttaaacctcatcctaaggggcctcaggggcagtgttggggttggcggccacagctaagtccaacaccagcatgtcgctgcagagaatcgtgcgtgtgtccctggag

SEQ ID NO: 238326 - DNA, 122 bp, Homo sapiens
aaaatcctagatttcctatctgaaggcaccatgaagagaaagtccgcctcctctgggccgcgtcctcacgtcgctggtgaaccaagttctgttctccattggagaccaaatcagttgacttt

SEQ ID NO: 238327 - DNA, 122 bp, Homo sapiens
gccttgctggctcctcgcagggagctgggatgcatttctaagagcagcatgcgtgaagcccggggtctgggcaaaggagtgtttggggaagagtctgctgttgttggagggtcggaagtaga

SEQ ID NO: 238328 - DNA, 122 bp, Homo sapiens
aggaagtgaaaatgttagatcatggtaaacaaatactatctaggaacagtgaaggggcatcgtgccaactggattcctgagttgaaaatcatcctgctccaataattttcagactatcctca

SEQ ID NO: 238329 - DNA, 122 bp, Homo sapiens
gtggtgagggcggcacagttgggggccgggcagccagggtcccggcccccggggtggagacgagggtccttttccccagcctcccaccgcggctgccagcctggaaatcgggcaatggagcc

SEQ ID NO: 238330 - DNA, 122 bp, Homo sapiens
tttccatgctagtgtcccttcccttcttcacccgctccggcagcttggtggcctcgtgcccgggccccactcctgccaggacacgattccttccacgacagactcatttaatcattatagca

SEQ ID NO: 238331 - DNA, 122 bp, Homo sapiens
ggagacaccagggccagcaatggctctatttgttttcagtgtctgttgattaataggttgcggaggtgaatggcaagctttcattccctctaggttgcccacagttatagagccttgtgggg

SEQ ID NO: 238332 - DNA, 122 bp, Homo sapiens
actgaactctgacccccattcttccagcatgaattcaggctgcctaagggcgtggggccccgggccagcgggcccctgggggctgaggctctggcgtgcctctaggcaaaagtagctacact

SEQ ID NO: 238333 - DNA, 122 bp, Homo sapiens
gcatgctcacgatccaactgtacccacctgcccaggcatctctctctgcccctccccacccggcggcaccctcctgtagacacccactctgccagatctgcccccccaacactgcatacaca

SEQ ID NO: 238334 - DNA, 122 bp, Homo sapiens
acactgcgttgccgtatctggacagactggggcactcgatcatgagaggtgcttcgacgtcgtccctgcaaagtagtgcggttggggacgacctggttataatctgtcgtgctttgagatgc

SEQ ID NO: 238335 - DNA, 122 bp, Homo sapiens
ctacagaatggcgtgtttcggggttgtggcgggccgaggggcggggtcgcagcaaggccccgcctgtcccctcctgggcctctcaaagtctgagccccgctccgctgatgcctgtctgcaga

SEQ ID NO: 238336 - DNA, 122 bp, Homo sapiens
aaagggaatgggttggaggggaggggaggaaaggagaggagaggagagatgggtacttcacgccacaaccccctcaaccaagaccacctccgcaaccacagcgggaaaagctaggggcaggc

SEQ ID NO: 238337 - DNA, 122 bp, Homo sapiens
ccttccttggtcaggccatttatgtgaagaggattatgcccactgaaaatacttttggcacgccatcacttcagcaaaaaagatgctatcgaacatgcgcacatcccccaacagtctgcctc

SEQ ID NO: 238338 - DNA, 122 bp, Homo sapiens
actaaacactcacctcgcagtgctgaaagtcaagccttctttgagatacacataaagtatcgggcagatgttttccccagtcttgtccagtgggcaaatctggagttttaacttatgaagat

SEQ ID NO: 238339 - DNA, 122 bp, Homo sapiens
cagccctctcctcttttcccctgcccttgtgacttggggcaattttttcctaaacacagacgtgttttgtcatgttcctgaaattaaaaagcaggaggccaaagggatgtttattactgaac

SEQ ID NO: 238340 - DNA, 122 bp, Homo sapiens
gttacgtttttcacatttgaaaatcacctctttagcagtcagctaactaaatatataagacgtagaccatgctttcaaggagctttcaactgacttcactggggaagtaagacatgagcata

SEQ ID NO: 238341 - DNA, 122 bp, Homo sapiens
ggcgagtttgcccccgcagcgcagccgcccacaactcggtcttccagaggagcgaacgttcggactgcttggtagtttactagggcaaagtaccaccccaccccgagcgagcaagcggacct

SEQ ID NO: 238342 - DNA, 122 bp, Homo sapiens
gtgctttgagacagggaaaatctctcgccgcgtccagaacggaacgctgggcttggggtgcggggcggggactccaactcgcgcgctacgctactcgtgtctcctgctcggatagtgactgt

SEQ ID NO: 238343 - DNA, 122 bp, Homo sapiens
agaagaatggtcagagaagtgggaggaaaactgaataatgtttttatttttttttgtaagcgagaggagagagatttaagaaggtggtcaatttattggttcttctgtgttctcagtacaaa

SEQ ID NO: 238344 - DNA, 122 bp, Homo sapiens
gcggcgcagcgctgcggggccgggatgcggggcgggggaacctcggctcccgggaagccccgagcctgggggaaccctgggcaccctgtgaaccctgtggtctgcactggctgccctgctgc

SEQ ID NO: 238345 - DNA, 122 bp, Homo sapiens
agcttttacccagcacctgtccagtgaaacaacttgataatcgtttcgaggggcgtccgccgggttaggaagccactgcctggcagcttgtggaagcctcatttgcaaagccacccctcaga

SEQ ID NO: 238346 - DNA, 122 bp, Homo sapiens
ccctcacctcgaaatccttatcttgatgggatctgcaaaggcccttttgacaaataatgccgcactcaatggccccaggggctaggatgtggctctatcttttgggggccatggttgtaccc

SEQ ID NO: 238347 - DNA, 122 bp, Homo sapiens
ttggagctggccttgggctgctgaggctgtgccctggaactctgggtctgcttcttaagacgctgaatgtatggagtcttggagggagaagatctacacccagcatattaatgctgaccaaa

SEQ ID NO: 238348 - DNA, 122 bp, Homo sapiens
actttgcctccgctccgccgtttccatggctccggtttcctactttcctcttgtctcctccgtcctcagcctgttctgtaatgtgggatttactagaagagcagggctggtgttcgaggagg

SEQ ID NO: 238349 - DNA, 122 bp, Homo sapiens
tgtccctgacagagtaacacgggctcaatggaaacctccagagtgtagatgaccatctctcggcaacgttgtgggtaagattaaacttgttggtggctaaggcttccaacactgagtctgta

SEQ ID NO: 238350 - DNA, 122 bp, Homo sapiens
atcgctggcgaaggtcactacaggacagccgcggaccggttgattgctcggggcggccctcgccccgtcggcgactccatcggcaacttcgccgcgctctgatttatgatgggaagaaaatg

SEQ ID NO: 238351 - DNA, 122 bp, Homo sapiens
aggggagctgcgggaggagggggacatcccttcttcaacccccgcctccaacaccgatcccgggagtcagctcctgaccccacccccatgccctgtgaggagggggttcctgcttccaggtc

SEQ ID NO: 238352 - DNA, 122 bp, Homo sapiens
ccttgttttgtcaaaattcaaatttgaaccaattctgcaggctgcattttgtgatttccccgtgctgtgctctcccaggaagggcaaatgtcaagcaacgagacacacagtcagtcaccagt

SEQ ID NO: 238353 - DNA, 122 bp, Homo sapiens
tgccccttcttttcaacacattgtagtccatgtcaatagtcttgtttgacttcaaacacacgaatatgcatgttttcaaaggaaaagaggtgcccactaggcacatttatcatgggcaggtc

SEQ ID NO: 238354 - DNA, 122 bp, Homo sapiens
tcccacattggcatcatcctggttttctacatccctgccttcttctccttcctcacccaccgctttggtcaccacgaagtccccaagcatgtgcacatctttctggctaatctctatgtgct

SEQ ID NO: 238355 - DNA, 122 bp, Homo sapiens
cgctcccttctgagccgagcagattggtggaaggtctgccgctctcggccaatgggtgagcggcaagccaagcgaggggcgggccccttgctgttcaaagtgtggtctgtttaccagcaaca

SEQ ID NO: 238356 - DNA, 122 bp, Homo sapiens
tggagctaagcaactggcctttgtttgtgaattggagcagtttaggggacatcctccggtcgccgcggggcgcgcgcctccgctgagtgtgcggtgcggtacccagcggtgcgggggaggct

SEQ ID NO: 238357 - DNA, 122 bp, Homo sapiens
cgacggggtcttctcacgggtttcattcagttggccactgctgagcagctgagaaggtggcgacgtaggggccatggggctgggccgggtcctgctgtttctggccgtcgccttcccttttg

SEQ ID NO: 238358 - DNA, 122 bp, Homo sapiens
gggtgggaagaggacagcccggcactggctgctggcccaggtgctgtgatgggtttcgtgcgcagagaggcctgacagcctctgcatcagtgaccgggcgaagagtggggcagctcggacgg

SEQ ID NO: 238359 - DNA, 122 bp, Homo sapiens
acagagagagagagaaagcagccgggttgggcaagccgtcgacagtctgcgacatttttgcgcttcctgggagggaattcctccaagaagaggggtaaatgagaggcccacacgctggatgg

SEQ ID NO: 238360 - DNA, 122 bp, Homo sapiens
gatggggttttgccatattgaccaggctggtctcgaactcctgacctcaagtgatccacccgtctcggcctcccagaaagtgctgtcattacaggtgtgagccaccacccctggccaacgat

SEQ ID NO: 238361 - DNA, 122 bp, Homo sapiens
gtgttcacggacagtaaaaagtgcctgctgggaccgagccatcgaaagccagacagaaggcgatgactcaccttgcctctctctgaaccacttatttcacaaaaatagacttgtgacatggg

SEQ ID NO: 238362 - DNA, 122 bp, Homo sapiens
tggcttttcagaagaagggtctgttctcggccccacaccagaacgccagccgccaggtcccgctgctcagcaggtctcaagcccgcgctcactcgggctccggctgctgacagctgcgagcc

SEQ ID NO: 238363 - DNA, 122 bp, Homo sapiens
gccgtcggcgggatggggggccggaggccggaggcccgcgccgccgcccgcccctgaccccgcctcccacccccgcagctgcaagcagaaccaggacctgctgtctttctacgccgtggtca

SEQ ID NO: 238364 - DNA, 122 bp, Homo sapiens
aaagtaagtcgggggaagcaaccaagattggccaggtgcctctgctgtgggctcctggcacgaaagggtgaagtccgtctgagtccaccgaccaatggtgacgcgcagcgccttcgcggcgc

SEQ ID NO: 238365 - DNA, 122 bp, Homo sapiens
gggtctcggatgacgatctcccgggtcaccgggttcacccggtggtactggtagtagctccgcactgaagccaccacagtcagagcgatcacctgaaggccacgcggagaagctgggctgca

SEQ ID NO: 238366 - DNA, 122 bp, Homo sapiens
ccgtgaagtattccgagttgatgatctcccaaatggtcaccgtcttgccctggaacttgccgaacggcgcagacacggtggccttctcaaagacgtcccgggcctcggagtcagtgtagacc

SEQ ID NO: 238367 - DNA, 122 bp, Homo sapiens
tggaaggcgggataatgcttccgcctcaggatgtccacatcctactccctggaacctgtgcgtttgttctcttgcttggcagagggggttaagattgcagatggaattaaggttgcttatca

SEQ ID NO: 238368 - DNA, 122 bp, Homo sapiens
ggattctagaggtgaacactttccatctgctttctcaggaagccctttggaagaaaaacacgatcaatgcaaatgtgaaaaccttataatgttccagaaccttgcaaacgaagaagtaagaa

SEQ ID NO: 238369 - DNA, 122 bp, Homo sapiens
cacatattttacaaagtctttcggtaatacagacagagccaaagcagggctcagcacacacgtgaaattgttagtcatgtatccagacccagctgacagtaaggattgtcatcatttcacat

SEQ ID NO: 238370 - DNA, 122 bp, Homo sapiens
gactccgcggggtacagggtggcagggcgcgggtgagggtgacccgggccgggcacggcgcgcagggcctgtccctccagcctcgcatgggcggcccccgccggcccggcctggccccttgt

SEQ ID NO: 238371 - DNA, 122 bp, Homo sapiens
ggggctttaacctggagcctgggtatccttagattatccgtcagtgagattcaaggagtccgtgcactccctggaatgttatgcacagtgctgtagttttgtgcatttggggggtgtaaggg

SEQ ID NO: 238372 - DNA, 122 bp, Homo sapiens
atctcctgcgtgtggtgctccttgttgttcctggagctctgcaggtcgacagactcaagccgcaaggttgccactaggggagaggaggggacaggtcacgcccacctgcagtcccctgggct

SEQ ID NO: 238373 - DNA, 122 bp, Homo sapiens
ggatgaatcagtgaagaccacggttttctccctggccccaacaggctattcctttgaaggcgtttgttaattctgggtagtgaatacacacctgtttgttatagtattctttgtcctcttct

SEQ ID NO: 238374 - DNA, 122 bp, Homo sapiens
caggaggctgggcgagtccgtagcggaagtcggagcggcagagcagtgattgggtgcggccggcaccgtctctgggcttcgacttccgggtgagaccgtgaaggtgtggcgcgacgttggag

SEQ ID NO: 238375 - DNA, 122 bp, Homo sapiens
gtgtctcgagtcggaagcgctcggagcgaggggcggggtgggagagctggcgcgcgcacgcgtaaagtctttgcagcctcgctacggggcggagtcttgcctgtcagcaggggcagagtagc

SEQ ID NO: 238376 - DNA, 122 bp, Homo sapiens
aggttggaaaccagtgccccaggcggcgaggagagcggtgccttgcagggatgctgcgggcgggagcaccaaccggggacttaccccgggcgggagaagtccacaccggggtaatgggtctg

SEQ ID NO: 238377 - DNA, 122 bp, Homo sapiens
ggtgcccagggcacagagctctcagctactagctccgcagggatcgggacactggacacacgttcctctcctctgcactggctgtttgtcttgttttcctcttcctcctccttgggctgatc

SEQ ID NO: 238378 - DNA, 122 bp, Homo sapiens
gcgcggggaccacactcacaaaccgcattccggtcttcccgcccgaaaatccgcgctgtgcgagggacccacaagactggcggtctaaaagggacccgcctcacttggaaacggggctgcgg

SEQ ID NO: 238379 - DNA, 122 bp, Homo sapiens
tttcccagagcccggattcgtgaagcagttgagtgctgcagcggcagtcgtcgcccctgccgccgctgccaccgaaggaagcatcccagacaccgggaaggtaaaggggctcagctaggaag

SEQ ID NO: 238380 - DNA, 122 bp, Homo sapiens
ggttgggagtagtagtagccagtgacaggaaagtctcactgagcgccgccatcactaccacgcgcctcagaatacacgcgcacaaacgcccccagcgcctctggccgcgggctcgcaggtgc

SEQ ID NO: 238381 - DNA, 122 bp, Homo sapiens
atgtttatgattgctgcaacgctttaagttactctaagttttggtcaacatagtttcccacgccacatttctccaagcaagggaaacctggaaatgcaggtttaatgactcattcaggagat

SEQ ID NO: 238382 - DNA, 122 bp, Homo sapiens
ctccgccagaacaaagtgaagtttaaaatagaaaccaattacctgggctccgccgcgcctcggcccccggagcccggtccacgccgccgcgcggacccccgcctgccccggcccggagcccc

SEQ ID NO: 238383 - DNA, 122 bp, Homo sapiens
cgcgcaggggggcggcggcctcgcctcgtctctctctctgcgcctgggtcgggtgggtgacgccgagagccagagagatgtcggatttcgacagtaacccgtttgccgacccggatctcaac

SEQ ID NO: 238384 - DNA, 122 bp, Homo sapiens
gccaaacagatgtgtttacagccccaaagtgccaagccctggagtctcacatgaagaaaacgaaaggaaaatacagtcatgggctacataaagatgttttgggcaacaacagaccacctata

SEQ ID NO: 238385 - DNA, 122 bp, Homo sapiens
ggctgcggctccccgctaaggctcctgcggccggcgcctcctggacccacccacccacctcggaagacagacgcctctcttcagctgtaccggccccaggctccgccaaactccctcctcgc

SEQ ID NO: 238386 - DNA, 122 bp, Homo sapiens
gctcacaaggggctggctgccaaaatccttctttggctgtaaccagatcctcccctgtcacgaaagcccccgcagaggcctcggctccgggctcggcccccgccagggctcgcaaaaaaaaa

SEQ ID NO: 238387 - DNA, 122 bp, Homo sapiens
tagaaaataagtgataatgcccaatagcgtcaaatgactaaagcttgagttagatgagtccggaaatacctccaatgagtttggcaacaaggacacttatgacaacaaggcattttccatgg

SEQ ID NO: 238388 - DNA, 122 bp, Homo sapiens
tactcgcccctcccttgggtaatccctcacgccctccctccgggcacctctgtgaagacacgtggaagacctgcccctggcgtcacaaccgctcgagatgaaaaagccaagccagggcgcgg

SEQ ID NO: 238389 - DNA, 122 bp, Homo sapiens
gcctaatggggcggggctgaccgcggagccggcctctccagccacctggcggcccggcagcgtcagccaggtgcgcgcccggccccacatcctctgggtcacgcccccgaggccgcaaggcg

SEQ ID NO: 238390 - DNA, 122 bp, Homo sapiens
caagtttgagtcttagaaaaaaaaaaaagataacccgtcctttgcttcactggcgaggtgcggactgatgtagtcaaagtttgggttcttatcctccgcaagttcagatctgccgcctcagc

SEQ ID NO: 238391 - DNA, 122 bp, Homo sapiens
acacacacacgcacacggcgcagacccagcaggagagcgcaacctagcatctttaaggttcgcttagcccttcctgtgcacctggaaggaagccttatcttaaactcccttccacctagagt

SEQ ID NO: 238392 - DNA, 122 bp, Homo sapiens
acccagtaaaatcacttaccagtcttccacctccggtgctgatctagcaagagcctgacccgctggccagactcaagctctgcaccaggtattaccaccctggcgacggctccggagcgtca

SEQ ID NO: 238393 - DNA, 122 bp, Homo sapiens
aaattagatgagccccagggttttccacctgctccgacactagtgtccgtggctgaggagcggccagagggttgagaaggaaatggggtctgaactggatgaggggcgcttgcttgctccgt

SEQ ID NO: 238394 - DNA, 122 bp, Homo sapiens
gtgccagaaatggagccggacctggcgacttttactgcccctcaggcgcggggcggcggtcgtcaactacagttcccatcatgccacgatccgcctggagtaattctccacgcctagtgaga

SEQ ID NO: 238395 - DNA, 122 bp, Homo sapiens
aatgaagcctttgaagtgccagtctatgaagaggccgtggtgggactagaatcccagtgccgcccccaagagttggaccaaccacccccctacagcactgttgtgatacccccagcacctga

SEQ ID NO: 238396 - DNA, 122 bp, Homo sapiens
gcgaaattcctactcaaaaaaaaaaaaaaaaaaaaaaaaattcttaaactactacttatccggagaaaaacaaggtattttaagactgggaagggaaagaatcttccttcaatggttttgga

SEQ ID NO: 238397 - DNA, 122 bp, Homo sapiens
ggtcccgcgggcgcgcagggactggggaggctccgagggagcaagacatttaaacccgggcggtgggggggcgggcggtgtcagacgcccaacgaccacctccctcccggcccgcgccgagc

SEQ ID NO: 238398 - DNA, 122 bp, Homo sapiens
tcattgttcttggtttgtgagtacagtaaacattctccaagtggcagcaggagagaaccacggtgctttcgtaacaagctgagatttacaggcttgtaagagctggggttataaatcaggct

SEQ ID NO: 238399 - DNA, 122 bp, Homo sapiens
actcagacaggcaggaagctgaaggcaaaggaactctctatctgattggtttccattcagcgtttctgattaataagagacgtccctcaaataggaagatattgccgctgatggcgctgcag

SEQ ID NO: 238400 - DNA, 122 bp, Homo sapiens
cgcctccgccggggccgagccgctgttcggctgacagttgaggatggccggagccgagggcgccgctgggcggcagtcggagctggagcccgtggtatcgttggtcgacgtccttgaggagg

SEQ ID NO: 238401 - DNA, 122 bp, Homo sapiens
gacgccgggccggccccctctgactcagcagcatgggcggcccctcccacccacagccgacggggcccttgtagagtggggggcacctcaagaggcagcggccacccccacagctgcccctt

SEQ ID NO: 238402 - DNA, 122 bp, Homo sapiens
ctgattggccaagaaaggcctcctaggccctcactagaggatatgaactcccctccttggcgtagcgacgggaaggggtggctctggggtggacaagcagcgggctggggagaggcggctac

SEQ ID NO: 238403 - DNA, 122 bp, Homo sapiens
tgcgttttcttcctttgctgcttaccaaagcagtctaggcttggactccaagaatcaagacgtcagaggtatactttggttcatgagcatcttgataagactcttgcctgtcatcctgttac

SEQ ID NO: 238404 - DNA, 122 bp, Homo sapiens
aggagaggagttggcttgggaaggggctaggtgagccgtaccaggatgaggtaccgggagcggtactgcacggtgccaaagatgcccaggatgactgccatgatgtgcaggaagttggctag

SEQ ID NO: 238405 - DNA, 122 bp, Homo sapiens
tgagctacatcccctggcacaagtcggttgtaacggagaattcctgtcatgttaaaaacgcgaagcattttatattacctcgtgctcgaccagggagtgaccaactctgaggatgaattcca

SEQ ID NO: 238406 - DNA, 122 bp, Homo sapiens
tggagaataggaatcatgtgtgttcctcgagtgtacaacccacatttgagtgacaaatcacgaggacaatcgacaaaaacaactaagcgcaaagccgcccgaatccatctccctctctgtgc

SEQ ID NO: 238407 - DNA, 122 bp, Homo sapiens
gccttgaactattcactgtcgagatggctaatcagtattgaggccggagggcaggcgggccgcctttcaccgccgcttccctttcatctcgggctcggcggaggcgctcaattaaaagccta

SEQ ID NO: 238408 - DNA, 122 bp, Homo sapiens
ctgccgtgcctttgctgctgccgcagtagattttcagctcatttctttctgctgctgcttcgcgctgctctgtcatgcctaaatctatctcgtcactgccaaaggtgcctgaatcagggtga

SEQ ID NO: 238409 - DNA, 122 bp, Homo sapiens
tatacggctgcgtgcccttcagggacgtcaggtcaactgccgcagagcgggcgatgaaggcggtgacgtaaagaacggtggcactgacgttaaacatcattaacactagtggccagggcacc

SEQ ID NO: 238410 - DNA, 122 bp, Homo sapiens
cgaactcctgacctcaggtgatccacccgccttggcctcccaaagtgctgggattacaagcgtgagcccctgcgcccggactaaactgggaactctttaaggcaggtcttattcatcctttt

SEQ ID NO: 238411 - DNA, 122 bp, Homo sapiens
aattccagcttctctaagtctttgctatcacttgccattgtcctttttattttatcctggcggccgtcacaggcttcctctgatggagacctgtctgccggcgatttggtagttctgaatcc

SEQ ID NO: 238412 - DNA, 122 bp, Homo sapiens
atattaaacctgagggaggtattattaatgtctactgtaaaaataaattacctgagacatcgaggaagtatttgtctaattatctatggcaggtaaatgacaaggagaaaagtcccacccag

SEQ ID NO: 238413 - DNA, 122 bp, Homo sapiens
tgtacaaactataaacacttactgattgtccacattatctgcctggagtatgctcagtaccgcacaaaaatgcatttgaactacttttattgagagcaaacactgatgatctacggttttct

SEQ ID NO: 238414 - DNA, 122 bp, Homo sapiens
catggtgacgccgtttccacttgaggcctggtctcagaccacgaactacaaggaaaaccacgacgaccactaccccggcctaagcggtcagctttctcctcctcctctgcgcgccggactca

SEQ ID NO: 238415 - DNA, 122 bp, Homo sapiens
gattcccttcttttgagacagctcttgggttcgcagttgcaggcgggaaacctcttcagtcggatgtacacaaatctctctggataacacagagggctgctgcgaggggaccttggagctgg

SEQ ID NO: 238416 - DNA, 122 bp, Homo sapiens
ctgattcaccacgtccatgtccgccagcagcagcatcagcaatgcagggggcgggaggctcggctagcaagggcggcgcggggcgcggcgggggcggcgcgcgctcgttggaacagcccagg

SEQ ID NO: 238417 - DNA, 122 bp, Homo sapiens
cttaagcaaaaaggactgtgtgattgacatgggacttgtgtatcaatacttgcacgcatgcgtgtatgcacacacaaacacacatacacacacaagccggacatttgcctttatgctgaggt

SEQ ID NO: 238418 - DNA, 122 bp, Homo sapiens
agggctgcctgcacccgactcagcagaggctcgtaaggccccagcacctccaccagggcccgctgcgccgcctcaacctgctggtcccgctcccaggagcctgacacatctcggcggcccct

SEQ ID NO: 238419 - DNA, 122 bp, Homo sapiens
ttctgtgtctgtttcccttccgtgtgcacctcaaaggctcgactacatcttactcatcttcgtaccctccagatttcatcttgcccagtcaaatctatccacagtatatcttttaacattgt

SEQ ID NO: 238420 - DNA, 122 bp, Homo sapiens
agtccaagaagccgagagctggggctcaggcgggaccgggacaccggcatcccgcacacgcgccacacacactgcacatgtgcgacgggcatccacgcacgctgcacaccggcacactcaca

SEQ ID NO: 238421 - DNA, 122 bp, Homo sapiens
catgtaacagttgtgtcataaattacacaataaagcagtcctgttcaaatttttttttaacgtggcttgtagaatttttaaaaaagtgatcttaggtttgttttttcatgcgggatgcagat

SEQ ID NO: 238422 - DNA, 122 bp, Homo sapiens
tgaaccccagtggttccctgacaggcaggtggaggtgaatgtgagggaggcccacaggaccgcaaaagcagctggtgctgtgagttcaccagtaagtgactttcctgtgatttccccgctta

SEQ ID NO: 238423 - DNA, 122 bp, Homo sapiens
gctgaagtatttgcaccaagaacagtgtattgatggcagtaaaagaccagcgggggtgaacggaaaatatgttctttgaaaattcgggatgcagtataggaaagttgctgatccaccgaatt

SEQ ID NO: 238424 - DNA, 122 bp, Homo sapiens
gaagttgtagtcatgagggaagtaatctgtaaacactgtcaccgcgctaaatctcctcggcgtcacatcccgagcctctgtctcgctcttcttctggcctcggcctgttcggctgcctgcca

SEQ ID NO: 238425 - DNA, 122 bp, Homo sapiens
tcttcctgaaatggagagcaaagacaactcggtcaggaccaggaagaatcctgggcaagtcgagagtcacaacccagacgacaaacctgatacaaatacagccttgtctctctgccctgcta

SEQ ID NO: 238426 - DNA, 122 bp, Homo sapiens
tattacaatttatttttatgaaaaaagattaaaaagagatatgtctgctctaagcagttacgtgaaaatggataaatacaaaagcaagcacaagagtattcagtagagaattctgagcctga

SEQ ID NO: 238427 - DNA, 122 bp, Homo sapiens
caagatgggcatgtgggccgggatgctgctgtaccccaggattcacactggcctcgcggccgtgcagaaaagcaagacagtggatctgagctccatccccgcagtctgcactggccccttca

SEQ ID NO: 238428 - DNA, 122 bp, Homo sapiens
aacgcgcgtgcagcatgcgcgtgcaagccattacaggccagccaagccattacgcacgtgcggcatgcgcgtgcaagcagttacaggccagccaaaccgttatacgcgtgcggcgtgcgcgc

SEQ ID NO: 238429 - DNA, 122 bp, Homo sapiens
gtgtcagtaacatctaagattttcattttgtcctggggctctacgcagtttaactggagccgccacagctgattgggtgtgtgttgtcagtcccccaggcaagctctgagggttacatttct

SEQ ID NO: 238430 - DNA, 122 bp, Homo sapiens
ccacccaagtgtgacattacagagccccgtcgactggggggacccggacggcctggaagccgcactcattggctctcgcgtccgcccttcattatggggcgccttcccggctctctgaagat

SEQ ID NO: 238431 - DNA, 122 bp, Homo sapiens
gggttagtgtcctcctttcagcaaaaattcttagtctctttacttttatagaccccgttacgttactatttcctttgtaatcttatcccaccgcccagttcttttctttcccttctccctct

SEQ ID NO: 238432 - DNA, 122 bp, Homo sapiens
tggccaccccgtcccaagagctcactgaatgtcctgcttgtcatactcctcgggggtgaacgtgagaggcaggcaggcctgtatgttgctgtcctgggagcagggcacaggaagagaagtga

SEQ ID NO: 238433 - DNA, 122 bp, Homo sapiens
tgcttcaagagtcaactaaaggccaggtgtggtggctcacacctgtaatcgcagtactttcggatgccaaggcaggaggattgcttgagaccaggagtttgagaccagcctgggcaacatag

SEQ ID NO: 238434 - DNA, 122 bp, Homo sapiens
ttagtccaaggactttttccagtgacttgcgtgggaaggactagtccagctgcccaagcgcggggtgtggtgggtgaggcaaggatttgggatcctgatcccaagggtcgcagggagcggcc

SEQ ID NO: 238435 - DNA, 122 bp, Homo sapiens
tcctgctatgttgggagtaatagcattgtcttcttccgtgaatattaggagcaaaatcaccgggtggatgcacacccagtgctatattggcagtaacatcatactccagcccctggagatta

SEQ ID NO: 238436 - DNA, 122 bp, Homo sapiens
tactatggtaaatgtcaatagttttttatttttgatggccctgtgtgctttaaggaaaaccgagggaagtggtaactgtgcctttgtcaatccagtttacgggaactggagcaacccagaga

SEQ ID NO: 238437 - DNA, 122 bp, Homo sapiens
cggcttggacggggtcggcggcgcggccccctccgctttcgcctccccgggccgcggctccggaaccctgagcatcccggcggccccgccttggcctgaatgcacccgcccggcccgcaccg

SEQ ID NO: 238438 - DNA, 122 bp, Homo sapiens
cctccttttacagatgagaagatcaaggctcagagagataaagaaacattcccaaggtcacgatatgaggattcaaacccaagtttgttgacacaaaggtccatgctctccatgccagaacc

SEQ ID NO: 238439 - DNA, 122 bp, Homo sapiens
cctggacaacaagagcaaaactccatctcaaaagaaacaaacaaacaaaaattaggcaggcgtcgtggcatgcacctacccaggaggctgagatgggagcaaagttgagcccggaaggttgg

SEQ ID NO: 238440 - DNA, 122 bp, Homo sapiens
agacactcattcctatcgtgtctaacttgccaggctgtggtgaggtcacatggctctgtgcgtaaaaggtacacagtgcaaacgtgctggaatgtcagggatgctattaaggaagcaataag

SEQ ID NO: 238441 - DNA, 122 bp, Homo sapiens
catccactgacatttcttcccccggccccaccaccaccttgtctctattcctcttcgctgcggttcatttctcccagggccccatgcacttgtcctcggaccctcgggcggaaactgggcca

SEQ ID NO: 238442 - DNA, 122 bp, Homo sapiens
atgccctcaagtcctggctggccaagttactggagccgatgtgagtgagccgggctgggccggggccggcgaacgtgggcgttgggggctcgcgggggcgtgggggaggggaggtggcgtgg

SEQ ID NO: 238443 - DNA, 122 bp, Homo sapiens
ttgaagggccttttgcaatttccgctttcctaaaacagaacatccttcttcctcagctaccgctaacctttatttagaacagaataaatcactggactcaaaatttatgttatacactaaag

SEQ ID NO: 238444 - DNA, 122 bp, Homo sapiens
cacaccagtggtttcatcagaggggaactcactactcaggaggtgacggtgacgtggtgccggtccctgaagtacgcgcacaagctccggaggttgcgggagctgagggaggaaacagggac

SEQ ID NO: 238445 - DNA, 122 bp, Homo sapiens
tatggaggagaagacaggcttgaacacacaggaagtagcagactcaggagaacatagttccgtgacttaacctattgctgttgtgggccacatagtcctggcccattgggtctcagtgtctg

SEQ ID NO: 238446 - DNA, 122 bp, Homo sapiens
gttaaaatgtaacttgccatcctaaaacgagccgagctgtaagataagctatctttttaacgttatcgttcatccgatctaagacacctgagctggctggagtacggggagggctaagggct

SEQ ID NO: 238447 - DNA, 122 bp, Homo sapiens
gaccgcctataacatcatcggcgagagcccagccagcgcgcccgtggaggtctttgtcggcgaggctggtaagctccgtgcacccccaaccccactgccagagagggccacagtggtgggga

SEQ ID NO: 238448 - DNA, 122 bp, Homo sapiens
ggagaaccaaggccaggaggcagaaggaggtggcagacccggcccggcggcggcccagcacgcgcaggccacccagagtggaggtgggaaacggcattacgcccctttcccttttcctggtc

SEQ ID NO: 238449 - DNA, 122 bp, Homo sapiens
aaaactagtgaggagaaaactttctctaaaatggccatagtaggtctattttaaagtcaacgataactttaaaatcatctatgttacccctaaaaactgctttagctacattcattgaagta

SEQ ID NO: 238450 - DNA, 122 bp, Homo sapiens
acttatatgaattcatttagccctcacaacgaacctagaggtaaaaaccgtgctaaaagtcgtgatttgagcccagagcaatgtgggtccacagtccctgctcactgttttagaatggaaca

SEQ ID NO: 238451 - DNA, 122 bp, Homo sapiens
acctcctctccagtggtacctcaatggtccggtgcagagggtccacgatctgccagatggcgagagtgaggacatccatgcccaccagcaggcccactgtggcatacagcttccagggttcc

SEQ ID NO: 238452 - DNA, 122 bp, Homo sapiens
atgagccacgtgacagacctcccctgactggctgacagtgaagcataattgagaagatggcggaccagcaaggacctcatcagaataggtctgtacacagagcggcatagagagtgcaggag

SEQ ID NO: 238453 - DNA, 122 bp, Homo sapiens
tgcagtggcacaggctatggcagcatttctaacgcccattctgagcaagaacgcagggcacgtgggcccaaaccacctccctcccaggggagccagtgtgaaccagggtttacagtgaggac

SEQ ID NO: 238454 - DNA, 122 bp, Homo sapiens
tcccccaaccccacctccacaggggaacctggaatcggggctctcgctggcacacggccccggcctctgctggctccgcttggtcccactggcctgcaacaccgacaccttcccctctgtca

SEQ ID NO: 238455 - DNA, 122 bp, Homo sapiens
cgcctcgccctaccccaggagcctgcctccccagctggggatgaggctaggaggcggccgcgtggggcccagcacaaagacctgtccccaggggccgccgcctccgccgctgctgctgccgc

SEQ ID NO: 238456 - DNA, 122 bp, Homo sapiens
acatggagcaaattaaaataggatgtgggagaggaggaacctgacactcagggattagcacggtccccttcttagtgggtgagaaatttaggaagtcagaaagctgctcactccattccact

SEQ ID NO: 238457 - DNA, 122 bp, Homo sapiens
gcacattcagattcaaggggaggggaaataagacttcaattcattagtgagtagtggccacgccacactgtaggagatattgttgtagccgtctttggaaaatgcaatttgccacaccaaag

SEQ ID NO: 238458 - DNA, 122 bp, Homo sapiens
gtcacaggcgcataaggaccaatgagcgaaggcatcgcgagccagggggcgcggagaaggcggggaatcatggccgcccccagtgttccgcgtccgggggtttgtgggagttgccttgacct

SEQ ID NO: 238459 - DNA, 122 bp, Homo sapiens
gcgcgagcaggaagcagggctgcgtgccgcgcttgcgagtcagctggagttccgggtgggcgtgggcttggcgggccccacactcagagcagccggccagccctgctggccccgggcaatga

SEQ ID NO: 238460 - DNA, 122 bp, Homo sapiens
cttacagcagcggttcttagacttttggccttaggacttatttacaagactcttaaaaaccgttgaggagcacaaagaccatttgctttttgtgggttttctctcatttttaatgttttttt

SEQ ID NO: 238461 - DNA, 122 bp, Homo sapiens
cctattaagtgtagggtgctgtggagacacctctctcagacttgaaaggaccagaagtggcgtgaggtgagatccaagctaagccccgaagcagggataagagttccaccggaaggaaacag

SEQ ID NO: 238462 - DNA, 122 bp, Homo sapiens
cgacaggctaaacctccgcccaggggcttcccgatgtcggctgcagcgggtctgggttttcggcctgcagagctcgcgtctgacggctgaggaacaaaacaccctccctctagcggctcaag

SEQ ID NO: 238463 - DNA, 122 bp, Homo sapiens
attctggagaaaagaataatatgggtttgagaagggttggggtctgtggctatgcaatttcgaacgaagtgtaatggaaccaggaaagctgggcttagacaaagaaatattttagaagttga

SEQ ID NO: 238464 - DNA, 122 bp, Homo sapiens
ccctaatccagaagggcgctcccagctgggcgccgggatccgggcaagttaggctggtcccgagtcccgaatctcccaccccggaccccccagacccagagctgccccgcggatgaggaggg

SEQ ID NO: 238465 - DNA, 122 bp, Homo sapiens
gggcgtgcgacacagcgtcagaaagcggacggaagctgggggtgagcaggactcgggtgccgtgagtgtcttggtgaccactgtgagccggcgaggtccactgggccagaccctggcccgag

SEQ ID NO: 238466 - DNA, 122 bp, Homo sapiens
gtctaggaatcctgtgctgcttccaaccctctgaaaagaaagagcgtggtcacgtttttgcgccacagtagatattaaacaagtagatattaatccaaaaatgagaaaagtagaacatgaga

SEQ ID NO: 238467 - DNA, 122 bp, Homo sapiens
cgaccagtgcgggtcacagcacaggcgacagaagctatggcagaggcacctgaaccctctcggaggggaaagccaggctcccaacctcagctcgccgcctggagccgggaaccgaggagagc

SEQ ID NO: 238468 - DNA, 122 bp, Homo sapiens
ccagccaggcccaaggtctatgggctcaaagctctttgaccttgagcagagactccctctcggacactgagtcccagcataaggctacagagcaggctggaaacaggagctggggcagattg

SEQ ID NO: 238469 - DNA, 122 bp, Homo sapiens
gccctcctccaccgcagccacgatggaggcaaagttgtcatctgacagcaccatctctgccgccgacttggccacggccgtgcctgagcccatggcgatgccgatctctgctttcttcaggg

SEQ ID NO: 238470 - DNA, 122 bp, Homo sapiens
gtagcacaggaatgcgttctggggcttcaagaagctgctgtttttgaaaatgagtcctaccgaggcaagatggcaggtgctgcagccaggaaaatacatttccgtgtgttttaatatttatt

SEQ ID NO: 238471 - DNA, 122 bp, Homo sapiens
ctgaatttctcgccaggccttagctgccttcccgcggggcagggctcaggacctgcagcccgccatgcctgagcctacccccgctccgcctccgtggactcctgtgcggcccaagcctcccg

SEQ ID NO: 238472 - DNA, 122 bp, Homo sapiens
ctgaatgtgcacatctcggagatgtgaaagaaagcagagtacagagaaagcccacggagtcgtgagagcacacaaactccacacaggcagtgggtgcagaagggaatcaactttttatcatc

SEQ ID NO: 238473 - DNA, 122 bp, Homo sapiens
ccacccccctgctgagggggcctccaggcaggacgagactcctcgggcaagggccgtgcccgcccacctctgctgcccacggccacccacccttctcccctgccccgtcccctgggccaccc

SEQ ID NO: 238474 - DNA, 122 bp, Homo sapiens
ttaccaaggtatgcatgtgttgtcaggcattgctgtcctggctccaggcggcaggactgccggtccacacagcccagcacagggaccttgtagcaggagtgacagcgaatgtcagctgggaa

SEQ ID NO: 238475 - DNA, 122 bp, Homo sapiens
catcacgacctcttcagagacatcttcatcatcctccaagaaacaagcagcgtccatggccgtcgtcatcccagaagctgccctcaaggaggggctgagtggtgatgccctcagcagcccca

SEQ ID NO: 238476 - DNA, 122 bp, Homo sapiens
tttggccggtcccccacggtgggctccttccctctggggattgagggactcaagacaccccgcgcctgcgcttttcttttctttttttctttttttttttttgagacggagtttcgctcagt

SEQ ID NO: 238477 - DNA, 122 bp, Homo sapiens
gtactctgtgttcaccctaagacagttctcatctttattgtgattgtctatttccttggtcgtctctactgccagattatatcttgagtgttagatattagatttcacacatctttatatta

SEQ ID NO: 238478 - DNA, 122 bp, Homo sapiens
ttctctggaccacaacccttggccccagcagttctttccgagatatttcctctagtgtctcggtcttggtggcctcactgtggttagagaagcagccttgaataaagtgtgtgctttattca

SEQ ID NO: 238479 - DNA, 122 bp, Homo sapiens
gccgcggatcctgagaccccgccgcgggctgtgtgctgctcagcgcccatcctctgcgcgcgcaacgctacttccgggcgagctctgcagactcgccacaggccgggctagcgcttagccag

SEQ ID NO: 238480 - DNA, 122 bp, Homo sapiens
tggccaagcaggcagacttaagatatgcccttctgatgggtgaaagtcccaaggccaccccgtgaaggtgaaagttccatggcaggtgttctctggtttgcaaatggactatcagctctcca

SEQ ID NO: 238481 - DNA, 122 bp, Homo sapiens
ttcattttagcctcactacaattttgtgaggtccatatttgctgttttacagatgaggaacgtgaagcttagtgagattaagtactttgctcacggtcccacatggcaacggtgggtacttg

SEQ ID NO: 238482 - DNA, 122 bp, Homo sapiens
aataggatatggggggcactgggctttcaccccttcctgcagtgcgtatgaggggacattcgctggattcagtggaccttccttacctcctgcatcccagtggctctattcctggagggttt

SEQ ID NO: 238483 - DNA, 122 bp, Homo sapiens
tctactccctggctgtgcaccgggttccctacccctgtctacgtcggctccgccacttcgcggcttgagactaaaagagcatcccggcagggggccttccagccccaaagcagcctgtccag

SEQ ID NO: 238484 - DNA, 122 bp, Homo sapiens
tcaactgtgaatggaaagcaacaggagggacaggattgtgattgtgaggctaatcaatcacgtggtcacctaatcccatgtcaaaagaggagctggaccctataaaaggaaagaactgtgat

SEQ ID NO: 238485 - DNA, 122 bp, Homo sapiens
tttcctcagagctaccagaatctccttcccaacagcaaaaacgattttctccagtcctcacgcgtctcatcagttcggccccatccattcattcattcatgaatctgacagatgtgtattgc

SEQ ID NO: 238486 - DNA, 122 bp, Homo sapiens
ggcgggggcggcggccggcggggaaggagagccggagccggcgggcacccggggaaacctcgcccaccgccaccccaacaacgtgcaccacgggcgtcgggcgcacaagagccgggccaagg

SEQ ID NO: 238487 - DNA, 122 bp, Homo sapiens
tgtttgttcacaccccccaggatcgtctgcagcgtgccccaatccatcttctactctgggcggtttgctctggaaaagacgaatgcacacaacacaggaatcactagctaggacagaacagg

SEQ ID NO: 238488 - DNA, 122 bp, Homo sapiens
tggatctggatcctgctttagtggaagtgtccctttaacagcaactggcctggcctggctcgggccctgctttgcctcctgttcagctgcggctgcagctgccatgctgactcatgtgcccg

SEQ ID NO: 238489 - DNA, 122 bp, Homo sapiens
gggctcgtcctggccccgcccacctctgggtcggaactatggtggttctgtgagggggggcgtcctgcactttcgcgccgtatccctccgccccccttcccgacaccctcgcggagagcggt

SEQ ID NO: 238490 - DNA, 122 bp, Homo sapiens
ctggcccgcaggtagccggcaccaggagccttagagaagctgtagggcctgctggccgctcgtccgcctcgcgcccgggggctccgcgcctggagctgcgccggcggcagccatggacctgg

SEQ ID NO: 238491 - DNA, 122 bp, Homo sapiens
atttgacattcagagatgtcgcagcaccctgcccggtaccggtcagcccagcccgggtcgcgttacagtttcatcagctattagaaaagacccacaaactggctgaaaagttctcaaactta

SEQ ID NO: 238492 - DNA, 122 bp, Homo sapiens
ccggactcgtctcgcaacagtcactgccctccactgctgtatcaatatttatcaattcttcggcggctcagaatgcgtgctggggattcaatcaatttagcggcaatctgagcgcggcattg

SEQ ID NO: 238493 - DNA, 122 bp, Homo sapiens
ttggagtgcatggcagctaccctccacgggagacgaagaggtgtttgtttccggtgagttcgtttttgaaacccagtttcctcatggtttcttttggtcagagtgcttgacaaggaggcact

SEQ ID NO: 238494 - DNA, 122 bp, Homo sapiens
aacgtaactttctaaaaccagggaactgaaatgcacctttagcccgatttctgggaatgccgtcttcctcttaaagcagcagctgacgcaggctgatgccagcgcggattctgctgtgctgg

SEQ ID NO: 238495 - DNA, 122 bp, Homo sapiens
tttgcgcgcggggcggggcaggtggcgcagcagcggcggcggcggctgtgggtaaaggcgcggcgcgcggcccccgagcgcgccaaccttgccctagccggagcccgctgcggcccagcgca

SEQ ID NO: 238496 - DNA, 122 bp, Homo sapiens
ggcccggggtgcctcggacatggtgatgttcccacggggatagcaagtcctcaaactgtccgagcgagaggcacaaaccctgaggactggagagaggggttcgcccgggccctgctgtgtac

SEQ ID NO: 238497 - DNA, 122 bp, Homo sapiens
gggacgactcctcctgaatcccttgcccttggccgttgcgggtggccgggaggcccgctgcgcccccagccacagaggtgggcgccccgggtctcgggcttaccgcccccctcctccccctc

SEQ ID NO: 238498 - DNA, 122 bp, Homo sapiens
cggcccgtatagatttgctgtcatcctgtaggcttcccacacaagacagaggcctggtgacgcacagcgggaacccggggcttgcagggttaagtactccctgcctcctggctgggggttcc

SEQ ID NO: 238499 - DNA, 122 bp, Homo sapiens
atgagcctctcacgcccccgcctcattcacccacttccatgctgcagctcatccatgacccggtttccccccggggtatggtgactcggtcatcccctggggctggccccagcgaccaccac

SEQ ID NO: 238500 - DNA, 122 bp, Homo sapiens
gggccactcctgtaaaatcagacaggttccaatcacctctcatgcaccagtgtgttgagtcgatgtttatttcaaggcagagccccagttgctgtgatggttggaaaaagcaaatgtgaccc

SEQ ID NO: 238501 - DNA, 122 bp, Homo sapiens
actgtaggccaagccctgcctgccaggtctacatataaccacagttacatgttgtgtgatcgtatagttaaagccaactgtctaaacacattatcaggatttcgcaaccagtggtaagaata

SEQ ID NO: 238502 - DNA, 122 bp, Homo sapiens
gcctgataaagtaggcggtgggctgctgggtcctagattggttagtttgcatatgaaaggcggctaaggagtgagttttttgctatgtctagaaattgacttgccctaggagggtcaatctc

SEQ ID NO: 238503 - DNA, 122 bp, Homo sapiens
taaaatctgaaagtggaaattacctctgggccccctaactctcaaaaatatgtgtcatgacgattattgcaatggaattttaagacttaagaacgtaatatgtttctctttcctctattcag

SEQ ID NO: 238504 - DNA, 122 bp, Homo sapiens
tgaaacagctaatgaaacctcagagctatattagtagacagagagtaacctgatgtttcacggagtaactggcccaggaatcttggtgctggccaggtcatatttataccactctgtagcac

SEQ ID NO: 238505 - DNA, 122 bp, Homo sapiens
tctgtgtgactcgcgatgctttgcgtttcttcctttcagcatgtctggcgtggttcctcccgtctccccctcccgggcccacgttgtaaccacaagcacgcattctcgccccttcattctct

SEQ ID NO: 238506 - DNA, 122 bp, Homo sapiens
cccgagatttggtgcccgttcctctggggcagagggaacaccggagggtgggaggtgctgcgccttccaagcaggggggcaatcgccgcccgaccccgcccaaccttgtctgggagcccagg

SEQ ID NO: 238507 - DNA, 122 bp, Homo sapiens
cccagggccccaggtctgtggggcatcctgtcttcctttatgtggggtaactctccgttccgttccccaagccttcacagagtgacaccttcacagataatggggtggggggcctggggtcc

SEQ ID NO: 238508 - DNA, 122 bp, Homo sapiens
aacaaaccaactcaccccaacattgaaacaatatcaatacacctgcagcatctcaagacccgaatttctatcccgactctcctgtggatcccgtttgccacaagtactgcaccccaaccctt

SEQ ID NO: 238509 - DNA, 122 bp, Homo sapiens
ctggggagcccagcttgaacccagatcagacgcctgaagagaggacccccatgcctggcccgtacccgagaacttggcactgcaattggtctcatcactgccgtcagcacagttggcaaaac

SEQ ID NO: 238510 - DNA, 122 bp, Homo sapiens
ccgcctgagggggaataggggcggacaggaggcagcagaagcttaccggcgccgctcttccgcctcctcgggtcgcgttcggccgtacggtgatccgtcccggcacccgttccggccaccgc

SEQ ID NO: 238511 - DNA, 122 bp, Homo sapiens
ctgccttcccgcggggcagggctcgggacctgcagcccgccatgcctgagcctcccaccccgtccttgggctcctgtgcggcccaagcctccccgatgagcgccgccccctgctccagggcg

SEQ ID NO: 238512 - DNA, 122 bp, Homo sapiens
cgcacaggcacggcacgcaagcttttggggtgcccagtggctctgttttcaagtcacagccggcccgcagggtgcggacctttccacatctcacttgggccgctagaaaatagaaggtgggg

SEQ ID NO: 238513 - DNA, 122 bp, Homo sapiens
caccccaatcctgccgcggctccgtggctctccttacctttacctgaggtgaagcaaggacgtggaagcagctacggcgcgctaccaagcacctcacaccgctctcaacagtactgctcagc

SEQ ID NO: 238514 - DNA, 122 bp, Homo sapiens
gagccgccctgacacaccacccggtcgctcgccctcctcgcccattgccagaggggcacccggaatccatgcccacaaaggttaatctgcaaggtgtccggctggcagtcagggggacggtc

SEQ ID NO: 238515 - DNA, 122 bp, Homo sapiens
cactcccaagcccttgtgcagcccccaagtctgatttgttagttcctctatccctcatctcggcaccccctcccccacctcccccaactcccaccccacttcccagctaccagcttcccatt

SEQ ID NO: 238516 - DNA, 122 bp, Homo sapiens
ccaaagggtgcctgcttccctctacctacccggctggtgaaccaggcttcagcatccttccggttctgctcggccatgacctcatattggcttcgcatgtcactcaggatcttggcgagatc

SEQ ID NO: 238517 - DNA, 122 bp, Homo sapiens
ttcttttttcttccaggctagctggaaggaccagctagcctggactttggcttctttgcccgggagccctggcatgatggggtgagggctcttggtgggttagtggagagctgggggctggc

SEQ ID NO: 238518 - DNA, 122 bp, Homo sapiens
tcacgagcgatctgttgtgcagcccgatcatcccccaattcaccaacagccttctcctcgcgaaacgcccgggaccatccgtctgaattacccacagggtgaggatgaaaggcgagggaatg

SEQ ID NO: 238519 - DNA, 122 bp, Homo sapiens
tattctttcagattccttcacctttgccttctacagaacaggtcatggatcagttttcctcgacatgctgctttatctcatctctttctttcttgttgctgttgctattgctgttactttat

SEQ ID NO: 238520 - DNA, 122 bp, Homo sapiens
cgatggagaaaatgggtcaggggatccattcccaccccacccctccaaatccagaccctccgctaccacagatcagcctcgaaaaaagcttgtgcttcaacaaggatggggaactgccctcg

SEQ ID NO: 238521 - DNA, 122 bp, Homo sapiens
tttttattttatgctcattgacattcttttgaatcctgttgctgaataaaagcctctcaacggaaatgtaatcacatttaatctcgacctgtccaaacgtggaagaaaatgaaataaagtgc

SEQ ID NO: 238522 - DNA, 122 bp, Homo sapiens
caccctccatccagtacctggcatgaagccagcacataggagctgctttattttattttacgttactttattttatttttgagatggagtctcgttcagctgcccaggctggagtgcagtgg

SEQ ID NO: 238523 - DNA, 122 bp, Homo sapiens
caaagcagccaaggagcggctggaggggtgtgtgttccgtacactccttatgaaaactcccggggctctggttctgtctcaggactcgtgacctgtgatgattttctgtcccacgctggtcc

SEQ ID NO: 238524 - DNA, 122 bp, Homo sapiens
gacggagaacaacaagaaaggcacttccggtgtctgttgccaggcgcgggcccagtgggccgtaggggcgacattgttgccgttgtctttcccccccagtcccggggatggagatgtcggga

SEQ ID NO: 238525 - DNA, 122 bp, Homo sapiens
aaggggctaaatagccccacccccaccacaagcctgagacttctacctgcaacctgcaggcgcataggtccactagctggcagcatttcatggcctggccgcacagccccaaatattggctt

SEQ ID NO: 238526 - DNA, 122 bp, Homo sapiens
gtccgggccaccgaagttgcccccaaagtgggggtgatgctggtggggatgatgacttcccgggtggccgtggtgaggctgctggccgccaaagaagccgtgcacaggctgcgcttgcagcc

SEQ ID NO: 238527 - DNA, 122 bp, Homo sapiens
gttcataatatcagtgtagctacactaattcttttatggttaccattgcatgcagttcatcgttataccatccacctatttgtatttgtgttttaaagtgtttctcttacagacagcataag

SEQ ID NO: 238528 - DNA, 122 bp, Homo sapiens
gtctgtgtatatgcgcgcgtgcatgcctatgtatgtattacaatttctttatccattcatcgttaacagacactttggttgtttccaaatcttcgcaactgtgaataatgctgcatgaactt

SEQ ID NO: 238529 - DNA, 122 bp, Homo sapiens
cgggccgtgagccctacctgctctggggtggggtgtgtggagccagccgtccaggtgtggcgcgagggctcagaccgtgtcccctgccgcagtgcacgtgccggaaggacatggtcaagatc

SEQ ID NO: 238530 - DNA, 122 bp, Homo sapiens
cacacggagttcgcttttagttttctcttttagaagtcaagggaacagtgaagcccatgccgggggctggccgtttgtggatgaagatgctggagaccaggccactcggtttctgttctgct

SEQ ID NO: 238531 - DNA, 122 bp, Homo sapiens
ggctgcagttgctcttgcaggcttccaggtcccagcgcatatcggtgttggaagccatttcgaaggaggagccgttccacctctgcctcttgatgaactgggcttcatggatgcggggcttc

SEQ ID NO: 238532 - DNA, 122 bp, Homo sapiens
tattaaatcttgctactgcactcttctggaccatgcttgttacggctcaagctgagctttcgctcgccgtccaccactgctgtttgctgccgtggcagacccgccactgacttctatccctc

SEQ ID NO: 238533 - DNA, 122 bp, Homo sapiens
atcagaaagagaaaacaggttgcatgaaaggaagagaaagaaaaccgaatgcccgcttttcgagagcactgcaaaattagccccgggacccggctgcacaaaagtgcagccttaaagaatgc

SEQ ID NO: 238534 - DNA, 122 bp, Homo sapiens
tgcgggtcagcagcagaagcacctcaggccatctctgtttttccaataagaatttgaagacggtggtggcacagtcttgattaatatcacagaccaggtcaggaggaatttctttcaaaaat

SEQ ID NO: 238535 - DNA, 122 bp, Homo sapiens
gtggctccctggttccgtggctcccggctctcagctcctgggggcaagcatgcctggagtcgccacatggtgcccaatattccgggctacagagatggcctgtgctaattacgatacgtttc

SEQ ID NO: 238536 - DNA, 122 bp, Homo sapiens
aatacccgttattttgggggcacgcacgggctcgtgctctgagttcctggaaggaggcctcggggagtgacgagaaaccaggggggtctgcaggacttggaccgccgaccgttcctcgctcc

SEQ ID NO: 238537 - DNA, 122 bp, Homo sapiens
cttgccactctccctggcggcaactctcttcgaactccctccttctgccgccctctcccgcgccacccaaccccctacccgccgctaagtcccggctcggctcattcccgcccgagggcccc

SEQ ID NO: 238538 - DNA, 122 bp, Homo sapiens
gatcccccaactcacaaccacgcccgcgggtctcactgcagtgagacttgagagtggcggcggtcagattcccaggtcaactccagccgtgggaaaggaagccaagccctgagcccctttcc

SEQ ID NO: 238539 - DNA, 122 bp, Homo sapiens
ggcccgttccctcctccctcgcccacggttggggctgaggcagagcagggcgggtccgggcgcactcacgctttgatgaagtgctgtgcctcctcgcggctcaggaaggcgcgtggtccccg

SEQ ID NO: 238540 - DNA, 122 bp, Homo sapiens
tgcaggctcacttcccccggctcaggattcctagcaagggccggaaatctgggcagggagcgggaatcgaagcccgggcaggccctcccgcgacaccgcgactcggcaaaagccagggactc

SEQ ID NO: 238541 - DNA, 122 bp, Homo sapiens
tgcacaggccgccccagacaccccacttcattcctgggaggtgtcatcatgttgcttggacgacggggagagggggacctgccagtgttggcctccattttcccccagtcatctgcccccaa

SEQ ID NO: 238542 - DNA, 122 bp, Homo sapiens
ggaaaagtagccgaaagcactccgagaagacaagacaactgcagttctgtagggactgcgcggcacgcgtgggcccagagcctgtcccagcgaggtagcagctgccatgccgaccgctggag

SEQ ID NO: 238543 - DNA, 122 bp, Homo sapiens
gatgccctagatgtccttattaggacaagagactcgagggggcggggccagcccgacagccggcttgaggctccttataaggccgcggcgggcgggaggcgggagccggagcccattggtcc

SEQ ID NO: 238544 - DNA, 122 bp, Homo sapiens
ggttagtgattctgaatagacagtgctggtacctccctcccccagggcctgcaggcagcccgtcttttgaccctcagagttggggttgggtggaaaggagacagtttggaggccactgccgc

SEQ ID NO: 238545 - DNA, 122 bp, Homo sapiens
tgaatgaggcagacccaggcccgtgatcttgggccataggccccctaacccctgcccacacgttgctggccttgcagctgaatgaaggtcctctacaccatcagatcagcctctctttttgg

SEQ ID NO: 238546 - DNA, 122 bp, Homo sapiens
gagctggctaaggctgctcctccacctggatgcacacacagggctagggctgtggagaggcgggagcaccagcggcccacgccgaggaagataggcgctccctcctggggtgggcagcgcag

SEQ ID NO: 238547 - DNA, 122 bp, Homo sapiens
acatggcagagtcaggaatccaatccagatgataggactcccgacccagtgccctctccacggtaccaaaaccacctctgtgctgttaatgttaagtgagcactgagagaaattcctatggc

SEQ ID NO: 238548 - DNA, 122 bp, Homo sapiens
gtcaggtctcaggccgggtggagtccgcctcagaccataccagtgttgggactcgggcggcgcctcagccctccaagcacaccccggtagaatcaggtcagcagccttgatccacgtgcctc

SEQ ID NO: 238549 - DNA, 122 bp, Homo sapiens
cgcacgggtgccagaatgttcatcctgcctgcggccttgcagggcgccctgagaaggcgccgaggccggatccgcgtcagcgacccgggcgcgtggagacccgacgatcacccgcggccggg

SEQ ID NO: 238550 - DNA, 122 bp, Homo sapiens
ggtaatcccatatgagtcagggctggggtgtggaccactgtccaaactgttgctgttgaccgccataccattctgtctccaaaacacacatttctgaactgctcacacaggtacacaaatta

SEQ ID NO: 238551 - DNA, 122 bp, Homo sapiens
aagggatccgccctcaccccccaccccagccaccccaattccctattccctccccttggacggcgccggggaaaacaagctgctcgagctttatttcttcggtgcaaccaactcagaatgaa

SEQ ID NO: 238552 - DNA, 122 bp, Homo sapiens
ccctcgttgcggggactgatagggaaacgcgcatctgcccctggcgcagagcctggcacccggctggccccctccatcactatggctactgttgctctggcttgggcacagtgagcacacag

SEQ ID NO: 238553 - DNA, 122 bp, Homo sapiens
agcactcaggagcccaatagcgtgcagcatgtaagtgtttgtactcattactagcatgaccgacatcctggctggctctgcccctctcgtatggctggtaccagctggtggctaagttcctg

SEQ ID NO: 238554 - DNA, 122 bp, Homo sapiens
acgcacagtgccccgccgaaggagaaaaaggccacaatgcgaccccagtttaccccatcccggaagagttcattcactacctgttcaaagctctgatatgctgtccctggggtgatgtggag

SEQ ID NO: 238555 - DNA, 122 bp, Homo sapiens
cttaataacaagtgtaccaatacactgacagagaaagtgcaactctaaccccctggtgttcgcattttatgtgaaagattaaggatattttcccagatacatactactaatttctgacatct

SEQ ID NO: 238556 - DNA, 122 bp, Homo sapiens
tgttggctttctctgaaatgccaaagccacccgattattcagagctgagtgactctttaacgcttgccgtgggaacaggaagattttcgggaccattgtaagtgcttaggagttactgtctt

SEQ ID NO: 238557 - DNA, 122 bp, Homo sapiens
gacccaccccaccactgggtaggaatctcctggcaggctgggtatctgcaaggcagaacccgtttctcatctcagtatgctcggctgatgtctgcagaatgaatgaatggcctggcactgag

SEQ ID NO: 238558 - DNA, 122 bp, Homo sapiens
ggatgttcggcggcccgggcaccgcgagccggccgagctccagccggagctacgtgactacgtccacccgcacctacagcctgggcagcgcgctgcgccccagcaccagccgcagcctctac

SEQ ID NO: 238559 - DNA, 122 bp, Homo sapiens
tcagaggacttcccttccgtagttttcattctaagcggtcatctgtgagtcagaagatttcgccgtggcctgatttcccaccctttctgcccgcgcaagccgaaagcgctcatgttggcttt

SEQ ID NO: 238560 - DNA, 122 bp, Homo sapiens
taggccggttatgaggctgctctccgttactgagtggccagctccttaaggcagggagtgcgcttgctggggctccaatccccgggcctgtgtgtagccccgatctccatgagtgagagcaa

SEQ ID NO: 238561 - DNA, 122 bp, Homo sapiens
atactttgctaaatctgagaattatctctcaatttaaaaacacattcataggtgtcagcacgttggttccttttagtgagtttcatttatttggataccatattttggagaacttaataact

SEQ ID NO: 238562 - DNA, 122 bp, Homo sapiens
ctccgtcccgtacctccccagccagtcaggggcacagggcagaggctccatggacacctgcgagggagcaggggcccatacccacctccagaagcagccgcaccacctcggtcttgccatac

SEQ ID NO: 238563 - DNA, 122 bp, Homo sapiens
gggtgacggacgcacctggaaaatcgggtcactcccacccgaatattgcgcttgtcagaccggcttaaaaaacggcgcaccacgagactatataccacacctggctcggagggtcctacgcc

SEQ ID NO: 238564 - DNA, 122 bp, Homo sapiens
gtatattgagtgtatttgcaagagctgtttagtgttttcttccctagtgaaccaacataacgattattctgctatgagtctatgttacgaaatatgtctatgtcctgctattctcaggcttc

SEQ ID NO: 238565 - DNA, 122 bp, Homo sapiens
cagcctcaacatcccttaagcagcctcgagggatcctcccacctaaaccccccctcccaccgccgcctcagtaggtggaaccataggtgcacaaccatgcttcgctaactttaggatttttg

SEQ ID NO: 238566 - DNA, 122 bp, Homo sapiens
tgctgggattataggcgtgagccaccgcgcccggccaagacccacattattaaccctcatcgtacagaagtagtgataggctcagagaggcaaagccactttcccagagccacacagcaaag

SEQ ID NO: 238567 - DNA, 122 bp, Homo sapiens
tggggagggccaatttagaggacagattgaccagggcgagcagcaggatatctagaaagacgctttgcttctaaggagcgggagcctaatcccgttacaggctggagggagactcctggggc

SEQ ID NO: 238568 - DNA, 122 bp, Homo sapiens
gcgctcactcattgagcacctctctattgcagctctcacagatgagcggcataatcactccgctctctgggggccacgagctcagaaacatcctaatgaaaaataaatgtatttacagggag

SEQ ID NO: 238569 - DNA, 122 bp, Homo sapiens
atacacggccaccaccctgtccctgacgccctggatacacggccaccaccctgtccctgacgccctggatacacggccaccaccccgcccagactgaagggtgacaccagaggcaaaaagag

SEQ ID NO: 238570 - DNA, 122 bp, Homo sapiens
gtgggggccgagagcactgggctaacgccacgaggcctcacgaggtgatgcttgggcgggcggaggaggaggacagagagagggagggctgagaggagaggaagagggaggaggaggaggga

SEQ ID NO: 238571 - DNA, 122 bp, Homo sapiens
tccagccttgcgacagagctcgactcttctcaaaaaaaaaaaaagagagagagagagaagcgcaaaaacctcacctgccgggtgctagagtcaacctcacctgccaggtgctagagtcctcg

SEQ ID NO: 238572 - DNA, 122 bp, Homo sapiens
acattgctttaggtgctttctccgacactgccttatttcaaccacacaactcacttgtgacgtgcggggttatctgcatggatgattcagaaaggggacaggccttcgccagacacggcaat

SEQ ID NO: 238573 - DNA, 122 bp, Homo sapiens
cctagagcagcccgcttgagctcagctccctagctagcacctttacaaaggatggagagacggaatccgcaaacgctatccctttgaataaaggcagccttgttagggaaaggaaagactgt

SEQ ID NO: 238574 - DNA, 122 bp, Homo sapiens
aaatcctgggcctgtttccccagaatcagcatcttatggaacatcttaatgaaagttctacgaaacacattaaccaatatgtctcaagaaggccctcattttaaataaaaagttcattatgg

SEQ ID NO: 238575 - DNA, 122 bp, Homo sapiens
ctcatttgtttacatattgtctatgacagagttaagtaacaaaattacaaatttaccctccggtttaaaaaccctcaatcctccttatttccctcaatataaagctcacccttctaaattca

SEQ ID NO: 238576 - DNA, 122 bp, Homo sapiens
acctcgtgatccacccacctcggcctcccaaagtgctggaattacaggtgtgagctaccgcgccctgccgaagtgtacactcttaaacagaaatgaggggaatggaggctgagcaggcaaga

SEQ ID NO: 238577 - DNA, 122 bp, Homo sapiens
tagtgggctgcgtcagaccctggggagtgcgagcaccgtttgagaagcaccaaacacaagcgcatcgtccgcctcttccattcaacacagactgtcaacctgtcccattgtgtaggtctaga

SEQ ID NO: 238578 - DNA, 122 bp, Homo sapiens
agaggccggagctttggacttgggaggccgcaggcgagagcgagctgggcgtggagagtccgctgtgaggcagaggctgggcctgtgcaagctttcgggaggcaggaggccaggcctgcaga

SEQ ID NO: 238579 - DNA, 122 bp, Homo sapiens
ccgcactcgggcggcggctccgccggcgcaggggggcggtgcccgtggcgcccccggctccgcccccgtccccgcagcctcctgggctgcccgggcctccccacattgccgcccgccccggg

SEQ ID NO: 238580 - DNA, 122 bp, Homo sapiens
ggaccgtccactctgagacaggcagctgtgaccagtgggccctggactcttcccacccagcggccagcgctcctccggcccgacctggcccccgtctccacagcgactgccgctctgatcca

SEQ ID NO: 238581 - DNA, 122 bp, Homo sapiens
aatgagatatactcgtgtagtgggagattttaatatacaggcccccagaatcggaacagacggtagtttgataaaaacctaaggatacgttttttggaagaactgaatcattcaatcagtaa

SEQ ID NO: 238582 - DNA, 122 bp, Homo sapiens
gggaggtaggaggcccaccctacgccctgcccccgcggagcacaagccccgcctgcgtcccgagctcccgggtccgcaaagctgggccccaaagagctccaacgccggaaccaaggagcacg

SEQ ID NO: 238583 - DNA, 122 bp, Homo sapiens
ggctggcagccgggccgggcggctcgctcccgggagctgacaatgtagccaagtcctgctcgtcggggccgcaaagaatttaaaggggtctagaaacatccatcttttccccttttcacagt

SEQ ID NO: 238584 - DNA, 122 bp, Homo sapiens
cggggaggggacccggccaggagtcgagggccggcggaggcgggagtggaacggcagggccgggggagtggcccgcacctgacggacagcccttcggaccaccctaccgagggggggccctg

SEQ ID NO: 238585 - DNA, 122 bp, Homo sapiens
ctgcgtgcgccaggtgccaggctcgccccagggtaaaacgtggcccgggccctggggcctcgcaggccactataggaggcagaacagtaaacagatcattgaaaagacctcgggagaggagg

SEQ ID NO: 238586 - DNA, 122 bp, Homo sapiens
ttcatgatgaattgaacagtttttgaatttccctcgggattaccttccttcacattccttcgtgtacaggactttcagaaatggggacctgataaaggaactgacaacaagcccatgattat

SEQ ID NO: 238587 - DNA, 122 bp, Homo sapiens
ctgctcgcccaggtgcgtcatcagaacccttggtctggctggcggagaagacagcacaagcgcctggatctgcccctcccccggcaccagctccccggggcctggcgcactgtgaggagaat

SEQ ID NO: 238588 - DNA, 122 bp, Homo sapiens
cagcaatccgatttggccacacctgccaaagagattctgctgtgtctccaagataccagccggccaccctatggccagcagatgcctccaccatagaccccaagaagaaccccgggacccag

SEQ ID NO: 238589 - DNA, 122 bp, Homo sapiens
gagaggagcggggacacgggcggggccgccgtagctccggatgggaccagcgcccgggcccgttagtccaagcaggagctccgggagaatccttcacagggagatttacccctgccttcccc

SEQ ID NO: 238590 - DNA, 122 bp, Homo sapiens
agcagcctcagggagcagatcgggaggtcagttttggacagggtaagatgggaacagctacgggctatccaagtaaagattgtgagtgggcagcagatatgtgggagactccagccggcaga

SEQ ID NO: 238591 - DNA, 122 bp, Homo sapiens
aaagaaaaccctttccattgtgagaaagggctgggcagttgccaagactagagggagtgacgcaaggaaggagctgagaaagtgctgtctttatgcagaagcaggaaaggatcttcatagct

SEQ ID NO: 238592 - DNA, 122 bp, Homo sapiens
ggggcgctcccggccctctggagggcggcccttctcttcctgtaactctacagacgcgtccggacagaccaagacactctctgtgccttcgggcatgttacccatcctctctgagctcggct

SEQ ID NO: 238593 - DNA, 122 bp, Homo sapiens
cccccatggggcatccctaccctactactagtccctatatctcttgaactttttttttttcgttaaagaaaaaaaatatttcttggtttctatgttaaaaatggaaaaaaaacaaagacatt

SEQ ID NO: 238594 - DNA, 122 bp, Homo sapiens
tgtggatcacggtggacgtcgggggagcagggttgtggggcgcccccagcacagccacctcgtgctcctccttgagcatctcatagttggggggctggccactgttgacaggagagaagaag

SEQ ID NO: 238595 - DNA, 122 bp, Homo sapiens
aaaatgggaaagatgagcccaggctcgtgggcactggcacgtcggccacacgtgaggctgcgtggggcacagtcggatgcacgtgcccacacactcattttcattttactgggctcaacacc

SEQ ID NO: 238596 - DNA, 122 bp, Homo sapiens
ccccgacgccccgcagaatgctcggctttctttctttctcttggagcaaggagctgaaaccgggctagtgggtcgctatttcacaataaatcgtgacaatggcatagtgtcatccttagtgc

SEQ ID NO: 238597 - DNA, 122 bp, Homo sapiens
gggccacagatccccgtggccgtctggtgcagggtctttgatggaagttggctggaggcccgactcggtgctgcgcccacacgactccacggcccatctacactgcaacatgcaacactcgt

SEQ ID NO: 238598 - DNA, 122 bp, Homo sapiens
gttaatgtcgtggcagtgggatgcagaggagggcatggatttgagagatgtttttaaaaacgtccagctggtggcctagctgaaaccaaaaactgggggtgagggttgtcacatgggatgag

SEQ ID NO: 238599 - DNA, 122 bp, Homo sapiens
aggacacatttatggaggaacaaaggccgggcatgaaaacacattcttgaagctggagttcgagtgatgaggttcagccaaaagttcatcatgatctccagtgtggttcttttctcattggc

SEQ ID NO: 238600 - DNA, 122 bp, Homo sapiens
gtaacaagtgcaaacagcgtgacgggcagaagcccagctctgctcgaggccttctgggcacgtgggtggctgatgagggttcacggccacacactttccttttctgtttctctcactccagc

SEQ ID NO: 238601 - DNA, 122 bp, Homo sapiens
gcggaggtctgcggagggcgcctggctcggtcggtcgctccttccttggcgggccctcgccgacccacggtgctcagccagccccattcttggcattcaccgcgtgccttaattgtatggac

SEQ ID NO: 238602 - DNA, 122 bp, Homo sapiens
ctggaagttcattgaagagtctgaaattagggacttatttcaaatttggacatggctagtcgaggcgcaacaagacccaacgggccaaatacgggaaataaaatatgccagttcaaactagt

SEQ ID NO: 238603 - DNA, 122 bp, Homo sapiens
ttcccatctagtgaacgctgcaaataaaactgctcagaatcggtctgaactgcctgtttccgtggtagcaggcctctgtctggaggataaatctgcaccatcttcttttttttttttttttt

SEQ ID NO: 238604 - DNA, 122 bp, Homo sapiens
cccctcattagtccccctccaagatgggtagtctgggggtggggcacacatccttgcttccgcagagagatccgtctccctgtcccagcaacagcagagatctgatgaaagacagatgaaaa

SEQ ID NO: 238605 - DNA, 122 bp, Homo sapiens
gacccgactactggttttcagtaactccggggatttcacctgatttcatcttggtcgacccgactactggttttcagtaactccggggatgtaacctgatttcatcttggtcgacccgacta

SEQ ID NO: 238606 - DNA, 122 bp, Homo sapiens
atcccttctaggctcccagccagcaaacgcatttcagagacgggattaagctgtctctggcgaaccagggagcagctgggtaggccgcggggggcgcctgtcatcgacgtcatttccttcag

SEQ ID NO: 238607 - DNA, 122 bp, Homo sapiens
gtatctaacatacagccagaatcacagtcatagcacacttaatattttatcagaaacttgcgtgaacaagttaagaggactctcaacttaaaaatgacaccaattgcaatgatcttgttaac

SEQ ID NO: 238608 - DNA, 122 bp, Homo sapiens
gctgcggctccgacccggtgcgaaccgccatacgcgccgcgcggtgggccggaggcagtccgcgtactgttgcggaaactctgtctcacaaggtgcgcaacactcgccgcgcgcaacactca

SEQ ID NO: 238609 - DNA, 122 bp, Homo sapiens
cggggatgtggaacaccccaagttcaggacttctggagttaggtctccagacatggggttcggttcaactgaagtgttagagcccctaaaaacacacctaaatggtgttcacagtttatatt

SEQ ID NO: 238610 - DNA, 122 bp, Homo sapiens
gttaaatgcgtgcaggcttccgtgcaggagccctctgcacatggcagagagaatgtggcccgtgctgcactctgacgcgcagaccatcttgatggctcagggacggccaggctccaccacac

SEQ ID NO: 238611 - DNA, 122 bp, Homo sapiens
tctggtccccgacccgcagtccttccttctcagctagagagcctggttccaccagagacacgtagatgcccacgccgtgctccgagcccccacggatgctgaagcccaagccctcgtgggcc

SEQ ID NO: 238612 - DNA, 122 bp, Homo sapiens
tctctactaaaaatacaaaaataagcctggcttggtggcacacacctgtaatcccagttacgtgggagactgaggcacgaaaatcacttgaatcagggattcagaggttgtaatgagccgag

SEQ ID NO: 238613 - DNA, 122 bp, Homo sapiens
tgtccacatcctggggagccaggcaaattggtcagcgcgaccaccacggaccaagggcttcgtctttaaaattagggaagccgggttagtggcctgtaaatctgtgggacctggagggggtg

SEQ ID NO: 238614 - DNA, 122 bp, Homo sapiens
gctactcactcagcgggcatttctggagttccaggaacacaaaccccaacaagatccaatcgacgccttcccggagtgcacagtccaggacgtaacccggagaacaagcggcaattaccccc

SEQ ID NO: 238615 - DNA, 122 bp, Homo sapiens
tggccccgccgaggaggcgaaggaaggccacccctcccccatcatcttttgcccgcccctcgccagcaggagccagcccagtccgccttctagcctcctgcagaccagagaggacgcacccc

SEQ ID NO: 238616 - DNA, 122 bp, Homo sapiens
ttcattgtagacatgaagtgcagcccctgcagcagctgcagagccccccacctcccattccgcatatactaagaaaagggactctttaatctctgggcctgagaaaaaatttattaaggaat

SEQ ID NO: 238617 - DNA, 122 bp, Homo sapiens
agccccctggccaggtccgatttcaacaccaagtttctgagcttttcccattttgtccaccgtctctagaacatttctgcttcttttacctttcaaagaatccaaacttgaactctacttac

SEQ ID NO: 238618 - DNA, 122 bp, Homo sapiens
gccatgcgcgccgcctgctgagtccgggcgccgcacgctgagccctccgcccgcgagccgcgctcagctcgggggtgattagttgctttttgttgttttttaatttgggccgcggggagggg

SEQ ID NO: 238619 - DNA, 122 bp, Homo sapiens
ggtaactgctgctttggtttaaaatgctgcttttcctgctcacggtcgtagccacgaggccgagaagtcgtgtgtgtgcttttcctctacgttctggctccgtctcgggttctcgggcctgg

SEQ ID NO: 238620 - DNA, 122 bp, Homo sapiens
gaccacctgctggaagcccaccactgtgaccacctgcagcagcacaccctgctgccagcccgcctgctgtgtgtccagctgctgccagccttgctgccgcccaacttgctgtcaaaacacct

SEQ ID NO: 238621 - DNA, 122 bp, Homo sapiens
gccgtgggagccccgccccctggcgcgggtggtgagatggctggggccgagtcccaggggcgccggggccatgggccaagctcaggggagcagagcctgaggccgagaggggtcccctgggc

SEQ ID NO: 238622 - DNA, 122 bp, Homo sapiens
atggctaatttttttattttttgtagacacgaggtcttgcgatgttgtccaggctggtctcgaactcctggactcaagtgatcctcctgcctcagcctcccaaattgctacgattaaaggca

SEQ ID NO: 238623 - DNA, 122 bp, Homo sapiens
atttcttcaatttgacattcagagcactgggcagaaatcacatcgcgtcaacacccgccgcgggcctttgtggaatggtgctaaaatatttaaacaatggagaaaaaactcttaagtagatt

SEQ ID NO: 238624 - DNA, 122 bp, Homo sapiens
gaggttagagtagggggctgctctggatttgtgaggtccgttttaacttcccttgaaaagcgcatcatgtgggcgggggcaagcgcctggctgcgccggggggcaccacggtgctgcccatc

SEQ ID NO: 238625 - DNA, 122 bp, Homo sapiens
actgtggctggatgggaggcttcttcaaaaaggggtttggagaccaggtgcggtggctcacgcctgtaatcccagcacattgagaggccaaggtgtgcagatcgcctgaagtcaggagttcg

SEQ ID NO: 238626 - DNA, 122 bp, Homo sapiens
aatggggaatgggagtgacctctgcaggccacacccatgctgaattctctgcctgcctcccgagtgcatgtgttcctaagtgaggctgagtgcggcttcagctgatcttaagtacttcacaa

SEQ ID NO: 238627 - DNA, 122 bp, Homo sapiens
gtttcagcactttggacagcgccccggacgccccggcccctttgggttggcgatggcgagcgttcagcaaggcgagaagcagctttttgagaagttctggcgaggaaccttcaaagcggtgg

SEQ ID NO: 238628 - DNA, 122 bp, Homo sapiens
gagatttggaatgcaaggggctgtgaacaaccagggtgcgggtctcagaacgaaagtgcccggagtccagacctccagctgctcaatgaggaaaggaccggcgcccccaggtttgcctgcgg

SEQ ID NO: 238629 - DNA, 122 bp, Homo sapiens
accgtgccctctctgcgctgcgccgcccggcccccgacctttttggatggtcgatgtcagcgccagccttccggggcgctggcctgggctcaagtcaggcaatgaccaggggccggtgagct

SEQ ID NO: 238630 - DNA, 122 bp, Homo sapiens
tgccactccctgcctgtcacatgccttctggtttgactggagtaatcctggtagaatccacgtagctctgaagagtgggtattctgaagagcgcaggttctttgaggggatgatacatgttc

SEQ ID NO: 238631 - DNA, 122 bp, Homo sapiens
caggcttaacccctcccaggtcctggtgtgtgctgaggcagggccacccaggctgggctccgtcccctcaggcggctgcaccatacttggagggttttttaaatttttatttttatttttga

SEQ ID NO: 238632 - DNA, 122 bp, Homo sapiens
gtttcccggtgttgttccaggcctgacgggtgttcagggtgtaggactcagggtgtaggacgagcgtggcgcgtccctccggaccggaagcggggctcaccccagcgacggggggcttcctc

SEQ ID NO: 238633 - DNA, 122 bp, Homo sapiens
taagcatctggctacactatatctctaaaagttttacgtagttcaaatgtgagcagcgttcgtctacgcagaaaaactgaataagcagcattaaccgcgggcagaaacagaacagaaaccac

SEQ ID NO: 238634 - DNA, 122 bp, Homo sapiens
ctgtccgtgggcagcgactattcagcccaagctatcattcttaatttccctgccaggctgcgactaccggggtgaatcagcccgcgccaggcccctttcccacccgccgctgcagttaggac

SEQ ID NO: 238635 - DNA, 122 bp, Homo sapiens
gtcccgggccttgccccaggggtggagaaatggccgctcacacctacctgtggggccaagcggatggaaggccccgagacagctagtcccggcctactggcaagagctactcaggtcgctgc

SEQ ID NO: 238636 - DNA, 122 bp, Homo sapiens
acggcggtcgggtaggtgacggcttggttggggtcgctgcgaggggactactaggagcgccgaggcgtgagtcgtagcctgtggcttggggtcgggagtgcaggaggcgaaaatgtttgcca

SEQ ID NO: 238637 - DNA, 122 bp, Homo sapiens
gaggaagaggagatcgatggatagtcggaatagagccgccccaactcagatcctacaacacgcaagttccttcttgaaccctggtgcctcctaccctatggccctgaatggtgcactggttt

SEQ ID NO: 238638 - DNA, 122 bp, Homo sapiens
tgaggccagataacgggaagtgtgagccgattggccggacttctcactccacggcccagccgtttacggatcgcggaggccatccatcaaaagaattacaccaatcagcggcgaaaatgccc

SEQ ID NO: 238639 - DNA, 122 bp, Homo sapiens
agtgagaggagtctggggctggggctgccttccaggcccacggggcggccccgctcttttcggattggttacctttgggcaggtgaggtggctttgctttgcttggtcttgaggttttgtgg

SEQ ID NO: 238640 - DNA, 122 bp, Homo sapiens
cttcctctttgaacagttgccttttcctctcacagaaggaagatttcattttgtttgagacgagaaaccaaaccacacaccaaagagaggggtatgatggctaagaagcccccaaaaccagc

SEQ ID NO: 238641 - DNA, 122 bp, Homo sapiens
tccatagatatggacggtcatttcatagagtaatgaaacagttaagaggaatgctattttcgataaggtggctaggaaaagcctcactgagggcctggcatttgagtggattcctgaagtag

SEQ ID NO: 238642 - DNA, 122 bp, Homo sapiens
gattggggggacatgggaccttacgcttgtgggggtctgcgggctgggaactctcgtcctcggtccccagggcgcagctgttggggctgcgggggagtggagcccccgtgcccctgcttttc

SEQ ID NO: 238643 - DNA, 122 bp, Homo sapiens
cttcttatctggccccggagactttctgcctcatcccagctacttccatcgtatgtctcccgggcccctgcttggaacttgggtgtcccccacacacacctgcagtccccaagctgcatccc

SEQ ID NO: 238644 - DNA, 122 bp, Homo sapiens
tgagccacccgatcccctcctcaggccggggccctgtcccctttcacagctagaggccttcgcagacgggacagtttgcacctcatccacagtatttacctcagacacccctgggcatccaa

SEQ ID NO: 238645 - DNA, 122 bp, Homo sapiens
cttccactgtgagagttacccgaagctcggcgtgcgtgatggtctagggggcttccgaggcgattgggcagtgtcagtcttcagccgctaagccgagaagatctgggaaggagtcggtcaga

SEQ ID NO: 238646 - DNA, 122 bp, Homo sapiens
gcgcgaaaaggaagctgtgcgattggcttacgttttatttttatttagaccaataggactcgagtatgcaggatacctattttgattgggcaaaactggcatctgacgtcatccacggataa

SEQ ID NO: 238647 - DNA, 122 bp, Homo sapiens
aggcggatactgacgccctgagggcatggaatagggcggcttgtgcaggtcccgccgtctcgggccttgcaaaaagggcggcctctccaacgcccctaccggaacctccccggaggccccag

SEQ ID NO: 238648 - DNA, 122 bp, Homo sapiens
agcagcactccatcatcggttccttgtgtaaattacggtttttaccggcaggaatcagagcggagtctcccgtgtagcatgcagctgcggtcgctgtttgtagaaaccatgggtttggggtg

SEQ ID NO: 238649 - DNA, 122 bp, Homo sapiens
tccttcccaggctccggcatggagcagtgaccaagatcaagtggctccctgagctgatggcgctgcaggggagagagtcttaagaaaacaaagaagaaaaatagggaaaaatttcttcagaa

SEQ ID NO: 238650 - DNA, 122 bp, Homo sapiens
gttcaacgctccaagccccatagactgattcaggaagataaactgaggctcaaggaatttcgaggtagaacaatacaccaaagccttaaacctgaaatgactacccttttctggggggtggg

SEQ ID NO: 238651 - DNA, 122 bp, Homo sapiens
gcggggccggggcggtgcgagggcggggccaggcggtggcctggaagcccggagcctcagcgctcgcccctgctcgtgagtccgtctccccttagtccgggcgagcctctgatcttggccgc

SEQ ID NO: 238652 - DNA, 122 bp, Homo sapiens
ttgcttctgcccttcgagttgcttccttgtaaagaaggctgctaagagcctaaaacaaaacgcgccgagtttaagccctttctatttccctttaacgcttccgcaaatgccaagagaaatcg

SEQ ID NO: 238653 - DNA, 122 bp, Homo sapiens
ccgtcccggcccacacctctttcctctccagccacaccggcgcgccccgagggttgcaggcgggggctgcaccgggttgaagcccagtcaaccacacgtcccagggcttaggcgccgggcgg

SEQ ID NO: 238654 - DNA, 122 bp, Homo sapiens
cggtgcacacacaaatcaggttcagatctgtggggttcatcctcccgggccccttttaagcgcttggagtcactaggaatgtaccaacggccctcggagggaggacgaggcggagagccacc

SEQ ID NO: 238655 - DNA, 122 bp, Homo sapiens
cctctgtcatgatctgaaaaccacttttgaatcaaaaagtataaaccaaaccctccaatccgtaagtgtggaatacataaaacacttacagagcctcatcttatgcattctacattacatgt

SEQ ID NO: 238656 - DNA, 122 bp, Homo sapiens
agttcccggaccgcatcatgaacaccttcagcgtcatgccctcgcccaaggtgtcggacacggtggtggagccctacaatgccacactgtcggtgcaccagctggtggagaatacagacgag

SEQ ID NO: 238657 - DNA, 122 bp, Homo sapiens
tggggggcgtcaggccggtcatgtgggtcccagctcccgcactcgggaaccggaggagggcgcgcggccagggacagccggccggcctgggcgccgcgctcccgtccccaccagccgcgtga

SEQ ID NO: 238658 - DNA, 122 bp, Homo sapiens
tcgtaggtgcgggccgcatgaatggagcgccgggcgtaaggcaaagcctggcaccgtctgcgcggccgctatctgctcccggagcgtgagtgcggggtgtggggcgtgcgcgtgcgcgctca

SEQ ID NO: 238659 - DNA, 122 bp, Homo sapiens
cggcgcctcgggaggcggaggctggcggatcactcgcggttaggagctggagaccagccccgccaacacagcgaaaccccatctccaccaaaaaaataggaaaaccagtcaggcgtggcggc

SEQ ID NO: 238660 - DNA, 122 bp, Homo sapiens
gcgacgggacagcaggatgaggacctacagccagctttacttcagtccacgattgagacccggctgctgttctcaacagctgttcccaccatagcctgaaaacccagatatttgctgcctca

SEQ ID NO: 238661 - DNA, 122 bp, Homo sapiens
tctcgcaagctgcccgctcggccaagcggctgggctccgtcgtcattttctccatgaggccgaatgctctcctctgtgctatgttacttttgtgtttgatggattgtacttaggttcgtgct

SEQ ID NO: 238662 - DNA, 122 bp, Homo sapiens
caggcagagacactcctcacttcccagactgggtggcggccgggcagaggctgcaatctccgcactttgggaagccaaggcaggaggctgggaggtggagattgtagcaagccgagatcacg

SEQ ID NO: 238663 - DNA, 122 bp, Homo sapiens
gaatcctctcctttctttaacccttcttcacacggagtcccaccctcgccggaagccgagcggtttctacatcatgccacttccggtgcggcctgccggcccctggcgggagcgagcacgcc

SEQ ID NO: 238664 - DNA, 122 bp, Homo sapiens
agaggaaacaaaatcatgaaagccctgcaaatctccctcctaaatccaacattaagaaggcgaacggatactgaattcaaagactacccgtacttgaggatggcatcattccttactgcttg

SEQ ID NO: 238665 - DNA, 122 bp, Homo sapiens
ccacgcgaggccccgcccgcccgctcgaagccccgcccacccggcggtcacaccgccttgcgcgctcggcatgacgtcactcccaccaggcacctcgccttgtcaggagctgccaggcgcca

SEQ ID NO: 238666 - DNA, 122 bp, Homo sapiens
caccttggccccatcagggtgactcaggatgtacagactggcagtgtctatgtgcccatgcgtgtgtgtttgcttctcccccaccgtgtgcctctgctgggcagccatgtgccagtctgtgt

SEQ ID NO: 238667 - DNA, 122 bp, Homo sapiens
agagaaacagagagagaagaaagacagagatggagagaagtagcaacacacacacacccacgggaggaaaagagaaatccaggcacacaaaaaggaaacccccccagggatgcaaagaaagg

SEQ ID NO: 238668 - DNA, 122 bp, Homo sapiens
ctgctagctattagttccctgcacagctgcaccaaaccctggattatgaatctgccacggcggtcattcatcagtttcacagtccaccccggcacattccagcaacaacagaaacagaacat

SEQ ID NO: 238669 - DNA, 122 bp, Homo sapiens
gctctcatccgcccggctctccgcggagaaccgtccgggaatcgtccccgaggtgcggcgcgggaggtggccggctttgttcacaatgcactgcccgccgcacccgccctggacacgtgcag

SEQ ID NO: 238670 - DNA, 122 bp, Homo sapiens
agcctgaagcagagtgtaaggaacggccagagagcgcaacactggggcccactaccccggcgcagtgaccgccgcgcggcagcctcagggttaggggactggcgggaagcgtgggccggtcg

SEQ ID NO: 238671 - DNA, 122 bp, Homo sapiens
cataggggctgagtcttcacctagacaggtgtcactgggtttcttgttatcacttgggtccgttgttggcaagtgtggatttgtgccttcttgtttatattcacctgggaatcaggaaagag

SEQ ID NO: 238672 - DNA, 122 bp, Homo sapiens
atgagattcttttaactcccccaagctcgtttgcaggttatagccttatctggggacccacgttttccaccctggctacacatcctgtgaacaattgcctctccagagcctgaaaggagagc

SEQ ID NO: 238673 - DNA, 122 bp, Homo sapiens
cctgtggacttggccatctgcttctgcctcctaaatgaccccgtcttctccaggagtggacgggagctggcagcaggtgtcctcatccatgcaaagccatgggcagttgtgccctgatacct

SEQ ID NO: 238674 - DNA, 122 bp, Homo sapiens
ctgaaaaagaaaacaaagatgatttttctttaatgatggaaaggcaatttttatttcaaacgattatgcatttgtaggttgtgcataggctgaaaggtttgaatcactgtgaaataatgttt

SEQ ID NO: 238675 - DNA, 122 bp, Homo sapiens
tggcaactcagggcagccacctcttcgggtactggggcggtcccaatggctgtcagaaaacggcacagctgcctcccacagcccaggccagccctgcaactgctctccccaaagccacaggt

SEQ ID NO: 238676 - DNA, 122 bp, Homo sapiens
ttcaatgaggctgggcgcggtggctcatgcctgtaatcccggcactttgggaggccaaggcggacagatcacttgaggtcagtgtgagaccagccgggctaacaccgtctctgctaaaaata

SEQ ID NO: 238677 - DNA, 122 bp, Homo sapiens
gttctgcgtgtggcccaaaagtcaaaagagaacattctggcctgtccattggtgattcggcgaagaaactgggagggatgtggaataacactgctgcagatgacaagcagccttaaaaagaa

SEQ ID NO: 238678 - DNA, 122 bp, Homo sapiens
tcctgggccgggccaccactgccctcttgctcagtttccttggccgccgcaccatccaggcgggttcccaggccatggccggcctcgccattctagccaacatgctggtgccgcaaggtgag

SEQ ID NO: 238679 - DNA, 122 bp, Homo sapiens
cccccactcggccagtgccctttgggggcaatgccaggccaggaagggcgggcaccctcgcgcgtcctggggacagaagggcgcgcaccgggcgcgtagctcctgagccccgaggcccctgc

SEQ ID NO: 238680 - DNA, 122 bp, Homo sapiens
gttctcccggatttacctgttgaggcgctggcgtcgctcccacgccggtcccggtggccgcgcccgcccctgccacagccccggctaccgcggtggccgcagccgctaccacaaccgtcgtc

SEQ ID NO: 238681 - DNA, 122 bp, Homo sapiens
tgcctgagactcagctctgccacaaagttaagtaacactggacaagtcacagtttctctccgctcatttccttcctgctctctaaaaccaggggaacaaaggtgctgtattctttgcagagt

SEQ ID NO: 238682 - DNA, 122 bp, Homo sapiens
tcgagggaaagacctttctttcagggtgttttcagcctcaccagacctgcaagcagcccccgccgctctcaggcccacgccgggatgcctccggcacgagggaagcgggcagccccgcgtgt

SEQ ID NO: 238683 - DNA, 122 bp, Homo sapiens
caccaacgtccctgaggaggagcctgggtgacccacctgtagcagtggccgggctccgtccgtcctgctctgcccgctcgctggtcagctgatgcctgggagacccaggtgacacggaagga

SEQ ID NO: 238684 - DNA, 122 bp, Homo sapiens
tggcctgagacttgaaacaaacaaacaaacaacagattctggtgctgcaaactctgctagcgcagaactaagaaaacgtccctagagacgggccccgaaaggacgcctctgagtgccgcagc

SEQ ID NO: 238685 - DNA, 122 bp, Homo sapiens
cgcgagtcctggcgccgagagcgttccgcgaagcctcccctcccgctccgcagcgctgggcggtctcagcctcggcctcgggctcttatccagtagacagggtccgccccgccccgccctcc

SEQ ID NO: 238686 - DNA, 122 bp, Homo sapiens
gctcagggcctcagacgccgggacctgctgttcacgccggggcgggccgctggctgtgtccgcctgagctgaggtctatggcccagagggttgctgaccccgccatcctccctgtgtccagc

SEQ ID NO: 238687 - DNA, 122 bp, Homo sapiens
acccctctctcaccccagagttcaagcaccaaccgaaaagattgagagtagctcagggtacggtaaacggaggaagctttgaaaaaggcggggaaagcctgggatggcgagggggtgctcgc

SEQ ID NO: 238688 - DNA, 122 bp, Homo sapiens
ccccactgcctttcccaggaccttcactcgtcctgtcccaccgcagccccgcctcctccacgccgggtgagctgtggcctagcagcatccgaggctccgccccccccacccccaagcgtctg

SEQ ID NO: 238689 - DNA, 122 bp, Homo sapiens
aggtggaggctgcatgatcctgagcccggctgtgcggtgaaggctgcgtgatcctgagtccgggtgtgcggatacagcccgcgtgaccctgagcccgggtgtgcggatatagcccacgtgac

SEQ ID NO: 238690 - DNA, 122 bp, Homo sapiens
gttctggcctctccttccctgaaaggtgtccccagggccacatggacgcccatccctccccggacgctccccacccctgcccgggaaagccacccagaattaaatcctggggtggaaggagg

SEQ ID NO: 238691 - DNA, 122 bp, Homo sapiens
aactaggagggagacggatgggtggtgccctgcagacctgtggattgaaataagtgttcccgggaggcaaccgtgggatcagggatcgacaggacatgggatctgagacttgggtgagattg

SEQ ID NO: 238692 - DNA, 122 bp, Homo sapiens
ttcatctcactagggagcgccagacagtgggcgcaggccagtgggtgcgcgcacggtgagcgagccaaagcagggcgaggcattgcctcacctgggaagcgcaaggggtcagggagttccct

SEQ ID NO: 238693 - DNA, 122 bp, Homo sapiens
tctattatttttatttttgcaaaatgtttattttcactgtcacctgggatttctttgcctcggttgaatgtattgaaagattatatcctttatttaaagatgtctcattttacccccttgca

SEQ ID NO: 238694 - DNA, 122 bp, Homo sapiens
cattcagaaagctttagacaggacagtctagacagtccaggcccgcgtctgcaggttgcccggcaacaggcgccgcagcgcagggcttctgattacactctgacctccagggacgaaaaggt

SEQ ID NO: 238695 - DNA, 122 bp, Homo sapiens
tgagtgagacgttgcatttttggcgatgtcatcccaggcttcacctgtcacatctgtcaacgactccaaagtttgggtcccaacttcccttccaattcccaagccagcgtgtccagatatgc

SEQ ID NO: 238696 - DNA, 122 bp, Homo sapiens
attattattcttcccttacgtccccccagcccccacctggggcagtcgctctcccggctgcgtcccttttcgtccatgtcctagcagagactacagagcagtacagaggctctcgctgaaac

SEQ ID NO: 238697 - DNA, 122 bp, Homo sapiens
tgtatgcacagccagatgagtggcaccaaaaccatcacctacaggaaattgttccaactccggccctacagatctgttgcctaaagatgcatgatctttgatatgggagagcagtcaggcag

SEQ ID NO: 238698 - DNA, 122 bp, Homo sapiens
acttggattggaagaatgaaccaaggctttgagtctcttcgtctcatctccgttttgatacgtgtctccttagtttgtaagccaaggagaggactacagtgaggattgtggagggaagtgga

SEQ ID NO: 238699 - DNA, 122 bp, Homo sapiens
cagagcgaacctgtgcggctgcaggcaccggcgcgtcgagtttccggcgtccggaaggaccgagctcttctcgcggatccagtgttccgtttccagcccccaatctcagagcggagccgaca

SEQ ID NO: 238700 - DNA, 122 bp, Homo sapiens
cctgccgggacggcacggaccccagtcagcccgccgagctcctcggggaggtggaccgcacggaatttgaacagtatctgcacttcgtgtgcaagcctgagatgggcctcccctaccagggg

SEQ ID NO: 238701 - DNA, 122 bp, Homo sapiens
cctacagctggagggaccttcaagggatcagtgaggtccacaatgggcccctcaccccaacgcttcctagttttatctgctgaggcccaggagcaccccaggatgggggcagcaccagattg

SEQ ID NO: 238702 - DNA, 122 bp, Homo sapiens
atgatggggcggtaatttattcaagcagagacgatcaccgggctcctgtgtctgccctcgcgtcagaggagccgtgcaatggcagggggagggcaggtgtgtctgactgcacgcaggaatgg

SEQ ID NO: 238703 - DNA, 122 bp, Homo sapiens
ttgcctttcggattctctctctctaatatctacacatttccacagccaccccagagccagcgatcagatccggccaaggatgtctgcagaaacgcctaacatagagactctccctctccaag

SEQ ID NO: 238704 - DNA, 122 bp, Homo sapiens
ccccgtggtccagcaggaagcggacaatttctgcagaccaggagacgtaagcccagctcccgatgccccgccaggactgactcttcgccccacgtgtccaccaaggtgcgccaggctccttc

SEQ ID NO: 238705 - DNA, 122 bp, Homo sapiens
tgggcgccgggcagcagggacttctccaggccggttcccgggccacgacacccggtgggccgagcaagggagagcaaccacttcatctccacgccgctcagagttgacacagcaggggccgg

SEQ ID NO: 238706 - DNA, 122 bp, Homo sapiens
tcaatggcctccgcctcagggctgggcagcagggcaggctccccagagatggtgtacactcgaggctgagggccctcgcctgcgggcttcctaatgctgggctcctctgagaggctgccctc

SEQ ID NO: 238707 - DNA, 122 bp, Homo sapiens
cacccaagccctgcggccagggaataattctaagggctctcccctttggatgtctagggtcggggcggtctcggctccctggatcctctggtgtcccggcaccgaggggcgctcggcagcgg

SEQ ID NO: 238708 - DNA, 122 bp, Homo sapiens
aaccaccccagaacaacaatgaaggaaaattccagaatgacaactgtacagcaagtctagcgagcagccagtccagattgaaataagaggaaggaaggctctgggacaaaaactccaaagaa

SEQ ID NO: 238709 - DNA, 122 bp, Homo sapiens
ggtgtctggcgagaggagtggataagctgtagtaccttcacacatgggatgcacctcacccgcccacaagaacccgcgagcggagacacggggcaccaggaggactctgaagagcagagcgc

SEQ ID NO: 238710 - DNA, 122 bp, Homo sapiens
cagccggacactgttctggacgtgcgaggccaccaataccatcaacgtccacaggctgagcggggaagccatgggggtggtgctgcgtggggaccgcgacaagcccagggccatcgtcgtca

SEQ ID NO: 238711 - DNA, 122 bp, Homo sapiens
aaagtgtgggagggggagccgcgggggtgcgcgctcctcctaactcggggtcgcttttagcgagaagtgatatttttccagcctcattgaaaaccgttgcaaacattgaaaatagtaaaagt

SEQ ID NO: 238712 - DNA, 122 bp, Homo sapiens
aaatgtcattttctacaagtggaaatcgtagattgtgagcctcaatcattatctggggtacgggaaggtggcatagctgaagactttaattttggagtacttgaagaatctaaatcaatctt

SEQ ID NO: 238713 - DNA, 122 bp, Homo sapiens
cccaggctctagcgccacaccgccccggccaaccccgccgacgccgctctgccggccggacgctggcttcaacgcgactccgacttaggttcacgcgccgcttccgcctcccccggccccgc

SEQ ID NO: 238714 - DNA, 122 bp, Homo sapiens
ctctgagttggccccaccggccgggaccctccggccgcgaccctctgatccttcctctgccgggccctgccttcagaatgaaggcagatgaggggcttccaccaacaagctgagagtactgt

SEQ ID NO: 238715 - DNA, 122 bp, Homo sapiens
cccccatatgaggtgaccacagaaccacagattggactcattcattctgcgcagcaggagcgcttgctaccattcacgcactttcaacctccagaatgccccgacccacggcccccaaccac

SEQ ID NO: 238716 - DNA, 122 bp, Homo sapiens
ttgttgtgactaagaaaggagagtatgatttctggtggttatgatatcactctggctcatcgaagctcacagaatatgtaaggttctgccacgtccaaagatgttaggcaaatgtaatagaa

SEQ ID NO: 238717 - DNA, 122 bp, Homo sapiens
cgcatccaggggcacaaagcttaaggggaagaagcaggctggggggctggtggcaggtcccggccagcacacagggtcaggggcccttgttcccggccccacccagcagccaccaagtggac

SEQ ID NO: 238718 - DNA, 122 bp, Homo sapiens
ggctggtggattacctgaggtcaggagtttaagaccagcctgatcaatatggtgaaaccccgtctctactaaaatacaaaatttagcccagcatggtggtgtgcaactgtagtcccagctaa

SEQ ID NO: 238719 - DNA, 122 bp, Homo sapiens
ttcacttttctgagaggtgtttttcatcactcagtcactgtgacataccgtggcttgaggcgagcagcaggcggcagcccctgcaaactttaaaggccggggagggacacacaaggctggtg

SEQ ID NO: 238720 - DNA, 122 bp, Homo sapiens
ccccgcgggcagcccttggcgccccgctctgcgcccgccggcatgaggactcgtgcgtggcgtttcgaccctccgcctgaactgagactgggtggggaaaggggcagactgctgtctgtgac

SEQ ID NO: 238721 - DNA, 122 bp, Homo sapiens
tcggtcgcccatgggaaagcacccggcagggcgtggcttcggggcggggcgggcagagggcggagcaggatggagaggcgaggtgggcggagcagagggcgtggcttcggggcagagtgggc

SEQ ID NO: 238722 - DNA, 122 bp, Homo sapiens
aaggatggattcaaaagagtacttatttattttactttactattacttcttaatagataccgaggagtcttcatagggctaagggaaagagacagaggaaagaaaagcttgtgttggtgtgg

SEQ ID NO: 238723 - DNA, 122 bp, Homo sapiens
ttgtgccccttttcctcatttcctcatcactaacaggcggggaaactgaggttccccaggcgaagcgactgacttgcccagaaccacactactggggtgggggcagcaaataggcgcctaag

SEQ ID NO: 238724 - DNA, 122 bp, Homo sapiens
gtatatttgaaaagaaagtccctgttgagttgtttctgattagggacatttaagtggcttcgtagcaggatgaacaatagcaggcagttgccttcagggtgagatttaaggaggaatactag

SEQ ID NO: 238725 - DNA, 122 bp, Homo sapiens
acttggattcggacttgcgaagtttcatgcttccaagaagggagcccctccggaagaggccgcccttcttcttgcccgctagctcagcgtctgcgtggaagttgagcacgaaaccgccgcgg

SEQ ID NO: 238726 - DNA, 122 bp, Homo sapiens
gttatttttccaaccacacctattccctctagtgcccagatatttgatttgtgagctgtacgtttcaccttttcatctttgatctactaaaaactggtttcttagttgtgaggtgtcacagg

SEQ ID NO: 238727 - DNA, 122 bp, Homo sapiens
ggtgcgcgggactcgggccgcgccctggtcggccatttcgcacactcggggcgcgcccggcgggctgggcgcgcgaggcctgtcctggagcgcaggagttgaggggctgaagaccgggccgc

SEQ ID NO: 238728 - DNA, 122 bp, Homo sapiens
ctgctgtcagatgcacgtgagactcagctgtactcaccggcgaaataaacgttttggctccgggaaggcagaaaacgtccactttgagagaaactcacaccctgcataagccactaaccggt

SEQ ID NO: 238729 - DNA, 122 bp, Homo sapiens
accccgtgatgctccttgtcactacagctttatgttttggagaatgacaagtaaattgaacgaagcagtgtgtaacatctttaagaccggcttcactcagcacagtgtctctgagattcatc

SEQ ID NO: 238730 - DNA, 122 bp, Homo sapiens
atgttctccatacaactttaaagttgtacagtgctttctgcagtgaaatgaattttttcacggaatggatttttttaacgagtcttgaaattaacatgtgaggagcagcatgacacattacc

SEQ ID NO: 238731 - DNA, 122 bp, Homo sapiens
cacgggcgaacttggggcggctgagtcgcggggccacgcgggcactttgggggcggtgtccgggggaagcgggctccgcgcggccgccgccggaaggagagggcggccccgggctcgtgtgg

SEQ ID NO: 238732 - DNA, 122 bp, Homo sapiens
ccagggcctaatcttgtttgtgtagtgtctctaattccttcattttgaccacagctcttacgcaccctgtatatagtaattatccatgagagggagagtttgggaaatgatacccttgtcaa

SEQ ID NO: 238733 - DNA, 122 bp, Homo sapiens
ggcagtcagtttcctcttcctaagactgggtgtggtttctctgggcagactacacagtggcgactctggcgggatttgaggagcctggagaggcccaccacgtgtgtgtctccccctagtga

SEQ ID NO: 238734 - DNA, 122 bp, Homo sapiens
ctgaaccgacgctgaaagtatcaggccttccgcttagcgctgccttcgagatcagtctctcgacccctgttaggagcaacggcggtgaggcaggatgaacggcctcatccacggagcactgc

SEQ ID NO: 238735 - DNA, 122 bp, Homo sapiens
cagatgagcaagacaatagtgacaacgcagcatgattcatgctgagagtgccggggagggcgggaggccaggcagggtttctcacgggaagtcacatttgaactggctttctcacacttgtg

SEQ ID NO: 238736 - DNA, 122 bp, Homo sapiens
agtttccccggcggcggcggcccgggggcgcatcctcccgcaactgtcaagcgctggcggcggaaatgatgaggcgctggccattttccgagcccgggtttcctgcctgagccccgctcgag

SEQ ID NO: 238737 - DNA, 122 bp, Homo sapiens
ggttaaggagaggagattgcgtggctcggagcagccagacccggtaagccgactccttcccgtattccgctttaaccaagcttgtttccctggcggccccacaaattccctgagcggagcgt

SEQ ID NO: 238738 - DNA, 122 bp, Homo sapiens
cttgtcgtcgccgggcgttggcggccctatcttgctgcaggtagcggccagcagagcaggcggtgacggctgagtgtcctacccacgatgggcgggttcagagagggagacaaggggatgag

SEQ ID NO: 238739 - DNA, 122 bp, Homo sapiens
catctagggggttttgtagaacaaatgtaggtgcaatgggggttggcagtaagtagccctcgaaattcattactgagctgttggcagctctaggaaaagtttaatggaggagactaaaatac

SEQ ID NO: 238740 - DNA, 122 bp, Homo sapiens
aggaccacttcccaaatcaatgaaacgaccgtcctcttttgtgtcttgacttcaggtgtccggccgaacgacggagtcttttcctttcttgtcgatgcagtttctcagcctcctgttgcttc

SEQ ID NO: 238741 - DNA, 122 bp, Homo sapiens
gagatctgggtatttctgggtatctctgggctctcattggctggatcacaggggcttccacgacttgacagccaatcactgaggagcttgatgaagtccccttctgtctgttgaaaacttta

SEQ ID NO: 238742 - DNA, 122 bp, Homo sapiens
caagctgtctttgccgctgctcctgtaggagttgtgagaaagagaaagtgcacattatagcgtggattgttttcaacaggcttgaagtttgcaaatctgctgaatccctctgtcagtgtttc

SEQ ID NO: 238743 - DNA, 122 bp, Homo sapiens
ggagtacagcagcggaagccacaggtcgggcagggaggagtggggggccctgcgtgggtacgctgatgccgcctcaggttgcccaggctgctgcaggcaaaggggcagtggggacagcggta

SEQ ID NO: 238744 - DNA, 122 bp, Homo sapiens
tttggaggggtgcaggtgacttgtgtcttagagctgacgcagattgttgcgagatcattgcggagaggcaggcctgcagcgtgacctgctgcgggtccggcccctctcccttttccagagcc

SEQ ID NO: 238745 - DNA, 122 bp, Homo sapiens
cttcccctccgatgcggacgcgactttctcccaccgcaacacttgcaaccgggtcgggagcgagcgaggccccagtctcaggggaccggaagccagcggcaacaacttccggcgggccgcgg

SEQ ID NO: 238746 - DNA, 122 bp, Homo sapiens
cgattctagatgacgtcatatacacgtttgtccaatccaaagaagcatgtttcataacagcgattccattggttgaaataaaactgtaatttgagccaatggcacagctttattttcgcgcc

SEQ ID NO: 238747 - DNA, 122 bp, Homo sapiens
ttttctcttctcttctctcttttcttttctttctttttttctgagactgtctcactctgtcgcccaggctggagtgcagtggcacaatcttggctcaccacaacctccacctcccaggttca

SEQ ID NO: 238748 - DNA, 122 bp, Homo sapiens
cctagggctccacaggtgtaggcccttaaagtgccttagggtgtggcctgcaggctacagcgaccttaggagtttgcctgaagcagtctcggaaggatgtccggacctggcctggggacaag

SEQ ID NO: 238749 - DNA, 122 bp, Homo sapiens
ttgactagaccttgatcccaagaaaaagacacctctgcgaccaggtccctggagaagctgcgtgaagcccgccgtgtggtagtgcccacccgtcaccctccccacgccctcgcctgcaattc

SEQ ID NO: 238750 - DNA, 122 bp, Homo sapiens
gaggaaagtcggcttcgactgccatcttttggggatttcgaaaaacgactcggtaggaaacggagggaggcggaggcgcgggagtgggggaaacccccttattatccagtgtcggaactggc

SEQ ID NO: 238751 - DNA, 122 bp, Homo sapiens
gatttcctgctcctacggggctccaagtctgagtggggagaagcagcagcaccttgaggacggcccaggccactgaagccatgctctcttcagccaggcgccctgagacccgggcaaggcga

SEQ ID NO: 238752 - DNA, 122 bp, Homo sapiens
ctttggcttccattaacccctggccggggactggctcctgtgaggcttctacacaattaccggtaaggagcatttgccagtcgcagagggaggtgttgcccaacgctggctcccgatgcctg

SEQ ID NO: 238753 - DNA, 122 bp, Homo sapiens
gctgagtagacatagcactgcctacagctgctacagttgctgtgagcactgagatgatgccggtgtgaggatggccccctgatgcacagtaagtgcttaataaacagtagtcgtcataaatt

SEQ ID NO: 238754 - DNA, 122 bp, Homo sapiens
ccgcccccaagatgaggactgggcacggcgggcccgcgaggagcagcagccttccggctgcggagctgctccaggaagtctcgggctccggaggtccctctgccgcccctaacccctgcggc

SEQ ID NO: 238755 - DNA, 122 bp, Homo sapiens
ccattttggacataacatacaacataatacatgtaacacgcacagaaacacatagaaacacgtatccatacacacaaagatcaaatagatgttaccgtgaaactctagccatgacatggcat

SEQ ID NO: 238756 - DNA, 122 bp, Homo sapiens
tggggggcacatatggcagtgtcaccggctcctcacctgtgtccacaggtatccaggctccggagctttctcacggtgaaggtgattgagtgagccgccgagcggtggggacagaaatcttt

SEQ ID NO: 238757 - DNA, 122 bp, Homo sapiens
gggccaggcggcgggagggatcatcttccgggagcgtggctaggggcggagcgactgccgcgcgatagtcagggagctgtgcgggtcctggttgcaagagaggtggggagaggggcctggcg

SEQ ID NO: 238758 - DNA, 122 bp, Homo sapiens
tcacacaagtcagcgcaggtccccagcatgatgtctacagactacagctatgccagaaatcgttaggatggcctccagctgtttggacactatttgcacacaagttacatttagagcagaac

SEQ ID NO: 238759 - DNA, 122 bp, Homo sapiens
atgggcccgagtttaccttcagggcaacttggttcctcgctcgggcagctttgtgtagggcggtcatcccatctttggcacggaagtccaggtgagctccaccatttttgagagctttgatg

SEQ ID NO: 238760 - DNA, 122 bp, Homo sapiens
ctttttctcctgctttgctttgcttggttaacagcatgcacacagctgtgcagtaagagccgcagaggtttgctgtgtctcttcatgacctgcaacccatctggggccctgctttccacctc

SEQ ID NO: 238761 - DNA, 122 bp, Homo sapiens
ctctaaggcttaagcgatggagcaacgttttcttggctgtgcgaagggggcttgggattccgcagaggtggcgccaaagccccagcctccacctgctctgggttcagaaggttgtgggcggt

SEQ ID NO: 238762 - DNA, 122 bp, Homo sapiens
ggggcttgaggtggggctcacaccaagaggaaaccggttctgggaatccctttgcagcaccgcgcttgttttggttgttgcgcggggttgttgttggtagtggtggcggtgtgtgtgtgtat

SEQ ID NO: 238763 - DNA, 122 bp, Homo sapiens
gcgggttcccccaacagctgtctcctccgcaggcctgggtcggggcccccggggtccccgcgctcccgccgagtccctgcccaccgcgcagcccctgggagacttacagccgggcaggcggg

SEQ ID NO: 238764 - DNA, 122 bp, Homo sapiens
ggcccaggtatctcagattcccagacagactcccggctctcgccttgcccgtgcccaccccgcatgttatttctgagcacctactatgtgcagggccagggatggggccaaccaggaagcag

SEQ ID NO: 238765 - DNA, 122 bp, Homo sapiens
tgacagctcacagacaaatagaagtgaacccagaggggtgaaaagcaaccagcctcccagcggtcagggaggtagaagcctaaatggggtcctgagatttaaatgcgaatcgccttcccatc

SEQ ID NO: 238766 - DNA, 122 bp, Homo sapiens
tcgaagtgggtgaagtagaggcgcaggcggtagccggggggtgcagtcagggtccagcgccgctcctggtcattggcatactcccctggaaagccgggggatgccaggcgcccgaacacagg

SEQ ID NO: 238767 - DNA, 122 bp, Homo sapiens
ccggcgcgtcgcacagcttgctgggagaaaaaggggcggtaacaaaagtttctataacaacgcaattcgaggcggtgattgggtgttctttcataggggagtgtaaagaccgtgaagagggc

SEQ ID NO: 238768 - DNA, 122 bp, Homo sapiens
ggggcagagggggaaggcaccaggagccccgggcgggccagaggagcatactttacatttcgatattcttccagagtgatgcggccgtcgctgtccgagtcgtacatgtggaacagaactag

SEQ ID NO: 238769 - DNA, 122 bp, Homo sapiens
ataggcctatggcggagggatcactcgcttattctctgtgtactttaacctaatgggggtcgcccgggagtcggaagggggaggggaaagggaggaggcagccaaggaattgtttttttctc

SEQ ID NO: 238770 - DNA, 122 bp, Homo sapiens
acaaacactagctcattatttacagtgaatacccaacaaaaccctgctcgaggtgaggagcggggacctgctgctccaacagaccagactggctgctggctccgagctcattaaatcagcaa

SEQ ID NO: 238771 - DNA, 122 bp, Homo sapiens
gggaagaaaaagcgtctccacagccttggcaacacttgtgattttgttttcgatggtagccgttctaacgggattgaggagccattcgttacttcacaggtggacagcagcagctttgtcgg

SEQ ID NO: 238772 - DNA, 122 bp, Homo sapiens
ggcgccgccgccgcccgggagttgtgtgcagagctgacttttggagggccgagttgcaggcggcgggcgcatcccggagatggcggggcagggagggagggaaggaggagggggcggggagg

SEQ ID NO: 238773 - DNA, 122 bp, Homo sapiens
ccccactgtggataccaaaatcctcagatggatgttcaagtctgtgatatacaatggcatcgtatttccataaatccacacaatccttctgtatactttgtcatctctagattacttatgct

SEQ ID NO: 238774 - DNA, 122 bp, Homo sapiens
gattcagctagccgtgggacggggccgggggtctgcagctccagggtgcgcctggggtcccgccgggtctgaggagctccggctcccgcgccctccgcccccaccgtcgtgagaacagcgcg

SEQ ID NO: 238775 - DNA, 122 bp, Homo sapiens
actggctgccaggcactcactggcattggtgctcagggcaatgaatccagtccatctctccgggtcattcacacaccaaggccctgctcacctttggaaagctgggggactgagtggggagg

SEQ ID NO: 238776 - DNA, 122 bp, Homo sapiens
gggcggccgcgttcgctccttgcgtgtgcgtcgctttcacactcggcggctgcggattgacgcctccgcctgttccccggaggagagcgagtgcaagagaaaaaacacttttattgaaacga

SEQ ID NO: 238777 - DNA, 122 bp, Homo sapiens
cccgcaccccgcaccccggcatggctttccccgtgggcgcttttcggcgcatgctcagagcgccagcagggctgttctgcccctacagaggcctcctagtcctggctgagcgggaacctcaa

SEQ ID NO: 238778 - DNA, 122 bp, Homo sapiens
tttatccctctatttatattacggtctttttcttccctcacatgctcaatacatgagacacgctattgctgttgaattcataggaatgcataaatagactttcttccactcagactgaatat

SEQ ID NO: 238779 - DNA, 122 bp, Homo sapiens
ggtgatccatccgcctcggcctcccaaagtgctgagattacaggcgtgaaccaccgggcccggcctgttgttgttttaatagagacggggtcttgcatggttgcccaggctggcctcaaaat

SEQ ID NO: 238780 - DNA, 122 bp, Homo sapiens
cccttccgagcatgtcttccccgtcacagagaacttcatgttggcgcctccaaaagttgccggaggaattagggaacagggtgggggtggatgagactgaggccagagagggggctggcggt

SEQ ID NO: 238781 - DNA, 122 bp, Homo sapiens
ctccttcccctattttacagataacaagacctctgccagaagaaccatggctttggaaggcggagttcaggctgaggagatgggtgcggtcctcagtgagcccctggtgtgtggacccttcg

SEQ ID NO: 238782 - DNA, 122 bp, Homo sapiens
tcccaaatcgaaaccgttttttcccccgaataaagtgtgcccgtgtagctgtacagatttcgtcccctgaaaattcatctgaaatctcaattctcctgaggggagcaattaaggaagataca

SEQ ID NO: 238783 - DNA, 122 bp, Homo sapiens
cagtggggacaccctaagtcactgccttaagaaaaccacatctttcaacctgtcttaacacgaaggcatcctaatactatcacactgccccctccctccgtccaccccccccccccccccat

SEQ ID NO: 238784 - DNA, 122 bp, Homo sapiens
aatcacctttcccactttcttaaatgactggggataagccggcatttgttccagctctatcgttctaatgctttcttattccccaaatgcatctagttctatgattgcattctgcatctctg

SEQ ID NO: 238785 - DNA, 122 bp, Homo sapiens
gggcgccgcgaatgcgattagctccagtaccgattagggctgaaaggagcttggccctagcgctcttgcaagccgggcctgaaagaggaagtcctgaaaatgcctctcgtttagctttgtca

SEQ ID NO: 238786 - DNA, 122 bp, Homo sapiens
ggggcttctcattttagcgtgggtggcagaggcctggagaagcccgaggtcacttcagaccggccacctccttggaccttcccttcctgacataaaatgatgactgtaatggaggctctgca

SEQ ID NO: 238787 - DNA, 122 bp, Homo sapiens
gcccctccccggaaccggaagctaatggcgaaaccacggagagaaggaagtgaagaagcccgagtctgatctttatggtttatttgactagagcggcctgagaaaccggctgagcctggtta

SEQ ID NO: 238788 - DNA, 122 bp, Homo sapiens
caagcgccttcccgcttggagccttgtttccttcctggataaatgggcggggaagcatcacggaggtgtgcgggtttaatcggcacatgcgctgctgcctgcaggccaagctcaggataagc

SEQ ID NO: 238789 - DNA, 122 bp, Homo sapiens
tttttcactgaacttctcattcgtgactattctaaaatcaaccaggaacttatcgagtgccggccatgagcccagccctgtgaaagatactgttgtgggagagaaaaggggtctaaacgacg

SEQ ID NO: 238790 - DNA, 122 bp, Homo sapiens
ctattcagtagttgcaatcaatacatatattcatttactttacacccttactttaaaaggcggcaagaaaaaaaaaactacccactccatcattcaattcaatttttttttcagacttgaga

SEQ ID NO: 238791 - DNA, 122 bp, Homo sapiens
tccactttcgtttccattcctgcagacctcttctgctttgggaattttccactctgtggacgtggcctgtaagatgggttccctcctgccaccagctccacccgattctctgctggagaatc

SEQ ID NO: 238792 - DNA, 122 bp, Homo sapiens
gacccccctaaggaatgaaaggcttatttccccagctcctggaagagctgagacagacctcggctgccagcctccgtccatgattgacttggctgaagagagttgaagttaggccctttcca

SEQ ID NO: 238793 - DNA, 122 bp, Homo sapiens
gtattgctttggagagtttttctttgaaaagcttttattgacttttgctaaaagaagaagcgatgtgtcagattctaaatgaaatcctctttctgaggagctgtgaggtccccacaatgtgt

SEQ ID NO: 238794 - DNA, 122 bp, Homo sapiens
gtgaggaggagctgaccatgtatgggcagcggggattgttctaggcggagaccgctgtagcgaggacctatcccctgtgacacacgagtggcccttcaggatgccatgctgggctggagggt

SEQ ID NO: 238795 - DNA, 122 bp, Homo sapiens
ctctgctgcggttggagcgctccaccaggatgtccagatgggctttgattgcggcgatgccggccagcccgccctgcgggtcaaagcgggcaaagtcaccaaactcaggcagacgccacacg

SEQ ID NO: 238796 - DNA, 122 bp, Homo sapiens
cagagggtggcctgcggcggcgcgagggtctatgggacacttaccgctggcactcgccggcgtgcaggatgagtgcctcgctgctcctggtgctgacggtcagctcatgctcggtggagttg

SEQ ID NO: 238797 - DNA, 122 bp, Homo sapiens
gccgcaggccctcatagctgctgaggagggacatgcctggcagccagcggcggcagctggcgggggccagcaggccggccagggacagcagaccctgctattgtgaggtcagcagctgcccc

SEQ ID NO: 238798 - DNA, 122 bp, Homo sapiens
cacaggctctgacctgagagaattctttttattacgagtgaacagatgaactaaggtaagcgggtctcagccttccgctggtgcagcatctccacgcagggcctcagccccgtcctggcctt

SEQ ID NO: 238799 - DNA, 122 bp, Homo sapiens
ggagctctaggccccacctctggagacatgctatagttgttaagtccaggaagcagtcagcgaaaccagcctgatttttttgttgtttgctcttttgggaaaattttttctgatgtttggag

SEQ ID NO: 238800 - DNA, 122 bp, Homo sapiens
cattagttaggcatggtggcctatgcctgtagtcctagccactcgcgaggctaagaggggcgtatgggttaagcctagatggggccattgcactccagactgggtgacagagggagagtctg

SEQ ID NO: 238801 - DNA, 122 bp, Homo sapiens
tgccggaaaccaatcctcccctccttcctcttccccgtccttccactagcaagaggggaacgtggaaggaaactaactttgacccctggattctggctctgggcccaaaacttgggtggaag

SEQ ID NO: 238802 - DNA, 122 bp, Homo sapiens
acacacacagacacccacgcacgcagtggcggggcacgcacagccacccccacatggccacgaaagcagctggaatccaggtgtcagcagggctcctctggggtcacctaatccatcccctg

SEQ ID NO: 238803 - DNA, 122 bp, Homo sapiens
gaaggggaaaaggcagaaatcacaactcataggccagcgtcttgagcgacacttcctcagcgggaagaaccggcaaaaaaggccttccaagatggcgggccctgacggggccgccccccttg

SEQ ID NO: 238804 - DNA, 122 bp, Homo sapiens
ccacaaacaggttcccacacacggggccgcccaccaggtggctgaggtcaggggcgttggcgaggcacaccgactgcggccgctccaaaaagctctccaggtaggcctggctgcagtcactg

SEQ ID NO: 238805 - DNA, 122 bp, Homo sapiens
gggacagcccggcttcctccacccgagggggaaaacaaccccaggaaaacaacttaaactcggccttggactgtccatcaagggaagccaaacgaggcgctgctctccagacctccaggagc

SEQ ID NO: 238806 - DNA, 122 bp, Homo sapiens
ggggaactacgggtattcttggaagcactttacgtcagttgcgacgatgggtgtattttgcggtctgtacaagaaaaacaaagtacggagcgagcgtagagttctcgcgccacccgaactag

SEQ ID NO: 238807 - DNA, 122 bp, Homo sapiens
ctttcacctacctggagaacccaagaaattttcatcttactaggaattcagagacaaccacgtatttaacttttaaaaatataactaagtagaaagaattatatgcgtgtatttttggaaga

SEQ ID NO: 238808 - DNA, 122 bp, Homo sapiens
taattggtagctttgctacttactataattgcaaagtctgggatctttcctctacaacaccgtagccttctttactttttttaagacaagctctctgtcacccaggctggcgtgcaaaggta

SEQ ID NO: 238809 - DNA, 122 bp, Homo sapiens
cagctagaagctaatccctctcctaagaatgtccttattctggcagggtgtggtggctcacgcctgtaaacccagcactttgggaggccaaggcgggcagattacaaggtcaggagattgag

SEQ ID NO: 238810 - DNA, 122 bp, Homo sapiens
gccgccgcgctccagccgccgggggcctcccctggacaccaagtttctccttgtgttgtgcgtttgttgtgctgacggcgctattattaattaaagtgtcacatggtggaggggggcgggga

SEQ ID NO: 238811 - DNA, 122 bp, Homo sapiens
ttttaaggcttgataggtcctacccacatggctctctgaggagctgtgcgagtttaccttcgacgatggcccacagaaacgtagtgatggtggctggctttttaaaggtgatgtattcagag

SEQ ID NO: 238812 - DNA, 122 bp, Homo sapiens
atcaccgaagctcaggatcggccgggagtcggaagtgcctgcggaagtttttttctttttcgtttttaacacggaatctcgctctgtcgccccagctagagtgcagtggcgttatctcgact

SEQ ID NO: 238813 - DNA, 122 bp, Homo sapiens
gccaggtgattacaaatggtgttctcaccaaatgcttcctatagactattacacatgccacgcacttcaccagccaaagtaaaagtcctttactcaataaatcacccactactccccaagag

SEQ ID NO: 238814 - DNA, 122 bp, Homo sapiens
taacatatgtcctcttctccctttcggcagtgacggcccccagctccccgctgagccccccggtgtcccccgtgttctccccaccggagccggcaggcatcaagaatggcgagtgcacggtg

SEQ ID NO: 238815 - DNA, 122 bp, Homo sapiens
aataacaatgtaatgagcaattatgaggcctacaagccttccacaggagctatgggagatcgactaacggcaatgaaagcagctttccaggtctgaaataagcatttcattaaaagcacttt

SEQ ID NO: 238816 - DNA, 122 bp, Homo sapiens
gaaacgcagtcccaccgcggcccaccgcggctcccgggcggcctgggctgtacctgtgcgcggcgtcctttctgcgctgagccagggcaccccggagcctgcggcctccttccccgcccctg

SEQ ID NO: 238817 - DNA, 122 bp, Homo sapiens
ctggctaatttatagtggcccagaagtgtgattacttgtttcaaggccctatccttggttcgccttcactatcctagaaataggatagcttctgtacccgccagctacagaagctgaatttc

SEQ ID NO: 238818 - DNA, 122 bp, Homo sapiens
ggatgcggaccagcttctggttggagcagtccacaatcgtgccctcacagcgacacttctcggggcacacgaggtccatgaagcactcgctgctgaacctgctgcggtaatcctcggagcct

SEQ ID NO: 238819 - DNA, 122 bp, Homo sapiens
ccttttaaatcatgcctgaaagcccaactcctctgctaggcagggctattttagctggtacgggacccatcatccttatggctccaggacagactctttgtctcaccctagtgcagaccaat

SEQ ID NO: 238820 - DNA, 122 bp, Homo sapiens
cctgccagtccgggccaatcccgaacacatttactttgagcgggaaaagctcagaagcggcgagagagcgtggtccgctaaccgccccttcctctccttgtctctggggggtaacggagcct

SEQ ID NO: 238821 - DNA, 122 bp, Homo sapiens
gcgtgtggacgccacacgctcccggaagtgggaggtggccgctggagtttgtgtggccgccgccgcgggaacgcgagcccggtaatttttcaacggagaaaggcgaggctttcgggctctgc

SEQ ID NO: 238822 - DNA, 122 bp, Homo sapiens
ttttaaataagacaaagatgcaggatagttgcaggatagctgaaactataccattaattacggatagtggcagcaaggattgaaacaatttgtagaaccctggagaagtccccagactttcc

SEQ ID NO: 238823 - DNA, 122 bp, Homo sapiens
gcgtgaccagctcgtgcatggtgctgaaagttttggagcagaggctcggggtcgcggtgccgtcggccgccagccacttgcagatgagctcctgtttgatgggctggcgcatgtagcggaag

SEQ ID NO: 238824 - DNA, 122 bp, Homo sapiens
tcctgagggctagactgagcctgtcctgattcttttccctttccattagctctgtgcttacgagttcccaacattcttcagatccaaggctttcatgaatttatagtggagaaagaatcgta

SEQ ID NO: 238825 - DNA, 122 bp, Homo sapiens
aatttttctgccaattatttacatagtctgctgtttgtactgtggaatgcaaagcaactccggctactgcagcagtagctgtgacagcaatcaatcccataatgattttaaagtggcaacga

SEQ ID NO: 238826 - DNA, 122 bp, Homo sapiens
tgccttattctgctcttattctccagcacttgaggcaatcattcccagatagtggaacctcgaatggcagacactgtggttctcctgcggggctgagaactgtgaggagcagagcagacttc

SEQ ID NO: 238827 - DNA, 122 bp, Homo sapiens
cagaggggctgggcccaggcaaagcttctgtcgctgctgctgcggaggccgaggacaggacgtgggctgggccgggcagtgccggactcggaggagcaggaggcgaggtccgccggagctct

SEQ ID NO: 238828 - DNA, 122 bp, Homo sapiens
agcccccagtcggcccctcagcgccggctccgggcccggccagtacctgcagcgcagcatcgtgcccaccatgcactaccaggacagcctgcccaggtgagcctggcctccgggtccccgcc

SEQ ID NO: 238829 - DNA, 122 bp, Homo sapiens
cccctgcctcggagtgtggacgtgaactccggggtgggctgggctgggtttctacagaggcgggaatttgtgagaactgggagagtgtggctgtcggcaggggtccgtatcacactgtgggc

SEQ ID NO: 238830 - DNA, 122 bp, Homo sapiens
caaagcccctgcccgccttagattctcatggctacctcctctgacccatccacatccttgcggctggcaggcaggatgttttgaaatggtgcagccaaaggccccgtctagcttggctggct

SEQ ID NO: 238831 - DNA, 122 bp, Homo sapiens
gccaaactttgcgaggcgggacgcggggggctcttcttgctgctgcgcagcttccccgcgcgctctcccggaagcctgggttctgccaagtccaggagcagctgtcagcccgcggggctggc

SEQ ID NO: 238832 - DNA, 122 bp, Homo sapiens
cctggagctggtgtaataagctctttgccttatttaaatgagcatgcgtgaaggtcgccccggtgcctgagtcacgttcctgtactcaatgcgcctgcgcttcctgaagccagactgggccc

SEQ ID NO: 238833 - DNA, 122 bp, Homo sapiens
aggattttgaaatcaagaaacacacaaggcattgagtaagaaacaggctaattataacttcgagacacaagaaaaacaataagtatatgcaaatgtgtcaggttggtagaatctttggaatg

SEQ ID NO: 238834 - DNA, 122 bp, Homo sapiens
gtctctactctcttcctacccttcctgttttgaacattgctttgtgaagacatgatgcttcgggctgtggcagccatctggtgtctataatgttttgtgccccctcttcatgcattttaatc

SEQ ID NO: 238835 - DNA, 122 bp, Homo sapiens
aaaataaaccaataatcattagtaattatgtttcctgccttttcactttattaaaatcttcgtcttgtgcatcatgtttaacaattttgagttattttagtaaatttgcaagggttcggtcc

SEQ ID NO: 238836 - DNA, 122 bp, Homo sapiens
tggagacggcagaggatggcgtgggcctggcaggactgaggcccggtgcccgtgtagggccgctgcttccttctctgcccacagctgacgtgagccacgtgggtctgctgcagatggagacg

SEQ ID NO: 238837 - DNA, 122 bp, Homo sapiens
aggaaccccaacccaccccccaccaacctacacactgaggccgctccttccaggcacaggcgtctcctgtgcgccttcttatcgatggggtaaacgcctgagcgccctgcacagaggggtga

SEQ ID NO: 238838 - DNA, 122 bp, Homo sapiens
ccatgaccctgcagcgccgaggtgagtgagggctttgggccggcggtcccagggcagccccgcgggcccgtgcccagggcgcaggagcagccgggttggcctaagggaccttagtgccgggc

SEQ ID NO: 238839 - DNA, 122 bp, Homo sapiens
gtattatagcagactagcaatccagagtgggtctgagacttcccactgcaagtccaagttcgggatgtaagcttggccactttctggtgaggcttctcttgctagcttatagcttacagcca

SEQ ID NO: 238840 - DNA, 122 bp, Homo sapiens
agcctcccaagtagctgggatgacaggtgtgggatgcccacgcccagctaattgtagaaacggggtttcaccgtgttggacaggctggtcccaaactcctggcttcaagtgatcaatccctc

SEQ ID NO: 238841 - DNA, 122 bp, Homo sapiens
atctaaataatcccgaggcacggaggagggggtgcgtggtctgtcgtggactcagagctgcgaaatgatttcttcagaattcagtcaacctctaccgaggaaaccagaggcatcctgtacca

SEQ ID NO: 238842 - DNA, 122 bp, Homo sapiens
tcctcacttcccaggcgggacggcggctggacagaggtgctcctgagttcccagatggggcggcggccgggcagaggcactcctcatttcccagatggggcggcggccgggcagaggcgctc

SEQ ID NO: 238843 - DNA, 122 bp, Homo sapiens
cgatttacctggatggtcaaaattgtactgtcctttcaaggccttggccttctgctctgccgtcaggaccttgtagaacctgtcctggctcaggatgaccaccttccgctgccgctgttcca

SEQ ID NO: 238844 - DNA, 122 bp, Homo sapiens
agtgcaggaaaattatattgaaatttagtcatttattagtgtcccagaagaatctatagacgccaacatggatcgttgaaattaagctggacacataacaaagattttgttttgtaaaatgc

SEQ ID NO: 238845 - DNA, 122 bp, Homo sapiens
tgtggtcagaagtctgtgggtcatgtcctcatggctaccacatgcactgtcagccctgcccgcagcaccatctgccctcagctcaccaggcaaatgctacatatgttttaacactgagcatc

SEQ ID NO: 238846 - DNA, 122 bp, Homo sapiens
cccacgtggccccagagggttgagggtgactcccggggatcttctgcttgctgcgtggcccgtggggctgtcactccgccctacccccgaaacagcggaagcagctgcctggagcttttgtt

SEQ ID NO: 238847 - DNA, 122 bp, Homo sapiens
ctgacgcgagccagcgcacgcgcatgcgtagcactcgtgcggccgtgccttggaatagcacgtcctgcggcctcagccgcctcttccgccatcctccgtaggctgcattctgccctagtgag

SEQ ID NO: 238848 - DNA, 122 bp, Homo sapiens
gtaggaagctcttctcatgtgtaataatgagatgagataatgcatgaaaagccactagcacgctctctctggccacatagaaagcagctgggaaatagtagctgtgtcagtagttattctaa

SEQ ID NO: 238849 - DNA, 122 bp, Homo sapiens
tagtttacggattggagtcagtaaaagacctacctccggcggcagccgatcaatactccgcggcttgtccattcattaacccattgcgttcctgccggagcctagaatcgggtagatgtcac

SEQ ID NO: 238850 - DNA, 122 bp, Homo sapiens
ccactgggttccgccgggtgggctcactggggtgggcccaaggccagagggagtcctggacgcggggagctggagggtgaggcgacccgggaggagacaccgccaggcaggggagggcggcc

SEQ ID NO: 238851 - DNA, 122 bp, Homo sapiens
gctgcaaaggatgcgtaggatggagctaaatttatttgttcctttctttctcagcaacagcgacgaggcccgaggtgcagctgtctcgcctcgcctgtcttttgcaggcaccggcatgcaca

SEQ ID NO: 238852 - DNA, 122 bp, Homo sapiens
tggctgctttcatcagctatgcaaccaaattctaaggggcccttcgtatgtgtcaggctgcgtgccaggaacctagaggtaccaccgtaccacagtacaagatgctgtgtctggcttcgaag

SEQ ID NO: 238853 - DNA, 122 bp, Homo sapiens
cccacccctcactcctgcttgaggacagggcagacattgcgcatgccccgtatccaaggccgcctccgggagcacctcccatgccgctccgctccctcccggtgaccgggcacgcgcgctcg

SEQ ID NO: 238854 - DNA, 122 bp, Homo sapiens
gtctgtctcgtctctcccgcagatctcgcgagagtggctgactggctgtgggggttgcggcggcagcaggcggagccggggagggaaagcagcggcggctgaggcgactgaggcggcgggcg

SEQ ID NO: 238855 - DNA, 122 bp, Homo sapiens
agttgtggcccagaggctggctggagggagaaagacagaagaaggaccatcggccacagtcgggctttgatcccaggatgtttgttgaatgcaggaatgactccaagcatttaaagctgggg

SEQ ID NO: 238856 - DNA, 122 bp, Homo sapiens
gatgtttctacaacttggcacagtaacgatgacgatgtgtacagggcgcctccaattgaccgttccatccttcccactgctccacgggctgctcgggaacccaatatcgaccggagccgtct

SEQ ID NO: 238857 - DNA, 122 bp, Homo sapiens
tcttgccgacaccacccgggctacattttggggctcccatcctggggacccactgaggcccggaggggtcgggttcaagcctgtgtagacccagggccccctcacctggctatgtcagggta

SEQ ID NO: 238858 - DNA, 122 bp, Homo sapiens
gtgaaaaagcaaaatgagtgttttactctcagattaaatttaaaatacaagaagtctgatcgataaggctttagtgcattacagtttctgctctgaaaagctgtgagtatcatagtctgcac

SEQ ID NO: 238859 - DNA, 122 bp, Homo sapiens
ggttgaaggaagggagggacacgtgccggtcctccatcttgcggcgagtgttccggatggcgtggatggagaccagccactgccgctgtgaggcccgggcagccaatggcacctgcttctgc

SEQ ID NO: 238860 - DNA, 122 bp, Homo sapiens
ccccgacgacagcgggcgcgggaaagcgccccgggctcggcgcgcactcacccgacagctcgtccggctccagcccggtctccgtgtccagtccgcagatgacaaagtagtcggcgaagcga

SEQ ID NO: 238861 - DNA, 122 bp, Homo sapiens
aggggcttaggtactgggggttgccatcaacgcctctggcggtaccaggagcaggacctgcgcaggctggcccactggcccctgagggggaggaggaagagtgggtgcagaagaaccccccc

SEQ ID NO: 238862 - DNA, 122 bp, Homo sapiens
cctggcattttgacagccagaacctggggtgctgagcagaatcttcatgcctggcctggccgctccttcggagggaagctggagggtgggctgcgagaggagtggggtcagagcccctacat

SEQ ID NO: 238863 - DNA, 122 bp, Homo sapiens
ttaagaacccaggaaaaaatgttaacaattctcacattcagatttcttatcaaaagtcaacgtgaaatataactaatttatcgcaagcaattttatcagaaacttttcattatctcttcctc

SEQ ID NO: 238864 - DNA, 122 bp, Homo sapiens
tggggagggagtcgcccgctaagcgcctgtcaggcctcgaccaacgggatgggcccttcccgccagagcacactgctccaatccaggagcggctgcaggacctgagccaatgagacgcaacc

SEQ ID NO: 238865 - DNA, 122 bp, Homo sapiens
tgaagagagagaggaagaggagagagaggaaaaagaaagagcttcctggtgttggcgtctcgacctgtgtgtgcgcagtggtgataatccagtgtgaaatccaatcagacaaacaagcctca

SEQ ID NO: 238866 - DNA, 122 bp, Homo sapiens
aaacccatagaatgtacaatgccaagagtgaaccctatgtacactatggactctggatggcgatgatgtgtcaatgtcgtttcatcagctgtaacaatgtaccactctcgtgtgggatgttg

SEQ ID NO: 238867 - DNA, 122 bp, Homo sapiens
gaatgattgaaaatgctgttgcagttagttcatgtcacatgagttaaatgtggtcgaattcgctactggaaatcaaaggctttgtagcatctggcagtgttggttgctgatcctgcaggtgg

SEQ ID NO: 238868 - DNA, 122 bp, Homo sapiens
aggggtggagaagatgaacccgtggggagcttggggtggggctgtgggcaatggactccacgccatggggagggtggagagtacgagctcatggtgtggtgccagccatgcccttccccgcc

SEQ ID NO: 238869 - DNA, 122 bp, Homo sapiens
tgcctgccacatgttgtcagcaccatgggcccaggactgctgaggagctgttgatgccctcgctctcccagagccaccggctctgttagataattcacatgcagtctggccactgtcctacg

SEQ ID NO: 238870 - DNA, 122 bp, Homo sapiens
gcagataatgcttactaactgcttatcagatgccaggcactgtgctaaagccactaaactcgagctaactcatctaactgtcataatacctgaggtaggtaccctcatcataccctgcctaa

SEQ ID NO: 238871 - DNA, 122 bp, Homo sapiens
aactttaagtaaatgaaaaggcaaaaggtacaactgtgtgtgtgtgtgtgtgtgcgcgcacgttgtgtgtgtgtgtttcatttgttctgcaaatgtggtctcctgcatctgattatgtggga

SEQ ID NO: 238872 - DNA, 122 bp, Homo sapiens
ctgtgttcctttcagtttgtcaatctccactcttcactgttgtaccctagatctcactcacgtgacctgtctggcccacatagatatttgagggtatggccctgaacttgaggcactctgga

SEQ ID NO: 238873 - DNA, 122 bp, Homo sapiens
tccccggtggacgtggagggcgggcagggtcatcctttctcctgaaactggggagccctacgaaggggttccggagaagacgcacggatctcgaatacctccccgcccggctgccactggat

SEQ ID NO: 238874 - DNA, 122 bp, Homo sapiens
tggctaggatgtggggctccagctcctggtttggaattgcacggcgggagatagatagcacgtgggctgggggtgggtcagaggagctgatggactccatttaggatccgtgtcccccaggc

SEQ ID NO: 238875 - DNA, 122 bp, Homo sapiens
agagggatttatgtattaccttctgctcatccacacccgtcccctccgcggtgcccagggcgcaaggctgacagggttcaaggtaacagccctcagtaacttggtgaggggcccgctgtgga

SEQ ID NO: 238876 - DNA, 122 bp, Homo sapiens
agtcaagccccgcccccaaactctgtctccccgcggtatcctctggggctctccaggccccgcctcggctcgggccccgcccctccaggccccgcctccagccccgccccgcagacggcgct

SEQ ID NO: 238877 - DNA, 122 bp, Homo sapiens
aaaaatagagtcatggaatcttcgagttagaaggttatctggtccagtcttttttttattcgagcacaaaatcaaaacattaagtgggatggctgactactcttgtcttaaagatcttcagt

SEQ ID NO: 238878 - DNA, 122 bp, Homo sapiens
tttccaagtggtctctctcaagggtcttcttagcggggaaggagaatgcagctgtctatgcggagaagctcaaagcagttatttggaagatacttcttgaactttccccgatgaaaggcggg

SEQ ID NO: 238879 - DNA, 122 bp, Homo sapiens
tagcctcataattagtaaaatgtgaaaaaaccaaggactgtcttccgttgtgtattgcaccgcttaagatggtgctagatgtttccgataatgaaatgacattttcaaagaaaaaagtaaaa

SEQ ID NO: 238880 - DNA, 122 bp, Homo sapiens
tgtgtctatcttaaacaatgagtcatctacctgtccctggtaggatattgcatgacttagcggaactgtgactggagtaggaggcttagaactatgttgtattgtagctcttccatataggt

SEQ ID NO: 238881 - DNA, 122 bp, Homo sapiens
ttctctggctcccaccccatccagcctacaacagttgccatggtgaccgagaaggctctgcgactccaggccctgctgctaccgcagtgcccagctcttgctgtctccctctttccatctta

SEQ ID NO: 238882 - DNA, 122 bp, Homo sapiens
cctgcatccgagagccctgggctgactgcttctgaggccccgccccactactgcctgcagcgggcttccttactccgcctgctggttcctactggaggagaggccagcatgcttgtcaggca

SEQ ID NO: 238883 - DNA, 122 bp, Homo sapiens
taggtggatttgttgttggtagaagtggtgaattggaaaagtgatagggtacatatgtttcgccttcaaggcaagtctattcttactgtttgatgtcagagtaaaaagtgtcagtagctgaa

SEQ ID NO: 238884 - DNA, 122 bp, Homo sapiens
agggactccgggtatggccacgggggaatcacactcacccgatctttctgaagtgtcccccgaagactccgggcgggctgggctggggagagggactcccgaccgtgcagttgcaggaacga

SEQ ID NO: 238885 - DNA, 122 bp, Homo sapiens
gggattaatagatatgattaaattaaggcccttgaaatggggagattatcctgaattaatcggtaggcttaatataaggggcccttaaagtgaaagagagaggcaaagaggtcaaaataatg

SEQ ID NO: 238886 - DNA, 122 bp, Homo sapiens
cagctgtagtgggagtgttccaggattcgccttggtaaaccttgttccctgttccttgttcggagttccctggccgggcattgcatttcatgatttcttcttcctttcgctccctcttaact

SEQ ID NO: 238887 - DNA, 122 bp, Homo sapiens
cgttgcctggagcctggatttagtaatgaaaactggccagcagaaaggacccagcgggtgcgttccaggtgctccccctggtggggaaatgtccctggacagtaaggaaatcccctgtcttt

SEQ ID NO: 238888 - DNA, 122 bp, Homo sapiens
aaaatggcacaaagggactggccaaacctttcatttacctccctgaccaacagcaagattcggaaggccaagatgatggtctattaataccctgatcctcacatgaccaacatgaagcagat

SEQ ID NO: 238889 - DNA, 122 bp, Homo sapiens
cctccgcagcgacaacatggaggccgtgaagaccttcaatagcgaggttggtatggcagccgggttcccctgctcctgcccgcaccgcccccacccctggtcgaggccggggcccggagggt

SEQ ID NO: 238890 - DNA, 122 bp, Homo sapiens
ctgacccacacggagaaatcccatctctcttaaaaatacaacattagccgggcttggtggcgcaggcctgtaatcccagctacttgggaaggctaaggcaggagaatcgcttgaacctagga

SEQ ID NO: 238891 - DNA, 122 bp, Homo sapiens
atctggtcggaagcaaggaggtccgaggtcactgtcccttgaaggctgcagcggaggaaacggagaggctgggctggccctaccctacgtagcctaatcaaagcaagaatctgcaggattta

SEQ ID NO: 238892 - DNA, 122 bp, Homo sapiens
atgatgcacacaaaatcctgagacaaagaccatctcaggcaagtcctgtagagcaggttgcgcacttccctgaaaagactagtcacagtcaattctcactccccaggagacccattgtagtt

SEQ ID NO: 238893 - DNA, 122 bp, Homo sapiens
ggccagggagcggtgggcgtgacgtggggcggtgcgcggggctgggcggcggctgaggcgcgtgctctcgcgtggtcgctgggtctgcgtcttcccgagccagtgtgctgagctctccgcgt

SEQ ID NO: 238894 - DNA, 122 bp, Homo sapiens
cctaagccctcctcaatcttctccactgagctgggcgtccagcagctagcacagtacctacgcgacaacggacaaagaataagtgcttgtgaactgagctttcttaacttctcgatggaccg

SEQ ID NO: 238895 - DNA, 122 bp, Homo sapiens
gttcttaagttctccggagtaattgaatcaagcgtcagttgatggagtgggcagtttccccgctcttccctcctcccatctcccggtgtgttcgcggaggccccaggggagaggcagcccag

SEQ ID NO: 238896 - DNA, 122 bp, Homo sapiens
gccccacttacaccctgaaggcggatcccttgactcccgagaggctggcggtggagtgcgcggcaggaccgcagggctgatctctccagctgggctgggctttggggacataggccttgaaa

SEQ ID NO: 238897 - DNA, 122 bp, Homo sapiens
cttgattctcattgttcccgggagcgagcgccttggctgcgctgggcatacccaccctggcgccattcacaggcagtgcctgccctggccctgtgctcaccccatcaggcctcctcttccgc

SEQ ID NO: 238898 - DNA, 122 bp, Homo sapiens
agcttttccccaccagcttttccccaggtcttcacctttcagctggcaaagagcgcctttcgtctgcgcacccgcgctggtcccctacagcagcggcgccggcagcggcggtggcggccgcg

SEQ ID NO: 238899 - DNA, 122 bp, Homo sapiens
ggcaatatttccagactcatctgcttcccatggttagggatcgtccaagtaagatgccgccgaaagccccagggacacagagtatctcactccagattgggcagcgcccccccccccgccgc

SEQ ID NO: 238900 - DNA, 122 bp, Homo sapiens
gaaaattttaaagttttttaaagtgggatgtgcatagaatatggaagataatagtgcctgcgggaaagcagaaaacaaaagctttagtgaatggaggtggtctttgagctaagtatttcaaa

SEQ ID NO: 238901 - DNA, 122 bp, Homo sapiens
tcttctagacaatctgtagtgaagttaagtaataccttcaagatttcacaactgtaaactcgatctggaattcaaaccagatctatatgtttctgtaaatccaggctcttttttctgtatca

SEQ ID NO: 238902 - DNA, 122 bp, Homo sapiens
ggggggagcggaagaaggaccgggctgtgaccgcgggacggtcctgtcctcctggccctgcgtctctcgagctgctggcttctctccgccgacgacccgcaccttcccgcgccccggcccga

SEQ ID NO: 238903 - DNA, 122 bp, Homo sapiens
ctgcaggtcaccctctcggacggccgctcgacaaccacctatcggggtttataagggagccgtcctgcctggccgccccccagagaaaggtctgtgatggggtgattctgcttggaaaggtt

SEQ ID NO: 238904 - DNA, 122 bp, Homo sapiens
aggacaaggacaactatcttgatgggcttggacaaactggggcggggcagctcatgtttccggagccaggagaacaagtgagtggctaaaacctcctgttttctgttaaacattccgtccct

SEQ ID NO: 238905 - DNA, 122 bp, Homo sapiens
tttctccaaccattctctataggctccagcgtagttgcgagccctgtggagacaaagaagcgtgagagactgacaggaatgacaggcagtccccatcacctcccagctagcagccacacctc

SEQ ID NO: 238906 - DNA, 122 bp, Homo sapiens
actgatatgggtttttaaagcaagctccaataactgcctaagtccctatgattttttttccgattctgacattttctatatattttgaaaatatatgtacatgttaaataaataacaataac

SEQ ID NO: 238907 - DNA, 122 bp, Homo sapiens
accacaattagctgggcatgacagcatgcgcctgtagtatgcttatagtcctggctactccggaggggctggggcaggaggactgcttcaactcagaagtttgaggctgcagtgagctgtga

SEQ ID NO: 238908 - DNA, 122 bp, Homo sapiens
tggggaggcagtatattttctgctactggctttactcagaggggcctaatttcagttttccgcatgttgtatcttgaggcttttgctgtcatttgggagcagatgttgaaaccctacctttg

SEQ ID NO: 238909 - DNA, 122 bp, Homo sapiens
gactcactcccggcagagggatgatagcggccttgccccgagcgtttatccggctgcaggcgtcattcttggtcgcctgtgtgtccagagccccagcgcaggaagggagcgcaattcccacc

SEQ ID NO: 238910 - DNA, 122 bp, Homo sapiens
agcaatgcagtgatattagtcccacttcgcaatggaggtgcagagatcatgcctggctcacgtcaccctgtttcatagctggtcagctgtggagctagcatttggtcccagctctgctccac

SEQ ID NO: 238911 - DNA, 122 bp, Homo sapiens
ccccagctgaccctaatttattctcagcaccaccccctcccaggtcattgtgtctgtttccgaggggcctggaccgtagcccccgcccagctggccctctctgaccttgggggatcaggagc

SEQ ID NO: 238912 - DNA, 122 bp, Homo sapiens
agaataaccccgtagggagttaagcggcctctgcctacagcgttcctcccgcctccacggcgccgagccctgattgacgttcagccaggccaatcatagcctgtgtctgaggcgcgcggagc

SEQ ID NO: 238913 - DNA, 122 bp, Homo sapiens
ccacagccgcgtgccctctccccggagctggggaccaaggctgggccccgccggccgcatcggtgggaacttccgcggtccccatcccagggcgcacagggtccagctcctcggcgccgact

SEQ ID NO: 238914 - DNA, 122 bp, Homo sapiens
aggaagcactccacaaatatttgctgaacgaatgaatgaaccctgaggaaactgaagccccgggtgtgaggacgtggggggatcgtggctggtccaacgccactctggggccgaacttcgaa

SEQ ID NO: 238915 - DNA, 122 bp, Homo sapiens
ccaggtggggctggggtggggagaggacggagaagggaaagctttgctggtgagggacaccggggacctgaaactcagtggactgcaacacagacgggaacagggcacagccctgtgctgga

SEQ ID NO: 238916 - DNA, 122 bp, Homo sapiens
cccatgatgaggggcccgaagaccttgagcttgtcagagtgcaggtagccagagaagatgcggaagaagaagcccacggacgtggaggaggaggacggggaggcggctcgtgctggaggcgt

SEQ ID NO: 238917 - DNA, 122 bp, Homo sapiens
aatgaagaatgtgcaaccacatactccagataaagctgttcagttaaagcagccccatgtcgctcccaagccccacctttgtgtaaatctatgcgagcaccgatggggcatgtcccagaccc

SEQ ID NO: 238918 - DNA, 122 bp, Homo sapiens
tccagggctaggaatggttgccaggtctcagctgcctgcctgaagacggagatcagccagcgccagtactggcaccaaggccgcccctgcctccgactttcccaatgctcctgggagcgtct

SEQ ID NO: 238919 - DNA, 122 bp, Homo sapiens
aaatttcatggggaagttgacaaactgcaaactgattctgttacacctttctgtgcccagcgatactcatactttattttcaataatgctaatgcttatctgtatttcttaaagtttataat

SEQ ID NO: 238920 - DNA, 122 bp, Homo sapiens
ggtcacagaagactacttgggttcatggtctctaatatttcaaacaggagctccctttagcgagtccttcttttcctgactgcagctcttttcattttgccatccttttccagctccatgat

SEQ ID NO: 238921 - DNA, 122 bp, Homo sapiens
cctcgttgcgggagtgcagcaactccatgagtggggccgaggccccctctgcatcaatggcgtcggccgcctccttgtcctgggccagctcacacagcaccccggcagccacgcgctggatg

SEQ ID NO: 238922 - DNA, 122 bp, Homo sapiens
gttttcctctctgtggtctcaccacatgactggattgggcttctcacagcaggttggtctcggggtagtagggcttcttacaaggtgcctggctgtacccagcatgtaaaagcagaaactac

SEQ ID NO: 238923 - DNA, 122 bp, Homo sapiens
agccgaccgctctaggggtccaccccagtcctctgcgcgcgccggctgccctggcccagtcgctgtggaccccacccaggcggcgcgcgcagaatcagttctgagcctcctcgcctcccggc

SEQ ID NO: 238924 - DNA, 122 bp, Homo sapiens
cagccaatcgcccactggtgccccaccccttccgttctgggaaaactcgagcacccagaacggcttccggcgggagctgtgcagctccttatcatggtgagttggctgttggggtgagggtt

SEQ ID NO: 238925 - DNA, 122 bp, Homo sapiens
aagggatggaagttgacgctaaaaatcaccgaagggcaggtaagccggggcggggtgtgacggtgcgggcctcgccacccggcaggtgtgcacccggtcgcttccgcaggtgagcgcagcct

SEQ ID NO: 238926 - DNA, 122 bp, Homo sapiens
agagtcctacaggtccggggcttgcttgtgggaacggcttgttcttctagactctgggggcgggggcttgggtgtgtttccttacttgtaaaaggtcctgttgtttttgggagcagggagta

SEQ ID NO: 238927 - DNA, 122 bp, Homo sapiens
taaagtgattcattcatttataaacacattttttttgggcacttagtacatgtcaggctccgtgctaggcaatgaacaaaagcccacaccaaaaagttctctgccctcctaggtctacaaat

SEQ ID NO: 238928 - DNA, 122 bp, Homo sapiens
ggcgtctcacctgagggagccctgatgttgctccctcagaggacctgcagaggctggcaccgcgaagctcctccgagggcctgggtcctctgttctcacgagagcagcagccgccccggctg

SEQ ID NO: 238929 - DNA, 122 bp, Homo sapiens
ttgattcaataaaatcgtttccggtaacaggccccaggaatcctagacctaagcctggcgcgaaactacatttcccacaatccttcgggggctgataaggctccgcaatggtctgaactaca

SEQ ID NO: 238930 - DNA, 122 bp, Homo sapiens
ccgagctcaccaactgcgtgcccggcgtgctggaccgccgcgactccgccgcgctgcgcacgcccaggaagttctactacatcaccctgctacgagaccccgtgtcccgctacctgagcgag

SEQ ID NO: 238931 - DNA, 122 bp, Homo sapiens
cccgggcggcggcggtggcgtggacggcgactgctccatcttcccggggcgctcacgccgcggttccaaagcgcagacccaagtgggacattcgctacattgttggcattccacgggcgtca

SEQ ID NO: 238932 - DNA, 122 bp, Homo sapiens
agcactgcaagagattccaatgggagccagaggtgaaatcaacaacaactgttcttaatccgtattctgctctaacacagctgagatagtaaaacaacacaatatcaatgggttcttttggc

SEQ ID NO: 238933 - DNA, 122 bp, Homo sapiens
cgggaccccgaagtgctgcgggagcatatgacccagctcaaggaagccgccatcggtgagcgccccccaccccgggcggccctgccccccagcctcacccttcctccttcccacaccccagc

SEQ ID NO: 238934 - DNA, 122 bp, Homo sapiens
acttcccggaagatgtgtttttccttacacccatcctaggtctcctgggaggcaaaacgacgttccgggcaggcttggtttccctgtgaagccgcccgtgccctgagagctgtccctgccta

SEQ ID NO: 238935 - DNA, 122 bp, Homo sapiens
acccactgaggcctcatgtcccaccaaagcagcaaggaatcctgaccgcatagtgcagcccgggctgcctgcccacatctgggcctcatgaaatgtcatcatgggccttgtcacagcccagg

SEQ ID NO: 238936 - DNA, 122 bp, Homo sapiens
cactgtggactgctcagaggcaggcgaggcggagctgaccattgagatcctgtcggatgccggggtcaaggccgaggtgctgatccacaacaacgcggatggcacctaccacatcacctaca

SEQ ID NO: 238937 - DNA, 122 bp, Homo sapiens
agaggctgaaggctcccagcgccctaccccgcccgaggggcggagcctgagccaaggccacgtgatgatgacagacggcactctggctttcctggagctgtctctatggtattcttcccagc

SEQ ID NO: 238938 - DNA, 122 bp, Homo sapiens
aatactggaagctattatgggaaccaagtaacttcctgaagtgaattactctaaacttaacgaaccattcttccaatcttagggctaaatgtcatctaaagccaagagaaatttttacctga

SEQ ID NO: 238939 - DNA, 122 bp, Homo sapiens
aacaagaggttctgaccaggatgcagccacaggattccagatctgtttcaccgacccgggcgcatcctggccacgctgggcctgccccggcctttgctccatgagaactcacttctgcaggc

SEQ ID NO: 238940 - DNA, 122 bp, Homo sapiens
tcggggccctgcccgtccgctcggccccctcaccccgggggccgctgccctaacgtttcccgtcccgcccggcccttcccggcccgcggcctcctctgggccgcaccctctgcggcgcgttt

SEQ ID NO: 238941 - DNA, 122 bp, Homo sapiens
ccagacatgtgcctgattggacagtccccgcccctactcctctgattggatagggcatcacgccccgccccctcaggccctgagtgacaggagctgtaatcagacaatgggccgaatgagac

SEQ ID NO: 238942 - DNA, 122 bp, Homo sapiens
acaaacttcccaggacgacagtcagaaaatcatagttacagaaggcaggctggggagaggcggtttctgggtctccgaatgaggtcacacaattaaaattaaaaaaacgaaaccaaaccaac

SEQ ID NO: 238943 - DNA, 122 bp, Homo sapiens
gagtagggtgggctggcccctgctccttagaatgtacagccccatggctgggcagggggacgcacatagtgacccgtaattacatatctgtctgtgtgaaggagaaagtactcggttttccc

SEQ ID NO: 238944 - DNA, 122 bp, Homo sapiens
gtccctcactatatctagttgttccaaggcagggactaaattcttcattcctgcactctgcgccctagcaccatgcattttcgtgaatcactccctggtttggggtactggtgtgtatgtgt

SEQ ID NO: 238945 - DNA, 122 bp, Homo sapiens
cagggggctcaaatggggaatgttgattggttggggatgaaatcataggggtatagaaagcggtccttgacagcctctggatggaggccacaggaccagatgtcatgagtggtgggtctgag

SEQ ID NO: 238946 - DNA, 122 bp, Homo sapiens
tctgctgccacccggcctccagaatggggaggaagagaatctgtgatgtctgaaggtgtccggtgtggccctgtgatgcagcagccccgggaaccgagcacagccccccattgcctcctgaa

SEQ ID NO: 238947 - DNA, 122 bp, Homo sapiens
cggaccaggcggctgggccgcgctgcttctcgttaccttccgcagggtcaggggccgcggcggggttggaggtcagcccaggcacatgttaacccctgggtaccagtttgctcggaaactcg

SEQ ID NO: 238948 - DNA, 122 bp, Homo sapiens
cctccagccggctttccctgtcctctgctcgtgtgccaataaagttattgaaattgacaccggttgctaaggaagtgggtcgccgagccaggttgctaaggaagtgagcggccactgtctct

SEQ ID NO: 238949 - DNA, 122 bp, Homo sapiens
ccctctctgcagccctggttggagacccagggtggatccagcgccagccacagaaaggaacgcacctccatccaggacgccagagccctcccataaccctctgaactaacacccacccgcct

SEQ ID NO: 238950 - DNA, 122 bp, Homo sapiens
gaggtgctgctttagccaagacctgaaggacgaacgagatctgacaggtgaagagtggttcgaagtgagatgagcaaagggctagaggtgagaatgcatggcctgcttgtggttcactggag

SEQ ID NO: 238951 - DNA, 122 bp, Homo sapiens
ggctccctcagcttgcggggaggtgtggcgggagaggcgcgagcgggaaccgcggctgcgcgtggcgcttgcgagccagctggagttcgtggtgggcgtgggcttggcgggcctcccactcg

SEQ ID NO: 238952 - DNA, 122 bp, Homo sapiens
ctcagcctgtgccctcccattcctgccccttgatctccaggcgctgagccagaggattgtcgggaggaccctgggcaaagacgcctaccctgccatgctgcgccatctgccctccaggctgc

SEQ ID NO: 238953 - DNA, 122 bp, Homo sapiens
tctcaccaagcactactgaccacctgctcggcccccagccccatctgggtcctgctctcacggagctcactcacacaggtctaactgaccctgtgtcgtcaatgccatgatgtcaggaagct

SEQ ID NO: 238954 - DNA, 122 bp, Homo sapiens
ctcgtgggtgttcagggcagacgctgccacgtactgtgtggatgagaccaggggacacgtcgggaatggggactcaacagagacagaagtaggtcaggggtcacgcagcgctggaggcgggg

SEQ ID NO: 238955 - DNA, 122 bp, Homo sapiens
gacagcgcgacggagggcgaggagccgccgcgggtagcggaggagggcgaaggccgcgagcggcgctcagtgtcctactgcccgctgcgccaggagtccagcacccagcaggtggcgctgct

SEQ ID NO: 238956 - DNA, 122 bp, Homo sapiens
acgtacaggcctcctcgggagggagcgcctccccaccactgagccatcctcagcagcgtccgctgcgtctgcactgatgaccgtctgagcccagctcagcgttcctggacaaacagcctcac

SEQ ID NO: 238957 - DNA, 122 bp, Homo sapiens
tggtcgatgggactgggtgccatggagcagggggcggcgctcatcggggaggctccgggccggccgcacaggagcccacggagggggtgggaggcgcaagcatggcgggctgcaggtcctga

SEQ ID NO: 238958 - DNA, 122 bp, Homo sapiens
agagaagggaggtcgccatcttaaaggggatagggctgagttgtcctgggctccttctgccgtcccttgcggtggcgccacaagacctttggaagctggcttccttgccatctgctgtttct

SEQ ID NO: 238959 - DNA, 122 bp, Homo sapiens
tccaaaaaagaaagagaggagcgcagcactgccgcctggcccctccagcttcccggaccacggccaacctcgagcgcaccttcatcaccatcaggccggacagcatgcagtgcggcctggtg

SEQ ID NO: 238960 - DNA, 122 bp, Homo sapiens
agggagcagccgcggccagagccggagcaggggccagagttgcggctagagtagggcctgcgcgtttgagtgactgagagttgcccctgcctgagacctcaaactccaggcggaagcgctat

SEQ ID NO: 238961 - DNA, 122 bp, Homo sapiens
agtgattgttaatactaaaagcttaaactttaactgcattttaagcatctgggactggagcgaaagcgggagctgtgagtaaatgctttcagcaggtatgtagttagttattaaaatgggct

SEQ ID NO: 238962 - DNA, 122 bp, Homo sapiens
ggagcacgtgcactttacctgcgcacttgcagatctttctccaggagtgagtttaaggtccgcacctccgctctggatggtgagcggagcacagccttcgaagtaagaactcagagggagct

SEQ ID NO: 238963 - DNA, 122 bp, Homo sapiens
aagttcagaaagccaggagtctccagatggccttggtgacttctcgggactatgcctcgccgcccttcagcctggagagaagttactccgggacctcccaccctctcgtctctctctccggc

SEQ ID NO: 238964 - DNA, 122 bp, Homo sapiens
ggttttccaaccgcagaagatatcaaaacccgaatccactttacttgtttttggacataccgggactagacattgctttgcaaaccaaaaggctgtgcaaagtcagtattttaaaagagagg

SEQ ID NO: 238965 - DNA, 122 bp, Homo sapiens
tgagccaagccccaggagaaccagaacccaccttttcctcagtgccctgaccagctgtcccgcagctgtggcttaaatgccaacttccagttcgtaaatttcttcaattattcctccccaaa

SEQ ID NO: 238966 - DNA, 122 bp, Homo sapiens
gatgctcaggccccgcctaagtttgcgcttctgatacgtggcagaagcctgtctctctgacgccaaagcccagtctggagtccacgctgctggaccactgtcttaaggaggccagtcttgct

SEQ ID NO: 238967 - DNA, 122 bp, Homo sapiens
atagcaccttctgaaagcagtgaattggatgtgtcagttgaccacagacccccgttttctcgttttctctggttaaatgacatgaatctcggtttagatttgtgaggcctgctagtccaaag

SEQ ID NO: 238968 - DNA, 122 bp, Homo sapiens
tccggcgctgctcgctgcccctctcccgcttccctcctgtccgccccgcgctcccctcctcgctcccggttgactcactcctccaggaatagggatccccgtgttttcccgtcagtcccatt

SEQ ID NO: 238969 - DNA, 122 bp, Homo sapiens
tccatagccatgactttgggcatcgtggatatgccagtgattccctgcactttctccacccgtcccctctcccaggtactctgcttatctccaaccaccttcctaacacacaagcgtttcac

SEQ ID NO: 238970 - DNA, 122 bp, Homo sapiens
gcccgcgccgacttcctgcctagctaaggcgagccccacccacttcccgcctccggggcacgccccctcagctccgcctcgccattcgtcgggagagccgtcactcattccctcacctcccg

SEQ ID NO: 238971 - DNA, 122 bp, Homo sapiens
cgagaggcacaaagggctggctttccaccggggaaactgaggcagtggagcgaggagcggcgtcctcgaaagtcctcgcaaactcccagcgcctgtgttgggcccatgcaggctacccaggc

SEQ ID NO: 238972 - DNA, 122 bp, Homo sapiens
cacacaaaccctgtttactttatgcccttttccctggtaagtggagttcagccaaaccagcgctcagaaccaccactgaggaagtgaagagatcaagctcagacaagctgctttcgttcctg

SEQ ID NO: 238973 - DNA, 122 bp, Homo sapiens
tgtcactccctccagtgccttagttcagagcaggccagggcacagtattgccctggatctcgtgaagatgggctttgccctggctggccctacttgggcaggaacatgtgttctccatccaa

SEQ ID NO: 238974 - DNA, 122 bp, Homo sapiens
tgcggccacactcctcagcccttgggtggtcgatggcaccggatgccgtggagcagggggcggcgcttgtcggggaggctcaggcggcgcaggagcccacggcggggagaggggggagattc

SEQ ID NO: 238975 - DNA, 122 bp, Homo sapiens
ctgtgagccctggagcccccatctgtgagccctggagcgtgatgcctgcgggcctcttcccggatgcgttttccaggccaccccagttagagctgcatcttggcagggccccgagagccaag

SEQ ID NO: 238976 - DNA, 122 bp, Homo sapiens
cctgcgcagttcttttcctaaatcgattcggtgctccccaccccgacgcaggcacaggtccgcaaccagatagggagatgcctgaatttcaggctacctttgacaaagctttcttcctccct

SEQ ID NO: 238977 - DNA, 122 bp, Homo sapiens
tgagagagcacccccccccccccaccaccaccaccagggtaataagaggtgaagggaaatcgtaaatatgactacatctacagtggcagctctggcaaatccaggcctattgcccacccctc

SEQ ID NO: 238978 - DNA, 122 bp, Homo sapiens
agctggtctcctagccatcctgaatgccaagtttgttataaagaaacagaggcaaaatggcgatcaggcaggcaactgggtggtctctgccacgggccccttggccattctttgtaatgatg

SEQ ID NO: 238979 - DNA, 122 bp, Homo sapiens
catgagacagagctggtggtgtccgtgcacaggtgcacacgcatgcacacacgtaagcaccggtgagcacacggacacattacaggactgcgctcactctgcatggagagttttgtcagtca

SEQ ID NO: 238980 - DNA, 122 bp, Homo sapiens
tgcaatactcagcctccgagggactgggcgctcctgaggagcgggaggacgacggagcagcgcccggtcctggagcacaacaggaatcccaggaccaaacccatgtgacgcggccacgcccc

SEQ ID NO: 238981 - DNA, 122 bp, Homo sapiens
aaatgccaatggatacatcaactggaagattagctactacttgttctggaaaattagctgcggagatgcccagcggcctggagccacggccgaagccccgcaccacttgggcccggcagagg

SEQ ID NO: 238982 - DNA, 122 bp, Homo sapiens
atgctaaggcagctgtcaccacctagctgtgtgacacaggacatacgcctttatctgtctcgcttgaataatattatgtgtcagaggagtcattgttataattgcctaaggcaattctcgtg

SEQ ID NO: 238983 - DNA, 122 bp, Homo sapiens
ctgcctatgcaaagcaggtaagaagccgaactctgaggcctctcgccattgtctccgagtcggccagctggagcgttttcggggctgtaaagggagaatggcgcatgcgcatattcagggcg

SEQ ID NO: 238984 - DNA, 122 bp, Homo sapiens
gaaggagaggtgattgtctttccccagttttgtctaccattccggttccatctgcattcccggaggagtcctgttgagggcagagtgactgtgagcaaaacaagaagagctgtgtcaccaag

SEQ ID NO: 238985 - DNA, 122 bp, Homo sapiens
gggggagctggcctcgtactggggatgctggtcctctgccctgctcctctgccagctgggcggctgggcccggcagcagcttggactagcttgaaggcccagcaggggcctctgtgggcggc

SEQ ID NO: 238986 - DNA, 122 bp, Homo sapiens
ctcccatgtgagattcaactcacaaaatacaggtggtaaggctttctatattgggtaacacggagctttcaaaacaagaaaagaaaacagcacttggcttctccgtatttctcccttgtgac

SEQ ID NO: 238987 - DNA, 122 bp, Homo sapiens
acagtttggatgctgaggttggaaagcaggacaggggacactcctgagtgcagctcggagcggggaaagccgaattccgggggctgaagaggccgcgcaggggacgagcgcctgcgatgcgg

SEQ ID NO: 238988 - DNA, 122 bp, Homo sapiens
cactggaaacaaaacaaaaaaccatgatatggggactgtttaagaatattctgattcatccgtatggtgacaagcaatcattaaagaataaggtaaatctgaacatgccaagaagggaagac

SEQ ID NO: 238989 - DNA, 122 bp, Homo sapiens
atcctcccgtcttggcctcccaaagtgctgggattacaggtgcgagccactgcgcccggccgtggattttagtcccagccttgcccctctgaggcagtgtagtcatgggaagttgcttcgcc

SEQ ID NO: 238990 - DNA, 122 bp, Homo sapiens
gcggccgcgctccccgtcccgccgcggtgcggtcggatgcccagctcgcgtccagacccgcgggatgcagacccggatcagtcaggcttgagggctgctccgcatagaccaacgtccgggga

SEQ ID NO: 238991 - DNA, 122 bp, Homo sapiens
cggaggcgacggcgagggcggtgctcggcgtcgcggcccgcgcacggctctctgggaccccgagtcccaccgcccactccgggcccggaagcctgctggcgttggactacaagtcccggcag

SEQ ID NO: 238992 - DNA, 122 bp, Homo sapiens
tgagggcagtttgacgtcatggtgaatttcacctctcagtccggcctggttttgaaccctcgccccactccacccctggtttcacgatttggcggaaagggtccaggattgtagggactctt

SEQ ID NO: 238993 - DNA, 122 bp, Homo sapiens
cccacctttgtgtggttccaggcccatgcatgacacgcgtgttccatttccacgtgctaccggcaccagagcccattctgtacatgctcgtttttacaaccgctttttaaatcagcgaagag

SEQ ID NO: 238994 - DNA, 122 bp, Homo sapiens
cttatcttttctcgatacacagcgtccttcctccagcagaatcctaaaatagcagcagtccggattaacatggctgtgaggagtaggtgcttagctgaataacatcagaattaatgaggggc

SEQ ID NO: 238995 - DNA, 122 bp, Homo sapiens
gacacagctaggtgggaaaaaaacagatgccatgcaccccctagtctttcaccaaagagacgcactaccctaggtgtttcaggtcacttccagagcacttctgaccatttgaaaaggccctg

SEQ ID NO: 238996 - DNA, 122 bp, Homo sapiens
ccgtcagcaacgccccggtcactgagtacatgtgagttgacgtgggcctagtggggccagcggacacgtcagctgcggctgagagcgcggatctgggctggggctagctcgaggcaaggggc

SEQ ID NO: 238997 - DNA, 122 bp, Homo sapiens
cccgcgggcctctccgctcgccccgccgcccacctgccaggggaaggagcgcagtgcacgcgccgccaggaagcggcgctccaaactctgcagcaagagttcggtccccgcgttctcctcgg

SEQ ID NO: 238998 - DNA, 122 bp, Homo sapiens
cattctttcagactctccatggaaggtgcatctgtcaaacgttggccctgagatgacaggcgtcaccgtgagtggcctgactccggctcgtacctatcaattccgggtgtgcgcggtgaatg

SEQ ID NO: 238999 - DNA, 122 bp, Homo sapiens
gaaatcccgacccaaagcggtggggtctggtaacgtctttctgatgaactacggaagggacgatactgcggagaccctccaacccaaagactgcagcactgattggccaactttgggtaagc

SEQ ID NO: 239000 - DNA, 122 bp, Homo sapiens
tgataggaagaactcctgtgatatcagaagaatcaactccagaggtgttcgacaggactgcgtttcagagacttccttttggtacgcccagcctcttaaagcctaacacataaatggagcct

SEQ ID NO: 239001 - DNA, 122 bp, Homo sapiens
agggggtgatggaagttccagagctgggatcccggaaagataagagaggggcaagagcggcgtttgcggtcgctgacaggaggcagggaacacagctgccagccccgatcccggagggagag

SEQ ID NO: 239002 - DNA, 122 bp, Homo sapiens
ccaccgctggcaggttgacctgcagctgggcgacggcggcggctgcacggtgggggtggccggggagggggtgaggaggaagggagagatgggactcagcgccgaggacggcgtctgggccg

SEQ ID NO: 239003 - DNA, 122 bp, Homo sapiens
atagtacttatcaatgttgtccaagagaacttttggtgacaagggttctagtctatcagtcgaatatggtagccattagccacatgtgtctcttgagcacttggcaggtggctaatgtgact

SEQ ID NO: 239004 - DNA, 122 bp, Homo sapiens
gcagttggaaaatctgactggggcagcttctgagcgcaggctgggcctgcacacactcagcgggccgagtggccacctccttcagagctgctcagcacgccctgggatcgcgggcggttttc

SEQ ID NO: 239005 - DNA, 122 bp, Homo sapiens
gacgttctttcccagggctgccataggtccgtggccgtttgtcatttggactcgtttattcggttcaagctcaagagcatctttggaaccatggcccatataatgtcggatagggaaaaatt

SEQ ID NO: 239006 - DNA, 122 bp, Homo sapiens
ccccgggcgtcccacgaggtgaagatgctgctggcggaacctgcaggagctagcgggattcgggggcgctaaagtcgcaggggcagggcgggaaggaagatccggcgcggggcacaggatcc

SEQ ID NO: 239007 - DNA, 122 bp, Homo sapiens
ttaatctctcctagatcctagaaaggcctggctgcattaatggagattcccccatgcaaacggacattttccgcatgcaaatttctcccatgaaagatggttttgcagggccatttcaatat

SEQ ID NO: 239008 - DNA, 122 bp, Homo sapiens
ccctcaggatcgccgcgtcccccgggcctcacgggcatcacctgaaaggaatgcgggcgccggataagtggccgcctttgtctcgcttcctgtttgccaggacgtccagagcccggctccag

SEQ ID NO: 239009 - DNA, 122 bp, Homo sapiens
gctcggccgccagctccgcgacgaaggccgagttgttggcgaaggcccacacgtcgccctcgttcccagtgtagaagaagatgggcccctcgccccggacccagaacctgtctgtggggagg

SEQ ID NO: 239010 - DNA, 122 bp, Homo sapiens
gccaggattccaggtgtcaccacagcagctgagaaaggaaagaacttggaatttagcatacgtcaggttttagatgtggaaaagccccaaaagaaggagtagtacctgtgggcacagagggc

SEQ ID NO: 239011 - DNA, 122 bp, Homo sapiens
ggtttcagggcatcacttaaaaggattaaacggacctcggaggagcctcggcgtttcacccgtggtgacaaaaggcagaggaaacagaagggagcacggctttgtccccaaattcccactta

SEQ ID NO: 239012 - DNA, 122 bp, Homo sapiens
cagggctgagatgccgtttgggtagcctcgggtctccatggagacaggggcggggccaggcggcaggggcggggtgcccaacagccaactgcccgccctcaaccgccaaaaacccacactca

SEQ ID NO: 239013 - DNA, 122 bp, Homo sapiens
attgccgctagaggaggggaggggtgagaagcataagtggcaccggaagtggaattaatccgcctacctctcctgcgcctgcgaaacagaaaagacaaggcgcctgtcgggcggggtgtggc

SEQ ID NO: 239014 - DNA, 122 bp, Homo sapiens
ctctgctgggctggggcgtctccctgcgggactggggccggggccagggtggggtgcggccgcacctgcctctgggcgcgctctgcctcctcccgctcgcgcagcgcccgctcctccgcctg

SEQ ID NO: 239015 - DNA, 122 bp, Homo sapiens
gagggacacgaggagttgtgcaaagattcggaatgagagccaggggttttgaggcccagccgaggctccaagctccgccccttcactccagaccccacccataggttcccgggtcccgcgtc

SEQ ID NO: 239016 - DNA, 122 bp, Homo sapiens
agactgtccttccacttcaaagacaacaaacaacattgccttagagttgcacaggctttacgtgctcacatggtgatccccaatcagagtcttgcttgacactcacacagaagggggccaga

SEQ ID NO: 239017 - DNA, 122 bp, Homo sapiens
aagagcccgcctgggtctcaggttctgagtcttgagtgcataacaatgcgccccagagcccgccgaggggagaactagctccatctgctccttcccaattctcggctccggcgagggggagg

SEQ ID NO: 239018 - DNA, 122 bp, Homo sapiens
accccagccactggggacggtccacgccggatcaccagcagctcaggcttaaggccacgacgcgcaagcgcagcctgccagcctggctccctcccaaagcttgcgtgcaggttggcggcggg

SEQ ID NO: 239019 - DNA, 122 bp, Homo sapiens
tccctcctgggacaatacctccctcagttgaaagctactttaaattatggaattctgagacgagataaagtgggtaatgtatatacaataaatatttatttttagcacctttataggttaca

SEQ ID NO: 239020 - DNA, 122 bp, Homo sapiens
tggagcctcacagatctcttctgctcagtatgacactaagagaggtcctggaggtcccaacgagcgaaggggcgggagcgggggatctcgactccctctcggagacggagaggaggaggccc

SEQ ID NO: 239021 - DNA, 122 bp, Homo sapiens
gagaaaacaccacactttgagatgaattaagagtcctttattagccggcgaccgagagaccgctaacactcaaaattctctccgcccgaggaaggggcttgattaacttttatatcttggtt

SEQ ID NO: 239022 - DNA, 122 bp, Homo sapiens
tcccacctaggccagctccccatttccaaacaggagctgcctggggtgcccaggagggcccgggaactgggggagtgcaggccggaggcaggtgcgagcgaggagcagatctttggtgaagg

SEQ ID NO: 239023 - DNA, 122 bp, Homo sapiens
aatacactttacctacataattttttctggctttaattcaatgaaatccattatcctgggcgggaatggaacctcctcatctcacgcatctttagtctcctgaactgccttaaagccttgac

SEQ ID NO: 239024 - DNA, 122 bp, Homo sapiens
attaacacagagcgtcctaagtgacaggatggtctggcgaccacatttcccggcagccctcgcacagccaggccgcttcgaggattggacttctccgcaggaggcgggtgacagggggaggg

SEQ ID NO: 239025 - DNA, 122 bp, Homo sapiens
gggccagggggtgcagggggcctctccctttgttcctcgaggcaaagtgaaggtgccgtgcgtggagctccatgggttgagaagtgggtctgcctggctcaggtcccaccacctcctcccac

SEQ ID NO: 239026 - DNA, 122 bp, Homo sapiens
ccctctacccctgccataaatatttgctctttcatttgttcctgtacttcctcatttctccgtcctttactaaaaacgaccccttcctagccctcagctcctttatttctcatataacagta

SEQ ID NO: 239027 - DNA, 122 bp, Homo sapiens
ggaaattgactgttacttcctttacagatctacagacagtcaatgtggatgagaactaatcgctgatcgtcagatcaaataaagttataaaattgccttcatgtttttgttctttttagttg

SEQ ID NO: 239028 - DNA, 122 bp, Homo sapiens
ggcaggtgggtatgggcaatctgacacgatccaaaaggcttactgccttgcacccctccccgcaaaaaggaagtagagaccaagatcttgggctttaattttatttttaattgtaaaaagat

SEQ ID NO: 239029 - DNA, 122 bp, Homo sapiens
ccccccgcctccccgcctctgcccagacccggggactccacacccctacctctgcccggccgggggacccccacagccccgcctccgcccagtccccgggacccccaccttcccacctctgc

SEQ ID NO: 239030 - DNA, 122 bp, Homo sapiens
ctggggaccgaactcagtccgagatgtagactaggcaataacgctaatctaatcccggtacgattaaccccactcagcccgccctggcttaatgtccgctggtggtgtttggagacctcgag

SEQ ID NO: 239031 - DNA, 122 bp, Homo sapiens
gccccctgccaggcccctcaggtctgctccatgtgctgctggtggcccaggccaggtggccgcccaccttcatgaggaaccctgtagtgaggtgggtaggattttaattttagaattaccta

SEQ ID NO: 239032 - DNA, 122 bp, Homo sapiens
gtaactgttgtgaggtaaaaatgagttaacataagtaaaaccgagcacatgcaaaccatccgaaatggttaatacttactatttgtacttgaagaaataaatgtttttgacaataaacttct

SEQ ID NO: 239033 - DNA, 122 bp, Homo sapiens
ggcagatggcgcaggtggcctcctcctggaggttggtggacaggtcgggggcggccatggcgcggacagaggggaggaaggcggtactgtccgcggggcggcggcgggcggcctcggcagct

SEQ ID NO: 239034 - DNA, 122 bp, Homo sapiens
ccagaatcaaagacaaggaagggctaggggaggaggagaaaggaaagagtggagatggcacgatgccatggctaggacgcgggctggaaacgggcagccctactgacttcttgggcaagtgg

SEQ ID NO: 239035 - DNA, 122 bp, Homo sapiens
cttgccccccccccccccccccaacatacatggctggaactgaatagacttttactttcccgaggtgcttctacagttccctctgccagcaggggaacagatggaaatagcaatcacctgcc

SEQ ID NO: 239036 - DNA, 122 bp, Homo sapiens
ttacagctcgtaaggcggcgtgtctgtagttgttcattcctcccaataggctcgtgggatcgctggttcaggagtgaagctacagaccttcgcggtgttacacctcatgcaagcagcgtggc

SEQ ID NO: 239037 - DNA, 122 bp, Homo sapiens
tgcctcagccctgcaggggaagaccgtctcccgcataacacctgcatccacaccagagcccgctggggaggctcctggggccaccaccaatcaagatgggactgcccctcagaggagatccc

SEQ ID NO: 239038 - DNA, 122 bp, Homo sapiens
gtagcgatagggcacccaatctgccacccaccgccggcagtgcaaccccagatagcgcaccgaactcactccctgctgggcagtgcaaccccacatagcatccaacccgcctccccacccag

SEQ ID NO: 239039 - DNA, 122 bp, Homo sapiens
cgccctggctggtcgcgcgggccaatggcagcgcgcccctattacataagcgcgagggggcgggccctggctgacacaaacttcaggggacgtcgccttctgtccccaggcgcccctcctct

SEQ ID NO: 239040 - DNA, 122 bp, Homo sapiens
tccccagtttgttccttctgatgttcggacatgtttagagtttgttccttctgctggattcgcggtctcgctggcttcaagagtgaagctgcagaccttcacggtgagtgttacagctctta

SEQ ID NO: 239041 - DNA, 122 bp, Homo sapiens
gcagggaggctggacacgtggcggggggctggacacgcggcaggggggctggacacgtggcggggggctggacacgtggcggggggctggacacacggtgggggggctggacactcactcgg

SEQ ID NO: 239042 - DNA, 122 bp, Homo sapiens
ggggttacaggtgtgagccactgcgcccggccctttttctttttttttttttttttgtgacgaagtttcactcgtgttgcccacactggagtacaatggtgcgatctcagctcaccacaacc

SEQ ID NO: 239043 - DNA, 122 bp, Homo sapiens
ctcggttggagctggcagtttccaactccctggaggtcatctggagttcgggtgagcagccgcggacgcgaggaaaccggggcgtgcgcagagggacgaactcacgccgtgcttgcttccgt

SEQ ID NO: 239044 - DNA, 122 bp, Homo sapiens
cagcccaaccgactcctggttgccacgccggttaccatgggtgcagcctggggacgctgtcgtctgtggccagtgagtgcaccgagcatgcggagagggggacaggaggccttgggaggtag

SEQ ID NO: 239045 - DNA, 122 bp, Homo sapiens
ggtggagcccctgtccctgctgggtctgtctgatatttggaaatccctcctagagctccccgcagactttctctccatcctgcagtatcattagagaagaagaggaggggagaggacagaca

SEQ ID NO: 239046 - DNA, 122 bp, Homo sapiens
acacaggacaaagagataaagagaaaacagctgggcccggggggactactaccaccaagacgcggagaccggtagtggccctgaatggctgggtgcactgatatttattgtatacaaaacaa

SEQ ID NO: 239047 - DNA, 122 bp, Homo sapiens
cctgggcttttcaatccaggccagtaattgtccctctttgtttggaaaatgcacagggatcgaatatccatcagtctaaggcagtatataggggaaagaggaggaaggagcagggcagaagt

SEQ ID NO: 239048 - DNA, 122 bp, Homo sapiens
tgggcgctgggcgatgatggaatttctaacaaatgctttgtttctgctaaagctaacttgcgcttccatctctggcatctcctccacttcccaggtgagctgactggttactgagcctcaca

SEQ ID NO: 239049 - DNA, 122 bp, Homo sapiens
acagcgttcccgaggaccccctgatcctcatcttcttttctgcttcatcagaccagagaccgtggctaaaagccccccatctgccggctctcaggggcttccgaggcggcggggcgggaggc

SEQ ID NO: 239050 - DNA, 122 bp, Homo sapiens
ttgatgtccaggcctgcctttttggtgacctctgaccctgggcctagtgggattgatcagcgcttggatctgtgacctttcaccccgggcccaaaatgtcccaatcaaaggatgtggttgac

SEQ ID NO: 239051 - DNA, 122 bp, Homo sapiens
ctccctgaaccagaacagtgtgcctgacattcatggtgtagaggcccctgccagggagggcgcaatgtctgctcagcttggctaccctgtggtgggttggcacatcgccaataagaagcccc

SEQ ID NO: 239052 - DNA, 122 bp, Homo sapiens
gaaggggctttgtcttttccttcacggctctgtctctagcacctagaaaaatgcctggcacgacacaggagctccacaaatgtttgtccagtgtatcagaatgagggtacctggggcagggg

SEQ ID NO: 239053 - DNA, 122 bp, Homo sapiens
acgggtgggattggagggagccgcgtgattggcagtagcctcggctgctcgattggctcccgttcaggccctcgacccagcggggattcgcccccgtgcttgcggccgcctgcgctttcgct

SEQ ID NO: 239054 - DNA, 122 bp, Homo sapiens
gtgatttcaggatctacatgagaataaggcgcaattttttttttttttttctgaaaaatacggaagggttcatttacagctgttaaagatgggccggttttagggctaaagcaagactctgg

SEQ ID NO: 239055 - DNA, 122 bp, Homo sapiens
gccggccttggtcagggcgagcagctccctggtggcgcccagagctggggtgtcctggggcgcggcaggcggaaaggcacgcgcgggccaggggtgcagtcagcacagaatatggaagagaa

SEQ ID NO: 239056 - DNA, 122 bp, Homo sapiens
aagcagcagaagtctttatggtcccaatcctggaatgaatacttgataaatgtcctcaaacgtgagtgctcctcagaggttcaggaaggaattcttccagggcacttcatttccttatgtct

SEQ ID NO: 239057 - DNA, 122 bp, Homo sapiens
agtcttaatactcctctttctgctctctgaaaatagtgttatttcttgacctgaacttaccgtatcttgtttgtggactgtgtaaatctaacggtattttttgagtgattgactacaaaagt

SEQ ID NO: 239058 - DNA, 122 bp, Homo sapiens
ggctggtgtccgcgccgagggatcggcgatcccaggtccggggaaactccgcgagcgacgcgctcgcccgcggccttccttgtcgctctcggatgttcccgattaatgggctccaagtgacc

SEQ ID NO: 239059 - DNA, 122 bp, Homo sapiens
gtcatttcccctacaaactggtctaagacaagttcctggatgccggtggtttcttcatcccgggtcatttatcccagttgtgtaacctatgggaacaagagaggtttgctgtgccttggcaa

SEQ ID NO: 239060 - DNA, 122 bp, Homo sapiens
agggcagtgccgacaccgtgatgcttttgagcttgcactccagctccttggatggatccacgtcgccggcggccgtggccagcaccgccgccggcccccagcagcaggcgagcagggcgcag

SEQ ID NO: 239061 - DNA, 122 bp, Homo sapiens
attcccactgccagggcacccacctgagagcacaggcccccagccctctgcagacgcactcgtctgccggtcgcctctcggggacccaggcgtgcaggcacccctactcttttagctcacgc

SEQ ID NO: 239062 - DNA, 122 bp, Homo sapiens
taattagaacccctgaccctgcctcccttcctttagtagatctattttccttctagctaccgccttctggatccatggcctctccaaaactagaccatgatggtcagcctgacctgagagca

SEQ ID NO: 239063 - DNA, 122 bp, Homo sapiens
agcactctgctttccgggggcagctctacctctgtgtggctctttgggcctctgtctccccgttaaactctgagcatccggcagggaccctgcggtgttcccagctgcatcccctatgactg

SEQ ID NO: 239064 - DNA, 122 bp, Homo sapiens
actacctcattgaggttctctctcttattgtctgtacactttactatttgttctatgtctcggtctacttcttttaaaaagctaccagctgagtcactgtaagcaagagaatcattagctgg

SEQ ID NO: 239065 - DNA, 122 bp, Homo sapiens
aggtccccaccgaactgtccacacacatgcacaaactaacttcccggggcggtgcggagacgccgggacgcgaagacgtcaagagcccaggctagagggagagggactgagcccgagcaccg

SEQ ID NO: 239066 - DNA, 122 bp, Homo sapiens
ctgccccactgcgcacatgggcacaggcttggcacacgcactgcggcattcacgtatccgcgaacacatgggtatctatttatacatgaagacacgaaaatgtatttatttcttttaaaatc

SEQ ID NO: 239067 - DNA, 122 bp, Homo sapiens
gtttaaatgtgtcattgtaaggaaagtgcttagcacagtgcccggtacacagaagggactcgatagccactagcaagcatctccctcgttattttgcagcattatcaccggtgtctccattc

SEQ ID NO: 239068 - DNA, 122 bp, Homo sapiens
ggggtgggagctttggagcccaccctgggggagaccacgccgcacccccgcccagccccgcgcacccccagaggcttttgcagagccgggaagttggctggacgtctagacccgtggggacg

SEQ ID NO: 239069 - DNA, 122 bp, Homo sapiens
agcgccctgggcgctcgggaaggtgcctgactgctgacttccaatatttcaactcctcttcgggttctttgctcagatccccaaactcccacttgcgactaccgggaagagggagtcgtgtg

SEQ ID NO: 239070 - DNA, 122 bp, Homo sapiens
aattcaggtagggacgtcctgttggaaaagcagccattctctttgggtgtcctgagggaacggtgcgggcacatggactgagtggaggggaggaggcatgtatcttgaggtccttttgctag

SEQ ID NO: 239071 - DNA, 122 bp, Homo sapiens
tttttcatgtaaacaaaacaaacctgtgaattttaaggcctccgcctaaatccccatgggcgctgctccgtacacgccgcaccctaccctaccctcccttgcgctcccttcggagctcggac

SEQ ID NO: 239072 - DNA, 122 bp, Homo sapiens
ccaggcgctttctcaggtttctgctgatcttgcagcgcccagaaatggaccgagcggacccgccgccgcacgcaccctgctccactccaagctcctaagggctcctggcgcgccgcgtagcc

SEQ ID NO: 239073 - DNA, 122 bp, Homo sapiens
ctggacccttaccggtggctcttcctgcctgggaccctcccgcagagtcccactagccagcggcctcagccagggacgaaggcctcaaagctgagaggcccctgccggtgggtgatggatat

SEQ ID NO: 239074 - DNA, 122 bp, Homo sapiens
cccggacggctcccggcgcaggctgcagctgttccgtcagctgccgctcctcctcccagacgcagagcgccgctctgccccgccccccgcgcaggctgccgtccctacatccgggtaccgac

SEQ ID NO: 239075 - DNA, 122 bp, Homo sapiens
ccagttctcgcccccaaacaggtcctcatagtgctcggcagctcctggaactgtcctcaccgaagctttgggagtaggcagttcatggcacatcctaggcattctatgaagcttgcagatgg

SEQ ID NO: 239076 - DNA, 122 bp, Homo sapiens
aagggagaatcaatgggtgggtaaacagctccttgcatgctgggcaaatgagctccctttcgatattcttaatggtaaccttgagagtaaaatagtccaagttaaaggctcttagtgggtaa

SEQ ID NO: 239077 - DNA, 122 bp, Homo sapiens
gcaagagttaactcctcccatcccagcaggagccagaggaacagctggggcaggtgacctcgcgggccgttccagaaaacgttccccgcacccccgggatgcgccgggaagcgccctcccgc

SEQ ID NO: 239078 - DNA, 122 bp, Homo sapiens
gacgagagcgcaccagggaaggcgacccggatgggtcggtctccaggtctctaggcaactcggtgatctgtcctatcatctcccctccacccccacactaggcagtagaaggaaaaggaaga

SEQ ID NO: 239079 - DNA, 122 bp, Homo sapiens
acctgcccatgcaccacaccacagagaaaccaggacacaggggctcagggccagtgggggcgcaaaggctgcagaccgggagcggggcaccctgacaggtgggcacagcgcagagggcctga

SEQ ID NO: 239080 - DNA, 122 bp, Homo sapiens
ggccccacagggcagaagtgcccttgttggagacgggtgcctggggcaggtgggggtacccgagggtttccagccacaaggaggggtgtggacgattgggggattggggccggtgcgtggtc

SEQ ID NO: 239081 - DNA, 122 bp, Homo sapiens
gggttgagaaccactgatttagacattgctgtcccaattaatatttaaatagtcacagcccgttagctccactaatccagttgcattaccaccggcatacaaaagattattttttaaatacc

SEQ ID NO: 239082 - DNA, 122 bp, Homo sapiens
ttatcaagcccaggttccccaccaccgtgaccgcgtagaaacctagaaacaggaagaagacggggacctggagtcccggctggtggattaagcctgcgaggataaactctgtcacggaggag

SEQ ID NO: 239083 - DNA, 122 bp, Homo sapiens
gggcagagggagaggacaataaagacattttacatattcatagctgctgggccggcggggcgcagtagggcgcgggcgggcggccggggccgggcgggcgcggggtggggggcgtgaagggg

SEQ ID NO: 239084 - DNA, 122 bp, Homo sapiens
tgttgaccttttaattttttacaaaagtttttgagtgcccttaactttgatgaactttttcgtagttggacattaatttcaagaagacaactaaatattttggggagatttgagatattttg

SEQ ID NO: 239085 - DNA, 122 bp, Homo sapiens
aaggaacgctagaactatacgtcccagaacacttagctttgtttttaactacggtgcagccgcaaaagggaaataccggctcaggacccaggggagttgtagttctctaatccaaagaaatc

SEQ ID NO: 239086 - DNA, 122 bp, Homo sapiens
aaaaaacacaagttattttgatcttcccccaaagaatagtaaaggaatttcccccgaccccggccgccaggagcccagagaccccccagcctaaataacaatggcgctggagagggcgtggc

SEQ ID NO: 239087 - DNA, 122 bp, Homo sapiens
cggctctgattggctgaaaggacgctacgctagcctgggataggcattgggccaaggatgcgcccggcccactcgtgggggaggagaccaaggcgccgcactctgggtttgtttacacaggc

SEQ ID NO: 239088 - DNA, 122 bp, Homo sapiens
gtatatcattagagaggggacaaaataatagggtcttggcgaggtcttatgaagaagctgcgcctgcctagaaagatagatgggattgtgctgttttcgctttcagttcagtgatggggagc

SEQ ID NO: 239089 - DNA, 122 bp, Homo sapiens
gagccttcaatgggaagcttataaccttgccattcaggatcatcaaactggtcagaagagcgaacagcactaacatatttgtccttttgactcaaatatcttatttctttatttgcaactta

SEQ ID NO: 239090 - DNA, 122 bp, Homo sapiens
agcgctgcctcacagcccaaccaagcgacacggaagagacaaccacaggaatagcagctgcggagctccatggcctccctgtgccccctggtggcgagaaggaagaaaagcaagagcaggtg

SEQ ID NO: 239091 - DNA, 122 bp, Homo sapiens
ggaatgtggttttatttgggtggcgacttctgcggacccctcagtctcaagagagcgaggcgggaggactgaggggtctgtgttcacccgatgaccgtggcctttttgataatccactgcgg

SEQ ID NO: 239092 - DNA, 122 bp, Homo sapiens
gctccctggagccaaagagcagcccatccctttccccttcactcctacccaggctgcggtcgggagggtaagagcctacctaggagataggaaggctaatgacctcgcaatcccctccttcc

SEQ ID NO: 239093 - DNA, 122 bp, Homo sapiens
tgagtctaccgccactgcagggtcaggcagcagtgccaacctagatgctggcagaaatgacgatttcaaggccttgctacagaagaagggaagtaaggcaactccaaggtctcgtccctcag

SEQ ID NO: 239094 - DNA, 122 bp, Homo sapiens
ggaatgtccaagatgtggaccatgaacttggagagctgccctgagctcagctcacagccccgggagggctggccctgggggtgaggtgcctgattccaggacactgagtctcaagaactcct

SEQ ID NO: 239095 - DNA, 122 bp, Homo sapiens
actgcaccttccctaagctcgggtctcttcccccagccttcctttcccctgtggctttaacgatttgtagcacgatgcagttcaaatggctaggagtctggaacgtagaaggtgctgaattc

SEQ ID NO: 239096 - DNA, 122 bp, Homo sapiens
cttccttacgcagtggacaccttggcaccctctgcaaacagacagtcccgcagaggccctcgacgagtgtcactccatctgtttcgcgctcctaggagaggtgtagcagaaagcagtgcccc

SEQ ID NO: 239097 - DNA, 122 bp, Homo sapiens
aaccagatcccaaacctcaccaggttctgtgctcaggcccttgcctggacacgtggactccgggcagaagcattacttccagggagagtgaaggcccagcggccatgtgttcccctgatctg

SEQ ID NO: 239098 - DNA, 122 bp, Homo sapiens
cccgcccccacttcctcccgcccctcgctgggcggctattaaaagctgctgacgtcaaaacggacggccatctttgatgagggcagagctcacgttgcattgaagacgaaacctcggggagg

SEQ ID NO: 239099 - DNA, 122 bp, Homo sapiens
ggcggtccctgctcggagccattttcctcctcttctggatgtgtctagattggggcagtgcggctgccgccgcgcctccgcggttgccgccgccgccgcctcccccgcctcccccgccccag

SEQ ID NO: 239100 - DNA, 122 bp, Homo sapiens
acccagccaaacactacagccgtcagaggatctggctgatggcaaagcatctggagaaaacgttgcttcaaaagatgattcgagtcctcccagtcttgggccagactgtctgatcatgaatt

SEQ ID NO: 239101 - DNA, 122 bp, Homo sapiens
gctaaaacgaacgccaaggctctaagtggccctggggtccaggctcgccggaggcaccagcgtgtgcaggcccggagcgccgtcttctgggcgaggagtgtcattagtaacactttatgttg

SEQ ID NO: 239102 - DNA, 122 bp, Homo sapiens
gggtgttgagaggcccgcgaactgacgggccagtgagcgggcgtcgggagtgggcggatgcgttggggttcgggtcgtgggtgttgaggcggagaggaaggcgtggtgtggcgtctccaggt

SEQ ID NO: 239103 - DNA, 122 bp, Homo sapiens
gaaactcaaaaatggacagccctcccttattcataaatattacttcaaatatgttaaagacgttaagtaatttttagtctctttagaatttccaacgctatagtttattatgacagataagg

SEQ ID NO: 239104 - DNA, 122 bp, Homo sapiens
cttgacccaacatcttttgggtcttcaaaccccacggcggggcctacccaagcccacctccgtggctagtgtctaaggctgctcttcaaacacccagaacttaaggatgtaaagccactccc

SEQ ID NO: 239105 - DNA, 122 bp, Homo sapiens
cccaccttgccatcccagccagacttgacacgtccaaaaactgcatcctcagccccctcccggcagaagacaatggcctgcgtgccagttcccatccgggaccctccccaagccctcctctg

SEQ ID NO: 239106 - DNA, 122 bp, Homo sapiens
tttcttgcaccctgtatggatggcagtgtgtgcatccggaagcgcagctcctttccagctcgtttctaggccagtcttcgtcgtgctttcaaatgaaaggtgcagtcagtgcgaggaacacc

SEQ ID NO: 239107 - DNA, 122 bp, Homo sapiens
aatgttgtgatgattaaatgagtctgtcgtggaaggaaccgtgtcttggcaggagccgggcggacacccagacaccaacccgaagggggttgggacaaaggggagggacgcccgggaagggg

SEQ ID NO: 239108 - DNA, 122 bp, Homo sapiens
ctctggcttccgtttacttattttttaggagttttaacctttggttcctgcttttacaaccgctaaccccaaaaacattttttttttctttttgttctttgtaaaaccaaaccactatgctg

SEQ ID NO: 239109 - DNA, 122 bp, Homo sapiens
acctgcccagccttgttgctcagaggctgcgaggcagatttggccaagtcacgctacggccggccacaggcactcgtccaatcgcagaggcctgtgacgtatcaaccgtaggacagcggccc

SEQ ID NO: 239110 - DNA, 122 bp, Homo sapiens
aacacagagaagactccaggggcaagcacagaaaatagccatcaagggagattctttgcacgccatgcagaagtgccctacaggaggtgacgtgggagtgaaggaggaaaatatgacattct

SEQ ID NO: 239111 - DNA, 122 bp, Homo sapiens
gcaatccgaccgaaataaagctcgcccctctcatcctccaggtccacgatgatttttttacgagtctcccagcagcatttaaacggacagttcagcagctcttttgcggctggggacaccgg

SEQ ID NO: 239112 - DNA, 122 bp, Homo sapiens
tgtgtaaagtgcaagctgctacagaaatactttgtggtgtcattaacgatacagactctacgcttatgtagtgggcaatctctccaactaaggagcttcaaacaaagacccgtatctggacg

SEQ ID NO: 239113 - DNA, 122 bp, Homo sapiens
ctgtagttgaagaagtgagttattactggttaagtgaaggagaatacaaactacaggaaacggtgtggtgtctcactaagaggacgtcagaaaggacttagaggatttggggttgtgttagg

SEQ ID NO: 239114 - DNA, 122 bp, Homo sapiens
caaagctcactgagcacgttcatgacccttgaaagtcttcgaaaacagattactgggcttcgctcccagagaatgatttcgtttcttaggttctgtggtgcaggcaggtttggaaatcactt

SEQ ID NO: 239115 - DNA, 122 bp, Homo sapiens
gggagatactgttgtggtcacctctggaaaatacattctgctactcttaaaaactagtgacgctcatacaaatcaacagaaagagcttctgaaggaagactttaaagctgcttctgtgagtg

SEQ ID NO: 239116 - DNA, 122 bp, Homo sapiens
tgtaaacgatgataaggtgtgcttggtcagtcaagactttggctacacgatttactccaccgcagtggcatcctaatccccatgtgcgtcatgcttttcatgtactaacagatttacaaggc

SEQ ID NO: 239117 - DNA, 122 bp, Homo sapiens
tggagccgccccagccgccacgcgggctccgcaagggcgcgcaggagcctgggaagcgcccgacgttttccaaggtgacctccttcaggaagggcaggcccttggccactgagagcccagga

SEQ ID NO: 239118 - DNA, 122 bp, Homo sapiens
ggaccaaccctgttgagcaataggccatcttagtggcacctccttgagcctggtgggggacggcactgtttcaatgaggttgggtcaagagtgagctctggctggcacctggtggtgctgca

SEQ ID NO: 239119 - DNA, 122 bp, Homo sapiens
ccccgggatctccgcttcgactcccgctgcgcacgcgccgctctctaggtgcttccggcgcgcctgcgcagttaaaagaacggtggtgcgcaggctctaacactagtgcgccagccggctgc

SEQ ID NO: 239120 - DNA, 122 bp, Homo sapiens
ccatgtggatgtcctgaagtctctgtgaatccactgtgattctgggggctgcctgatttgcgaattgttcgttgctcaattaaattcctttaaatttaattcggctgaagtttttcttttaa

SEQ ID NO: 239121 - DNA, 122 bp, Homo sapiens
ttgtcaacatggagatgtgggtcgtccgacggtatccgaactagggacttatccggcacacgctaaacagagaagggaaatgtaagcagccctacctcaaccattgtgaggccagaagtccc

SEQ ID NO: 239122 - DNA, 122 bp, Homo sapiens
cccctgctgcgaaccagccggtaggtgcaggggccgaaggccaggcccagtggacccagccgcctgaaggggagccacggcctcagaaaacctctgcccgcccccgcggaaaaccgctgtgg

SEQ ID NO: 239123 - DNA, 122 bp, Homo sapiens
tgggaagctagcatttgatatggaaacctttaaagagtaattcttccgattggttaacatcgttagagatgagaaatagttacttatgagaaaaacatagaatgtttttgatgggttggcat

SEQ ID NO: 239124 - DNA, 122 bp, Homo sapiens
aagaccccgcagccaaggtcctccggccccgctctgcgcggcgctctggtcttggggctccggactctgtcatgccgggcaggggccagtccgatccttgcacccttgcctggcaccgtccc

SEQ ID NO: 239125 - DNA, 122 bp, Homo sapiens
ctaccaaaaattttaaaaattagccaagcgtggtgatacattcctgtagtcctagctattcgggaggctgaggtgggaggatggcttgagcagaggctgcagtgagctgagaaagtgccact

SEQ ID NO: 239126 - DNA, 122 bp, Homo sapiens
agctggtcctgacacttgcaaaatggtcagtggctcctgctcggccaggctgagtgtgtgcgtgtgtgtgagcaagggagcgagggtgtgcggtgtgcagggggtgcgctgtgtgtgcgcgc

SEQ ID NO: 239127 - DNA, 122 bp, Homo sapiens
agggaataaatagacaggaatggaaggggcagataacgtattggaatttatgttaactctcgctggaatagtaattctatttgtcctgaaaatcccagtaggtggcagcaccgatgttcaca

SEQ ID NO: 239128 - DNA, 122 bp, Homo sapiens
ttgccaatatttttctgcagccatccaagtccctaaaactttgaggtgtcagagagtgtgcgtttccagagcttcttattgtgtgccgcgccccgcgctcattgtgcaatctttgtattaaa

SEQ ID NO: 239129 - DNA, 122 bp, Homo sapiens
taattacaattttttattgcatgagacagaaacttagcttgagctatcttcaattgaagtcggggggatcttaaggaactcaagaatatgaatttggctgggtctcaggaacagccaggcca

SEQ ID NO: 239130 - DNA, 122 bp, Homo sapiens
atgtattgtgtggactgaccagcatctcacatgtaggagctttctgggggctgtggctcccggggtcctgtgggaagaatagtgaggtgcacacaatgcaacgggatccttagggctatttt

SEQ ID NO: 239131 - DNA, 122 bp, Homo sapiens
caatgtctcataaagggtcatgaggaggtgtctctaagccccaaagtttcctccagcttacgtggatggtggtaaaatgcaacggatgaacctgagctcctacctgtcatttatatgttagg

SEQ ID NO: 239132 - DNA, 122 bp, Homo sapiens
actcattcttttttatggctgcacagtattccgtggtgtagatgtgccacattttctttacggtctctatgtaacattcacacccggcagctgctgggtctaaaccgcaaaggggagggggt

SEQ ID NO: 239133 - DNA, 122 bp, Homo sapiens
agaaaggaggcatgccataaaaattcatcagaataatgtagggatgagacaagctccgatcgcgggcaagcaatcaaccaatcactcattccgtggcatttacagcacgtctcattcccctg

SEQ ID NO: 239134 - DNA, 122 bp, Homo sapiens
gcgggcctagtttaggcaaacagcagggactgctggcgacggctccagcccccactcccgcggtaacagctgcagtccagctgctggcatccctgctgggggagcgtgctaaacctctccgg

SEQ ID NO: 239135 - DNA, 122 bp, Homo sapiens
cccacacatgctggcatcatgtcccctggcttgtcatctttcccttcccaccgtcaccagcgttgtgagggttgtgcacagagtgtcaaccacagacaccacccaacttgtcctctctttaa

SEQ ID NO: 239136 - DNA, 122 bp, Homo sapiens
gccgggtaccggccgtggaagcggccaccgactactgtcagcagctgtgccaggtgagggcgcccggtggtcccctccccctttccccagctagagggggaagagggcgagcgagcgctagg

SEQ ID NO: 239137 - DNA, 122 bp, Homo sapiens
tcattgcccagggctggcagggccagccagctgctccaagtgtggggcctgctaaacccacgcccacctggaactacagctgacctgcaagcaccgggcgcagccccggttcccgctcgcgc

SEQ ID NO: 239138 - DNA, 122 bp, Homo sapiens
gcctgggacccagtgactcagcacccctgcccggatcaactggacttttgccccctgctccgccagcctcctgcttggatctctcctgggtctccctgctgcgcctgtccaggatgcaggga

SEQ ID NO: 239139 - DNA, 122 bp, Homo sapiens
aggccacagagaggatgagctggctagagagacgcgagtcgggcccgcctgcgagacagtcgcatagagcgtcagcgactctggaggacctgagggaagggtggttgccgtgaagcctctct

SEQ ID NO: 239140 - DNA, 122 bp, Homo sapiens
aagcagctgtcctcaccttggcctcaagcaaattctttaaaattctatttggtggctgagcgtggttggctcactcctgtaatctcaacactttgggaggtgtaggtgtgcagatcgcctga

SEQ ID NO: 239141 - DNA, 122 bp, Homo sapiens
ccttcccttccctgaatgcctgggaagaattcaggggcctcttgcctgtggatggagagccgaaccctggagcgggcctaggtgtggaggagggactgctctgccgggtggttcattctcca

SEQ ID NO: 239142 - DNA, 122 bp, Homo sapiens
gagctcccgggaacgctccaacgccttcagcctgtttcccaggaacggtccccggcttcgcgccccaatttctaacagcctgcctgtcccccgggaacgttctaacatccttggggagcgcc

SEQ ID NO: 239143 - DNA, 122 bp, Homo sapiens
aaaaaaaaggatattttactaaaaaccttcgcttggtggtggattcgtctgagtggttgccgtgcagacaatgtatcttgtaaatcctctttaggtgctaaagagcacctaaacatcacatg

SEQ ID NO: 239144 - DNA, 122 bp, Homo sapiens
gtagttttggataaatatttaacctctttgtgttatccctgatcattaaatgagatgggtcgttggaagaacaccaactttgagtcaaacagagtcagggtgaatccatgttcttcctctca

SEQ ID NO: 239145 - DNA, 122 bp, Homo sapiens
tgcggccgcgaagggcagggcctggggggttgccacagcgttggagggcagggcttggcccggatgcacctctgcggtaagcagggactggcggggtggctcggagaaagagcagatgcagt

SEQ ID NO: 239146 - DNA, 122 bp, Homo sapiens
acctgccgctccggtgccagtagggagcagaaggcggcgctcatggaccgaagcagaggtcgtcggcggcccaggtggggtgaggtcgctgggctcccccgggaccctggcaccccctcctc

SEQ ID NO: 239147 - DNA, 122 bp, Homo sapiens
tgtctacttggccttcttcctcacagtcttcaactctttgctcggttaccacctctgtagcgaaggcttagagttaccttcaccaccatcgtggacgtcaccgtctcctccttccctgcttt

SEQ ID NO: 239148 - DNA, 122 bp, Homo sapiens
gccgccgcctccgccgcggccgagtcgccgctgtcacatagtggaaaacgtgaccgcgcgcgccgcgcccgcccccggcctccgccattggccgcgactccgtctcatctgcatacatgagg

SEQ ID NO: 239149 - DNA, 122 bp, Homo sapiens
gccttggggcggggaccccggggctgccctaatggggcggggctggatggggcggggtcgcggctcctcccccggccgaggcggcgaggggaggggaactggcctgaggggctgctcactga

SEQ ID NO: 239150 - DNA, 122 bp, Homo sapiens
tttctctttcattcctaaagggctagaattctgtcgtctaaaacctgcctcatggaagcccgtggaaaaaactgcctgcggaagagacgaggttgtgagcgcttatagcacagatggagcag

SEQ ID NO: 239151 - DNA, 122 bp, Homo sapiens
attagcgccagatacattgtcatgtaatttcatttgatcacaagtatcctatgagataggcgaagcagacacattgctagtttactgaaaattaagatccagacaagttaacccagagtcac

SEQ ID NO: 239152 - DNA, 122 bp, Homo sapiens
cactgagggggaaagtcgtcagcaaaccgcaggcttcactagaacctcccatccggccctcggtcagctcagtgtatttacatcatccctgctagctcatgaaaagaatattaaaaaatatg

SEQ ID NO: 239153 - DNA, 122 bp, Homo sapiens
cggtcgaacagccccatgggggtgccctgaccttcttgctctaatgcagctgctgttccccggggcagcgactccccttctctccctcccaagtgcggccctgccctcttcacaggcacaca

SEQ ID NO: 239154 - DNA, 122 bp, Homo sapiens
tatgcacatttttttccttttaagtatggtataccgtgttctcagcaattatttcattatcgtttctctgcaacctttcttcaatggtactaagcaagacacatctggggaggcctactttc

SEQ ID NO: 239155 - DNA, 122 bp, Homo sapiens
cttgccttgctgcttccaacaggagagcagagagaatcccaccagatgctgcttcactatcggcgctgacgctttctaatgaatctgacccctggctgcagctctaaaagggtgcagcagtg

SEQ ID NO: 239156 - DNA, 122 bp, Homo sapiens
atgtacatggttcaaaacacaaaaggcaccaaaagttatacagtgacaagtaagtctccccggaacctcagaactcccaggccacccatgtcctcactccattataactgcagtaaccactg

SEQ ID NO: 239157 - DNA, 122 bp, Homo sapiens
cccgaacctctgcggcggcggtggcagggtacgcgggaccgctccctcccagccgacttacgagaacatcccccgaccatccagccccgagcagggactggcagagccggcgccccttcccc

SEQ ID NO: 239158 - DNA, 122 bp, Homo sapiens
gtctatagtgttacagctctgacccaggaagtcccagggtcttgccttccagaagggtcgcggctcttccctccctcagtccaacgaacaggagcacgtcacctcccgcagctcggggagct

SEQ ID NO: 239159 - DNA, 122 bp, Homo sapiens
gctgacagatctcgatggagctgcttatgggactccatggggggaactgtaaggactcaacgtatcactggtggacatgcgcgatctactctagtcagaagcatgacaccaacccaaccacc

SEQ ID NO: 239160 - DNA, 122 bp, Homo sapiens
ccctctaggctagtacaggcagtgaaagggggaacttaaaatgaaataaacacctaagcccggagctgcaaagctgggactacgttactcgtggtgccttaaaccccaagctttatccgccc

SEQ ID NO: 239161 - DNA, 122 bp, Homo sapiens
aggcgcgctggtcaagcagccagtcaacaaatgctccagggtgcagactgctcagctcggcgctggcgtcgaggtagccaggccatgccctcaggaaatgctcaggccacattccccgtttc

SEQ ID NO: 239162 - DNA, 122 bp, Homo sapiens
ttggtgaatctttctcctcaaaaggaacaacaaatggctccttcctcagtgctcttttctcggccgggcacttggcatccaaaaccatgctcagtgcaactggaggtgcattcagttctgaa

SEQ ID NO: 239163 - DNA, 122 bp, Homo sapiens
tttgctacaatgtaacagaatattgtctcagagttctaaaggttcgctcaggggaagcgacgggccaatcacagcgcgggataccggcccgccggccaatcggcgctgctggtagctaggtg

SEQ ID NO: 239164 - DNA, 122 bp, Homo sapiens
cgcgcgtgcgcgcagcctgcgcctcggtccgggtgggtctaaggatgatgattgatccgccgtgcgcacgccagcgcgttcctctgtggcaggagaggggggcctgcgtgtgaccgagcgtg

SEQ ID NO: 239165 - DNA, 122 bp, Homo sapiens
tcgtaggggggtgcggtggggtcaagatcatgctcttttagcctttcattaatgaaatcccggacgtccgtgttatctggagctgtaggagtcctccgaggaataaataacgtttctggaat

SEQ ID NO: 239166 - DNA, 122 bp, Homo sapiens
cagggctgggctgtgtcacgctgtccttcctgatcagcctgtactacaacaccatcgtggcgtgggtgctgtggtacctcctcaactccttccagcacccgctgccctggagctcctgccca

SEQ ID NO: 239167 - DNA, 122 bp, Homo sapiens
acagactccctcaacgacagcgtttgggggcttgcaggctgctgagcacggggaggttcccggagggtggagccctggcgagggcacagcagctccgagctccctgccccatacctcgccct

SEQ ID NO: 239168 - DNA, 122 bp, Homo sapiens
aagttcaacaagggaggctcacgcatgctgtgaggttgaccagtagccccagaatgtggccgagaagaaagttggaaaaaaaaatacagatcttcccactggtagcatagcgaatcgcttca

SEQ ID NO: 239169 - DNA, 122 bp, Homo sapiens
tctgatgtaaattaaaagctgaacatacatatgtgatgatataggcattacccaacgatacgaaagcagttacttttggggagagatagtggtagagatggtaaagaaaatttactcttttc

SEQ ID NO: 239170 - DNA, 122 bp, Homo sapiens
gccactccacccctaggctccctgcccaggtgctgggtccgatgacagatgttgggtgaacgcctacctactgtgtgccaggttcccgcgtgctgctgcttgggcgcgatgtgaatcgtagt

SEQ ID NO: 239171 - DNA, 122 bp, Homo sapiens
accattcagcaattaagaaggaaggaagtgttgatacacgtaacaaattggttgaattttcggggaattatgtttcatgaaagaagccagactcgaaagctaactaccgtatggttctatta

SEQ ID NO: 239172 - DNA, 122 bp, Homo sapiens
gcgggatttgcatgtgtgtggtggccccagacttcctgctccttctacgctgcaggtacgcgcgggccgggcggggcgggcgggcggcgggcgcgccaagacgtgggcacctcctcacccgg

SEQ ID NO: 239173 - DNA, 122 bp, Homo sapiens
tttctcactgtcagcctaatctggcaaagtttggctcctcaagagcaaccccaggcggggcgcagctgctcacacctgtgatcccagcactttgggaggccgaggtgggagaatcacttgag

SEQ ID NO: 239174 - DNA, 122 bp, Homo sapiens
tgcaagaagcgttgcccgttggctagctgctcggtggggatctgcctgccctgggggcgccgcccgcgctccccgcggtgctctcgctcctgggctgcgccagtccgaggcggtgccggctc

SEQ ID NO: 239175 - DNA, 122 bp, Homo sapiens
tccaaacagctatagagacccagaaatgcctgtggaaagctacagaggacttgggcaaggcgttagagccggacgttgtggtccctgggggagccaaccggggaggtgcctatgatctttct

SEQ ID NO: 239176 - DNA, 122 bp, Homo sapiens
cattctccagtcccttgtcctcgggtctaggagaatgcggagctgggagggcagtcctcacgggccccattacggttccgcccatcggaaccagattttgtttgtgcaaaatgaccctgatc

SEQ ID NO: 239177 - DNA, 122 bp, Homo sapiens
ggggcgggggagaggaggaagggaggtagttgcggcaggacccccgccccggtgtctccgcgccggcaggaggtattcgaggagaatcactcggcaagcgccatcttgcccacctccccgcc

SEQ ID NO: 239178 - DNA, 122 bp, Homo sapiens
atgccacaggtttctgtgttttgctttagggacagaaccacttaggaaggaaagaactcccggtctccagggtggtatttcagtgtctgtgataatgtcacgcaacacctcttcggggacca

SEQ ID NO: 239179 - DNA, 122 bp, Homo sapiens
ctcagcctcagacagcaggtgggataccaagttcccacttcatctgccgcagggctgggccgcgccaggaccacgtggccagtgcgcgcagggcgatgggcggcagtgcgcaggcgcgcacc

SEQ ID NO: 239180 - DNA, 122 bp, Homo sapiens
ggggcccacgagagagccgcagacgggtacagcgggtgatctggggtctcccttatgcttcgcccgggaggggggtctgccgataatctaaccccttctaggggcgcgtccgcagcggcgcg

SEQ ID NO: 239181 - DNA, 122 bp, Homo sapiens
ggaggttctgccaaagtcgatgacaggtctgccgagtgaactccacgagctgtctgctcccgggtgtgaacacctcgggtttgatttctggcgggtggtccggcttcgtgggctcgccccag

SEQ ID NO: 239182 - DNA, 122 bp, Homo sapiens
ggcacgccaccttcacgagagtaagagagaagcaacgggcttggacgcggggactgggcacgccaccttctccagccccagagccccactgtggagagaaaaggggctgctctctgcctcag

SEQ ID NO: 239183 - DNA, 122 bp, Homo sapiens
tggtgggtgctaaggatgattcctaactcaggcaggcaggtattgaggcagtgcctccagcgtctggtccctacatcctatccacaaaatcagtgcagagggaacatgcattacagcagcag

SEQ ID NO: 239184 - DNA, 122 bp, Homo sapiens
aaccataaccatggggcccaccctgagcttcctgatttctgaagtctgagtgatttcctccgtgtgccgagaggaaacagccttctgcactcacagccgaagggaaagcagcaggttggggc

SEQ ID NO: 239185 - DNA, 122 bp, Homo sapiens
tagcggcccggggaattcttgctagcttccgattggacgaaagcagaacgcctgccccttcgtagacccagcgtacgtacaacgctcacaccaccacgccgtacgctgcgttagcggaagtt

SEQ ID NO: 239186 - DNA, 122 bp, Homo sapiens
cccagctgtgtgaagctgcctgcaggctttgtgtggcagaagctcccaagacactgttttcgtgactctttcagccaagtccaaaaaacctgccatcctggggggcatcaggctgccagcat

SEQ ID NO: 239187 - DNA, 122 bp, Homo sapiens
ttgttcaggctggtgtgaggctcctttatctggagaatggttgcaaaggtaggaagaagtcgagactggactcatactatcactagctgaagcacactctattctgacattaatcaggtttc

SEQ ID NO: 239188 - DNA, 122 bp, Homo sapiens
ccgacctggaggcagtggacggtcgccggaggccacatggccctgctgaaatggccgagtcgctcaggtgaccatttgtcatccatccatcgatgtcactcaaggtgcagctcagagatgaa

SEQ ID NO: 239189 - DNA, 122 bp, Homo sapiens
actcgggaggctaaggcaggagaatcacttgcatctgggaggcacagcttgcacgtgaaccgagatggtgccattgcactctgcactccagcctgggagacagagtgagactcttgtctcca

SEQ ID NO: 239190 - DNA, 122 bp, Homo sapiens
tggcgccaggcctcactgcagggtaaatgctgcacaggctccgccctccagggctgggggcgggttacctcagtttccagacagacaagactccaatccgaggtcatgctccgggacaggag

SEQ ID NO: 239191 - DNA, 122 bp, Homo sapiens
ggcaggacatgccttccgtcttgaccgacttccaggagaactgggagccattcaggtacccgtctttctgcctcttggccgccaaggggcacccggaggcgctgcgatgggacgcgtacttc

SEQ ID NO: 239192 - DNA, 122 bp, Homo sapiens
actgcgtctggaggattgatatttatttttgcattgcgatggctgaaggcatttatttaacgatctttttacctggatatgtctgtgaggctcctgaaaggagacaaataaagtcaatatat

SEQ ID NO: 239193 - DNA, 122 bp, Homo sapiens
tttccccctctctatgcagatctggacgggttttttttttgttttttgtttttttctggacggacggaaggtgtgtccagcccatccattcatgtcaccagccccacaaagtgacagacgcg

SEQ ID NO: 239194 - DNA, 122 bp, Homo sapiens
gccgctcccccgctcccttctcctggctgaggctggcaaaggcaggcaggcatgggggggcggggcctcaggagggaggaggggctggtgggcggggcctacggacacctcgccccgccccc

SEQ ID NO: 239195 - DNA, 122 bp, Homo sapiens
tccatacggaatgatgcactgttcggttgtagtttcattcgtcagtgacctgcatctgcccgcccagtcttgagttcagctccatccctccctgcagttccgcagcctccggcttccccacc

SEQ ID NO: 239196 - DNA, 122 bp, Homo sapiens
gttcaagcagatgagtcaagtgtggattttcagggtgggctgaagtgaggagctgtggcacgggtcggaaagccagccaggaagccgttctgatagttcacctcattggagctggactaagt

SEQ ID NO: 239197 - DNA, 122 bp, Homo sapiens
aatgtgaatgtggagtcacgtgtagaataacaaagaagcagcttctgagcaaagaccaagcgcaattacaacacgtcacaccacgcgatgacgtgggtctgaacggggcaggcttccagggg

SEQ ID NO: 239198 - DNA, 122 bp, Homo sapiens
ggcggcgcgcagggggcgcgcctgggcggggagtgggctggcgtctccttacctggccttcggtggagcatgctgctgcgggctgggggcggggtgggcgctgcgtccccaggggttgactc

SEQ ID NO: 239199 - DNA, 122 bp, Homo sapiens
ttccctggccagctcaatgctgacctccgcaagttggcagtcaacatggtccccttcccacgtctccatttctttatgcctggctttgcccctctcaccagccgtggaagccagcagtatcg

SEQ ID NO: 239200 - DNA, 122 bp, Homo sapiens
tttgctgttggtgacagcatctgctgtacacacaagatgttgcctgatctctctggtgtccgtttctggcttttggttggccaaacccacaagtctccaaattcttagttggagtcctcatg

SEQ ID NO: 239201 - DNA, 122 bp, Homo sapiens
cgaattagtagatttgacactatgtacgatggcccttcatattccaagttcactgagactcgaaagatgtttgagagaagtgtgcatgaatcaggacagaacaaccgctattccccaaagaa

SEQ ID NO: 239202 - DNA, 122 bp, Homo sapiens
agagaagccagctgtaattaagcagaggcagaaatctccaaggaggaaggtgcctcaggtcggatgcgtccctccggtcctgtggccagagcagttgccctcagtgtgtgtctcctcccgtc

SEQ ID NO: 239203 - DNA, 122 bp, Homo sapiens
ggcctgttccctggaggggacgtcagtgtgggctgcagctgggtggctggtgcctcagtccgctaatgcccaagttgcaccatggcctacagtaagatggggtgggctgggctggggtagtg

SEQ ID NO: 239204 - DNA, 122 bp, Homo sapiens
tcaaaaaccacaagctagggccaaggatgcctcccgtttacaagctgttctgcaggctaacgctgatcttccccagacgctaaatcataatcttcgtgtttttcgtatttcacattctagcc

SEQ ID NO: 239205 - DNA, 122 bp, Homo sapiens
ctcttccatccacaccatcaggtcctggcaacacctcatctacgagcaggtataaggtgacggtaccacagcccaggtagaaggcccaggaaaacttgacctctgtgaaacggtgatatggt

SEQ ID NO: 239206 - DNA, 122 bp, Homo sapiens
gcggggcggggccagaagcaaagccgggcgtttctcccatgggaggtgctctgggtcctacggacagcccgctcccaggccagggggaggagctttctgctggcttcctagctccagtggtg

SEQ ID NO: 239207 - DNA, 122 bp, Homo sapiens
aatgcacaggacgggcccctcatccccaacaaagaatcctctggtgccaaatgtcaatagcggcgaggttaagaacccctaacgtgtgtgtactcaatctgaattctcttggtggggtggct

SEQ ID NO: 239208 - DNA, 122 bp, Homo sapiens
agaaggaaccagggttattataggattttggagaatggtggagtttggataaagtttaaacgcaacaatatttgataagcttaaagcacggcaagactgtgtgtcaagggttaataaacatc

SEQ ID NO: 239209 - DNA, 122 bp, Homo sapiens
tacatagtaagtgcccgataagcatattgggctattagctattatgctaatatgctactacgatattagctgctatgatagtctaagggatgcctgggccacaagttaagggtttctgtagg

SEQ ID NO: 239210 - DNA, 122 bp, Homo sapiens
ggacaccccccgggaggagacacactaggaagcccatctcttcctatgcgggacgccacacgcgtgtgcaggcagtgagccggagtctcgaggctcgctgtggagtcagggaggccaggaaa

SEQ ID NO: 239211 - DNA, 122 bp, Homo sapiens
ggggtcctgggacttaactcctcctccagcctcagccctcccggtgccaagattcttcaacgtcctcgggatgcacctccgcactgtggggccatctgggtcagcccggacgcaccggcctc

SEQ ID NO: 239212 - DNA, 122 bp, Homo sapiens
actcagtcgtggggaataaacgcagcgacccctcggtgttcccgctgggctcgtgggtgacgcagtgttttccggtggcttgggaagaatctggaggtcgggtgctgaggcttgagcgtctc

SEQ ID NO: 239213 - DNA, 122 bp, Homo sapiens
ccggcgcctgtactgaggccgctccctcctgttggcccccatgcggaaggcgcgcggcgccgtctgccgtacctgcagccacctggtcagcggggccctcttgctgacccacgacgaagtcg

SEQ ID NO: 239214 - DNA, 122 bp, Homo sapiens
caacaagtgcatggaacatcggaaacctcctgaaaatgctaaatttgccccgagatgtcccgaagtccggcatatttctctgggcagcctagaggctcaggagcccagcccagcccagccca

SEQ ID NO: 239215 - DNA, 122 bp, Homo sapiens
gaagacgctaggtgggctgcgcgctctgccaggcgaaggctggagcgcagacggcaaagccgcgcgtttcagccgtggtcgggtccgcaggacctgggcgtggggacaccaccaggcaggag

SEQ ID NO: 239216 - DNA, 122 bp, Homo sapiens
ggaacatagtaagaccctgtttctaaaatatatatatacatatgtgcttctacgtcgccccgcccctgagccggccgcccagcccctggtgtggtgcctggcgaggggaatgtcccaggtgg

SEQ ID NO: 239217 - DNA, 122 bp, Homo sapiens
aagacaccacgtgagggtgacgatgtgacagcaatcacaaatgcctgctcacgggacggacgagaacccagctgtgcagcgctttgcgaggggggcctgaggccctcagtgactgcagcctt

SEQ ID NO: 239218 - DNA, 122 bp, Homo sapiens
cgttgctggccgggatgatttcagactcgttcaccaaggaagacttgatgtcagctaaatcgccttcctcttcgggatgactgatctcggcgaagatcttttccttctgaggatcgccctcg

SEQ ID NO: 239219 - DNA, 122 bp, Homo sapiens
ttataggcgtgatgatagaggtccccccccccccaaagacccaaactgaatctaaagcctcggagtactcctaaggaagatgattcctctgctagtaactcccagtccactcgagctgcttc

SEQ ID NO: 239220 - DNA, 122 bp, Homo sapiens
tgtggataattgcacaggttgctatgctacaagaactagtcaagataaggcagagctcagcggtggggattttaatggcataggtggggtgagggaaagaggtctagggaagctctgaagca

SEQ ID NO: 239221 - DNA, 122 bp, Homo sapiens
cttgtccacagcagctgatatcacattaatttatacttcctctcagagctgactcatttccgttattctctgggactcccttctaaaatgtttccatcaaatttttcattaaatgacttttg

SEQ ID NO: 239222 - DNA, 122 bp, Homo sapiens
ggccagtgtaaaacaattccctgaccgggaatcgaacccgggccgcggcggtgaaagcgccgaatcctagccactagaccaccagggacacacaggagggagctttctctcccttcttctgt

SEQ ID NO: 239223 - DNA, 122 bp, Homo sapiens
gtagtgaagccacaggggtcagggcatgtcagggtgcgaaggatcctggggaggggcctccgaagctgcaagcgcacctgcgcctcggtgccctcgaggctgcggctgaccgtggcatggcg

SEQ ID NO: 239224 - DNA, 122 bp, Homo sapiens
gtttttggggcaagaaaagcttaagtaactttaaaggaagacaaagtactacacctggcacgaggaggaaagagaaatggaagcaggaaggcagatgccagaagcttacaacaatattctaa

SEQ ID NO: 239225 - DNA, 122 bp, Homo sapiens
tatctgccatctgctgcattacaagattttggcactcgcttagaggatttacccaccggccgagtcaggagacacttaacttctgtgacacgcataaaactatacagggaatgcggtagatt

SEQ ID NO: 239226 - DNA, 122 bp, Homo sapiens
cttccctcctccagtgaaagtaccagaagagatggcggccgctccgccgagtgtcattaccgcggaagcagcagaagccggcggcaggagcgggcccgagagcccgcggccagtggcctgcg

SEQ ID NO: 239227 - DNA, 122 bp, Homo sapiens
ggagggagccactgctgggctcaccatggaccgccggatgtggggggcccacgtcttctgcgtgttgagcccgttaccgaccgtgagtagccagctgagaccctctggcctctgccactggg

SEQ ID NO: 239228 - DNA, 122 bp, Homo sapiens
ttcaccgtgtcactcctgtgaccaaacccctccccactgctaccagattaaagcttctaacgcctcagctggtgctccaagacctgctggccagactggtgaggccaggtgtcctcactgac

SEQ ID NO: 239229 - DNA, 122 bp, Homo sapiens
aaataatacaaagtcacacgctttaggttctacaactcctgactggctgaattggcccgtcgatttaccttgaggcagttttggcggggtgggggctgggatgggggaggcggttgtagttt

SEQ ID NO: 239230 - DNA, 122 bp, Homo sapiens
atgaggagtgactcagtctctcctgcaggagaacttttggctctggtcacccaggtggtccggatgcttggttcatttgccttccctttggagaggttgttgccggcacagagggtgagctg

SEQ ID NO: 239231 - DNA, 122 bp, Homo sapiens
gaaatacaagagttactaactactgcactagttagctggttgtctgccaaagaggatgtgcgctctcaagtagacctcccatgtggaattatgagtcaaatgaataacgtaggcttctccac

SEQ ID NO: 239232 - DNA, 122 bp, Homo sapiens
ttggggatgtgattcgagaacctccaaatttcactgtgtttattctgtccatccattccacgttaatttcacaacattgtttacttgctatgctgaaggcacttacagcaatacagggacat

SEQ ID NO: 239233 - DNA, 122 bp, Homo sapiens
ccgccccgccaggcgctggtctgagcgtctgagcccagatggtgcgcttgctccagagggcgggcggctccagtggccgccgcgggacggtggggccagaggggcccgtgggggtgggggag

SEQ ID NO: 239234 - DNA, 122 bp, Homo sapiens
ccatattgccgtctctctgccagtcctcgggcagggcgcatgcgctatattggaccgcagcgctgagagcttttgtgtttaatgaccttcagctaccgggaggcaaagccgggctcttaaag

SEQ ID NO: 239235 - DNA, 122 bp, Homo sapiens
gaaagccggggggtagagagaatttccttcccctttccctcccaggtagccaaagcgcaccgcagcggcttggcttcctggaggaaaagcgcccgagcggggcaaagacccgcccaggctgc

SEQ ID NO: 239236 - DNA, 122 bp, Homo sapiens
tccaagatgtcatgcggcggcatccctcggcctgtgcgcaccgaaactagcttccttcaccgggcatatggcctgggagacctggggcatttgggtgcatccttccactgctggttggtgcc

SEQ ID NO: 239237 - DNA, 122 bp, Homo sapiens
ttgtgttgtgtgtattagaggtttgtatgggcctgactgaggggttgtggaatgtgtgtgcgtgagcatgagcctggagaggttctatgcctgttcactcctgacagagtttgtgagtgtgt

SEQ ID NO: 239238 - DNA, 122 bp, Homo sapiens
cccaacaagcagcgaaaggcagtcccgggccctcggcctccccactcaccccgtgcccatcgccggacacagtccgtcggcataaactttccgtcggcataaactttccgtccgcgcgccac

SEQ ID NO: 239239 - DNA, 122 bp, Homo sapiens
aaacagcaatgaggagcaaagagggtcccactcaacctccacaccatgtagtatgtagcacgtggggaagaaatggccatctcttaagaggactgcaggggagaaggtgggctcagggactc

SEQ ID NO: 239240 - DNA, 122 bp, Homo sapiens
ttttaactagatctttagtacaccacggtatcatcccaaaagccaaccatttgtggaccacgtgtttactttcaccattttggataataggatatggtttcggaactttcaggtaagcttta

SEQ ID NO: 239241 - DNA, 122 bp, Homo sapiens
ggcaccctggtgtgctgcaccgagctgtgatgagcacatccgggtcctgctggatgcatgcgccgggaaggacgtgccctgagttgggtcgatgatgagaaccttatattatcctgaagaga

SEQ ID NO: 239242 - DNA, 122 bp, Homo sapiens
aggtcagggagcgctggaggaaacctgcactggggtagaaatggctggaggaaggcggaccgcgggctcgctctcatggtgccaaccccggggacctttcttcaggctccctgcgggatccc

SEQ ID NO: 239243 - DNA, 122 bp, Homo sapiens
cctttcaggctttgtcttcccttctggatctttctgccacatttgggtgcctcccgcgagcgcaacacacaccgtgggtgcgaatgagggatgccagtatccccggagctccacaaaggggc

SEQ ID NO: 239244 - DNA, 122 bp, Homo sapiens
gggagccctccttccctatcaagttaaggggcccacgtggcaccctatggccccacagaccgtcttctacccagatgcccagttctaatgctgagtccctggcccagaccaagggcacctga

SEQ ID NO: 239245 - DNA, 122 bp, Homo sapiens
ctcagcgcggagggttaggctgcctcgaaccccattctggtaactccatcccagctgggacgccgggccctctccgccccttgcggcccacccctccccttctgccccccaacacggggacc

SEQ ID NO: 239246 - DNA, 122 bp, Homo sapiens
accctgcaaagggtcgtaaccggacttcggggcaaacttcaggtcccccgcctgctagcccgccaaccccctccgccaggcagccggcgcgcctccaggttccgcccaggcgtcgctgagtg

SEQ ID NO: 239247 - DNA, 122 bp, Homo sapiens
tggtcagtaagcaagtgcccagggacacacggagcagggctgcaaccccaggccatcagtcggcctgtgctctgagcccccactgcgtgccaagtgctgcagggagggaaccatgatggtgc

SEQ ID NO: 239248 - DNA, 122 bp, Homo sapiens
ctgagccaccccgaggtgctgagcagcagcacgatctcctcctgttgctgttagtgtgaccgccaccgccgaggcaattcctaatgacagagcaggtcgggaggacagcgcgaggaagtgaa

SEQ ID NO: 239249 - DNA, 122 bp, Homo sapiens
ccagccccttgggcttcagccctaccgcctgaggaggaaggcgcgaaggttgagccgccgcgtggcgcgcccgcgttaacccctgcagccgatctgctcctgctcacctgtttctcccatgg

SEQ ID NO: 239250 - DNA, 122 bp, Homo sapiens
aaacattagaaaggactttgctggtccaggtgcttgcagttgtgataggctgtgtcccatcgttggaggccctaatgcataaggctggatcatttctggacagggtcattgtaaagggcgtt

SEQ ID NO: 239251 - DNA, 122 bp, Homo sapiens
gtaagaacttcaccaagtgcagttcccttgcctgtgcagaaggtaccttctccacccattcgaagcccttctattttgtcctagaggggaaaccatacatggattgttcacactggaggcgg

SEQ ID NO: 239252 - DNA, 122 bp, Homo sapiens
ataatgtcaggacgcggcaaaggaggtaagggcctggggaaagggggtgccaagcgccaccgcaaggtgctgcgcgacaacatccagggtatcaccaagccagccattcggcgccttgctcg

SEQ ID NO: 239253 - DNA, 122 bp, Homo sapiens
cctaccgactcccatgaggaagtgcgatcgggaacctcctatatacttccgtttgcctcgcggtttctttctttccgcgccgatagcgctcacgcaagcatggtaggacttgctggtggggg

SEQ ID NO: 239254 - DNA, 122 bp, Homo sapiens
acgatgaacatcagcagaaaggccagggagcccaccacagcaatcagcatcacgtactggcggaagaagtccactatcccatccaggaagttggtggggggtgatgggccccccagggttat

SEQ ID NO: 239255 - DNA, 122 bp, Homo sapiens
tgcagtttctcccagataccttctttaccaaaaaagcaaatccctaactgctccgtgctgcgcctaccccaccgaagagctctctgtggtccgggatcacaaatcagagattgaaccaggac

SEQ ID NO: 239256 - DNA, 122 bp, Homo sapiens
caagatgaagaagttgcggagaactttgtcggagagtttcagtcgcattggtgagtagcgcgctgcccccggcccccccagcgcccgctcccctcggcctgcgcccccgccgcgttcctggc

SEQ ID NO: 239257 - DNA, 122 bp, Homo sapiens
gggtctctgagcctgagaggaagctccagagagtccgcccggattaggccacagaagcgccgagctcccgcacagacagcctcagggctcacccccaactacggcgacagggcggacccgcc

SEQ ID NO: 239258 - DNA, 122 bp, Homo sapiens
acaactcccggcgactccgcagggcggggtttaagtgctcccaccgcccagtccccggaccgactgtcccacccgcgacccatgctggccccaggttaacgcctgcaaccccggagggccac

SEQ ID NO: 239259 - DNA, 122 bp, Homo sapiens
tgacatctgtgtccatttggacatgagaactgcagatgcagactttcatcctcggagcctcgtgtagatgctgcacgggaaacgcagaggtaggactgaggctaccacaggcaacagacttc

SEQ ID NO: 239260 - DNA, 122 bp, Homo sapiens
gacaaaaaaaagttaaagcagagaagttctatgatctggccaaggacctgggagctgttacgctgcagaggcagagcatagccagactctggtatcatcaggcctttccagcagcccacact

SEQ ID NO: 239261 - DNA, 122 bp, Homo sapiens
gctgtgtagctgggatggtaacaattttggcaggctgcatggtcattttgtctccattttcggtagaagctggcatcacagtagggattgtctgaatgactacctttggagaggtcgctgtt

SEQ ID NO: 239262 - DNA, 122 bp, Homo sapiens
gcaggtgggacccccagtggaggaggcttccttcagcagacacctgggaccggtgctgcgcgtggccctgaccttggggaacacccagcaccaaggaagaaaaggtctgagtgaggccaaca

SEQ ID NO: 239263 - DNA, 122 bp, Homo sapiens
tgagagacagactcttccatgggtggtgggctcaagggcacagacattctggagggtgaacgccatcatttgtacagagggatacgtgggttgctgaggactgagagagccttgcaaggccg

SEQ ID NO: 239264 - DNA, 122 bp, Homo sapiens
cgaacaattcgacctgcggttgttcttcagccatggttgcgtcggggaccaggaagtggccgtccctgggggaactgggaggggctgggaccggggaaggcgggtctcacactcagggactc

SEQ ID NO: 239265 - DNA, 122 bp, Homo sapiens
ccgacttgacccaggataacccaggcgggttgggctctgcccagaattgaccaacatgggcgccgtgggggcagcgggaacggccagtgctgggcctcctcactcctccctgcgggcggggc

SEQ ID NO: 239266 - DNA, 122 bp, Homo sapiens
acgggccgctcctggggagagccgtggactgcaccttgtcagacacccccggcgctggtgcgcgtgcacatttggctctcagaagagcattccctttccctcgtggggatttaagtcactgt

SEQ ID NO: 239267 - DNA, 122 bp, Homo sapiens
tccaagaaggaaagaacactgacaaagtggtacataggtgtgtgcagagctgcatccagtcggatgactgagaagatgagcatgttaccacagatggtgaacaggtatgccaatagcagcag

SEQ ID NO: 239268 - DNA, 122 bp, Homo sapiens
acaaaaataaacaagggcactgggagaatcaggatgggggggcttccacgctggggggtgcgctcggcacccaggtgcgcggggtgcaggggacgccgcttgaggactcccagcagcgtggg

SEQ ID NO: 239269 - DNA, 122 bp, Homo sapiens
gggagcggggcggccggggggggggccggggggcggggaagggagggaggagaaaggagccggaagagggcagagttaccaaatgggctccttagtcatggcttggggctccacgaccctcc

SEQ ID NO: 239270 - DNA, 122 bp, Homo sapiens
tcaggctcatgacaccagccccgccgcggttccccctgaccggctttccgctggccctggcggctgcggaacggtcaactagaccccactagctgaagccggcatcacctgggaagcagcca

SEQ ID NO: 239271 - DNA, 122 bp, Homo sapiens
taggggagttactatttattataatttcttggaaaatcagtttcctcatctgtaattggacgtctatgcagggttgtgggaatacatattaaattagatatgtgtacatatctaatgcctga

SEQ ID NO: 239272 - DNA, 122 bp, Homo sapiens
tgttgtggtttagcgcctggcagcgccgcctccccccgctgcgctcccggctggcggctgcggttcccagtaactcccgcctgcccctccgcaccgcgtcccagagcctcgccccgggcagg

SEQ ID NO: 239273 - DNA, 122 bp, Homo sapiens
ctgaagcggccgactgggggcccggctctcggcggaacgagggctgcgcgccccgagcctcgagtccgcgctcctactccagctgggctcgcacggctgctgcaccttcgcgcctcctccct

SEQ ID NO: 239274 - DNA, 122 bp, Homo sapiens
cgcgctgctgtggccaatgcccgcttgtcttgctggttcgaaccccagcggctgttcaatcgcgcgcctccttctagccagaccccgcccccccggcaccgccttcctaacggctgtttgtt

SEQ ID NO: 239275 - DNA, 122 bp, Homo sapiens
ccgggcgatcgacgttccgcgtgcgtgcgggcgcctgacttcacttccggctaacgcgctcggcttgccccctggccccggatggtgactggtggtggtgctgcacctcccgggactgtcac

SEQ ID NO: 239276 - DNA, 122 bp, Homo sapiens
gagtcgggggtgccactagctgccgtccccagcactgttcgggagctaggggggctgtaacgggaggaagagacagggtgcacccagccctgccaatgagtcttgatttgtctctcggccat

SEQ ID NO: 239277 - DNA, 122 bp, Homo sapiens
tgctgggaaggactttggcaatcaaccaacctaactgcttgaaagccggggagctactcacgtccaggcaccaagtaacttgcacaaatctttaaagttaatttcgtgttatttctggaact

SEQ ID NO: 239278 - DNA, 122 bp, Homo sapiens
ccttgttcctacattcttctgatttattttgttctttatcttttttttctcccccagactcgctctgttgcccaggctggatcatagctcactgaagcctcaagtgatcctcttgtgtcagc

SEQ ID NO: 239279 - DNA, 122 bp, Homo sapiens
gcgggagggtgcacttgtctgcaggggaccacctgcagaagatccccaactgctaggcagcgtctgccagtgaaagagctatggtggtggctgctggcaaatgcctcatctgggaagctgag

SEQ ID NO: 239280 - DNA, 122 bp, Homo sapiens
tgcctctgacccattacagggcagattaatgggcaccagaaacatatgtcaaatagcaatcgctgctaatggacaggaaatccccacattgtcagggcagttgaatttagcaaccactcagt

SEQ ID NO: 239281 - DNA, 122 bp, Homo sapiens
accctactcacctctctgcttctgttccagggctcaggaggaaagtacagggctgctgagcggcctccggatctggcacacacagctgctcccaggcgggctccagggcctcatcctcaacc

SEQ ID NO: 239282 - DNA, 122 bp, Homo sapiens
tagaaaccgccccgtcactgacggggaggcaaaggactctcggcggccaggccctgaagccgcattggtgggtctccatttagtttgtcctttaaagtccggagaatgattattccataatt

SEQ ID NO: 239283 - DNA, 122 bp, Homo sapiens
cacagtccggaatcccacgctccctagcccgcggtgagcgggggaaacggcactcgctcccggaagtggatgttgccaagagcaacagtgaagcagagttaaagagccgccagctcaagctc

SEQ ID NO: 239284 - DNA, 122 bp, Homo sapiens
ctctcagtccctgggcgagatgcagcagctgcagaagaccctggcctccccggctgacaccgctggcttcctgcacagctcccgggactctggtggcagcaaggactcttcctgtgacacag

SEQ ID NO: 239285 - DNA, 122 bp, Homo sapiens
gacgctgccctggcttcaggggctgtgaatgctcggagagggtcaactggacctcccctccgctctgctcttcgtggaacacgaccgtggtgcccggcccttgggagccttggggccagctg

SEQ ID NO: 239286 - DNA, 122 bp, Homo sapiens
gggcatcacactttatgtaagttaaacttcagtaaagtgctctcagcacacatccgcagccgcacccacacaaaatcccaggaggctcagtaccagctgtggtccgggccttgcccacctcg

SEQ ID NO: 239287 - DNA, 122 bp, Homo sapiens
agaactttaataaataccataataataaaacttgagaactgaagagcacacatttcttcacgaatttattatataaaacgccctcagagtatttaatttctcctcactttaattacacatta

SEQ ID NO: 239288 - DNA, 122 bp, Homo sapiens
ggcctacccatggtaggtgcaggcctgtgcgcacaagggtacttaactccgacacatacccggaggagggaagagggccttggctgggggttcttgagcgggactgctggctgtccctcgtc

SEQ ID NO: 239289 - DNA, 122 bp, Homo sapiens
cacggtcgactaccgggtcagggcaaagggagggagagaggggtaacctggaggagtcatcgcgagaattgaccaaacgcagctcctccaatcaggagttcgaggaggtcgtgacgtcaccg

SEQ ID NO: 239290 - DNA, 122 bp, Homo sapiens
gaacctcgcatggttccctccgccttccttcccactcccaccgcaggccccactacggaccggaagtcacagagtttccgccttcatgcaactaagcgccgccatattgtcgtacggaacac

SEQ ID NO: 239291 - DNA, 122 bp, Homo sapiens
tcccgctggcattcctggagctcctggactgatgggagcccggggtcctccaggaccagccggtgctaatggtgctcctggactgcgaggtggtgcagtaagttgccttgttttttctctgt

SEQ ID NO: 239292 - DNA, 122 bp, Homo sapiens
ttctgctccggttccctctgcatcgcgggggcagctgtcacctgtaaggcgagcgcggcgcgggggatggaagcaggcgcccattggacagaatacaaaggcagaaacctaccccgaaggcc

SEQ ID NO: 239293 - DNA, 122 bp, Homo sapiens
agcggagacccaggctgcggtcccagttttggcctgggctctacctcaaagcttaaggaccggcgaagaggacaaaaagcaacgggcggacgcacctggcgaggaccttcggcagccggatc

SEQ ID NO: 239294 - DNA, 122 bp, Homo sapiens
gacggtcgcagacaagcagattccggcaccgcagaaagggaggcgccagacagcgctgcccgcctggacctgccgttccctcagccagcgcaagttgctctcatgagcctgggccagctccc

SEQ ID NO: 239295 - DNA, 122 bp, Homo sapiens
cgctgacgattgccacacggtgtaccaggggaacggggtacagcaggttgctcaggtacacgaaggccctggggagaagcagaggcggcggtcatgggccacccctccacgcatgttctgaa

SEQ ID NO: 239296 - DNA, 122 bp, Homo sapiens
aatgctgagtgtacccaatgtgctaagcacacacggcacagccggccgaatgcatgggtacgagggaggatttctttcctcaacaatacactctgccttacagccgacctacagtcaacctc

SEQ ID NO: 239297 - DNA, 122 bp, Homo sapiens
gatgatgtgggttacttacggcttcgccaggctgcagggccggagctgtgggggagaaagcggagagtcaccctggagcccaggagctgcctcaacctcagcccagtgcagcgtccgggaca

SEQ ID NO: 239298 - DNA, 122 bp, Homo sapiens
acttctaggggcttctctcctggggcctgttccctggttttgggagcgctcgggcgaccgcgagccagagcagcgtctcgctcatctcggacccaggcctggggctccactgacgccgacgg

SEQ ID NO: 239299 - DNA, 122 bp, Homo sapiens
tgacttgtcctaggttacctaatcagtgagggacagaactagaactgagatccagaccaccgtccccactccagtggatgcatcctggaaccaggaatggggaaggtggagccactagcaaa

SEQ ID NO: 239300 - DNA, 122 bp, Homo sapiens
tctagactactgttgtctaccacctgaaccactgcagcattttcctaattggtttagctacggctactgggctccctttcatttatcctccgcagggttgccagagcagtcatctcataatg

SEQ ID NO: 239301 - DNA, 122 bp, Homo sapiens
ggccatcaggttggtgctcattgtggtcattgcatctttacttttctgggtcccattcaacgtggttcttttcctcacttccttgcacagtatgcacatcttggatggatgtagcataagcc

SEQ ID NO: 239302 - DNA, 122 bp, Homo sapiens
cagaaagggagaattgtgcttgtgtgttttaccaagcaggacagatggggccgtcacccccgtgacccgagccctgcaaaactgtgttctcacacgaaaacccccaggctctgcgggcagcg

SEQ ID NO: 239303 - DNA, 122 bp, Homo sapiens
ggatgacccgggcgggggggctgtgcgacaacggcctggcgggacagggcgcctggagcccgtttccaccgccgcacagtcctcaggattcccgaagaggtaaaatagatataaaaaaaacc

SEQ ID NO: 239304 - DNA, 122 bp, Homo sapiens
tgctgcgggctctgtctgggtggaggctggctggcccagccacagtcccaggggctgtgccgctttcccagctgactgatgcagaggccgcagaggccttgggctgccgtctggggaagaga

SEQ ID NO: 239305 - DNA, 122 bp, Homo sapiens
ggctacttaacctgtgtcaggtgccctgggctctgccaaccgccagctcccgactcggggcgtcgtccctcacccattcccgcagcccctacctgaagcggtagctgccttctctctgcaca

SEQ ID NO: 239306 - DNA, 122 bp, Homo sapiens
ggggagggctccaggtgggcccggctcgaggcctgacacggcagtctgaaaaggtgcaagcgagcggacacggcctgtgctccccgcccagcccctcagcacagccctacccagagggttca

SEQ ID NO: 239307 - DNA, 122 bp, Homo sapiens
gcttgggctgggccccgcctctgttcaccctgtgcccggctctccgttccaggtctgcagcggcggcgcctgattcccgccccactgcccgacaccactgccctgggccgtaagcccagcct

SEQ ID NO: 239308 - DNA, 122 bp, Homo sapiens
cagctcctggcctcaccggttccccttattttcataggaagaggcatttgtctgccattccgggctccccgccagctctctccctgctcacacgccatccccatctatcagtgtccccctct

SEQ ID NO: 239309 - DNA, 122 bp, Homo sapiens
ttttgtttttgtttttgagacgaagtatcactctgtggctcaggctgcagtacagtgaggcgatctcagttcgctgcaactgccacctcccaaggtcaagtgattctcctgcctcagcctcc

SEQ ID NO: 239310 - DNA, 122 bp, Homo sapiens
ggttctttacagtcttactggaaaaattaattcaaattgggctttgtctaagcaccccctcgtgggctgaaacctggaggaagggccataaacaaagcacccggcaaatgatagagcaggac

SEQ ID NO: 239311 - DNA, 122 bp, Homo sapiens
ttatcaaagaaaaattggcatggagttcataaaaatgatgacagatcttcatatgctctccggccacacttcatgttaatatcatcccggattcctgcgtatgaggtagagtatgttatgag

SEQ ID NO: 239312 - DNA, 122 bp, Homo sapiens
cgccgagaggggcgcgcagtgcctttggggattggtagttttttccagggcgtctccgctcgggaaaggaagtgaagaaagccaccaggactacaaggcccggcgtcctccaagatgggagg

SEQ ID NO: 239313 - DNA, 122 bp, Homo sapiens
tttaaaaaactcttcagaacattcataagtcctaagatacacctacttcttttccttactcgttctcacaatggcctgtcctcccctgataaaattcaaggacctgggatttgacactaggg

SEQ ID NO: 239314 - DNA, 122 bp, Homo sapiens
gccgggtggcgctgggcccgccgaggtcggggctttcccatgggagggaggtggctgcggcggaattttcagatgcgtccttctctgtattcgttccctgggaaggattcccccaaatcttg

SEQ ID NO: 239315 - DNA, 122 bp, Homo sapiens
gagacaactcagacctcttagtagttaaagcagcctggatcctagctggatttacatttgcgctcagacaaactcatcagcagttaaaccatcctggatctgttgtcagacactgtgcttta

SEQ ID NO: 239316 - DNA, 122 bp, Homo sapiens
ttctcctccaggtcataatgctgagctccgtaccagacttacacggttacatcgataagtcgcagctgaccgaggacctgggtgggaccctggactactgccactcccggtggctgtgccag

SEQ ID NO: 239317 - DNA, 122 bp, Homo sapiens
agggtggcgagggtggtgggagcggcgggcggcggggagtgacaggcgcttggtccggcgcggctttgcctggttgtaacaagcgtcgggacatgcggagccacagaagccgggctggccac

SEQ ID NO: 239318 - DNA, 122 bp, Homo sapiens
ggacacaggactaacaggaaaggacacagactgctgtcaggacacatactaccacacacccgaggccaggaccctgctgacgtggcagacctccaccctggccccttactgccccccgcccc

SEQ ID NO: 239319 - DNA, 122 bp, Homo sapiens
aaaatgcctcacagctgagaaaccttcctttccgtactttttaaacggaagaataacatccggagtgcacacacaccgctgcacgactcgtcacaatcacgcacacctgtgtgacatgatgc

SEQ ID NO: 239320 - DNA, 122 bp, Homo sapiens
tttcgaggcaggccgatggccactgagctgtctaaactttctggtctgtttttgcgggtgcgcatctttaactcaatgagggagaaagtcttcttgtagtacccaattttatgttattgaca

SEQ ID NO: 239321 - DNA, 122 bp, Homo sapiens
agcattataaaaagagagctggacagagacccaggagccctaggttctggtctgattgtgcggctgtggcaaagtcacttcccattttttaacctcaatttcctcgtctgaaaaataatggg

SEQ ID NO: 239322 - DNA, 122 bp, Homo sapiens
tctccatgttaattacagccaatcctcttagctcaaggatggctcttcctctgtgtcagacgagtggctctgccagcacacaagccccgccccttcaggaagccccgcccctccacggccca

SEQ ID NO: 239323 - DNA, 122 bp, Homo sapiens
gctccatcctggggcgcggggactcctcttcgtcatttttgcacccactggaacgctgggcgtgcagatgcctccccagcgctacagcctaccaggactcggcaggcgggggcggggctgcc

SEQ ID NO: 239324 - DNA, 122 bp, Homo sapiens
tttacacatggacggggaaagcctgttttcattcgctgattccccttcctccctggcctgcgtgcctccctggtgagtaatggggaggctgcttttctggaacacaagggaaaacttccagc

SEQ ID NO: 239325 - DNA, 122 bp, Homo sapiens
tgaggcctaaacacttgtgtgcaggtttgtgcatgcatgtttaagttttctcttgggggacgtttcaggagcggggttgctggatgacagggtaaagatgtgcttaacttcataagaaactc

SEQ ID NO: 239326 - DNA, 122 bp, Homo sapiens
tttgcaaggtgactccgccggtctctttcaagcgggagcgatacacaggtcagcccggatcgtccatggtcactgccgtaagtgacactaacagaatatatcagaaaatcactgcctttaaa

SEQ ID NO: 239327 - DNA, 122 bp, Homo sapiens
gaagaggacagcagtggagagcgcctctaacgggtgcggccgagcggaggacttttctcccgtagcctggcagccaggcgcctggagcactgcctgactaaaacccagatgccgagtggccg

SEQ ID NO: 239328 - DNA, 122 bp, Homo sapiens
ttctttgaaaactggtgttcatgtttgccgttcaatgaagtcccttgtcaaagacaaggacggtcaattcacgtgtcactttcactaggcagaagtttctccaataccttctggctacttga

SEQ ID NO: 239329 - DNA, 122 bp, Homo sapiens
ggaggctcttatacctccgtgcaggcggaaagtttgggggcagcagtgtcattggcctgacgtgaggaggagggacttttcgaagttttataggaaagtttccgctttccagtccccctccc

SEQ ID NO: 239330 - DNA, 122 bp, Homo sapiens
taaaaagattaggcccccacttgcttttttttctttttttttggtgaagtctcactgtgtcgcccaggctggagggcagtggtgcaatctcagctcactgcaacctctgcctcccaggttca

SEQ ID NO: 239331 - DNA, 122 bp, Homo sapiens
aatcaagaaaaaataaccacatgatttacactgcccttagtgaaccaaacaacacagtcacggttggatgccttcttaatgcaggctgggcacatacccaacttgctgggtcactgagctaa

SEQ ID NO: 239332 - DNA, 122 bp, Homo sapiens
tcaaacgattctcctgcgtcagcctccccagtagctgggacaggcgccggccaccacgtccggctaatttttgtagctcaccactgagaacaaggtgacaaacatggagtttattgtacctg

SEQ ID NO: 239333 - DNA, 122 bp, Homo sapiens
tgggaaacaaaaggagaattttacagagagagagggatagctaaaactacgtgagcctggcgagggtgcagagcagaaagtagagactgtccgaagactgctatctgggacgagacaagttg

SEQ ID NO: 239334 - DNA, 122 bp, Homo sapiens
cctagtttcttcatccatgggtgggcacagcagaagctgtctcacctgctccatggtgaacgggatttgcaaggatttgactctggccatccagggaagatggagtctttgaccaggcctgg

SEQ ID NO: 239335 - DNA, 122 bp, Homo sapiens
gccgtggcgccagtgcttttctcctcaacaccagggaccccagcatcttgacagctgcttcgataaccccgtggtgccggcccctgtgctgaccacgtccaacatggctgccgcggcgcgtt

SEQ ID NO: 239336 - DNA, 122 bp, Homo sapiens
agccttacttccacaaccgtaggaaagctaagaccagcctggaatcattccctcttcacccggtctaaaccagcagatgccaacctgcctgtgccctgggactcccatctctccagtgcctg

SEQ ID NO: 239337 - DNA, 122 bp, Homo sapiens
agcgacgcgcccagggctccgcacgtggtgctccgcccgctcggaggggggacacaccagcgcccgccggggcgcacactcccacactgacccgggggctcacagccacagacagccgcaca

SEQ ID NO: 239338 - DNA, 122 bp, Homo sapiens
ctaagccaaagccagattagaaagggttttgtgttgctgcccacgcctcctctcattccccggaaaggaaaacaaaggctcagtctatcttggcccctgtcaggtgtcctgcccactccctc

SEQ ID NO: 239339 - DNA, 122 bp, Homo sapiens
gctcgctggggaacggaaagggagattaagcaagacaagactgttaacagttctagagctcgtgggctccgcagggcagcagtcaccctaccaccaggtcccagagcccagggctgtgtgtt

SEQ ID NO: 239340 - DNA, 122 bp, Homo sapiens
gcaatttgaaaacgcatctctaaagcacctaggagcaatctgaagaaagctgaggggaggcggcagatgttctgatctactagggaaaacgtggacgttttctgttgttactttgtgaactg

SEQ ID NO: 239341 - DNA, 122 bp, Homo sapiens
gggccgtgcccagctggctatggctctctttgagcaggagcaggccaatagcacttagcccgcctgggggccctaacctcattacctttcctttgtctgcctcagccccaggaagggcaagg

SEQ ID NO: 239342 - DNA, 122 bp, Homo sapiens
caactggaatggttgcatcgaagcaagaaaattttctccaaaaattaatacccagatctacgccaaaaacaaagtgaagaatacagcttctgctctcaccaagtcatctctaatagagagaa

SEQ ID NO: 239343 - DNA, 122 bp, Homo sapiens
tcccgctactctccacaccccaccccgctgctgcaataacctcaagtcatcccagtccggcgaactccctggtggctgcctagctgcccgcccgggcctctcccgacgagggtggccctgag

SEQ ID NO: 239344 - DNA, 122 bp, Homo sapiens
cgccaaccaacccggtcctttcaggttcgcaaagagggcggtgagcggcgggccctggagcgcgtctccactggcccgggggcttcaccagaggggtttctggaaaacgaaaggaattatcc

SEQ ID NO: 239345 - DNA, 122 bp, Homo sapiens
ggagccgggggaagggtggggaggggatgggctggagctccgggcagtgtgcgaggcgcacgcacaggagcctgcactctgcgtcccgcaccccagcagccgcgccatgagccgtgagtgcg

SEQ ID NO: 239346 - DNA, 122 bp, Homo sapiens
cgagctcctcccgctgaagtgatcggcttgcactgactgcgcttgggcttcgcgctttcccgcagcggccgggccttggcgcctggacgccccgccgacccccgcggccgcgcgccctgctc

SEQ ID NO: 239347 - DNA, 122 bp, Homo sapiens
gggagcgcaattagagaacattcgctttacttgtgtttccttgaaaatatgaataaagagcgtagcagcagcacagccaacaaaaaagaaataaatccaaaggctagcctggcaaatggtta

SEQ ID NO: 239348 - DNA, 122 bp, Homo sapiens
ccgggactggcagcgggcgggctgctgaggggccaacccctggtggcggcggtgttgagccggtggctagcgagaagtcggccggcagtggggccgcctccttttcttcctcctgcttggac

SEQ ID NO: 239349 - DNA, 122 bp, Homo sapiens
gtgcctctagcaggagctgcagttctgtgaatgatccctcttctctgaaaggcaggcagccggagctctggagccctccgggcgaacagaacagattgctgactgtggggtaggtccccttc

SEQ ID NO: 239350 - DNA, 122 bp, Homo sapiens
ttaataaatatgtgtcatgccactttggacatgtgtgattctttggccagcctcagtatgcgagcacgtaggctagcgctcagcacatgagtctatggaacccaggggaagcaattgcagtt

SEQ ID NO: 239351 - DNA, 122 bp, Homo sapiens
gccagcctcgcaggccacgtgaggcgagagctggttccaggaaaggggggccagagaccccgcagagtcgatgcgtcaggctgtggagtggggaatcatccttaaaccccacaatgtgccta

SEQ ID NO: 239352 - DNA, 122 bp, Homo sapiens
cgcagggcgcggaagcgagagggggccaccgagaaactaaacctgttactgctgcgaatacgccggcagggtccgggtggcggggcgggcggggcggacgcagcgtccgctgggcggtggga

SEQ ID NO: 239353 - DNA, 122 bp, Homo sapiens
gaaagtatttattcatacaaataaagacttgacccgtgaggtaggaacacaaatgggccacggaatcactcattccacagaatataccgagtgcccttgaagtgctgggcactgctccagga

SEQ ID NO: 239354 - DNA, 122 bp, Homo sapiens
tcggccactggaagaagagcggcgcctccaggcagtcggtgtggcagtggcgccagcagacggggtctccggggtttccacctctggcaggggtgcgttgtccccctccaacgccggggatg

SEQ ID NO: 239355 - DNA, 122 bp, Homo sapiens
tctggaaatttcagcagcactttcttcccaaactgctttccaatcaaatcctctttctcccgtaagaattatcacagacataaattgcctaattaataaacttaattcttataggtttacgt

SEQ ID NO: 239356 - DNA, 122 bp, Homo sapiens
ggccatcccggtgcaggtggatggcgagccctgcaagcttgcagcctcacgcatccgcatcgccctgcgcaaccaggccaccatggtgcagaaggccaagcggcggagcgccgcccccctgc

SEQ ID NO: 239357 - DNA, 122 bp, Homo sapiens
cattatgatactaacaaaaaccagaagtttccaggagtcagcaagctactcagtatctgacgtggtttctaaggtggagttgcatggggagcactctcccgtggctgctgagtgaaggcaac

SEQ ID NO: 239358 - DNA, 122 bp, Homo sapiens
tgtttgagatcctttttccctggtcgtctttccaaactgcgtgagtgcatggcctcgaggcggccctggagggattttcttgttaaacttcatacagaactaattaggaaagaggaaatctt

SEQ ID NO: 239359 - DNA, 122 bp, Homo sapiens
tcccgccctgccagggagtggcaccgagaacttagtgcagccaaggtaaaggttctctcccgcggcgttgccctgattaggaaaccagagagaccccggggcagctcgctgggcagaggccg

SEQ ID NO: 239360 - DNA, 122 bp, Homo sapiens
caaacttgaattttcacatgagtatgccactctatcagctactctgattaacctgacagtcgggttgtttagtcagtaccaaatttgttcatttggtctcatatagcaattaatgcaggcta

SEQ ID NO: 239361 - DNA, 122 bp, Homo sapiens
tcaagctctgtgctggaattctgcagacttgcagctcccatgtgggccatgctgattctacggggtctcctgtcctaggggccgagccctgcgcgttcaggagaaagcggggtcccaggagc

SEQ ID NO: 239362 - DNA, 122 bp, Homo sapiens
tttaaaataaatcagggaaaaaagaaccaaacactctgggtgttggccttttgcatacaacgctggccttgaaactgaagagttccattctcattcaaggagccattagataactattcagt

SEQ ID NO: 239363 - DNA, 122 bp, Homo sapiens
tccggaccgggcgtcccagcgccccggttagctatagggagacgtcagagcgctctggtccgcgatagaagagccccccagcccccccgcccgggcttccatataaagtaggggccctagtg

SEQ ID NO: 239364 - DNA, 122 bp, Homo sapiens
ttcccagacaaagccctcctctcccctccagaccgtcctgtgagggcagctgggggcagccgcccggatccatgggagggggagtatcttcctgggtcttgactaacatcggggccacttca

SEQ ID NO: 239365 - DNA, 122 bp, Homo sapiens
tcactccttccactttctagatccaaagagatgcagctacgatcatgcaaccgtacttcacgtccaacggcctggtcaccaaggcgctagagcacgccttccagctggagcacatcatggac

SEQ ID NO: 239366 - DNA, 122 bp, Homo sapiens
tgattataagtatgcaaaacagtaacctctgtacaaaggatggcaagacagagttacaaacgtcattctctttgagtggcgaaatgttgggcattgttgttgtaaagcttctctccttgctt

SEQ ID NO: 239367 - DNA, 122 bp, Homo sapiens
ctccccgcccctcgccccctccctgcgagcgccctcctctcctcctccccccgccccccgcgctcccgcccagcccccggaatcagtgccgctgttgccgtgcaggctgcggattcctccag

SEQ ID NO: 239368 - DNA, 122 bp, Homo sapiens
gtccttaaaatgccagtacggcataaaggcagacaatgggactttagtcacccaaagtagcgtctcctttaagaccatgagaccttgatgggcagaggcctactcactccttgccaccccta

SEQ ID NO: 239369 - DNA, 122 bp, Homo sapiens
ccgtctctccctgcgcaaaattccaagatgagcaaatactgggctcacggtggagcgccgcgggggcccccctgagccggggcgggtcgggggcgggaccagggtccggccggggcgtgccc

SEQ ID NO: 239370 - DNA, 122 bp, Homo sapiens
ggccactgagggagggggtgtttagtttctggaagtacctgctccccggggcccgcacagcgcacacagcctttcggggcggccccagacccggtgaggtccgcgccctgtgccgccgggag

SEQ ID NO: 239371 - DNA, 122 bp, Homo sapiens
gctcacaatcagcccggtccctccggcttccaccccgccccctgcgctcacctgcccgcgcgctcgccttccggggacccggggcccatggacacatacacccagccctgctgtcccgcgcg

SEQ ID NO: 239372 - DNA, 122 bp, Homo sapiens
gtccctgcgatgagcccaggggaaagtctccactgggcactaacatgtctttagcgcctccgtgaccctgaggcttagcaggtgtctgtatccagccagaattcaaggacttggttttgtgt

SEQ ID NO: 239373 - DNA, 122 bp, Homo sapiens
cgcggtcgcagcaacgctggtgtttctgctgcatccgggccgcgtaagccacctaacagtcgcctgggcaaccacgggctcggggtcgctcgccccgcccacagttgccccggcaaccgcgc

SEQ ID NO: 239374 - DNA, 122 bp, Homo sapiens
gcaactgtgacgtgtgggcggcctgctgtgcgtgtgctccagcaagtccagtcgcgggtgcgaggtccattctccagcgtggaactggccggcgggtgcacgcaccagcgtggagctttcac

SEQ ID NO: 239375 - DNA, 122 bp, Homo sapiens
ggcagaggcggagaaactacgcggtgtggctgcaggtggagccttggaccaactggccagcgccgcttccttccaccaggattcctggccccaccgcgcgctaggcggaggctcagcggggg

SEQ ID NO: 239376 - DNA, 122 bp, Homo sapiens
ctggggacacaggaggtggtgactgtgtggcctcgggccagacccagctctgacactccccgaacgcccgcgtcggaacctgcgaaggacgctgtctggcagcgcgcagctgaccaggaaga

SEQ ID NO: 239377 - DNA, 122 bp, Homo sapiens
ccatttgacaaatactgccctcttaacattcttagaatttttttttggagcaagtgttagcgtccctgttttcaaggaggtggtcaagtatgcacagacatcagtagtgacgtttgctggag

SEQ ID NO: 239378 - DNA, 122 bp, Homo sapiens
gccatcccttgggcggctctagggctgcgggggctcgggggtggggccgggtctcgggggcggggcctagctcggtctgcgggggctcgggggtggggccgggtctcgggggtggagccggg

SEQ ID NO: 239379 - DNA, 122 bp, Homo sapiens
ccagctcctgtcctagataaggcggcgggtgacccacttgggccggccctggaggtccgccgcgggcgcctctcccggcggggtgggttggctcctggaagtaggctagggcccgtctataa

SEQ ID NO: 239380 - DNA, 122 bp, Homo sapiens
cttccccgccctccgggctcaatatgcaaatccgagcaccaggaagtagctgggacctctcggccgagcccagagacagccagttcctctcccgccgcgccgggccgcgctgccgctcgctc

SEQ ID NO: 239381 - DNA, 122 bp, Homo sapiens
tcaccaagtaggcaaacccactgtgaaagtacaaaataactttctgttgcggactaacgtcgccaggctcctgtttccgtgtttaacggccctttacaacagcaaaaaagaggaatcagttg

SEQ ID NO: 239382 - DNA, 122 bp, Homo sapiens
gaagttaaacctgggcatatggacaaacatgaattgggctacaaatatcttgacatgactcgagaaagagactaaagaaagaaaagtagtaaacactcaagaacaaagagggtaggagcgga

SEQ ID NO: 239383 - DNA, 122 bp, Homo sapiens
tccgacagagcctctcttgaaatcaggtgttgatttagagactgacatatgagtcctgggcgtctgaagagggaagggatgctatgcggggagagagagagagagatactttatttgaaaag

SEQ ID NO: 239384 - DNA, 122 bp, Homo sapiens
aagtatcttcggcttttttcctgccgcctcggcctccttcccggcgcgctgtggtcccggcgcccgcggtcgcatggtgccctcgcccccagcgccgccgctctcccacccgccccgccgcc

SEQ ID NO: 239385 - DNA, 122 bp, Homo sapiens
aaagatgcagagctgcctcggtggacatgctctgtggctgatattataattttcataatgcgcttttatgtcgcgccagactcctccggtgaggagcccgcagagctgctgaaaggggcttt

SEQ ID NO: 239386 - DNA, 122 bp, Homo sapiens
catagagtcacagatctgatggccaagatcatgggttaagtttaaggtttcttaactttgcgatgccatgggacagcaagatgatgtccaggaggcagttggcctcatctgcagttcagaaa

SEQ ID NO: 239387 - DNA, 122 bp, Homo sapiens
gccggcacgcccatgggggccggggatgccggggcgtctgcggagagtgcaggtggggtgcgtgcgtgcagcggggcggcgcggcgctgcagcctcgggatggagcgtgggcgcgcgggtct

SEQ ID NO: 239388 - DNA, 122 bp, Homo sapiens
caagcctcggcctcccaaagtgctggaattacaggcgtgagccaccgcgcccgtctactgcgcgttttctaaaccttggctcctacgcatttatcagaagagagagcgcaatctgtctatga

SEQ ID NO: 239389 - DNA, 122 bp, Homo sapiens
tccaaactcagataaagttctgtccctcttttcccccaaagaatctataatttgaaaggacgcacttctcctttgttctagctctaaatagaaactacactccccgccgaaatcagtttgtt

SEQ ID NO: 239390 - DNA, 122 bp, Homo sapiens
tattatgctgcaccgtaggctgaggagacctacagccctgggaattctaagactgtgatgcgataaaacacaaatataaacatgggaaggccaagataaggctgggagttttaaatttattt

SEQ ID NO: 239391 - DNA, 122 bp, Homo sapiens
gctgtctcgctccagtcagggctggggctcaccctgcgagtccgggagactaaagcgccgcgtaaacacaggaagcaggcgagggacccgagttagaccttgagtagggagggagagggggg

SEQ ID NO: 239392 - DNA, 122 bp, Homo sapiens
ggggccagcacagggcccggtgtccctcgggccgtgccggtaactgggattggcacccgccggccatggaagagcctgggcccccaggtgggctcagccaagaccaaggtaagggggcaggt

SEQ ID NO: 239393 - DNA, 122 bp, Homo sapiens
ctcagcagtttcatgatcaaaagcacatattgcaagagggaatcaaatataggtcaaagacgctgactgcagcacacgataagaataggacaatgaggaggaggtggtgtaatcacaaccag

SEQ ID NO: 239394 - DNA, 122 bp, Homo sapiens
atgggggctgtcatctgaccaaagatgaaaataccacctaacagacgaggcaaggcccaccgtggggctgggtggctggtggagcaacagaaaggaacatgtgggtgagaaatgaggggagg

SEQ ID NO: 239395 - DNA, 122 bp, Homo sapiens
gtaagaatgtgtcctgggagaggggataaagacccaagctagtcattgcagctgccgtctcggctctctttgagcagagttgagctgtctgcccaccaaagtttggcctagagggtaggtcc

SEQ ID NO: 239396 - DNA, 122 bp, Homo sapiens
ggctcctcctcagactccacccactggaagcagccctgctgctgggaagtgtctcctgtccgaccctcacctgcagctgtcccagcaattgcatggtccgttcattaggaattgtctggttg

SEQ ID NO: 239397 - DNA, 122 bp, Homo sapiens
gggaactctgcgtgggagggagtttgtgactgcggcccaaaagccacctccatacagtgccgtgggatgccaggaagttgaaatcaccctcccccatcgcctgcacttttgagcgcccttcc

SEQ ID NO: 239398 - DNA, 122 bp, Homo sapiens
caagaggagctgtgcgggatcaaggctgctggaaaaaggattggggtggcgggggttgcgcgaagtacaatggccattatccgggatgacttaaccgagcgagaatcctgagcccaggccgg

SEQ ID NO: 239399 - DNA, 122 bp, Homo sapiens
gtggtttcctgtgtgtgtacaatttttgtttcctaaccagtctataaataagctccttaacggcaagtcccaaagtgtcccccaaagtccccatcacaacgcttgatacatgaggcctattg

SEQ ID NO: 239400 - DNA, 122 bp, Homo sapiens
tgcggcctccggcgacccggcagcgacgcgggcggggacgcggtgcatcgctactgcgcccggcggacagcgacttgctgctcaaaaagaataagaaccagggtttttgtttgttttttttt

SEQ ID NO: 239401 - DNA, 122 bp, Homo sapiens
acatcagctcttccggggctccagcctgcagcctccctgcagatttcagacttcccagcccgcacagtcacacaactgtacacacagctcatgggaatgacatgtgggaagacaactaaggc

SEQ ID NO: 239402 - DNA, 122 bp, Homo sapiens
ggctgggaggcggtcacgtggcgcaggatgcacccaacaccaccgtcgcaggcagagtcccgccccgccaggcgacgtcacgtgacgcacattcgctcaagtccacatccgggcatccacct

SEQ ID NO: 239403 - DNA, 122 bp, Homo sapiens
aatcaacaaggaagctgttgcccggcaacatggttggtttcaaagagacagagcaaccttcggtaataaccatgagcaatctatgaaaataactcatgaatccctgagttagaaaatatata

SEQ ID NO: 239404 - DNA, 122 bp, Homo sapiens
agttttgcagccagaacttgggagctctgtacttttaagagctaaatctattttttcttccgtagttggcaacaccattatgacatcacaacctatttccaatgagaccatcataatgctcc

SEQ ID NO: 239405 - DNA, 122 bp, Homo sapiens
cagtgtgtccattcgggttttcctgcccttacacagccccgctggaaccttacctgcacacgggcgcagacacacacttcctggtttgctttctggaatttgcgcctggtaatctccctgaa

SEQ ID NO: 239406 - DNA, 122 bp, Homo sapiens
cctgtaaagtggaacaagagcattggcagccactgtgctttgctaacaattcacagtaaacgcatgtcaacttaatcaaatctctctaaggacggagtcccttctccccacactggatttat

SEQ ID NO: 239407 - DNA, 122 bp, Homo sapiens
agaaaaggccccgctgtgatttggggaagggccgggggcccataagtcacgtgctcggggcggttgtgcaggagcggactgtcctctgggaacatagaagcgcccccgactagagtaggggc

SEQ ID NO: 239408 - DNA, 122 bp, Homo sapiens
gggcggggccgggctcgggccgtgacgccgagagtgcggggcgcgcggctgggagcctcgcgcccccgcccgggcccgcccccatcccgcccgcatacagcccgcatcccgccggggaagcg

SEQ ID NO: 239409 - DNA, 122 bp, Homo sapiens
tttctcagaagagccgagaggcctaggctcaagcttggggcgatccggtacttggaggttcgaagctcctagtttcgggttgagaccgatgtggagggcgatgacgcgcgggttccttgaca

SEQ ID NO: 239410 - DNA, 122 bp, Homo sapiens
ccggtatgtgcgctaggaggcagcggagctgagaccgaggccaggcggctagagaaaccgcgaaccaaggacgggggggctgggtctttctggtcgccagggggcagaagtgtagggcaact

SEQ ID NO: 239411 - DNA, 122 bp, Homo sapiens
gtgggcaggggcagaccctgctgggcaggcctgtttgtgacactggagaccgggttctttcgtgtcttgtgctcagggagtgttctttgtccacgtggctgcatctgacattgatgggccct

SEQ ID NO: 239412 - DNA, 122 bp, Homo sapiens
ttttaggttattttcttggaaggttgggaaaagatgtttgttttaacaggtcatgtactacgttgttgttttcatttctgttataagtaaaactaaaagcacagaatggtgggaaaggggct

SEQ ID NO: 239413 - DNA, 122 bp, Homo sapiens
tacatgggctggctgggcaataaaaacgggaaaaaatgtaaaagacacagtctccgccttcgaagcttacacccccggggcaagacctacaggaaaatagataatcccattattctctgata

SEQ ID NO: 239414 - DNA, 122 bp, Homo sapiens
cccttcatcaaaagcccgccccgtcgcccaacccattggcccgaagagccatctgccctgcgtcctattggctttcgtcaagcccccgcccctgcaggtgactatatcaccgattggctggc

SEQ ID NO: 239415 - DNA, 122 bp, Homo sapiens
gggtgttcatttgttagctaatccatgaacacctggtgtgagctaaaagcactccagagtcggtaataaacaccacaagctaatgagcacacaccaggaggtctgctactgcccttataaaa

SEQ ID NO: 239416 - DNA, 122 bp, Homo sapiens
ctgtgcggcccgagcctccccgacgagcgccaccccctgctccacggcgcccagtcccatcgaccacccaagggctgaggaatgccagcgcatggcacaggactggcaggcagctccacctg

SEQ ID NO: 239417 - DNA, 122 bp, Homo sapiens
gagtgctggttctgtcctccttgcgggtgcggagatggttgtcttggttacgggtcctaacggtcccctgccttgaaatcccttgttgagggcctgcaaccttgtgcttccgaccggagacg

SEQ ID NO: 239418 - DNA, 122 bp, Homo sapiens
gttatatgatttacaatgaattcaacaatgtttattctgcatgaatagctgtatccccaacgtagtatccaataatcttacatagagtaaaccctaaataatatcttctttatacattctat

SEQ ID NO: 239419 - DNA, 122 bp, Homo sapiens
gcgccgcgaggtcctaagcagcccgggctgttgcgcggcgctggcgggcggggacaccaacggggagtggatactccgaggctcaacctggggcctctgcccgccctcccctgggtgcggag

SEQ ID NO: 239420 - DNA, 122 bp, Homo sapiens
tctaagatggccgcccccgcccggtagcggggcggaaacgagcccctctagcttgctagccgagcccacactctttggcgaaggccgccgaacttccggcagtaaattccgtggtttcccgc

SEQ ID NO: 239421 - DNA, 122 bp, Homo sapiens
cacaaaggtttttagtatacaaagtaaatgaaatgcctctaagcctgaaactaattccttcggtgagaaagctggcagtccatggggatgaggtgggaagacctccattgcagtctggtgca

SEQ ID NO: 239422 - DNA, 122 bp, Homo sapiens
gccctgagctctagtgcctgtcccctgctcgtcctgcctcccaccggccctgctgacctgcggcggctctgccctggtcccctgacctccaggagctgccccttgctcctcctgccccccac

SEQ ID NO: 239423 - DNA, 122 bp, Homo sapiens
ggagccgggggaagaggggacatgagcggccagctgagtccatccccaggcggctaggggcggacccagcagcccctcagctctcctcgtaaccacgggtgggcagtctccaccgtcacagc

SEQ ID NO: 239424 - DNA, 122 bp, Homo sapiens
catcagagccaagctggggcgtgcagtgcacctgcctgtcagccggctggggtgctgaggcgtcgcatcagaattgcaggatgcaacacatctgcctgcatgtcagccgctgggagagatgc

SEQ ID NO: 239425 - DNA, 122 bp, Homo sapiens
tgacctcatctcagcccaaaaacagacattgggaacatctgaccatccatcccgttcccccgctctttttggctacctgcagtgaccccagcagcaggggcgggagttgcctgccctcttcc

SEQ ID NO: 239426 - DNA, 122 bp, Homo sapiens
caccggggccccacagggcaggacacgcggtcctgggctcaccgacatggccaggtgcagcggggtgttgccgtgctctccgcgggcatccgcgttggccccgtgggtcagcagcactatgg

SEQ ID NO: 239427 - DNA, 122 bp, Homo sapiens
tccctcttccccaggcctaaggaaggcactccctcttgatcatcttggcccagagttagtcgtctttggcttatttggggtcttgctctagatgacttgcttcttgccattttcctgtcttt

SEQ ID NO: 239428 - DNA, 122 bp, Homo sapiens
cgttccgcgccatgcagagcccagtctctggcacctggctgctctgatctggtctcagcgcggagggagcagagggagtccatggaggatccctccgagcccgaccggttggcgtccgcgga

SEQ ID NO: 239429 - DNA, 122 bp, Homo sapiens
atcctgcccgggacctcgcagccctgcctcccagcccgtgcgactgccctgggccctgaccgcttgtcaggaccttgcctgcacttggaaatgcgatgctgatgagtgaagaggcagcgctt

SEQ ID NO: 239430 - DNA, 122 bp, Homo sapiens
cgcagtggcggggtcggggtctggtcgctgcctcgaggcgagcagctgccaacatctggacgggacgggagcagggggccggggcaaggctggagcggtgtgggtctctaatcgtccagagc

SEQ ID NO: 239431 - DNA, 122 bp, Homo sapiens
gaggagaggcatcaacaggaagaattcaattttacttaaataaaaattttttactagcaacggaatgagtgattcagtggtggtgtcttcctgctttgagagagctgttctaagactaggca

SEQ ID NO: 239432 - DNA, 122 bp, Homo sapiens
ctcaaggcatcctcccaacttggcttcccaaagtgctgggattacaggtgtgagccacttcgccctgtcaaatttgtgttgttttaagccactaaacatgaggtaatttggtagagcagctg

SEQ ID NO: 239433 - DNA, 122 bp, Homo sapiens
ctcccaaagctctgagattatagacctgagccaccatgcctgacctgtttttaactttcacgaaatctaatttataaattatttcttttgttgcttgtgattttgctgttgtagttaagaaa

SEQ ID NO: 239434 - DNA, 122 bp, Homo sapiens
gtggggacacagcacgggctgacagatggtgacgcttggctgtggtgctgacagaccagccggggacctcgtgtgggaggaccaattaccaccgcatcccctcagggaagagcctctcagct

SEQ ID NO: 239435 - DNA, 122 bp, Homo sapiens
actgatcacatagacccgcagcactcagccaggcccctcaccccggctctgctctcaagccgggcttggctccccgcctgcccaaatgcgttcaacatcccccgaaaggccatttcccttcc

SEQ ID NO: 239436 - DNA, 122 bp, Homo sapiens
tgccaaaaagcatgagtttctgaccagcgttctggacgcgctgtccacggacatggtccacgccgcctccgacccctcctcctcgtcaggcaggtacgctgtgttcgccgtgggacaacaag

SEQ ID NO: 239437 - DNA, 122 bp, Homo sapiens
ccccggcccctgcacccaggttggcgtattggttcggatttttcttcactgccttggaggcgctgacggtgggccggtgtgggcctgtgtttcagcgagattcgcctgctggagatcctgga

SEQ ID NO: 239438 - DNA, 122 bp, Homo sapiens
gtgatcctcccaccccagcctcccaaagtagccaggattataggtacatgataccacactcggctattttttttttaatttttatttttgtagagacaggggtctcgccctgttgcccaggc

SEQ ID NO: 239439 - DNA, 122 bp, Homo sapiens
gtgatttctgctggccagtgtgtacaggcccaggaccactgcagctccccatggaccccacgccagggcctgtccccaccacaggggacacgcagcaggctggaaacactcccctccctttg

SEQ ID NO: 239440 - DNA, 122 bp, Homo sapiens
ttatgcttcccagagtgagtctccacttatttattatcccaaagtttgtttgtttaaaaacggggtcctgaaggaagaatcatattagtttcaagtgggttttgtgctgtttgctttttgtt

SEQ ID NO: 239441 - DNA, 122 bp, Homo sapiens
agggcagcggtgttcgccgggtgggggcccagaacctgtcccaggaagacgcaggagacgcgaccggggtgagacaagagtccaagctctcaagcatccactgtgttattgcacttcactta

SEQ ID NO: 239442 - DNA, 122 bp, Homo sapiens
tgggaggctgaggcaggagaatggcatgaacccaggacacagcttgcagtgagccaagatcgcaccactgcactccagcctgggcgacagagctccgtctcacaaaaaaaaaaagagacggc

SEQ ID NO: 239443 - DNA, 122 bp, Homo sapiens
aataactggtattggacaaccagctagccattagcaaaagataaaactggatacactcctcgaaccgtatgtcagagcaaatttcaaatggatcagtattctaatttaaaaaatgaggctgg

SEQ ID NO: 239444 - DNA, 122 bp, Homo sapiens
ttgcccttccatatcccaaagagaagatgctctgtcaaagggctgtcagctggtgccatccgcaactaactccacgttctgggagttgccgagggctgcctgggcggccatcccaggacacc

SEQ ID NO: 239445 - DNA, 122 bp, Homo sapiens
ggatcccgagttcccaggtgtaaatgaacatgcctaggcatgtgcctacgtatgaaacaccgaaaggaaacacggcgaagcaggacagcggccacctttcgcgggaagatgacgagtggctt

SEQ ID NO: 239446 - DNA, 122 bp, Homo sapiens
gagccccagcgaccgctctggtcggctgtgtagactgttgggtaggctgcgtgctagcttcggcgcggatccctgggcgtccgtacgtcggagtccttcgtcctccagggtccctgttcttt

SEQ ID NO: 239447 - DNA, 122 bp, Homo sapiens
aagtgccatttaggttctgggtgaaaaatgctcctttctgttactagttttggagtactgcggtattctctattgtttttttatgtctgcccacatctctgtgaatagtctccttgttaaat

SEQ ID NO: 239448 - DNA, 122 bp, Homo sapiens
taggtaatttataaagaaaagaggtttatttgctcacagttctgcaggctgtacaagaagcgtggtgccagcatctgcttctggtgtggacctcaggctacttacactcatggtgaaggcca

SEQ ID NO: 239449 - DNA, 122 bp, Homo sapiens
tccagccttcctgggctgtggagaggattccctcagcggctgtgaaagagtgctttcttgcgggtcagccccgacaggacagacttaagggcgggagggagcccatcccgcttgccccaacg

SEQ ID NO: 239450 - DNA, 122 bp, Homo sapiens
tccgcagctcccaggcgccgacccggacccccggccgcggcacctacgccccgccccagtcgctccacgccaaagcccattggtcggcaacctgtccctcctgctcatgtgatgcggcacgt

SEQ ID NO: 239451 - DNA, 122 bp, Homo sapiens
caactacgagcaagagtccaagatcatgtttgtggtgaacgcggtgtatgccatggcccacgctttgcacaaaatgcagcgcaccctctgtcccaacactaccaagctttgtgatgctatga

SEQ ID NO: 239452 - DNA, 122 bp, Homo sapiens
ggtgggctggcccagcctctcctccagcctgagaagcatgccgtcgctggacggggtggacgggaagctggagcccaacttgtggctggacttgttggcggccaggctcccgatgctgctgc

SEQ ID NO: 239453 - DNA, 122 bp, Homo sapiens
acccggtctctgaagctgggttgcacgcgtgtccaggtccacggaaggctgcagtacccgcgcagccccggcatcacctggcgtcacccggcgccacctggcgcatcgctccccacggcact

SEQ ID NO: 239454 - DNA, 122 bp, Homo sapiens
acaggccagcagggctttgacaacgtccacccgcccgtggctgacggccagcatcagggccgtctgtcctgcctggggagggcaaggaacaggattatggttcatgcaggccccagggcagg

SEQ ID NO: 239455 - DNA, 122 bp, Homo sapiens
cctccctttcctggttcgcccgcagtttcggcctatcaggttgagtcgggtaaaccaggacgggccaagcggcactctcattggatatcactggtgggggcgggaagaaggcggagcacgtg

SEQ ID NO: 239456 - DNA, 122 bp, Homo sapiens
cgtagaccgacccccccccagcgcgcccacccggtagaggacccccgcccgtgccccgaccggtccccgcctttttgtaaaacttaaagcgggcgcagcattaacgcttcccgccccggtga

SEQ ID NO: 239457 - DNA, 122 bp, Homo sapiens
aaaaaaaagaaacggcgagctcagagtgggggccccggcgtccccggccttgcacgtgcgcgcccggatgcctagcccgggccgcctggcgctgcaaactttacactttctttgtgccgagc

SEQ ID NO: 239458 - DNA, 122 bp, Homo sapiens
ctcgctttcttatctgaccttccggcctaagtgccaactcaactgttttcactggcatagcgaagcaatggccactgggaagaaattcaacttgctgtacacctgacaccactgcttttttt

SEQ ID NO: 239459 - DNA, 122 bp, Homo sapiens
tgacagccttttaaaggctgtaaaataattcaaaattaccttttacaagctgtggccattcggtgacatcagggtgatcacagctttgagtcactgattaaaaacaggttgtcacaccagtc

SEQ ID NO: 239460 - DNA, 122 bp, Homo sapiens
catagacaagatcgcagcgcaagggcgcaagcggaaaaagcggacctccatcgaggtgagcgtcaagggggctctggagagccatttcctcaaatgccccaagccctcggcccaggagatca

SEQ ID NO: 239461 - DNA, 122 bp, Homo sapiens
gggtcctaacgaaggtctgttggtggagatgatcctccttatgtaactaaacgtagaggacgctcaggaggaggagggaggccgctcttgttattcatttaaaacggtgcctttgggcggta

SEQ ID NO: 239462 - DNA, 122 bp, Homo sapiens
taagactaaatgttgtatttgcaaagattttactcccccaaagcagaacataatttccctcgctatcttagcttgaaaaggcctgaagtgaaaatgtatgactttgcttatgcagcttttct

SEQ ID NO: 239463 - DNA, 122 bp, Homo sapiens
aagcagatgattaagagcagaaatgcggtggccacagggacacagtaggttgtcccgcgacgagccagtgacaggaggagagggaaggaaaatggcagctgggggtccggaacgcagagcag

SEQ ID NO: 239464 - DNA, 122 bp, Homo sapiens
ccagtgtcccgagggtctcggcgggaggtccgggtgtcccgagggtctcggcgggaggtccgggtgtcccgagggtctgggcgggaggtccgggtgccccaagggtctgggcgggaggtccg

SEQ ID NO: 239465 - DNA, 122 bp, Homo sapiens
gcgggcggagagcgcagagccagcgagccagcgagcgagcgagcgggagccggagcctcgcgccccccgctccactccgattctctccgcgccagagccagcgcgccaggtagggtgagccg

SEQ ID NO: 239466 - DNA, 122 bp, Homo sapiens
gacacacagcagccctgagggtagctgccgagaagttccccaggctgcctccaaaacccacggcctgctccaggccgtcagaacccaggcacaagacaaacgtcctgcggtgacctcacagc

SEQ ID NO: 239467 - DNA, 122 bp, Homo sapiens
caagtcccatgatacaccggaagaatctggcgtcgaggccggccagctccaaagggcaaacgctgtctcccccacccaaggtagcctcggcccgcgcccaagtgggtgtggctgcgggaaag

SEQ ID NO: 239468 - DNA, 122 bp, Homo sapiens
gcccgcggctctgattggctacctcagagcaaggggcggggcggcggaggacccgaagggcgcgagagcggaacactgcgtacgcgcacttccggtctttgtggcttgcagctcggggtggg

SEQ ID NO: 239469 - DNA, 122 bp, Homo sapiens
taagttgaatttagtcagagttgtcagactaaattcagactaaagtgtcagaagagtgtacgtgctcatttacttggtacccacttcatgcttttctgtggttggctaataatatttacaac

SEQ ID NO: 239470 - DNA, 122 bp, Homo sapiens
ccatgccggccacttcccctcgcgatggcacagctggctgggactgctgctccctgccaccgctcagtactgcaggagggcactgtgctgcgcatccatcaccagcccaggaaaagatcgga

SEQ ID NO: 239471 - DNA, 122 bp, Homo sapiens
ttttttttttgagatggagtctcgctctgttgcccccgctggagtgcggtggtgcaatctcgggtcactgcaacctccgcctcccaggttcaagcaattcccgtctcagcctcccgagtagc

SEQ ID NO: 239472 - DNA, 122 bp, Homo sapiens
gtaccagaagtggcatgggtacaagtgatatgtgggtcacccacagagagagacgcagaacgaagcttcgtgaccctccaagttcagtgaagacacccaaagcctggggcaaaacgaggcgg

SEQ ID NO: 239473 - DNA, 122 bp, Homo sapiens
tgttctgtagagagcagacactaggcccgctagagaatcctgaggcagcacgatgacacccgtacgcaagcagcatgaacggaggtggactcggtgcagctttgctgtcttagaaaatggac

SEQ ID NO: 239474 - DNA, 122 bp, Homo sapiens
tgcgcttttcagactggcttaaaaaaccgctcaccaggagattacatcctgcaactggctcggagggtcctacgcccacggaatctcgctgattgctagcacagcagtctgagatcaaactg

SEQ ID NO: 239475 - DNA, 122 bp, Homo sapiens
tccactggagggtgaggcgcagcctgctcttcctggtgtgccttcaccaagcccccacctcggttcttcctctgtgaggcagcctcgtggcaagagaaagcacttacactgatgttctagaa

SEQ ID NO: 239476 - DNA, 122 bp, Homo sapiens
gccttgcagagcggtgggcggggcctgcgaagaaggtgtgccgggggctggttggaggcgcgggcggcggggccaatgtggcggtgacgtcacggggcgggcggacgctggcgcgggtaggt

SEQ ID NO: 239477 - DNA, 122 bp, Homo sapiens
cgcctggcatctcgcctcttcagctcctagtaccagggtgaaaggagggggctccctgaccgagtcctccccagacactaccaaacactcggtccgaagcatccgggaaacagtcccttgga

SEQ ID NO: 239478 - DNA, 122 bp, Homo sapiens
tcctcgaggtcggtccggggacgccctctgggaagcttcacctgcggctcaggttacaaacgcacagtgcccagccacgtcctcacctgcagtttcaaaagccgaaagaaacaaacacaaaa

SEQ ID NO: 239479 - DNA, 122 bp, Homo sapiens
agtcatagaggtggagaagtcccataataggccagctgtaagctagagaaccaaagaattcgatagcatagcttaaagccaggagtgtagcgcagtcgaagttcaaagcctcagaaccaggg

SEQ ID NO: 239480 - DNA, 122 bp, Homo sapiens
cgtcctccaggcggcgagaaggaaagggggaggggagcgaacgccaggcggttccgccgccgacccccgcacccgccgcccctagccccgcaaagctccgcgggtacctgtcggcgccgaaa

SEQ ID NO: 239481 - DNA, 122 bp, Homo sapiens
acctctcggatctgacaaaccagatgcagagcgacgaatggagaccaccttcccgggaggcggaacccagctgggttccagcctgctctgggagaggagcacgcctcccttgagctgcaggc

SEQ ID NO: 239482 - DNA, 122 bp, Homo sapiens
cttctatgggtttcccgtgcagttctattttacctgcggacacacaagaagtgagacggtcggccgagttcagcggctctccctgcccgaagacccgcacagcccaagcggcgacacaaatg

SEQ ID NO: 239483 - DNA, 122 bp, Homo sapiens
tgcagagtccatcttcccaggtgatatagaattccttattgggaattctggggacatgaccgatgaggcagaaacaaaagggaagtcagaaatacagagatgagatgatgagaaagaagtgc

SEQ ID NO: 239484 - DNA, 122 bp, Homo sapiens
gcgttttagctgtcggaggggatgatggagctgacgcgctaggcctgtcaacttgttacacggatgggttgcacgcagcgaagctgtggaaaatctgtgccttttaacttttctacttaatc

SEQ ID NO: 239485 - DNA, 122 bp, Homo sapiens
cgggacgcctcacagcaggagaaccccagctgccatcatgcgctgtggcctgaggtggggcggggccagggaccgccaggacagcccgacccgccccccacagtgggggtaggagccctgcc

SEQ ID NO: 239486 - DNA, 122 bp, Homo sapiens
tctgagcaggcgggaggaactcggtccaagcccctcttccctgaactcccagggctacagcgtttccttccagccgccagatgacaacatagccactggcaacaggcagagacgtggcccgg

SEQ ID NO: 239487 - DNA, 122 bp, Homo sapiens
ggagtgacggacctgctggcatcctcctgaccccggtttccagctctcccctccccctgtcgacaacccagggtcagaggacaggcagccacctggccaaggggcaggcccccttgtgccct

SEQ ID NO: 239488 - DNA, 122 bp, Homo sapiens
cctgaaactgaggatgggaaagctaaaagctggctgccgcgcgagctcggcccgcccggccgctggcgacctctggaatgcatggcaccagtgtccagcacacgcccggcgcccgggccgag

SEQ ID NO: 239489 - DNA, 122 bp, Homo sapiens
atacccacgtcacagggttattgtgaacgttagatgacataacgtaggtccaaagcttagcgcagagcctagaacatagtaagtgcttaccaacatagtagcctcattattaggaaggtagt

SEQ ID NO: 239490 - DNA, 122 bp, Homo sapiens
gatgacgtcccatggtgggtgaaaatctatcctggataactcctggaccagtaccaattccgctaccttaaaatacatatacggacaactctcaaaactaaagttaactgatttttcagctt

SEQ ID NO: 239491 - DNA, 122 bp, Homo sapiens
gggggagtcctggctctgaagtcaaacatgtgccagtttcaatcttggctccactgcttacgagctgtgtgactttgagtcagtcacttaacatctctgagtctcagattcctcaactgtga

SEQ ID NO: 239492 - DNA, 122 bp, Homo sapiens
ccagtccagggtcagatcctgggctgatgccacctgagggcggggtgggggcgtggcctccgtgcacatgggagactccaggtgcaggagagggggaggtggacttcctcttggtcttccca

SEQ ID NO: 239493 - DNA, 122 bp, Homo sapiens
ccagcttattcccaaaagggtttgagccggacaggggctaaacaggccccttcgacttggcgggccggccagacgtgacagcaatgccaaggaggccaagtttctttgtccatttctcacct

SEQ ID NO: 239494 - DNA, 122 bp, Homo sapiens
gggccgcaactttatttgggagtttctttttccggtgagacagagacccggcagaagaagcgggaggggctggaggctggtccttaggtaggcactgcccggcgactggagcgcggacctgg

SEQ ID NO: 239495 - DNA, 122 bp, Homo sapiens
tacttgtgagatgcttttctgccagacagctcccaaatcacatcttattaagggagacttcgaaggcctgttagcaggtgactgcggcaggggcaggggcgcatcagctgtccggcttggac

SEQ ID NO: 239496 - DNA, 122 bp, Homo sapiens
agtttcagcatgccggcatttggcactaagttgtcgttcaacatatatggaatgaatgaacgaaagggagagttggagttaataacaccttgcatagaataaaccccgtcggttcttaaccc

SEQ ID NO: 239497 - DNA, 122 bp, Homo sapiens
gcgcctagccgattcctgtcactgcagagatgtccccgccccctcctgggatggctgggacgcggtggaccggttgatggtgtgagggctgctgtgggaccacgggggacaccgcgtggcac

SEQ ID NO: 239498 - DNA, 122 bp, Homo sapiens
gggtccgcttcctgcggctgctgcttgccccataggccaggaggcttctgggtggaccagcgcgatctccccgaatatcgcggtctacccgaacatcgcggcctccccgaacatcgcggtct

SEQ ID NO: 239499 - DNA, 122 bp, Homo sapiens
gactgggacccaccgacaaacacaggatagtcaggtccaaggagatgcaaatgggggacgcggttagggagtcccagagccgaggtagagggggagcagtggtaagatgagcgagcagtcga

SEQ ID NO: 239500 - DNA, 122 bp, Homo sapiens
cctcaggggtgcagttgccatattccgggaaacactgtgttttaaaacaagcctgtgtggcgagggatggaggccgggcagcaaacccgtgagcaagcttggaggcagatcacacacaagcc

SEQ ID NO: 239501 - DNA, 122 bp, Homo sapiens
gtcttcgggcggcgggcgggggcggcggggcctcaccgagatagatgtctccgaaggagccgctgccgatcttccggcccagccggtacctgttcccgactctcagctccatggcggcggcg

SEQ ID NO: 239502 - DNA, 122 bp, Homo sapiens
atgggctaattttgagtgtgatggcctcagctcttttcctgcatctgctggcagggctgtcgtcagtcctactggctgcttctggaagacacagcttacccccagcaacatgtccaatccta

SEQ ID NO: 239503 - DNA, 122 bp, Homo sapiens
ggggaggagagaggagcctgcgggctgcagcagccgggcagtcccggaatctccggactgcgtccctgccccaagcccgccgggaacccgggccgtggacgcccccacccgggggccgcggc

SEQ ID NO: 239504 - DNA, 122 bp, Homo sapiens
aacctggcgggaagaccgtggcctcacagagcgagagcggacccgcgaggctccctggtgcgtgagtgcccaggccctggccatgccaaattggcgcctccgtctgccttctgaggtccact

SEQ ID NO: 239505 - DNA, 122 bp, Homo sapiens
cgtggctttctccaggacggggagggctgagctgaagaggtggggacagttgcgtccccccgccacccactgtcctgcggtgagagcagactcactgagcctgcccttctcccttgtgcctt

SEQ ID NO: 239506 - DNA, 122 bp, Homo sapiens
ctcaaattcaacctcaatcggcgacttaatctaggtggaggtaaagaggaagcgacccctcgacctttgagtacgggaataacttcctgagcgttacatttagcaaatgtatgtgcctctcg

SEQ ID NO: 239507 - DNA, 122 bp, Homo sapiens
gactcatgaaggaggagtagcttacctctgggggacccccgcggagggggtgcgggcagtcgcggttggactgccgacactgccgcctcagcagcagcgaccgctcccgggttccattggcc

SEQ ID NO: 239508 - DNA, 122 bp, Homo sapiens
gctcattttctccttcactcaactgattttgtcctcactctgtaatgctaaagatgagaccggttctgttttactcattctccccaacttcaacagtgaaaacagtgttaaacaactccagg

SEQ ID NO: 239509 - DNA, 122 bp, Homo sapiens
ctgaggagaaaatggagggcccttctctcacaccgacgagaaaagttcgagggggaaatacgagttcctttctgaagggacaggacggctgcttttccacagccgcgacgtgattgagaaat

SEQ ID NO: 239510 - DNA, 122 bp, Homo sapiens
gacggggacaccccactgtggcctgttacccagagaaaggtgctaaatgcagcgactccacgtgtgacgagatcccacccgcctcggagcatagaggcagttagacaagtctgcgactcggt

SEQ ID NO: 239511 - DNA, 122 bp, Homo sapiens
gaccagcctcggtggcgatgcggtccaatatgtcatgaaccaaagaatccatgacactcacggcctcccgggaaaggctgaggccctggtgaacctgcttcagcacccggcggaaataggtg

SEQ ID NO: 239512 - DNA, 122 bp, Homo sapiens
taaacacgtttctctctaaaagagaagtaaaagaaacaaagagctgtgggagaaagaaatcgaattttcagggcacaacagaaagcatgtgttgacaattttgataaactatccccaggatg

SEQ ID NO: 239513 - DNA, 122 bp, Homo sapiens
cagaaatgatgaatgcttgaggtgatggaaaccccatctaccctcctgtgatgattacatcgtatgcctatatgaaaacatctcatatacctcataaatatgctaattatgtacccataaat

SEQ ID NO: 239514 - DNA, 122 bp, Homo sapiens
agggctccaagtgccgacttgcagaggcctcgggagtgacagtggaacagagggtggcaccggcaccagaaagcaccccccgagcctagatttctaccttcagaaactccgacagtggggac

SEQ ID NO: 239515 - DNA, 122 bp, Homo sapiens
cacaactggaatctgcacgtctctgtctcacacccgttcactcagctgtgaggacatcgacgtgcagcctcgacttcctgcagtgcattcgtcaggctcccgtggccgctgggccattgtcg

SEQ ID NO: 239516 - DNA, 122 bp, Homo sapiens
cctggctccagcaccattctagaagaaaaaggtttgctaaataagagctggcctctctctcgagaaacctgccattcacaaaggtgtccaggggcactctgtgggtgctgggccgcaccgtc

SEQ ID NO: 239517 - DNA, 122 bp, Homo sapiens
cacaagaaattgtagtagaactagaaaggatggtaggaatcagagatacatttggaggcacggttgataggtggtaaaattgacaaattattgatacagggaattgttggttttaagtctgg

SEQ ID NO: 239518 - DNA, 122 bp, Homo sapiens
gaaatgcattttatttgcttgtagcatacatgtggctaaggctcagcacacacggagattcgcatatgtgtgcacacgccccacgcacacacccacacacgcatgtgcatcacatgaacgcg

SEQ ID NO: 239519 - DNA, 122 bp, Homo sapiens
tcgcaacccctcagcccggccagaggcttcaggagctgctgggggtgatccccagtggtccgctgtggtcctttatctccggctctgctctctgctgctgctctttcgcttgctgggtggct

SEQ ID NO: 239520 - DNA, 122 bp, Homo sapiens
taacccgctagaaaaatctcttgggagaggcgggagcggcaggggtggccgagtggccgtcgccaaaacgcggccccaccctggcagctgatttccgagatctggcagtaagacgccgcgcg

SEQ ID NO: 239521 - DNA, 122 bp, Homo sapiens
ccataccgcgaaccccctgaaatgcctgtgtgggctgccccctggtcctgggagggctctcgggaggctgctacctctggccggcctgaaggcactggcgcctggggtgttcgttgtgggtg

SEQ ID NO: 239522 - DNA, 122 bp, Homo sapiens
caagtgcagctttcaatcggagctgaacgagagctaactaagaatgagcccgacaagcaccgggaacaccaagcacagctcactcgcggcttctgcaagcttaacattcatcgtttcagcca

SEQ ID NO: 239523 - DNA, 122 bp, Homo sapiens
ctcccgggctctctgcttcggactcatagcgagatacaggtgctgtgggaaggggccctgcggcccccactctccaggagcctgcagcccctgtgagagcagctggggacaaggaggatgac

SEQ ID NO: 239524 - DNA, 122 bp, Homo sapiens
aggagaagtgtgaagtgggggaaaaccccttataaagccatcagatctcgtgagaactcacgcattatcacaaggatagcatggaggttaccgcccccacgattcgattacctcccactggg

SEQ ID NO: 239525 - DNA, 122 bp, Homo sapiens
caaatgcacccggggcacgcaaatttcgggccggattctttctcgggagacggagtaatgcgtcaggcctaacgcagtggaaacaagcaagacccggcccggaactcccgggacctgggttc

SEQ ID NO: 239526 - DNA, 122 bp, Homo sapiens
ctcctgtgtggcagaaaggacattcgggacctatgacgcaaacgcaggcggctacacattcgcctgcaggactgcaccttttaaagtccgcatgtagacagtgaaaatctacaaaggtaaac

SEQ ID NO: 239527 - DNA, 122 bp, Homo sapiens
gaccatccacgtagcccctgaccatccacgtagctcctgaccatccacgtagctcctgaccgtccatgttagcccctgaccatccacgtagcccctgaccatccacgtagctcctgaccatc

SEQ ID NO: 239528 - DNA, 122 bp, Homo sapiens
caccgggcggtcttttctaattcgtgtgggggctgatattaacataagcagccgcctcttcgggtgcgagtgggatcccaggtccgggatgtggtgggtgcggtgcgggagaggcacccgcc

SEQ ID NO: 239529 - DNA, 122 bp, Homo sapiens
gacgtgactgggtgtgcagaggaagagagaggccaggctcaggcttcatcttgtttaatccgtggaggacctaggggatccctgtttagacccctgcaggctgcagtgccgctctgctccgg

SEQ ID NO: 239530 - DNA, 122 bp, Homo sapiens
gatctgccgtcatatcagcttatggcgccggtcgctgattggctggccgctccagcctcccggcccgcttgctggctgcccagctgctaggacagtttgcagagcagtggcgtgcggagcgg

SEQ ID NO: 239531 - DNA, 122 bp, Homo sapiens
gattctggggtacaccaggcacgttgtcccgaatccatcccacccagacaccccctgactcgtacacacatgtacagaaacgcagacacacaaagacgcccacggacacactcacacggacg

SEQ ID NO: 239532 - DNA, 122 bp, Homo sapiens
ccatggagcattcacttataacttcccccgaaaatttcaataatccctaccaaggctccacgctggccctatcctaaagagttttcctagggtgctgctgagggatgaggtgtagggttggg

SEQ ID NO: 239533 - DNA, 122 bp, Homo sapiens
gggaagtgaaaatccacaaagctgcccccacttcgtaagggcctgtgcctggagggtcgtcgggttacagaaattgaaatcagctctttgccttccaactcttcttggccttgccaccgcga

SEQ ID NO: 239534 - DNA, 122 bp, Homo sapiens
cacccccacctccggacactattttggggagggaattaattagctatcgatttccgctggcggagggaaaaggatttcgtgctgctgtccagtcatccccaagctcagaacaggagggactg

SEQ ID NO: 239535 - DNA, 122 bp, Homo sapiens
ggatgaagccgaagccacggtcccggttgatgaagacttcgctgggctcgccatagcgttcgaagagcctcttgaagtcctcctccgtgatgtcggtgggcagatttcccacgaagaggcgg

SEQ ID NO: 239536 - DNA, 122 bp, Homo sapiens
ttcgtcttccgaggctctggggaaggaccgctccgtctcacgggtcacttggacagtgggcgcacccgagggttgaggcgtcatcctacggcggggtcagagggaagggtaagtttgagtcc

SEQ ID NO: 239537 - DNA, 122 bp, Homo sapiens
aatggccgggcccgtcccgccccatccgggattggctgtgcgtgccgcggccctccaccccgccccgctcaggatcttcccgggattggctgagctacccgacctctccaggggatcggctg

SEQ ID NO: 239538 - DNA, 122 bp, Homo sapiens
caagtgcctcttgggcccgcttctctaacaaatgtaaaaataatgcccttgaaccaggagcgaaactgagctatctaaggaaaacactgtgagcaaatactgagagcctagggaaaccatct

SEQ ID NO: 239539 - DNA, 122 bp, Homo sapiens
ataataattacttctgcttcacatggaaagaatttatttaaatatctgtaatggaaagaccgttattattggtattacaactttacagtgagtacatcaaaatgtagatatgacattcataa

SEQ ID NO: 239540 - DNA, 122 bp, Homo sapiens
tatcgattcattccagcactctcgctccggcagccgccatccaccgccagtttggagagccggacacccgggttcgaatcccggctttgccgcttttccactctgtgccctcggcaagttgc

SEQ ID NO: 239541 - DNA, 122 bp, Homo sapiens
agaataaaaactcacagtcctaagggccgggcaggatgcgaaatacctgctgctctcacccgctgctggagagaaggcagactgggtgaccacttggagacacggttgggtagttttaatga

SEQ ID NO: 239542 - DNA, 122 bp, Homo sapiens
acccgaaggtgctgtcccgcccacggactcgctcacactccgtttcttcgatcctttagacgactttttaccgttcagggatgctctccgttaccgcctctgccatttggttgccctccctg

SEQ ID NO: 239543 - DNA, 122 bp, Homo sapiens
ctggacaagttcccccaaataattatcctaccccagtagtgccacagtggagagatcttgcgttaagtgcttactgttcgttatctcattcctcataataaccctattatcctgttttatag

SEQ ID NO: 239544 - DNA, 122 bp, Homo sapiens
acatttaagtctccctgattaggtctacttacccagaaacaaggtctcttcaggactcaccggagaaccaacagaattccttccccaccccacacacagccggtaaaacttccaatatttga

SEQ ID NO: 239545 - DNA, 122 bp, Homo sapiens
cactataaaagcgcggtgtcagcattaagaagaagctgaaaggagttacacgatgagaaacgagttacactgtgtagggttccagacagcagtgtccgatgacagctacaagagcagcactc

SEQ ID NO: 239546 - DNA, 122 bp, Homo sapiens
gcaaccctcagtagcgaataggcaggcattcttctcaactccatgctacagatgaggaaacgggaccctagagtggagagcatttagttccaggtggccaggctagttgggggtagaaccag

SEQ ID NO: 239547 - DNA, 122 bp, Homo sapiens
tgggtcggcctccagggttcaggccactgaactgcccgtacttccccttgttcttgtcggcgggcttgaggatctaaaagagacagtgttggtcaggctcatggggctgagccacagggcct

SEQ ID NO: 239548 - DNA, 122 bp, Homo sapiens
actggatttggagtcaggcatcttggattctggcctcagttctatgcccaattcatggctcgttaccttattgataagacacatgtgtctggcagcagaaggggcagtttaggaaaggataa

SEQ ID NO: 239549 - DNA, 122 bp, Homo sapiens
gctcagggaacaattcctaggggacgttatctttaagggatcaaattctgagacaggctgcgggggctcctgccctaaggcagtgtcctctcttcccagctagagaaagaggttcatcccct

SEQ ID NO: 239550 - DNA, 122 bp, Homo sapiens
gggcagccctggaagtaattctcctttaatttccgaaagatgtacccacgagtttaaaggcgagtgacaccatagcaaccaagccccaataggaaacagccacaaggcccttcgctgggccc

SEQ ID NO: 239551 - DNA, 122 bp, Homo sapiens
agctgtttttgtaacctagcatatcatcactccggcctgtacatgataaactaaaaagttcgtaaaacagcagtgctgtttttcaaaactgacatttccaaaatgctctgctttcccaggcc

SEQ ID NO: 239552 - DNA, 122 bp, Homo sapiens
ggaggcagtatcgcaccggcggcgacggagggctcaggggtagtcggttgggtgggggcccgctgaactgacaagcggcatttcagctcctttcttccaccagtcggaaccccagagcaggg

SEQ ID NO: 239553 - DNA, 122 bp, Homo sapiens
ggcggatgtgggggccagccctcggaaacggaagtgagcggcggggtcgactgacggtaacggggcagagaggctgttcgcagagctgcggaagatggtgagtgggtacccgggcggctgga

SEQ ID NO: 239554 - DNA, 122 bp, Homo sapiens
tgctcaactggtccccattgtgcccctggaaaaagcttggccagggccacatgggacaaccggggaaggaggtcctgtggccactctatccaagccttccctaggtgaccgctccaaaattt

SEQ ID NO: 239555 - DNA, 122 bp, Homo sapiens
tcaggacccggggcccgctcgctcacccacccaggacccggcggccgccacacgcactctcgctcccgcagctcctctggtacccgccctcgtacctggcgcatctgggcctcggcggcgcc

SEQ ID NO: 239556 - DNA, 122 bp, Homo sapiens
caaagtaggcggcaaagaggtcatcagcaaggagtgttcgaccctggggagaatagcgggcgacggggctccagggaggccctttggattgactgttgcccaccttatctcagcaactgaca

SEQ ID NO: 239557 - DNA, 122 bp, Homo sapiens
gccatcagccgtggtcctatcaaatctgtcggagcccctcaccctgatgcttcctgttcacggtgttccatccctggcccttcctcgtccacggttacacgtcctgtcccctccctccccat

SEQ ID NO: 239558 - DNA, 122 bp, Homo sapiens
tcagcctcttgctcgccccggtgctgtggagagctgcaatcacgaggtgtgtgcccagaccggagagacggtccagcctctgatggctcggagatgatggaccgtggaagggaagcgtctgt

SEQ ID NO: 239559 - DNA, 122 bp, Homo sapiens
gaactaagaaatgatcctgggtcaatgatgtgcatttcattacctgcaccctcactggctcggccttcctgagagggctcctgctggccctggtgactaagaggctgctcctccagccctac

SEQ ID NO: 239560 - DNA, 122 bp, Homo sapiens
ggtacctggtaccccctggcttgttgaaggaaagatctggggccatagagaagcccatagcgactaaacccagcattctctgggcagcgaactgcatggaaggccaagtgaggagttggggc

SEQ ID NO: 239561 - DNA, 122 bp, Homo sapiens
cccggcctgggcgcggtgctgcaggtccaggggctgtgggggcggggcgccgggtcgggccgagtgcagcaccaggttcttgacacagcctgtgatgcctgaggagaatctgcccccggtca

SEQ ID NO: 239562 - DNA, 122 bp, Homo sapiens
cggctgtctcccacaagcaaatgctgcacgtatggctttgcttcttccacgcaccacattcgccacaaatcacagaacgtgcgcgggtcactagagagccttcgacgatgtgattttaatgc

SEQ ID NO: 239563 - DNA, 122 bp, Homo sapiens
acttgctgtagagcccactcgcacatgcctgtgggtctagcactgtgaggccctgggggccggggtgggtctgcagcaccctgagctccaccagtcactgccagattccacaccccccggga

SEQ ID NO: 239564 - DNA, 122 bp, Homo sapiens
gtctcctaagaccaatgcagaggccatggaagtgcggttcttcaggggccagttctctagcgtggtccacctctacagggacgggaaggaccagccatttatgcagatgccacagtatcaag

SEQ ID NO: 239565 - DNA, 122 bp, Homo sapiens
agaccttcctcctttggggtaaacggggctcggcccgcgccgcagcgtggacggggaccacgcccaaccctccccgcagatagctacagacattcgggcggaatctgggctcccgcccaggc

SEQ ID NO: 239566 - DNA, 122 bp, Homo sapiens
ttttctcatgttgggttggccaagagcagaaaaccctatggtgtggttttggttgggagccggtccaatgaccaaggctgagtcccagcccagggaaagagccccaagaaaatgggttttct

SEQ ID NO: 239567 - DNA, 122 bp, Homo sapiens
gctctgcccggccttcttagaaataactttggccctcacttggctgtagcagaaaggaatcgaggcccccgtccataatcgcaggtgtcggcgtggaaaggagccacgcgtgcacactcatg

SEQ ID NO: 239568 - DNA, 122 bp, Homo sapiens
cacttaaaatgtgagcttgttactcaaccttccttcatctctgtttcctcatctgtagaacggagataagatttgctccctttctacctcaccaggatctgtgaagattagataatggctgt

SEQ ID NO: 239569 - DNA, 122 bp, Homo sapiens
cacaaaactggtccttggtgccaaaaaagttggggaccactgccctagagggtccgatttcggtggcccaccatggtagcttgctcgatagcgcatgctttattggtttcttttccctccct

SEQ ID NO: 239570 - DNA, 122 bp, Homo sapiens
gagcagaaaggctactgggggcttcccagggagtgggtgagaccccacaacaaacaggaacggcgaggcgtggcgggggggtgggccgagggcaggagctgctaagtgtcctgcgactttct

SEQ ID NO: 239571 - DNA, 122 bp, Homo sapiens
ggcagggctggtagtgccacgtgcagttggcctcctgtgtgtactggtactcgccatggccgtcctgcgtgtgcgtgttgtagaagccgcagtagatggctgggaggaagggagctgtcagc

SEQ ID NO: 239572 - DNA, 122 bp, Homo sapiens
ttagattttgtattgtggactgattttgcctcacattaaaaactcatcccatggccagggcgggccactgtgctcctggaagattctctgtttaagcacccagtgtcttgccctgggttttc

SEQ ID NO: 239573 - DNA, 122 bp, Homo sapiens
gccctcttgtgggccaatggggagcggaggtgccggaaccacggaccaatggggcgggggcgctggggctcaccatataaggagcggcctcgccataaaaggaaacattgtatctctttata

SEQ ID NO: 239574 - DNA, 122 bp, Homo sapiens
gttactcgccccgcccccacccttcagtcccttagcaacgcgtcctcggtccgtagaaaccggttgccgagctctgcctacctctgaaaggcctagagagcagagttctcttctcagagggg

SEQ ID NO: 239575 - DNA, 122 bp, Homo sapiens
gagtttcattcagtgaatgagaactatagtttggttctgtgagatctctatgaatcaaggcggccactgaagcggagaaaagaaatgcttaaatgttaagaaagtttgaagtgcagaaaaag

SEQ ID NO: 239576 - DNA, 122 bp, Homo sapiens
ctgggaagacagtgtccaggtctcatgaaattaataaaataacttcggatcagctgcatccggcttaggcaccaggtggagctgcccatgccttccccgcagggctgagcccactcagccgg

SEQ ID NO: 239577 - DNA, 122 bp, Homo sapiens
gagacacggttgggccctgaagtcgcctgcgtggtgacccaggaaatccccgagccgagccgtaaggtccttaagtgagtaactttgccctggaggaaagtggattctacgaagggagttaa

SEQ ID NO: 239578 - DNA, 122 bp, Homo sapiens
ccggagagaggcgccgggagggtgaacaaccagtggcagggagaggcagctcggccccaccgccaacctcagaggcgcgacgcccggccccatcctcaaccccaccgctgcccccgcggaag

SEQ ID NO: 239579 - DNA, 122 bp, Homo sapiens
tgtaagaacacgacttgccagtagtagcgttctggatgcgttgcctggattctaacagcgcgattctccccttgccctcctggttttccacatctccagcttctagtggtctcagacttgtt

SEQ ID NO: 239580 - DNA, 122 bp, Homo sapiens
aaacccaaaccacaaaaccccgtcttgtgaaaactgtgtgccagtctaaaagtggcagtccgtgcaggagaaaaagcctgtcaacgttcagggcagaagcaggcagtgtgagatcacagctg

SEQ ID NO: 239581 - DNA, 122 bp, Homo sapiens
acttagtaagatccagtaggtattttgaatagatagtgtagtgcttgtcagagaagggttcgggagttggggtccctgaattctggctctgctaattccttatggacttaagcaggtgactt

SEQ ID NO: 239582 - DNA, 122 bp, Homo sapiens
ggagtgatcaaagacaaaatctgcgcgcctcagaaaagagtcagggtctaataagcccttcgtcggctccggggactccctcgggctcgggctccctgctctagctggagacctcgacagag

SEQ ID NO: 239583 - DNA, 122 bp, Homo sapiens
cacagagctgaggcataatagttttaaggtgaacagaggtcaccgctcctgagagctcggcgaggtggcgctgataacacctacagaaaccctggttgtgtagtgcactggtaattgtagtc

SEQ ID NO: 239584 - DNA, 122 bp, Homo sapiens
gacgaagggggaccaggaagacactagatgtgaccttccgtggtccctttccccttctttcgcacctagtctcttttttgtcctttccctcagttttggcggtgggtggggggatgggggag

SEQ ID NO: 239585 - DNA, 122 bp, Homo sapiens
gctcccgtcaggcccctgccccccctgccctccctgccctggcgcgcccccgcccctagccgccatccccgcccgagggtcccagccagagccccggcccccggccccgcccgcgcctgctg

SEQ ID NO: 239586 - DNA, 122 bp, Homo sapiens
tctgacctccctaggaaccagcagatacagaagcaaaaactttagggatggctttggaggcgtgtgaaaggatggagaaggcagggctgttccagaaaccttccacataaaagactctccca

SEQ ID NO: 239587 - DNA, 122 bp, Homo sapiens
ggagctcagttcaaataaaatcaaggacgtgaggaaggagtggtgaatcacccaggccgccgtctttctagggctgctgaagaaagagcaaatctttgcctacgttagtctttcttcctatg

SEQ ID NO: 239588 - DNA, 122 bp, Homo sapiens
gtggctcgcgcctgacgctggctcccagcggctggggtatcaggtgacccggctccccaccgaggtgactaaaatcccagtgatgctgattatttggatttcctgggcagggccgggcaccc

SEQ ID NO: 239589 - DNA, 122 bp, Homo sapiens
ggatgcatagtaggcactcaataaaacttcttgaacgagtgaacgaacaaggtggtcaggcgtgggccaaatgtccacgggaaaaggggtgtagagaaaattctccaatggaagttggcggg

SEQ ID NO: 239590 - DNA, 122 bp, Homo sapiens
agacaatccttagggtcattgtgaggattaaatgagatcatgaccatgaaacctttagcacgtttcctagcattcaaacattattccaaaatattagttactgtactatggaatgagtgacg

SEQ ID NO: 239591 - DNA, 122 bp, Homo sapiens
attactatgctcatttttcagataaggacactgcagcccagagaagaaacctgcaaaggccgtgttcacacactcacaagagatatggctgtgatttggatccagatgtgatgggctgacaa

SEQ ID NO: 239592 - DNA, 122 bp, Homo sapiens
accgtctcccactcctccagggacccggggtcccctttcgtcagggtcacttctcctgaacgccgggcagaacctaactcctctgactagaaaaagatcagaaaaattgaggccactgacac

SEQ ID NO: 239593 - DNA, 122 bp, Homo sapiens
tcacatgtttcgtttctagtcctgaaacatggttaagtgcttgcctcctagggcctctgccgcaggcttttggtttggaggctctcctttgccactccacccctctccactcttctcctctt

SEQ ID NO: 239594 - DNA, 122 bp, Homo sapiens
tctttcccctccggctttccttccccttctctcccgccttctccttattcataccagaagcgcctcagctctgattggctggagctctgtgctatctcagccaatcacaagccgggctgtgc

SEQ ID NO: 239595 - DNA, 122 bp, Homo sapiens
cacagaggtcactacaataacgggtgctgcagccacccagggaacacctcgcctggtacccgcagccattttctgcaaggggtacagctgggcaaatgctcagaggtgagagaaaaagagca

SEQ ID NO: 239596 - DNA, 122 bp, Homo sapiens
atcaaccccagagaaactttcctagggccagagagcatctcaaccgcgaaagtccgtttgcggcctccttctccacttcaggcctgcaaagcggctgacggcattcgcagtggctaggcaac

SEQ ID NO: 239597 - DNA, 122 bp, Homo sapiens
cacctgtaatcccagcacttttggaggccaaggcaggcggttcacctgaggtcaggagttcgagaccagcctggccaacatggcaaaaccccatctctactaaaaatacaaaaattagccgg

SEQ ID NO: 239598 - DNA, 122 bp, Homo sapiens
gagtggaatgccttacaaaaggaaatctgcctggcgccacggctttcctccgagtacggacgcctgttcagtctctttctgcttccggctgtgcccggtaccttctggtggttggtgcctgt

SEQ ID NO: 239599 - DNA, 122 bp, Homo sapiens
agagaccctttgccctctgggacagctgcttgattcgccggggggaggtgctggcactgacggacatgctttgtgtttacggatttgggtcctggaatgtgtgaccatctgaattgttcctc

SEQ ID NO: 239600 - DNA, 122 bp, Homo sapiens
ggtgcctgccccctccaaaaacaggaagacctcgcatagcgcggctggacttcctcttcacgaccctgagcttccaggatttgtgactcagcgaacacccggattccacgtgtgttcagggc

SEQ ID NO: 239601 - DNA, 122 bp, Homo sapiens
gaactacggaccaaaactgtagaggatatcatgacccagctccaggactgcttcatgatccgcagcgatgccatcctggacttcaacaccatgtcggagataatggaaagcggctatactcg

SEQ ID NO: 239602 - DNA, 122 bp, Homo sapiens
cgcgctgcggctcacgctcggagtgcgggcactttcttcctgtagggcgctgtttcgtcgcgaaatatattctttgtgtggttcgctcactcgtgcctggttctccgagagcgcagcgcggg

SEQ ID NO: 239603 - DNA, 122 bp, Homo sapiens
gtggggtggcccgcgtgtgtctgtgtgtgtgtctgggagcgcgcgtgtgcgcgcagacgccgccgccccctcctccccgccgccgcgcctctgcccctgcctcggcggggagggcgcccggg

SEQ ID NO: 239604 - DNA, 122 bp, Homo sapiens
ttcaccctaccatgattattgcaattattattatttatttttcatcttttttcaggttgacgatgtgtcacactgtgtaagggaatcgcatggagatgggcattccgaactgttaatgggga

SEQ ID NO: 239605 - DNA, 122 bp, Homo sapiens
tgaaacagccctcttaataacactgcctcacacagtctacccaggataacctgcaggactcgttggctgacagcatgtgcagaatggtgagctactgctcattgctcactatgctgctgtca

SEQ ID NO: 239606 - DNA, 122 bp, Homo sapiens
caaactgagaacacacaaccctccctctttctggtcgccgaagacgtggccactgcgcagcgggccgtaggtttggacccctcatggctcagagcccctcatccgtttcccccctccagtcc

SEQ ID NO: 239607 - DNA, 122 bp, Homo sapiens
tggtaggaaggggaggatgtaagcgatatcatcaagtcagaatcatgagttcttggtgcccggatgttagaggagggaaaaggtgaagatggctgaagctgtacactttcatgatggtggaa

SEQ ID NO: 239608 - DNA, 122 bp, Homo sapiens
tatgagaaagccaagatttcacaatatttcaacccaactcgactttgtctaataccagtgcgtaccaatggcattattaatccagactgggcgatgaattaaaaactctgacgtgacgtttc

SEQ ID NO: 239609 - DNA, 122 bp, Homo sapiens
tgccggctccaacaagaagtaactttccaggaagctgccggccccggcagccgccaggatcgctgcctgcgctgcgctggccgccggggattcacccagggaggcggggccgctggggaagg

SEQ ID NO: 239610 - DNA, 122 bp, Homo sapiens
acggtgcggccgtgctccggctcaggccctccgcgcggtaggaaacggcgagggccgtcccggggagcagcctcacttcgcagctttgctcgccttggtagggaaatggccttgggcggagg

SEQ ID NO: 239611 - DNA, 122 bp, Homo sapiens
aattgtagatccactgacagcttgcagggcgcacctgagtcgcagacactcaatgacagccgttgaaagcagccggctgcaaagtcacagagcagagcagctcaagactgtgggaacccacc

SEQ ID NO: 239612 - DNA, 122 bp, Homo sapiens
aagagttctactaaagacaggagaccattatttctgcgttttcatactctttattgccaacggtttaaaatggtcaacataaaaaaaaagacattttgataataaatactgctctttgggct

SEQ ID NO: 239613 - DNA, 122 bp, Homo sapiens
cccccaagtttcctccctccatggccctacgcccatagttagctctgtccagccctctggcggccctgatccgaaaggaaaccccaaagccagtacccggcagcaggagcctagtttgggtt

SEQ ID NO: 239614 - DNA, 122 bp, Homo sapiens
tcaaaggtgtcaattaagcctcttgccaacagcaacccccatcccgacaccactcccttccggaagccccagtgctgtcagtactttgcactgaatcataatgaagtggccctgggggcaag

SEQ ID NO: 239615 - DNA, 122 bp, Homo sapiens
ttgggctgccttgggtgtggctgcataccgtgggcccagggaggtggggagtggggactgcggggagtctggggagtcactgaagatgcaggtgctgaaagacacagccatcttcaggcaag

SEQ ID NO: 239616 - DNA, 122 bp, Homo sapiens
gttttcagggtgcatctgcaccgagaggcttgaggcagcaatgacccctgggctgcagttcggttgcaggcgctggtggcgggcagtccaggttggagggtggagatgggccaaggtcacag

SEQ ID NO: 239617 - DNA, 122 bp, Homo sapiens
tggaaacatcacagtgtaggaggattatggatggaaagtgcagctggaatgggaaaaggtcgaaacctaattagaagccttgggccaggggtagcctgtgatcacctgcgattgtgtttcag

SEQ ID NO: 239618 - DNA, 122 bp, Homo sapiens
tcaatgcggcagatgctgttggtagcacgaatctccacaccgaggtgggtcctcccacgacggattcctccaagcacaagagctggcctgggactaatgtggacagaggccagcgctcatga

SEQ ID NO: 239619 - DNA, 122 bp, Homo sapiens
cgctctggggcctctgggtgggtctggcctgttgggggctgaggagctcgagggtcagggcgcccagtgctggaccgcgcaccctcggcctgggctccttgccggtgcttgcgcgtgcaagg

SEQ ID NO: 239620 - DNA, 122 bp, Homo sapiens
ccagtacagatgtattgcagaaataatctcccatcccacagattgcctttctacgtcttacggttctccctccctccctccctcccttccttccttccttccctccattcctccctacctct

SEQ ID NO: 239621 - DNA, 122 bp, Homo sapiens
tgagccttctggtgggtgccggctgctggggctctctcaggcttcctcgggcaggagtgccgggagaaagttactctttatcccactctctcccggggcctactcccgcggagctcctcggc

SEQ ID NO: 239622 - DNA, 122 bp, Homo sapiens
gcggcacgcggccgggcggggccgggcgtgagtgacggccatgcggaccaatggggcgggcgcgcgccgccgccgccgcccgcgcggcccctgacgcgggcccgggcgccgcgccgctgcgg

SEQ ID NO: 239623 - DNA, 122 bp, Homo sapiens
cttgggcggtcaatggaaccgggtgcggcggagcaagggacggcgcccctctgggaggctcgggccccacgggagcccactacggggtgcgggtggcagggggggcttaggcatggtgggct

SEQ ID NO: 239624 - DNA, 122 bp, Homo sapiens
tgccagtatgggggtagaccactcaatctatcacatggcctattgacatgtgattcaaagcgggttctgttgttgttgttgttgttgttgttgctgttttttggaggacgaggagaatggac

SEQ ID NO: 239625 - DNA, 122 bp, Homo sapiens
aacagttgtcgttggaacagtcgtcattggaacagtcgttgtcgttggaacagtggtgctcgttcgaacagtcgtgacggttggaacagttgtgacaattggagtagtcgtgaccttggctg

SEQ ID NO: 239626 - DNA, 122 bp, Homo sapiens
tgaaaagctggaaagcagtgggtagcggctcgggagaagatgaggggtcagattagaagacgagaaaggaatccagtccgccccagacaggacaagtccggaaggatggaggcagcgtttcc

SEQ ID NO: 239627 - DNA, 122 bp, Homo sapiens
taacttccaaaacctcaggaacagtacaaagaattgaaaccctcaatatggcagcacagccggctgtagtgtatatttagggtacaccaaatcaggtattcctggtggtcttgtgcacttta

SEQ ID NO: 239628 - DNA, 122 bp, Homo sapiens
cgcccctcacccgctcctttctgacgctgtggtggttttcgttcgcagcccagaacattgcggaagtttctctacccatgcggtgtctctatggtcgggtgggtggggccaggaggaagatg

SEQ ID NO: 239629 - DNA, 122 bp, Homo sapiens
caggaacctcagattttgcaaccagactgtttactcgctccctaagcagccatgcgcaggcgcgaaactcctccccaggccagacccggcctgcgcatgcgttcaagtgagcgcgcagacgc

SEQ ID NO: 239630 - DNA, 122 bp, Homo sapiens
ctccttcttgagcagcagctcggtcacctccaggtgctcgttgcccacagccagctgcagcgcgttctggcccatgtagtccacgcagttgacgttcagcgtcttggactcctccagcatct

SEQ ID NO: 239631 - DNA, 122 bp, Homo sapiens
taaccagcatttactgagtgttcattaagtgctgttttacacacaacaacactgaaagaacggtatttcccctctcacaaaagaaactgaagcacagaaaaggaaaagaacttgcccaatgc

SEQ ID NO: 239632 - DNA, 122 bp, Homo sapiens
gcaggtcatgagagccgagcgccaccaaccccggaagaaaatacatatccgctgcgtttccgccctgagccccgagatcttggctgagaaagcaaagcgtgatgaccgtggggaccagagct

SEQ ID NO: 239633 - DNA, 122 bp, Homo sapiens
gtgtgcacactcgtgtgcatggctgtgaactggaatgtgtccctgtgtgagtggctgtgccggtctgtgcaggatgtcttctccagaacccatatctgtctctactgttgggtggagggcca

SEQ ID NO: 239634 - DNA, 122 bp, Homo sapiens
gcggtgtgacggggatgctgcttggggagttgcagatgacggcctcgccctccacgcgggcggggtgtggcggcgactccccaaaaaggcacagcaactcgtcctcctcgctcagggcaggg

SEQ ID NO: 239635 - DNA, 122 bp, Homo sapiens
agcggtgacgggtggggcagtgtgagatctgagccgagggcccgcatcaaagtcccctttcggcttctccatctgtgacatgggttgcacctgctctgactgctgcttacgagagatggtga

SEQ ID NO: 239636 - DNA, 122 bp, Homo sapiens
taagacttttctccatcttacatgggtgtggttcctggcaccccaaaacaaagctggggccgggtgtggtggctcacgcctataatctcaacactttgtgaggctgaggtgggtggatcatc

SEQ ID NO: 239637 - DNA, 122 bp, Homo sapiens
atcccgacgaaggtgttgggacccggactgcgtgtcccgacgctgggctgtgctactgcccgcgcccgtgcggctccagctggtgcgttctcccttccgcgctcacagactttgacagcgcg

SEQ ID NO: 239638 - DNA, 122 bp, Homo sapiens
atcaacactgagccccgtggcccgctcccgggtcagcgcgcctctctgctctcaccggggcgggtccgctgttggccccacccactcccagcccacccggccccgcaatggcccggcccagc

SEQ ID NO: 239639 - DNA, 122 bp, Homo sapiens
ctaaatgaagggtaaggaattccaggagagtacaggcgtcaacaggtgcccacaggaccccgcagcagccctccaaggtgggtattgaggaggagtttcttcacctgagcctgaggatgaga

SEQ ID NO: 239640 - DNA, 122 bp, Homo sapiens
tgaaaccagtagggggatagcgtatagcataagtaaagctttttggacatcaacaaactgcgataatctacaacagacagcgggctctggaaggtttgacctgctttagagagagatttccg

SEQ ID NO: 239641 - DNA, 122 bp, Homo sapiens
ttacagagtaatgtggtaggctaacaagactttgatgactttgtgtcagtcacctagccacgtgcaacaagaaaatccctcacacactaaatttttctcctaaaaccctcaagaaagcttaa

SEQ ID NO: 239642 - DNA, 122 bp, Homo sapiens
gtaaaatttaagtaaagggactaatttttaattgaagagtttccacccaagtaagtgtcccgagcatattctattcattttttctaaacacagtgaggttgactctattatcttaaatttac

SEQ ID NO: 239643 - DNA, 122 bp, Homo sapiens
ttcagttgtggagtcattaagtcagaaaattcagcaaataagcaccagccccacactggtcgcctcaggagtaaaatcgggaacaccctccaccctgctctctagggagaaacttgcaccag

SEQ ID NO: 239644 - DNA, 122 bp, Homo sapiens
ctctggggatgatgcttagaggagagtcattgctgtctgtgttggaagctggggagtcttcggctatattagctgctgacaaatttaactgctcagctttgacaccaagtttctagagacca

SEQ ID NO: 239645 - DNA, 122 bp, Homo sapiens
tatcacctggctcctgcaccctctggcttttaattaggctgagcctttagagaaccactgcgaaagatctagatgtttttatttcccttgatagcttatgggaagtttgcctaaggtggcac

SEQ ID NO: 239646 - DNA, 122 bp, Homo sapiens
ctcgtccacattcccagaccctccccagagctcctcctgcctcagcgagctcaccacttccgaggcccaggaacagagcggcttgcagttttcctgtgcctcctgctggtctccagcttggt

SEQ ID NO: 239647 - DNA, 122 bp, Homo sapiens
tctggggccctcttgatctccctcattatcggagctccttctcccagggccagccaggggcgccacacagcgcagccttttgcctggggtcagagaaagcttatgggccagggcaacaacaa

SEQ ID NO: 239648 - DNA, 122 bp, Homo sapiens
gcgctgggggctttgagagccgtttgggtccttctgtcggggcgggggcgggggcggggccggctccactcccaggggcgcagcaggcgtggctggaggcgagaacgcgcccccgtgagcct

SEQ ID NO: 239649 - DNA, 122 bp, Homo sapiens
agaaccctctgtgaaaagccatttttcattcaaccagagtctggaacgcaagtctgttcccggtttccttgacctgggcagttcctgggaccaaggggcagcccctcgcaggccgggtttcg

SEQ ID NO: 239650 - DNA, 122 bp, Homo sapiens
ttgggtgtaagagtacatctggcaacagattacggaagcataatcaccaaccccatcagacgttaccttatgtgtagggaaaggcaaggactagggtcatttatcttctaaggaatatagtg

SEQ ID NO: 239651 - DNA, 122 bp, Homo sapiens
gacgccccagccgggtctgataaagccccgaagccgatctaaggtcaataaaccaggcggcgtcaggcttgggccgagggccgggaggagaggagagtggagccctctcaggctggcggcgg

SEQ ID NO: 239652 - DNA, 122 bp, Homo sapiens
gtcttgggctggggtcttcgcgcccgtcctctcgatctgtcctagcagcagccctcgaagcggttcttttgaggctcttgccttacagaagtggaaactgagtcatggggaattggccatgg

SEQ ID NO: 239653 - DNA, 122 bp, Homo sapiens
cgctgagcagccgcaggaaggtgagctggaccacacccactggggagccctctgagtccacgtaagagaactggaaggagagagagggctggcctcagagggggagagagagggctggcctc

SEQ ID NO: 239654 - DNA, 122 bp, Homo sapiens
tgccgggcccaccgagcccgccgagcccacgcccacccggaactcgggctggcccgcaagcgccgtgcgcagtctcagtttccgccggcgcctctagtcttgcttccctccagtccattctt

SEQ ID NO: 239655 - DNA, 122 bp, Homo sapiens
ttcggatgagttcagcccctggctaaaatcagccttcctcgtggctccttgcgaatacagcggaccattcatcaattctgcacacctcgtgaaccacttccagagggggctgctgggtcttt

SEQ ID NO: 239656 - DNA, 122 bp, Homo sapiens
aaactccagcccgggccacacagtgagatcctgcctctacaaaaaacaaacaaaattagccgggtgtggtggcgctctcttgtagtcccagctacttgggaggctgaggtgggaagattgct

SEQ ID NO: 239657 - DNA, 122 bp, Homo sapiens
atgaaccaatgatgtacccctaggcaatttacctaacctcggcttgccagtttcctcccgcgtgaaacaggacaataaacgattatgcctcttagggttgtgctgaggaatacatgtgtatg

SEQ ID NO: 239658 - DNA, 122 bp, Homo sapiens
ccggcgggcggcaaggctccgggccagcatgggggcttcgtggtgactgtcaagcaagagcgcggcgagggtccacgcgcgggcgagaaggggtcccacgaggaggaggtgagagtccctgc

SEQ ID NO: 239659 - DNA, 122 bp, Homo sapiens
tgagaggatttgacaattgtgagccggaaagctcgcgtgttggcgggaggccagggtccccgccactccaggcctgggcctgcccggcagcgccctctgctggccggagccgcgacggcggg

SEQ ID NO: 239660 - DNA, 122 bp, Homo sapiens
gcccggctcccctcccccacctctccaggagcaattgtttatctgccagagggtgacaggcggctgtggctggcatgttgagccgccgtccagagatcagctggcggctgctgagcaaacag

SEQ ID NO: 239661 - DNA, 122 bp, Homo sapiens
cactctggagattaggtgcttaaagctttcgaaaacggcagcccgctttgttactgtggccggttcctggctgggaacaggctccttttcggcactacctacttgatacgtgtgatgttgtc

SEQ ID NO: 239662 - DNA, 122 bp, Homo sapiens
gagctagacatcccgggagcccaggcacgaaaaatgttcaccctcctggacgtggtgaaccgcaaggcccgcttcatccacgatggctctgaggacacctccgaccagtgtcagtgacggct

SEQ ID NO: 239663 - DNA, 122 bp, Homo sapiens
ggcggccggtatattcggcggtttacggtaatgggcgggccccaaatccccatgtggtcccgacatcattgacatggcggaatcccccatcaaaccctcctggtagttatttgagcggcggc

SEQ ID NO: 239664 - DNA, 122 bp, Homo sapiens
ccgatactcaaagggatggacctccttgtactggaacttcatggtgaatcacagggcttccgtgatccccgcgcagggcctgcctccttcgccgctgaccgctggccacgtcccgctccctc

SEQ ID NO: 239665 - DNA, 122 bp, Homo sapiens
gcctcagagtggagtgtggggaatgtttctggacctgagcgtctccaggagaaatctcgacggttcccagaagcagttatttgtgtacccagggagtgggggccctcggggagcagcacgga

SEQ ID NO: 239666 - DNA, 122 bp, Homo sapiens
gattggggaagcatttgaaacctgaaaagcacagtgattaggtttatatttctttccttccgtcatgctccctttcggattactaattaaggctttccaattttccaaatatttgaagagat

SEQ ID NO: 239667 - DNA, 122 bp, Homo sapiens
gagaaagagggtggaggcaggaattcgggccaggctctcccggagctggccaggactggccgagcccgaccccgcactaacccgcgagagaggtagggcagcgagggtccgccgcggcccca

SEQ ID NO: 239668 - DNA, 122 bp, Homo sapiens
ctttccaccgtgccaaggctccttacacgcatcctcatttttggcttcaggaggagaaggcgcatggctgggtcacgtgctcactcagcagaggaggcactggccacttctgtgtcctccgg

SEQ ID NO: 239669 - DNA, 122 bp, Homo sapiens
acgccagcttattttaagtcctgacctcttcccgggaagggactctgacatggaaagccacgtgctgtgaagcaaccatggaccccggccaagggaaacagaggcccccaacagcttcctga

SEQ ID NO: 239670 - DNA, 122 bp, Homo sapiens
cgcgcgcgagacgacggggccaggggggcgctctgaggagccacaataggccagacggcacgcgcgtccacgagggggccgggagccgcgaagtggcggcggcggcgacgacgccggcgggc

SEQ ID NO: 239671 - DNA, 122 bp, Homo sapiens
gggaagccccgctgcctcgaccgccgccaccgctccgacgtacggaaactccccgtgctccgcgcctcccagcaccgtcacccccagctcgccctggggtccccgcttcacggtgcattcgt

SEQ ID NO: 239672 - DNA, 122 bp, Homo sapiens
ctggagttgggcggcccggaagcaggactcttctccgactgccccagctgaactcccctccgcgtccacgttcttctgccgtctggtcttccgggtgtctgctggtgtctgccagggtctgc

SEQ ID NO: 239673 - DNA, 122 bp, Homo sapiens
ccggatggcagatgcctaacagagatcacatcccgatgcccccaccacaggcaccagcagcgggtgtgatctgccaagcaggagagaagtgcccagcttctgtcaaatgcgttcgtgacccg

SEQ ID NO: 239674 - DNA, 122 bp, Homo sapiens
tggaaaggtggaaactgcaagaggcacccccattacagactgaatccaggaaccttacaacgaatatttgaaacttaaaaatagagactcttagcgctgtgggatcataaacttatagaata

SEQ ID NO: 239675 - DNA, 122 bp, Homo sapiens
tctggtctcggctgccctgacagccactgggctccaggcaggcctgggtggtgaggacggcgctgggctgcggccaccagatccatggcttccctggacaatgacgggtcagccagacgctc

SEQ ID NO: 239676 - DNA, 122 bp, Homo sapiens
gcagtgagctatgatcctataagtgcactgcagcctgggtgacagtgcaaaaccctgccccgcctttcccctccaaaaaaaaaccccaaaaaaacccccacaaaaaaccaacaacaacaaaa

SEQ ID NO: 239677 - DNA, 122 bp, Homo sapiens
aggcaactgaatgagacctttacaagccagggtggtggcctcccttcagaatgcctggcccgtttcccagtgtgaaacattccccaaatatgcaactttgtgagcatcccagccgcctgcgc

SEQ ID NO: 239678 - DNA, 122 bp, Homo sapiens
aaatgttcaacaaactgagctatgtccataccacggaacgccacccagcagtaaaaccaccggcacacacctccgagaactgcgcagagtgggcaggcagcccccaaaggctgcgtactgtg

SEQ ID NO: 239679 - DNA, 122 bp, Homo sapiens
gttccctctctgggccacgccccagccccgttccttctttttctttgctgttgaagtctgcgcagccccttcccacagtttacccctgcaattcgttacccttatttcacacccctctccct

SEQ ID NO: 239680 - DNA, 122 bp, Homo sapiens
ggatgagccaaccactagacgtgtgactcagcccaggcaacactggagagctgaacccctcggacacatgaggaatcaacatcttgaatgccactgagattaaaacatgtaaccatgacacc

SEQ ID NO: 239681 - DNA, 122 bp, Homo sapiens
gaacgaagacaaagaagacatcggagggctccttttaggagatttgcttgaaggcctccgcggggatcttgccctcggtctagagaaagtaaagaaaaggagttgggatgttagtagagcca

SEQ ID NO: 239682 - DNA, 122 bp, Homo sapiens
gagggccgggggcggggacgggggtaggggaacactaccaagcgacagggctggtgtcagcggagtccagagaagtgagggtagggtgagaaacaaaaaggtaaaatccattgacagccagg

SEQ ID NO: 239683 - DNA, 122 bp, Homo sapiens
gaatattctgtcaaacttggggttgaaattcgccatcttctggggcaggaaagtgatggacgactgtgcctttgcaagaatcgacgcccacactgcccaggaagtgccctcgcgggccgggg

SEQ ID NO: 239684 - DNA, 122 bp, Homo sapiens
cattctggcttatctcctgacttactgagtgaacttgagcaggtccctttcgcccatgggcgtcggtttcttcatctgcaccaaggagacggaaaactggattacgtgtcgctaaggccccg

SEQ ID NO: 239685 - DNA, 122 bp, Homo sapiens
ccactggcggctggcactgccgaggcggagagcggcgctaacttatagcccgctttggggcgggccgggggcggggccccgcgggaaggcggcgacctgggaggccacccattgcccagtcc

SEQ ID NO: 239686 - DNA, 122 bp, Homo sapiens
acaggcttcagggaggggcccaagcctgttaccttcactccaggatctccaggcatccctcgggctccatcagcacctgcccggccctgggagaacaagggaagtgtcagaacaagcagggc

SEQ ID NO: 239687 - DNA, 122 bp, Homo sapiens
gtgtcgaccccgcccccacctcctatcgagccctggctctccgggcagctggaggggtcgcgctgcgcctgttggggctgcacctcggaccagggcttctgctgcatctgcagccatgtcgg

SEQ ID NO: 239688 - DNA, 122 bp, Homo sapiens
ttgtgtcgggcccccaggccccaggccagtgtccatcagccaggtgctcagctcccagtgcgctgaagctcagacccttcctggcaccctggtgtccagcactgagctgtggtgagcccatc

SEQ ID NO: 239689 - DNA, 122 bp, Homo sapiens
tctgggcacaacctcgcctttggtcgtggttttcccgttgaataatgctgcagaggacagcgagaaaggatagtgtgacaaatgcatcgcatatgacagctcacagatcgcctctgcgccca

SEQ ID NO: 239690 - DNA, 122 bp, Homo sapiens
cgcctgcgcggttgcggagctgcgggcggcgctgcatgggagcacgtgatcttgcggggtcgggctctagctgcagttgtgcagctggcggggcggtggctgcgcaagcgcaatattcattt

SEQ ID NO: 239691 - DNA, 122 bp, Homo sapiens
ccagctcctgcctgggagatacagcacctggtggctggccctgccccaggacgtcactcccggcgctagggccctggaactccgtccttccggcgctcagccttctcagtctccttgccctc

SEQ ID NO: 239692 - DNA, 122 bp, Homo sapiens
agagcatcggcataggtctctccatgtggcttggagccctcactgcaggacactgcattccgagagggattgtcccaagggcaagcattccaaagacacacatggaagcagcttttcttcct

SEQ ID NO: 239693 - DNA, 122 bp, Homo sapiens
accccagatccctcatagtaagcgccatttccgcacctgtttctgtgcatgttgaaaccccgcgtgataagaagttgacagaatggatagctgtcatggggccagggtggcagtggcccagc

SEQ ID NO: 239694 - DNA, 122 bp, Homo sapiens
ttcgtaaacttggttgtgtgcgctgtgcagatgtcagtcaccctgtgtggtgggcaaagccgacttctccgcctctgtagctccgaaactacaatccccagaggcctctgcggtcacttccg

SEQ ID NO: 239695 - DNA, 122 bp, Homo sapiens
acctctgatgctgctgaccctggagatagactagagttctcagcctaggtgtgtccatggcgtcaggaaacccttggtcctctactctcatgcgtgtgtccgccctcactctccaggtcctc

SEQ ID NO: 239696 - DNA, 122 bp, Homo sapiens
ctcctgagcccgtgcttcgggtgagggggcgggtcttccggccctctcgaaaatcatttccggcatgagccggaagaccgtcccggatggcctcggggactgccagtgtgtggaggtgagct

SEQ ID NO: 239697 - DNA, 122 bp, Homo sapiens
gccattaggtgaggccctcccttttccgggcctcagtttctcctactgttcgtagagcagcgggcgatgagacccgtgatgatgctgggaccctcccaacccaccctaaccttaggacgacc

SEQ ID NO: 239698 - DNA, 122 bp, Homo sapiens
cggggcctcccttctgccctgacggtcaagggtagttaaacccctgagggcttgggtttgcggctctccagcctcatgccctcaccatcccccgctccaggccgactcccaccccaccctag

SEQ ID NO: 239699 - DNA, 122 bp, Homo sapiens
attggcgtgaaggtagcggatgattcagccataatttacgtctcgggtgatatgggcgatcgatgagaaggcggttgaagcgtctggtgagtagtgtatggctaggaatagtcctgtggtga

SEQ ID NO: 239700 - DNA, 122 bp, Homo sapiens
gccaaccaatcgcctacaaagatcatttcctcgggctgcaattcaaccaatccaagtactcggtgttgaagggctcagtgacaattaaagatggctgcgcccatgtaacatcactagcgacc

SEQ ID NO: 239701 - DNA, 122 bp, Homo sapiens
cagaagcgcgagaacgaggtcctggaagcctggaagtccctcctggacgcctgtgagagccgcagggtgcggctggtggacacaggggacaagttccgcttcttcagcatggtgcgcgacct

SEQ ID NO: 239702 - DNA, 122 bp, Homo sapiens
gccatgaactggaagtgtggagtgactttttgcctggccacaccccccagccacccctcccggggcttggccttggtcacggcccattctggagccttgggctcagctcatgagtgcacact

SEQ ID NO: 239703 - DNA, 122 bp, Homo sapiens
cacccgtgtacttatggaacaggatatagggggaggggagtaaaaaatcatagaaagtcacgagtggaaagacccaaaccaaacagaaattattgatccttaactattgagtatatgctttg

SEQ ID NO: 239704 - DNA, 122 bp, Homo sapiens
tttcttggcttccttttttttttttttgagacagagtttcgctcttgctgcccaggctggcgtgcaatcgctcggtctcagttcactgcaacctccggctcccggatccaagcgattctcct

SEQ ID NO: 239705 - DNA, 122 bp, Homo sapiens
ttctagctttgcatttaataaataaaagactgaaataaggcaagactcaaaatctggtgtcggaagaggggtgatgaaaaaaattcaggattccttaatatctagggtgaccagataattat

SEQ ID NO: 239706 - DNA, 122 bp, Homo sapiens
ctaagagatctcacaggtgtggtttggtggagagtgagatccaatggtctgagactgtcacgtaagtgaacttcctgggggctgtagttccttatactttatagggttctgcctctagctca

SEQ ID NO: 239707 - DNA, 122 bp, Homo sapiens
gggggtgaattttaaaaaaaggcggggggggggggttcaggagggtgagcggtgagttcacggggccacgagacaccacagctgagtggggaaagggctatatgtacaggaggggcagggct

SEQ ID NO: 239708 - DNA, 122 bp, Homo sapiens
gcggggcggcaggagggactgggaggcccacagcggtcccgtgggaaagctctgtagggacgggcaggagtgaacatgttgtgttttgtgggctacaaacaggctctatttcctctctgcct

SEQ ID NO: 239709 - DNA, 122 bp, Homo sapiens
gatgggcggccgggcagagacgctcctcatttcctagacgggatggcggctgggaagagacgctcctcacttcccagactgggcggccgggctgaggggctcctcacatcccagacgatggg

SEQ ID NO: 239710 - DNA, 122 bp, Homo sapiens
tgagttccatggtgcagtggcttccagctggagttctaagggcaccccttgagctgcccacgtgtctttgcacgtgaagtaggtggctctctttaaggttcctcaactttattgggaaacat

SEQ ID NO: 239711 - DNA, 122 bp, Homo sapiens
cgtgcaggctcaggaggggcgcggcctggccacactgggatttcagatgtcacagtactccggaacgggagaggatgatttcccgtggttttgaggcaccattgctggtcgtttgctgcggt

SEQ ID NO: 239712 - DNA, 122 bp, Homo sapiens
gcgagggcggggccgggctcggcgacggcgcccgggactcccccacgccgcccgcggccgcgctcccgaggagccaagcgctgggccccgccccttccgagccccctccgggtgggggacgc

SEQ ID NO: 239713 - DNA, 122 bp, Homo sapiens
ggccgctccgaggccggggcagtctgacttccagtgccccatttgttggcagttagggcacgggcgtgttggcggcttggggtttgggcactgttttgcccaatgacctggattgccacact

SEQ ID NO: 239714 - DNA, 122 bp, Homo sapiens
gcctggccgggagggctccggccggggcagccgctgtctccgcctcgggccatggtcgcgcggacacgatcaccggcttcacagaccaggcgacccaaggtacttacgcctcttctgtgccc

SEQ ID NO: 239715 - DNA, 122 bp, Homo sapiens
tctgcgcaggtaagatccgttttcagaccaaaaccctgaaaacaagcgcagccagtcaagcgaacggaagcgcaggcccggcccaggctttgtcccggcccgccctggtcccagccagtccg

SEQ ID NO: 239716 - DNA, 122 bp, Homo sapiens
taccttctgctcagttgccgcctgggtctcggttggggaatttgcagattgctttggagacgctgagagaacctttgcgagagcgccggttgacgtgcggagtgcggggctccgggggactg

SEQ ID NO: 239717 - DNA, 122 bp, Homo sapiens
cggaacgccagtgcctgtggtcggggtggtcaggcctggacacggagactctgatctcaccgggagttccccaagccccgcccacagcacgatcctatcatctgctgcccgccccagctgga

SEQ ID NO: 239718 - DNA, 122 bp, Homo sapiens
ctggggacctcaggcacaatgggcacctactcccttcccctagagcaaaggctgagctcacggctggcagctgcccagctcacacccctccccacccactggggccctgctctgcagcgtct

SEQ ID NO: 239719 - DNA, 122 bp, Homo sapiens
cagcttcggcaagactagctcctgccacctgtccatcgacgcctcgctcaccaagctcttcgagtgcatgactttggcctacaggtagggacccccgcgaccccctgaggccccggccggag

SEQ ID NO: 239720 - DNA, 122 bp, Homo sapiens
tcgttttcccagcggaattttaactattctaaggatgtccttacagccagttccccactccgctactcagagtgtgtcagactttaccctgtccattcaactccagaaaaaccgggaggtct

SEQ ID NO: 239721 - DNA, 122 bp, Homo sapiens
ccctgtgtgtcttgggtagtttgaactagggtggaggcttctgggaatgtggaagaaaggcgaggttttacggacattgcaaaccacaagctggacttcgggagacgggagagggggatggg

SEQ ID NO: 239722 - DNA, 122 bp, Homo sapiens
ccctgctgccaccacctcggtgcacacacctactggacgcacagacacacgcatgcccaccgccactcgggcacgtgcacacacacaagcacactgccactctccggcacgcgcacacacaa

SEQ ID NO: 239723 - DNA, 122 bp, Homo sapiens
atgctgagtgctgattggctgctcttggctcctcccctcatcccgcttttggcccaagagcgtggtgcagattcacccgcgcgaggtaggcgctctggtgcttgcggaggacgcttccttcc

SEQ ID NO: 239724 - DNA, 122 bp, Homo sapiens
ataactgacaggactgtctctttttggaatcatgatcttcaagctaatcattttctgtcacgggagagcaacaactatctggaccggtggcacaggggtaaaagaatttaccaagacagttg

SEQ ID NO: 239725 - DNA, 122 bp, Homo sapiens
gggcctgcatcgggacccccgcccactccggctgtgccgccctgggcccggggtcgcgggcgctcatctccgccgcgcccacgacgccgctgccattctcgccgcctcctcctcccgggctg

SEQ ID NO: 239726 - DNA, 122 bp, Homo sapiens
cagggcatttaaaatgtttcctaatcccagtctactttattgatccaagagccatcccaacgccttcctgcttgaaggccatccctccactcacccagtctctatcatggtcttatctgccc

SEQ ID NO: 239727 - DNA, 122 bp, Homo sapiens
tccctttcgtgctcaggcttcacacgcacagcccggcagatgcccaggagaccttggtggcgggctggtagtattactcatctgacgtccatcactgtagacaaaggttgtggagcatcgcg

SEQ ID NO: 239728 - DNA, 122 bp, Homo sapiens
gcaggacaggtcctccctcaagcccctggatggagccggaccctgcccgcgcctccacctcgaacctctggccttccggactgctgtctttaagccacctcatttgaccagaccctgacagg

SEQ ID NO: 239729 - DNA, 122 bp, Homo sapiens
tgttctggacgcacagcacccgtcctaggaaaccaacaccctaccctggcgggccgggcccgcagcaagaaaacacacatctacgtggctgtcactcggctggcgggttaacgaccccgtgc

SEQ ID NO: 239730 - DNA, 122 bp, Homo sapiens
tttttccaggtgtatgattcactcttttctaccttattttgtgacaaaatgtggtctgtacgaggcccccactcagtatcaacacaggacgccttccaaaacaatgcaagaatgtaggttca

SEQ ID NO: 239731 - DNA, 122 bp, Homo sapiens
ggggagagcaggaaaggaagcggggtggcggtggctaggaagcgactgagccttctcgcccggccggcggaagagggagccgggtcccggcgcgccgagccagccgcccctcgcgcagttcc

SEQ ID NO: 239732 - DNA, 122 bp, Homo sapiens
aaacataaaaaaaaaaaccgcctccacaggatggaaaacaaacccaccaggttaccactacgggctcgggcagcccgcttttattctctcatctggccccacccacatcctgctgattggtc

SEQ ID NO: 239733 - DNA, 122 bp, Homo sapiens
ctgcgctggagcaggtcaagcagcagtcgacagcgttaacctgtcagctatgggaggaggcggtgcgaggcgcgggctggtcggagccgcgtaccacgccccccggcccgggtggaacgagg

SEQ ID NO: 239734 - DNA, 122 bp, Homo sapiens
ttaggggacaaaacagggccatttggagccacgggtggaggagcctctgtgttcacactgcgctcaacacaagccgagcacgcacatggccacgctccaaacagagcggagctgtgcggttc

SEQ ID NO: 239735 - DNA, 122 bp, Homo sapiens
ctgtgccgagggcatcgtctggcaaagggtacgcaaagccagcggagctgccctctggtgcgttcagcagggagccagcgccccagttccagccgagtaggtcggcgtacggtccatcatca

SEQ ID NO: 239736 - DNA, 122 bp, Homo sapiens
cctgcctccgaatttaccagaactgtgggtgtctccaaatatccctgaccaggatcacagcgaccagttctctactcttgcccaatccggcatctgaaccacagaccccagcttcctgtggg

SEQ ID NO: 239737 - DNA, 122 bp, Homo sapiens
ctggagaagaacaagatcggtcccctgtttgaggtaaggcgctgtggaggagggcagtcccgttgtctttaggggaaggggtgcagtaatgaaaacagaacactcccaatcccacccctccc

SEQ ID NO: 239738 - DNA, 122 bp, Homo sapiens
tgattcaccaacatccagcctgcgtcgcagcccatcattgcaatcaagtggagacagagtcggtgggagacgtgacttatccagcccacagggactgctacctgggagacctgtgcaacagc

SEQ ID NO: 239739 - DNA, 122 bp, Homo sapiens
tgacatatcccagggctgctgttttggggactgagaattcagggctagtcccagaaataacgcctgggagtagcagctgtggggagagatacgagcgtgtccgctgcgtggggagtgcggag

SEQ ID NO: 239740 - DNA, 122 bp, Homo sapiens
taaagattctcagcaccaaagtgtgctttcagtttagtgctggggagatcatctctcatccgacaggtcacaggcggggatgctttttattggttgatggcagctactgtatttaccaggga

SEQ ID NO: 239741 - DNA, 122 bp, Homo sapiens
caaagaggtttgggaaaatcccaggtggagaaagccccaccctgcccaggaaagttctcgcggtttcactgaaatccttctgagatcctaattgggttcaacattcccctctagtagcatag

SEQ ID NO: 239742 - DNA, 122 bp, Homo sapiens
ggatccggcagcggcggcggcttcttcaggggtagctgatgccggggccttggagagggacgctttgggagggtcctgggaggcggcgcggcgagcaaagggggcaagaagggcgtgctgtg

SEQ ID NO: 239743 - DNA, 122 bp, Homo sapiens
cacgtgtgtccgtttcctgctcagtagaatgtgaatcacatgtgtccgttttctgctctgcggattgggaatcacggcgtgtctgtttcctgctctgtagaatgggaatcacgcatgtccgt

SEQ ID NO: 239744 - DNA, 122 bp, Homo sapiens
cggcattcccgggatggcggcggcgtggatggctccggcgcaggtgagtggacgaggtttcggccttgctgctgctgtgctatttctagaggcctcgtgggcaggctggaagccaagacagc

SEQ ID NO: 239745 - DNA, 122 bp, Homo sapiens
taatgcttgtatgtgaaactgggtattggggggttccacagtttcaagtttctcctcttgcgtaataatgggagccacaactacccaaggcaaatagggcttattttaaattattttctgta

SEQ ID NO: 239746 - DNA, 122 bp, Homo sapiens
gcagaatggaagcagtcccaagtcgaagactaaggtgtggacgaacattacacacgatcacgtgaaacccttgctgcagtctctctcgtccggtgtctgcgtgccaagctgtattaccaact

SEQ ID NO: 239747 - DNA, 122 bp, Homo sapiens
ctggcgtggaaggggaatgggatcacggtgtgcctgggaggcaacaggtctcattactcccgtcttccagggctgtgtctgagtcagaggatcagcgcccagcagcgtgagtccttccttca

SEQ ID NO: 239748 - DNA, 122 bp, Homo sapiens
ccagtctccgcccttgggcggggctgcccatggtttgggcggggctgcccatggtttgggcggggctgcccatggtttgggcggggctgcccatggtttgggcggggctgcccatggtttgg

SEQ ID NO: 239749 - DNA, 122 bp, Homo sapiens
gctggcagcggggctgacatgttattgctgcacatacaccggctcagctcacagcgcaaacggaaggaagagctggcgcccggccgcggcccaagggcgtgcaaagggccagattgtttccg

SEQ ID NO: 239750 - DNA, 122 bp, Homo sapiens
tggacctcacctttcgggatttgtcaatgcgacagaacttctggaccacttccacagggacgggggcggggcctgggaatggatcttgggtctaggggaaaggaggacgcaattagcagaca

SEQ ID NO: 239751 - DNA, 122 bp, Homo sapiens
tccgagggcgggggccggggctcgttctcacccgcgcgcggcccctcgacctctcggacccgggccaccagctctgcgcccctcacgcctccctcggggtctctgtgtctctctcccgctcc

SEQ ID NO: 239752 - DNA, 122 bp, Homo sapiens
cccacggaggcccactgtgacgaacctgcgttctgcctcagcactgtgtatcctcggggacgtcggcgctccagctgcactcggccgggctggtggcgccgccctgtggtctgagggtgtct

SEQ ID NO: 239753 - DNA, 122 bp, Homo sapiens
gacctgcggtggttgccccagcctcagcaaggatgacttccggctatcgagtcgctgggtcgcacgcctagagagcctccgccgagcacaaaaattatttccggctcctcccggaagtgccg

SEQ ID NO: 239754 - DNA, 122 bp, Homo sapiens
tgctgtggagacagcggaagctgctgtcctggcttctccccctaggggcgccgggatggtcgcaggaaggaaatgcttctggacatgcgcagccgaccatgaccccagccacggcaggaggc

SEQ ID NO: 239755 - DNA, 122 bp, Homo sapiens
tagagctctcagcgcagccatgtttgagccgagtcaggtgacagaacccactccgaacagcggtggtgggggtggtgacaaagactgaaagccccactcctattggctcaaggcagggaaga

SEQ ID NO: 239756 - DNA, 122 bp, Homo sapiens
agaataaacatctatatttaatacaaaaaaactgctgggatttttgtaggaattgcattacgcctatagatcaatttgggtttttgttgttgttgtttgagacggagttcgctctgttgcct

SEQ ID NO: 239757 - DNA, 122 bp, Homo sapiens
agcagtccctcgcggctcggcccggctcggaccccgcggcccggcagccaccctctcccccggcctctcacaaaggagactggttcagtccggagcatcaccccgcacctgatccctcacaa

SEQ ID NO: 239758 - DNA, 122 bp, Homo sapiens
tttgcagttcacctggtgattgctgaatagtggctggaactaggattgtggcaatggaggcggaaagataaatgtgagatctattttggtataagaactggtagaactgagtggttgattgg

SEQ ID NO: 239759 - DNA, 122 bp, Homo sapiens
cacagatacagctgctaagtcgacacgtgcctctgcgcctccacagggcagtgtgagtcccggagcccaagcgagacaaatgcagccagggcagaacaatggccggaccccagcatctgagc

SEQ ID NO: 239760 - DNA, 122 bp, Homo sapiens
tgacatgtggctccctcccggtagggacccgctatcgtcccagcacttcttctgcacctccgaagctactgcccgtttcgcagtaaagccgcccgcgtcctagtctactccacctcgcagca

SEQ ID NO: 239761 - DNA, 122 bp, Homo sapiens
ttcctatggcgacgggggcggggccgccgcggggggcggggctgcagggggcggaggctgcgcagggagcggcgcgcgagccagcgaccccgcccgggcctgcgggaggacggaaccccagc

SEQ ID NO: 239762 - DNA, 122 bp, Homo sapiens
gagggcaagaaaagccgcccactggcgctgattcacactgaagtgtgagtgactgatagccgggcgtctgagactctcatgggcaacagggaatctcaggggtggcagagggactggaggag

SEQ ID NO: 239763 - DNA, 122 bp, Homo sapiens
gggtggtgggtgggctggtccgcgtgggtgcaggcctgagctgtggggtgcacaggagtgcgcggctgtggcccccagactctgtggggctccacggaggtgagtgtgttctgaggctcggg

SEQ ID NO: 239764 - DNA, 122 bp, Homo sapiens
agaggagcctgcgatccgggccccgctgcccgctccgcgcccgccggctggggctgccggcgagaccctgaaactgaacctggaagcgctgtcttgagcctgagctggggcggccgcccgcc

SEQ ID NO: 239765 - DNA, 122 bp, Homo sapiens
aagtccggacacctgagcgactttccgggccagaggccccaaggtgcatcggggcagagccggaagcggacgctgaaaactggcggctccttaatggttccggcggcagggaccgcagcgac

SEQ ID NO: 239766 - DNA, 122 bp, Homo sapiens
tcttcttgatgaacgactttactaatatagagtgtctcaatggttttccaaagtctacaacgttgtcttctgtgactaatttctcagggaagtaaattactcttctatttctacataattct

SEQ ID NO: 239767 - DNA, 122 bp, Homo sapiens
cagtgaagcttctgcatgccgcgcgcggcacgtcgggactcgtagttccggcgcggaggacgtgcgtcgcggcactctcgcctgaccgtctccacgtgactctcgcacctccggaagtgacg

SEQ ID NO: 239768 - DNA, 122 bp, Homo sapiens
gccctaggagttctcctcccgggggcctggaggccggcgcccccgaagccaggatggcggcgatggcaggaggattgggccctcggagcaacgcaggagaaacactcacctcaggctgctta

SEQ ID NO: 239769 - DNA, 122 bp, Homo sapiens
tccaagtccacgtgctgggggagtgtcatgaactgacgtgcggtgcagccagtgactaggcgttgtcggtgcgcggcggcggggcgaagcctcgcgaggggtgggagcccgcgctgcggggc

SEQ ID NO: 239770 - DNA, 122 bp, Homo sapiens
cacctcctagacagggtggcggctgggcagaggggcccctcacttcccagacggggtggccgggcagaggtgactccacctcccggacggggtggcggccgggcggggtctgccccccacct

SEQ ID NO: 239771 - DNA, 122 bp, Homo sapiens
gtgtgtgtgtgtgtgtctcgcctggaccttttctagccgtgtatgtgggagtgtgtgtgtcgcctggaccctttctagccgtgtatgagagtgtgtacacgcgcctacacacacacacgttg

SEQ ID NO: 239772 - DNA, 122 bp, Homo sapiens
aaggaaggaggcggggtctccgcggctccgaggtgggaccagaggaatgcgaaggcggggcgaagagtgggcgggacctcagtaccggaacaggcgtggcccgaggggcggggcaggtgggg

SEQ ID NO: 239773 - DNA, 122 bp, Homo sapiens
cagccggagtgaagccctccagcctttggaaaaagtaattagcgctgcggacaaacccaacgtggtaaaccccaagccccgccttcccctcggaaggcgggaggggattgggccctcgcttt

SEQ ID NO: 239774 - DNA, 122 bp, Homo sapiens
tgacaactatgaagggtttagtttggcctgaggcttctcagcttgtccagtatttcccttcgttcctcagtgtccacattgaggcctatacagaaaatcatggggagtgatttctatttttt

SEQ ID NO: 239775 - DNA, 122 bp, Homo sapiens
ttttttttttttttgtagagacggggttttggcaggctggtctcctgaactgggttcaagcgatctgcccacctctggctcccaaagtgctgggattacaggtgtgaaccaccatgcccagc

SEQ ID NO: 239776 - DNA, 122 bp, Homo sapiens
aaataaaagtaatacaatttgcaaaatctgtcactaagacttcatagaggcccaaatcagcgacatggcagcattttctttcatggtaatcagctgccagattgcagagaccccctgatgcc

SEQ ID NO: 239777 - DNA, 122 bp, Homo sapiens
ctctttttattttcagtttcacctcctcagtctcagctttcttattttaagagctggccccgtttgtctggctgaatggattatctacccccaccatccttaatgtatttccagaggtctct

SEQ ID NO: 239778 - DNA, 122 bp, Homo sapiens
tctgggacgctcacggcagccccacgagaatgatcacacgagggcccacgctcccggcctcggggacgctcacggcagccccacaagaacgatcacacgagggcccatgctcccagccttgg

SEQ ID NO: 239779 - DNA, 122 bp, Homo sapiens
aagtgggtagcagctggaggggcgtgtttgtggtccccagcgcgggctctacgccgggggcgcatccttcccacgtgccacgggctatgaggaaccggcccctcttcctccctaatctcagc

SEQ ID NO: 239780 - DNA, 122 bp, Homo sapiens
gcaaagtgatcgagtgcttttcctccactttccctcacttcgcgccccacccggctgtcccgaccaccctcaggatgttttcctctggtgtgcctctgggccaaatcgtgctaaaaatcatt

SEQ ID NO: 239781 - DNA, 122 bp, Homo sapiens
cgaatgaagcgaccccgctctgattggaagatgaacttctgaggcaagggcccatgctcccggagaaaaccccagacactgagcagcagcagacgcacctcgaaaggtgccagttggctaaa

SEQ ID NO: 239782 - DNA, 122 bp, Homo sapiens
gcgaaacgtggactgggtgatgcctcaggagaaaccaccctagtagttccgctccgagggcggaagtgcgcgtctcttgtttgtgcggctgaccagttggcgacatggtggcacccgtgctg

SEQ ID NO: 239783 - DNA, 122 bp, Homo sapiens
ttgctaatgagtacaggggagcaggtgttgatcagggggaccctgcactgggcatctggacgccctgtctcaggacttgagactccgtttggatggcacaggcagactaagcccaggtcaaa

SEQ ID NO: 239784 - DNA, 122 bp, Homo sapiens
cacagagtcccggggagctgatcggccaccagggcctctcggtgtggagggaagagggaccggccagcccagctggtcctgagagtgcagctagcagctgctgaccagcccccagggggctc

SEQ ID NO: 239785 - DNA, 122 bp, Homo sapiens
tacacactaaggtttagagaggttgtataacttgtcctaggtcacagagccgctaagaagcggagacagagtttgaactggtggagtttaactgtgatcatcatatctttcttaagttcaaa

SEQ ID NO: 239786 - DNA, 122 bp, Homo sapiens
caaagatgaggaccctggctcacagtccagccaccagctccacgcacagcgaggagggcgcggaagccatccgtacccgggccacagagctgctgaccctgctgaagatgcctagcgtggcc

SEQ ID NO: 239787 - DNA, 122 bp, Homo sapiens
cccagaccctgccactaaagttatttatctgcaaacctgaccccacccccatctattctgcggcagccttttgctgttattgctctgacgccggccaagatttggccgaaaaggaaaaaaaa

SEQ ID NO: 239788 - DNA, 122 bp, Homo sapiens
ccggcgctgaaggaccgcgcggccatgccttacacagacgcggtgatccacgaggtgcagcgctttgcagacatcatccccatgaacttgccgcaccgcgtcactagggacacggcctttcg

SEQ ID NO: 239789 - DNA, 122 bp, Homo sapiens
cgtgaagctacaaacaagacacatcaggttcaaaggcagtgcttatgtctcaagagtctacgtaattcatattttaaaaagaaaccctcttcatttacctaaataaattgtctgtatatttc

SEQ ID NO: 239790 - DNA, 122 bp, Homo sapiens
tcagcactggccaataccaaagatagtccggtcctcatagatttctttgaggatactgagcgctacagaaaacaagccaacaaagcccttgagaagtacaaagaggagaatgatgactttgc

SEQ ID NO: 239791 - DNA, 122 bp, Homo sapiens
catgaatattgcagcaaagcagaagctgcctcaccttttctgatttcgctttggaagtcacgtaacatgacttccaccacattctattaattacaagtgagtcatgagcctgctcaaattca

SEQ ID NO: 239792 - DNA, 122 bp, Homo sapiens
gtagctgctgtgataacaagaattacgtttatgggtcaacaaggcctggggtcacactatcgattctagcttgggaaactacacgtcttagtctatcatcatttggtccatgctttccattc

SEQ ID NO: 239793 - DNA, 122 bp, Homo sapiens
gcgcaagccgcgtggcagggaccgtgtgcggcgtggaggctactgggaattgtagtcctgcgcggcagcggggtaggtgggaaaagagatgtggcctttcctgcactgccggtttctctggc

SEQ ID NO: 239794 - DNA, 122 bp, Homo sapiens
aaagcctgcatcgctaagcctaacagtcaacaaaaagaaagcagaatgaagacaagaaagcggtaagaaatgggaagagacatgtagcacagattggcttcaatgtcatcttaaaatcaaga

SEQ ID NO: 239795 - DNA, 122 bp, Homo sapiens
agcacggggcccggccccacaccgacctgaagaggttggtaggatgactgaatgaattgacgctgggatgcagcagggcccatgggcagaggctccagagcctgggaaggatggggtggcct

SEQ ID NO: 239796 - DNA, 122 bp, Homo sapiens
tcgatccctgaaaagaagcctcagaatttcacaaggcgtggccccaggagtctcactcaccggtccggaagggagcgccgggagaggcctgagagccagccgggccgtcctctcgctggttc

SEQ ID NO: 239797 - DNA, 122 bp, Homo sapiens
gctcccgccgggtgtgctcacaccacacgctctcactgcacacatgctgggttggtgccccgtccgctgaagggacatgccaccgagcatgccgggtgccaccgagctgctggcatgttcgg

SEQ ID NO: 239798 - DNA, 122 bp, Homo sapiens
ggcccgagtaaaaagtgggacagaaaacagcggccagccaggccaaaagcgtcacaatcccggttcgagaggaacccgggttccgtcccagcgctgatctctgcaggggcggggctgcgtgt

SEQ ID NO: 239799 - DNA, 122 bp, Homo sapiens
taaagtttcaagcacttgaacaatgtcttcctaacatcccccacttatctaaaaaagaatcgccgcacatcccaagtaaatcattctaaactcaattctgaaaatactaggtagaaataatc

SEQ ID NO: 239800 - DNA, 122 bp, Homo sapiens
cacagtcctgtttctgcagaaattgagaggtggaagagaatgatcctttatatagtaaaacgcacaattctccgtgtcccccttgtgcatcagaggcgctgtggctctgaaagaatgagctt

SEQ ID NO: 239801 - DNA, 122 bp, Homo sapiens
cactggggaagccgctggaaaggcacctggacacccacacacatggaggggatgcgggggcgcgccgcagggaccgggcccgaaggtggccagactcgcctaccttgtggggcgcccagccg

SEQ ID NO: 239802 - DNA, 122 bp, Homo sapiens
gaaataaaaataaagaatcctgtcaaaaagcatcatcaagcaacttcatatgtgaacacacgtccacaattaaacctggattactactgaggcaagcagtttccattaatttctaagaaatc

SEQ ID NO: 239803 - DNA, 122 bp, Homo sapiens
ttagcctggccagggggctgtgttgttttttagctcactcaagctgtgtgggtgcaggcacggcagagaggaaggctggatttaaccagggtctcatgcaggaggaagccaaagtgggcaag

SEQ ID NO: 239804 - DNA, 122 bp, Homo sapiens
cggccgcggcggatctttacgaggaggacggcaaagacctggacttctacgacttcgagccgctgcccaccctccccgaggacgaggtgagcccccggccccactggggggccccttccgcc

SEQ ID NO: 239805 - DNA, 122 bp, Homo sapiens
attttaaatataattttcttcccttctcttttcattccttctctctacattttaggataccgaaaactcattaacttcgattctgctaaattaaaatttgtggagtttttgagcaattcttt

SEQ ID NO: 239806 - DNA, 122 bp, Homo sapiens
agtgtgtgtctgaactcccatctgtgagcgtgtcgtcgaggtgtgcacctccagcgacttcgtgctcggcagcgcggacgcacctgcccgtcctccccgccagggactcaacttcctgggcc

SEQ ID NO: 239807 - DNA, 122 bp, Homo sapiens
tggggccggggccatcgccgtggcgtcttgaggacctgacgcgagctctgtggtcctggacgccagcccagggagggcagatgtctgcactgactgggatccggggctgtgagggcggcgct

SEQ ID NO: 239808 - DNA, 122 bp, Homo sapiens
tgcggccgttcccggcgcctggagtctgggcattgcaggagagcgcccctggaaggctcgcggccccttgcgaaacagacgcgcgtgttaaaagctggcgtgggccaggcgcggttgctcac

SEQ ID NO: 239809 - DNA, 122 bp, Homo sapiens
agccccacgaagtgccgggtcagcttgaagatgcgcaggatgcggacgaagcggaccacccgcaggaagcccagcacgtctttggcggccttggagctgaggcccgagaggcccacctcgag

SEQ ID NO: 239810 - DNA, 122 bp, Homo sapiens
gcgggcagtgcgcaggcgcgggcggagggcgggctgaagcagctgaagcggcggtagcggcggcggctcgggcagaggggcgggagctgaggcgggagcggacaggctggtgggcgagcgag

SEQ ID NO: 239811 - DNA, 122 bp, Homo sapiens
tggaggactcccagtacggcaaagggaaggcgccaaaagttgtcagatggcgaaggaaaccgcgaaattcgccattgtcacatgatggagcaacctatcgaaagcggagggaaaggtgccga

SEQ ID NO: 239812 - DNA, 122 bp, Homo sapiens
tcctagtcacctgaatcatgcaaagaaattccgctttccaggagcacgggactaggagggcgcctacttcctccctggtgcataatgggcccttaaaattaaatatacaaaggatacaaacc

SEQ ID NO: 239813 - DNA, 122 bp, Homo sapiens
cgagggcgctctgcttaagactgagaaccgaaatgcttcctgaattaggatcattgagaacgccgagtgcagacacaaatcgaaaagcagccacccgcgccgccaaggcggggccagaactg

SEQ ID NO: 239814 - DNA, 122 bp, Homo sapiens
tgggaacagcttggaaatgctaattcttggctcagcctacacctatgcattcagaggctacggttaacaagattcccaggggattcctatacacattctaagttgagaagcataaaacttgg

SEQ ID NO: 239815 - DNA, 122 bp, Homo sapiens
aacagctgcgccaggacggagagcccacagtgaaattgctgcgtgcgcccagggcggcggcggcgccaggcaggcgcggatcccgctgcgagggacttgcctgctgacctggggccgcaggg

SEQ ID NO: 239816 - DNA, 122 bp, Homo sapiens
gaggctgaggcaggaggatcacttgaagtcaggagttcaaggccactctggccaacacagcgaacaccatggtagttcgccatggtagagaacaaccagtctctaccaaaaacacaaaaatt

SEQ ID NO: 239817 - DNA, 122 bp, Homo sapiens
ttctcccaggcgggagggcccggccttattcgctggggtccagagataatgcttgcgctccgtggccgggaggagggacccccagcactctgaagcagctgacacggggctcactttccttt

SEQ ID NO: 239818 - DNA, 122 bp, Homo sapiens
ggtctgagatccaccccgaggctgcgggacctgcccagaccctcgaccagggaagaaactcgggcgcctttacccggtttaatttcagtttaggccaaaatccccgcgggttggtcggggcg

SEQ ID NO: 239819 - DNA, 122 bp, Homo sapiens
gcgtttgttgagtggctgcctgacagcacctgcctaccctcctccctgcaggaactcctgcgttgcgagctgtgcctgggcatcatgggtgggaaaccgcgacactcactgtacttcattgg

SEQ ID NO: 239820 - DNA, 122 bp, Homo sapiens
gcgggtggggaccatctacgataaaggcagccccagttgggtgaggagggcacagaccatcggagggacagaaagacctggaagccttggatttaggaactagactggtgcttttggtttct

SEQ ID NO: 239821 - DNA, 122 bp, Homo sapiens
gctaggcacttgaaaggaaagctcatctggaaagattggatcgtctcaaatgcacatactcgtacactcgattgaagcgtactctgtgcctactagatcttttcacagccaaaacacctggc

SEQ ID NO: 239822 - DNA, 122 bp, Homo sapiens
gcggggcctccgcgagggtcctcacctggccccgcacgtgtctatcttatcccggctgcccgaccaatcacggcccgaggatctgcgcctgcccctctcgcaggctggaccaatccagagca

SEQ ID NO: 239823 - DNA, 122 bp, Homo sapiens
gtccggggcgagggccagggccctgcctccatgtgggtgcgagctgctggctggtgtggccgggaggcagccccaaaatccggactgctcggaatttgcaggcgaggagccgtgcgttccgg

SEQ ID NO: 239824 - DNA, 122 bp, Homo sapiens
attcagagatggtagacatgtttccagactttgtccaggtactttttggtccaaccaaaacgatgaagaatccggaacctcaaaagtttttcccagtgtcttgggcttagcaaggggctgct

SEQ ID NO: 239825 - DNA, 122 bp, Homo sapiens
aaacacttcccagaccgtggcgccgaagccccacttgtcagcttccaagctaagtgtctgcgcctcccggagacactcgggggccacccaggggatcctgtcggtgagcactgagggaatga

SEQ ID NO: 239826 - DNA, 122 bp, Homo sapiens
gctgtgatgattaggctctgtgcccacactgccccacacctagtgggacagactgtgccccggccccactggttgtcttgttgtcgcattcgtccttgcattgtgcctccatcgctcccttt

SEQ ID NO: 239827 - DNA, 122 bp, Homo sapiens
ttccttaataataaaaagcatgatcttgtatttgcatgaagccttctgtctcaccaaacacgtctccatgcccaatctcattcgtaatgcctctctttcacaccaacagccagtccctcaca

SEQ ID NO: 239828 - DNA, 122 bp, Homo sapiens
atgacctcctgcgtgtcctggcccacagcgttgcgcagcgtgcagcgcaccgacagtggccgatccacgtgctgcagacgcagtgtgctcaccacctcaaactcctgctcctcctcccagta

SEQ ID NO: 239829 - DNA, 122 bp, Homo sapiens
agaagcttagcgctccagagacgaggagtctaaaaggcagcctttcacagcctgcaggggcgtgtgcacacagagtaggttgggtattgcaacacagcagtctcctataatgcatgtctatt

SEQ ID NO: 239830 - DNA, 122 bp, Homo sapiens
aagatgtcagtcctccatgttgatggttagaagactgcatggaaaggcgtcagttctccgcgttgatggttagatgactgcatggaaaggcgtcagtcctccgtgttgatggttagaggact

SEQ ID NO: 239831 - DNA, 122 bp, Homo sapiens
cctgcctgcccgcctgcccgcgtgttctgtgctgcgtgtccacctccttacctgcctgcccgcctgcctgcgtgttctgtgctgcgcgtctgcctccctgcctgcctccctgcccgcctgcc

SEQ ID NO: 239832 - DNA, 122 bp, Homo sapiens
actcagataatcacattagttttgtcattaaaagatcccttttatagaaagtacctaaaccgcttaaaccacccagagaggttgcatacattatcaaacaccaagacaaacaaaagggattt

SEQ ID NO: 239833 - DNA, 122 bp, Homo sapiens
gtccgtgtgaacgggggcacagggccctgggacagagcccaggacagcagtggtcacgtccgtctgaacgggggcgcaggaccctgggacacagagcccaggacagcagtggtggcgtccgt

SEQ ID NO: 239834 - DNA, 122 bp, Homo sapiens
ctcaggtgatccgcccgcctcggcctcccaaaatgctgggattacaggcgtgagccactccgcctggcctcaagtctttacggtagattatgtttccacaattttctgcaaatgttttccgt

SEQ ID NO: 239835 - DNA, 122 bp, Homo sapiens
tggaatctaataaccagtgtgatggtattaataggtggggcatgtgggaagggactaagtcgtaagggctccaccctggtgaatgggattagtgcccttataaaagaggcttgagcaagccc

SEQ ID NO: 239836 - DNA, 122 bp, Homo sapiens
aacactgaacaagacaggcatcatctctgccctcacagagctaacagcagtgggggaaaccgaattttctgggtaggaaggcaaggagaaggagcacctattaccatcagcacacccagcat

SEQ ID NO: 239837 - DNA, 122 bp, Homo sapiens
aggataggagaatgaccctgtggactccagagccagcctctgcgagccccggggtgaccgcgcctgaccaggccacgtgaagtcgtttctgtcctaaagttgcataggacgccgttttctct

SEQ ID NO: 239838 - DNA, 122 bp, Homo sapiens
caaggtctgcctaatccaaaagtctatgcttatccctgcattccactgctttgtttatttcgtgacagacccctcacaggtgagacttactcttcttggcttcctctagcttgtccttggcc

SEQ ID NO: 239839 - DNA, 122 bp, Homo sapiens
acgccggagttggggtgtcagctggaattgacggtatacggtgcgcactagggactctcccgacggggagcagtgagttgtcatcccgggtagacggcgaactcccggagccacgcggccgc

SEQ ID NO: 239840 - DNA, 122 bp, Homo sapiens
ttaggacagtggggacatgcggcgttcgactgcaccgctgcggccgcaatgggagacagccgtgcccagaaaccagtgaagtgaaggttcctctgggtgccctcgaacatgggcccctgtga

SEQ ID NO: 239841 - DNA, 122 bp, Homo sapiens
aggaagaaggaattccacctccagatggtcctcgggctccgccacagcatcagctttcctcggggcctccagccacctgggctcctctatcagattccgggcttaccaagcctctacaatca

SEQ ID NO: 239842 - DNA, 122 bp, Homo sapiens
ccctgtctcttttgtactaggacgaggagcagaaacttggtaggggccggatccacaaagcggtcacatgggcacggtacagatgaggaaactgaggctctagaccaggggaaagggaaata

SEQ ID NO: 239843 - DNA, 122 bp, Homo sapiens
cggctgataaggaagatgttttccttcaaggtgagcagatggatggggcttgcctgcttccggtccctggcggcatcctctcccagtattcgccagaagaaactaatgcacaagctgcagga

SEQ ID NO: 239844 - DNA, 122 bp, Homo sapiens
ggtgggagctggcccagggccagggccagaactgggtgtcagggcacctaggctgcagggcgggactgacctggaggccagagacagggcaagggggcaagagcaatgggcgcaggccttgg

SEQ ID NO: 239845 - DNA, 122 bp, Homo sapiens
ggtgggggtggggtagagtgaggggcctcgtgaagagcgctgcgggccaagaccctcttgcgcatgtgacgagagcgcacgagtgtgggagcttcggcctgcgctcacaggcgtgtgcgtgg

SEQ ID NO: 239846 - DNA, 122 bp, Homo sapiens
agcggcgctcgaaactctgcagcaagagtttggtacccgcgttctcctcaggcgccatgacgtgggcggggccgcagcgttgccaggagaccgggcggaagccgggcctggactgaaaaggg

SEQ ID NO: 239847 - DNA, 122 bp, Homo sapiens
aattcacttaatctgtctagagctcagtgaaaataaggataacatatgctttacccacttcgctgctaattgtgaggattaaattaatgaatatgtgagcaaaaacagcaaaacgcttttgt

SEQ ID NO: 239848 - DNA, 122 bp, Homo sapiens
atgattcacaatgggccgaagtgcagagagcttaacacttgccatcgtgggcatggcacccgcaaacactgcatctggaaggcaagaggaatgtctcaggaagacactcagtgaaggcgaga

SEQ ID NO: 239849 - DNA, 122 bp, Homo sapiens
tagaaggaaggccaaccgccccatggccgttaccgttctactcgtcctcatccgggactgcgctgaccttctggccgttaaagccgttatccactgttatcaggaccaggtagtctcgccca

SEQ ID NO: 239850 - DNA, 122 bp, Homo sapiens
gccagccctaatctccttctcgtggcttctccgtctctgaccccaaataggccttaagggcgtgggagaaatgagtttctggagctggaaaagccactgccttctgcacgggcctgagaagc

SEQ ID NO: 239851 - DNA, 122 bp, Homo sapiens
gctgcacgggttccccagggtggggaagcgggtcctggccgagcagaggttgctcttgggcggggcgtctccccggagcaagcgctcagctactcgggcttttgcgtaaacgcctcgattct

SEQ ID NO: 239852 - DNA, 122 bp, Homo sapiens
aaattgccggactccaccccagagttccggattcagtgggtgcacggtgcgccccgagaacgtgcatttccgacaagtgcccggagatgctgacgttgcggctctctggaccacattttgta

SEQ ID NO: 239853 - DNA, 122 bp, Homo sapiens
gtcttcacggtcttgacgctggcccggaatagcagcgtgatgtccaccgccatagcgacccgcaccctcagccccacactaggcccgcccacgtaagcagccggcgaccgcggcgcgaaccc

SEQ ID NO: 239854 - DNA, 122 bp, Homo sapiens
aatccgtttgtgtttgtgactgagttacagaataatgaatagatattattgtgcaagtggcgtggactatcataagctatcctttggttattgttggcatgctacgacgtttttaagaaagg

SEQ ID NO: 239855 - DNA, 122 bp, Homo sapiens
taaataaaagatacatttagtggatgagcatatctcacaagatgaagccaccttacttagcgagagcccagcactggcccagggtcctaaagggtaacgtgagacggcgcaggcagaagctg

SEQ ID NO: 239856 - DNA, 122 bp, Homo sapiens
atgaaagacggtttcgtgttggacaaggacatatctgcagaaggccagttctctcgaactcgtcggacttcctggctccctgacccccagtgactcgtttttccgttttctcaggtgcctgt

SEQ ID NO: 239857 - DNA, 122 bp, Homo sapiens
cggcgtctaggcccgcgacaacgccagtcttcgccccccaggggcctcgtcccggggccgcggaggccacgtgcagttccccgcccaccctgaggtaccggccccgccccacgcccagctcg

SEQ ID NO: 239858 - DNA, 122 bp, Homo sapiens
ttctttgctttcttctataaaatgagttaaatgtaaaaaagcgaaatctcgctatgcttccgctaaataagaggaaaggcattatttaataaatctagtctggtgggtcccacccagcatgc

SEQ ID NO: 239859 - DNA, 122 bp, Homo sapiens
aggaattctagtatgaatattcagtgtcagaatagcatagctagctggtcccagactcaacgttttactggaaggtatctgattcaacttatctttacagatggaaagagaccaagaggaaa

SEQ ID NO: 239860 - DNA, 122 bp, Homo sapiens
ctagccacgcttgaggagcgtggctgcactgtgctgcagtgtggctgcacttcagcccaccgctgcactgtgggagctgctctctgtgctggccgaggccggaactggctccctctgcttgc

SEQ ID NO: 239861 - DNA, 122 bp, Homo sapiens
agaagcggtagtgaaatgaagcgaggcgacagcttttaccagtgtagggacatttaaaaacgggatagagagcacaaggagcgtagacagtgtgttaagggcaataaagagcgggaagggag

SEQ ID NO: 239862 - DNA, 122 bp, Homo sapiens
tgctccgccgcgctacaggtcgcgggaggggccaggcctaggtgcttcgccaaaagagggcggagctgcgcacacgtgctggctccccgccgcctcgggctcggctctctccgcgcagaggt

SEQ ID NO: 239863 - DNA, 122 bp, Homo sapiens
ttcagagaaaatggaagcccctgcagcctgtttcacagcctcgagggccaggacagccaacgaagtcccggatgagcgctgtggcggctgaaataaagcagatccgagccagaaggaaaaca

SEQ ID NO: 239864 - DNA, 122 bp, Homo sapiens
gagctgtccccaggacacagcccaggagagcagcttgtgcagtgaacccaccccaggcagcggggacgctccgccgcccgcaccagcggcccgcacactcacgcctcgctgtgctgtctgcg

SEQ ID NO: 239865 - DNA, 122 bp, Homo sapiens
gagaagaaccgttgctggtaacgggcagggaagtccgagctaagaaaggcccgggcccagcgcagggagggcagaggagggggcacagtctcccgccggcctcggccaagccaggtcactcg

SEQ ID NO: 239866 - DNA, 122 bp, Homo sapiens
tctgtgagtttggcgggcctcgtctgtgtttctccttgctctcatcaggggctgggagaccggggtactgcagagagggtgccctggtcgcagataccaggggcactcaaccgagtccctgt

SEQ ID NO: 239867 - DNA, 122 bp, Homo sapiens
gcgcgcagccctctcgagctccgcgcgggcagcccggccccagcccggcgaggtgcgcggcggattgcaagcatataacctgcccgcggtctcgatggcacccagaggatgttttatttcta

SEQ ID NO: 239868 - DNA, 122 bp, Homo sapiens
ctgtacctcaaaaaaagactgcagcttcttaaatggtctttccagagagcatgcatagtgcgcgaaaagtggctcatttaaatttttttgctatgttgggaggcctaataaccacatttgat

SEQ ID NO: 239869 - DNA, 122 bp, Homo sapiens
tgacgcaagaagatttttctagttgggaatgtggtcaatctggtgttcctctttctaaaccggaggggggccccaattgtaagccaaatttactgttacggcgatcaccgtctcaaattttc

SEQ ID NO: 239870 - DNA, 122 bp, Homo sapiens
cctttaccatctactttcaccctcctgaatgtaaagtctgagcgggaactttagatgtgtcggtaactcacattcttacacccgtccccccctccccccgcccccttttaaccactgctgtt

SEQ ID NO: 239871 - DNA, 122 bp, Homo sapiens
tgtaggagcttttggggtcacgggaagtactgagaggtgaggagtgggatttgggacgtgcgtagttgaactcataggacgtccaggtggagaaggaatcacttcctgtctctggatccgtc

SEQ ID NO: 239872 - DNA, 122 bp, Homo sapiens
cgagcgcttccccggggctgcccagcctctgctccgctcgccccgccaggcccggctccgcgaagcccccagggtccagtccaaggccccgattccccaaggccagggccccggggcagcat

SEQ ID NO: 239873 - DNA, 122 bp, Homo sapiens
ttttacgaacgaggacatcaaggtaggtcgctcatccagcctctcagagcaagtgactggcggcgtttggactcgggccgagtgtgccatacccatcccgcacaaagccggggctcgatgcg

SEQ ID NO: 239874 - DNA, 122 bp, Homo sapiens
ctcacctcacaaaccgcagaaacacacccaacattaaccaaaatggtcgctaccagagaacgctgagaatcccgccactacgttacgtgcgcacacagaaacgcctttattctgagccctta

SEQ ID NO: 239875 - DNA, 122 bp, Homo sapiens
tcctcacctcctaggtggggcggccgggcagaggcactccccacttcccagacggtgtggcggccgggcagaggcactcctcacctcccaaacggggcggccgggcagaggcgctcctcact

SEQ ID NO: 239876 - DNA, 122 bp, Homo sapiens
cagactcccgagggactacaggcgcctcagactcccctgggactaaggcatgcaccaccacgcctggctaatttttagtagagacagggtttcaccatgttggccaggctggtctccaactc

SEQ ID NO: 239877 - DNA, 122 bp, Homo sapiens
ggccgcttgccgccgatgaggggtgcagagcttctgcagcatcctggggaggtcccggaacgtgggtctgggctgtgctgatgctggagcagccagcggggagagctgccaggccactcctg

SEQ ID NO: 239878 - DNA, 122 bp, Homo sapiens
ctcagctgtttcatccattcgacactagatcgtgcagtgggctggaagagaattagaaaacgagtaacaggaggcttcgagaggatacagaaaggaacagtgacactacaaggtgataaagt

SEQ ID NO: 239879 - DNA, 122 bp, Homo sapiens
ccactgttggaggttgtcaccttcgtggatttcagtatttggatttatgtccccatcatccggtcttcccccagagttttctccctcttatctaaggcagttcacagcatggaccgttttgt

SEQ ID NO: 239880 - DNA, 122 bp, Homo sapiens
tcatccatgcgtaagccggggacgcccgaggacatgctcttcacccaaggcctgcgccggcgtctgctgatcaagggcccagtacaaaggccgtcatggagatccaggccttcgccaacagc

SEQ ID NO: 239881 - DNA, 122 bp, Homo sapiens
tgcacaacaatggccacacatcgagattgaaatgaagggataaaaacattcctataaattcgaaggcaagttttgctgactagaaaaacaagccaataatttgaaatggtgtgcccgaatgg

SEQ ID NO: 239882 - DNA, 122 bp, Homo sapiens
actctgtgccatgctggtggttgtattgtatgcatggggagtcgcatgttccctgacactcgcgtgctctgctttaaagttatcttttcatggtttcaacacaatcaatcatttcttctgtg

SEQ ID NO: 239883 - DNA, 122 bp, Homo sapiens
agggccaggaagcgcggaaggaaccgccgggggccatggacggagcagtgatggaagggccgctttttttgcagagtcagcgctttgggaccaaggtagtctggcgcatggatgccgaacct

SEQ ID NO: 239884 - DNA, 122 bp, Homo sapiens
gggtagagggaagatttaattattatttgacaaaggaacaaactgaccttctgagaatttcggcaacgtgccaaagtcccagctaatgactagaagaaagggactcggtgcagatcctcgga

SEQ ID NO: 239885 - DNA, 122 bp, Homo sapiens
tgttagtcatctcacgtcgtgagagtgtggtgtctgtttatgccgggtccgctgttaattcggagttgagtcattcggggtggattgggggcagattgtggcgcgagatctagaaaaggatc

SEQ ID NO: 239886 - DNA, 122 bp, Homo sapiens
tcgagtgggaagggcaggatctgcttgaggtccagtgggggctgcatgatcgggggctgccgtagcagaggcaggggccctgcccggctcaggctgcctgaagggcagagaaaacattctgt

SEQ ID NO: 239887 - DNA, 122 bp, Homo sapiens
tttcgtactcaaagctcgtgcatccagggaggggaaaccggagatagggtcttcgggccccgggcagaccctctgtgccgctgcaaaccgttgcagcctgaggctgtcaggtcctcccccag

SEQ ID NO: 239888 - DNA, 122 bp, Homo sapiens
tccttgcttctgttgttgcttttgagtgttacctctgagtctgcctgtgctccctggaaacggcccgggtttcccaccccctgcccaggtttgctccttccctggtttttctgtcattatca

SEQ ID NO: 239889 - DNA, 122 bp, Homo sapiens
ggagagcctgccatcagggaggctcctccctgggtgtgggagggaagcgcaggcatggcgcgcccctgagcactaacacccatgctcctttgcaggctccgtacttctggccttcgaactgc

SEQ ID NO: 239890 - DNA, 122 bp, Homo sapiens
agaggagaaggcacccgcggaaccgacggctcaggtgccggacgctggcggatgtgcgagcggggagaacgaggtactaagagaaaagcacgaagctgtggatcatagttcccagcgtgagg

SEQ ID NO: 239891 - DNA, 122 bp, Homo sapiens
tgagcattgccgacgggccggagcaaatcgctcccgggctagaccctgcctacaccgcggcggggacaggtggaggtttcaacccctgtttggcaacctcgggcgcagccaggccccgccca

SEQ ID NO: 239892 - DNA, 122 bp, Homo sapiens
cctgaagtcctagaagtaatcatgaccattcattcttctctctgaatctccctcccattccgtgctgcttctccaacaaccattaccactctagtctaaaccactatggtggtctcctcctc

SEQ ID NO: 239893 - DNA, 122 bp, Homo sapiens
gaactcctggctgaagagcgggtaacttttcgtcctcctgcggaaagccatggcagcgggcgcgcagcggccggcggggcccgcaccctgcgctcacgaaccgcagcgcaaacttctccagc

SEQ ID NO: 239894 - DNA, 122 bp, Homo sapiens
aggcaccaggcccagggagtctgaggggacaagccctgcagtcccctctctcccttcccccggggatgctgagcatccctgctcaacgctgctcactggctctgcctcctgcccagcacatg

SEQ ID NO: 239895 - DNA, 122 bp, Homo sapiens
cgctttccagttaggatcatttggagaaagccaaatacatccctaaccaatcacacgggacgccccccttctgggagccgcctccagtcccccgaggccgacagcctccatgggggctcacc

SEQ ID NO: 239896 - DNA, 122 bp, Homo sapiens
acgaaaatagtggctttaacattctgatgtaagactccagaaactcacccaaaaaatggccggcgtccactagagggatcccttgcgccaggtcgcctgggtgaacctggtggttgcctgag

SEQ ID NO: 239897 - DNA, 122 bp, Homo sapiens
taggaagatatagaaacagcttactggccaagaatagaagagggaaccagtggagagggacggatttgcaagatagcctctggagaaaaaaaaatcacgagggagaaaaatcggcttcatac

SEQ ID NO: 239898 - DNA, 122 bp, Homo sapiens
cacacaaaggcaaagagctccttaaagggacctgcctgctcctccgtgcagctgcaaacccgtgtcggtgcaggctcagcaacccaggctttcgctcgagaatgagtggggaggggtcttga

SEQ ID NO: 239899 - DNA, 122 bp, Homo sapiens
cggcgccctgaaacccgatatgtcaggcaagctggtgggatcctgggatccctcatgtaacggcactcattctgacagaagcagagataaaacagactaagtacacagaggagtttaaggtt

SEQ ID NO: 239900 - DNA, 122 bp, Homo sapiens
cctgtccttccacctctgtggggaccaagagggcaaggatcgtgccaggctcaccgtgggcgctcagtaagcggccgtgcagaggacggttgagggctttgtgcagaggaaatgagagactg

SEQ ID NO: 239901 - DNA, 122 bp, Homo sapiens
gcgaagcttggggcgggacttccggcatttggatgggacgtaatttgggagcgacggttccgtccacgccggctctagggagggggcggtgttccgtggccgcctccctggcggcgctgggg

SEQ ID NO: 239902 - DNA, 122 bp, Homo sapiens
agtgtgttcggaattggtgtgttcttggtctcactgacttaatgaagccgccgaccctcacggtgagtgttacaattcttaaaggtggcatgtctggactttgttccttctaatgttcagct

SEQ ID NO: 239903 - DNA, 122 bp, Homo sapiens
ttggaaaccgcaccctttctcactgcaaatttgcattcgcagctgggcttcgggtgacctcgccagaggacagaaagctaatccaatcctgctgctgaatgagggtgcccggtcctacctgg

SEQ ID NO: 239904 - DNA, 122 bp, Homo sapiens
ttaaacagacactgacatctcaatccagcaattgttaataggctgtgacacgtgttctttcgttaatacgccatgcatagcatctcctgttcactttgcttcactggaatctgaatacattt

SEQ ID NO: 239905 - DNA, 122 bp, Homo sapiens
acccaggttcctgtggccacgtcctgagactgttgtcagaacagctgtccccacactgtccgtcccacgttgcggttcccgatggcaccggcgctgccgcgtggtgtgagcgtgccaggaaa

SEQ ID NO: 239906 - DNA, 122 bp, Homo sapiens
gaagcagctccctctcgttccgctaccaagagaggcttccggtcagcggagggtttgctccgtctcttggtgaacttgaacagaggcagaggcaaaagcaaaacgtatgtattttgtccaga

SEQ ID NO: 239907 - DNA, 122 bp, Homo sapiens
atgctcgtgttggctgactgagtgagtctgcctactggtaaagaactctgcctgagctatcggctgacacctgttcataagctgtggttctggccacctctctgatccatcttctcctactt

SEQ ID NO: 239908 - DNA, 122 bp, Homo sapiens
acctcgtgatccacccgcctcagcctcccacagtgctgggattacaggcatgagccactgcgccgggccaaataagtgaatgttttaaaaaacagcatcagagatctgtgggacaatatcaa

SEQ ID NO: 239909 - DNA, 122 bp, Homo sapiens
tagggacaaaaagggtgggtggggcagcgcagacactgattgctaatctctctctctaagcgtttgcgttcagtgatgcacacggtcaggagcacactgggtaaaacgccggagccctccca

SEQ ID NO: 239910 - DNA, 122 bp, Homo sapiens
ttgcttgctaaagaaaaatgaaagctggaatttcagcagggaagaaagtatatgccccaccgtgatgagtacaaacacacagcatcagggaagccacacagaatgaagctctgagaagactg

SEQ ID NO: 239911 - DNA, 122 bp, Homo sapiens
aggtgaggaaactgaagattatcaggattaggagatttttgcccagggtcataaataacccgtctgttacaggcacttacttgcttccctgagaacaggacaggtgatgggcacttggttat

SEQ ID NO: 239912 - DNA, 122 bp, Homo sapiens
atggcagcagagagcacccggccctgtgggcggcctggacagggctgggcctggggctgccggagagcctgtcagcttccaggatgggagtggcctcactcagctgctccacctccgggtca

SEQ ID NO: 239913 - DNA, 122 bp, Homo sapiens
ccctgagcgggccctgcaccatctgcaggcctcctgacacctgagagcagagatgctgtccgtgtcctgggccctggctgcaaaccggaaggcgtccttggaaacggccgcactgggccagc

SEQ ID NO: 239914 - DNA, 122 bp, Homo sapiens
cgagtttatttaaaaactcgtgtccggggagtttatttaaaactcggaagccggcggccgcgagccggttgtttatgtaaacccggaaacgccccggggggcgggggcggggcggggacggg

SEQ ID NO: 239915 - DNA, 122 bp, Homo sapiens
agcctcggatctacaaaggcctttcacgcaaaacctgctcagatactcactgcccgttcccgtcgccatcttggccccgaagtctccaaccctgaggagagacggtctggaagggccgaaac

SEQ ID NO: 239916 - DNA, 122 bp, Homo sapiens
gagcgtccctgaccccgcagaagctgtggctgggaaccgcaaagccaggtatgtggttgtcgcactggagacccttcctgcttgagagaagagttcgagaaatttcagggagtggtttgaga

SEQ ID NO: 239917 - DNA, 122 bp, Homo sapiens
ccccagagctgctgcccaggggcgccgggaaggggtccctgtgtgtggaccaggacttggcgcatctgccggcggcatggcggttggaccctaagtccgttgggcggtggagggcccagcat

SEQ ID NO: 239918 - DNA, 122 bp, Homo sapiens
atgcacactatatataaatacatcttttaaaactgctggtcaggaatcagacggcctccacgggtggtgtcacagggctgccccccgcagcctccctcatggttctgagccctcctcagtca

SEQ ID NO: 239919 - DNA, 122 bp, Homo sapiens
acagtgaggagtcctggaagtcaagggaagaaagtatgtcaaggaggaagcggggatgaacggtgtcagatgctgtcaggaagctaagaccaggcctgtgaatggacttttggatttagcat

SEQ ID NO: 239920 - DNA, 122 bp, Homo sapiens
tgaggccccactgctccttgctgcaggagaggtcatccctgtctttgccgagatcgacaacggctccacacgtcctgtgctgcctcgggcagccgtggtgcagacacagacgttcatggccc

SEQ ID NO: 239921 - DNA, 122 bp, Homo sapiens
ccctaccatacagtgcgctctgggagtcccgggtaaagggggtcattcccgcgagggatgcggagagcagagcggccggaggagcggctagggatctcgccgggtcaccggggagggtagac

SEQ ID NO: 239922 - DNA, 122 bp, Homo sapiens
gcagaattcatagtacctagttttcttgtccctgggaattttgagggacttgaaatgtcgcgtggatgagtgagggagtttgtcttccagagacaaagcaaaacgaaacgtcaaagttctgt

SEQ ID NO: 239923 - DNA, 122 bp, Homo sapiens
tgtgtttctaacagccatgggcccagccctccttcaggcaccggctctgtccagtaggtacgattattactcccattttacatacgaggaaacccagggaaaagagatgtcccaaggtcaca

SEQ ID NO: 239924 - DNA, 122 bp, Homo sapiens
ctctgagccctcctcggaatcttggggtcgctggacgccgggttccggtcctggcccccccgccatccccccaacagaacagggtcatgaaaaggtaaggcggggacaggggatgcagggat

SEQ ID NO: 239925 - DNA, 122 bp, Homo sapiens
cacacaaatttcaacatttctgcctcttcttcaccagcaggaatatgaggcatctgacaccgttagtgagtttcacacattaattcaacagatatttattgagtgcttactacagacctagt

SEQ ID NO: 239926 - DNA, 122 bp, Homo sapiens
tgattctgttactcaactagattgaaaactccggaggtcagggatttgcatagggatccccgccccgccaccccgcttaaatctcaaatgtagaccggttcagggtgggtggaggaaaggaa

SEQ ID NO: 239927 - DNA, 122 bp, Homo sapiens
ggcaatggccacgtggcgctcaatggcgatggccaggaggctgaagacagaggccgagagcgtgatgaaggcagagccctcccgggcaaaccactgcacaggcgtcagcctcagcgtgacag

SEQ ID NO: 239928 - DNA, 122 bp, Homo sapiens
tacaaagggaaagaaatcataaagtggcactgactgcaacattgttttcattttataatgcgtagtcattctgatagcttggtttgtttttaaggtggacactgtaatttccttcctctgat

SEQ ID NO: 239929 - DNA, 122 bp, Homo sapiens
aggaggtgtctctaagccccaaagtttcctccagcttacgtggatggtggtaaaatgcaacggatgaacctgagctcctacctgtcatttatatgttaggatttattttttatgatttattc

SEQ ID NO: 239930 - DNA, 122 bp, Homo sapiens
actcatctgaaggtaagtaaattttctctggcgatcaaaagcctggtcggcaacaaagaccgcgcccgctttttccaccgtcctggtgtggcgagttgcggaatttcaataactgtgacaag

SEQ ID NO: 239931 - DNA, 122 bp, Homo sapiens
cataaatttacctagaggcacaggaacctcctgcgacagtagatctgggtacctcattcccgtcacccttgtctggtggattgaagtgtttcctagtggaatcatattacagtaaaaagaaa

SEQ ID NO: 239932 - DNA, 122 bp, Homo sapiens
cactctccctttctgccctccctcacccacaagcacacgcatagcgactaggacctaacgcgcctgcgtaaagtttagagtttacctcacctcagacgcgactacgacctctctgcgcatgc

SEQ ID NO: 239933 - DNA, 122 bp, Homo sapiens
aaaaaaaaaaaactttactaagatgacattgctaagatgctctatcttgctctgtaatctcgtttcaaaaacacagtgtttttgtaaagtgtggtcccaacaggaggacaattcatgaactt

SEQ ID NO: 239934 - DNA, 122 bp, Homo sapiens
ccttgccgtcgtaggcggactggtcatacccgcggaggaggcgcccgtcgggccccaggtcgcagccagacatcctctggagggtgtgagaccctggccccgcccccgcggtcagcccagtc

SEQ ID NO: 239935 - DNA, 122 bp, Homo sapiens
agctgccggccttcagggcgcgcctggtggcgccgagcatcctgggaggtgtggtccgggcgctgtgccgaggattcggggtagtgtagtcctggcgccccgctggaggagctccccagctg

SEQ ID NO: 239936 - DNA, 122 bp, Homo sapiens
ggcgggaaggagctgaggagagccgcgcaatggaaacctgggtgcagggactgtggggcccgaaggcggggctgggcgcgctctcgcagagccccccccgccttgcccttccttccctcctt

SEQ ID NO: 239937 - DNA, 122 bp, Homo sapiens
gagccaagattatgccactgcccttcagcctgggggatagagcgactctgtctccaaaaacgagagagaaaaaaaaaaagaaaccaaaaaactcacatgtaccccatagatacgtatgacta

SEQ ID NO: 239938 - DNA, 122 bp, Homo sapiens
cacatgcacagcagggtaacggtgggatcggtcccacctcacctccatgctctgtgcattcgccttgggggacaggtaacaggttagctgtatatcttctcccactctgacgaggatgggct

SEQ ID NO: 239939 - DNA, 122 bp, Homo sapiens
agctgtgcaccatcacgtctggctagttttctccttaagtgttttttttttttgtagagacgagatctcgctatcctgccaagaaaatgctattatttatggagcacttaatttgtaccagg

SEQ ID NO: 239940 - DNA, 122 bp, Homo sapiens
ggatggcgaccgcactgagggacccggcttcggtgagcgctgcgatctccgggcctcccccggccgagattcttaagtcccaagtgagaggcaccagctcacgtctctgtagcacagggtcg

SEQ ID NO: 239941 - DNA, 122 bp, Homo sapiens
ctttctcaaaagttcagctcgttcaaccaactgatacttagttccctgaaatatttacaccgttatatccccagtgcctgttctgtgcctgacacaggaaaagcactcacaaatgaaagctg

SEQ ID NO: 239942 - DNA, 122 bp, Homo sapiens
ttaattacaaactttgaaatcttggtcagtgaaagttcattttagtgcatcttgcaaatacgatcaaaggtcttttcagtactgatttgatgatgcttaaccacagtgtgtgaagaatgaag

SEQ ID NO: 239943 - DNA, 122 bp, Homo sapiens
acagctctaaggggaaaaaaatgctccaggaagcagccacaaaggcgtctccgcgcgaagcgcccaggtttcccacgcgggctcaaggagctccgcggacagcctgaagccgcgcgtgcgca

SEQ ID NO: 239944 - DNA, 122 bp, Homo sapiens
gccaagatgatgaaacctcgtctctacttaaaatataataaaattagccaggcgtggtggcgggcgcctgtagtcccagctacttggaaggctgaggcaggagaatggcgtgaacccgggag

SEQ ID NO: 239945 - DNA, 122 bp, Homo sapiens
ctcgccgctgttccccccgccccctgttgcaggagacaccgaggctccgcggagctgcggcgggggcccacgcccagagaccgtgcgaggaaagccaacctcgtcctgcctgccctcccagc

SEQ ID NO: 239946 - DNA, 122 bp, Homo sapiens
tatgaatatcctattcctcaacaacatttcactccatggttttaacattctttcatgaaccgggccgggcacagtggctcacctgtaatcccagcactttgggaggccgaggtgggtggatc

SEQ ID NO: 239947 - DNA, 122 bp, Homo sapiens
taagcctcagatggaggtgctaaggttttcagcacaaaggtgtccccaccctaccagtaccgttagggtcctgggtcccaagctggccgtgccaagttcctcagctgaagttgtggccagga

SEQ ID NO: 239948 - DNA, 122 bp, Homo sapiens
ggtgaagactgccccctggtgggcgggagccctcgggaggcccgcaggcccagcgtcctgcgcccgtaatccctcaaaggggcttctctggaatcacccccaggccctggggccaggatcga

SEQ ID NO: 239949 - DNA, 122 bp, Homo sapiens
aacccgaaaacactcgacaggtcgtgaataatcgttttaatgagtgtgcaaagcgtgcgacggggtgcaccgagctgtcgggttaaacaaacaacttgtaccctgaccaaatccgattgtta

SEQ ID NO: 239950 - DNA, 122 bp, Homo sapiens
tgtggctggcatgttgagccgccgtccagagatcagctggcggctgctgagcaaacagcacgagctaatcagcaaaaggtcacgccggctccccgagtccccgcatttgaagtcatgcctca

SEQ ID NO: 239951 - DNA, 122 bp, Homo sapiens
catgatcaaagctgccagctctctcctttataatttcttctattgccccaaatgtgaggacgttattattcctccacagacaaaacaagtgtttccgctatggttttttttgtttgtttgtt

SEQ ID NO: 239952 - DNA, 122 bp, Homo sapiens
cctctcccaggcctggagggtttctggggaaggaaggaggcccggcgggctgtcccactgcgaacgatcggaggggggaagccagactggacgagcccaaagataaataaaggggttggctt

SEQ ID NO: 239953 - DNA, 122 bp, Homo sapiens
cgggtgggctgggagggggtgacagcctctggcttacatctgggaaccagttatgtcgcccgggcattttattttcctgaacaataagagaaagcatgattttctttcgctaagcccgcatc

SEQ ID NO: 239954 - DNA, 122 bp, Homo sapiens
accaggaggggcccagacccaactcagcagcaagggtggggcgggacggatctgtgcccccgttttgggctgcacaggctgggtccgaggccggcgtgttgccccagctatttttttatgta

SEQ ID NO: 239955 - DNA, 122 bp, Homo sapiens
taactgccagagctggatggaccttagaggtgccagctaacgcgctgtgagcgttttctgcggttaggcctgctctaaacatttgacatgtgttaaagcatttatgtgctttacccacaccc

SEQ ID NO: 239956 - DNA, 122 bp, Homo sapiens
ccggggtgctggggtgccgggagcaggcatgtagccctagccagggggccccgatgcggacgcggtgaggtgggggtttgcctgagacagtgtctctctctgtcccagatgaaggtcaccgt

SEQ ID NO: 239957 - DNA, 122 bp, Homo sapiens
gaggaatgcataaaattagtggactcctctgagtgacgttccccggctccaatcagcgggcgcgcaggcgcccccggccccgccccactgctgactctctttggctgattcctgcagggagg

SEQ ID NO: 239958 - DNA, 122 bp, Homo sapiens
acggcctgatgcagaaccacactcagacacccgccctgtggagcacaacacaaggagcagcggggagccctgaaggggcccaggcatggcaggcaacccagcacgtgaggaaacctgccctc

SEQ ID NO: 239959 - DNA, 122 bp, Homo sapiens
ggggaggcattgccccaccccgagaagaaaacagaaatccacgagtgtaaaacatggatgcggacaacagggaccaagaaaacttaagtcgtgtttatcaaatgtcaggtggccgaggattt

SEQ ID NO: 239960 - DNA, 122 bp, Homo sapiens
tcagattgtggtcaaattgctctgccagactgtgtgaacaaaaaagtgaatggaaattttcgttttaaaaaataatacttttggacttagcccgtggctaagaagaagtaaggaagccaagc

SEQ ID NO: 239961 - DNA, 122 bp, Homo sapiens
gcccgcagctggggagcctcctcctcctcctcagcatcagacctaacaggtgtttccagccgggaggatgggctcaaggtcgcactcacagctgttgctaactcctgttctggactgtttct

SEQ ID NO: 239962 - DNA, 122 bp, Homo sapiens
tcaccttcctgtacttgcctcggccgccagccgatcccgcccgatacccccgctacctggcgctactggagactctaacccgagacctgggccccacgctgctggttcatggggtcactcca

SEQ ID NO: 239963 - DNA, 122 bp, Homo sapiens
gcctgcctatcctgcgatctttggcggggacacggagacacggcactgaggggctccgggcgactggggcggggaagtcggagttcctggccaacggcccgcgggggcctggatcctttgtt

SEQ ID NO: 239964 - DNA, 122 bp, Homo sapiens
tgcctttgtgcaacactttattgggaaagatttacacacggtgacctgtcataggccaagcgatgagaagagggcgccaggagcgctggggtcccgaggtggctcagatggaagccatggga

SEQ ID NO: 239965 - DNA, 122 bp, Homo sapiens
tctccgctggtcacggcctcggaattccgacatgctggactgtggcttgggaaactgactcggttgttctccattcctgatcccatttcctgtttgtgggtgtgatggctgagttgtgcacc

SEQ ID NO: 239966 - DNA, 122 bp, Homo sapiens
cggcgtctccccgcacgggccccaggctcagccagcttctctcgcagctcgcggctgattcgcacctccaccgccagccgcacattagacctcaggctgcggcggggacacggcaggccgca

SEQ ID NO: 239967 - DNA, 122 bp, Homo sapiens
actctcaactgaagcttctgcggatggttagctgggtggatgtcttcccgcttccttggccgtgattttatcaacttgttactagacagccagcgcactaataatggcagttaatatgcgcg

SEQ ID NO: 239968 - DNA, 122 bp, Homo sapiens
tttagagaaaacaatggtgttctctgtgtacccttccgcgagggctggggagtataccgccgcgcagaagacgcaggccaggggagaattcgcgccgggcggcaggcggggtggcgggcagc

SEQ ID NO: 239969 - DNA, 122 bp, Homo sapiens
ggtccatggcggaggctgggtggaggcggcagcagcgacagacactcagcccgcgagcagcggccgggctccacaccccgggcgggcggcagcagcgggcgggcgacgggcaggggcggccg

SEQ ID NO: 239970 - DNA, 122 bp, Homo sapiens
ccacgccctgttgattcaaccgcagacccgggtcgccgccccctcccccgccttcctcttcgcctgagcccgcccgccccgggttccagccacccccacccgcggaccccggtggtgtcttc

SEQ ID NO: 239971 - DNA, 122 bp, Homo sapiens
gaaggacttcaatatatggttaacctctcatgtgctctgtgaatctagacacactccatccgagttgctgtatgatttcctgaccataatgacctggccaggggaacagctattcctttgac

SEQ ID NO: 239972 - DNA, 122 bp, Homo sapiens
atgggagtcgaggcacacagggatgaacaaagtgggaagccgtcaccactgtagacctgccgcccccgcgggaggaatgggagcctggttttgagctggggtgcctgacaggagcagcagtc

SEQ ID NO: 239973 - DNA, 122 bp, Homo sapiens
aacaaagaattggggtgtcgtcgaaagctgtggaggctggaggtaagctagctaccagaccgactagggcgaggctcacgaattaattaccacaaccctaccaggtattggcgcttcctgct

SEQ ID NO: 239974 - DNA, 122 bp, Homo sapiens
gttgttggcttttcgttgtttggttttgtgtgttgtgcgtgtgtgtggcggtttttcccccgtggtgcattttattttttatcgttgtgctcttttttttcttttttttttttaacccagtg

SEQ ID NO: 239975 - DNA, 122 bp, Homo sapiens
aacaaccagcaggctgcagccacccagagcccaggcgattctcgccgcctgagtatccagcgctgcatccagtctctggtccatgcttgccagtgtcggaatgccaattgctcactgccatc

SEQ ID NO: 239976 - DNA, 122 bp, Homo sapiens
gactgagaattacaaaatttcttgaaaaagcactaggcacaatagttggcgttcaacaaacgctcacacacacatctgccctggaattgggtctacttaaacagaagggggaaaaaaagctt

SEQ ID NO: 239977 - DNA, 122 bp, Homo sapiens
aaacaatagaggtttgtttcccacttgctttgtaggtccatgatggattagtagggcaggcgtctctcatcttagttacccagggagctaggccactcacatttcactggccaaagcccatc

SEQ ID NO: 239978 - DNA, 122 bp, Homo sapiens
tcactaattccgcacatggtaactccgaactctaaaactctgaccgttaagagcttgcatcgagagccactgcgagtagctgctgttatgacatggccatttcattctccacaacaagagaa

SEQ ID NO: 239979 - DNA, 122 bp, Homo sapiens
tgactgatagagcttttgccagacaaaggcgcaaatagcaaggcattactcatgccaagccggagaacactgtgtcacggctgacaaatttatgggagatatgagctcacctcttgcacaaa

SEQ ID NO: 239980 - DNA, 122 bp, Homo sapiens
catttaaaatgcagtgctgtttggagcccagactgggcggcatgtgcagccgtgtgcccgcgccgttcctcacgtgcacatgggtggcttgagcgcataagcatgactgccaatatcacggt

SEQ ID NO: 239981 - DNA, 122 bp, Homo sapiens
tgtgtgtgtgtgtttgtgtgtgatgtgcttagtctggtaaggatctaaaaataaataaaacgggaggtaaaacatcaatgtatctataatatgagtcaaaagtcattgagtattggaagtgt

SEQ ID NO: 239982 - DNA, 122 bp, Homo sapiens
agctctcagggattaggacagtggcaggtagtgtctgccggggtggcagggctggtggaccggctagcagtgcaaatcttaaatctcccacagtgtgatcttcctatgggctgggatacaat

SEQ ID NO: 239983 - DNA, 122 bp, Homo sapiens
cgggggtccccgccagaccccctcggccggccgggccgcgcttcccgctgccccgccggccgggctttgctcccgccacgctcacgtagctctggtggggaaggactctcctgggctggacc

SEQ ID NO: 239984 - DNA, 122 bp, Homo sapiens
tcgcccccgacgtcaggcacggggcgggacccttgcagctgtccgtccagtcccgttccccggaaagtgaggggcgggaccctcgcggctttctatccaatcctgttccccggcgaatgcgg

SEQ ID NO: 239985 - DNA, 122 bp, Homo sapiens
tgcaagagtttcagacccacggccagagtggacttttcttccttgtgctcagagctagctcggagcaccgtagccacattgcagcccacagggaagggtggaatgagaaatggaagagggga

SEQ ID NO: 239986 - DNA, 122 bp, Homo sapiens
cataaaaagagcttcccataaccacctaccctgggcgctcagttagtacggtaaacagagcgcgagcattaaggctttttatgataattccccacaagttgtgaaaagcgaccatccttggt

SEQ ID NO: 239987 - DNA, 122 bp, Homo sapiens
agtcctgcaatacaatcgattcacgctgcctgcgggcagtcctgcaagacaatagactcacgctgcctgcgggcagtcctgcaagacaatagattcacgctgcctgcgggcagtcctgcaag

SEQ ID NO: 239988 - DNA, 122 bp, Homo sapiens
gatgttaagtccctctaaacattttactaaatctaacgatagattgccaccagctgagagcgtttctcggcgaagagccggagcgacgcgctgtcctgggtgcagagcgcgtgctcaacaaa

SEQ ID NO: 239989 - DNA, 122 bp, Homo sapiens
agacctcccatgcttcaaagtgtgttgcttcaggttgccttagtttgttggataaccaggcgcctctttgaattcactgtatgcttgtgattaatgtcattcacacaacttctcttttcttt

SEQ ID NO: 239990 - DNA, 122 bp, Homo sapiens
agtgagtggcagaggcagggtttcaatgggacagtccgtggcggagcacactggctccgccgccagcccccctgcggtacccatccgcgctcgccgcctgggaccgccagcccggggcgggg

SEQ ID NO: 239991 - DNA, 122 bp, Homo sapiens
ccgcgcaggtgggggagacctggctggccggaactgggattcggggggagcattgcccttcggcgtaagcgctgctcaggtagagcccagcgctccgcttctccacagaacgtgctggcgcg

SEQ ID NO: 239992 - DNA, 122 bp, Homo sapiens
tactctgtaaatgtgggctatccctgtcaatttacagatcaagaaccatcctgtgagcctcgaaggcattgcgagagatacccaaagctcaaccactagctatccccagtctctatttgtct

SEQ ID NO: 239993 - DNA, 122 bp, Homo sapiens
atggagtggtccacgatgtagtcctggtcctcatccttggggcctgcattgtagtacacgcggtaactgtgactagcctgggcaacctgtttggtggagccggtcagacccaacagtcttgg

SEQ ID NO: 239994 - DNA, 122 bp, Homo sapiens
tctgtggatccagctgagacacagggctgggaaacaaagttaactgttctccctcctgagcggcttgtggttcaggaaacacccccaagcccctgccttgggggatctgtgggtgagaggga

SEQ ID NO: 239995 - DNA, 122 bp, Homo sapiens
ggggacagaccccctgattggccagggtttgtggtggtcagacccagccaccttccctggcggtcccggctcctttaagccccaccaagtggggagccgagctgggcgcgccgcttcccact

SEQ ID NO: 239996 - DNA, 122 bp, Homo sapiens
ggggtctcggaggggaccagaggctgcagtgacaggcaacctggggtcctgacacgtgatcgctcttgttccaggaagatgaactcttccggatgcctgtctgaggaggtggggtccctccg

SEQ ID NO: 239997 - DNA, 122 bp, Homo sapiens
actggatgtgcctgtccttttgtaggacattctcccatcccaaagatgaggctgtgctgccgtgtgggcaagctctgtggggagaggggaggccagtgggttgtttttgccatcacagaata

SEQ ID NO: 239998 - DNA, 122 bp, Homo sapiens
agggaggggagatctcttggttttccacggctgggatctctatgagaagatatcctttatcgggaggtcggagctcttattagatgtgggtccctgagagtggaagcctggggaggttgggc

SEQ ID NO: 239999 - DNA, 122 bp, Homo sapiens
atgcggggaggtcctgggtccagtttccatctcactccccgatgggcttgtgaactgaggcggtggcattctctgcctggcccttttgtctggttggagaatgagacctactgcctggagcg

SEQ ID NO: 240000 - DNA, 122 bp, Homo sapiens
cccaacatgcacggaaacctaacaccgtgtggatgacgcagtacctatacccaacacgcacggaaacctaacaccgtgtggatgacgcagtacctatatccaacatgcagagaaacctaata

SEQ ID NO: 240001 - DNA, 122 bp, Homo sapiens
tccaacatctgttttgcctatatggctgatactctaggccgcactccgttccatctctggcgtaagttcctttcttacagcagcctcctcggattcactctcctttgacacatttggatggg

SEQ ID NO: 240002 - DNA, 122 bp, Homo sapiens
gggactgggctcccacgtgtcccgggctccgcgcagagctgagcaggtgtggagagtggtcgggtgcccagcgttgcccctccaccacgcgccggccgtttgcccccggggtccgggtccgc

SEQ ID NO: 240003 - DNA, 122 bp, Homo sapiens
gaatatttcaggagagggagaggcaaggccttgccaacctgagaaatgacaaccaagtatcgtcactgtaagtatcagtagtaatagtgagagtgtgtcctgtgcatcagtaaagcatcttt

SEQ ID NO: 240004 - DNA, 122 bp, Homo sapiens
cctctaggcgctcggcttggagctcaggggccggtcacgagttctccgtcacccgtggggcggagaaaacccttgtgattgtcacaggatatagctttgaagaatcctgcgcttagcctggg

SEQ ID NO: 240005 - DNA, 122 bp, Homo sapiens
gtgcagtcagctgtccggccgctcggtcgcacttctcatcagctcaatacccgcagaggacgtgcaccggttccctcccggacacccaccccgtggtctccgccgcaccttctgcccaccgc

SEQ ID NO: 240006 - DNA, 122 bp, Homo sapiens
cctgctagaggccctcccctcacctgcgggccagctccgccgcgctctccgtggccgcaccgttgaccagcagggacacgctggtcacagccccggccagaaaggcctccacgataccctca

SEQ ID NO: 240007 - DNA, 122 bp, Homo sapiens
gtttgtcttccttcttttgcgcaaagagccttctccgtgttattatttttggccattgctcgagtttcgggacccctcccggtccgggcgtctcatctccctcctcccggtccccacccgat

SEQ ID NO: 240008 - DNA, 122 bp, Homo sapiens
cgtgcaaaacacaactctactaaagatcagtagcaaccaggaacgaccaactcccagttccgagtttcttgggaaagaattttatggcagactcctctcactcttgtaattcacttttgtct

SEQ ID NO: 240009 - DNA, 122 bp, Homo sapiens
cccccacgatgcggggagtaagagccagcccctcttgccccccctggctcttaggatccgcggtggactcacagcctgtttaacatattgtgagtaatatcacctccccctctggagatttt

SEQ ID NO: 240010 - DNA, 122 bp, Homo sapiens
ctgcagcttcactcctgagccagcaagaccacgaacccaccagaaggaaaacactccgaacgcatctgaacatcagaagggagggactccagacgcaccactttaagggctgtaacactcac

SEQ ID NO: 240011 - DNA, 122 bp, Homo sapiens
ctaaaatttcagttaataaaatatgtgcaaatgaagctgtcacagttgcacttaataattcgcactcccaatttagcttctcaatactgcaagctaggcgttactgatttaggggttttaga

SEQ ID NO: 240012 - DNA, 122 bp, Homo sapiens
tcactcaaaacctcttgaactgtggaaacgatggggaagagagtatgtcaaatgagatcccggggaaggaatgcgagcttgatagcttgaccaacagcaacaaaatgacctgagaacttact

SEQ ID NO: 240013 - DNA, 122 bp, Homo sapiens
gcggccaagggaggaatgtgggcgcagccggaggctggggccgaggttcctctggcccagcgcccagtccagcctccccgccccagctgggctccccggagctggttgccaggcttcggctg

SEQ ID NO: 240014 - DNA, 122 bp, Homo sapiens
tgtgcacacacacgtacacacacagagacacacacgtatacacacacagagacacacacacgtaccagcgctgtgggggtgacctctgactcctgaagtgtgcacacatacatacacacgtg

SEQ ID NO: 240015 - DNA, 122 bp, Homo sapiens
ggtgtggccgagggtattcggaactacgcaatgatttggagaacctgagctgctgcccaccgcaggccgggggtgggaacccctggagcccggccgcgcagtagccgcgatcctgccaccag

SEQ ID NO: 240016 - DNA, 122 bp, Homo sapiens
aggagtcggacccgggtgggaggccgagcgtgggcacccccgagaatcgcgtttggattccgtgcagtgatgatgaatgcccagttttgcatatgatgattgcatagaattggcgtgataat

SEQ ID NO: 240017 - DNA, 122 bp, Homo sapiens
ccttgcccctctcgtctctgtccgtttacaactaggctctgtgttccctctgtgactgcacggcttagcaattggccctgtgacttccagtcacaaaagaggaaggtgttagcaagtctcaa

SEQ ID NO: 240018 - DNA, 122 bp, Homo sapiens
ctcccggccgcggctgccctctgcccgggttgtccaagatggagggcgctccaccggggtcgctcgccctccggctcctgctgttcgtggcgctacccgcctccggctggctgacgacgggc

SEQ ID NO: 240019 - DNA, 122 bp, Homo sapiens
gccgggcgagggccatgctgagcctcgcagccaagctggtggccttcttctggaggacggcggacacccctagggaggaagccgggcagctggagcccgagctcgcggaaggtggctcgcgg

SEQ ID NO: 240020 - DNA, 122 bp, Homo sapiens
agtagttgaataaacatcataggtcacaataaccctgggactgcctcttggggaggtagccgcaaactctcgcaggtggcagtgacaccagtacttctccggggggttgttcgagtggagga

SEQ ID NO: 240021 - DNA, 122 bp, Homo sapiens
gcggtttagaggtgggacccggctagccggcggttcaggtggccggacctgctggaagggcgggcgtgggggatgggacgcaccccaggggatgctcctgcagagcttttcccaggtgggca

SEQ ID NO: 240022 - DNA, 122 bp, Homo sapiens
agacttcctggctacttagccagtatcaagtaattaaaaaccactccatggatggggccacgccggcagagaaaccttcttacagggaatgactttatgatacccacacttttcaaagagtg

SEQ ID NO: 240023 - DNA, 122 bp, Homo sapiens
gagctcacgatgcaggcccacgaccagggctcgcccgcgctcagcgccaacatgagccggcgcatgttggtgggcgacctcaatgacaatgtgccgcgggtgctgtaccccgcgctggggcc

SEQ ID NO: 240024 - DNA, 122 bp, Homo sapiens
gacagctgctccggcctcccgcccacatacccgctctcgccgcgggctggacgacgggaacgaggctcaaggctgattggctctgacgcctgctcatgtagccacactttccgcctctgcgc

SEQ ID NO: 240025 - DNA, 122 bp, Homo sapiens
aagcccaaacaaaaacgctgtccggcgccaggcgcccacctgcaagcccaagccggtgctcggccagttacaaaagaaatggtcaggatctggacaacgataatgatagtattaatcctcct

SEQ ID NO: 240026 - DNA, 122 bp, Homo sapiens
cccaatcacgctttgagtctgcgcagtagctgcagcccaagccatttcccatttttccgccgccgcgccttgatgacgtaattttcctgcgcctcggggcgagcagcggcgcgcaaggaaag

SEQ ID NO: 240027 - DNA, 122 bp, Homo sapiens
ctcctgcggggctcgtgtttgccgagtggagacatagctcctgggctctgctcggcccatcgaggttggctggcccccttgggctcctgttgctctctgcctccccccagcctgtgtgcgtg

SEQ ID NO: 240028 - DNA, 122 bp, Homo sapiens
caccctgggaagactactgcgaatcactctgtctctcaaacctggccatggctcagcccacgccctttcatgtatttgcccttttccctgctaacagaaatggaatcagaacaaattaatat

SEQ ID NO: 240029 - DNA, 122 bp, Homo sapiens
cccacacctgcggcgccgccacaaagttccggtgagcggcgtgcgctcggaactggggtgcgccccggccagactcggagcagctccccagcccggccccgctccacgtacccccgccccgc

SEQ ID NO: 240030 - DNA, 122 bp, Homo sapiens
gagctcgcacttttcagcatcgcagttttaactcagaccaaagggcagacgtggagcatgcggggccggaacgagtgggggaaatgaagtcctgaaagcagaccccacttctgcccgcttct

SEQ ID NO: 240031 - DNA, 122 bp, Homo sapiens
ccggcggggctgtggaggaagaccggccgcaatgagtgagtgctgagcagagagaagggccgttctcggctggtatcaggcccaagagagtcaacaaaggggggacgaaagggagacaggga

SEQ ID NO: 240032 - DNA, 122 bp, Homo sapiens
tgccaggacacggattcgcattgcgtttctccgggaccagccaattgctcagtcattacccggtgacccttagctatgcagctcaaagtgtgacaattgtgggccatgaaccctccaggaag

SEQ ID NO: 240033 - DNA, 122 bp, Homo sapiens
caggtgccgctcgtggggatgaagcgagctctggagtgtgaccaaggtgcccacacatgccgtgctcagcctccaaaggggaaggggtgctcccccaaaacctagggatggggcagcctcgg

SEQ ID NO: 240034 - DNA, 122 bp, Homo sapiens
atctgactatctcgcacgtacagtctcctccctgtacatgaaggagaatctgctctaacacgcggatctgactatctctcacgtacagtctcctccccgtacatgaaggagaatctgctcta

SEQ ID NO: 240035 - DNA, 122 bp, Homo sapiens
gaggcgttttgaagagtgctgcgcgcacctgcctctcggagatatccaactccacccgggcgtctcctgagagcgcacagtccacagaccccgggagggctgcccgccctaggacacgtact

SEQ ID NO: 240036 - DNA, 122 bp, Homo sapiens
cgactcaaggtaaagtcggcaggcccaggaaaccgagtgttgcgggcgtgggaggcgctacgaggtgtctggacccaaccaagtcccgggccgcggaagccacctcggtgccagcgagactg

SEQ ID NO: 240037 - DNA, 122 bp, Homo sapiens
gtgaggacctcaggaagctttcaaacacggtggaaggggaaggggagcaggcatcaattgcgaaggaaaaagagagaggaaagaggtgtcacactcttttaaacaaccagctcttatgtgaa

SEQ ID NO: 240038 - DNA, 122 bp, Homo sapiens
ccttcgtcaccgtgaacgcccagtggggcatcctcagcaagtgcctgacctacagcaaggcggtggccgacccgttcacgtactctctgctccgccggccgttccgccaagtcctggccggc

SEQ ID NO: 240039 - DNA, 122 bp, Homo sapiens
ccagcacggcatccgcgggggatccctacctgtcctttagggcttgcctcataggtcaaacgtcacctcccagggaggtatggcctgccccctggccaggtgggccccttccacgctcgcct

SEQ ID NO: 240040 - DNA, 122 bp, Homo sapiens
agagacgtgtcgccagctgctcggagagggactcttattcagcctctaaggcgtcaattgcgcctccagggttccaggagtccagagaaagcccttcggggtcttctgacctggggtagggt

SEQ ID NO: 240041 - DNA, 122 bp, Homo sapiens
gcggcttcgctgagcatcaggtgctggtagcaatgcaccccaaccgcttgccgcaggggtcggacctgccctggagcagggcagaggctggccgagactgagccaggaacatctagacccca

SEQ ID NO: 240042 - DNA, 122 bp, Homo sapiens
gagcgcgagagtcctgggtgcgcgcagggcacttactttctatcctccagcaagcatcgtcgcaagcctcccaggtgtagaaattgttggcgttgccctcgcagcccccgtacaggaactgg

SEQ ID NO: 240043 - DNA, 122 bp, Homo sapiens
tctgctcaagccgaaagccctaataaacttccttgctcaagtccatcttagattcttggtcgatttctattttctgagggtcaagaacccactgccagtatcagacagggtgcaaagaaaaa

SEQ ID NO: 240044 - DNA, 122 bp, Homo sapiens
agatagaaagggcagtctggggatgcgcgtccccgaggagggtttctttacacacccctgcgtgccatagaaccgggtcagaatcactgcttagcactgattccaaagttcagccatgaaga

SEQ ID NO: 240045 - DNA, 122 bp, Homo sapiens
gaggaagatgaagggttaactggacacaagtgtgtaaagattatctgagtcaacggctgccgaaaattctggtatgagatagcaatgagatagtttgagctcaaaagctcaaacttttgaga

SEQ ID NO: 240046 - DNA, 122 bp, Homo sapiens
cctccggactccggaggcccccaagattgcctttcccttcccggtcggcagtgacgctcccgcaaggagctgacgcccaggcccttagcacctgtcacagccaagcacccttttactccggc

SEQ ID NO: 240047 - DNA, 122 bp, Homo sapiens
cttttccagcccagcccgacccctgggggcgcccctctctcgggacccctctcttgtccccgtgcagaccgcttccgctcgggtctgttccctccaggaagccccttcccctgcttccagga

SEQ ID NO: 240048 - DNA, 122 bp, Homo sapiens
cgctggcggacatctcgctgtcgctccggcccgcggcttcctcctctaggtctttggaagcggccagctcacagaccggctggccgaggctcaaggatccccccgcaaggccggccccgctg

SEQ ID NO: 240049 - DNA, 122 bp, Homo sapiens
ctggtctgttcttgctcattcagaaactggttggagtaaaaagattccccttttcaagatcgccaaaagtggaactgatcgctttcgaagggactccttcaggaagaaggagaaaaattcga

SEQ ID NO: 240050 - DNA, 122 bp, Homo sapiens
catggcaacccagaaaggcagtcctctccccttccccaggctggactgcccaaacctgcccggcctgactgctctagaaagggcaccttagtgtccatggagaggtggcaccagggcaggtg

SEQ ID NO: 240051 - DNA, 122 bp, Homo sapiens
gatcatgactcacctggacctggaatctgggctctagcagctgcctgtcacagagcacgccggcctcaatccgggcctgtgggcggagtggaggggagggtgtcccagctgatagccaaagc

SEQ ID NO: 240052 - DNA, 122 bp, Homo sapiens
tccccagagatggctcccctcagcggcgcggctccggataactggaggaagcgcgggttccgaggcttcaagggcctcattgttctgcctggaggggcacattgaaaatgctccagggttta

SEQ ID NO: 240053 - DNA, 122 bp, Homo sapiens
gctgaggctggcgaagccccggcttctctcgcgcttcgggctgctggcttggtggcaccacgctcacactcgctggcccgctgaacgcccctgggcctgtccgccgcagtatctggcggcgc

SEQ ID NO: 240054 - DNA, 122 bp, Homo sapiens
agagtgagactccttctcaaaaataaataaatagcttttcctccctgatgcaaacgaggtcgcacgcatgaggcttctccgccgccgccgccgcagacgccgcggcgatgcgctacgtcgcc

SEQ ID NO: 240055 - DNA, 122 bp, Homo sapiens
gtgaaccaaaattcctcctaagtcacatagtaaagttggaaaacagacccatgacctccccgcgcggccggtgcctcctgccctctctctaggagggtgctctcggacggtgtgtcccccac

SEQ ID NO: 240056 - DNA, 122 bp, Homo sapiens
acttgaagtctcagtgtggacctgtataaacttctgatactctgctagacactcagcaaacgctggccattgcaacgagtgtcactagtgtggatgatattgctgctacgcagtgcagcttg

SEQ ID NO: 240057 - DNA, 122 bp, Homo sapiens
agggggtgagaaggttggttggctggatggctgcttcaagtaatgcgaaaagtaaacccacgaaaccaccttttgaaaacaaagtgcgagggctgtgccatcctggctgcagcagggtcgta

SEQ ID NO: 240058 - DNA, 122 bp, Homo sapiens
catgatccacccaccttggcctcccaaagtgtggagattacaggcgtgagccaccgtgcccggccagcaacaaccattgatgttttaaagccaaagtgcactgggtgaggggggatgggggc

SEQ ID NO: 240059 - DNA, 122 bp, Homo sapiens
ctcccctgggcgatcggaccttggggccagggtcggctgccagggccctgcgagtgcagccgccaccgcccgcaggcttggctccgccccgcggggcgcgcccagggcagagtccggcgccg

SEQ ID NO: 240060 - DNA, 122 bp, Homo sapiens
tggtattttggtcagtgcagacagctgctgggggtgacgtcagtgcagtgggcctctgcacgctcagccccggatgtcgggagggggaggagggaggggagagctactggatgcaaagctct

SEQ ID NO: 240061 - DNA, 122 bp, Homo sapiens
agaccagcctggacaacatggtaaatcccatctctacagaaaatatacacaaaaattagccgggcatggtggcacacacctgtagtcccagctactagggaggctgaggtgggaggatcgct

SEQ ID NO: 240062 - DNA, 122 bp, Homo sapiens
ccactcctaccaaggagctccgttctaccagttctcctccacccagccggggctggtgcccggcaaagcacaggtgtacctgtgcaacaggcccctttggctgaaatttcaccggcaccaaa

SEQ ID NO: 240063 - DNA, 122 bp, Homo sapiens
ctcccggagcgtgggcgagtgattccgattgtgcagcagaaacccagggtctcacgggaacgaggaaacccgcccacgcccagcctccaagcgacgctctccatgacaaccggcacttggta

SEQ ID NO: 240064 - DNA, 122 bp, Homo sapiens
gaggtagtattagcagtctaaggggcatctgaaaatatgctgtgcattttttggctgttacgaggatttgcaggctcaaatggcattttgtgggtgaaggacctataaatgtcctgtagtat

SEQ ID NO: 240065 - DNA, 122 bp, Homo sapiens
gaacatacataaagcatgctggcccagggtaggtctccactctgtaaaggacagtaccctcgacttccttcttggggtaaagaaaatctagacaacttccttgctggctgatgagccctaca

SEQ ID NO: 240066 - DNA, 122 bp, Homo sapiens
tattaacatttgaggtgttctgaccagaagaagacagagcggatgatcattcattcaccacgttgacaacctcgcctgtgattgacagctggagtggcagaaagccatgagatttggtagtt

SEQ ID NO: 240067 - DNA, 122 bp, Homo sapiens
cggccgcgctgcacgtgcagggaccggtaggcgccggggtcagcgccagcgtttgatgtgcggcggggagcgggccgagccccgggaggccgcttcgcacctcccagtgtgtccgggttgag

SEQ ID NO: 240068 - DNA, 122 bp, Homo sapiens
taaacacatcccgactgttttctgcaatgaatttagaggattccctgggatttaggagcccgtccattctgccctttgggacccggcgggccaaactcttcccgccctaggcgggtcaaggt

SEQ ID NO: 240069 - DNA, 122 bp, Homo sapiens
tctgcctcctggacttcgagcggcaccttgacaggatagcccgaggcagcacggcgttcccgcagacgctgggcctgccgctgggcctcaactcgcttggcttgcagcttgcccagctcccg

SEQ ID NO: 240070 - DNA, 122 bp, Homo sapiens
gggacagaagtgccagggacctgggaagtgcagacttaatacaaggcagagcaaaactcacgcgcctcggtaggacctttactccacgtgatccacttccgggtttgctgcgcaggacagaa

SEQ ID NO: 240071 - DNA, 122 bp, Homo sapiens
cagggggccaccatgaccgtctctgtctccttcctccccgggacctccgcgctctcgcggcgcttctggattcacatcgcagcttgtgtcatcgtctgttctgggaagacagctggctgagt

SEQ ID NO: 240072 - DNA, 122 bp, Homo sapiens
acctcctcctcctcctccatgccagcggagtgatatcaggacgcgcgagctcagtaaacacggcagcggcggcggctggaggccgtgagacaggcccgcggacacggcgcaaaacccggccc

SEQ ID NO: 240073 - DNA, 122 bp, Homo sapiens
acccccaccccaaggcctttggggatacacacacagtcactggttcctacaaccaccacacggagactctgccaccccacagaggcctctagatggttcttgccctcaaggagctgggggcc

SEQ ID NO: 240074 - DNA, 122 bp, Homo sapiens
aattttctatctcctttttgggacccttggaaccttgcataagagtgtaggttccctggccgggtgtggtggcttatgcctgtaatccctgcactttgggaggccaaggtgggttggattcc

SEQ ID NO: 240075 - DNA, 122 bp, Homo sapiens
ccccagtggaagcctggattaatgagcctgataaactctgatttaccctttaggatagctcgagaaaaagaccccacggtgatcattcaaggtcaataggacaggccatcaccaagtagcag

SEQ ID NO: 240076 - DNA, 122 bp, Homo sapiens
ggctgggcagtggccatggcggccaggcaggcctgctgtcatctagagctcctgttgaagcgcggccggatgtggtgcctccaggtggctgctgacatggagcctttcctgacgagcagagg

SEQ ID NO: 240077 - DNA, 122 bp, Homo sapiens
agaccgaggtgagggaaacccccggcctcgggtgcagctggacagaagcgcccatgcggacgggcgaagcatggcagtcactcggcacctctgcctcaagggctggggattcctcatccccc

SEQ ID NO: 240078 - DNA, 122 bp, Homo sapiens
ggcaacacgtggcagagccggcgtgagtccggtgggtctgatcccagagcctcaggttgacgccacttccttggcacggaacagcgtttactgaatcttagagcaaaatgcttttccaatga

SEQ ID NO: 240079 - DNA, 122 bp, Homo sapiens
gccaggcctttattcccagaccccgaggctacttgggggtccggataagggtgtggtatacgggcttgacgatgaggtgcaggtgcagggcgttctcaaccaggtactcggagttgcgccgc

SEQ ID NO: 240080 - DNA, 122 bp, Homo sapiens
tcgccgctgccgcaggaggaaatcgtgtgaagctccatccatggcgtagaatacattagccgaggctgggatagtcagctctgaaggttcaggggatggatgtaaagcacacacacagttgt

SEQ ID NO: 240081 - DNA, 122 bp, Homo sapiens
cagttaatttgggtaagggaagaccgtttggtccacagctggctggaaagcccaggcccccggcggcagcagccccggccgatccctcggcctcccgggccccgccagaagagcgcggcgca

SEQ ID NO: 240082 - DNA, 122 bp, Homo sapiens
cccactggtccccaggctctgacctctgaacccgctggcccctgctccgaccactgagcgcgctggtccccaggctccgacctctgaacctgccggccccggctctaatgtctgcgctcact

SEQ ID NO: 240083 - DNA, 122 bp, Homo sapiens
ctattaaaacacgcggcagaatgacacagccagcgggtcgtcctcatctctattaaaacacgcggcagaatgacgcagccagcaggtcgttcatcttgacaaatgttctgtagcgggtgcta

SEQ ID NO: 240084 - DNA, 122 bp, Homo sapiens
tcccctgcgccaaagcctcccacatcagggtgcagagtgaacccctaaacgtgggcaagtcgggttctagaaaggaagtatatactggagagcgcagtgacagtattaaatggcgtgaaagc

SEQ ID NO: 240085 - DNA, 122 bp, Homo sapiens
ggtggcggaaatgaagtccgaggtcctacgtcgaggatacgggtgaggtcatggccgaatcgggaagacgagagatggggccgattgatctagaaagacttcggcggatgcacatgcgaagt

SEQ ID NO: 240086 - DNA, 122 bp, Homo sapiens
ctcagtcaccatcacagggaagagtaacacaacatttatccccaaatctctctgtagactcgccctcagaagccattgttcaaaacatgccagaacattacttcacacttgcatagcaccca

SEQ ID NO: 240087 - DNA, 122 bp, Homo sapiens
ccagggtgcagatgccttgctgaggtagcagagatgccatggattcttgcatcatcaagtcgcatttccccacagtgctcaatgcctgctatcttgctcttcttctccttcaaattcccacc

SEQ ID NO: 240088 - DNA, 122 bp, Homo sapiens
attctgagcccagatctgcctgattctaaactcacattttcttcactggaagttgacctacgtttgcagtcaccatgttgagtgaatgaagcaatgggttctgagatgtttctggtcaccta

SEQ ID NO: 240089 - DNA, 122 bp, Homo sapiens
tgaataaccaacagacccttggagggtctcttaccgctctggacttgagttggttaattccgctgcagagacggagtggggcgggggcgggggtgggggtgggggtgggggtgagtggtgta

SEQ ID NO: 240090 - DNA, 122 bp, Homo sapiens
ctcaagtgattcacctgccttgacctcccaaagtgctaggattacaagcatgagccactgcgcccaaccattaattttgattttttaaaaatattgcattaggctgggcacggtggctcacg

SEQ ID NO: 240091 - DNA, 122 bp, Homo sapiens
ggcggcccgaaggaggaggctagaccggcgggcgcacagccacagttctgcagtgatccccgggaaggtgggcagccggcccggtgacctgcagggtccgagctgtagaagccgcagccgcc

SEQ ID NO: 240092 - DNA, 122 bp, Homo sapiens
tagggctcagaggcggaagcggaagcacattctgtcacgcaattggagttgctgaggcgacgcaacaagtgtgcctcccccctccatggagatccccgccccatcagagaatgttgcatgat

SEQ ID NO: 240093 - DNA, 122 bp, Homo sapiens
atagaatttagtttagagttgaagtcacagcttacagaaaatgtgcctggatttccacagcgcttcccaggttatatgatgctgttcctaagagagaattcccagcttctttgaggaagtgg

SEQ ID NO: 240094 - DNA, 122 bp, Homo sapiens
gccactttcttctctggaatgttaatctgctcttattggagttagcaaccccaggaggatcgcttcctgatttgtcttatccagaaaaaaaaaaaacaaaaaaacctcctctttcccacctc

SEQ ID NO: 240095 - DNA, 122 bp, Homo sapiens
tcccccaactgcacggaggcgagcaggagtctaaatgaaacagacctggaagctcaggggcgagtccagagacactcaagcacactgggctcactggctgggaccttgagcctcccgctctc

SEQ ID NO: 240096 - DNA, 122 bp, Homo sapiens
gacccgggagagccccaggcgcctttacctggtttcatcttcagttgaggccaaaatctccgcaggttgctaggggccgggccagggctcggtgggcggggctgaccgcgggaactgggcca

SEQ ID NO: 240097 - DNA, 122 bp, Homo sapiens
gccaagcaccgcttcttagccggcccaggaagggccgaggcagtcgttatcctggcagcccggctctgggtcgcggcgtggccgcagggttggggtcagggaagctcagaggggtctaggag

SEQ ID NO: 240098 - DNA, 122 bp, Homo sapiens
gactctgtctcaaaacaaacaaacaaaagcttttttgacagctggtgagttggagccaagcgtgacggtgctagagcccctgcgccgcatcctttcctccgcgacctgtgacgagtgactgc

SEQ ID NO: 240099 - DNA, 122 bp, Homo sapiens
gaaggaaagcatggaaaacaaatagcagctttctcttagaatgcaaagaacagaagctgccgacacctgaaaataaaagctatgccctgtgctttgaggaagaccagagtcagctctgaatc

SEQ ID NO: 240100 - DNA, 122 bp, Homo sapiens
gttctgttttctaaactctggaatgttttgcataagaatagaatattttgttccttagaacgggagtggtacctggaaaaaccatttgggtctggagttttctttgtggaaagttttaaagc

SEQ ID NO: 240101 - DNA, 122 bp, Homo sapiens
tgaccctgtcttccgtggcctcgtggggctggctctgctcctcctcccttgactgagagacgtcatggagattgggtggagggaggactgtagagttggtgcacccacgtcagctagttagg

SEQ ID NO: 240102 - DNA, 122 bp, Homo sapiens
ctcccacggcccgcccagagacagcagccaccggctaaaacaccgcacttccgcctccgtcgccaccgccccggaagcactcgccgcaggcccggaaaaagaatccgcctcgcagcgtcctc

SEQ ID NO: 240103 - DNA, 122 bp, Homo sapiens
ggtgagaaaatgtaaaccctgtaagctaatacccttaataactgccaagattttccttgacggtgcctatgatcagcctttctagaataactgacttcttagaaaatggttagaaacaacaa

SEQ ID NO: 240104 - DNA, 122 bp, Homo sapiens
aggcgggaggcgcgaggcgggaggctgggcgagaggagccggcggggcgggggcctgggccgtcacgtgggtgcgccgcgcaggcgccgggcgggccagacgtaggcccgggggttcccggc

SEQ ID NO: 240105 - DNA, 122 bp, Homo sapiens
gcccgacctctgccatacgcaccgtatctttatgggagccgatgaggtcagcagggagcacgcgttcagatggcagaagagggcaaagtactgctagaattacaaagatatttacagctttt

SEQ ID NO: 240106 - DNA, 122 bp, Homo sapiens
tgcaccgccggaggctgggcagctcgcagcgctgctcggcgctggaccccacccggcaggcgcaggccacccacacccggctctgtgcggctgccccccgcagcattgcacggccgaccctc

SEQ ID NO: 240107 - DNA, 122 bp, Homo sapiens
tcagctcccagaaaataaagggggtctgtacccaaactttggtatccccattgctcagcacgggatagttactcaataacagtggtaagcgctgacatttggaaggcactcagttcgcccag

SEQ ID NO: 240108 - DNA, 122 bp, Homo sapiens
cccccctggctgggggagtctgaacagtcctgattcccgcccaggggactttaagaagttcgagcggacgtcatccagtggtaccatgtcgtccacggaggagctggtggacccagacggtg

SEQ ID NO: 240109 - DNA, 122 bp, Homo sapiens
attcatttccccagccccttatttgtagcaagccccatgcacgaagggctaactccaaagcgagattcttttctgatgagatgcaaaccactctgcagtaaaacatataaccagggaactgt

SEQ ID NO: 240110 - DNA, 122 bp, Homo sapiens
caggaatggagagtgaggtggcccaggcgcttagagacacagagagcgagccagaggagccgttagggaacagggacgtggcacagggaagaagagtaaaggaacctcagtcatgcggtagc

SEQ ID NO: 240111 - DNA, 122 bp, Homo sapiens
tccgtcccccaacaagccccggcccccaagtcccgcgcgggccggccaggggcggggcgtcgggccagctgagctatcccgtcagaccgcgccagtttgaatgaaagctctacaagatggcg

SEQ ID NO: 240112 - DNA, 122 bp, Homo sapiens
ctcctgcttctggcctaaggtgactgttaattaagtgtttacattgctccaaaatgccaacgaggtgtagtttataataagagtacacagaaatgtgcccagcaaagtaagaagcactgtac

SEQ ID NO: 240113 - DNA, 122 bp, Homo sapiens
aggggaggggagggggaggttgggagggagccgccgccgcgcgcgtgcggccggcgccgccgccgttgccgctccgctcactccagcctgtttgggggcactttgtttgtgtcccacaatgc

SEQ ID NO: 240114 - DNA, 122 bp, Homo sapiens
cgctcccctgtctttcagcgcctgcaggttccgggaggtcaggttgtattcctggcgggtcgtctggctgggtgggccccggaggtcgtggctcgggagcagggaggcgtaggggggccggc

SEQ ID NO: 240115 - DNA, 122 bp, Homo sapiens
ctccgactctctcagcctctcgctccgcgtccgggcagcaaaaatggcggcgcctcaatccgggacttccgcctgcgcacgcggacaactgctcagctctatggcaaccgctccctggcaac

SEQ ID NO: 240116 - DNA, 122 bp, Homo sapiens
cactgcactgcagtgagggctgcctggaaagtaaatgcaagtgagatggatggctgccaccggccttgagaaacaaccctcaaaacaccaagccagccaggcagtgatgtgacactgctaga

SEQ ID NO: 240117 - DNA, 122 bp, Homo sapiens
gttttaaaattgttctgcatcctctactttatgtccaaagtggaggatctccaaaatgtacgacccatgctgcaaggctctattcttttcctattaagaatgtcctcctaacattggtgtag

SEQ ID NO: 240118 - DNA, 122 bp, Homo sapiens
gtttaaaaaaagaaatacagctggcctggtggctcacacctgtaatcccagtaggttgggcggatcgctcgaacgcaggagttcgagaccagcctaggaaacatgatgaaacccccatctct

SEQ ID NO: 240119 - DNA, 122 bp, Homo sapiens
ggcagccactgtggaaaatagtttgttgtttcctcaaaagttaaacagagaattaccattcgatccagcaattctactccaaggtatataccctaaggaattgcaaacaggttctcaaacaa

SEQ ID NO: 240120 - DNA, 122 bp, Homo sapiens
gtgttgccaccagtcccagaactaataagagaggtcactgtgcctaaacagtttgtacaacgtggtttaaactaaacacctcctctctttctgagagtctggaattttgtatatgccaggca

SEQ ID NO: 240121 - DNA, 122 bp, Homo sapiens
cagcgagactccgtgggcgtaggaccgtctgagccatgtgtgggatataatctcctggtgcgccgttttttaagcccgtcggaaaagcacagtattagggtgggagtgacccaattttccag

SEQ ID NO: 240122 - DNA, 122 bp, Homo sapiens
cggagctgacagactcgctcaggaccctgaaggtgctcactgtgtcctgccgtggagccccgtgcccagtgatgacaccatccttgctccccgtgccccccaggggctatgggcgacaccat

SEQ ID NO: 240123 - DNA, 122 bp, Homo sapiens
agcataacattttcaacagcacaagcagctccaacagccatcccaccactagtaagcacacgtggccgggcgccgtgtctccatgtgtgttgtgcatgtatgtaaaccaagtcctcatcctg

SEQ ID NO: 240124 - DNA, 122 bp, Homo sapiens
ctctctgcagtccgaggcccagctggcctccgaccagaccatcaaagagctcatacggagcgtccttggccagaactacgacattacaatggaagtaggtgaaccaaaacaagagtaacatt

SEQ ID NO: 240125 - DNA, 122 bp, Homo sapiens
cccccttgtgatattgtttcttagatcccgggagggagacgatgatactagtggcaatatcgcaggggctgtacacacctcctgcgatattgttcttatccctaaggggagagcataatatg

SEQ ID NO: 240126 - DNA, 122 bp, Homo sapiens
tctgtatattggtcaatctaaaggattcttactattattggacaaaagacgagtcaatcacgcaaatggacggaacagaggtgaatctaggaatatccccgcccatagaaagtactgattgg

SEQ ID NO: 240127 - DNA, 122 bp, Homo sapiens
gcgtggcctccattgaggggcgtggccctggtatgtggggcgtaacagggcacgagggggcgtagcttcgatggccggacgtgcaggctgcggatccccgtaggcgagcgagcggctaggtt

SEQ ID NO: 240128 - DNA, 122 bp, Homo sapiens
aaaattcagtggcaccagctgaggctggggtctgtgcctgtccccatgcatcctcagacccgactccctttcctggaactgatggaggcagagtcagacctagatttttatagaggctccta

SEQ ID NO: 240129 - DNA, 122 bp, Homo sapiens
gacgtccaagcccctcccggagtacctgtggaagaagattgccaacaactgcatcttcatcgtcattcaccgcagcaccaccagccagaccattaaggtctcacccgacgacacccccggcg

SEQ ID NO: 240130 - DNA, 122 bp, Homo sapiens
attccctagaggtcaattaccatcttttatgctgagaggatagaagcctaccattattaacgacctggcctgacaaatgtataggctgaatagtagtaagaggaagaagactgtcggggttc

SEQ ID NO: 240131 - DNA, 122 bp, Homo sapiens
ctgcagttgtgggggtgggggggaggattttgcaaccctaccctctctgcagggtacctccggtggctctggcctctgggccccatgctgtgccagacacacagagaggctcagccagttat

SEQ ID NO: 240132 - DNA, 122 bp, Homo sapiens
gtgggctcctgccagccacgctggacagtgaattctggtcaccctagccacagttgagtgcgcctctggtgggatgaggaagactttagtcatgcccatcactcccatttccaactaggttg

SEQ ID NO: 240133 - DNA, 122 bp, Homo sapiens
ccggacacgtcgggtttcctcgtttttgcggactggcgctttctgatttcagagactctccgcaacagaaccatctcaagtgggtctacctcctcgcctttttttgttgttgttgttgcttg

SEQ ID NO: 240134 - DNA, 122 bp, Homo sapiens
gtgtgcgtattaacgatggattatggaggttagttgcagtattgccaataacacctggtgcgcaccaagcactccctgagtcacatggtcccgttattcccgttttggatcagaaggctgga

SEQ ID NO: 240135 - DNA, 122 bp, Homo sapiens
agagaatctgcagcaggctgcccagcagtggccagctggtggggcccggcagggcggccgcgttctgagtctcgccaccagctgtcagcgggcagactggcacctctcgcggctgaggggac

SEQ ID NO: 240136 - DNA, 122 bp, Homo sapiens
gtgacccggaaccccgaggggagacagtgctttcggggcgccgcggtggagagaacagatcgcctccggaagcgtggggtctgggccagggaggcgatcccctccgatgcgcgggacagagg

SEQ ID NO: 240137 - DNA, 122 bp, Homo sapiens
acatgcgccaggttgggagcatatatcctggggctgggggtgggacctgtctgtggctgacgggagtgtgtgcctggtgcttctgtcactgggcccagtccctactggttccagggatgctg

SEQ ID NO: 240138 - DNA, 122 bp, Homo sapiens
atgaaacgacaggtatgtgaaaccatgttgtaccctgcaaagcatgttgaaaatgcttcccggagtaaaaggttaggtaacacaacttcagtgtgactcagcacagcagatatgcagcacag

SEQ ID NO: 240139 - DNA, 122 bp, Homo sapiens
tagtagtagcccctgacaaagcaggaatcgcccttaaaggagacttaactcaccctcaaacgtggtcttctcttcccaaacactccctttccactggcaggaaaaccaaatccagaaagtgg

SEQ ID NO: 240140 - DNA, 122 bp, Homo sapiens
atgcccccgcggggcagaacagcggctactcctcccggcccccgggccagagccgccagccgaggccccgccccggccaggcccgcccccattaaccccacctttgccgctgccccttaacc

SEQ ID NO: 240141 - DNA, 122 bp, Homo sapiens
tattttaaggaggcaggggagttattctccatgggaggaaataagccgtgagctgccttgcgctttggcatgtttctctatcatacagataagaagctagttcagtcaagtgtatgcagatt

SEQ ID NO: 240142 - DNA, 122 bp, Homo sapiens
accttcccactgctgcagcaccttaccataattaggcagctttttaaagcttctaattaacggaacacagaaattaaaacctttaaactttcttttctatttctggctcactgcaaatgtgc

SEQ ID NO: 240143 - DNA, 122 bp, Homo sapiens
gcataactggcaaaacgcgtttccgccaacgatagcgtcacttccggcgtctcaagccggcggtgaggagaatagaaaacttgccctcacttaagatggccacatcctgcctttgtcctcat

SEQ ID NO: 240144 - DNA, 122 bp, Homo sapiens
tgttcctatgtggatgaggaagcacatagcccaggcagccattggcagccatgtttcagccgtgaggagacacctgccttagaatgaatagaaatcctggaaggcagagagagttggaaata

SEQ ID NO: 240145 - DNA, 122 bp, Homo sapiens
tctcggggtgaccaagcttaagtttccttatctgaaaagtagggacactagtctccatctcgtttactcgggatgggacaagacgaccaaaaaagagaggattcctcatcaggtttattact

SEQ ID NO: 240146 - DNA, 122 bp, Homo sapiens
cttagcgcgccttcatattcatcatcaaaataagacggttagaatcttgcagcagtgaggcggccaatcaaaaggacagaaatgttatccttgaggtgcagagacagccaataacaaatgcc

SEQ ID NO: 240147 - DNA, 122 bp, Homo sapiens
ccagccgaataaaaaactcttccttctttaatccggtgtctgaggagttttgtgttaatccggtgtctgaggagttttgtctgcggctcgtcctgctacaaagggaggcatcccaccttttc

SEQ ID NO: 240148 - DNA, 122 bp, Homo sapiens
ctctaagtggggtcgcggcgtggccacgcttcacggtcacgctcgtccgtcctgcagtggcgtgtttacatggtcacacgtgtgtgtatcaccagtgggtcaactgcttgtcattcctcccg

SEQ ID NO: 240149 - DNA, 122 bp, Homo sapiens
gggctcctcaagtgtggccagagtggatgccaaggccgaggaggcgctgagagcgagcgacggctgctagcacgttgtcacctctcattaggatagtctttgttgttgttgttgttgttgtt

SEQ ID NO: 240150 - DNA, 122 bp, Homo sapiens
agagaaatgcgcaggcgcatctcctcgccctgagccccgcccacagggcgaagatgtgtgcgtggataactcccagagccccgcctgtgtggcaacacgcaggcgcaaggtcgcgtgccctg

SEQ ID NO: 240151 - DNA, 122 bp, Homo sapiens
aagactttcagagtcctcggggagaggtgagagtgacgataagcacaataaatccagtgccgtccaccctgctccatagcaaagagggagaaaaggagggtgcagcgagggagagggggagc

SEQ ID NO: 240152 - DNA, 122 bp, Homo sapiens
ggccaagctgcgaggtacagccctctattgttctaggagcacagaaacctcctgtgtgggcggcgggtgcgcgagctagagggaaagatgcagtagttactgcgactggcacgcagttgcgc

SEQ ID NO: 240153 - DNA, 122 bp, Homo sapiens
cctgtgacaccgcacgctgagctctgtgatgtagccgcttgcggagactgcaagcagccgcggcgcgcccggccctccctcttccgctgccgccgtgggaatggaaacatctgccccacgtg

SEQ ID NO: 240154 - DNA, 122 bp, Homo sapiens
atggaagaaggatgggcagtggctgcagggggatgacctccagttcaagacaatggccaacggtaccctgtacatcgccaatgtgcaggtgagtgtcacccctggggccctagtagctgaga

SEQ ID NO: 240155 - DNA, 122 bp, Homo sapiens
cagggtggcatctgggggccaggccgaggaggcattctcaggttctgaggtcgtggacaccgatgatggatgaagcatgtccatggctgaggggagggtggtcagcagtcagctatttgcct

SEQ ID NO: 240156 - DNA, 122 bp, Homo sapiens
gcgtcccagggaagggttaacttaagcgagatcccagcagagaagcaggtcgaagatccccgggcagcgcgaaaggaggttcagagagcccaccccatctcctgcaacatctctccaatgca

SEQ ID NO: 240157 - DNA, 122 bp, Homo sapiens
agtgatctgcccacctcagcctcccaaagtgctgagattacaggcgtgagtcactgtgcccggtcctcacatcaattactgttggtttatatccactgggcttcttggacctccccactaga

SEQ ID NO: 240158 - DNA, 122 bp, Homo sapiens
ttatcatgaaggctgtggccagatttttcacggcggtttggacactattaacctcctctgcgtcaatctcttgatccacagagacgtttgactctggctcttcatcggagttgtgctgactt

SEQ ID NO: 240159 - DNA, 122 bp, Homo sapiens
ccagtcttcctaaacctattcagaaactcattcagctcagggttcctcaagaggaatgtccggaatggccacctcctcctcagccgagtgagtgcaggcggagggagcctgagactccgctg

SEQ ID NO: 240160 - DNA, 122 bp, Homo sapiens
gctcagggaagagtcctactcgcaaggatgccagggcaggcccgcccccaccctcaacggcgcgcggggacttctgccgcagtcaaggctttggctcactcccctcaagacgggaagccatt

SEQ ID NO: 240161 - DNA, 122 bp, Homo sapiens
gtctccatgacctgtctagcttttagtgaggcttaagacaagattacattccatacagcccgcaaatggatccctcctctccccaccttcctgcttctttcagaaatgccagggttttctgt

SEQ ID NO: 240162 - DNA, 122 bp, Homo sapiens
caaagaggcggtctccttgctggagtggcctttggttttgttgcattgttttttggggggcggggaggcaaggaatagagaaatctctcaaaagtgtctccctggctacttgtgaaaggaag

SEQ ID NO: 240163 - DNA, 122 bp, Homo sapiens
ttagagactacaattcccggcaggtctcgcgctcgcgctgctgcggcttcatagacccggcgctgcaggatctgctgggagttgaagtccttaatgcctccgggctgcagagaggatgggat

SEQ ID NO: 240164 - DNA, 122 bp, Homo sapiens
gctagctcagggctcggatgcgatcggttccaccctgcatggaggctttcaacccgaacgcgtgcatccttcaaggtcaagacccaggacatagttcaacaagtagttggtgatgatagagt

SEQ ID NO: 240165 - DNA, 122 bp, Homo sapiens
gcaagatggtttctagagggagaagaacatgcaaaaccagagacaaaaacaaggatctcacgctggcaagatgaatcacaataacaactctgaaggcaagaggattggtgctaagagtgaaa

SEQ ID NO: 240166 - DNA, 122 bp, Homo sapiens
ttttttaagccggtctgaaacgtgcaatattcgggtgggagtgacccgattttccaggtgcgtccatcacccctttctttgactcggaaagggaactccctgaccccttgcgcttcccaggt

SEQ ID NO: 240167 - DNA, 122 bp, Homo sapiens
tgtcaatgtactctcctctccctcttagccttttagaacacagtcttaaaggtgtgatagcgaaacctgctgcccaggatgtttaatttgtttaaaaaattttttctttattgcattgtagt

SEQ ID NO: 240168 - DNA, 122 bp, Homo sapiens
taaatgctatgtgtccacactactgtggtaaagccgacagtccataccatgagcccatttcgcgcagggaaattcgagtggtgggcttgggcccgtcgttctggtagcttcccagtagaggg

SEQ ID NO: 240169 - DNA, 122 bp, Homo sapiens
cttgttctctgctggcaaagggcagggttcccgggtcaggtgacccaggttcaaatcacacgattctaagctttctgtgcttccgtttccccacctatggaatgggcagccagtaaaggggc

SEQ ID NO: 240170 - DNA, 122 bp, Homo sapiens
ccacatatcctgctctcgcgtgcacacaaccacatgcacacctggactcgcacacgcccacgcatggcagtttacacacacattcacgcggatactcacagcctcccacacactcctactca

SEQ ID NO: 240171 - DNA, 122 bp, Homo sapiens
gtcccgacgcccgcaggtcctcgcggtgcgcaccgtttgcgacttggtgagtgtctgggtcgcctcgctcccggaagagtgcggagctctccctcgggacggtggcagcctcgagtggtcct

SEQ ID NO: 240172 - DNA, 122 bp, Homo sapiens
cctccatccttctgccaggcaatctgagggtttgggtgacctgtggcagcacattcgaggcgggccatggtggtggtccggatggttatgtcgtggggcgttttggtgaatgatggcaacac

SEQ ID NO: 240173 - DNA, 122 bp, Homo sapiens
gaaaaaagaccatcagtccctctgcctcccataaagatttatggggatcacatctctcagcgggcagatgagccaggaaaatagggtctggaggcagggaacagaaggccgattcacacttc

SEQ ID NO: 240174 - DNA, 122 bp, Homo sapiens
ccaatgccgtagcccttggtgtcgaggagtcccccgatctgggtgaggttgcagttgaggcgccggtggtattcgttcatggtggactcgagcaggaaggcgtagcgggagttgaggacgcg

SEQ ID NO: 240175 - DNA, 122 bp, Homo sapiens
aggattcttgataagggttaagaaaatgcattgtgtggtgacgcaaaaggactgatgatacgtttctggtcagaaagtaggaaatcagttgaaggtttcagatgtgtattggttcttgacta

SEQ ID NO: 240176 - DNA, 122 bp, Homo sapiens
ctgggataaaggttttggtatttgcccacttctagatagaatgaatgaaaacaacacaagcgttttatgagcactctttatcagaaaggtatttcctggaccagaaatgggcaatagttaca

SEQ ID NO: 240177 - DNA, 122 bp, Homo sapiens
aaagggattgcaattactataggttttacaggtatcgcgagatttcgtcaaatctcattacggatcccggctgaaagccattttgtttttcagctcacttcaagggtacctgaagcgaattg

SEQ ID NO: 240178 - DNA, 122 bp, Homo sapiens
tcactgtggccctggtgttcccaagttgcaaaggaagcttcagctctgggtagattcactcgccgggtttctgtttgataagataagaggaggcatccgctcagtgtcttatgccaatatga

SEQ ID NO: 240179 - DNA, 122 bp, Homo sapiens
ttccaagagagtaaagttcttgagtttggaagtttcctgggtccatagcccctttatacccgcctgaaggcccgttgtcaccacgtcattatttccttgttattatttacctactgaaaaaa

SEQ ID NO: 240180 - DNA, 122 bp, Homo sapiens
tgttgggctgagtgagcatctctggcttgggggaggctgctcattaagtgcctgcctgcccgcccacccctcggcgccatgctcccgcgtgggcagcgggccctgcgcctcactgcacccct

SEQ ID NO: 240181 - DNA, 122 bp, Homo sapiens
ctccgctccaggaattgtttggcaaattctttggcttccagcgtgtcccccaggcaggaacggatataatcgtggacatcatagggggattccacctccttgaggatcgctacagccatggg

SEQ ID NO: 240182 - DNA, 122 bp, Homo sapiens
aaatgggagggtgtcctgcgggagatcgcctatgcagcaggtgccaccttcctaccagtgcggctcaatgtgctgtgcctgactaagatgtgaccagctcaggcagactgaactaagcaccc

SEQ ID NO: 240183 - DNA, 122 bp, Homo sapiens
ctaaattgggcagagacaagagacaggtacagtgaagcaacaggtagaggagtagattaacgagaaaaatatcacatcagtgaggagattctatgtatcaacagaaagaacaaagatcaggg

SEQ ID NO: 240184 - DNA, 122 bp, Homo sapiens
aaaaccaaagcgctcaataactggcagctactacacgaggcaacgcttacggagggtcagcgctgctgagacttgtccagatgccacattagcagtggagaacccgagtgcccaccccgccc

SEQ ID NO: 240185 - DNA, 122 bp, Homo sapiens
tgaagtcgcgcgcctgtagtcccagctactcagaaggctgaggtgggaggattggttgagcgcaaccaagcaggtggagactgcagtgagctatgattgtaccactgccctccagcctgtgt

SEQ ID NO: 240186 - DNA, 122 bp, Homo sapiens
ctaagcctctcactttgcattcccctagcagtcgctgcgctgtgcaccaaaaaggccctccggacattcatagacttagttggatggcgatgtccctaacgtacttgggatggagggagacc

SEQ ID NO: 240187 - DNA, 122 bp, Homo sapiens
tggcgcccgaggccttgtttgaccgggtgtacacacaccagagtgacgtgtgagtcctgccggcggtcactgtcctaccccacaaaaagggcaaggcactgcccaaagtcacgtggccccag

SEQ ID NO: 240188 - DNA, 122 bp, Homo sapiens
aaggggatgtcactttcggacagagaacgagcgccagggcgtggaggcgtgaaaagggcacgtgggtggcttggaagaaccaaaactaagtgttttgggggacagccagagagccgaacaca

SEQ ID NO: 240189 - DNA, 122 bp, Homo sapiens
tacctgcaagactatacgttttctcctgatttcttgttctgttagttagacacaacctatcgtgaccccataccttgtaaggtgaagaaggcccttaatccctcccccctttctcttcctta

SEQ ID NO: 240190 - DNA, 122 bp, Homo sapiens
cttgagcgagcacttgtttagcatagtttcaccagtggcctgtctgtctaaagtagtcggcgaatattaaaatagtcctaacaataaaataacactcagtcaaccgtgtagccttcttccga

SEQ ID NO: 240191 - DNA, 122 bp, Homo sapiens
agcccagtcgggcggtgaccaatcgtcctggtttggccaggcccgagggagttcccaggacgccggaccttaagttttaaaactaaaacgagttggtcaccctaagtccaggactcctgcca

SEQ ID NO: 240192 - DNA, 122 bp, Homo sapiens
tttttataggcacaggatgggggcgtggccggccagggtggtcttggaaaggtgacctttcggcggcaaggctggagtgcctatcctcacctaggttcgtggggatggatccctagtcaggg

SEQ ID NO: 240193 - DNA, 122 bp, Homo sapiens
ggctttctccaaagctgcaggtgctcgggtgcccaggtggtccctgcagcttcactgcagcggctcctgcggagattgcattgagagctcccgtccgcgctgcggcctgcagcgctagtttt

SEQ ID NO: 240194 - DNA, 122 bp, Homo sapiens
taaaaaacacagggaggaagaaggtctctggcagagaggggatgcccaatagatagaagacgggtgagccatccactgattcattacaggctgtggcatccattgtgagacacagctggatt

SEQ ID NO: 240195 - DNA, 122 bp, Homo sapiens
caggcggctagatgttgagcacagaggagaaagagtaggagtcagggtcaaaccttaaaacgttgggtctgacatcatggactgtgaagggtgatgacatcagtgacggtgggggataaaat

SEQ ID NO: 240196 - DNA, 122 bp, Homo sapiens
cgaggcactcaccgtagcgccgtccggctctccaggcgcgcacggcgcagtgcaggacgccgtccatccacaccaggaaccagctgatgcaaaagcccagcagcagccccagcatgaggtcg

SEQ ID NO: 240197 - DNA, 122 bp, Homo sapiens
ggcgggccgtcccacttcctcatgacaggccgggaagcagccacacccagcacccacaggcgctccagagcaccccggctcctcctgagggcccagccggccccacaagtcctcaggcccac

SEQ ID NO: 240198 - DNA, 122 bp, Homo sapiens
aggggggcagtcctcgtccggggacaggtcccaaaaggctgtttatttgttagagttctacgctcttcaaatgaacccaaatcaagggcaagttatcacgcaccatgtgacacccggcagct

SEQ ID NO: 240199 - DNA, 122 bp, Homo sapiens
agagtcacgtctgtgcaaagagaagaacgactctcgacctcctggatccagtcaccaccacggtcccaacacagcgctccaaggactccctaacgccaatggaaatggtcgctactaaaggg

SEQ ID NO: 240200 - DNA, 122 bp, Homo sapiens
cttcccaccccacgttccacgcctcgctacgccccctctggtcgcaccgagggatgcaggcggtgcccaagcgcacgccccgctctccagtcatctgagtggtagagggccacgcccacagg

SEQ ID NO: 240201 - DNA, 122 bp, Homo sapiens
ttttcattatggattggcattattttccatagagttttgcccgttcctgccaggggccaccgtatctaagcttgagggattcatcttgtgttcatatggctcagttaggtattaagaaaata

SEQ ID NO: 240202 - DNA, 122 bp, Homo sapiens
gcggtaggggtggcagtcatgatcaccgatgaaaattccaggacgggagaagaccatgtgcgttacagtttctgacgtctcctgtaatgcgatggagcctgcatgttgaaccgaaatgagtt

SEQ ID NO: 240203 - DNA, 122 bp, Homo sapiens
acaataagttgataagatttgcaaaatgatgatagccctggcttcaaagcaagccattcccggtcttgacagtaattttccacaatgcaatcctatttctagaaaacagcacatatgttcct

SEQ ID NO: 240204 - DNA, 122 bp, Homo sapiens
tctgaaacgcttgatacacgtgcttctccacgtgaagcaaatgcctccctttttgagattcgtccttcagtctactacttagactttacctccagtgacacttcagtttccatgagcttcaa

SEQ ID NO: 240205 - DNA, 122 bp, Homo sapiens
ccgcacgtcccgtgctgtggctctgactgctggccttgtcctgcaggtggcctgtgagtacggcatggtgcacgtggtctcccaggccgggggccccgaaggcaaagactactgcatcctct

SEQ ID NO: 240206 - DNA, 122 bp, Homo sapiens
gcaggggaagaggggagacctggcacgtgcgggaggcctggagaagagacaaggaaacagcgtgagtatcgtaggcacataaagacctggctggggatattcagggagtggagggcaggctc

SEQ ID NO: 240207 - DNA, 122 bp, Homo sapiens
tgttttgcctcaccgtgtggcaacggcttctcctgggtagtggacactcttgaaaaccagcgcgaatgcaccttcctgaaaacacacaaacagtgagggtcaacgcgttccagcagccgctg

SEQ ID NO: 240208 - DNA, 122 bp, Homo sapiens
aaagagaaactgtttggaaagcagcagcttattaattttacttttatggcatttagaaagcggggtggctgtttcgatgcctcctcatttctggcttgcatgcaaacactcttatggcatta

SEQ ID NO: 240209 - DNA, 122 bp, Homo sapiens
aggttttacagtattggcataaaacatttggacccctggcgcctggtatcagggacttcccgacgctggaagagttcagggaagggaagcgggcccctctggcaccgaagacacagaatcct

SEQ ID NO: 240210 - DNA, 122 bp, Homo sapiens
agagacggagtttcaccacgttggtcaggctggtctggaactcctgacctcatgaccagccgacgtttttaaagacatagtgtccccctcaaggcatattccagttcctatcacgaggattc

SEQ ID NO: 240211 - DNA, 122 bp, Homo sapiens
gccgacggcctcgcccccccaccccgccgccccgcccccgccccacgggccggtggggagcgcgtgtctgggtcacatgagccgcctgcccgccagcccgggcccagccccccgccgccccc

SEQ ID NO: 240212 - DNA, 122 bp, Homo sapiens
taagttaggagaaaggatttgtcacagactatcagatcactgcaacttcaaatagccctacgtaaaattaattccttaagcgcaagaaaaaatttataatgcccacaagtccaggcaatatt

SEQ ID NO: 240213 - DNA, 122 bp, Homo sapiens
gcccggccctgtttttttttggaggggggtggggtggggttgggggtctcactctgtcaccgaggctagagtgcagtgactcagtcaatcatagttcactgcagccttgacctcccaggctc

SEQ ID NO: 240214 - DNA, 122 bp, Homo sapiens
gcgtgtgcagcgtgcctgggtcaggcggtcacgcaagtaaaggccgctgtgcgtgcgaggcggcagcgaaggctgcacgcaggaagaggggctgcaggtggagacccacatgcagcagcaac

SEQ ID NO: 240215 - DNA, 122 bp, Homo sapiens
cagggggccttcggcgtcactgcaggcttcctaggggtcccctaagtgctctgcaaaccgcggctggaagtttcccactgcagtgaacagtagagaaacagggagaacacacagggcttgct

SEQ ID NO: 240216 - DNA, 122 bp, Homo sapiens
ctgagacggagcaccaggtgcagggtggactctttctggatgttgtagtcagacagggtgcgcccatcttccagctgttttccagcaaagatcagcctctgctggtcaggagggatgccttc

SEQ ID NO: 240217 - DNA, 122 bp, Homo sapiens
cacagcaatgacagtgtgtgctgttataaaagaacacttgctccatgagaacattagaaacgtacaaaaaatttcacgcaagacctcgccgtctttatacgcaggtgtatttacgttgattt

SEQ ID NO: 240218 - DNA, 122 bp, Homo sapiens
gcgttcctcccaccttgtcctcccaaagtgctgggattacagacgtgagccaccgcgtcccgtggggccgttttctagcaggtggtaggatagtcatggttagaaaaagatgttcggttccg

SEQ ID NO: 240219 - DNA, 122 bp, Homo sapiens
tccagcccaagcaacagagcaagattccgtcttaaaaaaaaaaaaaaaaaaaaaaaacagcgagagaaaagaaaagaaaactgagcagaccacaatcaaaagctacaggaaaaagtaagtgg

SEQ ID NO: 240220 - DNA, 122 bp, Homo sapiens
aagacatggagactggagggtcgggggttgccggtctgggagatactgctgggcatttaacgtgcacaaaacagcgccaggccttgcagtgccccccaccccgagacacggctgacaagtgg

SEQ ID NO: 240221 - DNA, 122 bp, Homo sapiens
ctaggcggtgggggagggggaacagtggcgggctctgaaacctcacctcggcccattacgcgccctaaaccaggtctccctggattaaagtgctcacaagagaggtcgcaggattaaccaac

SEQ ID NO: 240222 - DNA, 122 bp, Homo sapiens
aaggtaagtggaaaagcttagaaaattaaggcctccctttcaaaactgcagggacttttacggtgtttccaaaggtaattgcttcttacttcagtaaaagtgactttatgtgactgaaagag

SEQ ID NO: 240223 - DNA, 122 bp, Homo sapiens
agcgccagggagggagcctggagggccgcctgtcttttcgagctgcgcttccagggacttcgcgtttgtgcctggcgggctgcggttggaagaaaagtgccaacatggcagctccagggtca

SEQ ID NO: 240224 - DNA, 122 bp, Homo sapiens
ggttcactctgttgtctgggttgcggggaatggaggtggtggcagtggcagcactgatggcgatggccgggctcaacccgaagggaacagtgctgctttttcttgcagccctgggagagaat

SEQ ID NO: 240225 - DNA, 122 bp, Homo sapiens
gtccgtccaccagcacatctgtaagggacacgagactgtcgggggctgggctggcctgcacggcccagccggcctaccccacccactcgctgattcattcatttcttccctccttcactctt

SEQ ID NO: 240226 - DNA, 122 bp, Homo sapiens
tcccacctcccacgtgactatgtgacatttgacgggtaactgcatctcatctgtaaaatgcgtcttgcaggatcgttctggcttccgtacaatcctgcagagagcagcaaagcgcgcacgca

SEQ ID NO: 240227 - DNA, 122 bp, Homo sapiens
tggggggcggaggcagagaaggcccagtgaaggtcgggagaccagcctggaggaggcacgcgtgccctgcgcagaagcccccgccccagccctcctcccccaggagaggctccaataaagga

SEQ ID NO: 240228 - DNA, 122 bp, Homo sapiens
agaaactggacaagtacaaggccacctggctccggctgcaccagctgcacacgcctgccacggctgctgatgaggtacgtgctgcagcctcctccaggaagccgcccaggtcactgtggaat

SEQ ID NO: 240229 - DNA, 122 bp, Homo sapiens
aatctctgggtccgcaggagtgatccagcgtaggcagtgccggagtaggtgctgggagagcggggcctcagcctggtttgggggcaggcattttcatttgaatcccctcacatacctagtgc

SEQ ID NO: 240230 - DNA, 122 bp, Homo sapiens
cagggagcccccaactgggggaagccgcctggcctccaggtacaggagctggtgccgaggcgcgacgcagccactctgtagaaaagtcgggcgctcttcctggccccgggctgcctcctagt

SEQ ID NO: 240231 - DNA, 122 bp, Homo sapiens
attcacatttagttcgcctaggaaaactagcagttagtgaaaaactggccacatcacagccgcacagctccagcagcccgggtagcttccccaccctcactttctccagccccgcctccagg

SEQ ID NO: 240232 - DNA, 122 bp, Homo sapiens
cactcgcatccctgatgcgtgacccctgctcacctcaagttcctatgagagtttctttaccggttccaaacaaactgcccagattctggaaagggagagaaagcccctccccctttccactt

SEQ ID NO: 240233 - DNA, 122 bp, Homo sapiens
gcccctcctgctctatccacggcgcccgcggctcctctctcggactcgcggcgtcgctgtcgaacctcacgaactgggtgtcgtccacgtagcccactgagatgaagcggggctccccgcgg

SEQ ID NO: 240234 - DNA, 122 bp, Homo sapiens
accgccttcctctcggaggccgccaaacaacttgggcacacaaaacgttgagtgtggccgcggcgcagcgcgcgccaacgagcccgggccggcgggagcagaggaagggcggggcgcccggc

SEQ ID NO: 240235 - DNA, 122 bp, Homo sapiens
gaggaggcacttcagggacttctcgggtttttcccggcatgtgcgcagccgaggcgtgtgcgtggcattccagattcccgggaactcttagaactttatcaggccttcatttcctaaatcat

SEQ ID NO: 240236 - DNA, 122 bp, Homo sapiens
cagcgctctggggcagggcttctgaggggcgggcctgcctctgccgggacctggagcccccgcccctcggagaggctcctaggctgacttgggcagagccctctggtgggccgggaggggga

SEQ ID NO: 240237 - DNA, 122 bp, Homo sapiens
ctgttggaataagcttcaggcaaaactttgccaacaaaaaccggtccaactgattttagacgaaagtccaaaagcagtttaatgcaggacagataatcttttccacaaatgatactgaaaag

SEQ ID NO: 240238 - DNA, 122 bp, Homo sapiens
atgaactcagggccggtcgtggccatggtctgggaggggctgaacgtcgtgaagacaggccgagtgatgcttggggagaccaatccagcagattctaagccaggcaccattcgtggggactt

SEQ ID NO: 240239 - DNA, 122 bp, Homo sapiens
gcgagtcctcacgctacgtcttgatctatgataaaccggtacttccaccttgttctttcccggaggagttggaattttccggctgttgccacgttgttctccaaaacatttcccttcatacg

SEQ ID NO: 240240 - DNA, 122 bp, Homo sapiens
tagctggtcactggtgattggccctgttaggacagccaaggtgaactcaaggccatgaagcgtgtggctgaagggagtgaagaacaggaaggccaggtggacatcagggccctagtagacca

SEQ ID NO: 240241 - DNA, 122 bp, Homo sapiens
aaagacctgactacataactgccctgttggtcaaaggtgattgtaccaagagtacacaagcggacataaatcgaaccaatcagtttctttctcctggggattgggattcatagatactaatt

SEQ ID NO: 240242 - DNA, 122 bp, Homo sapiens
actagagggattgattattgattggtgatcggggtcgctgaggctccgggccggcccggccgactggccgcggcaagaaggagctggctgggcggcgtgggcggcggggcgacgcgggctca

SEQ ID NO: 240243 - DNA, 122 bp, Homo sapiens
cctccccaggctcattaggagccgccagcggtaatgaggagccgggggtgggggacctgccgctgccttggccgccaccaactaattgggaccagaagctggacctgagacgagggaggggg

SEQ ID NO: 240244 - DNA, 122 bp, Homo sapiens
caaacccctcagccatgagatgttgccgaagtttactccaaacaaggaagtcgggaaaatcgccacgcccacttccttctagccactgcccccagcactggcctggagccccgatagtgttt

SEQ ID NO: 240245 - DNA, 122 bp, Homo sapiens
ggctggcggatcacttgcggtcaggggctggagaccggcccggccaacacagcgaaaccccgtctccaccaaaaccagtcaggcgtggaggcgcgagcttgcaattgcaggcactcggcagg

SEQ ID NO: 240246 - DNA, 122 bp, Homo sapiens
cgtgttacagacggggaaactggggctcccagaggctccagctgggaggctgtgggaggtcggggcacctgccaggctctggaggggtctggctgcaccggctcccctgcccaaccccacag

SEQ ID NO: 240247 - DNA, 122 bp, Homo sapiens
ctctgtccaggcccgcaggccttcctccccttcccgcagtctctgctgctcgcgggcccacgcttggcgcacggctctctgccgggccagctccaggacccgtgccttctcctcatccaacg

SEQ ID NO: 240248 - DNA, 122 bp, Homo sapiens
gggtggcgactacgaggagctctaggccggcgtgggcagtggccgccctggggcggggggcgtgcctgtcactgcctggggaggcatttgcctctgtaccatcgcctttgccgctgccccgt

SEQ ID NO: 240249 - DNA, 122 bp, Homo sapiens
tgtaacttatgctgggacttgatgactgctcatgaagtcccagcagaagatggggtgctccgctccccctgggtactcagaggccttgactccttgcgtcttctggctctgtcctcctctgg

SEQ ID NO: 240250 - DNA, 122 bp, Homo sapiens
gatctgggcaggctgcgaaggcggtgctattccaaagcccagcccagaggcagtgacctccgacccaagccaaaaaaaaaacctcgcgttcagaggccgggagaaagaacagctcccaaatt

SEQ ID NO: 240251 - DNA, 122 bp, Homo sapiens
aaacagggcctcaatttccccaatccagttttgcatgcccatctggacctgtgggggtggcgaagagaacaggatttgcttatgggttttgaggcaccctgcagcaggcaaagcagatattc

SEQ ID NO: 240252 - DNA, 122 bp, Homo sapiens
agacacctgctgacacattgccaggccgatgtgagaaactggaaccgtccctggggacctcggcggcacaagccatgcctgcttcccagcgtcagcaggagtcaggagggaaccaggaagcc

SEQ ID NO: 240253 - DNA, 122 bp, Homo sapiens
gtgcctcagattaatcattttagcagatgttttaggtgacccactcattctttcagcccacgtctgatttcagcaacagctgtggtgaacaatttctgcaaacaatgtcaacttttcatctc

SEQ ID NO: 240254 - DNA, 122 bp, Homo sapiens
cggagatgggtcgcttctcctggagctagagctgcgggctggggtctccagggttcggcccggggagccgaccctggtcggccgtcggggctctgctcggccctcctgaaacctccgcctcc

SEQ ID NO: 240255 - DNA, 122 bp, Homo sapiens
cgtgacccggggcagacggatttccggttcccggggctacgaggcggaagcgaaggcagacgcagtctccgtcgttgacgttagtcgcagtcttcgctgctaacggtaataactcttaggtt

SEQ ID NO: 240256 - DNA, 122 bp, Homo sapiens
atcgcctctttgtagcccggagcagctgctgccatcacgctggctgtggcggaaggaggtcgtgggccgtggcggtgggagcagctgctgccatcacgctggctgtggcggaaggaggtcgt

SEQ ID NO: 240257 - DNA, 122 bp, Homo sapiens
tagaagcaagcaggtcactaatgcagagcaattttttcttaaattgatacagttcagcctcgaaccatatattagtcagctcagaatactataaaaaaatacaactcagtggcctaaagaat

SEQ ID NO: 240258 - DNA, 122 bp, Homo sapiens
aaatggaagatgagaggcagagtaggttgcctaaggtgataagaggatgaaataacggcgcgagaagtcgaacccactccagatccgcccatgcaagacacaagaagccacaggaggaggaa

SEQ ID NO: 240259 - DNA, 122 bp, Homo sapiens
tcacatgttgcactgaaaatatggacagagaaagcctgtaagatttggtaatgtgaaggtcgctggtgacctatagcagagcagtcttcctgaggggaggaaaagaaaatcaaaatctcaat

SEQ ID NO: 240260 - DNA, 122 bp, Homo sapiens
tgcgacagtgtcactgaggacccaggctcccccatctctgccgaggcatcttcccatcaccggtgcctcctcaggctgtgcccccagctcctggtatcacatccttgcacagccaggtcccc

SEQ ID NO: 240261 - DNA, 122 bp, Homo sapiens
gtcttccattctcccctctaaaatggctcccagccaggcggcttgggagggggcagtaagcgccgcccccactccccctccactcccccccgggcccctcacccaagcagcggttcctggta

SEQ ID NO: 240262 - DNA, 122 bp, Homo sapiens
cttgggtggcctgattctgtattgtgcatgatttgcttttctggccactaataggtctcacggtgaagacagcagaaccagatggagtaggggctcaaggaacaggtagccacaccaacact

SEQ ID NO: 240263 - DNA, 122 bp, Homo sapiens
gcaagtgagatcttctgaatgtcttcctagaggggaggaggcaggaatcccaggagaaaacggaagaatcagtactgaaaaaagaaatagaagctgattacaaaaatcacgtatattactat

SEQ ID NO: 240264 - DNA, 122 bp, Homo sapiens
ggggaagaaggcagatgtggggggcagcaacagctgcagcagaagcaacgctgaggggcccgggtgggattgggggacctccgtggggagcatggctgagacatggacctgggagacagaag

SEQ ID NO: 240265 - DNA, 122 bp, Homo sapiens
cacctgctgggaaacgaggacctttcttgtcacctctgcctcccctagcagcatcccaggcgcagacctggacagctggctcccgcacctgccctgggagtgctcccggcagcaacggccca

SEQ ID NO: 240266 - DNA, 122 bp, Homo sapiens
gcgcatcttcaccaccaataatggccaccaccaccgaacggacgagttttcccggggaaacgtacagtccagagagttgcagatctacgcttggatggatgcaaccttgaaagaactgacaa

SEQ ID NO: 240267 - DNA, 122 bp, Homo sapiens
tttgcgcacatgtttctttaagtcaaagtttctgcaaaaccctttgccgcaagtggcgcacgtgaaaggcttcttgtcgttgtgggtgtgcatatggaaggttaggttgtagacctggtgga

SEQ ID NO: 240268 - DNA, 122 bp, Homo sapiens
actgaagcccacacaagctaatgcactagtcccagagccggaacttgaattcaggtcttccgacccttctaaaccacggtgctttccagtgttccatagctctttatcttgtgtgggggtct

SEQ ID NO: 240269 - DNA, 122 bp, Homo sapiens
gaggcgcgcggcgcgtccatggtgccgggggccgggacgcgggcggtgctccgggcccgccgagtcaggcgctggctaccgccgccaccgctgccgccctcattcactttttccgcgctgac

SEQ ID NO: 240270 - DNA, 122 bp, Homo sapiens
ggatcccgcccgctgcggagagtgcgctagttcactcacccttacggtctccgaagcagacgcgaagccctccaacgtgagcctcaccagcccccgtccccaaaacgctcttcctcggcttc

SEQ ID NO: 240271 - DNA, 122 bp, Homo sapiens
gaattgcaaataactatggctatttcttacacatggttttcattgctaatttgacatccacgtaaagactaatgaacaaaacaaagaagctgcactttacaaggttttgtggtataaaacta

SEQ ID NO: 240272 - DNA, 122 bp, Homo sapiens
tccctacgcccattggcttattcaattcacgcaggaaccaatgggcggagacggcagccgcgccgtctgacggcttagccgcggtgcagactgcggcggcggtggtctgaggaagttctatc

SEQ ID NO: 240273 - DNA, 122 bp, Homo sapiens
aaaaaatctcttgggggaggagaggtaaaagactgatcagcgcggcactggattgccaatcgcacatcatctgcatcaacagtagctttcttagcatggcttgaataaatttttgcatcatc

SEQ ID NO: 240274 - DNA, 122 bp, Homo sapiens
tccccttttccttcctattaccaccttcctttttcacaggagccagagaggtggtctctgcgtgcttcccacaccacattgacaaggaaagggagggacattccaaggctggaagccctgcc

SEQ ID NO: 240275 - DNA, 122 bp, Homo sapiens
gtccggtcctcccatcccgagggcttggttacaaacgtgggttgtcctcccgggtgggcccgcctggcttcaggagtcccccttagaactttgactgccagggaggcacacctgggacacag

SEQ ID NO: 240276 - DNA, 122 bp, Homo sapiens
acctgaactaaaaactttcaccatgaaagcacacagcaggagcaggcccagagcgtaaggcgtgcccggcccggcgctccggcggggcctgcggagggggagggggtcgcggcttcccggcg

SEQ ID NO: 240277 - DNA, 122 bp, Homo sapiens
cagcctgtccctcctctgtacacaggaagcttggctcagtagttgccccaggtcaggtttcgggtggcagagcccggctccaaacccagagaggctggcgctctggagcgtgcccacgccac

SEQ ID NO: 240278 - DNA, 122 bp, Homo sapiens
ctactgtgtccccttcacttaggagctctctctctgcttctggcgagggcagctgacagtcgcagaggtgataatgggtagacagactccagaatgtgccctgggtccacacccgcctgcct

SEQ ID NO: 240279 - DNA, 122 bp, Homo sapiens
gcccccaggcccttgagggtaggagcagggagaagcagcagaaggaggtgatgcccctgccgctcctcccaaggccagccccgtccccacgctcccatgccagggaggggtcaggggccaga

SEQ ID NO: 240280 - DNA, 122 bp, Homo sapiens
aaattcaggagagtgatttcttctgtgagggaagaaaggggatatgttatgggagaagcccgaaaagtgggagtttgggggctcactcatgatcttccctgggactggagcaaataaaccct

SEQ ID NO: 240281 - DNA, 122 bp, Homo sapiens
gagggaggagaggggcaggctcggcgaggccatgtgatgctgggcgagagagagccgccgcgccggagcctccttctttcctgcctctgattccgggctgtcatggcgacccccaacaatct

SEQ ID NO: 240282 - DNA, 122 bp, Homo sapiens
aacaagcgaccgcgaggccaaggagcgtgacgacggactcccggatcctagtgtgttggacgctcgagacaaacaccgcaggccccagtgcatgaggagaagcacagcctcctttcccacga

SEQ ID NO: 240283 - DNA, 122 bp, Homo sapiens
cgcgcttcctgcctttcctagtggcctgactttctcagggctcccctggaggttcggaaacgtgtcgggggcatgtgcctgcggaaacattccagggcacgttccctcctgcccacatccag

SEQ ID NO: 240284 - DNA, 122 bp, Homo sapiens
aacactagcattcatcagcattaccagaacggagtggtaaatcagagctcagggccctaccgtcagcgtttctgaaatattcagtttagagttgtgccagagaatttggctttctaacaagc

SEQ ID NO: 240285 - DNA, 122 bp, Homo sapiens
gcagcagctgctggcacctggacggcggcgccaggctcacctctatagtggggtcgtattcgtccacaaaatggttctggatcagctggatggtcagcgcactcttgcccacaccgccggcg

SEQ ID NO: 240286 - DNA, 122 bp, Homo sapiens
gtgtgagcagcgctgtgtctgtttcggaaagcgctctggggaggtcttgtccctagggggcggagcgcaaaggacagaagctccggcaccgagtcggggcagagtcccgctgagtccgagcg

SEQ ID NO: 240287 - DNA, 122 bp, Homo sapiens
cacaatagcatcctataaatctgctcttctccgctacctaaatgaataaatagtctcattcgtcaagtttcttagaccccaaatctaggagtaacccttggtgtcttctttttcccttaaaa

SEQ ID NO: 240288 - DNA, 122 bp, Homo sapiens
ttctctgctctttttgaggcactgccctcctctctgtgttggcattatcctcaagcaagtcgggaggtggctgtagtggatccagacagcacgtggtaccacactattcaaaggcagaaagg

SEQ ID NO: 240289 - DNA, 122 bp, Homo sapiens
ctagtgctctggttgagaaactgcgtttaatgaccctcagaaaagccagtgtggctggaacgctgggttgggcgggggttgagcgtggagaggggctttggagcagctcggtctcccactaa

SEQ ID NO: 240290 - DNA, 122 bp, Homo sapiens
gtttttaaaacaattaaggtgtagaaaattcccctacattccaatctgatacagccactacgcctctggtaccccttcacttagccttatgtatttgtacctaattaatgtatgaatgcaag

SEQ ID NO: 240291 - DNA, 122 bp, Homo sapiens
agccgccgccgccgccgccgcgcgaggagccaggatggtcctggtccacgtcggctatctcgtgcttccagtgtttggctctgtgcgaaacagaggtatcgctttttcctttcggggtctgc

SEQ ID NO: 240292 - DNA, 122 bp, Homo sapiens
cttcccagccagcccttgttggcttgccatcgtccatctggcttataaaagtttgctgagcgcagtccagagggctgcgctgctcgtcccctcggctggcagaagggggtgacgctgggcag

SEQ ID NO: 240293 - DNA, 122 bp, Homo sapiens
tgaggcggctcttggaaccgcccgcgcccacctcggcgatcttgaggaagcggcccttggcgttctgcttcacatctaagtagaagcgcttgttctggatgtccagccgcttcgaggccagc

SEQ ID NO: 240294 - DNA, 122 bp, Homo sapiens
gccatggagcagggggtggcgctcattggagaggctcgggcggcacaggagcccgtgaagcgggtgggaggctcaggcatggcgggctgcaggtcccgagccctgcccggcgggaaggcagc

SEQ ID NO: 240295 - DNA, 122 bp, Homo sapiens
gtcctcccaccttgccctcccaaagtgctggagtgctgggattataaggatgagcaaccacgcctgggcccctgcaaatgttatacctccctggaggagacagaccccaagtccacacttct

SEQ ID NO: 240296 - DNA, 122 bp, Homo sapiens
gcaagaagccccctgaccccttgttccaaatatactcttttgtctttctctttattcccacgttcgccctttgttcagtccaatacagggttgtggggcccttaacagtgccatattaattg

SEQ ID NO: 240297 - DNA, 122 bp, Homo sapiens
gatgcacgcacgcgtgagtgcgcgcgtgtgtgtgtgctggagggtcttcaccaccagattcgcgcagaccccaggtggaggctgtgccggcagggtggggcgcggcggcggtgacttggggg

SEQ ID NO: 240298 - DNA, 122 bp, Homo sapiens
tcctccaaaagggtcatgattttgcattcctaccagcccactggcatatgagtgtctctccgacacttcgtcaaaagtgtattaagttgaaaatttttgctattgtaacgagtaagaaatgg

SEQ ID NO: 240299 - DNA, 122 bp, Homo sapiens
gggctgtgacggcatttctggtgttagtgtctctggctgtgagttctgcatccaactcaccggaggcaagcgacccccacctgcggggcagaagcagccgggtgcatgctgcaggggctgcc

SEQ ID NO: 240300 - DNA, 122 bp, Homo sapiens
ttgggtgggaaggggacgggtgctgcactaggaagaatcaagaatggaccggccttgccccgatgcaatcggcttcctaggatgggatggggggtaggggattgcatttctttaacccagat

SEQ ID NO: 240301 - DNA, 122 bp, Homo sapiens
gggagtttccattggccggggggcggtgtctgtccctggccggggtgggggcggggcctccgccgctctgagcttgcccttgtgtctggtgcttcgtagagctgccgccgtcgccgctgccg

SEQ ID NO: 240302 - DNA, 122 bp, Homo sapiens
gtgtgctcctccctgaaacttttgcactacctcggactgattgacttgtcagacggtaagcgaaccctggagcttccccgttttctgtgaatgtgtttttgtggcttcggttgctgtgacag

SEQ ID NO: 240303 - DNA, 122 bp, Homo sapiens
ggtgaacacagtgcacataagcccctgggtgtctctctaattcttccccaagtgtgtctccggcaggcaggaaagcttactgtgtgtcctgcaccgtgtgcgtgttggttgtaccctccctt

SEQ ID NO: 240304 - DNA, 122 bp, Homo sapiens
gaagtcagtagaaggacagcccacagagtgggctcagcctactgagcatgggggaattcacgttcagtaggtagccagggaaataagggcaaattaatactaagtacatctcatggtccctg

SEQ ID NO: 240305 - DNA, 122 bp, Homo sapiens
gtccagcagctgatattctctaaattcttgttcagtggccatcctgccgtcacttgaacacgctcctgggaaattgccaaacccatttccagctccctacaacttttagtacgcttcctcga

SEQ ID NO: 240306 - DNA, 122 bp, Homo sapiens
tcacagggcagaagctgcgggcaggggtgggcatcagtggggcggtggtgcagggggtgtcgctcccaagtcagctcacacgcacgtcttcaacacacccaccacacaggcacccgcacgca

SEQ ID NO: 240307 - DNA, 122 bp, Homo sapiens
ggacttttggggggaggtcaaagggcacgaagttgtgcctgcagctgttaccatagtaaccgaggaccggatgtggcgatcttacggtgcgacagtcctcttctcaggccctctggcccgag

SEQ ID NO: 240308 - DNA, 122 bp, Homo sapiens
acaatataatcaagtttattcctttaaaacaatgaagtgatttacataaagtagcttgatcgaagagtttcagtggaatcgtagcaaaacaattatagagctggcacagagaccaaacccct

SEQ ID NO: 240309 - DNA, 122 bp, Homo sapiens
ttaaaatgactcagaatctaatctaagtgatgtggaaatatattcctaaactttatcatccgaaaactacaatatttttgtaaaggacatcaagtcatttttaaaagtgatttattttcata

SEQ ID NO: 240310 - DNA, 122 bp, Homo sapiens
tcccacatttgctgtgattgatcggtcttcctgggcgatttgtctctctagttgcatccacgcagtaggttttgctcagatactgaaaatagtacatgtagcagcccgtggaagggtcctgt

SEQ ID NO: 240311 - DNA, 122 bp, Homo sapiens
cttccgcagaaggcgaattctttgcgctgctgcaaatggatggtgctactgggccagatccgaatctccgtagttcagtgcagtgggttctccatccctgctcaggacgcacaaacttactc

SEQ ID NO: 240312 - DNA, 122 bp, Homo sapiens
ccggggcggcgggggctcggcgggagggttgaggctgaatcacgcgcagcctgcgggcggcggaaacgtccctagagcctcgccgccctgggacccgggctgcttcctgggagaggattaca

SEQ ID NO: 240313 - DNA, 122 bp, Homo sapiens
gtctcctgtggctggattatgtaaagaagaaatggagttctttgaagtttcactgataagcgtgtggggagtctgagatatcttcttgatttgtgctcatgattattctggttcgtgcactg

SEQ ID NO: 240314 - DNA, 122 bp, Homo sapiens
gaacccccttccttatcctggctgcataatagtctactgcacggatggacccctgtgtagcgttcccctgcgagggactcgggcagccacgccccctagctgtcggggaaagcgctgctgtg

SEQ ID NO: 240315 - DNA, 122 bp, Homo sapiens
gtctcccggggcctcagtgccagcaccatggacctctcttcaagcagctgacattcaacccggcccccaggtctgctgggtccccccacccccacagccctcacagcattccccattgctcc

SEQ ID NO: 240316 - DNA, 122 bp, Homo sapiens
tctggtacccgccctcgtacctggcgcatctgggcctcggcggcgccgccctcctgccttcgcagctgctcccggaagcgcgcaacctgctccagcagcgcgtccactagggacggcgcggc

SEQ ID NO: 240317 - DNA, 122 bp, Homo sapiens
cgtcgggccctagcgagggcgcgctccccggggacaggcagcggggctcctccgagcccacggggctcagctccacctccgataggtcctgctcctccgccatgtcgcccccggccgccgcc

SEQ ID NO: 240318 - DNA, 122 bp, Homo sapiens
gcggcggtcctggctcagtctgagcatgcgctcaaagggcccagaagttcaagttgctgtcgcatcccctgtgctgtgtgcaccctgggttccctgcacgtggagtttcattgctgtttata

SEQ ID NO: 240319 - DNA, 122 bp, Homo sapiens
gaggaacaggggtgaggcccttcacagcgtcgggatgaacaggggtgaggcccttcacagcgtcgggaggaacaggggtgaggcccttcacagcgtcgggaggaacaggggtgaggcccttc

SEQ ID NO: 240320 - DNA, 122 bp, Homo sapiens
gcgcgcgggtacttccggtggacgcaaggcctgaaggcggggtcaagggtacaaccctggcgggggtggtgcccgtggggcggggcaagaaaaggggaagagcccaacggtattaacccctc

SEQ ID NO: 240321 - DNA, 122 bp, Homo sapiens
ggcgggactccagggtccctgggaggccccggcagccgcgcatgctcagagcacagggaccgctccacctcgtccgtggccctgcccacccaggccgcaagagctgccgggacggtccccat

SEQ ID NO: 240322 - DNA, 122 bp, Homo sapiens
tagacatttcccaagccctgaagagcactgataggggactgctcacctcacacacagccccgggagtgggaaccatgacttacacctgaagaagttgaggcacggtcaagttattagccctg

SEQ ID NO: 240323 - DNA, 122 bp, Homo sapiens
cagcagaaaagcattggggtccctggctgggttagcccaggtttctaggagtgtggtaagcgtcgaatgacttttgtccttttaaagcacattatgttactttttcccccaaggtttcaaca

SEQ ID NO: 240324 - DNA, 122 bp, Homo sapiens
aggtgtaatggatggcagggggccgacctaaccacactccagtctcttctaggtcgtcaccgctctgcaccaaacaaatgagtcctgtttcaccactagggtgccgaggtggatggtggatg

SEQ ID NO: 240325 - DNA, 122 bp, Homo sapiens
agatgaagcccatcggggaagtggggcggggccaacccggcaggccccgccccttcgcggcgcttcctagttcggctggttcttctgtcgccggcttcagcagcccgcgcccgggcaggtaa

SEQ ID NO: 240326 - DNA, 122 bp, Homo sapiens
tctagccttttctcagatggtgaccacttttggcttggctggcattgtggggtatcataccgtctggggagtgacccctgctctccactcaccactgatgtctgtgacaaatgcaatctcag

SEQ ID NO: 240327 - DNA, 122 bp, Homo sapiens
ggagcctgacatccgggtttgcaaaccacctggattctggtaaacaccgcggatttgcagcgggcagcctagagtgaacccagctgctccgcgacgcaggcgctttgggagggtcctggact

SEQ ID NO: 240328 - DNA, 122 bp, Homo sapiens
gtgtgagcctcatctgtgtgcggctgctcccgtgcgcagcagtgagctctgagggacaggcggcctcagcaccacgctgggcatcgccgggaagctgtgggaccaccagagcccagcattcc

SEQ ID NO: 240329 - DNA, 122 bp, Homo sapiens
ctggggaagaagcacaagggcggtgatagctccagtggcccccaacgcttggtttctttccgtctcatccgggatctgcaccagcatctgagagaaaggggtgagccccagtctccagtccg

SEQ ID NO: 240330 - DNA, 122 bp, Homo sapiens
tccacagaggagatggtggcagcttctccttggttcaggtatttggaaccagctggggtacgtagccctttgggccacaatcacaaagccacgtttacacagcagaagtgaaaccaacttgc

SEQ ID NO: 240331 - DNA, 122 bp, Homo sapiens
ccacagttaccaacagcagcttctgaaattgcatccaggagtcagattcgaaagtcattgcgtgtctcacaaaatcagaagaaatatgaccataaggggtaagagattgtccgatgtaccaa

SEQ ID NO: 240332 - DNA, 122 bp, Homo sapiens
ggcatgcctgcaccctcagggcagccccggacatcggcgtcaggttgcttgagtcaggggcgtgggaatcagacagacccggtctcagatgccaccctgtactgttggttctgtcatttatg

SEQ ID NO: 240333 - DNA, 122 bp, Homo sapiens
gtccaggagccgttggccaggcacttgcggaccttgggccccaccacctcgcgctccccccggcacacatactcaatctcatagtccactggcaggaagttgatagccttcacctggtcccg

SEQ ID NO: 240334 - DNA, 122 bp, Homo sapiens
aaactccgccccctcatccaggtgactattcccggtcctgtgcgaccctctgcgcaagagcgaccctgggacacgggggtgccctgtacccccagctcagctgcccgtgccctaggccctca

SEQ ID NO: 240335 - DNA, 122 bp, Homo sapiens
aggagggttatcttagtaaggcttgtttgcagatcctcagtgcaggctttccgtctctgacgattccggttgttctttgcctggtgagggaggtgaggggcaccttcgcaaggggaaatgag

SEQ ID NO: 240336 - DNA, 122 bp, Homo sapiens
caagaagacccccagttacttaccggcctgcttaccagccattttgaccagaaagagaagcgttgccttctgggtaagtcatagaggacaagctgggcccagtccgcaggcgcgttacgtca

SEQ ID NO: 240337 - DNA, 122 bp, Homo sapiens
ggagctttgacttgagaatccatatccttcgttcagcacaaagtttctgagcgcctaccacgtggagagagctaagtgctaggtgctgtgaagaaacacagcgtttaagacaggatccctgt

SEQ ID NO: 240338 - DNA, 122 bp, Homo sapiens
gcgcggttctctctccgcaggctgctttctaggatttgaaagggccatagcgacagaagtcgatctctaagaaggcataaactcggcctgagacgtgggggggagacactgcagagaagagg

SEQ ID NO: 240339 - DNA, 122 bp, Homo sapiens
aagttctccaagtccctacccgtcccacaagcccagccggcttcacctctcactggcactcgccatgggacttcgtggcacctagcccgtgcactcccgcagcccagagggagctcatccct

SEQ ID NO: 240340 - DNA, 122 bp, Homo sapiens
ttaatatagcgaatgtttagcctgtcctgactattacaaaatcagaacagcgagaatattcgcagtattctatgaatcaaagattcacaattggaaaacagaatgatgtagattttttggca

SEQ ID NO: 240341 - DNA, 122 bp, Homo sapiens
tggaacgcagttcctctccttcaccacgcagcatcagtcttgggtcaaatagaaacgaatcgtccccttcctggttaagtcttccaagacacaccagaggtccaggctggcattcttggtgt

SEQ ID NO: 240342 - DNA, 122 bp, Homo sapiens
gggtcctgccggggagcccctagggtgcctgcatggacgaggggccggaccagggaattccgggacaccagccaaaggatcggcctcagaattccagaaccacccatgggcacgggctctga

SEQ ID NO: 240343 - DNA, 122 bp, Homo sapiens
caggggataggaggtgggggagtcgagagctggagtcaggcgccgctcacgctgggatgacggagtgttaacctcagactctgggtccctttgggccgaagctttaagaaaacaggggcagc

SEQ ID NO: 240344 - DNA, 122 bp, Homo sapiens
cctcctaatgggttgaatgacggaaaaaagttagaaatattcagaaaaaaaagaatgttacgaataaaagggatacaaaaatcattggaacaattaaacagggtgaaattgttcagatggct

SEQ ID NO: 240345 - DNA, 122 bp, Homo sapiens
agacacgtggcttcgggcacccagctaggcaagcccagctcagtcggtgtccggaaaggccgcgttctcccgcgccaggggccggcaatggtgcggagaggggagaaagaagcaaggcgcct

SEQ ID NO: 240346 - DNA, 122 bp, Homo sapiens
ccacagcccgcagcgtttctccaggtttatggcttctgcctgatagcctacccctcaggccgccttccctgggtctgttcccatctgttctgggaggagggttttcttgacatttccccagt

SEQ ID NO: 240347 - DNA, 122 bp, Homo sapiens
ctctgtcttccctggaagaattggccaggcctcactcagcagtggtttttttgggtcaagcggatcctgggtttgaatcctgcttctgtccttgggcaactaattggccctctctgaaccgt

SEQ ID NO: 240348 - DNA, 122 bp, Homo sapiens
tttccttctttcagttgagttcacccaacatacattgggtaactgtgtgccaagttctttcgaatgtattgggtagtgggtggtgatacaggctgtagagtcagaccaacctggcctgaaac

SEQ ID NO: 240349 - DNA, 122 bp, Homo sapiens
ggctagtatttgtgggcttcccgtagttgtctagagttaccaagtggcaagtggctgccgcgagatgaacgcggagtagcttggccgtaaagaccatgttctcggtaattaattagtccttt

SEQ ID NO: 240350 - DNA, 122 bp, Homo sapiens
ctgaatttgatgtgaattcttttgctgcttaataaagtgacctctaggtgcattagaatgcgaaggcaaatagttgcaataaatcacctgcacaagcattgtgagctttttgtttttttaag

SEQ ID NO: 240351 - DNA, 122 bp, Homo sapiens
agcgtgtgcacacaagggtgaggtcacttgctagaaccctgcgagggggcggtgccgaggcgtggaggtgatcggagtggacagagaggcggccccagaagttagtcggcgggatttgggcg

SEQ ID NO: 240352 - DNA, 122 bp, Homo sapiens
gaacgccgctgtggaactgtgagatgacattgctgccgctttgtggaagagagttcccaccgtgtcttgttgtgattggtatccgttctgcacagcctccaccaccacagcgtggcacaggc

SEQ ID NO: 240353 - DNA, 122 bp, Homo sapiens
tggggcccgcgcacgacccgcccgcccctgtcaccggcaagccggagcggcgacacctcccgtccccgccgcgcatccactagcccgccccgactctccatcgggcctggaggtccctgacc

SEQ ID NO: 240354 - DNA, 122 bp, Homo sapiens
ctgctatcagccactgctgccaggaactactaatcaggcagcatgtctagaatgttaagacgatgattattaatcagtggccaaccaagaaaactgatgcatggcagaggcatccagtccaa

SEQ ID NO: 240355 - DNA, 122 bp, Homo sapiens
gcgcagacatagctttggctggcaaacggtgtccgccgagggacaaaagaccttgacatgcgcagaaaatactaaattatagcgttactgggccaattggggcagatccccgagtagcgaag

SEQ ID NO: 240356 - DNA, 122 bp, Homo sapiens
ctggccaccagccttccagcccttacggcccacgccgtaatcctggtgaccgagaaggtacgttcagtctaaggatttgcatttgaacgaaggatactggccaagccccttaccacccccac

SEQ ID NO: 240357 - DNA, 122 bp, Homo sapiens
gacagccaggtaatctccgtcccgcctgcccgaccggggtcgcacgagcacaggcgcccacgccatgttggctgcccaaagggctcgccgcccaagccgggccagaaggcaggaggcggaaa

SEQ ID NO: 240358 - DNA, 122 bp, Homo sapiens
ccccaaaggggagcgtgcaccgcgatgacgtcctcaaggcgcgccacgtccgcccggcggcgcagctgcccagcgcaacctcggccccgcctcgatagccccggacccctgccccgcccgac

SEQ ID NO: 240359 - DNA, 122 bp, Homo sapiens
gcagggagacctattatagaaatctttgtaggaggctgctacaatagtccacgtgagactcggggctcagactgggacaatgagttgggaaagggcagctataagtggagaagcttcctaag

SEQ ID NO: 240360 - DNA, 122 bp, Homo sapiens
cagtagggcaccctcaagacctctggaacctgtgtggtgcttctcacaacagaacagggccgggcacctccttgacactgttcctcaggagaaccagcagcgtgaaggggcctgcggttgcc

SEQ ID NO: 240361 - DNA, 122 bp, Homo sapiens
ctgcctccttacatattttaagtttggcctaaaggtttctctgtacatcatgaactataacgtaaatggaatagtatacggactctagtctactcttgtgccagtcactgagtttggccaat

SEQ ID NO: 240362 - DNA, 122 bp, Homo sapiens
gaaggcaggctggccactaagtccctggtctggcgctcagcggctgaaactgcagcgtttcggcctcacagatggggctggagttggagacgtcgctgcggccaggactgggaggccacttg

SEQ ID NO: 240363 - DNA, 122 bp, Homo sapiens
ttttggaagatgctttactatgtaaagtatagatggtcattttaatcattcagccacatacggttggctggtaaacagcttattctgatacaagaatgcttgggtgcatatggaaagattgt

SEQ ID NO: 240364 - DNA, 122 bp, Homo sapiens
gtcagatgggtagggttgcacgtccagctttggtggactgggaaagtcatgtccagcctccggggcagaaggcagaggggacttaaatgacccacatggcagggcttgtctgtgtgtgtctc

SEQ ID NO: 240365 - DNA, 122 bp, Homo sapiens
tgtggctgtggagggaacgaggtctacgtccagcatgcgtgaggtgccttcctcacaggacgggggacaggaggcccatgacagggaagtggctggaccccgggcacgaggcgggtgcaggt

SEQ ID NO: 240366 - DNA, 122 bp, Homo sapiens
cgccgcccgcctttccagtggctcaggactggccccatctctttgcagcactgctgagaacgcctctcaactgagagcccgcgctcctcccctccatgaatgtatctgctttccaccccaga

SEQ ID NO: 240367 - DNA, 122 bp, Homo sapiens
gtcttctatgttctaagcacaaagtagaaactcaaaagtgattgtgaaatgagtgaacaacgattaattaaaaaaataagagtaagagggtataagattcaggaaatacccccttaaggaaa

SEQ ID NO: 240368 - DNA, 122 bp, Homo sapiens
gatgcttgttttcttgtaaaaaatacagtcccccagatcgtgtgacgaaacctgcttcggcggcccgaggtgggggttttgagtcggttagtggaggcagtgggagcaggatgggcggagct

SEQ ID NO: 240369 - DNA, 122 bp, Homo sapiens
gcgatcctcgacttccgctctcccttcgcgcccagagggcttgttcgcctcccgaggccgcgcttggcccagccgaggtcccgtagttcctaacgctcgagccgttatcgtctcgaaaagcc

SEQ ID NO: 240370 - DNA, 122 bp, Homo sapiens
ggaggggctcggttgttacccgagatgctgtcgagatgcagtagaaaatccccaacaccgcggagcgtggaacaagaagttttatgcgttacacaccgaaacacaacttgacctgcaaccta

SEQ ID NO: 240371 - DNA, 122 bp, Homo sapiens
atcatttacaggaaaaaccagaagttgcagctgcatgctatatgactcaggtcacatggccgcattgctctcaaggctcaacataatttaaagttccgccagctttaggtttgaattattta

SEQ ID NO: 240372 - DNA, 122 bp, Homo sapiens
aagggggtccgggaggggtgccttcgggagaagccagtgccaggggcaccccaatgggcccgagggtgcgggctggcaggctgggtgcgctttgtgtcccccgcctgcgccccagcccggct

SEQ ID NO: 240373 - DNA, 122 bp, Homo sapiens
cgcctggtacttgaggatgctgactgtctcctctgaagaaagccccgaagacactcgtggcggtgctgtgcccaggtggccgcggctgcaggggaggggcagcctggcggaactcgctgcaa

SEQ ID NO: 240374 - DNA, 122 bp, Homo sapiens
tgtctatcttatcccggctgcccgaccaatcacggcccgaggatctgcgcctgcccctctcgcaggctggaccaatccagagcaacgatccggggaagctggcctggcctcatgaataatta

SEQ ID NO: 240375 - DNA, 122 bp, Homo sapiens
tcatccttttcttttaatttcttctgttcatccagaagctgctgctgctcttgctgcagacgttgactgcaatttctagcacatggagttaattaattgccaatttggtcaaaacaatcagt

SEQ ID NO: 240376 - DNA, 122 bp, Homo sapiens
ggcacagaacaaaacagaacatttgatgtgaaataacagcaattcacattcaagtggctgcggtgccagtaagtcaggggaaaaactcacactaaaaagaaaaaaaaccaacaagtaagaca

SEQ ID NO: 240377 - DNA, 122 bp, Homo sapiens
ccaggcactgggaagactcagcgagccactggaagagcctcatcttcagagttggccccacgcccttctaacttgtcccctgtttgttgtttgtcatgaaggctgaggacactgagctccag

SEQ ID NO: 240378 - DNA, 122 bp, Homo sapiens
gcgcccacaagagcctgcatccacctggccaagcgcacgcacctagaccgcggaggcaaccgggcctgccttggaaacccaaggacccggagcctcagtttcctcatatgtagaaaagggca

SEQ ID NO: 240379 - DNA, 122 bp, Homo sapiens
aagtttcactagttttttcctaatgtctttttctatcccaggatcctaaccaggctaccacgttgcatttagttgtcacatctcctttggtctgtgacagtttctcagtctttttttttttt

SEQ ID NO: 240380 - DNA, 122 bp, Homo sapiens
gtgcggggggacagccagcccgagagggcccagggtcggatttcggatggaaccagagctcgctccagggagttgaaggagttgggagcgcatctcccaataatcccaaagaaaccgagctt

SEQ ID NO: 240381 - DNA, 122 bp, Homo sapiens
ggctgccctgatatttccggaattttatagaaaggggaaggctgagcctaaaacctctctcgaaggcggccaccctgccaggcccagctcctcgcaaacaaagaagtcagttgggcgccccg

SEQ ID NO: 240382 - DNA, 122 bp, Homo sapiens
cccgaggaagtgcatctgggctgagaccccaaggatgtacaggaggtgggggccctgatgcggaagggactgcggatgtcatctcagtccaccaccaccttctaacagcagcggcactgctg

SEQ ID NO: 240383 - DNA, 122 bp, Homo sapiens
agcccttcactgcctggggctggcggcgccggccgctcagagtgtgggccgcggagcccacgcctacccggaactcacgctcgccctggagagcgggtgtgcagccccagttcccgcccgcg

SEQ ID NO: 240384 - DNA, 122 bp, Homo sapiens
agagccccgtgaccgggaaaaggagaaggttccgctagagctagggggcgaggccggagccgctctaggctggggaagggcaagtccctctgagctggcccagagctccgcccctagcctgc

SEQ ID NO: 240385 - DNA, 122 bp, Homo sapiens
ccccgagcgcccgcggttgactttgcaaaaaattgggggattttccacactcgcttccctcgtcgttcgtccggcggccgcccattgttgtttgccaaggggtggaggagggcagtcgtgtc

SEQ ID NO: 240386 - DNA, 122 bp, Homo sapiens
ggtttgtttctgtactctgttgtgtcctgcaggtgacaccgatgctgtcccctgcgtgttcgggattgtggtctgtgtgtgttctcgtgttaggcctgtctggctctgcgtgttcgggattg

SEQ ID NO: 240387 - DNA, 122 bp, Homo sapiens
ggcgcgttgtattgcacaggggccagaaggggcctatggggattccgctccaccccgggccgcctgcagattcctcagaaagggcaccctcaaaaatcgaggacgcttctccccttcccctt

SEQ ID NO: 240388 - DNA, 122 bp, Homo sapiens
taatagactacagatagtataaacctaacttgaaaatacatggagaaactaaaaaattctcgtgatttgttttattgtgatactttattgaagtggtctggagctgaacttgggttatctct

SEQ ID NO: 240389 - DNA, 122 bp, Homo sapiens
cgcggtcggtgtctccggcgcggcggcggcggcggcggcggggcttttcctgtccggttacgttaaggtcacatgaccgagagagcggagagactagtgcaaagaggctgcgagcggctccc

SEQ ID NO: 240390 - DNA, 122 bp, Homo sapiens
gatcacaatcactctattgatctttggccaatcattttggccaaatcactctggccattgcgtggatactggactcgggtaggcattgagggtgagagaggaggcaggaaaaccagttgagg

SEQ ID NO: 240391 - DNA, 122 bp, Homo sapiens
gaacctctcaccccagaggcctcagaggtgagcaggcctagcagggcccaggcagtcctgcggccactgacgtcggcctgggagggtggacaggcccccggctcagagccatctgtggttct

SEQ ID NO: 240392 - DNA, 122 bp, Homo sapiens
accaaactgctaggattacaggcatgagccactgcacctggcttcatctgcgttgttgagcgtagctacagtttgttcatttgcattgctatatagtgttctcttgcatggctattgcatgg

SEQ ID NO: 240393 - DNA, 122 bp, Homo sapiens
gccccaggggaaattggagcgagggggtcgtagataccacggacagcggcggctgcgaggcgtttcagcaccacggagagcgtccagacctgcttttcaggagcgcgaagagtattgctgtt

SEQ ID NO: 240394 - DNA, 122 bp, Homo sapiens
gacgtggacaaggtgtacatgacgttcgtgcaggtgagcagccctcctcgggagtgtatgcgccacatgggctcagagcagctcccctcaccctcgccctctctccgccaggccaccagcag

SEQ ID NO: 240395 - DNA, 122 bp, Homo sapiens
ctctgggagcccctctcagcctcctaggaggcctccttgtcctctttggagaccccttagcgccaggctccgtcaccgcctagtcccttggttctgaccaagatcccgaggaagaaggcgat

SEQ ID NO: 240396 - DNA, 122 bp, Homo sapiens
taatgaggaaggccagagcacccgccaaccggtcccggctcagacagccagacggctggccggccccttccaactggctgggctgatctcgcagaggataagagggagccggcggcttcggc

SEQ ID NO: 240397 - DNA, 122 bp, Homo sapiens
aagtggccggtccagagctgtggggtggcctccgcgcggtctctggcggagtcggggaatcggatcaaggcgagaggatccggcagggaaggagcttcggggccgggggttgggccgcacat

SEQ ID NO: 240398 - DNA, 122 bp, Homo sapiens
agcccaccatgcctgagcctcccaccgcctccatgggctcctgtgcggcccaagcctccccgatgagcgctgccctctgccccatggcgcccggtcccatcgaccacccaagggctgaggag

SEQ ID NO: 240399 - DNA, 122 bp, Homo sapiens
ctggctccgcccccagcaccaggcgcccagtggagccgtttgggagaattgcctgcgccacgcagcggggccggacaggccgcacagacctactgtggcgggagggaggggcggctgctgcc

SEQ ID NO: 240400 - DNA, 122 bp, Homo sapiens
ccctgcgactaaactacaaccaagcccaggttctgcaaaacgattccagaaataagccaccggcctgccgcggcctccggagccctctcccgctcggcgccccgaggccccaccccgaagca

SEQ ID NO: 240401 - DNA, 122 bp, Homo sapiens
cactcctcaacaccacaggcagaaaccccagaaaccctgctctcccaggacagcagggggcgccacagaccccagttcctcccctgggtcctgcagctgcacttctgaagtctggtcccttc

SEQ ID NO: 240402 - DNA, 122 bp, Homo sapiens
cactagaggcaacacccagggtcactctgagagggcctgaacctgctttattaacaggatcgagggtcaggtatgttggtgggtcttggactctcctctaaggtaaatgggtgtgtgggggt

SEQ ID NO: 240403 - DNA, 122 bp, Homo sapiens
gttgggcgcttgcctcttcctgtctctgctgtgagtgcggcagcggcagtgagtgggtgtcgacgcggcggaatgcccgtcgctgctgctgctgctgcccgacgggcctggggagggcactt

SEQ ID NO: 240404 - DNA, 122 bp, Homo sapiens
ctggggctgccgccagcagatttcctcaaagcccagcgaggcagccgccggaggaatgtgcggcctccttggcatggcagacattcaagggagcccacaaaggcgctgttatgaaaaccctc

SEQ ID NO: 240405 - DNA, 122 bp, Homo sapiens
ccggaagactgcgagccccgctcacctcgagctctcagctcgctccatggatgcaacacccgatccgcctcggggactgggaaagttccctccagggctcccacaggcgctccgcctcctga

SEQ ID NO: 240406 - DNA, 122 bp, Homo sapiens
gccttcacaagctacagaggccttaccagagaaatctccctgcttgctcagttttgcaaccggctctggaacaagtgacctgtcaggcttctatgcctaggacttgaagggacgtggaggct

SEQ ID NO: 240407 - DNA, 122 bp, Homo sapiens
acattatttttaaaaacagacacacagcctgggcttgggaatctccagaacaaacctacacgagcaaggaggttaatggggctgtttctgggtccaagctccaagaggaaggagggtgatga

SEQ ID NO: 240408 - DNA, 122 bp, Homo sapiens
tcctaatcaggttcgatgcgaggagagccagttagagatgtgtgtgattctcccagtgtgcgtctttgattcgtgtgctaattatgtcgatcctttggggaacacagccaggaagctgggtc

SEQ ID NO: 240409 - DNA, 122 bp, Homo sapiens
ccagcaggagcagttggtcttcggcagcggggatgctgtggagctgagctgtcccccgcccgggggtggtcccatggggcccactgtctgggtcaaggatggcacagggctggtgccctcgg

SEQ ID NO: 240410 - DNA, 122 bp, Homo sapiens
gggcagcccccggccatggcatctcacaaagacgttccagggaccctctttagggaagcacgtccggtagttaccgttctgttctctccaccgttcccctgagcagttgcagcggggccggg

SEQ ID NO: 240411 - DNA, 122 bp, Homo sapiens
cgtgccccagctgtgaggggcatgtgtgctcttggtgggcaagggcaacccagttttctgcgcctcttttaaaatgatacagatttttggctttaaacttcagagtcctaggacaaagccct

SEQ ID NO: 240412 - DNA, 122 bp, Homo sapiens
cccctccctcccggcttcctttctttgtagccacctcaggggaagcaacagatcgtcactcggtgttctcaccgaaagcacgtaatcgccggtgtaactcatgttggctggggggcctcccg

SEQ ID NO: 240413 - DNA, 122 bp, Homo sapiens
agtgcagcgtgcaggagcactgcttacacctgggggaggaaaggcacaggagccccagctcggcaccgcccaccccgccacgcattcaccacgtgctcctgatagcaggcattgcggactcc

SEQ ID NO: 240414 - DNA, 122 bp, Homo sapiens
gggcagccgggcagccatccctgagtcagggcctggcttgggcgtgtgacctcagaggggcggggaggctcgcccgatccccaggccaccatccagcctagaccgagaacacggacgcgggg

SEQ ID NO: 240415 - DNA, 122 bp, Homo sapiens
caagtgttagctactttctaactataaaattctatccaaaaagacttgcagtcaaaacaccgagccaaaaaacaaaaaaggcaccaaagcagtgccgacttcaatgtgcaaaggccttttac

SEQ ID NO: 240416 - DNA, 122 bp, Homo sapiens
actgttttaatatttaatttatttaaattattttagttttatttaaatttatttaactagcggctgccacatgggacagtgcagctctagagggaaaagctgaccacatcctttgcagtttg

SEQ ID NO: 240417 - DNA, 122 bp, Homo sapiens
ccccggaggcggtggcccccgccccccgcgcccgccccgtcagtggcggccgcacgaccgcgcgcaccagcgaataatagccgcccgtgacatctccgctgataccgtcccggacgggcggg

SEQ ID NO: 240418 - DNA, 122 bp, Homo sapiens
ttatggttttgctttctattcccccatgctctggcattttttcttatggcttcaccctttcgtgtcttcctcctgtgtgtgtgggtttctgctctgctcattgctgctgttgcactgacgcc

SEQ ID NO: 240419 - DNA, 122 bp, Homo sapiens
tctagttacagaaggagcctgatcaaaacaaccaccaaaagtcttccactcacagcagttcggagccgaaaagttgcggaaatgaggcccagcaacggtccctggctttgatttgccaaaat

SEQ ID NO: 240420 - DNA, 122 bp, Homo sapiens
atattcactgactggattctgtatgaagaaattatttgtaaaatatacattccgattctacgtatgtggcatgtttctgtgggaaagtttgtatgcatgcgagtctgtatacagtgaagata

SEQ ID NO: 240421 - DNA, 122 bp, Homo sapiens
cttcccatattcacaggccttagagttcgcgccttggctgggctcctagtccgggctgagcgtctactcgctggttaaggtcggtccttccaggtccacagcggcctccacgcggcccaccc

SEQ ID NO: 240422 - DNA, 122 bp, Homo sapiens
ttcttagggtcaggcaagctggggagaccctgaataagggttcccccattatgttcccagcgtaactctggaactgggtaccacaaatctttgttaacctagtaatgaccatcacaaaagcg

SEQ ID NO: 240423 - DNA, 122 bp, Homo sapiens
aatccccgcgggttggtcggggcgggggcggggctcggtgggcggggctgaccgcgggggcggggccagggtctaacaccctccagataatgtatggctgcgacttggggctggaagggcgc

SEQ ID NO: 240424 - DNA, 122 bp, Homo sapiens
gtagtttcttgtccttaaaattctttcctgttgtcaagctacctgaaacgtatttgtcctcgataccctaggggcagggtggctgataactaaggtgcctgggaaacacttcagaagcaagt

SEQ ID NO: 240425 - DNA, 122 bp, Homo sapiens
cacctcagttctatcctggtctcggcaaggaatgcacacaaaataactgaaagttataaacgaccaaaacataaaccttagatgccttgagttaaaatcaattttcctaataaattcaaata

SEQ ID NO: 240426 - DNA, 122 bp, Homo sapiens
gttgcaaagagcaatcacctgtcatcataaagagcttttactatcaaaacactttcacatcgatttcttcattctagccccactacaatcctgtgagggaggtacagtagggatcattaact

SEQ ID NO: 240427 - DNA, 122 bp, Homo sapiens
caacgccattcattcattcattcagcccagaggggttgcccagaggcccgaggatgcagccgtctcccccacctggacatccgtcactcggggtgggatccgattaagtgggcgtggggtgg

SEQ ID NO: 240428 - DNA, 122 bp, Homo sapiens
cacctcggagctctgataggcgaagatgctaggcatcttgtctcagtggccaccaccagccggctgcgcccggcagagagaaggcgagcttgggaaggctgggccctgatgaggcggggaga

SEQ ID NO: 240429 - DNA, 122 bp, Homo sapiens
ggctagtgaacagtcagtagggcagctgtgttgatttgttctgtgacctcattgagcatccgtcactatttcccagctcagtctgtgcacatactatctctattgccttgaaattgtttttg

SEQ ID NO: 240430 - DNA, 122 bp, Homo sapiens
agttaacagaagcaagttgactcaggcaactgtgagaaaagctaagactgtttgcatgcacgtggtgagtcatctaatgtgtaagtcaagctaccagctagaattaatcttgtgcatggaaa

SEQ ID NO: 240431 - DNA, 122 bp, Homo sapiens
gaacatggctcctgaggcagctctctgagacccaggactataagagattgttgttgttgtcgtttttagagacagggtatcactgtgtcacccaggcctcaatgcagtggctggatcatagg

SEQ ID NO: 240432 - DNA, 122 bp, Homo sapiens
gagagaagccagaatccgccaccctgagtagccgctgctcgtgggatgcaggggaaatggcgccctctggtgttggctcaacgcctgtgttcagcaccgggagctgcccaattcggccttga

SEQ ID NO: 240433 - DNA, 122 bp, Homo sapiens
tttgttctggttgataggggactttttcaaaaaatagaggtttcatttgaataagaatgacgtcaagttacaaacgttttaaaagagaatgactcggttgggtgtggtggctcatgcctgta

SEQ ID NO: 240434 - DNA, 122 bp, Homo sapiens
gacacgctggcctgtgattggctcttgccatgcccgaggggaaggcggccgcccccggggcggggctacatacacagccgtggtcccgcccggcccacatccgggcttccgcgtagtccggg

SEQ ID NO: 240435 - DNA, 122 bp, Homo sapiens
actgtattccagctagtcctgctgcctggaaaggctccagggttggggcctgttttctctcggaagcatttgagagatgttaaagacacagtagcacagaattgagactttctctttaagat

SEQ ID NO: 240436 - DNA, 122 bp, Homo sapiens
tggggtttccgtcccgggactcccctacgagggcggtccccggtagccagaagatccggccggactccgagcctggccccttgggcgccgtgtaattctatagctgtagggtttcctctcca

SEQ ID NO: 240437 - DNA, 122 bp, Homo sapiens
gattgtgttagaatacagcagactgaataattgatagagatttatttggctcacagaagtcgaaaggcatggcattggcatctggtgagggccttcttactgcatcataacatggtggaagg

SEQ ID NO: 240438 - DNA, 122 bp, Homo sapiens
ctctgagaacgccaagagacacccaagggactccaggtaaaggtgagcccttccagcagtcgccctctggctcggcacggaggggggcgctcagcctttctggggcaaatttagtaatatgg

SEQ ID NO: 240439 - DNA, 122 bp, Homo sapiens
agctgggggagtcgttggtgggagatctggtgtcccttcggcggccgcgggccgggggaccggggaagacggagggtcctgcggcctggagcaccaccctaccacaccaggcaacgcccccc

SEQ ID NO: 240440 - DNA, 122 bp, Homo sapiens
cggggcactgccctggcctccaggccgccccggaagccgcgccgcctgcgtgggaccctgcgacgctgccacccagccgcaagcggaactcgcttggctcgtcaccccttcacccggtgcgc

SEQ ID NO: 240441 - DNA, 122 bp, Homo sapiens
cagagtttccagtgaaatataaacttcttgaaggccccatgggatcatgccttaaaatgtcgtgcttttgtttatgcctcccatatgcaaaacagtggtgaaatgtgtggttctgtgagaga

SEQ ID NO: 240442 - DNA, 122 bp, Homo sapiens
taaggcccaatatgggaggggtcgtccctaccagcccctcccttgtgcccattccactcccgcctggctgccgtctccagctggtcccggctgcctgcccggtcacccgatccgccctctaa

SEQ ID NO: 240443 - DNA, 122 bp, Homo sapiens
tgacagcctaaaacccttggttagattgagagaatttgtattaacctgtaaaacttgcttcgtcccacccacaattaataacactaaaataaagggtaatttaataactgtcaaaccctgtg

SEQ ID NO: 240444 - DNA, 122 bp, Homo sapiens
ctattatgaagtcggccatctgaaaggtggtcaggaagagggtggcggggcttcagcagacgtcttctaaccctgcggatgtggttaggccctggatgttcttgtacctttggagctgtaga

SEQ ID NO: 240445 - DNA, 122 bp, Homo sapiens
ggcggcgatggggcccctcattctccagcaccacgaagtcactctcctccacctcctgcccgtccttgtaccaacgcacaggggcgtcctctcggtccacctcacaggccagcatgacacac

SEQ ID NO: 240446 - DNA, 122 bp, Homo sapiens
aaaaatcccaccttcctctcatagcctttcagattctccctggagctgaggttcatctcacgcccccttcatctatgctggccctgctctacttctcacagaggcatgttcttgccaagata

SEQ ID NO: 240447 - DNA, 122 bp, Homo sapiens
tcaaaagcaatgtcccaggacttacaatgtttgctaagacgcaagagggtgtgacacagacgctaagcgccactggcgaggagatgaaggggtcgtcttcatcttcgccggatgatttccgc

SEQ ID NO: 240448 - DNA, 122 bp, Homo sapiens
ctaaagcccagtgagaaatcgagcgcagtgccggtgggccggcactgatgggggaccctgcgcactctctgcatctgctggccctggtgctaagcccatcactgccggggcccacagggccg

SEQ ID NO: 240449 - DNA, 122 bp, Homo sapiens
gaggccaggagggggggctgtgggtctcccggcagtggcagacggggactgaatgttaatcgcatcccgagtgagtgtgtgtgtgcgagaacacagcgagtgtgtgagtccctcccgctcca

SEQ ID NO: 240450 - DNA, 122 bp, Homo sapiens
ggtcagaaagccactcagggctcggtgggaattagtgattctggagggtgaaaggagaggcgacttggtggatgttaacattcaataagtaactgcgttcgatttgggtttgatttaagcga

SEQ ID NO: 240451 - DNA, 122 bp, Homo sapiens
ggaagtgaccgcctcgcggctgcttcctctcctggagtccagagtcccgttgctccgccgcgatattcagtaaaccactgggagtccggcagcatggaggcagcgcgccctcccccgacggc

SEQ ID NO: 240452 - DNA, 122 bp, Homo sapiens
tggtgattcccttggtcttctgtaattggagggcgggggtgggactatttataggattatcggggtgttggccacagcccctccagctgggtataggcctggaacattgtgattgggcaagg

SEQ ID NO: 240453 - DNA, 122 bp, Homo sapiens
tgactcttcctcacccccaggtctctgatccggagcaagctgttccctgagctggaggagcgcagcttggagacagcccgggccgagcccccggaccccttgccggacaagatgcgccagtc

SEQ ID NO: 240454 - DNA, 122 bp, Homo sapiens
acagacttggttattgggtccagccagggagcgtggggcctgcgacaggaaggattcagccggccatgctggggttggggacacagactctgttattgggtctggccagggatcgtggggcc

SEQ ID NO: 240455 - DNA, 122 bp, Homo sapiens
ctgatccagcccacttgtgtagtctgggagtctgggacaacctccgtccgcccttctagccgggtcactgcaggcaagccttggtgctcttgcctgcgacgtggaaatgatgcctgcctgca

SEQ ID NO: 240456 - DNA, 122 bp, Homo sapiens
aaaggcaattcgaagagtgggggaagctgcggttgtccctgcggagccggcagggcggcgcggaccctcacctgatgagggcacccgcaccaggaaggcggagataaagaggaggatggcgg

SEQ ID NO: 240457 - DNA, 122 bp, Homo sapiens
tggacctggggactcaccagaagggcccgatgtggagtctcacggagcgtcggcggaaggcgcacaggatgctaaagctttacaacggcctttgggaaggggaggctgtgggactccccaca

SEQ ID NO: 240458 - DNA, 122 bp, Homo sapiens
cctaaacgcacagccaagacctcacccgcaggctcgtaagtcactggaaaaatattaaagcgttccctccctcccctcctctatctttgacatacacacgcctgcgcgcgcgcgcactctta

SEQ ID NO: 240459 - DNA, 122 bp, Homo sapiens
cggtgagtgttacagctctattggaagccgtgggtcacggaagagaactgtggaacccagcgactagtgtgcagctcatttaggacaaacccgggcacttagccacgcaggaacaatggcca

SEQ ID NO: 240460 - DNA, 122 bp, Homo sapiens
attggtgtttggagattccaagtgttgagtttgttggtttaaaaaataataacaataacacgggaaggctgctaatgctcttgtagaaaacctaagtgctagaatctgctcaggcaggaggt

SEQ ID NO: 240461 - DNA, 122 bp, Homo sapiens
tcacgccccccactacagtctaaagcggggtttggtgcccaccgcgcattcctctttaaacgcgttttaattgcttttaaatggcctgccagctgcgggcaagcttttccccgcttgggctt

SEQ ID NO: 240462 - DNA, 122 bp, Homo sapiens
ataggaatatatactgtcttgcctcctgggtggaatttcagacaaaaaaaactcaatattcgtaacctcttgcctcataatcctcctcatagcaggtataatagccaccaccaacagatagt

SEQ ID NO: 240463 - DNA, 122 bp, Homo sapiens
tcggaagaagccggggctcctggaggcggaggcgaggcctgggacccaataagaagggcgcggctagagaggaggggctggccaaaagcccttgaaataaggcccaggcagaaccgcggttc

SEQ ID NO: 240464 - DNA, 122 bp, Homo sapiens
atcatctaggataggaccactgtcagcctcagagcctggcacagaacttggcacttaatgcgtgtttgttgaatatgaatggattgggtccagtgtctaatgatacgctatgaaagttattc

SEQ ID NO: 240465 - DNA, 122 bp, Homo sapiens
tgtgttactaagtgaagtctactatacatagtaaatactacgcagtcatacctttataaacgacaaaatctgaccaggctagatctgaatctgttaatttctgagacggtgtgtctgaagtg

SEQ ID NO: 240466 - DNA, 122 bp, Homo sapiens
gttatttattgtgtactgactccatctgccccgtcaaataaaaaaccacaaggttcgagccgccgggcccgacaaactccgggtcggcgaaacagagtccgcgataggtgcagcgggctggc

SEQ ID NO: 240467 - DNA, 122 bp, Homo sapiens
ccacaagttgagctaatttccttggctcaattccatcctaccaatcctttgccagtcagccgagaagcaaggaggcctgcagtcttgggaagggagtggcgggtgagagagaagtggttgtg

SEQ ID NO: 240468 - DNA, 122 bp, Homo sapiens
caggccgtggggggaacccgaggcgtggcggcaaatgcgtagagtcactcaacacgcactcggcctctttggagggtgagggtttctcatagttggcgtcttctaaaggaaaaacactaaaa

SEQ ID NO: 240469 - DNA, 122 bp, Homo sapiens
ctcctcctcctcctcctgccccattggcctgcatgatgctgccgctgaccaggctgtggccgctacttcggtgggggacagcagcggcggcgggaggggcagcagccgggggaagtcccacc

SEQ ID NO: 240470 - DNA, 122 bp, Homo sapiens
ctttagatctctctccccgactgatttctgatgcccaaccaaacctaaaaggtcagataacgcaaaacaaaacagaggagagccttagattttgagagagacctgtctgcctgaagttcttg

SEQ ID NO: 240471 - DNA, 122 bp, Homo sapiens
ctcacccgtggggcaggacaccctgcgattatgtttcctccatttccacaggctctcacccgtggggcgggacaccctgcgattacatttcctccatttccacaggctctcacccgtggggc

SEQ ID NO: 240472 - DNA, 122 bp, Homo sapiens
gcgcaggggctgaggctgggagccgtagtcaggggcaccgggtgggctttggcggcgggtcgacctgcctttcaggtgccgggggtttgggagcaggggaacgggccctgggcggattcctg

SEQ ID NO: 240473 - DNA, 122 bp, Homo sapiens
tctgcctggggaaggtggggccagagtggatgtgttcccagcgtggtcactcccctgcctcgccagcaggtctcggctccaatcaggaggcctaagccaagtgataagcagccagacaacag

SEQ ID NO: 240474 - DNA, 122 bp, Homo sapiens
gctgcccgtcgctgacgccccctggccgctgattggcttcccctgacagtgggcggaacgcggccccggattggatatccattcgccgtccctcacccggcacctgcgtgcactctccggcg

SEQ ID NO: 240475 - DNA, 122 bp, Homo sapiens
tgacaccgtctgaacacctgtgtcgtctcagagtagtgaccaaaatgccaaggcctcattcggaggataagcactcatctgcccagccagacccaaggttttcagaacactccttagcgtgg

SEQ ID NO: 240476 - DNA, 122 bp, Homo sapiens
gtgtgattttacagcatgtgtactctctctgcctaatgtcgattgctcactacacagagacggttcaagcctgtgttctgtgtaacatctacacctcagggtggcactcagcgcatctttat

SEQ ID NO: 240477 - DNA, 122 bp, Homo sapiens
gcagcactatgctcctggtctcctggaactgacattacttactcagaaatggaatgtctgcgatcattaggtcgactccctcacagatgaggaaactgaggcacagagaagtcaagtcatat

SEQ ID NO: 240478 - DNA, 122 bp, Homo sapiens
gtccccaggcttctcaccggctgccttggatgccccatcaggagccttccaagacagcagcgctgctcatgaatatgtcactacagccccctgcgctgactcaatggtttgcattttttatt

SEQ ID NO: 240479 - DNA, 122 bp, Homo sapiens
aaacggcactggtttcatcagccacataggcacagaggtctcattttataaccatgagctcggatgaacaacatctcccctggggaggcattgtgggttctctcccgatgccctgccctgcc

SEQ ID NO: 240480 - DNA, 122 bp, Homo sapiens
aagggcagggtctctcttcagtttatacaaagccatggtgcttctaaatcagacctagaacgtgcttgactttctatgagataacaagaagaccgtgagctatgtacttgctgactcttttc

SEQ ID NO: 240481 - DNA, 122 bp, Homo sapiens
ccaacatgcacggcaggagcggcggcccagcactcggcactggccacttgcaggtaggagcgcggggcccccccgcccactgcgcacgcgcggcggcccgttgctggcccaggtgcccctag

SEQ ID NO: 240482 - DNA, 122 bp, Homo sapiens
ttcttagaaacttgattgttggatgtgtttttcatttggcaaaaattcaatgtggctttgcgtgggatgtctgaagtgtcagaaacagcactgttgatgttctggttttgagagggaaaata

SEQ ID NO: 240483 - DNA, 122 bp, Homo sapiens
ttgccccctggggtgctatgtttttgtccatctcccagtatgaaggagatccttctgcagcgaagcccaccattagctgagcccagcagctcagcttctcagttttcctggcacttgcctga

SEQ ID NO: 240484 - DNA, 122 bp, Homo sapiens
tctacagccgggtcccatctcctcccactcttcaggcctcgctgacccgcgtcccttcttcgtcccggggctccaaccttgcccccgccacctccagaggccccacccacttatctgccctg

SEQ ID NO: 240485 - DNA, 122 bp, Homo sapiens
ttagataatatatgcaaacgtgcttctcaaattgcaatatgctgttgaaataacttgagacgttaaaggcacgggtgaggtacatgaaaataccatcgttgactaataagtgactcagacac

SEQ ID NO: 240486 - DNA, 122 bp, Homo sapiens
ttggaaaggggtggtgtgcttggaatatctgctcagtgcaggcgcgtggcagaccccagacgcgtggcagaccccagacgcgtggcagaccccagacgcgtggcagaacctcagtgcagatg

SEQ ID NO: 240487 - DNA, 122 bp, Homo sapiens
gaggaatgggaaggggccagagggatggactaatgggctaaaatcatcagtttgaaaagacggttgtggctacaggcagagatttcactggatcaggtctcttgtttctgttcttcattagt

SEQ ID NO: 240488 - DNA, 122 bp, Homo sapiens
gacactggcctctcgccttgggcgcagggtttggggctcagctgtcaattccaaggaattcgtagggttcgacccacgcggcgggagggaacggagggagaatcaaaaggcatcctccccca

SEQ ID NO: 240489 - DNA, 122 bp, Homo sapiens
acccgtcctcaagcagccaaccaccaccgccccacgccagttcagcctatcgccgtcctccggggcgggatcagaacaacttctccaccaatgagaatcttcttctgctgggcctggggcgg

SEQ ID NO: 240490 - DNA, 122 bp, Homo sapiens
cccggagcagggagtccttctgctccctggcacggctctgcgctgaacccacccggcctgcggagagcagacaagtgcctcttgggcccgcttctctaacaaatgtaaaaataatgcccttg

SEQ ID NO: 240491 - DNA, 122 bp, Homo sapiens
gacctcgggcacgcggatctgaggagcaccgtgcagttgctgctccttcgagatcccctgcgaggccctgggcctcagttcaaaaagctgtggaaggcctgcgggtgtaggggaaacggccg

SEQ ID NO: 240492 - DNA, 122 bp, Homo sapiens
taggcgaagtccagaatgtccccaaataccttggagctgatagtgtgcatctccagctcccggctgcccccggccccgccgcctggtgctgccgtcgcgccccctacatcagccggaccccc

SEQ ID NO: 240493 - DNA, 122 bp, Homo sapiens
ggagcctctgcagagaaagcgtgagagatggagatgggcaaatggattcatttagagctgcggaacaggacgccctccgatgtgaaagaacttttcctggacaacagtcagtcaaatgaagg

SEQ ID NO: 240494 - DNA, 122 bp, Homo sapiens
gaactaatttgagcttctataattacttcatgttttacacctgtctgcgtatcatgcacccgcttgtctctgtacttaagctgtatatttccttgcagaaaagctagttttcatatacaagg

SEQ ID NO: 240495 - DNA, 122 bp, Homo sapiens
ctccgggtcggcgaaacagagtccgcgataggtgcagcgggctggcagctgggagcgccccgcaagcgtcacgtgagggggcgaggggcgggatgcccctccgcgggccccgccaatgatga

SEQ ID NO: 240496 - DNA, 122 bp, Homo sapiens
cgttcatatatggcaggatttagtaagcatgtctgtctgtgtctactccgttgatatgctcgtggatttaaagcctccagacccaggtccgacctttgttgttgagcctcacaggaaagctg

SEQ ID NO: 240497 - DNA, 122 bp, Homo sapiens
cctcccccagcctcgctgtcgccttgcagtttgatctcagactgctgtgctagcaatcagcgacactccgtgggcgtaggaccctccgagccacgcacaggatataatctcctggtgcgctg

SEQ ID NO: 240498 - DNA, 122 bp, Homo sapiens
aaggaggagaaacatttttcaaagatcgagaactctcctacgaagagccaagagcctctgcgtgcctcagggactcaaacggggatcacggtgcctgttcactggcaaacagggacccccat

SEQ ID NO: 240499 - DNA, 122 bp, Homo sapiens
atgtctctaagcttgaatgtaattagaaatcttaatatacagcccatcgggtcagaacctcgaaagggatggatggagacacaccaagtaccatcatttttttctgagttttatcttatata

SEQ ID NO: 240500 - DNA, 122 bp, Homo sapiens
ctgaatcagaatataaatactgacaagatgccccgggattcatatgcacagtagagctggcgaagttccattgtagcctgtgattgttttctgcaacttagtatttctgagttttcccaagg

SEQ ID NO: 240501 - DNA, 122 bp, Homo sapiens
ctctttgggttctgacaggttccagcttgttttttgagaccttgtcagcgtggggcctgccgggaagcaggtgcttgtctttaatgggatgccttatcctgggctccacaggctgcacgggg

SEQ ID NO: 240502 - DNA, 122 bp, Homo sapiens
accttgaagaacccgtccccatggtcccacgtccatgtgtctcgagacctgtcgcatcctcgctgaaactcaagaatgtgaaacaggtgaaggtgtgttttgacgcattagcataccagggc

SEQ ID NO: 240503 - DNA, 122 bp, Homo sapiens
caccaggattgggctccgccccccaaaagtcccccacagagggcatgcgaggatggggagcgacctggcctttctgctgagtcatgccatctggacctcacagctctgtgagccagcaggtc

SEQ ID NO: 240504 - DNA, 122 bp, Homo sapiens
tcactatgtggtattcagattccaccaatccttgttctagatgcatgagctgaaaactggcgagccctgccagccagccactgggagtttctacaggcctacctcaggggacagggccttgg

SEQ ID NO: 240505 - DNA, 122 bp, Homo sapiens
ctatagggggaaggggaaaagaccccttatcttggtgtttcttgcttttcctcgcagccccgccctttttgcttcgaaggacgagtttttcctgaattcacaatacttttgcattgaagatg

SEQ ID NO: 240506 - DNA, 122 bp, Homo sapiens
acattagcactttttcggactactgtatcaacaaaggggctgcggcgctgcaataattggcgagaaagcaaacagagggccgagagcgcgactctgctcttcgtccggctgatggatgagca

SEQ ID NO: 240507 - DNA, 122 bp, Homo sapiens
tgccgtccgcccccagctgaagcatccccaggaccgacgcaatcccatggggagagatcacgatgttgtcatgaggcctcgacttcacaatctgattgaaaacctggatccccgtgttggag

SEQ ID NO: 240508 - DNA, 122 bp, Homo sapiens
ctcccacaaccccccgcgcggctccgcccccgcccggggtccccagctcgctgcccgccccgtctgagccctgagaggcccctgggccccccaaccacgggggcatcagggacaaccagacg

SEQ ID NO: 240509 - DNA, 122 bp, Homo sapiens
ggtctctcacccgtgtcccggctttctgagctggttgttaacctggctggtcgctctggccgaccgcatcccgtctcggattcctgacgtttctttttcattctttgagtgtttcaggcagt

SEQ ID NO: 240510 - DNA, 122 bp, Homo sapiens
ataactgcgggacagcgaggtcgcgctcgcgcggggtgaggttggaggcagccgaggagccgcacagggcagcgcctgccgccgccgccgcgcccatcccccactccgacggccacgagttc

SEQ ID NO: 240511 - DNA, 122 bp, Homo sapiens
ccctgccaccaagaactcaggcgggggcgcggcagcggccggctctgtggggagcgggagcggggcggttccgctggcgtctccgggggacgcgcacccgcgcggggccatctccgccttcc

SEQ ID NO: 240512 - DNA, 122 bp, Homo sapiens
cctccacgggagggagaccaccgcccacccgtgcacacctccacgggagggagaccaccacgtgcatttgcaggtccactgtgattgggagcacagtcctttttctgatgccccaggcctgc

SEQ ID NO: 240513 - DNA, 122 bp, Homo sapiens
cccaccctggagctgctgcttccgtgactcacattccggccatttccgtggtgtgaggtacgggcgggactccttctgcttcttgtcacacttgtcccgggctgggctcttccccgccagcc

SEQ ID NO: 240514 - DNA, 122 bp, Homo sapiens
aaaaagggatggaggctcaattaggtgactcatgcacccattagataaaagcagatgccgcgttttctgaaccccaactgtaactggtccctggcgacaaggagacacccccctgggtgttt

SEQ ID NO: 240515 - DNA, 122 bp, Homo sapiens
cccgcccttgacgtcaccagggggttcccgggggtctggaggggttaacccttgggaagccggctgctataaccagcaacctaaggtgtccgggcccctcctcctccccatacacacctaat

SEQ ID NO: 240516 - DNA, 122 bp, Homo sapiens
ctgctgggctaatcctcaagggcaaaggccacacgggccatcagccgccgccacctgatgcgaagaaaggcagctgagaaaaggctgcctgctggcaaagcgaccccagaaccagccagccg

SEQ ID NO: 240517 - DNA, 122 bp, Homo sapiens
aggcgcggggcgggctctgggcgggcggccggggcggggactgcagagcaggctgcactgcgcggtacccactgccggcctgcgcggtactcactgccggcctccgcggtacccactgccgg

SEQ ID NO: 240518 - DNA, 122 bp, Homo sapiens
gtgtgaccttacagctgtagctgctgcaggacctccactggtcgggtgtcaggctcaggtcgcttctggctgtgtgcttgttgctctgtttggaggtcttggtgacttccgtaccctgggtg

SEQ ID NO: 240519 - DNA, 122 bp, Homo sapiens
tagatgtcggaggaggcgaagatgccacgtccagcagaaagagctgcacagtggcggccgcgcgtcagaacggcagctgtggggtggctgtggagcggggcgccggcggtgggttgtttacc

SEQ ID NO: 240520 - DNA, 122 bp, Homo sapiens
aagatatatatggatggatctctctcataatgggcacaaacggtgaagatatttgagtcccgtgtgaatgcccaaagggcatcattactgtagaagagattaataatcagacaaaataacat

SEQ ID NO: 240521 - DNA, 122 bp, Homo sapiens
agggaggtggggtgtctcccccaagcacagcactcaactcttcacaggacaagtacatggcggacatggacgagcttttttctcaggtggatgagaagaggaaggtgagtgtgtgtcgcttg

SEQ ID NO: 240522 - DNA, 122 bp, Homo sapiens
ggtgccagcaggcgtggtgccagcaggcgtagtgccgggagtcactgaggagtgaggccgcgccctcctcccagtcctctgtcctcggaattcggattcggtgcaggcgtttattttcattt

SEQ ID NO: 240523 - DNA, 122 bp, Homo sapiens
ggattcgaagactctcactcccaggagcgacgggcttttttatgcctatgggatttatctcggctcctacttcgagttctgtgactacgcccttcggaacgccagttgtacgggctagaaag

SEQ ID NO: 240524 - DNA, 122 bp, Homo sapiens
gagtgagtggcctggacagaagcatggcaaggccaaggcaggagtgggggcggggcccagcgcgtgggcacacgtgcggcccagagcgtgggcacacatgggtcctgggcggcatgttctgg

SEQ ID NO: 240525 - DNA, 122 bp, Homo sapiens
tccatgatcctcactacagggaccaatgtagataaaggatgacatactgtctagccaagacggggaaatcagcagcatgatacagtcattcttcttcaatagctaaaaaagtaagtaaagtg

SEQ ID NO: 240526 - DNA, 122 bp, Homo sapiens
gggtgctatgcaggcccacgtccccacaaagcccatggcaggcgcccgggtgccggagcacgcacttggccccatggatctctgtgcccagggctcagccaggcatctggccgctaaaggtt

SEQ ID NO: 240527 - DNA, 122 bp, Homo sapiens
ccgccggcgcctgcggagactgcgcagcgcccggctggccggcagccagcgcacggcccgcggcaacggcgcacagccgcttggagaatcccactggctcccgcaccgcccctccgcgcccc

SEQ ID NO: 240528 - DNA, 122 bp, Homo sapiens
cgggggttgctactgatacccagagtgcgggggccagggtgctgccaacatcccaccatgcgcaggacgtccccaccccaagaaccacccggccccgcgtatccggagcgaggagtgggcag

SEQ ID NO: 240529 - DNA, 122 bp, Homo sapiens
aagtcccaggacttcagaagagctctgtgaccttggccaagtcccttcctccttcaggagcgctgcagtgggcctaagtgcctcctcccgggactagtacggggacggtcgtgagatctgga

SEQ ID NO: 240530 - DNA, 122 bp, Homo sapiens
ttgaacttcaggcacgaaaactgggttccagacactaacaaactacgtgcccttcgtgaacgtgcttaatttctttatgggaaagcagccagtacaaacctccccactcatagctatccaat

SEQ ID NO: 240531 - DNA, 122 bp, Homo sapiens
gcggggcgggagggcgagggctgtctctccctcaggactggggttagcgaggccgggctgcgtgctcaggagccgaggcagagaagtcgtggctgcgcagagggaggcggtgctctcctcgc

SEQ ID NO: 240532 - DNA, 122 bp, Homo sapiens
agtaggctctgcagtgatgaaggggatcaggggaagcaaagtgaccctactggaaccaaacggatatttccgtggaggtatcctaaggggatgggtgttgcagagcaaagctgtaagctgcc

SEQ ID NO: 240533 - DNA, 122 bp, Homo sapiens
ccgccctcgcgtcaactgcaatctagagcgcggcgcatcccgtgagcccgcggggaactacgactcccggcatgctccgcggccaccggaattaacccttcagggctgggggccgcgctatg

SEQ ID NO: 240534 - DNA, 122 bp, Homo sapiens
tgattgaatgggtaggcgagtgaatgtgtttttggggtagggggaaccttctgtggctgacgattagatgatcagcccattcatatacaactgtgctggattgtgacatggccacatctcag

SEQ ID NO: 240535 - DNA, 122 bp, Homo sapiens
cagaaacccacgccacggcgaggcacacggtgagagtgccatccgtgactgtcaggcttgcggtacactgtggcaggcggacacgagtgaggctccgtgcctcggagaacagcatgcttcct

SEQ ID NO: 240536 - DNA, 122 bp, Homo sapiens
gtgggagaaaaaaggctgaggaaatctctgtatataccagggagtccagaagtccactcacgtgcccaaggctggacgcatgttcagaggagacctgagaaaatcctaaacttcacctctgg

SEQ ID NO: 240537 - DNA, 122 bp, Homo sapiens
taaaccgatgctccctgagctggaacagagcgcacaacgagagaacgaggaggccgagtccgtcagagcttctggtccatccatgtctagcccagtgaatggcgttggttttctgaaggccg

SEQ ID NO: 240538 - DNA, 122 bp, Homo sapiens
ctgtcaaaatcattgaggagttaagatagttggttcttcagaactctggaaattgtccaacgttagaatcaaatagaaatagcataagatttcccagaaggcaaaacaaggatggttttcct

SEQ ID NO: 240539 - DNA, 122 bp, Homo sapiens
tctctgacctagcatgtaaggctaacttgttaagcttgcaaggagcgtaaatctcagacccgtcactgtccttggtagtaagcactattctgacttctaccaccatagattagttttacctg

SEQ ID NO: 240540 - DNA, 122 bp, Homo sapiens
caagctgtagctggcttctctcggtgcaatctaaaaggcggagctcggagtagcctgtgccgtcgggacgggaagatgtcagcgggcgttgtcctgccactcgggcgctctgggcgtgggcc

SEQ ID NO: 240541 - DNA, 122 bp, Homo sapiens
aattagcaagtaagaatttcccaactactaaatcattcctacatatgaaatatattcagccggttgggcatggtctgaatatatacattcggcctattaatgtggcaaacctgaagttctct

SEQ ID NO: 240542 - DNA, 122 bp, Homo sapiens
actccattcccagtcctcacctgaaccctgacaatcaaagctacttgccatgtagaataccgaccttgcaagagagttgtaaagattaaatgagatagtgggcttctcttctgtgtcccctg

SEQ ID NO: 240543 - DNA, 122 bp, Homo sapiens
atgaaaggcaactgcgagggaatgctagagttaatccaggtgcaggtgggaggctcgattcggcccagacaaacagagccaccaagcagagagggccatcgccttgatcccaagaagcacta

SEQ ID NO: 240544 - DNA, 122 bp, Homo sapiens
cggcccagaggcccgctcttccgctgaggcgccgcccgcgccgcctgaccagaggatactcgactgccgctcccggagccagggcgtacaggtaatatgctccgcagcatgatggttggaga

SEQ ID NO: 240545 - DNA, 122 bp, Homo sapiens
cgcgggcatcgctctgggcatcgggctgctctgcgggctggtggccatgctagtgcgcagcgtgggcctcttcctggtggggctgctgctcggcctgctgctcgcagctgctgccctgctgg

SEQ ID NO: 240546 - DNA, 122 bp, Homo sapiens
tcagccgctgccgcagccgcagcacggcggccagcggctctgcgtggtggtacagcatggcgttctcctgctggatgtcgatgagcggctcttcgtacacgtactccagaaactccttggcc

SEQ ID NO: 240547 - DNA, 122 bp, Homo sapiens
atatgctgaaatataagttagttacccattggcaaggaaagagggaccatggtcatttagcgcttacagtaatggcatatggaactggttggcttgtactgctctgtctgtagttcaagggc

SEQ ID NO: 240548 - DNA, 122 bp, Homo sapiens
agagacatctagattgggaagagccctcaaaagctggctgacaaccaggatccctgctcacgggcctattttactcaacaggaaaaattgcttccaaaggttttcttttctttttttttttt

SEQ ID NO: 240549 - DNA, 122 bp, Homo sapiens
gtatgtttacactcccgcgataaggaaagtaatattcccttctccccaccgggatattaccgaccatatcacagaggggtgtacgtccccccaccccgcaatattgggagtaacatcagctt

SEQ ID NO: 240550 - DNA, 122 bp, Homo sapiens
aacaaatgttgcaacctggacatgaaaagcagtctgtctacccaaggctgcccccgcagccggatggcagcgccactccctcccccacaaccggggaacaaggaccagggccgggtggtgga

SEQ ID NO: 240551 - DNA, 122 bp, Homo sapiens
tctccgggactgggcgctgtgaggtttcacagagtgtgcttatgtcacccactgaggcagcgcaggtaagttctcttgaaagtagaccctcaagtctgggcggtgtagtaggccttacttgg

SEQ ID NO: 240552 - DNA, 122 bp, Homo sapiens
cacagagtgactctcttaaagggccagacctctctcaggggcaattaaggaatctagtctcgctggagattccatccttcagatgaactgatgagcagttctctttgactcccagtattagg

SEQ ID NO: 240553 - DNA, 122 bp, Homo sapiens
tggtaattagcttgtttggcagaaggtgtcagtccagctgtcaataatgcctttggtcatcgctgattcctaagtttaaagtattcaacaatatgaatagttacaatttattgagcatttgc

SEQ ID NO: 240554 - DNA, 122 bp, Homo sapiens
ttatcctcaccagccagcttctggctgtccatccctctctccgactgggcagggccctctcggggagacctgttggtgccaagaaagagatctatatgcctactaagtcttcccaagaagca

SEQ ID NO: 240555 - DNA, 122 bp, Homo sapiens
cttctaggaagccacctacctgtcagcttcctggatcacccacctaagggcatctcagttcggtgaggatgcccttcacgtgcactgtttgctccagggcacacatgtgaagactaaagcat

SEQ ID NO: 240556 - DNA, 122 bp, Homo sapiens
caccatcggaggcgtgacctatgagcgcgtgagcaagagactggcctaagcagccaggcccggcccagggagctacaaacccaccaataaaactgatataaggacagacgctgctcgctcca

SEQ ID NO: 240557 - DNA, 122 bp, Homo sapiens
cagggctaggtatgactcatgggaaaggggtgagtccacagagttgcttcatggaaaagtcggtcctgtgggagtcagaagacctgagggccaccctagttgtgccagtgctgttggttttg

SEQ ID NO: 240558 - DNA, 122 bp, Homo sapiens
agaccttccccgggttatctgactctaaagggcaggcaccgttgactcacttcccattgacggagctactttacagctctgtaggggtagaaattaacccgcggaaaactgataataaagca

SEQ ID NO: 240559 - DNA, 122 bp, Homo sapiens
gctgcatagtgcactcccccaccaaccccgggttcatgacgtgcagcgatgacttcagagcgcggttttggtaccggagatcgaccactgactgagccaccctctccgtagggttctttctc

SEQ ID NO: 240560 - DNA, 122 bp, Homo sapiens
gtgcctcgcgggctcaataaatgggccccatgagtttagagtgcgcgtctgcctgtccctcggtctgtcagcatccctggctgctcgccccaggcctctgggcaggcctcagcctgtaccgc

SEQ ID NO: 240561 - DNA, 122 bp, Homo sapiens
tgtaaagtgagatcatttccaggctttggctattaagaagtagccactaactttattacacgtttttttgttttttgttttttttgtcttttctagcttattgttggtagaaaaacaggcta

SEQ ID NO: 240562 - DNA, 122 bp, Homo sapiens
ggacctgggctcggaggctcccttccggatttccaaaatctgcggaggcagcatttgttccgcctctcccctctagagtgtggagacaggaggacgtctgtgtagggaagcacgtcgttggc

SEQ ID NO: 240563 - DNA, 122 bp, Homo sapiens
ctagcccaatcctctcctattgtagagaccaagagatcaacttttgttgcttcctatgaacgttctatagaactctacttcttacctaaccctatctaatttaaagaaaaaaaccaaaagcc

SEQ ID NO: 240564 - DNA, 122 bp, Homo sapiens
agggccgggggtgggggtgcttggggacagatcagggagccggagatggggagaccaaggcgagtctcagggcccagcccacctgcatcagtcggggtgaggctggaccagtctgggcatca

SEQ ID NO: 240565 - DNA, 122 bp, Homo sapiens
tgaatgcgggtcctgggggcacgtcaccgtagctcaagtcctccccagcctcaccaaggccggagctgccgctgcagctgcccccaccacctcccgccccgagggccgcagctccgtcgtgg

SEQ ID NO: 240566 - DNA, 122 bp, Homo sapiens
gcgggacggctggggtcaggatccagctccgctaaagcaaggatttaaccacactcctgtcgcctcttccactctgcaataggggcagtctccagacgcgcagagtggttagtatgttatga

SEQ ID NO: 240567 - DNA, 122 bp, Homo sapiens
cacgcgaatcgacgtcgtcacgtgacggtctgcctccgcccttattaactctcagcccagcggcggtttccaggacctcagactttttgccgaggcggcagtccctagacgaagcgaaggag

SEQ ID NO: 240568 - DNA, 122 bp, Homo sapiens
ggcaagtctcagaatgggtgagtcaaccccatgccacacactacacgctagtctaaggagcgggtacagtaaagcctcattcagccagaccctacaattccataatgaaagagctggctcag

SEQ ID NO: 240569 - DNA, 122 bp, Homo sapiens
cgcacacacaaggcagcgatcgcaaaatcaactcacaggatctccaaatcgcgcagcgctcggaaggctccatcttcaatgcagctgatgtggttgttgtccagttgcctgtggaaaagcag

SEQ ID NO: 240570 - DNA, 122 bp, Homo sapiens
tcaccccttctcaaccccacggcttagaaccaaatccaggtttccgctgagccgacttctcgccctctgtagccccccacggcctggaaacatggaaggagaaagtccagcacaggcgtaaa

SEQ ID NO: 240571 - DNA, 122 bp, Homo sapiens
actctcagaagcaaacatcactccatcggaggcaaacacaatccattaagaaataagctacgactgccctataggctacttttgtgcaagtcaggttaagtgcatattcaaagcgttgaggg

SEQ ID NO: 240572 - DNA, 122 bp, Homo sapiens
gaaaagctcggatgtgacacggaacgaacgaacctgaagcaaactgaattatctcctcaacgtcagatcaaacgtggacttgtcctgtgcttggatgctgccttgcctgagcgaagaaatta

SEQ ID NO: 240573 - DNA, 122 bp, Homo sapiens
tgaagttggtaactgagcggcaactccggcgggcgcggagtgacagctcgtgacggcctccgagacgccagctgccccttctcggctgtgtggcttagacttcctgattctcccacgacgtc

SEQ ID NO: 240574 - DNA, 122 bp, Homo sapiens
gtgccggttcaagattgtagcagccacgtctccactgcctaacactcacccaaacttaatcgcagggaataaatattttcggaagactattctacaatcattttcttttgggacatgatatt

SEQ ID NO: 240575 - DNA, 122 bp, Homo sapiens
taacttgagtttttacatgtattcacccagattaaatgattttgctcttatatggataaacgtgcagttaggaactttaaaaaattgtaaatgaggtgcataatcattactcattgtctttt

SEQ ID NO: 240576 - DNA, 122 bp, Homo sapiens
gcccacgcagctgccatcacggcctatgccctgacactgaccaaggcccctgcggacctgcggggtgttgcccacaacaacctcatggcaatggcccaggagactggaggtgaggggtgagg

SEQ ID NO: 240577 - DNA, 122 bp, Homo sapiens
tggtcccaccgcgccggttgtcgccgcgcgaagccgcccgggccccgggacacaaggacccgaatcaggagagtctctccagtcggcatggtggctctggccgtccccgaagcgcgtgctgg

SEQ ID NO: 240578 - DNA, 122 bp, Homo sapiens
acgaggaagaatattgttgggactttattcatagactcacagcagttccggtccctccgccggagccccgcctctccaccgtgaccccgcccccgaggcgaggagtttgcggcggcttcgag

SEQ ID NO: 240579 - DNA, 122 bp, Homo sapiens
agcgaggaggcaggaaaagcctagagacgcctggtcccatccgcctacccagtccccagccggcctgaagggaggaagaggaaggaacccataatcatcccaaactggcgcaaatggtgggt

SEQ ID NO: 240580 - DNA, 122 bp, Homo sapiens
gttctctcaagagaacaaggaatcaggtcttactacataagggctttctctatggtgacacgtcacatctcaaaacaaaacagaaagtaagacaaaccaagctgtgatgcaggaaaacagag

SEQ ID NO: 240581 - DNA, 122 bp, Homo sapiens
ccgcacagccgccgctgcggagcgctgcgagctgcagtggagggggattctccgtatttgcgtcagctgttgttgaaatgggctctgccactggtgcgggtccaggaacattgcaatgtgct

SEQ ID NO: 240582 - DNA, 122 bp, Homo sapiens
cgctcgctcggctgccggtggcctctgtggccgtccaggctagcggcggcccgcaggcggcggggagaaagactctctcacctggtcttgcggctgtggccaccgccggccaggggtgtgga

SEQ ID NO: 240583 - DNA, 122 bp, Homo sapiens
gggcagagccctcccgaggctctccattggccaggccgagttgcccaaacttccccccatcgcctctcattgggaattcctggcatccgtcagccgggctgcggcgcatataggtggactgg

SEQ ID NO: 240584 - DNA, 122 bp, Homo sapiens
ggttctttcttcccctgttctccgccttcctgcttgtcatcttcactcatcagctgaccacgttgcctcttgtggtgtaaacttgtaccagttttacggtccctctggccagtacacccatg

SEQ ID NO: 240585 - DNA, 122 bp, Homo sapiens
gcgatgtcctgtacgtgctgcccagctcgatgtgaggcaacgcgctgtccccatgcctctcgcggggcccatcagtcatccctgagcacagactccgcttgccctgcacttacagccgtcac

SEQ ID NO: 240586 - DNA, 122 bp, Homo sapiens
tcccgtccccgagccacgtcgctgctcgtgggctcgcggagcactccccaggtctcacctcgggccccacaccagaaggagaaagctaggggccgcgccagctccgccctcccccgcggggc

SEQ ID NO: 240587 - DNA, 122 bp, Homo sapiens
gcgaaagaacaaagcctacacagtgtggaagcggaccccagcgggttgccaatgctggttcgggcagcctgcttttattctcttatctggccccacccacgtcctgctgattggtagagccg

SEQ ID NO: 240588 - DNA, 122 bp, Homo sapiens
cccagtcccaccccagttggtgacccagccccaggaccagatggcagctcctggagagagcgtggctttccagtgcgagaccaaaggaaaccccccacctgccatcttctggcagaaggagg

SEQ ID NO: 240589 - DNA, 122 bp, Homo sapiens
gagggtgaggctgagggccatctcaggagccctgaaaggacagcagatggacaggatccacgcttgggactggtccgtatttgttgtatggacaccctccctgccactcctctctggctact

SEQ ID NO: 240590 - DNA, 122 bp, Homo sapiens
ctctttggctcaggtgatcctcccacctcagcctcccaggtagctggaactacaggtgcacgccaccatgcccagctattttttgtattttttagtagtggcggggcttcaccatgttgcca

SEQ ID NO: 240591 - DNA, 122 bp, Homo sapiens
acactgtgcgccccgagtaatgtgatggagagggtaatcatccggtccgttatctaaacccgtcactccaggaaacagcgacccgctgttttccggatccgcgctctcccagcatcctttgc

SEQ ID NO: 240592 - DNA, 122 bp, Homo sapiens
cggggcccccagccttccggcgcctacgcccccgtcaggtcccctccgcgggctccgggccgctttgctgtggtcaggataggcgaccggtccgtgtcacttctcccgacccaacatggcgg

SEQ ID NO: 240593 - DNA, 122 bp, Homo sapiens
ggtgggaatcaattatttgcatttctaataggtaatcagttgataatgatgcggccggtccggtacactcgaaaaaccactgttccaggatattccaagatgttccaagagtcttaaacacc

SEQ ID NO: 240594 - DNA, 122 bp, Homo sapiens
aaaaagccagtagttccttgagatcccattgttcagctaactaacgaagaagttcatacccgggactgaccattttaattgaaacaatgcaagtgtaccgagcaaaactatcagctcacgat

SEQ ID NO: 240595 - DNA, 122 bp, Homo sapiens
ctttgcaagatccctttgtgtttgcggctgtcattgtggaagagttgcaacttgggggcccgagattggatgaagcgcacagccacgctttgggttacacatttgaaactcagggggcttcc

SEQ ID NO: 240596 - DNA, 122 bp, Homo sapiens
ttatatggcacagaggttacctacaggctggaatgttttctaaacaaaagaataaaacaccgtgcctgtgaaggaaaagcaaagctagagccaggagccagggaagggtccttggtaaagaa

SEQ ID NO: 240597 - DNA, 122 bp, Homo sapiens
ccgtggggtcttctgcaaggggctgactcgcaagctgctgtcttcttcgatctggcctggcggctgcgcatcaacttcccctacctctacatggtggcttccatgatgctcaacgtccgcct

SEQ ID NO: 240598 - DNA, 122 bp, Homo sapiens
tcagcgtggacccgggactcctgcatcctcccgtcctgccccgcctgggcacaccacggccgagagcctcctgttggcatcagcctctccccagcaccgactgtgcgctcccgctcccccct

SEQ ID NO: 240599 - DNA, 122 bp, Homo sapiens
tggtcgctgctcgcgcggtctcctgggtgacgggaacgcggtagcctgcttggtggagaccgggtgcgcctgcgtacttcatagttcgcgtagcggctcgagcgtggagatgaaggtaaata

SEQ ID NO: 240600 - DNA, 122 bp, Homo sapiens
agtggcagaagctaaaaacagtttgagctaaagtactggggcttcttttgactcctggttcgcaggatctggctgtgataagaggtgagtcacatagcatgcaccattcctaagagtcagag

SEQ ID NO: 240601 - DNA, 122 bp, Homo sapiens
cctggttccttccaaaatgtacttccaaatgtgatcttcccaaacctttgcctattgccccgctaaaaccttgtctcatatctgtttcctaaaattcattatccccccaaatctgctgtttc

SEQ ID NO: 240602 - DNA, 122 bp, Homo sapiens
cctagcccagcctgctgtcatctctcctatacccaccccctcccccactcccccgcctgacgttataaacaagtgactcagaggaatgatgggggtgtgtctcataatagttcattccaatg

SEQ ID NO: 240603 - DNA, 122 bp, Homo sapiens
gaagcaactcaatgtttttttatatttgtttgtaccaacactatattttacaaatatttacgtttgtctttcataatagccttctattgctgactggaccaaagccaaactcagcctccctc

SEQ ID NO: 240604 - DNA, 122 bp, Homo sapiens
tgggggaatcctgaagccttcctgggccccggagtggctccattccatgacgcactttctcggttcctcagaatcctacctacttagtagccatgtgggagggaactaggtgagcagctgct

SEQ ID NO: 240605 - DNA, 122 bp, Homo sapiens
cccactctctcattcctatcaccacactgctgtggttgagctcaggcttctattcctgaacgtcgtctctgtggatttgatcctatgtggcttgaaacttaagtgggtggtggccaaccaca

SEQ ID NO: 240606 - DNA, 122 bp, Homo sapiens
tgccggttggaggctacaggggctctggggcaagggccgcttttaggagtttgctggtcacgaggggggacgcgacctcgtccaagatctgtctgcaagggacccttcccagccgatgtgaa

SEQ ID NO: 240607 - DNA, 122 bp, Homo sapiens
aaaacgggggccccaactgctgtcgctgtccctggtgctgactaaaccctaaagcctctgcgttgcggccttggggccattggtggtgccgagttattcttttattttctttctgttctttt

SEQ ID NO: 240608 - DNA, 122 bp, Homo sapiens
gccgcctttatgaactgtaacactcaccgcaaacgtctgcagcttcactcctcaagtcagcgaaaccacgaacccaccataaggaagaaactccgaacacgtccaaacatccgaaggaacaa

SEQ ID NO: 240609 - DNA, 122 bp, Homo sapiens
agctaacttcgattttgagggggagggacagagacagagaaacagagagagatatgatcgcgattcaatctttgcagaagaaataacccgtgcacaaggggccacaccatcccccaccttac

SEQ ID NO: 240610 - DNA, 122 bp, Homo sapiens
gcccccgagagcgtggccgtggggctgggtcgctggagtggccgcttcggcccagacactcgcacccccggcggtgcggcggttttcacgcgcgcactcactcagcgcgcccgggggtctga

SEQ ID NO: 240611 - DNA, 122 bp, Homo sapiens
tggctgtttatgaatccttgtcaacctcgttcgcagtcaacgaccagggaataaattattcgtggaatgacacagttcataattattataaggtattattaaattatgaaagcgtaggccgg

SEQ ID NO: 240612 - DNA, 122 bp, Homo sapiens
ccggccccgccagcccagtcctggacagtgggtggggacatactcaacgccaggttcattcgaaacctgcaggaacgtcgcagcaccaggccttggtgaccgcagccccgtcaaacatcttc

SEQ ID NO: 240613 - DNA, 122 bp, Homo sapiens
aaaggagtcaattatgtgaagccaggaaggtgaactataggcaaagcgcaaaggtcctaacgtaaaagaactcttggcatgtttgaggaatagaaagaaggccaaggcaactggagcttgaa

SEQ ID NO: 240614 - DNA, 122 bp, Homo sapiens
agcggactggcatgctctgcccaggggcctcttccggtctttgagggggaattggattcccggcttctggctgggccgccttgcgggatttatttctgtctcagtgcccactggagtcctga

SEQ ID NO: 240615 - DNA, 122 bp, Homo sapiens
tttaaaatgttctggtattgctagtatatgcttgttttttgttccaaaaggtttcgcgagcgtctaggggtgaaggtagtaaaagcactcaaaagaagcaacaacggaataatccatgcagc

SEQ ID NO: 240616 - DNA, 122 bp, Homo sapiens
ggagtgtggggcttcctagcttttaccctgccctcagttctttcacttccactggagtcccgcagggacagctccgggaccatgcaggcccgggtgggcgtgggggctcagctagctcggtg

SEQ ID NO: 240617 - DNA, 122 bp, Homo sapiens
gcctgctgaccataacagtgccagcttctttgcagcttcctcttctaccatttcccactacgggcacctaaaagaagcatctctgaccagaagacaaaggcccaaatagcacctgggggagg

SEQ ID NO: 240618 - DNA, 122 bp, Homo sapiens
cacaaaacatcctagacataggaaaccatttcacacattggaagagaaagaaaggagtcacgcagaccggaagtcagaaacagtagcatcttgcgaacattatgctgcagccatcagccttc

SEQ ID NO: 240619 - DNA, 122 bp, Homo sapiens
acagtgtagccagtgaaaagctcaccacaaatgtttattagataagactggtctggggcacgtcatctatgaaggtgctgagcaaatccaagaaatgtttcctatcatactcttaagcacca

SEQ ID NO: 240620 - DNA, 122 bp, Homo sapiens
actggaagtgaaagaaagggtgggcgggggaaaaagaaaagtgctttgcaagttcattttcgttgtcaggagcgctggtggtttaggttctccacagacgcaggaaaacatcagtcacgagg

SEQ ID NO: 240621 - DNA, 122 bp, Homo sapiens
agcttttctcgctcagagcccttgtcaatttgattaaactcacaaacatgtgactgactccgcctctattaaaaacactcaagccagagaacgactgagaagcgtgtggctttgtctttgtg

SEQ ID NO: 240622 - DNA, 122 bp, Homo sapiens
ttttaatgctgtcaatatttttttagaaaatactgcctccaggtcagacactgtgactcacgtctgtaatcccagcattttgagaggccaaggtgggcaggagttgaacccaggagttcaag

SEQ ID NO: 240623 - DNA, 122 bp, Homo sapiens
ccattgatatgtgtttcacctccactgccctggaggtagaactggtggtgaaggtatctacgttgaccacatgtagtcaaagaatcttcttctcccttacctggcaaaagcattgagcatag

SEQ ID NO: 240624 - DNA, 122 bp, Homo sapiens
ttacgatgatagctaacccagctcttcaacttcctttcaatctccagaaaaggctctctgcgtgctaatggtaacgtggctttacagatttttacccacttcaaatatggccgccaagctcc

SEQ ID NO: 240625 - DNA, 122 bp, Homo sapiens
tttcaaggacacaagcaggaagcccggaaatccctaaaaacaggtgctaaaagccgccagcgcaacctgacagccgcgaccgcctcttttcaacctgaattcagggggagctgggagaggag

SEQ ID NO: 240626 - DNA, 122 bp, Homo sapiens
gggcatgcagggcgtccaggatgcagggcagagagagaagcgagggatgagtcacggatgcgccccccgctctgagcccgacggggccctgaatggcttttcctgccctggctcctcccatc

SEQ ID NO: 240627 - DNA, 122 bp, Homo sapiens
cggcgcccgtagcccagttctgcccagtggctgcctcctgggacctatttatacctagcgcgcacgcaggcgcgtcggccgcctcggtctgggcaagggcgcggaggcgggcggtgtgtgcg

SEQ ID NO: 240628 - DNA, 122 bp, Homo sapiens
tttgtattttcagaagggttctgggtgcttctgtttataagagaaggagatgtctatacacggagtgggaagatccttcatttatcactatggggaaagatgttgaaaattttgtctcaaat

SEQ ID NO: 240629 - DNA, 122 bp, Homo sapiens
agctatataatgatatcgcgtcacttccgctctctcttccacaggaggcctacacgccgccgcttgtgctgcagccatggtaagactggaatccgtgccgtgatccagcggcatcgcagctc

SEQ ID NO: 240630 - DNA, 122 bp, Homo sapiens
ccgctcccgagcgtcggaagatgccggccgtgtccaagggggacgggatgcggggcctggcggtcttcatctcggatatccgcaactgtgagtggcgggggcggcgtggggccggggccggg

SEQ ID NO: 240631 - DNA, 122 bp, Homo sapiens
ttaagtcacattttattaaaactgatctttgctgtctgtacctctgacatgacaacaagccgttttccttggtattttgctttgttgacattctggtttgccataattggtcatcgtttcta

SEQ ID NO: 240632 - DNA, 122 bp, Homo sapiens
cctttaccacgtccgtgtgcccagcacgggcaaatcagtagccacgcaataaatgaagtgcggtgttgcagctctgggcctctctgcacctgccctgacctcagcctgtccagcccagcctg

SEQ ID NO: 240633 - DNA, 122 bp, Homo sapiens
tcattcaggatgtactgggcgagcacagggaagtggggctggcttttagccttcgcacaccggggcatgctaaggtcgcgctggccagcgggaagtatttccaccgttagaggaaggggaac

SEQ ID NO: 240634 - DNA, 122 bp, Homo sapiens
ccgcgcggcggcgggacataggatccccatcggggacctgggcgacggcctgagcttgggcgcccctccagctgggcgtcatctccacacagttcttcccttgcgccgcgaattcagcccct

SEQ ID NO: 240635 - DNA, 122 bp, Homo sapiens
ccgcagccctctccccagcctctgctgaccctacagccctcctccccacccggtctctgccggcctcccccaccagcacatctcggcctggtgcccctgctgccggccatccagggcctgtg

SEQ ID NO: 240636 - DNA, 122 bp, Homo sapiens
aatacaaaagtctcaaaatgaatttgttagcaaccatcctgactgcattgtgaggctttccgacagctccagggaggttggcttgaggtagctttgcccagctggctggagaaatgagatca

SEQ ID NO: 240637 - DNA, 122 bp, Homo sapiens
gaaggagggccggaggtcgtcgaagaaggatgcaccttctgaggtggcgttgggggtctgcgccccgcccgcgcccggggggcggaggaagagtggcgccagtagcagcagcagcaacatct

SEQ ID NO: 240638 - DNA, 122 bp, Homo sapiens
tacccactccaagggctcctgtgcggccggagcctccccgtactagcccaccaggaggaacgaacaactccagagatgctgccttaagagctgtaacactcacggcaaagttctgcagcttc

SEQ ID NO: 240639 - DNA, 122 bp, Homo sapiens
ccaccacctcagggctttgctcaaagcagcaacaagcttcagctaccgcagacccagcggcgcctaccaggggccgcagcggagcacagtccccggcaagacaccggtcgcaacgtcctggg

SEQ ID NO: 240640 - DNA, 122 bp, Homo sapiens
acgccgcgcctcccgccggcgctgcagagggcacctgttcagccagggcctgcagcccctcgcctgccgccagagcagctctcggttctcccggatttacctgttgaggcgctggcgtcgct

SEQ ID NO: 240641 - DNA, 122 bp, Homo sapiens
gcaagagcaggcatgagtgtggtttttgtgggtgcatgcgcggcaggcctggggcctggccgcctgctgcctcacctgcaaggaggggcctcccagaaactcccttccccaatgcccagccg

SEQ ID NO: 240642 - DNA, 122 bp, Homo sapiens
aactcctgagccgagaattctgaagatctcctccctccctgaagctgtgggctgggccatcggaaaactttcagttttgtttccttgcctgcaagaaacgaaactcaaccgaaagcctgcag

SEQ ID NO: 240643 - DNA, 122 bp, Homo sapiens
tatctgggagcccaggggctggggacagaagaggctaactgacctctggctggtaccttccgggcttcaggacaactcagccaggtggtcactgtgggcccactccccagatgaggaaacag

SEQ ID NO: 240644 - DNA, 122 bp, Homo sapiens
aacctgggaaggaacaacagcctgcacgacatgaagacggtggtgaagacctggaggaaccgactgcccatcgtgtctgacgacttgtcccactggagcagcatcttcatgtggaggcagca

SEQ ID NO: 240645 - DNA, 122 bp, Homo sapiens
gtagttcgaataaaactttcttgtggccaaaaggggaatcaaacagccgtaggctgcggccgtagcctgatacggccgtaaaccttatgagggtaagcagagaggagtaggttaaagaattt

SEQ ID NO: 240646 - DNA, 122 bp, Homo sapiens
acccggcccgcaagctgggccagcctgcggtttccgggcactggggagtgcgcagagccccgggccagcgaccgcagccggggcccctggcttctcccgagcactttcccccggaccggtcc

SEQ ID NO: 240647 - DNA, 122 bp, Homo sapiens
tcctcaaacatccccaccaggcgctgaagtggttccagttctccggccttgtaaacctgccgggggagcttcctgccgctgagcacttgcgagcagccttgattacatttcctcggggtaga

SEQ ID NO: 240648 - DNA, 122 bp, Homo sapiens
agccgcccggctgccccctgggccccccaggcctgctggccacagcagctgggccacagccgtggccccccacacccagagcccaccgggcccctgctccagggccggcaggcggggtgggg

SEQ ID NO: 240649 - DNA, 122 bp, Homo sapiens
agtaaccggttattaatatccaatattcgttctcttgactcctaccttctggtggaaattcgaataagtaatgaattgcctaaaaggcagatggaagaagaaaaagcaaagggtccagttaa

SEQ ID NO: 240650 - DNA, 122 bp, Homo sapiens
tccaggtcagcgcttatctgtaggatttagtgttaagctctggggtgaaggcgttactgacgggctgaagggaaactagttacatcggttttgatcgtattctaaataggcaataaaatcat

SEQ ID NO: 240651 - DNA, 122 bp, Homo sapiens
ggtctggctgtggcggaggagcataagaaggtaacgcgacctggcgcggcagacagggctcgaagacctcatcttgattaagaaggccacaaattcgcgtttgcctctgctcggagaaatcc

SEQ ID NO: 240652 - DNA, 122 bp, Homo sapiens
tcagaaagctgactgcttccgccggacaaatgaatggctgaaaagcagcccaggaagaggcgagagttaaaccggaaaggaaccgccttgcatatcacctgcactacatacagggctaaatg

SEQ ID NO: 240653 - DNA, 122 bp, Homo sapiens
ggggcttgtgtggggacagccagcctcctcgtgttgatttctgatcacctggtacctggtcgcgataaggcaggactgagacgttttttctccgttttggacaccggcttaagtagttaaaa

SEQ ID NO: 240654 - DNA, 122 bp, Homo sapiens
ggtgcgggaggcggggtgtggggcggtagtgtgggccctgttcctgcccgcgcggtgttccgcattctgcaagcctccggagcgcacgtcggcagtcggctccctcgttgaccgaatcaccg

SEQ ID NO: 240655 - DNA, 122 bp, Homo sapiens
cttctgggccaccagaaatgaggcatggctcttccacttcccttcttcttagaagaccctcggggaagtgtgtctgcatggatgcgtgtgcatgcgtgtgtctggctccgtgactcttgggg

SEQ ID NO: 240656 - DNA, 122 bp, Homo sapiens
aggaggggagagtgggaagcagggaggaggaagaagataaaattgatctgacaagtgattcgttggggggaaatcgtaaaaacaaagcaaaacccgttatgagctgtacactgtgatggtgc

SEQ ID NO: 240657 - DNA, 122 bp, Homo sapiens
acaacagcttaaaagagggttaagccccaaaacacaaaacaaccaaaagattgtaatgcccgtactaatactttctaaactggctttgaaatagtcaccacttcatcacattccattttgtt

SEQ ID NO: 240658 - DNA, 122 bp, Homo sapiens
tgctccctccctcacctccttcacacattacaatcacaggcttctgtttctcagacaatccgattccattccttacacacctctctttcccagtccccatcgatcacacttttcagcccttt

SEQ ID NO: 240659 - DNA, 122 bp, Homo sapiens
ccacggtgggttaatgtgggcggctgactttcactcctagagtgctaagcagtgttcagacggctcttacacacgcggcctcaccacctcctctaacccgagccgcacaggggtgtggggca

SEQ ID NO: 240660 - DNA, 122 bp, Homo sapiens
tggccgcttcacgtgtcatgggcatcagttctttcatcctaacgcgccactttttgctgtcgttctcctagactgagaagagaggcagggattgagtgatggacactggactggaagttctc

SEQ ID NO: 240661 - DNA, 122 bp, Homo sapiens
aggcaaatctgtacagacaatctgcttctatagaagcagattttggctgccaggacctgacggtggggagtgcctgcttaatggggaggggtttcctttggctgtattgaaaattagaacta

SEQ ID NO: 240662 - DNA, 122 bp, Homo sapiens
ctctgctgacaggtgtggtccttttccccaaagacagggttccatccgtgggcgttccgccgcctccgaaacttcccccggacgttcaggctcccccctcttttttgggccccagcccgttc

SEQ ID NO: 240663 - DNA, 122 bp, Homo sapiens
taggcacacgccccagagcagcagctcgggttcggcgccgactccgcgccgagaccagcccgctaggggaggactcacagcacccagctcccaggagggcacgcagaggactaccgagccac

SEQ ID NO: 240664 - DNA, 122 bp, Homo sapiens
cgtgtggccctgtgtcccggagttagctaagtccagtggaagaatcaaggactttgcagacgtgagagttgtgtctctacagtgcccttagataaacagaatgataataaattatgccagta

SEQ ID NO: 240665 - DNA, 122 bp, Homo sapiens
atggcctgcacctggttgaagctttcgacctgaacgcggggcaggctcttcaggtagccccgcaggctggaaaacaggtgtgcccacagggccttgcgctttctcctcagggctgccgcggg

SEQ ID NO: 240666 - DNA, 122 bp, Homo sapiens
tgcgcagccccgcgaagcccccctccggctccgagctccgggagcggggtagggatgaagcggaggtaaaccagggcccaagcctcggtccggagccaacaaaatcaactggatcccgccgg

SEQ ID NO: 240667 - DNA, 122 bp, Homo sapiens
tctagggcggggccaggatgattgttatgagggcggggcctggggtggggccaggataagcgtcgttggggcaggtcctgggtagggggcaggtcctgggtagagtccaggttggcgggtcc

SEQ ID NO: 240668 - DNA, 122 bp, Homo sapiens
ctgggagcccttccggcagcaactcaaccccagacagcgcccaggggctctggttcctcacgcgctgagatgctccggactcaccttgggcatctctcgccccaggcctggcgtcacccatt

SEQ ID NO: 240669 - DNA, 122 bp, Homo sapiens
atgattggaggagagtcagagctgctccaagagcatgcggggtgttgtagttctaagaagcgaggcttgcccgattctgtgcctgtgcgcatgctgaaagcaggggcgggaccggggcggtc

SEQ ID NO: 240670 - DNA, 122 bp, Homo sapiens
gtgtccgggctgtggccaagcggattggtgaggtccaggtggcttgtggcctgaaccagacggtggaggaatttgtgggggagctgaattttgggctggttgaggttgtatatgagtgggcc

SEQ ID NO: 240671 - DNA, 122 bp, Homo sapiens
ggttctagaggaaggttctgcatgtcctggggccttgatgtaggcagctgggagtctcaccgctcaggtttcctggccaggaagtgcacaccctttgtcttaacaatgagccactccggcaa

SEQ ID NO: 240672 - DNA, 122 bp, Homo sapiens
ttaaagcaaagtttattgaagcacaataatacactctgagggacagcgggcttatttctgcgaagtgaactcagcacttctttacagagctcaaggtgcttttatggggtttgtggggagga

SEQ ID NO: 240673 - DNA, 122 bp, Homo sapiens
gctgcggcaagggggcagcgcccagggcccaggtgccgggagatgcagcttcctgcccgccgctacagctgctatttatagctgagcagggagaagccaagacagacagggtcagcttcctg

SEQ ID NO: 240674 - DNA, 122 bp, Homo sapiens
gatggatccttttttaacaaaaaatactttaggttttcaatgatagcaaacgtagtggggcgtgcaaggaagaaccagttgtattggtctctatacttatcaaaggcgtatttgtaagcttt

SEQ ID NO: 240675 - DNA, 122 bp, Homo sapiens
cggtcttcggaagcgaagcagtgtcaacagtccctggtaaacacaagtagtattacaagtcgggagctcttcaagtcttggatgagactgtagagcggtcttgtgcggcaatgtgctacctt

SEQ ID NO: 240676 - DNA, 122 bp, Homo sapiens
tagtggaagaggagcctgtccaaataccatctgcagacgaaggagcgtctacaaaacacacgagggacctagaaaccaacagacccatcccatctctctcaggttcagcaattctttccttc

SEQ ID NO: 240677 - DNA, 122 bp, Homo sapiens
catcccggatacccaagccgacttttgagcaagcacagcccatggaaagggcagtcccgccggccagccccaagcgagaatctagttggtgagaagaccagaaaaccagaaaggcgaggagc

SEQ ID NO: 240678 - DNA, 122 bp, Homo sapiens
actaatcaacaccactgggctcatggctattggctggttactggtgctactgatctctgccgagaagctcttccacctctagccatgcagcatcagtctccctcctgctggcagagaggggc

SEQ ID NO: 240679 - DNA, 122 bp, Homo sapiens
gtgtgggtttcattgcagcccagacacctcacactgaaaagtctgaaagcagcggtcaaacgctaatggccaaaaggccccatctaggctgtgagatggagatggctttttacaaatttgtt

SEQ ID NO: 240680 - DNA, 122 bp, Homo sapiens
tggcggcagctctgccgtcttccagaaccttccccaatctgcgcatgcgccaagactccccggctttggaaataacctcactggtttcgcggcaaccgtccaaagtacaggttctcattggc

SEQ ID NO: 240681 - DNA, 122 bp, Homo sapiens
gcaaccacctgaggatgcgacgcgagcgcagtgtccgggaactgctagcgcaggacgccgcgcaacctccgcgcctgcccgcaggcaccgcggcctcgggcctcccctgacgacgccctcgg

SEQ ID NO: 240682 - DNA, 122 bp, Homo sapiens
ttaaatccctttaggacaaccatctccccgtactcccaccccagccctgctcccctcctccgggcagtgagaagaaccaagccagcacccaccctgcccagcagtgtggctggggctatccc

SEQ ID NO: 240683 - DNA, 122 bp, Homo sapiens
tggaatggggccggtcaggaaggtgtctctctgaggaccccttctcttccgctcagctctcgcccaggtgtggacagcaagagaaaccctgaacctccctgcagccttccaggcaggcctgg

SEQ ID NO: 240684 - DNA, 122 bp, Homo sapiens
ttcattggtttaagtttctttccttgcaagattaaaagtaaccagtggtctgaaacgggacggtggagaaatgacagcagatgatgatcgctgttatttcctgaaagggagtgtgggaacta

SEQ ID NO: 240685 - DNA, 122 bp, Homo sapiens
ccgatctccaggggcacggaaggccgaggcgtgccgggggagccaggagcagctggctggcgggcgccgcgggcctccccggtcacgtgacaccccggacaacgtgcgccgtcacgtgacgg

SEQ ID NO: 240686 - DNA, 122 bp, Homo sapiens
ccgggtagggctggatgtggctgacaccggcagggggcggcgcgggtacctagggtcctacggaagaaagtggaatagtgcccgccacccctggaccccggctctagacacaaagcgcccat

SEQ ID NO: 240687 - DNA, 122 bp, Homo sapiens
tattctctaactacccccaattcctttagcctctccccacctgtccaaactcagctcagccgtgggccaatgcagcttacagacggttgcagagctaggaagaaaacccagctctcccaacc

SEQ ID NO: 240688 - DNA, 122 bp, Homo sapiens
ccggttacctgggcgggctccaggatggtaccgcgcgggagggctccttgtgcgctgcgccgcaggagtaaatggcattaaagaaaaagggaaagatacaaataaaaaaaattaaaaggaag

SEQ ID NO: 240689 - DNA, 122 bp, Homo sapiens
tataggcctcataacccagtgaggctttattgttctcatttataggacatttgtaggaagcggaggcatagggaatgagaatgcctaaagttacatgatagaattcagattcctagcttcag

SEQ ID NO: 240690 - DNA, 122 bp, Homo sapiens
gggaagctcccgtcaaagctccgcccccaacaaatgccccttgtgataagtcgggccccacgttccattgggtcctgccaagctctcgcgagacttgggcctttcccagtgcaaaggtttta

SEQ ID NO: 240691 - DNA, 122 bp, Homo sapiens
tggttcaggctgcacaggtgttaggagctcagcaggtgggtaggagccccctgattcaagcgcaattgaccgggaggcagctgggagccctggtcaaaggggacaaagaaaggcaccgcagg

SEQ ID NO: 240692 - DNA, 122 bp, Homo sapiens
gcgggaagcgcgcagcctcttgggacttgcagtccctccaagcccttcatagcggccggccgcttattcctgtgcgagtaaggagcgcccaggccaaccctccggctgcaggctgaggggcg

SEQ ID NO: 240693 - DNA, 122 bp, Homo sapiens
tgcaccccacgtcggtccacggcgtggaggacatgatccgcctgggggacctcaacgaggcgggcatcttgcgcaacctgcttatccgctaccgggaccacctcatctacgtgagtgccgcc

SEQ ID NO: 240694 - DNA, 122 bp, Homo sapiens
tcaaaatgtctttatattttatgtaactattccatctgtcttggtaaaagataagtgaggcgaatatagctttgtaaagcaattacagtgatgcttttaattttgaataagaatattagtaa

SEQ ID NO: 240695 - DNA, 122 bp, Homo sapiens
aaaaaggatattagcaaagagatgacaatgtattcgaggactgacttgttgagggcatggcgttgaaccctcagcatctttcccgttggcctagcagccttgtagtcagattttacagacgt

SEQ ID NO: 240696 - DNA, 122 bp, Homo sapiens
gagtgcaatggcacgatcttggctcactgcaacctctgcctcagtaactggtattataagcgtgcaccaccatgcccagctaatttttgtattttttagcagagacagggtttcaccatgtt

SEQ ID NO: 240697 - DNA, 122 bp, Homo sapiens
tctagcaccaacctcttacagttagttatgccttcccttgaaataactttttaagaatgtcgattctgagtataaatcacagattgcactgagaaaggcaaaacctacatatgtattatgaa

SEQ ID NO: 240698 - DNA, 122 bp, Homo sapiens
aagagcctttgcttctgtacttcttaaaagctttagaaagggacttcattctgcacacttcggggaggaccaggacccatgactgcatgggaagtaaaacacaagtagcacacggcatactt

SEQ ID NO: 240699 - DNA, 122 bp, Homo sapiens
tgttagaaatatgtagcttttgtgaagatgggtaaaactaaaaacaagatgaaacttgtccgatacagtattttgctttgaacaagaaaggtctgttcatagatcattgacatttccactat

SEQ ID NO: 240700 - DNA, 122 bp, Homo sapiens
gatgcaaaaaagaaaatgaaaaacaaaacaaaaaatccccaaaaccttattatgggagcccgtcggtcttagaagctgtttgacatgtataataaatggcattgactgggcctgttttacat

SEQ ID NO: 240701 - DNA, 122 bp, Homo sapiens
tccatcctgccgtccgtctccactttcaccagcccgtaccgcaagcgccgcctgcaggagcgctgaccctgcgccgagcccgaggccaggggaacccacaactacctcaacagcgtgtggga

SEQ ID NO: 240702 - DNA, 122 bp, Homo sapiens
attcttcctccggataatcacaagttcactcttatcttcaagtctctgccccagagtcagcgatttcaacgatgttacgtaaaattactgaccaccaacccctatactgttctacttttttc

SEQ ID NO: 240703 - DNA, 122 bp, Homo sapiens
gtagtgcacgcctgtagttccagttactcgagaagctgaggtgggaggatcgcttgaacccgagaggaggaggttgcagtgagttcacatagagccaccacactccagcgtgggcgacagag

SEQ ID NO: 240704 - DNA, 122 bp, Homo sapiens
ctcaggtgatctgcccgctttggcctcccaaagtgctgggattacaggcgtgagccactgcgtccggccatcaagagtttttatgacaatgtgtatgaagctgcctttgagtagggtggctg

SEQ ID NO: 240705 - DNA, 122 bp, Homo sapiens
catgtttatgttttgttgatttctcccacatgtctgtaattcagcttgcccagcaggctacgtggcatttccctaccttgcatatcttacctcaactctaagcagaagctgcttaacaattt

SEQ ID NO: 240706 - DNA, 122 bp, Homo sapiens
gccgctggccagccccgagtgggcggtggccgcggcggccgcggcggcagcgaaggggaccgcactgggcatgcgttgccagcccgggccccgcccccaccctcagtcctcgtgtgctggcc

SEQ ID NO: 240707 - DNA, 122 bp, Homo sapiens
gggtggaaagggaaggggactgaccaaatacagtgggatggggccaggggctgatataaccgagatggggaaggggtgagtctgggtctgggaaaaactgatccaaaggcagaaagggaggg

SEQ ID NO: 240708 - DNA, 122 bp, Homo sapiens
aaaggacaaacagagcagattctccatgtctagcatttcgctctactgttcaaaagcatccgtgcatcaataaagcaaaaacaaaacaacacgtgtagatccaacacattcaggtcagtaga

SEQ ID NO: 240709 - DNA, 122 bp, Homo sapiens
caggaggctgagatgggaggattgcttgaacccgggagttggagcagcgagccgagatcgcgccatggcaatccagctccggtgccttccagtctgggcaacagagagagactccatcgaaa

SEQ ID NO: 240710 - DNA, 122 bp, Homo sapiens
tccttccagaaggttctgagcaagtgtatgtttgtcttagtcaccattacatttccagtacgtagcacagtggttgactcataggagatgctcaatacagccttactgaatgaataataact

SEQ ID NO: 240711 - DNA, 122 bp, Homo sapiens
ccctccaagctttctggcagccaagggaacaggcagagctaacaaaccacagtggacctccgacctcagctctcttcccacaacactaaaaacacaacaaaattgccagcctttgtatgctg

SEQ ID NO: 240712 - DNA, 122 bp, Homo sapiens
ccgcttgcgccgcttctccggggcgtccgcgttgtgctcatccagttgcttttgaggttccggccccctccaaacctctgaagcgctccgtgcacgcgacgcggcggcggggtaagctggag

SEQ ID NO: 240713 - DNA, 122 bp, Homo sapiens
gtgcggcattaaagggagctcttgatcagcaagcggaaaaccgataccaggtcgtttccccgcgccccttctacctcttggaggagaggaactgtggacttcactcctctctgcctctatac

SEQ ID NO: 240714 - DNA, 122 bp, Homo sapiens
aatgatgaaaagctgtagttgacataagagtgattcctccctcaaagtggaaagcccagacgtatgaaaatccaaagagctatttggtagtgatggtggtaggaaacctcatccttgcaaac

SEQ ID NO: 240715 - DNA, 122 bp, Homo sapiens
tttaaagaatgcttcctaattttaagccttacttagcagaagagaaagggtggcaagagacgtttctgagaatggaccaagcacaaacaggaaaatctgttggccttcatttaatgtgaacg

SEQ ID NO: 240716 - DNA, 122 bp, Homo sapiens
cctcctggtctcaagcgattctcccactctgcctcccgagtagctgggactacagaagttcgccaccacgcccagctagtttatgtattttttggtagagacttcaccatgttgcccaggct

SEQ ID NO: 240717 - DNA, 122 bp, Homo sapiens
aggaggcggaggggcgataaaggagggaaatctaaacgtgtttctcgtcactgagctgtacgctttaaaatggtgcagatggtacattttatatgtatgttattcctcaatttaaaaattaa

SEQ ID NO: 240718 - DNA, 122 bp, Homo sapiens
ctctacgacttttttgaccccattgctgatcttatccacaccatcgatatgaggcagggccgtacgctgctgcactgcatggctggagtgagccgttccgcctcactgtgccttgcgtacct

SEQ ID NO: 240719 - DNA, 122 bp, Homo sapiens
ctgcacctgtctggtggctctttgcagggaagagaaggaacggtggatccgtgccaagtacgagcagaagctcttcctggccccgctgccctgcacggagctgtccctgggccagcacctgc

SEQ ID NO: 240720 - DNA, 122 bp, Homo sapiens
ttacataggaggagtaagttctagtgttctattgcacagtagggggactacagttaataacgtattgtatatttcaacatagaagagaggattttgaatgttctcaccacaaaaaaacaatg

SEQ ID NO: 240721 - DNA, 122 bp, Homo sapiens
ggccatggtcagcaagactcggggtagcaacaaaaggcgggaggccacaggcagcagcgccggcatccaaacaaaagacaggagcagagaggcctgagagcaggaggcgaattcgatctctc

SEQ ID NO: 240722 - DNA, 122 bp, Homo sapiens
gtcaaaattgggtaaacacattccaccctgtctcttcccccaaatgcaactaaaagccctcgacatactgcacagggcagctatccgaggatactgaagattaaatggtagcaggcctactg

SEQ ID NO: 240723 - DNA, 122 bp, Homo sapiens
taccaagagagtcagcagacacaataagcaatagctgctgaccttaagaactatccgatacggatagcagttgtactgtgtgcaatgtctaaagttaaggataggccgggcacagtggctca

SEQ ID NO: 240724 - DNA, 122 bp, Homo sapiens
ttgctgctttgaaaagggatttagaacaggaattccctcagacttggtaacagtagatgccgtgtgagcggaagagcatcttcagggaaaacgtgtgagaaatgggggagaggaaacctgac

SEQ ID NO: 240725 - DNA, 122 bp, Homo sapiens
tcaatttctcatctgtaaaatggggaaaagaagagcttccttgaggggaattgttgggagcgttgatggagatttggtacagaagagtacctagcaaatcctttgttacagagatgatgttt

SEQ ID NO: 240726 - DNA, 122 bp, Homo sapiens
tcaaagtccagtgagttgcaagcctaatgctcacctgcagagacagaattcctgagtgaacgaacagagcagctcctcttccatctccaggtaagaactgctcgtgtcctccttgagggtgc

SEQ ID NO: 240727 - DNA, 122 bp, Homo sapiens
aaaaataaagtccaagctgctccatctgcagccacccttttctggagttaaaggggcaagcggcaccttttctctatttctcagtttccttcggtcctgtaacttatggagtccagaagaag

SEQ ID NO: 240728 - DNA, 122 bp, Homo sapiens
ggagtggacaagaaagcgcgaaggagcgcgattagaaggtctcatctgtgcaacgtgggccgaggggtgggtgtggaggcctcgccaatttccttgtctctctagggttcctgaggctgtcg

SEQ ID NO: 240729 - DNA, 122 bp, Homo sapiens
acactgtagacactgctggcctattagtcactctgtagccctctgagctctcagatcaaccgttgcagtatcactgtgcctgtgttcaagtaactcttattttacttcataagggcaccaaa

SEQ ID NO: 240730 - DNA, 122 bp, Homo sapiens
ccgtagactccagcagcaggtcctgtcacagggttccgggcgggcactacgggcggagggcgacggcacgccagaggtgctgggcgtcgccaccagcccggccgccagtctatccagcaagg

SEQ ID NO: 240731 - DNA, 122 bp, Homo sapiens
tgtttgaatagagatactagccatgctgcccaatagggctttctggccctgaaaaagatacggagtattcttggaaagttgaagggaaaaagaataaactgatccatgtagtagcatgcaga

SEQ ID NO: 240732 - DNA, 122 bp, Homo sapiens
acttggggaaagaatacgggagcagcgcgaggaatgctgggatactggaggtcggcccagcgcttcctgcggggttagcgctttttccgagttgtagaggtgattttttttttttttttttt

SEQ ID NO: 240733 - DNA, 122 bp, Homo sapiens
cactcaccggcccaggtctcggtcagggccagggccgccgagagcagcaggaggacggttcggggcgccatgaccagcatctcggcgtctgaggagactctgagtccgggtgggtgcgtggg

SEQ ID NO: 240734 - DNA, 122 bp, Homo sapiens
gccccccagcccccgtcctcccaggcgcgaccttgatggagcgacccttggccgcggcgccgggactcagacaatgcacaatgcgccgagcctgggccgcagctcctcagcgcggccacaag

SEQ ID NO: 240735 - DNA, 122 bp, Homo sapiens
gtgggcgtggggactcaactagctcagtggtgaacagctggcacgtctgtgggttgtggacggtaaaggccacgtagacctcaggagcccgctggtgctcccggcaggcagccagcctccgc

SEQ ID NO: 240736 - DNA, 122 bp, Homo sapiens
gatgcattctgctgtgggtcacgtcacagacacggcggtccatacacacccggaaactgtcgtgtttgcgtgtgcgtgtattcactgtatggtccggcttaatgcttttgcttatgggaagt

SEQ ID NO: 240737 - DNA, 122 bp, Homo sapiens
tccacttgaaccaaaataaatatttgccattacaaagaacaagccggtccctgttgcgggcgggggcgtcctcggccctctctggccccctcggcccaggagctacgcgagctcggattgtg

SEQ ID NO: 240738 - DNA, 122 bp, Homo sapiens
gcgctttagaaagcgcccgggggcgagctctgagggtcggcgggtgctgggtgggagcggcgaaggggagctggcgccgaggccctcgccgacccgctgccctgtcccccaggtgtgcgagc

SEQ ID NO: 240739 - DNA, 122 bp, Homo sapiens
aacgcaggagacacaagaagcggatccaggtagcaaagccgagctctgggcagggggcttcggcgcgctggatagtggaaggggcggggaaagccccctaaaagggcgagcgaaagcaaggg

SEQ ID NO: 240740 - DNA, 122 bp, Homo sapiens
gaagtcagtatctgattggtatgactgagaatcagccatggacaccctcccaccacatgccgccatctcatcatagaaatactgtgtgcccctaagtagcaggctgggagctccaacaaatg

SEQ ID NO: 240741 - DNA, 122 bp, Homo sapiens
aaagctgcctgcctttctaggatggaatgttctatattttgatattgttgtgagctataacgatgtaggcatttaccaatagtcactgaactgtgcacttaagacccgtgtatttcactata

SEQ ID NO: 240742 - DNA, 122 bp, Homo sapiens
aagtctcacggcctgcacatctcttgtgactctgggaaccgcctctcccgccggagcccccgagccccaccaatggcagctcttcccagtcagcagcttcagagcaggcagtctccttggaa

SEQ ID NO: 240743 - DNA, 122 bp, Homo sapiens
agatgagccaggacccatgtggccggcacatgcgctagtgccggcatctcatgtgtgcagcgtgggctcccttagtgcctggcaccttagtgctctgctaagtctcattgtttaaaaatgtg

SEQ ID NO: 240744 - DNA, 122 bp, Homo sapiens
tgagtccctgagtcatggagatgcaattggagatgctgtggaccctctaagaggaatttccgtcccagctgtgtccctgggggtgccctggccccgcctgtgttgcccctgggctgcagagt

SEQ ID NO: 240745 - DNA, 122 bp, Homo sapiens
actaataaaataaagggaagactcaccagttcatcctcctctccctggttgagcaaagcccgatggtccttcttactgttctcttccatctgaactcaaccggcgaggatctcttctggcta

SEQ ID NO: 240746 - DNA, 122 bp, Homo sapiens
acctaaaagcgatcttccctgtttcataagtaagctcatgattgtaaggatgccagatcacgtggcaaaaccctccatgtgaacattaatcacattaagtgatacaagggaaaactgagttc

SEQ ID NO: 240747 - DNA, 122 bp, Homo sapiens
gaaccgcgggctggaaggagggagacgtcccctacctccactccggaagcctcggggtaacgtctcccattgctctagcggagttcagatctccaattccagtttcaactggaaccctcacc

SEQ ID NO: 240748 - DNA, 122 bp, Homo sapiens
gctcggctcctccctcgcagggcaaaggctctccctgggaggtgcccagaggccggggcccgggcccaggcccaacccagcgcaaggccccttgccagccccgcccaggccccgcccccggc

SEQ ID NO: 240749 - DNA, 122 bp, Homo sapiens
ttggggtttttattaaaattcgctatcacgatccctctaggtaacccctacacagccacacgtgagagaatggcttcacaatacatacaaattgtggagatctggctattaaaatgccttga

SEQ ID NO: 240750 - DNA, 122 bp, Homo sapiens
atgtgaggagcgcctctgcccggccgcgaccccgtctgggaggtgaggagcgtctctgcccggctgccccatctgagaagtgaagagaccctgtgcctggcaaccaccccgtctgagaagtg

SEQ ID NO: 240751 - DNA, 122 bp, Homo sapiens
gcggccgccaccctggcccgcgcctcgccatggccccgcgccggctcctgggtcccgctccggatcccgctccgagtcccagatcccgcgccggctcccgctctggatcccgccccggcctc

SEQ ID NO: 240752 - DNA, 122 bp, Homo sapiens
tatttcagtgctgggtggtgtgagcgccagtcgccggccttcagcgtggcggctgctgggcggcggcagggtggcggacggagcgggggaccggggagcggcggccgccggaggaggttatg

SEQ ID NO: 240753 - DNA, 122 bp, Homo sapiens
cgcacagacagtccccctccgtggtggctttggctgtttccccttcaactggaattgccccgttagactcttcctgaggtccccggagtggcacagggggttgtggtggagagtgaagcgaa

SEQ ID NO: 240754 - DNA, 122 bp, Homo sapiens
gggctcaaccaagtgtcgtctgaagtgacctcccagctctatgcttctttgcgcctcagccggcaggcggaggccacggcccgagcccagctgtatttaccctccacctccccgcctcatga

SEQ ID NO: 240755 - DNA, 122 bp, Homo sapiens
tttctggcggctgcgcttgtgtgtgaatgtgtcccgggaggaccggacacctcaatcccccggcccccaacgcgggcgcctgtccgcgagcgccgggccagacgccgaagaggaaggtgacc

SEQ ID NO: 240756 - DNA, 122 bp, Homo sapiens
ctcaattccatttccacctggcctgagagcttgtactcgtcgcagccagtgtagactgtccgcactggtccttagtgttgctgcagttgcaaatgggctcatccactgtgcctgcctgttgg

SEQ ID NO: 240757 - DNA, 122 bp, Homo sapiens
ccatacttcttccaggacataggctacttcttgaaggtggccgccgtgggccggagggtgcgcagctacgggaagcggcggccggcgcgcaccatcctgcgggcgttcctggagaaagcgcg

SEQ ID NO: 240758 - DNA, 122 bp, Homo sapiens
taggtgtcgatcacctgcgcgggtcggggatggggctatgcaaagggtgactcaccagaccgaagtcgttctcagccttggaccaggaggctgccagagacagcagcaggaagatcgcggca

SEQ ID NO: 240759 - DNA, 122 bp, Homo sapiens
ccccgccagcctgggcagtgaggggcttagcacccatgccagcagctgcagaggatgtgccggtcccctagtagtgccggtggctcgatttctcgccgggccttagctgcctccccgagggg

SEQ ID NO: 240760 - DNA, 122 bp, Homo sapiens
gttggcctcggtggcatcatccagttcccgctggagtttacgccgagatgcgttggcacgcgtcgcttcttcttctgcttcctccagctggcgtttaagctgcttcatccgagcgttggcct

SEQ ID NO: 240761 - DNA, 122 bp, Homo sapiens
attccccccgtaggaggcaagacctgagcgcttactcacgtggctcccccatccgttccgcgtccatctccaagactgcctcacagggacccccaggaggctccgaaccatccagctttctg

SEQ ID NO: 240762 - DNA, 122 bp, Homo sapiens
agagcccatctaagatgggggaaacagaggcccggagagattcttgccggaggaatacagcgcctcaaagggcatctgatgccctgtccccgtcgctaggctctggttcccactccctttat

SEQ ID NO: 240763 - DNA, 122 bp, Homo sapiens
gtgcacctgggagagaacaaggtccacaccgccaggtttcacagcctggaagacctcatccgcgagaagcgccgtatcgacgccagcggccgcctgcgagtgctccaggagctcgccgacct

SEQ ID NO: 240764 - DNA, 122 bp, Homo sapiens
tgactcattcgattgctcatttattgcttcccttctttgcaccaggcattgctttaagcacgagagataagttgacgagcaaaaaggaacaaaattaatgcccttatggtttatattctagc

SEQ ID NO: 240765 - DNA, 122 bp, Homo sapiens
ctggtggtgacaccaggcgtgccctgcccctcctgatctgatgctggtggtgacaccaggcgtgcaccttctcctgatctgatgctggtggtgacactaggtgtgcacctacccctcctgat

SEQ ID NO: 240766 - DNA, 122 bp, Homo sapiens
accatcccctcattcattaacaagccacctaacaggaaattactgggcatggtagccccccgcttggataccactagctcccccgaagctcccccgtcacatggaggacacccccttaccct

SEQ ID NO: 240767 - DNA, 122 bp, Homo sapiens
ttcctgacctcgtgatccgcgcgcctctgcctccaaagtgctgggattacaggcccgagccgccgcacccggcctgcaggtgttgttctgaccccagctccactgtgccagcccgacttgag

SEQ ID NO: 240768 - DNA, 122 bp, Homo sapiens
gactgtgttgcagagcgtgccctagacctagttcagtttttccaacttcatccttacttacgcctcctggcaagagtggccgccccgagttgtcccggcagcccggagaggggagggaggtc

SEQ ID NO: 240769 - DNA, 122 bp, Homo sapiens
tgcactttatctaccacctgccggactctagaacgggggcgaagcacctgaacatggggtcggaaactcctagaacttaagcaactttcctgaggaaatagagtgatggggtgatggacaag

SEQ ID NO: 240770 - DNA, 122 bp, Homo sapiens
cgtgtgctcttggaattcaagtaagtgttggcctcactagcaatagttcctgaatattcccgagaaagaaccgaacccttgacatctcctttggtagatgactcaatggaaaagtaagaggt

SEQ ID NO: 240771 - DNA, 122 bp, Homo sapiens
tctgtcatggaactgtggccacaaaaagaggcgtctctcaggccaggtactgtaggagtccgccccctgctccatctgtattttttccactcacagtccacctggcatgagaaaggtgttgg

SEQ ID NO: 240772 - DNA, 122 bp, Homo sapiens
acctcgtgatccgcccacctcatcctttgaaagtgctgggattgcaggtgtgagccactgcgactggccacaagccattcttcaactcatttacctgtttgtggcctgtctccaccctagaa

SEQ ID NO: 240773 - DNA, 122 bp, Homo sapiens
gtcacaggctagtctgtttgactctgaagcacacgctttggagcgctgacatttggctgccgcagctggccagcggggttttctccagcaggaaagaaaattccagcatggttgtacacttt

SEQ ID NO: 240774 - DNA, 122 bp, Homo sapiens
ttgacaggaggctgacctcaggtctaatgctcgcttacccgcaggtcacctcctgctgtgcggcccagttcttaacaggcctctgaccagtaccagtctgcagcccagagttggggacccct

SEQ ID NO: 240775 - DNA, 122 bp, Homo sapiens
gtctgtaaaaggtataactgccctgttaacactgcgcaccagacacatggctctggggctcggctcgcctgaaatggcttgtcatggtaggcgcgcaggcgcccagagaaagagcgagcgag

SEQ ID NO: 240776 - DNA, 122 bp, Homo sapiens
aatatatggtatagcactgttacgtgaattgatttcttaccttttggagccgcatgatgtcgctgtctaccatgaagttatagctagccaacattcaaatttcttctattactgcatcattc

SEQ ID NO: 240777 - DNA, 122 bp, Homo sapiens
aataagaacaaagaccaaggttcttcgggtgcttattgtctttcaccacgtgctgcatttcgcacgacacatccgccgctttccaaacctttcccctcttgactttctgtatcccttcattt

SEQ ID NO: 240778 - DNA, 122 bp, Homo sapiens
ctctagtctccttcctccgccccttcccaggcttccctgacccagcgcgcagccaatccccgcccgccgtcgcgggcttctggtccaatcaccatggtctccccgcccacccccattgctcc

SEQ ID NO: 240779 - DNA, 122 bp, Homo sapiens
tgcgcttttccgatgggcttaaaaaacggcgcaccacgagataatatctcgcagctggctcggagggtcctacggccacggagtctcgctgattgctagcacagcagtctgagatcaaactg

SEQ ID NO: 240780 - DNA, 122 bp, Homo sapiens
ggggaagacgctgacgagagaaggcctcttccttgagggttggtgctgtgttgcagtgaccgtggcggattacgccaactcggatccggcggtcgtgaggtctggacgagtcaagaaagccg

SEQ ID NO: 240781 - DNA, 122 bp, Homo sapiens
gggaggactattgggaggcggcaggagggacagcgaacgtttcctcctctgctcctgaatcggaggaaggtaagggagggctgaggcaggacctcaggcccacccggtcggggcacaaacac

SEQ ID NO: 240782 - DNA, 122 bp, Homo sapiens
agagtacaatgttctgagaaagagatcctctggaattctggcctaagtgtatttaatgcccgggtaaagaaagtgagagaacatttctctttaggggctgctgctggatttctaaaaagaaa

SEQ ID NO: 240783 - DNA, 122 bp, Homo sapiens
gtaagcgcaggagaggctcctgctgagagcgagctcctgacatagtgacctcattccccacgccgccctcctcgcagcggcagaagccgcactggctggtgctgggtgagctccaccgctgc

SEQ ID NO: 240784 - DNA, 122 bp, Homo sapiens
aacggaaaaggcaagtgatgaaaagccacaactcaggacaagcacaggcggccacgctgccggagtcattcgcgccgcccgcggaaacctgcgtcgcccaccccgggccctcgacgcccgcc

SEQ ID NO: 240785 - DNA, 122 bp, Homo sapiens
ccgccgccaccttccatgttggcaggtgccgggttgatgtcgtcagcagcagaacggctccgcccaggtggtgacgcagaatcccggcgccgcccgcccacccagcccatggctccaggccc

SEQ ID NO: 240786 - DNA, 122 bp, Homo sapiens
gacaacaaataccgattaatcttcggagtaaactgtttcctattcttgaccaagctacctcggggtgtggaggggagcggaggggagccaactgaccctcccctccgccccaccccccccat

SEQ ID NO: 240787 - DNA, 122 bp, Homo sapiens
aggcaaataactgctgtgggaagggcgtgaatttcccacaaagtgttttgtgaacatttacgtaacttcttttgtgttttgctactaatgtagtcatttgcttccatagccgttttgggtaa

SEQ ID NO: 240788 - DNA, 122 bp, Homo sapiens
tggagggagggggcggtgttggggggaagtccggagtttcctcacagctccggaaggtggcgccacagggtgatactgggggaatgaaatcggttccccaagtttcatgtgaaacttggcag

SEQ ID NO: 240789 - DNA, 122 bp, Homo sapiens
ccacgattttttttaaaggacctggctagtttggaaaagggaacgggcccgcgtttaaagcgagtgtaaataaacaaacacgtggtctgcggaggaacacctttaagcaccagcaggatgac

SEQ ID NO: 240790 - DNA, 122 bp, Homo sapiens
cgggtgctgtaccccagctctggagcgcaatggcttcgcgctcttggatatggtgctgcacgccgcggagcctggctacctggtcaccaaggtggtggctgtagacgcagatgtgagacaca

SEQ ID NO: 240791 - DNA, 122 bp, Homo sapiens
gcagggcatttctgaggttcctcattcaggcaagtagcttttttcttgctcttctatcatcgcccagatcttcatcaagttttactgaactattactcctaatatcttctatcttctttact

SEQ ID NO: 240792 - DNA, 122 bp, Homo sapiens
gggctggaaattattttcttctgtgaccttgctaaaggccatctcatggatttattttttcggccctgtggttacgttttctttgacctagatttccatggaggttggtattgataagttgt

SEQ ID NO: 240793 - DNA, 122 bp, Homo sapiens
gctgagggagaggaggccaaagagagcgagcagtgagcgccggggcggacgagaagccagcgctcccagcctcctcggttatccgctccggtttccgctcacgttcaacaggggccgacagg

SEQ ID NO: 240794 - DNA, 122 bp, Homo sapiens
gggctgcttcctgcctggggctcagcctgcgcggtggttggcagttgccccggaagtgggcgggaaggacctgcgcatgctctgtgaccctgggtgcagggattgtgtgaagattgagagct

SEQ ID NO: 240795 - DNA, 122 bp, Homo sapiens
gtgatataagctttagcttctcccgtaagaatataggggaagcagctgaagagagctccccggaagctagaattttgttcagggtggtaataattatgcatgaaaatgatagttaactgtaa

SEQ ID NO: 240796 - DNA, 122 bp, Homo sapiens
tctcctgtttaaaatcctttttttttcccctttatcgtgggtggggccttacattttccccgggcgtgttttgtgcctctccctggccctaacttaaccgcgaagcactgagattcgagaaa

SEQ ID NO: 240797 - DNA, 122 bp, Homo sapiens
ctggagagttttaggttacccgcgagccacacaaggaccttgtgttgttgttttaaaaagcgatcactgctcgtaaaacccacagcagataattttaatgtcacctcctgccgggcaggcac

SEQ ID NO: 240798 - DNA, 122 bp, Homo sapiens
aggggaaatgatggaacgctcacggcccctggagtcccgaggaggcgcgttcggccttcacggtgctccacgccgattggctcaaggactgacggactgtgagcaactgaaaaggctcgggg

SEQ ID NO: 240799 - DNA, 122 bp, Homo sapiens
tgaaaggagttgatcctgactccaagatgcattccaaagaaagaaaacgcaactgtagcccggactccgcggaggaaggccaactgactccactacgtgcacttccgagccacttgggccca

SEQ ID NO: 240800 - DNA, 122 bp, Homo sapiens
cctaccccaaagcaaacgctggagaacccggaaattgcccagaacgggaaccgactttcgcgccaaccgcgcggccgcgcttgccttttccggtggaagtgacgccatcggcagctgcagca

SEQ ID NO: 240801 - DNA, 122 bp, Homo sapiens
aggggctcccacagccatagaggttgtcaaacttgctcttggtggcggagtcattgacatcgatggcaggcaccttcagaatcccattgaccatcatcttgtacaggttgtggaccccgatt

SEQ ID NO: 240802 - DNA, 122 bp, Homo sapiens
cccgttccaggcttcccaggaataggagctgagctactgcggccgcagcggcagagcctccgcctgacctcaccagggtgtgggggggctgctgagggaggggggcgggaacccagttgggg

SEQ ID NO: 240803 - DNA, 122 bp, Homo sapiens
tatatcattcagaaaaagttttattttttaataacattctattaacattattttgcttgccgctggcatgcctgaggaatgtatttggctttgattacacactaagtttttgtaataaattt

SEQ ID NO: 240804 - DNA, 122 bp, Homo sapiens
gggcttgactggagccgaggtcgccgtcggagcgggcgcgggggccgtggggaccgccgccgccagcagcaggcacagcagggtggccccaagccgctgcatctccgctctgcgcccgcagc

SEQ ID NO: 240805 - DNA, 122 bp, Homo sapiens
ccaagccaggttcgcctgaccacacctcgagcgccggcccagtgcttgcgatcttcgtgacggcacctggggtgtaagtactgcttgtgggagagccccacaggaaatccagagtattgcgc

SEQ ID NO: 240806 - DNA, 122 bp, Homo sapiens
gtccggccccccacccttcaggccagcgggcgtggagctgaggctttagagcctcccagccgggcttgttcctgtcccattgtgtatgggataggggcggggcgagggccagcactggagag

SEQ ID NO: 240807 - DNA, 122 bp, Homo sapiens
gcagcggcgtggccatgaagctgaaggtgaagaacgtgtttctcgcctacttcctggtgtcgatcgccggcctcctctacgcgctggccagccatgtgactgccttcctcccctgcgggcag

SEQ ID NO: 240808 - DNA, 122 bp, Homo sapiens
gctgggcggagcctgcaaaacccgcctctcaggttccgcccagcacgccggtcccgccttcggtcccacaatttccgccctactgaattcttcagaggaactcagttaagcctccttatttg

SEQ ID NO: 240809 - DNA, 122 bp, Homo sapiens
ggcttagtgcagtggctcactcggaggctgaagtgggcggatcccctgaggtcaggagttcgagaccagcctggtcaacatggtgaaacctcgtcatttaattaataaatttgaaagaccct

SEQ ID NO: 240810 - DNA, 122 bp, Homo sapiens
ctccattgtaacgtggccgggcggtgtcaacacaaacgcccccaccctcccctggacgcgcgtaacccgctccccgcaccagccccctgcccacaactgcgcaggcccagcaagcccccaca

SEQ ID NO: 240811 - DNA, 122 bp, Homo sapiens
ttcttgatattgacccgccctatttccataccagaaggaagtgcggcaccttagtgatcccgagtttaagccgagagttgctcacgtgaccgagatctcacatgacgtaggcgctcacgtga

SEQ ID NO: 240812 - DNA, 122 bp, Homo sapiens
ccagtctgcacaatgggaaaaacgaggacatctgtcccacagaatccttatacgccactacgaaaaagtgacgcacgtcaaaaaaaaccgctgagcatggcgcccggcgaggagagcacgtt

SEQ ID NO: 240813 - DNA, 122 bp, Homo sapiens
agcagatctggagctgggcctaagattctgcgtttctaacaagctcccacctaatacctacgcaactgattcttgcatcacacttttttgagtggcaagactggacttagttctaatgatgt

SEQ ID NO: 240814 - DNA, 122 bp, Homo sapiens
cgccctgcgcgccctgctgcgctgcaacctgccccccggcgcccagcgcgtggtggtctccgccgtgctggcgctcctggttctcatcaacgtcgtactgatcttcctgctggccttccgct

SEQ ID NO: 240815 - DNA, 122 bp, Homo sapiens
gaacacttagtatgctgagcatatactgtgtcttaacttctttgtcttcccagcacccaacgaagtgtctcgccatagccagcacccagtaagtatctgctgagttgttaaataatgcaaca

SEQ ID NO: 240816 - DNA, 122 bp, Homo sapiens
aatgaataacagaggaggtgctgaaggagaaaaatgatctatatacatttgggggaggttcggattgaaatgcactttaatgaagtgcatttcaagtgacttccacgttatcttccttctgc

SEQ ID NO: 240817 - DNA, 122 bp, Homo sapiens
accctgttttctggcagctgctgctgagtcgaaggatcagttcgtgaggcacaggcagatcgacggggttgctcccttttggactgtaacaaacacaattagatcctctctgcttagggtct

SEQ ID NO: 240818 - DNA, 122 bp, Homo sapiens
tgctactctacaatagaggtatgggaaagtatgtctgaaatacaggagctatttcagatacgatgggatatttcagatacgatgggataatatgatgggatatcttttagtactgcatgttc

SEQ ID NO: 240819 - DNA, 122 bp, Homo sapiens
ctataacccttctttaatatggctttaatatttgtattacacactagaccaaaattatcacgagggacaaaactgtgtgttttgttcattttttggtgcattgttgtattcaaagtgcctgg

SEQ ID NO: 240820 - DNA, 122 bp, Homo sapiens
tcccagacacccccctccaacagtgatgaataggagggactgtctccctcccccatccctcggagactagccttgcagtgttttagactgttttgaaattctgttctttagaagagattttt

SEQ ID NO: 240821 - DNA, 122 bp, Homo sapiens
tggaggtggacgtgctgcactgcatggtgctgagctgccctgcctctctggggcagccaccgtggagcgggagatggagctgcggcacaagaatgagatgctgcgagtggagaccgaggccc

SEQ ID NO: 240822 - DNA, 122 bp, Homo sapiens
gttgtccttcccggatacaggacagctgccatccggggcagtgtacccacaggtgtttcccgtagagacaccggcccctccccagggcttcatcctctccaccttatccccgggtctcagga

SEQ ID NO: 240823 - DNA, 122 bp, Homo sapiens
gggacgagcgcggggagacgcgctggaaaggggctggaattagcactgtcctgccgaaggcgcacctggccgctcgccctcaggaagaacttaattatggatggcgttgggtctccgcttag

SEQ ID NO: 240824 - DNA, 122 bp, Homo sapiens
atatctgttctggaggagctgcccatgacgacgggaggggaggacagagcaccaactccacgaacatgaatttaggggaggagaagatgaggagcacgagcttccagaggacttccttgagg

SEQ ID NO: 240825 - DNA, 122 bp, Homo sapiens
gcaaaaatgggaagctgggggaaatttacgaacatctgcttcatctccctgatatctgaacgtccaggtgcccctaatgtctcctacccgctgggtcctctctattcctcccaggacccagg

SEQ ID NO: 240826 - DNA, 122 bp, Homo sapiens
acaggaagcgactgcgagccccacactctccagacacggaaactctaaatgcagagagaacgaagcatattttgtcttccttttcctttttttttttaagcaaaataataacttgacacaag

SEQ ID NO: 240827 - DNA, 122 bp, Homo sapiens
tgggcagaagcaggctgggttttggagtgagggcttcagtgcacctcctctgggaagaggcgccatcttggaaggagggagcctgggtccttcttcagagagggatgatgggggtggctcct

SEQ ID NO: 240828 - DNA, 122 bp, Homo sapiens
ggcctagggctccgggcactctgcggaaactcgaccaattagagcccgactctggtctgacgagcatcccgtccgaccaatcagtgtgtcttgagccggcaaatcaccagggacgaggaggc

SEQ ID NO: 240829 - DNA, 122 bp, Homo sapiens
ttggaaaaccgaatgcctcggccgttagcacaggccgcccgccctggtggaatgggtcgccgccaccacgtgaccactttgtgccgcgtggatgtggccttcgtgaaatcgagatctggctg

SEQ ID NO: 240830 - DNA, 122 bp, Homo sapiens
cgtgtgcaggaggcggggatctgctgcaccgagtgtgcacatttgcacgaaccgtgggggcgtctgcggctgtgggtggagaggaaatcctggatcacacatctgagagagggggtgtgggt

SEQ ID NO: 240831 - DNA, 122 bp, Homo sapiens
agaacacctctttctctaatactgcacaattcttggtcctagttgagtgcactaggtgaacgtgtaactcagcctgccccaattaaaacccttctcttggatctcttaaactataactgcag
